United States Patent Application Publication US 2011/0252501 A1 - sequence listing, part 3

SEQ ID NO: 9176 - protein, 336 aa, Bacteroides fragilis YCH46
MKIGILTSGGDCPGINATIRGVCKTAINYYGMEVVGIHSGFQGLLTKEVESFTEKSLSGLLNLGGTMLGTSREKPFRKQGIISDVDKPALIQRNIAELGLDCVVCIGGNGTQKTAAKFAAMGINIVSVPKTIDNDIWGTDISFGFDSAVSIATDAIDRLHSTASSHKRVMVIEVMGHKAGWIALYSGMAGGGDVILVPEIPYNIKNIGDTILNRLKKGKPYSIVVVAEGIQTDGRKRAAEYIAQEIEYETGIETRETVLGYIQRGGSPTPFDRNLSTRMGGHATELIANGQFGRMIALKGDEISSVALEEVAGKLKLVTEEHDLVVQGRRMGICFG

SEQ ID NO: 9177 - protein, 569 aa, Clarkia gracilis
MSTPALISETEAWKDLKAHLEDIKRTHLRELMGDTERCQSMMVEFDNIFLNYSRQQASPDTINKLYKLADAAHLNQKIDRMYNGDHINSTENRSVLHVALRAPRNSAICSDGKNVVPDVWNVLDKIKDFSERVRNGSWVGATGKELKDVIAVGIGGSFLGPLFVHTALQTDPEASKNARGRELRFLANVDPIDAARNISGLNPETTLVVVVSKTFTTAETMLNARTLREWISSALGVSAVAKHMVAVSTNLPLVEKFGIDPNNAFAFWDWVGGRYSVCSAVGVLPLSLQYGFAVVEKFLQGAHSIDQHFSSAPFEKNIPVILGLLSVWNVSFLGYPARAILPYSQALEKLAPHIQQVSMESNGKGVSIDGLPLPFESGEIDFGEPGTNGQHSFYQLIHQGRVIPCDFIGVVKSQQPVYLKGEVVNNHDELMSNFFAQPDALAYGKTPEQLKKENVSEHLILHKIFTGNRPSLSILLPTLDAYRIGQLLAIYEHRVAVQGFVWGINSFDQWGVELGKSLATQVRKQLHASRVKGEAVEEGFNFSTKTLLTRYLEATSDVPADPSTLLPKI

SEQ ID NO: 9178 - protein, 773 aa, Desulfovibrio desulfuricans G20
MNRTPLKRRFTVTLMLFTLLCCALYTVTASSFMHYHNAQITSRTERLLHALVLQRENDLANQIFVGHIRALRSTAADLQETDDVYSITVYDKSGKPLIHTRPERPLPLTGAEMAILAQGDVDARGTENGVPLLYHTSALMVIGELQGFVTVAYDLSHVRRDTILLSAMLTILLLGTVIAAGMVCSHFITQHIRRPLTALRDAMHRARSGELQHRAPIEAQDEVGRLAESFNAMVATLQRNESSLRHAQTIYKDIFENALEGIFQITGRGYLINANPALARMLGYSSVMELLAERGTTPLKSLVNRRDLARMLRMLRAKGAVDGYETRVYTKGGGITWISVSARTIAKEETGQPESFRYEGFVKDITEHRRLRELEQTRTAMIEADKAKSDFLAHMSHEIRTPMNSVLGMAEQMLRTPLSAEQKECMDVLKNSGESLLHLINDILDLTRVEGGQLALASAPFTVHAVVYGVRDMLSLQARQKNILLAATIAPDVRKNHMGDAQRLQQILVNLLGNAVKFTDNGEVSLHVSRAPDAVHDGDLLFTVRDTGIGITPAEQSRLFQKFSQASTAIHSRYGGSGLGLAISRHLVDLMGGTIRLESEPGVGTTVTFTARFAAVPEETARTGHEAEQPDTAGDDATALPALTVLLAEDTPSNRAVVRMMLQDTPCTVIEAEDGQQALHLFGQYDIDVVLMDINMPVMDGMEATRQLRRQEHGSGRRTPVIALTANAFQQDIIRYRQAGCDGHLVKPVTRKALLTALQSCAGGGATHSGSGA

SEQ ID NO: 9179 - protein, 203 aa, Clarkia lassenensis
KFLLGAHSIDQHFSSAPFEKNIPVLLGLLSVWNVSFLGYPARAILPYSQALEKLAPHIQQVSMESNGKGVSIDGLPLPFESGEIDFGEPGTNGQHSFYQLIHQGRVIPCDFIGVVKSQQPVYLKGEVVNNHDELMSNFFAQPDALAYGKTPEQLTKENVSEHLIPHKTFTGNRPSISILLPTLDGYRIGQLLAIYEHRVAVQG

SEQ ID NO: 9180 - protein, 451 aa, Gibberella fujikuroi
MSHLPQEPEFEQAYGELASALENSSLFNEHPEYRTALAVAAIPERVIQFRVVWNDDKGNLQVNRGYRVQFNGALGPYKGGLRFHPSVNLSILKFLGFEQIFKNALTGLNMGGGKGGADFDPKGKSDAEIRRFCQAFMTELSKHIGAETDVPAGDIGVGGREIGYLFGAYRKFANRWEGVLTGKGLSWGGSLIRPEATGYGLVYYVEYMLKHANRGTFEGKRVALSGSGNVAQYAALKIIELGGSVVSLSDSKGALVAKEGSSFTPEQIHNIAALKIKHQALTTFEHDGQFTWIEGARPWVHVGKVDIALPSATQNEVSKEEAQALVDAGAFIVAEGSNMGCTAEAIDVFEAHRKEKGAEALWYAPGKASNCGGVAVSGLEMAQNSQRIQWTEKEVDDRLKAIMKDAFVAGLETAQKYVEAKEGELPSLIAGSNIAGFIKVAEAMHDQGDWF

SEQ ID NO: 9181 - protein, 370 aa, Streptococcus pyogenes MGAS10394
MLQYSQKLPKEFAMSGFLEQRLGHCLRQMVEKGLEALLVTHLTNSYYLTGFSGTAATVLITAKRRVLITDSRYTLLAKASVEGFDIIESRTPLKVVAELLEADQIDCLGFEDQVSFSFYQAMQAELSGITLLAQSGFVEHLRLIKDASEIETIAKACSISDKAFEDALDFIKPGTTTERDLANFLDFRMRQYGASGTSFDIIVASGYRSAMPHGRASDKVIQNKESLTMDFGCYYNHYVSDMTRTIHIGQVTDEEREIYALVLAANKALIAKASAGMTYSDFDGIPRQLITEAGYGSHFTHGIGHGIGLDIHENPFFGKSEQLLQAGMVVTDEPGIYLDNKYGVRIEDDLVITKTGCQVLTLAPKELIVL

SEQ ID NO: 9182 - protein, 256 aa, Clarkia gracilis
KFLQGAHSIDQHFSSAPFEKNIPVLLGLLSVWNVSFLGYPARAILPYSQALEKLAPHIQQVSMESNGKGVSIDGLPLPFESGEIDFGEPGTNGQHSFYQLIHQGRVIPCDFIGVMKSQQPVYLKGEVVNNHDELMSNFFAQPDALAYGKTPEQLKKENVSEHLIPHKTFTGNRPSLSILLPTLDAYRIGQLLAIYEHRVAVQGFVWGINSFDQWGVELGKSLATQVRKQLHASRVKGETVEGFNFSTKTLLTRYLE

SEQ ID NO: 9183 - protein, 149 aa, Canavalia lineata
MGAFSEKQESLVKSSWEAFKQNVPHHSAVFYTLILEKAPAAQNMFSFLSNGVDPNNPKLKAHAEKVFKMTVDSAVQLRAKGEVVLADPTLGSVHVQKGVLDPHFLVVKEALLKTFKEAVGDKWNDELGNAWEVAYDELAAAIKKAMGSA

SEQ ID NO: 9184 - protein, 301 aa, Blastocladiella emersonii
YVTNWDDMEKIWHHTFYNELRVAPEEHPVLLTEAPLNPKVNREKMTQIMFETFNTPAFYVAIQAVLSLYASGRTTGIVLDSGDGVSHTVPIYEGYALPHAIQRLDLAGRDLTHHLQTILMERGHSLTTTAEMEIVRDIKEKLCYVALDYDAEMATASQSSALEKSYEMPDGQVITIGSERFRCPEALFQPSMLGRESAGIHETTYASIMKCDVDIRKDLYSNIVMSGGTTMYPGIADRMQKEITALAPSSMKIKIVAPPERKYSVWIGGSILASLSTFQQMWISKQEYDESGPSIVHRKCF

SEQ ID NO: 9185 - protein, 91 aa, Brassica napus
VDPRVRSNVAPCIGYITQGGPLPGACCTGVSKLNSMARTTPDRQQACRCLKTAASALGPNLNAGRAAGIPKACGVSVPFPISTNTNCNIVK

SEQ ID NO: 9186 - protein, 135 aa, Haemophilus influenzae R2866
MQILHTMLRVGDLDRSIKFYQDVLGMRLLRTSENPEYKYTLAFLGYEDGESAAEIELTYNWGVDKYEHGTAYGHIAIGVDDIYATCEAVRASGGNVTREAGPVKGGSTVIAFVEDPDGYKIEFIENKSTKSGLGD

SEQ ID NO: 9187 - protein, 146 aa, Pisum sativum
MGFTEKQEALVNSSWELFKQNPSYSVLFYTIILKKAPAAKGMFSFLKDSAEVVDSPKLQAHAEKVFGMVHDSAIQLRASGEVVLGDATLGAIHIQKGVVDPHFVVVKEALLETIKEASGEKWSEELSTAWEVAYEGLASAIKKAMN

SEQ ID NO: 9188 - protein, 146 aa, Pisum sativum
MGFTEKQEALVNSSWELFKQNPSYSVLFYTIILKKAPAAKGMFSFLKDSAEVVDSPKLQAHAEKVFGMVHDSAIQLRASGEVVLGDVTLGAIHIQKGVIDPHFVVVKEALLDTIKEASGEKWSEELSTAWEIAYEGLASAIKKAMN

SEQ ID NO: 9189 - protein, 506 aa, Arabidopsis thaliana
MASSLLTSSGMIPTTGSTVVGRSVLPFQSSLHSLRLTHSYKNPALFISCCSSVSKNAATSSTDLKPAVERWPEYLPNKLPDENYVRVFDTTLRDGEQAPGGSLTPPQKLEIARQLAKLRVDIMEVGFPGSSEEELETVKTIAKTVGNEVDEETGYVPVICAIARSKHRDIEAAWEAVKYAKRPRILIFTSTSDIHMKYKLKKTQEEVIEMAVSSIRFAKSLGFNDIQLGCEDGGRSDKDFLCKILGEAIKADVTVVNVADTVGINMPHEYAELVTYLKANTPGIDDVVFSVHCHNDLGLATANSIAGIRAGARQVEVTINGIGERSGNASLEEVVMALKCRGAYVINGVYTRIDTRQIMATSKMVQEYTGLYVQAHKPIVGANCFVHESGIHQDGILKNRSTYEILSPEDIGIVKSQNSGLVLGKLSGRHAVKDRLKELGYELDDEKLNAVFSLFRDLTKNKKRITDADMKALVTSSDGISLEKSNGANGLKSNGYIPVLQVSSNV

SEQ ID NO: 9190 - protein, 339 aa, Aloe vera
SDSGKDAGRLSAAWQLYKAQEDMMKVAKKYGVKLTMFHGRGGTVGRGGGPTHLAILSQPPGTINGSIRVTIQGEVIEQSCGEERLCFKTLLDEMAVVATKEYRSIVFQEPRFVEYFRLATPETEYGKMNIGGRPSKRKPSGGIESLRAIPWIFAWTQTRFHLPVWLGVGAAFKHIMEKDKKNFQTLREMYNVWPFFRVTIDLLEMVFAKGNPDIAALYDKLLVSEDLQPFGERLRNNYVETKSLLLQVAGHKDLLEGDPYLKQRLRLRNAYITTLNVCQAYTLKRIRDPTYNVNLRPRLSKDVTERRKPAAEFLTLNPTSEYAPGLEDTLILTMKGIAA

SEQ ID NO: 9191 - protein, 318 aa, Wolbachia sp.
LCDKKIQLGINLTKGLGAGALPDVGKGAAEESIDEIMEHIKDSHMLFITAGMGGGTGTGAAPVIAKAAREAKAAVRDKGPKEKKILTVGVVTKPFGFEGVRRMRIAELGLEELQKYVDTLIVIPNQNLFRIANEKTTFADAFQLADNVLHIGIRGVTDLMIMPGLINLDFADIETVMSEMGKAMIGTGEAEGEDRAISAAEAAISNPLLDNVSMKGAQGILINITGGGDMTLFEVDAAANRVREEVDENANIIFGATFDQAMEGRVRVSVLATGIDSCNDKPEASSINQNKIPAEEKNFKWPYNQIPISETKEYASTE

SEQ ID NO: 9192 - protein, 364 aa, Aloe vera
SDSGKDAGRLSAAWQLYKAQEDMMKVAKKYGVKLTMFHGRGGTVGRRGGPTHLAILSQPPGTINGSIRVTIQGEVIEQSFGEERLCFKTLQRYTAATLEHGMNPAISPKPEWRALLDEMAVVATKEYRSIVFQEPRFVEYFRLATPETEYGKMNIGSRPSKRKPSGGIESLRAIPWIFAWTQTRFHLPVWLGVGAAFKHVMEKDKKNFQTLREMYNVWPFFRVTIDLLEMVFAKGNPDIAALYDKLLVSEDLQPFGERLRNNYVETKSLLLQVAGHKDLLEGDPYLKQRLRLRNAYITTLNVCQAYTLKRIRDPTYNVNLRPRLSKDVTERRKPAAEFLTLNPTSEYAPGLEDTLILTMKGIAA

SEQ ID NO: 9193 - protein, 438 aa, Sorghum bicolor
MNRRPAYIGTCKGNDRCNAAADGNLRVFKRIASALDGGKGRIREAVEAVRDELGDGVLHVAAALGRTRVCAYLVEELHMDINAAAVSGQTPLSYAVCSDDNVEVVRYLLDHDADPDKPVYHGCNSLHIAVAKGLCVMVELLLSKGADVNSMSYCGTPLNVAAMENQGAVMKILLDYNADCNKEYSTIFTPLSTALCARSLSCVKLLIKAGADVTTKGTHKFSPLIFAANEGLTDFYECLLEAGADPNVPDDSGLLPIEIAALENRRKDVEILLRVTARIPSVPDWSVDGVLAYVKSIPTDEDDPVYKMNLADLKLEGNKAFKKKDYYTAVKFYSVAIMKNANSVDATLFSNRSLCWIKMGEGNKALIDAEACRLFQPYWAKACYRQGAAHMFLKDYEKACGAFLDGLKLDPANAELENELRESLNSLTISRGTTKVSE

SEQ ID NO: 9194 - protein, 178 aa, Clostridium perfringens str. 13
MLYDFKVKDIEGNEVSLGEYKGKVLLIVNTATGCGFTPQYEGLEVLYKKYHDKGFEILDFPCNQFFEQAPGSNEEIVGFCKLNYGTTFKTFAKVEVNGENACELYKFLKKEAPMAKEDETSLGFYDKLKGLGFTTEGEEIKWNFTKFLIDKNGEVVARFAPTFEPEKLDELIEELLEE

SEQ ID NO: 9195 - protein, 166 aa, Triticum aestivum
MAARAVTMLVVAAVLAGGASAQSTSGCTQTLIGMSPCLNYITGNETAPSKSCCSQLATVVSSKPECLCVALNADPAALGLGAVNKTRALGLPDQCGVKTPPLSNCASAPTTSPSSGAPAGQTPTSSGAGSKSTPTADVGSGSASLRSSAGIVAGFIVAAVYAVSAM

SEQ ID NO: 9196 - protein, 485 aa, Methanococcoides burtonii DSM 6242
MDTTLRDGEQTPGVALKTEEKVWIARKLDELGVDIIEAGSAITSEGEREAIRAVAAEGLDAEICSYCRIMQQDVDFALECDVDSIHLVAPVSDLHISVKLKKDREALKEMALSAVEYAKDHGLIVELSGEDASRADLDFLKDLYKSGVEVGADRVCFCDTVGLLVPERTTEIFKDLSSSIDVPVAVHCHNDFGLAVSNTVAALNAGAREAHMTINGIGERAGNAALEEVAMILEWLYKRETSIKTNELYKVSRLVSRLTGLAVAPNKSLVGGNAFTHEAGIHVHGLLADTSTYEPITPESIGRERQIVLGKHAGKSSVTLALKEQGLNVDDSQLNEIVSRVKELGDHGKRVTDADLQTIAETVLDIYRESKVKLEDLTVVSGNRATPTASVRLIVDGKEIVEAATGDGPVDAAFEGIRKAVSGVADIHLEEYHVDAITGGTDALVEVLVKLSKDGKMVTSRGARTDIIMASVEAVINGINQLIQD

SEQ ID NO: 9197 - protein, 397 aa, Coxiella burnetii RSA 493
MSKEKFVREKPHVNVGTIGHVDHGKTTLTAALTKVLSEKYGGEKKAFDQIDNAPEERARGITIATSHVEYQSDKRHYAHVDCPGHADYVKNMITGAAQMDGAILVVSAADGPMPQTREHIVLAKQVGVPNIVVYLNKADMVDDKELLELVEMEVRDLLNSYDFPGDETPIIVGSALKALEGDKSEVGEPSIIKLVETMDTYFPQPERAIDKPFLMPIEDVFSISGRGTVVTGRVERGIIKVGDEIEIVGIKDTTKTTCTGVEMFRKLLDEGQAGDNVGILLRGTKREEVERGQVLAKPGSITPHKKFEAEIYVLSKEEGGRHTPFLQGYRPQFYFRTTDVTGQLLSLPEGIEMVMPGDNVKVTVELIAPVAMDEGLRFAVREGGRTVGAGVVTKIIE

SEQ ID NO: 9198 - protein, 428 aa, Sorghum bicolor
MAPPLVGCKLHRHRLLQAAAHGDLRRFKRIASALDGGKGRIREAVEVVVDGNGAGALHVAAAHGRTRVCAYLVEELQMDVNDTAVLSGDTPLTYAVRSKKNVDAVRYLLDHDADPNKRVHHGCTPLSIAVGKGICVMVELLLSKGADVNSLSCGGTPLHVAAMENHGAVMKILLDYNADCNKEFFILFTPLFTALRARSLNCVKHLIKAGADVMKGIHKFTPLILAAYEGLTDFYECLLEAGADPNVPDDSGLLPIEIAAFQNRRKDVEILFRVTSRIPSVHDWSVDGVLTFFKYVKSFLTDQDDPMYKMDLADLKLEGSKAYNEKDYSTAVKLYSVAIMKADSGDATLLSNRSLCFIRMGEGDKALVDAEACRALQPYWPKACFRQGAAHMLLKDYEKACDAFLDGLKLDPANDEMENALRWSIHDD

SEQ ID NO: 9199 - protein, 211 aa, Zea mays
MTSVWKTKVLPGLNKIFDKDGKKAAAAGFLKSFNKEEFDKEIEDKKTELEPKVVEAYEASPPEVKALFKDKKPVKVSKKNSAAVTKFLDELAKIDFPGAKVVSEAVAKSGTSPLLPAITFILDKVAPFIPKEEPKEEPAAEATSREVAVEEKKEEAEPAAATEAAPAPAETPSEAAVVEEKKEEEKKEEEDKPAAEEAAPPAAAAAAAEEK

SEQ ID NO: 9200 - protein, 964 aa, Oryza sativa (japonica cultivar-group)
MAGKVEKMASIDAQLRMLAPAKLSEDDKLVEYDALLLDRFLDILQDLHGDDLRELVQECYEIAAEYEGKHDSQKLDELGNMLTSLDPGDSIVMAKAFSHMLNLANLAEEVQIAYRRRIKLKKGDFADENSALTESDIEETFKRLVVDLKKSPAEVFDALKSQTVDLVLTAHPTQSVRRSLLQKHSRIRNCLVQLYSKDITPDDKQELDEALQREIQAAFRTDEIRRTQPTPQDEMRAGMSYFHETIWKGVPKFLRRLDTALKNIGIDERVPYNAPLIQFSSWMGGDRDGNPRVTPEVTRDVCLLARMMASNLYCSQIEDLMFELSMWRCNDELRARADELHLSSKKDAKHYIEFWKKVPPSEPYRVVLGDVRDKLYNTRERARQLLSSGYSDIPEETTLTSVEQFLEPLELCYRSLCDCGDRVIADGTLLDFLRQVSTFGLCLVRLDIRQESDRHTDVLDAITTYLGIGSYREWSEERRQDWLLSELNGKRPLFGPDLPKTDEIADVLDTFRVIAELPADNFGAYIISMATAPSDVLAVELLQRECHVKTPLRVVPLFEKLADLESAPAAVARLFSIDWYRERINGKQEVMIGYSDSGKDAGRLSAAWQLYKSQEELINVAKEFGVKLTMFHGRGGTVGRGGGPTHLAILSQPPDTIHGSLRVTVQGEVIEQSFGEEHLCFRTLQRFTAATLEHGMHPPIAPKPEWRALLDEMAVVATKEYRSIVFQEPRFVEYFRLATPEMEYGRMNIGSRPSKRKPSGGIESLRAIPWIFAWTQTRFHLPVWLGFGSAFKHILEKDIRNLHMLQEMYNEWPFFRVTIDLVEMVFAKGDPGIAALYDKLLVSEELWPLGEKLRANCEETKQLLLQVAGHKDLLEGDLYLKQRLRLRNAYITTLNVCQAYTMKRIRDPDYHVTLRPHMSKEIMDWSKPAAELVKLNPTSEYAPGLEDTLILTMKGIAAGMQNTG

SEQ ID NO: 9201 - protein, 240 aa, Arabidopsis thaliana
MTMNKSPSLVVVAATTAAEKQKKRYPGESKGFVEEMRFVAMRLHTKDQAKEGEKETKSIEERPVAKWEPTVEGYLRFLVDSKLVYDTLELIIQDSNFPTYAEFKNTGLERAEKLSTDLEWFKEQGYEIPEPTAPGKTYSQYLKELAEKDPQAFICHFYNIYFAHSAGGRMIGRKVAERILDNKELEFYKWDGELSQLLQNVREKLNKVAEEWTREEKNHCLEETEKSFKYSGEILRLILS

SEQ ID NO: 9202 - protein, 221 aa, Glycine max
RGGGGSGGGMRSRFPGGMFGDDMFASFGEGGGIHMSQGAPRKAAPIENKLPCTLEEIYKGTTKKMKISREIADASGKTMPVEEILTINVKPGWKKGTKITFPEKGNEQPNVMPADLVFIIDEKPHGVFARDGNDLVVTQKISLAEALTGYTVHLTTLDGRNLTIPINNVIHPTYEEVVPREGMPLPKDPSKKGNLRIKFNIKFPTRLTEEQKAGIRKLLNA

SEQ ID NO: 9203 - protein, 248 aa, Magnetospirillum magnetotacticum MS-1
MATRNVSDLIVETLQQAGVRRIYGLVGDSLNGITEAIRSRSVIDWVHVRHEEVAAFAAAGEAQVTGELAVCAGSCGPGNLHLINGLYDAHRTRTPVLAIAAHIPSSEIGLNYFQATRPEELFRDCSHFCELVSDPEQLPNVLETAIRTAVGRRGVAVVVIPGTVALKEAPKRAIAAAATLHPRAPVAVPPADELDRLAALLNGSQKITLLCGRGCAGAHAPLMRLAERLKSPIVHALRGQEPVEHENP

SEQ ID NO: 9204 - protein, 608 aa, Burkholderia vietnamiensis G4
MSTVADFIVERLYDWGVRRVYGYPGDGINGFFGALARAGGKIEFIQARHEEMAAFMASAHAKFTGELGVCVATSGPGAAHLVTGLYDARLDQMPVLAIVGQQARTALGGHYQQEVDLPALFKDVAGAFVQLAVVPGQVRHLVDRAVRTALGARTVTALVLPNDLQELDYAPPKRAHGTVHSGVGYTRPKVVPYADDLQRAADVLNAGKKVAMLVGAGALHATDDVIAVADRLGAGAAKALLGKAALPDDLPWVTGSIGLLGTKPSYELMNECDTLLVVGSGFPYSEFLPKEGQARGVQIDLKADMLSLRYPMEVNLVGDSAETLRALLPLLKERQDTAWRDRIAKWNADWHDTLAARAAAKASAGRGVNPQRAFTELSPRLPADVILTSDSGSCANWYARDLMIRRGMMGSLSGGLASMGAAVPYAIAAKFAYPLRPVIAMVGDGAMQMNNMAELITVAKYWRQWADPCWICMVLNNEDLNQVTWEQRVMEGDPKFDTSQQIPNVPYYRFATLVGLKGIYVDDPEQLGAAWEEALASDRPVVLEVKSDPEVPPLPPHVTLQQAKHFAQALVKGDPREANVIVETARQVLSAVLPGNGERGDDGHKGES

SEQ ID NO: 9205 - protein, 341 aa, Arabidopsis thaliana
  misc_feature (120)..(120): Xaa can be any naturally occurring amino acid
  misc_feature (142)..(142): Xaa can be any naturally occurring amino acid
GVKLTMFNGRGGTVGRGGGPTHLAILSQPPDTIHGQLRVTVQGEVIEQSFGEEHLCFRTLQRFTAATLEHGMNPPVSPKPEWRVLMDEMAIIATEEYRSVVFKEPRFVEYFRLATPELEXYGRMNIGSRPSKRKPSGGIESXLRAIPWIFAWTQTRFHLPVWLGFGGAFKRVIQKDSKNLNMLKEMYNQWPFFRVTIDLVEMVFAKGDPGIAALYDRLLVSEELQPFGEQLRVNYQETRRLLLQVAGHKDILEGDPYLRQRLQLRDPYITTLNVCQAYTLKQIRDPSFHVKVRPHLSKDYMESSPAAELVKLNPKSEYAPGLEDTVILTMKGIAAGMQNTG

SEQ ID NO: 9206 - protein, 311 aa, Bacteroides fragilis YCH46
MIHIACNIDSNFTIHCAVTLTSLFANNRNSEFCVHIIASTLPEADQKALSSIAESYGNKICFYFPEKDLLNNFSIKKSGNRISIATYYRCLLSRILPVNIDKILYIDCDIVVLNDISEFWDTDITQYAIGCIEDIGSDEEEYYSRLQYDKKYSYFNAGVLLINLKYWREHKIDEMCEQYFLAHSDRIRFNDQDLLNALLYKDKLFVPFRWNVQDTFYRRTYSHKVKEHSGLKEALLHPAILHYTNKKPWNYDSMHPLKQEYFKYLDMTPWKGTRPIIDFQTRVITGFKRLLYITGIKKSKYINLKDYELAQ

SEQ ID NO: 9207 - protein, 400 aa, Campylobacter coli RM2228
MLIVQKYGGTSVGTLERIDAVAERVIKSAKEGHQLVVVVSAMSGVTNTLIEQAEYFSKNPNGKDMDMLLSSGERVTSALLSIALNERGYPSLAFSGRKAGIITDSVSTKARISYIDTQAITKALNEGKIVVVAGFQGVDKEGDVTTLGRGGSDLSAVAVAGALKADLCEIYTDVDGVYTTDPRIEPKAKKLDKISYEEMLELASLGAKVLQNRSVELAKKLNVKLVTRSSFNDNEGTMITKEDGMEQALVSGIALDRNQARVTLRNIEDKPGIAAEIFSVLADENINVDMIIQNVGVDGATNLGFTVPQNELDLAKNAMQKILGSKTTIESDSAVVKVSIVGVGMKSHSGVASKAFKALADEGINIGMISTSEIKISMIVHEKYGELAVRALHECYGLDK

SEQ ID NO: 9208 - protein, 129 aa, Vibrio sp. Ex25
MLRVGDLDKSIKFYTEVMGMQLLRTNENKEYEYTLAFLGYGDESQGAVIELTYNWGKTEYDLGTAFGHIAIGVDDIYTTCDAIKAAGGNVTREPGPVKGGSTHIAFVKDPDGYMIELIQNKQASAGLEG

SEQ ID NO: 9209 - protein, 272 aa, Azoarcus sp. EbN1
MSNELDMQGETIRMEVVGGVATLTLNRPDRLNSFTNRMHEEVREALAAVKAGRDRGIVRVLVITGAGRGFCAGQDLSDRAVAPGEAPVDLGASVEKNYKPLAMALRNLDLPVIAAVNGVAAGAGASIALACDLVFAARSASFIQSFSKLGVVPDTGGSWILPRLVGPARALGLALLGEKLGAEQAEQWGLIWKCVDDDALMPTVQQVAASLAQGPTFGYAQTKKAIWASSTNDFETQLDLERNMMTVCGQSNDYREGVAAFIEKRAPSFKGD

SEQ ID NO: 9210 - protein, 463 aa, Arabidopsis thaliana
MSKASDAVREPLVDKNMAGSKPDQPWMVYLSTFVAVCGSFAFGSCAGYSSPAQAAIRNDLSLTIAEFSLFGSLLTFGAMIGAITSGPIADLVGRKGAMRVSSAFCVVGWLAIIFAKGVVALDLGRLATGYGMGAFSYVVPIFIAEIAPKTFRGALTTLNQILICTGVSVSFIIGTLVTWRVLALIGIIPCAASFLGLFFIPESPRWLAKVGRDTEFEAALRKLRGKKADISEEAAEIQDYIETLERLPKAKMLDLFQRRYIRSVLIAFGLMVFQQFGGINGICFYTSSIFEQAGFPTRLGMIIYAVLQVVITALNAPIVDRAGRKPLLLVSATGLVIGCLIAAVSFYLKVHDMAHEAVPVLAVVGIMVYIGSFSAGMGAMPWVVMSEIFPINIKGVAGGMATLVNWFGAWAVSYTFNFLMSWSSYGTFLIYAAINALAIVFVIAIVPETKGKTLEQIQAIVNP

SEQ ID NO: 9211 - protein, 563 aa, Oryza sativa (indica cultivar-group)
MGNCCVSRPSGADKRRRCGSSTAPHTRGGRRVIGAANMRCLSTVSSVSDAARAVMSNEPATVLGNSGSSGNGGVMAAEEMLRRYEIGEELGRGEFGVTRRCRDAVTGERLACKSISKRKLRSSVDVEDVRREVAIMRSLPAHANVVRLREAFEDADAVHLVMEVCEGGELFDRIVARGHYTERAAAAVMRTIMDVVQHCHKNGVMHRDLKPENFLYANASENSPLKVIDFGLSVCFKPGARFNEIVGSPYYMAPEVLKRNYGQEIDIWSAGVILYILLCGVPPFWAETDEGIAQAIIRSHIDFQREPWPKVSDNAKDLVRRMLDPNPYTRLTAQQVLEHPWIQNASAAPNIPLGEAVRSRLKQFTVMNKFKKKALLVVAEYLPTEELDAIRELFNMLDTKKKGHLTLEELRKGLQVIGHNIHDTDVDMLMEAADIDGNGILDCKEFVTVSIHLKKIRSEEHLPKVFSFFDKNGSGYIEIEELKEALSPRGDQKSIDDIFLDVDIDKDGKISYEEFELMMSAGMDWRNASRQYSRAVYNTLSRKIFKEVSLKLDHSGPLVAAGK

SEQ ID NO: 9212 - protein, 219 aa, Rhodospirillum rubrum
MTRAIRIAPSLLSADFAISRPRCPSDGRTGADILHFDVMDNHYVPNLTVGPLVCAALRPHTSLPIDVHLMTRPVDPLIDSFAEAGADMITFHPEASDHVHRSVQMIRKRGLKAGVALNPASPLSLLDHILEDLDLVLIMSVNPGFGGQSFIPSALPKIAALANGRRRACRGDRVDGGVNPADARALARPGPISWSGWRSSERVTGPRPSPPSGAPRKVD

SEQ ID NO: 9213 - protein, 226 aa, Wolbachia endosymbiont of Drosophila ananassae
MIQSNLQGVNFVVANTDAQALEKSLCDKKIQLGINLTKGLGAGALPDVGKGAAEESIDEIMEHIKDSHMLFITAGMGGGTGTGAAPVIAKAAREARAAVKDRAPKEKKILTVGVVTKPFGFEGVRRMRIAELGLEELQKYVDTLIIIPNQNLFRIANEKTTFSDAFKLADNVLHIGIRGVTDLMVMPGLINLDFADIETVMSEMGKAMIGTGEAEGEDRAISAAEA

SEQ ID NO: 9214 - protein, 571 aa, Clostridium tetani E88
MEGYAMSKKYLIVGGVAGGASTAARLRRLSEEDEIIMFERGPHVSFSNCCLPYHLAGLIKTANQLVLMSPEQFKKQYNIEARVNSEVIDIDRAKKEITIKDTLTGKEYTENYDKLILSPGAKPIVPPIKGIEDINLFTVRNVIDIDKLNKFVSTMKTKNATVVGGGFIGIEVAENLKEAGFNVTLVEAMPQVMKIFDYDMVQILHKELHDKGINLIVNDKVASFEKDTVVLESGKRVEAEAVVMAIGVTPETDLAVKAGLELGELGGIKVDQNYRTKDEDVYAVGDAIEVYHALTGKMTKLPLAGPAQKQAREVADHIHGRLVPNTGYIGSSVVKCFEYNGASTGLNEGMIKALNLDIQYETVKVIPGDKVGLMPGCEPLHFKLLFEIPTGKILGAQAIGRGNVDKRVDVIATAIKFGATINDLRDLEFCYAPPFGTAKDVVNFAGYVGSNLLHDEFKQVHEYDVRDLVESGACIIDVREKHEYELSHIIGAKNIPLSEIRDRVAEIPKDQPVYLHCRSAQRSYNAAKALKHLGFDNIYNVSGGFMGISFYEYFNDQTTGREKIVTDYNFL

SEQ ID NO: 9215 - protein, 167 aa, Zea mays
MEYGQQGQHGHGATGHVDQYGNPVGGVEHGTGGMRHGTGTGGMGQLGEHGGAGMGGGQFQPAREEHKTGGILHRSGSSSSSSSEDDGMGGRRKKGIKEKIKEKLPGGHKDDQHATATTGGAYGQQGHTGSAYGQQGHTGGAYATGTEGTGEKKGIMDKIKEKLPGQH

SEQ ID NO: 9216 - protein, 324 aa, Synechocystis sp. PCC 6803
MAETLLFAALRQALDEEMGRDVNVLVLGEDVGLYGGSYKVTKDLYEKYGEMRVLDTPIAENSFTGMAVGAAMTGLRPVIEGMNMGFLLLAFNQIANNAGMLRYTSGGNYQIPMVIRGPGGVGRQLGAEHSQRLEAYFHAVPGLKIVACSTPYNAKGLLKAAIRDNNPVLFFEHVLLYNLKENLPDYEYIVPLDKAEVVRPGKDVTILTYSRMRHHCLQALKTLEKEGYDPEIIDLISLKPFDMETISASVKKTHRVIIVEECMKTGGIGAELIALINDHLFDELDGPVVRLSSQDIPTPYNGMLERLTIVQPPQIVDAVKAIIG

SEQ ID NO: 9217 - protein, 456 aa, Polyangium cellulosum
MISISKSKQKLLPPGPRSPMALQTLQWLKNPVPFLEACGARYGEMFTLKLPTQWPVVVVQHPEAVKEVFALDSNAGHAGEANNILKPFLGKYSLLVLDGEEHMRQRKMMMPAFHGERMEAYGHAMIDAAHASIDAWPVGSPFGVHAPMQAITLQVILRTVVGMTDGPLLAELEALYPQVIDAASAPAMHFELFRKDLGPWSPWGKFKRRSARGKEIMIHEIRRAREKGTAGRTDVLAMIIDAKDENGELLTEDEIHGELMTLLVAGHETTATALCWALRWLLRDAALTRRVAEEAAEVADDPVKIAKSELLDRVVKEALRLQPIGPVVARVLKQPLTIQGRELPADVMVAPCVQLLHHRPSLYPEPTRFDPDRYATFTPKPWEFIPFGGGLRKCIGAAFSMYEMKMVLATAFSRLSMELATDDIKIIRRGVTLAPSGGLPLVIRKKSPRATKPIAA

SEQ ID NO: 9218 - protein, 174 aa, Triticum aestivum
MAPAVMASSATTVAPFQGLKSTAGLPVSRRSSGSLGSVSNGGRIRCMQVWPIEGIKKFETLSYLPPLSTEALLKQVDYLIRSKWVPCLEFSKVGFVFREHNSSPGYYDGRYWTMWKLPMFGCTDATQVLNEVEEVKKEYPDAYVRVIGFDNLRQVQCVSFIAFRPPGCEESGKA

SEQ ID NO: 9219 - protein, 576 aa, Ralstonia solanacearum
MLKHPATKYRPFPPIALPDRTWPSKTLTRAPIWMSTDLRDGNQALFEPMNAERKMRMFKMLVQIGFKEIEAAFPAASQTDYDFVRELIEGGHIPDDVTIEVLTQAREDLIRRTMESLRGARRAIIHVYNATSPVFRRTVFNTDREGVKRIAVESAKLIREIAESMPETQWTYQYSPEVFSGTELDFALEVCNAVTEAWDPTPAHKIIFNLPATVEMATPNVYADQIEWMHRHLARRDSILLSVHPHNDRGTAVAAAELAVMAGADRVEGCLFGNGERTGNVDLVTLALNLYSQGIDPGLDFSHVNDVARTCEDCTQLPVHPRHPYVGDLVFTAFSGSHQDAIKKGFAVQKPDAIWEMPYLPIDPADVGRTYDSIIRVNSQSGKGGVAYLLESGYGIAMPRRLQVEFSSTVQQLTDASGREATAADIWALFQETYLRADGPIGYVSHRLAERDDGSQHIRLVVNIADREHVCEGVGNGPLDALVQALAAVLAAPVSIHHYEERALGQGANADAIAFAELAAPGVAGSVFGVGIDANLTTASIRAVVGGVNRLAARHAQAQPGQSLLRRGMAPSMELA

SEQ ID NO: 9220 - protein, 285 aa, Oryza sativa
  misc_feature (174)..(174): Xaa can be any naturally occurring amino acid
MAVARLVAARAPLLSPAAVAAAHRSPPALLRLAFAPLPARLAVPLRVAVGEPEPEEDARRAVAERAARKQSERRTYLVAAVMSSLGITSMAAAAVYYRFAWQMEGSGEIPVTEMFGTFALSVGAAVGMEFWARWAHRALWHASLWHMHESHHRPRDGPFELNDVFAIANAAPAXISLLAYGLLNRGLLPGLCFGAGLGITLFGMAYMFVHDGLVHRRFPVGPIENVPYFRRVAAAHQIHHTDKFEGVPYGLFLGPKELEEVGGTEELDKEIKKRIKRKEAMDAIR

SEQ ID NO: 9221 - protein, 160 aa, Mycobacterium avium subsp. paratuberculosis
MTVSFRPTADLVDDIGPDVRSCDLQFRQLGGRTEFAGPISTVRCFQDNALLKSVLSEPGGGGVLVVDGGGSLHTALVGDVIAELARANGWAGLIVNGAVRDSAALRGMDIGVKALGTNPRKSTKTGAGERDVDITLGGVTFTPGDIAYSDDDGIVVAVGD

SEQ ID NO: 9222 - protein, 958 aa, Pseudomonas aeruginosa UCBPP-PA14
MSQTPSLAQLQPADAFLRRHLGPDPAEQQAMLDFLGVSTRAELIVQTVPPAIRLNRPLELPAALDEQAALARLRGYAGLNQRWTSLIGMGYYGTVTPPVILRNVLENPGWYTAYTPYQPEIAQGRLEALLNFQQLTIDLTGLDLASASLLDEATAAAEAMALARRVAKARSNRFFVDAHCHPQTVSVLRTRAEAFGFELVVDEPDNLAAHAVFGALLQYPDSRGEIRDLRPLIEALHGQQALACVASDLLALLVLTPPGELGADVVLGSAQRFGVPMGYGGPHAAFFATREGYKRAMPGRIIGVSRDARGNPALRMALQTREQHIRREKANSNICTAQVLLANIASLYAVYHGPQELKRIAQRVQRLTALLAAGLESKGLRRLNRHFFDTLTYEVGERQAAILERARAARVNLRVVDDRRLALSLDETCDAATLATLFEIFLGAGHGLDVAHLDGGAVADGIPAVLQRTSAYLQHPVFNAHHSETEMLRYLRQLEGKDLALNQAMIPLGSCTMKLNASSEMIPITWPEFAELHPFVPREQAEGYRRMIDELEAWLRAITGFDAICMQPNSGAQGEYAGLLAIRRYHQSRGDSQRDICLIPASAHGTNPASAIMASMRVVIVECDPCGNVDLDDLRLKAAEAGDRLSCLMITYPSTHGVYEEGIGEICEVVHRHGGQVYMDGANLNAQVGLARPADIGADVSHMNLHKTFCIPHGGGGPGMGPIGVKRHLAPFVANHPVIRVEGPNPLNDAVSAAPWGSASILPISWMYIAMMGPQLADASEVAILSANYLANRLDGAFPVLYRGRNERVAHECILDLRPLKAQTGITEEDVAKRLMDYGFHAPTMSFPVPGTLMVEPTESESKAELDRFVEAMLSIRAEIGKVESGAWPAEDNPLKRAPHTLADVTGIWQRPYEIAEAVTPSEHARAFKYWPAVNRVDNVYGDRNLFCACVPLDDYRE

SEQ ID NO: 9223 - protein, 379 aa, Ustilago maydis 521
MSKQAYNVVVLPGDGIGPEVVEQATRVLELISSKSTTFSIKLKSYDFGGCAIDSTGKPLPDDTLAACKEADAILMGSVGGPKWGVGKVRPEQGLLALRKELDLYANIRPCLFPSESLLSHSPLKPEVAKGVSFIVVRELVKGLYFGERQEANLDDPNSDGAAFDTMVYNKHDVERITKLASHLALQSNPPAPLHSIDKANVLATSRLWRKVVQDTVDSEFASQGITVDHQLVDSASMVMVSNPRKLNGVVLTENMFGDILSDESSVIPGALGLLPSASLSGLPDGNGKCNGLYEPIHGSAPDIAGKGIANPVGTILSAAMLLRYSLNQPDLADKVEAAVRKVLDAKQIGGLELRTADLGGKHGSKDVGDQVVAVLETLL

SEQ ID NO: 9224 - protein, 529 aa, Neisseria gonorrhoeae FA 1090
MSIVEIKVPDIGGHENVDIIAVEVKAGDTIAVDDTLITLETDKATMDVPADAAGVVKEVKVKVGDKISEGGVILTVETGAAAAEAAPAAAAEAQPAPAAAGGATVQVAVPDIGGHTDVDVIAVEIKVGDTVAEDDTLITLETDKATMDVPCTAAGVVKAVFLKVGDKVSEGSAIIEVETAGSAAAAPAPAAQAAAPAAVPTSAAPAAVPTSASPAAAKIDEAAFAKAHAGPSARKLARELGVDLGQVKGSGLKGRIMGDDIKAFVKSVMQGGAAKPAAAGASLGGGLDLLPWPKVDFSKFGNVEVKELSRIKKISGQNLSRNWVVIPHVTVHEEADMTELEEFRKQLNKEWEREGVKLSPLAFIIKASVSALKAFPEFNASLDGDNLVLKNYFNIGFAADTPNGLVVPVIKDVDQKGLKQISQELTELSKKAREGKLKPQEMQGACFTISSLGGIGGTGFTPIVNAPEVAILGVCKSQIKPVWNGKEFAPRLMCPLSLSFDHRVIDGAAGMRFTVFLANLLKDFRRITL

SEQ ID NO: 9225 - protein, 319 aa, Ustilago maydis 521
MSSAAKKEAILRQFRQLTNATPQDANRILKAHGYRIEPATDAFFNNEQAQINASISSSTLDRKSEREVKERLNALFDRFRDAGADSDEEDDEASQPEDRDLISIGGALKMCEALEVSPEDVVFLPLSYYLKSASMGTFTREGYINGWKMLDLSDTIDKQKKTLEKLRQELLDNKPLRLERIAQEKSNPATASGANKGLYEKVYEYTYAFARREGQKSLALENALAFWDLVLPASPTFQRAGSQGTFTQAQLDLWKRFLSEQTRGRAVSKDTWMQFLDFTKEINSDFSNHDFDAAWPSIIDDFVLWVRDNMPASDGMDTS

SEQ ID NO: 9226 - protein, 929 aa, Pectobacterium carotovorum subsp. carotovorum
MTKYSLRARMLILILAPTLMIGLLLSSFFVIHRYNQLQSQLADSGASIIDAAGNHQRYAITHRQMDTIPALINTLHRRHSAIIRTISVFDARNQLLATTKLRNKRTLQCLSNDVLAHNKLHLHHTNDALILHMPIVTDSEFMAGTTPVLPGTATPLGYLVIELDTSTIRLQQYQEIFIAALLLLLSLGAAVIFAYRLMRDVTTPIRNMVDTVDRIRRGQLDSRVEGYMLGELDMLKNGINSMAMSLTAYHEEMQQNIDQATYDLRETLEQMEIQNVELDLAKKRAQEAARIKSEFLANMSHELRTPLNGLIGFTRQTLKTPLNTTQTDYLLTIERSANNLLNIINDVLDFSKLEAGKLVLEDIPFSLHNTLDDVVMLLAHTAHEKGLELTLSIQNDVPEQFVGDPLRIQQIITNLLGNAIKFTEQGNIDIRVEKRRQELHQVLLEVQIRDTGIGIAELQQSQLFQAFRQADTSISRRHGGTGLGLVITQRLVKEMGGDISFQSELSKGSTFWFHITLPLNPHAIPTEPAYTMLQGKHLAYVEYHPIAAQATLDILSQTPLIVSYSPTFEQLPEGEFDILLLGIPVQYRNTLLDYTPRLRDICRRSPCVILALPSLAQMDAEQLKTFGVHACLSKPLAASRLLPLLQDSTLFQFSFLPDDTASHQSAVRHLARLPLRVMAVDDNPANLKLIGTLLEEQVETIILCESGQDAIAQAELNQCDIILMDIQMPGMDGICASELIRQIPHHATTPIIAVTAQTMTGEREHLLRSGMDDYLAKPIDEQMLKSVLTRHARQDPLKRNRGEMTGLLNEHDDSQLSLDWALAQQQAANKPELGRDLLQMLLDFLPEVQRKIENVLKGQTDDDIIELVHKLHGSCSYSGVPLQPICRYLEQQLRKGVHASDLEPEWLELLDEIDNVNRAAQPHINPRLP

SEQ ID NO: 9227 - protein, 954 aa, Pseudomonas fluorescens Pf-5
MLSLSQLREPNAFLNRHLGPDAEEQQAMLASLGLGSRAELIEQTVPPGIRFNRALDLPPALDEAAALARLKGYAGQNQVWTSLIGMGYHATLTPTVILRNVLENPGWYTAYTPYQPEIAQGRLEALLNFQQMTIDLTGLDLANASLLDEATAAAEAMALAKRVSKSSSNLFFVDEHCHPQTVSVVRTRAEGFGFELVVGGVDELSGHQVFGALLQYPDTHGEIRDLRPLIDQLHAQQALACVAADLLSLLLLTPPGELGADVVLGSSQRFGVPMGYGGPHAAFFACRDDYKRAMPGRIIGVSKDARGQVALRMALQTREQHIRREKANSNICTAQVLLANIAGFYAVYHGPAGLKRIAQRVHRLTCILAVGLERHGIARVNRHFFDTLTLEVGGSQTAIIESARAQQINLRILGRGRLGLSLDETCDESTVTRLFDVFLGADHGLDVSNLDAEALESGIPDPLLRRTRYLTHPVFSAHHSETEMLRYLKQLENKDLALNQSMIPLGSCTMKLNASSEMIPITWPEFANLHPFAPREQAAGYGLLIAELERWLCAITGFDAICMQPNSGAQGEYAGLLAIRRYHESRRQGGRHVCLIPASAHGTNPASAQMAGMQVVIVECDEAGNVDLEDLKAKAQAAGERLSCLMATYPSTHGVYEEGISQICEVIHSHGGQVYMDGANLNAQVGLARPADIGADVSHMNLHKTFCIPHGGGGPGMGPIGVRAHLAPFVANHPVVPIDGPLPENGAVSAAPWGSASILPISWMYIALMGPQLADASEVAILAANYLAEQLSGAFPVLYSGRNGRVAHECILDLRPLKAQTGISEEDVAKRLMDYGFHAPTMSFPVPGTLMVEPTESESKAELDRFIEAMLSIRAEIAQVQEGNWPAEDNPLKGAPHTLADITGVWERSYSIEQAVLPTAHTRAHKYWPAVNRVDNVYGDRNLFCACVPLADYR

SEQ ID NO: 9228 - protein, 365 aa, Ralstonia solanacearum
MRILVLPCDGIGPEIVGAAMEVLRSADSVFKLDLAFDYDDVGFTSLEKYGTTLRDEVLAKAKTYDGVILGTQSHADYPAPDKGGRNVSAGFRIGLDLYANVRPARTRPFLTSNMREGRTMDLVIMREATEGFYPDRNMTKGWAELMPSPDMAISLRKITRHCSERIARRAFELAMKRKKKVTAIHKANSFHMTDGLFLECVRDVARDFPEVRLDDLLIDASTAHLVRAPERFDVLVATNFYGDIISDLASELSGSLGLAGSMMASDTHCCAQAQHGSAPDIAGQDKANPVSMILSVAMLIQWMGEHHQNPAYLAAAQAMEAAVDSVLENPATRTPDLGGNCGCKAFGQLVAKVIQAVRVPSSSGT

SEQ ID NO: 9229 - protein, 225 aa, Methanosarcina barkeri str. fusaro
MVSREYVKGDLPEKAAILQRDGETYAIAPHIPGGIVYPETLRKIADIAEKYGAAALKITSAQRIAIVGLKEEDLDAAWGELNLKPGAAIGLCVRSVKICPGTTFCKRGKQDSVGLGLKLDEKYHGMQLPSKFKMGVSGCQNSCSEPMIKDIGLMGTAKGFTLSVGGSAGPRPRLGSVVAKDLTEEQALDLVERIIDFYKKYPKPRRLGEVIDEIGLEKFKEEVGL

SEQ ID NO: 9230 - protein, 566 aa, Campylobacter coli RM2228
MRKISGSAMICEALKEENVKIVFGYPGGAALNIYDEIYLQKYFKHILVRHEQAAVHAADAYARMSGEVGVAVVTSGPGFTNTITGLATAYSDSIPLVLISGQVANSLIGTDAFQEIDAVGISRPCVKHNYLVTCIEEFPRILKEAFYIAKSGRKGPVHIDVPKDVSAALGIWDYPKEISMKTYKPIYKGNSKQIKKLAENLEEAKRPLFYLGGGCIASNAANEIRELVKITQIPAVETLMALGTLRSDDELNLKMAGMHGSYTANMALSECDLLVAIGARFDDRITGKTSEFAKHSKIVHIDIDPSSISKIINAHFPIVGDIKEVVKELLEELKKNQFKSNIHEWRQTLKRYDELYPLAYEDSDEVLKPQWVIQECAKLAPDARIITDVGQHQMWVAQFYPFNYPRQLATSGGQGTMGYSLPAALGAKLAVGEEVVINFVGDGSVLMNIQELMTAYENGIKTINIILNNSFLGMVRQWQSMFYEEHFSATDLSLQADFIKIAEGFGCEGYNIKTKDEFRTAFKQALESNKTSLLNVFIDRFEDVLPMVPAGGAIYNMILPKLKDKQ

SEQ ID NO: 9231 - protein, 367 aa, Oryza sativa
MALRRLLQGSVLPRMAGRAAAAPFSTASGETVRATLFPGDGIGPEIAESSHLLVPKMVFNVAGVPIEWEEHYVGTEVDPRTESFLTWESLESVRRNKVGLKGPMATPIGKGHRSLNLTLRKELGLYANVRPCNSLPGYKTRYDDVNLVTIRENTEGEYSGLEHQVVRGVVESLKIITRQASLRVAEYAFHYAKTNGRERVSAIHKANIMRKTDGLFLKCCREVAEKYPEIVYEEVIIDNCCMTLVKNPGLFDVLVMPNLYGDIISDLCAGLIGGLGLTPSCNIGEGGICLAEAVHGSAPDIAGKNLANPTALMLSAVMMLRHLQFNNQADRIHNAILQTISEGKFRTADLGGKASTSDFTKAVCDHI

SEQ ID NO: 9232 - protein, 109 aa, Griffithsia japonica
RFTRALLNLVTRNPDGRRRALLCGGGVANFSDIAATLAGVQQALTDFHGKLQVAKVKVFVRRGGPNYKTGLQLMRDLGNSLDIPIDVYGPETNMTSIVALAIKWIEEGV

SEQ ID NO: 9233 - protein, 339 aa, Campylobacter coli RM2228
MKFVSIEQAIKDLQEGKMLVMVDAEDRENEGDLIFPAQFSTKEKVNFMIKEARGVVCVALAEELARKFELPLMVPKNTSNHETAFTITVDAKDATTGVSAYERDMTIKIFADDNAKASDFVRPGHINPLIAKKGGVLERTGHTEGTVDLCHLAGLKQACVICEIVKDDGDMARRSDLEEFCTKHNLNMIAVSDIIEYRLKNESLIKLQEKSDAILAGFKAQKFIFTDHNNAQHIAFAFKEIQKCENVKFHISGSDFELLTSDKFSKLLDQIRFLSENGGVIVFMQGEKSSVTQFKNYGIGAQILRYFGIEEIKLMSQSCDKDYIGLKGFGLNLKICNFN

SEQ ID NO: 9234 - protein, 423 aa, Streptomyces coelicolor
MTRRRVAVTGIGVVAPGGIGTPQFWRLLSEGRTATRRISLFDPSGLRSQIAAECDFEPSDHGLGLATAQRCDRYVQFALVAASEAVRDANLDMNREDPWRAGATLGTAVGGTTRLEHDYVLVSERGSRWDVDDRRSEPHLERAFTPATLSSAVAEEFGVRGPVQTVSTGCTSGLDAVGYAYHAVAEGRVDVCLAGAADSPISPITMACFDAIKATSPNNDDPAHASRPFDADRNGFVMGEGAAVLVLEDLEHARARGADVYCEVSGYATFGNAYHMTGLTKEGLEMARAIDTALDMAELDGSAIDYVNAHGSGTQQNDRHETAAVKRSLGEHAYATPMSSIKSMVGHSLGAIGSIELAACVLAMAHQVVPPTANYTTPDPECDLDYVPREARERTLRHVLSVGSGFGGFQSAVVLSGSEGGLR

SEQ ID NO: 9235 - protein, 387 aa, Methanosarcina barkeri str. fusaro
MISMKKYDVVIIGAGPAGSYAAYMLAKSKINVLVIDKYSFPRYKPCAGGLTAKAFNSFDFPISKEVKYSTNSIVTSYKNQIFHNISGNKTLVKMIERKEFDDFLIKKAVDSGATFLDGMKVTEITWENAEFSIKTDSEFFRCNYLIGADGTNGIVNRTFNIVERDLYGFAVEINCPVSRDNIGKFNMTFDFGTVPNGYLWIFPKDEYVCVGAYTTNRKMKNIQKYLLDYIEKLGLVPESEKLKGHIIPYYGINYKQPDFPCVLVGDAAGFGEYWTGEGIYYAVKSGTIAAEVISSSIKSGIFDRQALQRRYQREIIRGLKLAYYIGKFFYGNLPLSFNLVMSYLPVGIMYESASRGLTFDQSFSKIHVALSSLILNKSHISNNKYHR

SEQ ID NO: 9236 - protein, 374 aa, Methanosarcina barkeri str. fusaro
MYDVIIIGGGPSGASAGRRAGKLGMKTLLLDKEEFPRYKPCGGGLSEHAMSYLDFELPQDIIEWDVTGARIIFRDQLIEVHKDHRVSALVSRNKFDNFLLEKAKETNIEVHTGEKALCCREMPYCVEVDTRQGTYQAKFAIIAEGAHGLVKTCVRPADNKEEYGICLVTEVPADEREMEKRLGDAVELHFGVAGGGYGWIFPHKTYYSVGIGGVVKDFPHPKEAMLNFLKENGFSGEYKLHGHKIPWGGIKRKVVGSRVLLSGDAAGYVDAFSGEGLAYAICSGQFAAEAIARVCLQGKNLKDLSKYESLCRAEFGTHLKYSLLFSRIMHHFPERTFKIFTSSDKMLDKYLEVMDFTIDYKDYLRWALLNFKLR

SEQ ID NO: 9237 - protein, 397 aa, Yarrowia lipolytica CLIB122
MAEFDRDLDDELEFKTSKDVDVTPTFESMDLKDDLLRGIYAYGFEAPSAIQSRAITQIIKGRDTIAQAQSGTGKTATFSISMLEVIDTKHRETQAMVLSPTRELATQIQSVILALGDYMNVQCHACIGGTSLSVDMKKLEAGQQVVSGTPGRCLDMIKKGCLRTKNLKMLILDEADELLNKGFQEQIYDIYRYLPAATQVVVVSATLPHSVLEMTSKFMTDPVRILVKRDELTLEGLKQYFIAVEQEEWKFDTLCDLYDTLTITQAVIFCNTKKKVDWLTQQMKDNNFTVCSMHGDMAQKDRDSIMNEFRSGRSRVLISTDVWARGIDVQQVSLVINYDLPPNRENYIHRIGRSGRFGRKGVAINFATNDDITTLRDIEQYYSTQIDEMPVNVTDMM

SEQ ID NO: 9238 - protein, 391 aa, Methanosarcina barkeri str. fusaro
MYDLIIVGGGPSGASAGKTAGERGLLTLLIEKENFPRYKPCGGALSSYGLSCLDFKLPESIIERNIPKVGVYFRDRFVEGMKENNLALLVSRKVFDNFLLEKARGAGIEVHTGEEVLDLVEKEDFVEVRTTDNTYLGSFVLISEGSGGTLKYKVRPRDKITEYGLGLVSEIPDDDEVIRNRFPGTINIHFGVAKGGYGWIFPHAGYYSAGIVGAAQYLEHPKKTLLDFLEENGLSGDFPVRSHVIPKGGIKRKILNSRLLLSGDAAGFVDAFTGEGLSYAIRSGQLAAETVADLVMYSLKLNSLKAYEFSCRQEFGNYLSSSLKLDKIMHRFPEASFKLAVSNREILDKYLDEVVTNRNYKEYVRWLLLNFCLVEPVSRIKSLTLEGIDKD

SEQ ID NO: 9239 - protein, 306 aa, Wolbachia endosymbiont of Drosophila ananassae
MNVPRVTKLDNGLRIITEQVRDIDSVALSIRVGVGSRAESAKQNGISHFLEHMAFKGTKTRTAFEIAKAFDDIGGVFNASTGRESTTYYAKVLKKDIKTGIDILIDILMNSTFPEDELEREKGVVIQEIFQTNDSPSDIVFDKYFEAAYKDQPFGRSILGTQDTVKSFTRGDLDNYINEHYFGENMLFAVAGNVEHEEVVALTKDFFSKIHSKKLKKSQNATSHTGGEYLEHRKLDQVHLLIGLPSVSRHDDKYHTFQVLDSILGSGMSSRLFQEVREKQGLAYSVYSFNSSYTDTGCFHFCWYRQ

SEQ ID NO: 9240 - protein, 331 aa, Triticum aestivum
  misc_feature (134)..(134): Xaa can be any naturally occurring amino acid
  misc_feature (159)..(159): Xaa can be any naturally occurring amino acid
MRVSRGAVACAALMLLSTAAALRSEPSRLSTSGAPKLRASAEAAQANATFCSKEEAFAWAKKDHRRLLHVVYRVGDIHKTIKFYTECLGMKLLRKRDIPEEKYTNAFLGYGREDAHFVVELTYNYGVDKYDIGXAGFGHFGIATDDVAKTVELLRAKGXARVTREAWALSKGGKTVIAFIEDPDGYKFEILERPGTPEPLCQVMLRVGDLDRAISFYEKACGMKLLRKRDNPEYKYTVAMMGYGPEDQNAVLELTYNYGVTEYDKGNAYAQIAIGTDDVYKTAEVVKLSGGQVIREAGPLPGLGTKITAILDPDGWKSVFVDNIDFAKELE

SEQ ID NO: 9241 - protein, 258 aa, Magnetospirillum magnetotacticum MS-1
MTVSCLYRGQVMHHRLDPVGHRFTYDVVSLLVDLDELPELGLTLLSHNRRNLFSVQDKDLGDGGSPRRWIEAELARHSIFIPGGAVRVHLFPRFLGLAFTPLTTWFCHAADGSLSAVLYEVHNTFGERHAYLVRTEGDERRTLRHSAAKCFHVSPFLGLSGDYAFALRPPSETFAITIRETDRATAKPILVASHVAKRVPLTDTALIRAALAYPLLPLKIVGGIHWEALRIWLKGASFHSKPAPPASLVSFIDKGGLS

SEQ ID NO: 9242 - protein, 640 aa, Lolium multiflorum
MATATSTAVAFSGATATLPKPRTLPRHLLPSSRRALAAPIRCSAVSPSPSPAPPATALRPWGPSEPRKGADILVEALERCGISDVFAYPGGASMEIHQALTSSPLITNHLFRHEQGEAFAASGYARASGRVGVCVATSGPGATNLVSALADALLDSIPMVAITGQVQRRMIGTDAFQETPIVEVTRSITKHNYLVLDVEDIPRVIQEAFFLASSGRPGPVLVDIPKDIQQQMAVPVWDAPMSLPGYIARLPKPPATELLEQVLRLVGEERRPILYVGGGCSASGEDVRRFVELTGIPVTTTLMGLGNFPSDDPLSLRMLGMHGTVYANYAVDKADLLLAFGVRFDDRVTGKIEAFASRSKIVHIDIDPAEIGKNKQPHVSICADVKLALQGLNAVLTGSKCDKSFDFASWHDELEQQKREFPLGYKTFGEAIPPQYAIQVLDELTKGEAIIATGVGQHQMWAAQYYTYKRPRQVLSSAGLGAMGFGLPAAAGTAVANPGVTVVDIDGDGSFLMNIQELALIRIENLPVKVMILNNQHLGMVVQWEDRFYKANRAHTYLGNPENESEIYPDFVTIAKGFNVPAVRVTKRSEVRAAIKKMLETPGPYLLDIIVPHQEHVLPMIPSGGAFKDIIMEGDGRISY

SEQ ID NO: 9243 - protein, 335 aa, Glycine max
  misc_feature (218)..(218): Xaa can be any naturally occurring amino acid
  misc_feature (244)..(244): Xaa can be any naturally occurring amino acid
QLRRPPPPLKFSIVFFFFRFSIFYSMGIGGSALGPHFVAEALAPDNPPLKIRFVDNTDPAGVDHQIAQLGLELASTLVIVISKSGGTPETRNGLLEVQKAFREAGLDLPKQGVAITQENSLLDNTARIEGWLARLPMFDWVGGRTSEMSAVGLLPAALQGIDIIEMLAGASLMDEANRSTADMAILPYKDSLLLFSRYLQQLVMESLGKVFDLDGNRXYIQQLREGVHNFFVTFIEVLRDRPPXHDWELEPGVTCGDYLFGMLQGTRSALYANNRESITVTVQEVTPRTVGALIGLYERAVGIYASLVNINAYHQPGLGNMACGRGMLNCIQMKT

SEQ ID NO: 9244 - protein, 416 aa, Chromobacterium violaceum ATCC 12472
MANRRVVVTGYGSLTSLGENSAEAWEAIMNGKLGYRKFELENQQIKAKFFSFLDENKARYRGIPKAISRALPAFAKNAVVAAREAIDMAFGSPEAIAEHYPAHECGVIIGTGWGGLDEAYDIRDAYRDTGFGSPLGSLISMPSIATGACTLMWNLRGYQNTVIAACATGTIAIGDAYEAIRQGRASMMLAGGSETLRNETNIWNIDVLNALSKEQEEAERACCPFDRRRSGFVLAEGAAVLCLEELEHAQHRGATILGEIKGYGSFSDARDFTAPAEDMLARVKSIEFALKQAGKRPEDIDYINAHGTSTPLNDLNESNAIKAALGAHAKRVPVSSTKSYSGHLISAAGSFESIICLKAIATGILPGTANLLESDPECDLNYLPNGHLHGQAVDTTLNLSFGFGGANAALVIERAR

SEQ ID NO: 9245 - protein, 413 aa, Cucumis sativus
GDDVEDVRREVQIMHHLTGHPHIVELKEVYEDRHYVNLIMELCAGGELFDRIIAKGHYSECTAASLCRQIVTVVHNCHSMGVMHRDLKPENFLFLSADENSPLKATDFGLSVFFKPGDVFKDLVGSAYYVAPEVLRRRYGPEAAVWSAGVILYILLSGVPPFWAENDQGIFDAVLRGHIDFSSDPWPSISSGAKDLIRKLLHSDPKERLSAIEALNHPWMKEDGEASDKPLDIAVLTRMKQFRAMNKLKKVALKVIAENLSEEEIVGLKEMFKSMDTDNSGTITFEELKAGLPKLGTKLSESEVRQLMEAADVDGNGSIDYIEFITAAMHMNRVEREDHLFKAFEYFDKDKSGYITMEELETALKKYNMGDETTIKEIIAEVDTDNDGRINYDEVVAMMRKGNQELTTTSRQK

SEQ ID NO: 9246 - protein, 175 aa, Triticum aestivum
MAPTVMASLATSVAPFQGLKSTAGLPVSRRSNGASLGSVSNGGRIRCMQVWPIEGFKKFETLSYLPPISTEALLKQVDYLIRSKWVPCLEFSKVGFIFREHNASPGYYDGRYWTMWKLPMFGCTDATQVINEVEEVKKEYPDAYVRIIGFDNMRQVQCVRFIAFKPPGCEESGKA

SEQ ID NO: 9247 - protein, 117 aa, Fragaria x ananassa
MASSTAMKLSLVALLCIVVALPIAQAITCGQVASSISPCVNYVKSGGAVPAACCNGIRSLNSAAKTTADRQATCNCLKQASGAIKGLNPSLAAGLPGKCGVSVPYKISTSTNCAAVK

SEQ ID NO: 9248 - protein, 537 aa, Aspergillus niger
MARLLKAVTVCALAGIAHAFNYDQPYRGQYHFSPQKNWMNDPNGLLYHNGTYHLFFQYNPGGIEWGNISWGHATSEDLTHWEEQPVALLARGYGSDVTEMYFSGSAVADVNNTSGFGKDGKTPLVAMYTSYYPVAQTLPSGQTVQEDQQSQSIAYSLDDGLTWTTYDAANPVIPNPPQPYQAQYQNFRDPFVFWHDESHKWVVVTSIAELHKLAIYTSDNLKDWKLVSEFGPYNAQGGVWECPGLFKLPLDGGSSTKWVITSGLNPGGPPGTVGSGTQYFVGEFDGTTFTPDADTVYPGNSTANWMDWGPDFYAAAGYNGLSIKDHVHIGWMNNWQYGANIPTYPWRSAMAIPRHLALKTINNKTTLVQQPQEAWSSISSKHPLYSRTYSTFSEGSTNASTTGETFRVDLSFSATSKASTFAIALRASANFTEQTLAGYDFAKQQIFLDRTKSGDVSFDNTFASVYHGPLVPDSTGMVRLSIFVDRSSVEVFGGQGETTLTAQIFPSNDAVHARLVSTGGATEDVRVDVHNITSTWN

SEQ ID NO: 9249 - protein, 117 aa, Fragaria x ananassa
MASSTAMKLSLVALLCIVVALPIAQAITCGQVASNISPCVTYVKSGGAVPAPCCSGIRNLNGMAKTTADRQATCNCLKQAAGGIKGLNPNLAAGLPGKCGVSVPYKISTTTNCAAVK

SEQ ID NO: 9250 - protein, 117 aa, Fragaria x ananassa
MAISTAMKLSLVALLCIVVALPIAQAITCGQVASSIAPCVNYVKSGGAVPAACCNGVRSLNSAAKTTADRQTTCNCLKQASGAIKGLNPNLAAGLPGKCGVNVPYKISTSTNCAAVK

SEQ ID NO: 9251 - protein, 195 aa, Griffithsia japonica
GTRPVVPPTLSMRLRVAVVGGGPAGACAAETLAKNGIETYIFERKMDNCKPCGGAIPLCMVEEFDLPPTIIDRKVRKMRMISPTNVEVDIGKTLKPHEYIGMTRREVLDAYLRDRAVDLGATAINGLVSKLVIPDDDGPYTLHYTDIEAHKSGGRNTKTLEVDLVIGADGANSRVARTSTPAIITMPSPSERIRS

SEQ ID NO: 9252 - protein, 445 aa, Shigella flexneri 2a str. 301 [sequence omitted]

SEQ ID NO: 9253 - protein, 590 aa, Porphyra yezoensis
MPLKQRVSSEKTGAFALLDSIVRHGVKHIFGYPGGAILPIYDELYAWEEASLIKHILVRHEQGAAHAADSYSRSTGEVGVCFATSGPGATNLVSGIATAHIDSVPILAITGQVGRAFIGTDAFQEVDIFGITLPIVKHSYVVRDPRDMSRIVAEAFFICKHGRPGPVLIDVPKDVGLEKFNYFSVEPGKVNIPGCRPITSLKSRQILMAAKMIQQSSQPLLYIGGGAIISDSHQIIKELVDFYKIPVTTTLMGKGIFNEDSDYCLGMLGMHGTAYANFAVSECDLLIALGARFDDRVTGKLDEFACNAQVIHVDIDPAEVGKNRIPQVAIVGDVAEVVSEILNLLKTSFPPYPEQIISWQERINRWRQQYPLLVPRKSTSISPQVILVATNKLAQNAYFTTDVGQHQMWSAQFLKVKAKHWLSSAGLGTMGYGLPAAIGAQVAHPNDVVICISGDSSFQMNMQELGTIAQYQLPVKIIIINNRWQGMVRQWQQAFYGERYSHSRMTEGAPDFQKLAEAFGIKAFTINNRQNMQSALQVAIDYPGPVLLDCQVTENENCYPMVAPGKSNAQMIGIAKPQRGTASNYINNSV

SEQ ID NO: 9254 - protein, 168 aa, Triticum aestivum
MAALPLATAEACDANSHMITSGELRALQPVFRVYGGRRLFAGPVVTVKVFEDNVLVRGILEEKGQGRVLMVDGGGSLRRALLGGNIAMLAQNNGWAGIVINGCVRDVDEINGCDIGVRALGSHPIKSDKRGMGEKHVPVTVAGARICDGEWLYADADGVLVSRTELSV

SEQ ID NO: 9255 - protein, 494 aa, Staphylococcus aureus subsp. aureus COL
MTEWTGEERYQRIEDVDTEYFKTLKQQVDQSKFRQQFHIQPETGLLNDPNGLIFYKGKYYVSHQWFPLGAVHGLKYWYNYTSDDLINFKAEGPILNPDTKYDSHGVYSGSAFEYNGHLYYMYTGNHRDNHWQRHASQMIARLKEDGSVEKFPKPVISQQPEGYTSHFRDPKVFKYDEKYYAIIGAQNNDQQGRLLLYNTEDIINWHYLGEINTELDDFGYMWECPDYFNVDNQDVILICPQGIEPKGDQFKNIYQSGYILGKFDIEKLTYEHENFVELDNGFDFYAPQTFLDEKGRRVLIGWMGLPEIEYPTDNEGWAHCLTTPRVLNVENGQLKQRPYPALEKLRHNKETALGYANKFTRKLHPYEGKQYELIIDILDNDATEVYFELRTSKTSSTLIAYNKRENKITLDRSDSGLLPTNVEGTTRSTILDTPLKQLQIFVDTSSIEIFCNDGERVLTSRIFPTEDALGIKTSTESGQVYLQFTKYDLKDEHK

SEQ ID NO: 9256 - protein, 214 aa, Jacaratia mexicana
YPESIDWREKGAVTPVKNQNPCGSCWAFSTVATIEGINKIITGQLISLSEQELLDCEYRSHGCDGGYQTPSLQYVVDNGVHTEREYPYEKKQGRCRAKDKKGPKVYITGYKYVPANDEISLIQAIANQPVSVVTDSRGRGFQFYKGGIYEGPCGTNTDHAVTAVGYGKTYLLLKNSWGPNWGEKGYIRIKRASGRSKGTCGVYTSSFFPIKGYR

SEQ ID NO: 9257 - protein, 215 aa, Jacaratia mexicana
YPESIDWRDKGAVTPVKNQNPCGSCWAFSTVATVEGINKIRTGKLISLSEQELLDCDRRSHGCKGGYQTGSIQYVADNGGVHTEKEYPYEKKQGKCRAKEKKGTKVQITGYKRVPANDEISLIQGIGNQPVSVLHESKGRAFQLYKGGIFNGPCGYKNDHAVTAIGYGKAQLLDKNSWGPNWGEKGYIKIKRASGKSEGTCGVYKSSYFPIKGYR

SEQ ID NO: 9258 - protein, 224 aa, Triticum aestivum
  misc_feature (186)..(186): Xaa can be any naturally occurring amino acid
  misc_feature (199)..(200): Xaa can be any naturally occurring amino acid
  misc_feature (204)..(204): Xaa can be any naturally occurring amino acid
TLARAAAAAVMDGGGGVGGGMGPVGGGVGGMVGPVGVGGGGGGSDVELVSKTLQFEHKLFYFDLKENPRGRYLKISEKTSTTRSTIIVPIAGVAWFLDLFDYYIRTDERDVFSKELRLDTKVFYFDIGENKRGRYLKVSEASVNRNRSTIIVPAGSSGEEGWEAFRNVLLEIHDEASRLYVLSNHXSQQHLGPPERLSXXSDDXGAGFIAGHGHPSGCCPRGRW

SEQ ID NO: 9259 - protein, 486 aa, Alkaliphilus metalliredigenes QYMF
MKKYNQLSFELSKPGRIAYQLPACDVPEVNLSEILPAEMIRDQDVELPELSQGDVMRHYTLLSNKNFGVDTGFYPLGSCTMKYNPKVNEDIARLAGFSHIHPYQPEETVQGALALTYELDQMLSEITGMERVTLQPVAGSHGEMTGLMIIKAYHESRGDHKRKKIICPDSAHGTNPASAAVAGFDIIEVKSNDQGEVDVESLKAVLSDEVAGLMLTNPNTLGLFETNIKEMAQLVHEAGGLLYYDGANTNAIMGKTRPGDMGFDVVHLNLHKTFATPHGGGGPGSGPVGVRKDLVPFLPTPVVEKKEDRYILDYDRPQSIGKVSTFYGNFGVTVKAFAYILSMGGDGLKKASEMAVLNANYLMHLLKDHYEVAVNRVCKHEFVLAGLKKEIAEMSTLNIAKRLLDYGYHPPTVYFPLIVREAMMFEPTETESKETLDQFADALIKIAQEAKDNPELVSSAPQHTSVGRLDEAKAARSPVVKWQRSQ

SEQ ID NO: 9260 - protein, 447 aa, Alkaliphilus metalliredigenes QYMF
MFPYIPNTVEDEKKMLAAIGLPSIESLFEDIPENVRLNRELNLGKSLSEFELVKYMKSLSNQNKSIEDLTCFMGAGAYDHLIPSTVDHVISRSEFYTAYTPYQAEISQGTLQVIFEYQTMIANLTGMDVANASLYDGSSAIAEAAAMAVDATRRMEVIVSSTVHPESKRVLNTYANFKNIKIVEIESKDGVTDVEQLKNAISKETAAVILQNPNFLGIIEKVEEVEKAIHEQKGLLIMSVDPISLGVLKSPGDLGADIAVGEGQALGNTLSFGGPYLGFMATTKKLMRKMPGRIVGETTDVNGERGFVLTLQTREQHIRREKATSNICSNQALNALAAAVYLTTLGKAGLKEVALQSTQKAHYALKEITKSGKYQLAFNQPFFKEFAVKTDVTAEVVQSGLLEKDILGGYHLEKFDPKLKNMLLFAVTEKRTKGEIEQLARVLGGIK

SEQ ID NO: 9261 - protein, 428 aa, Leptospira interrogans serovar Copenhageni str. Fiocruz L1-130
MMQEPSQIVHRKVLPGGITVLFQKAPHTVSASAGVFVRVGSRHESSKNAGYCHFLEHMLFKDTAKRSAKQQAEDIERVGGFTNAATSREYTYFHVTVAGKHIGIGLELLAEMIYEPLLKQSDIDNEAGVILEELQGYEDSPEDYIHDFYYQNFFPKNSLGRDIIGTRESVSGVTHKSILDFYDTYYHTENMFLSISGNFEPDEIFTIAAKYFNRTRVKKREGNSLSLPKKKWGYFPKKKKLEQVYFILGGEGFAREFHNASSASLFTHILGGGTSSRLFQKVREEKGLCYHITAYPSSYADVGINSIVCSTSKEKFITCLEIISDEIKSVLDHGISEKELLDAQTNHEGTLSISYEQTESRMNTIALMELYYGRNFSYEERVKEIYSITLEDLNMFAKSVFGIPKLHLSALGNLSLKEEKAVQRIFSI

SEQ ID NO: 9262 - protein, 369 aa, Azoarcus sp. EbN1
MGRPGAGTSALAPITEIVEDIRAGRMVVLVDEEDRENEGDLVLAAEHVTPEAINFMAKFGRGLICLTLTEARCRQLDLHLMVRDNRSPHGTAFTTSIEAAEGVTTGISAHDRSRTVQAAVARHAKPADIVQPGHIFPLMAQKGGVLIRAGHTEAGCDLAALAGLEPASVICEILKDDGTMARLPDLVEFAKEHGLKIGAIRDLIEYRSANEHLVERVAEKDVETPYGRFRLAAFEDKTSGEVHFALSHGEIRPERETLVRVHEPISVVDFIDPESGRHTFPVNQAMARLAEAEQGVIVLLYRPQSGSELLAGLRGDTSLAAKWDARLFGVGAQILRDLKVGKMRLLASPRKIPSMAGFGLEITGFVERP

SEQ ID NO: 9263 - protein, 226 aa, Glycine max
MATPASITNVTVEFLQFPALVTPPGSTKSYFLGGAGVRGLNIQEEFVKFTGIGVYLEDKAVSSLAAKWKGKSAAELLDSLDFYRDIIKGPFEKLIRGSKLRTLDGREYVRKVSENCVAHMQSVGTYSDEEEKAIEEFRNAFKDQNFPPGSTVFYKQSPTGTLGLSFSKDETIPEHEHAVIDNKPLSEAVLETMIGEIPVSPALKESLATRFHQFFKELEANPNIEN

SEQ ID NO: 9264 - protein, 407 aa, Geobacillus stearothermophilus
MGIIVQKFGGTSVGSIERIQHVANRVIEEVQKGNDVVVVVSAMGKTTDELVNLAKQISNHPSKREMDMLLSTGEQVSIALLAMSLHEKGYKAVSLTGWQAGITTEEMHGNARIMNIDTTRIRRCLDEGAIVIVAGFQGVTETGEITTLGRGGSDTTAVALAAALKAEKCDIYTDVTGVFTTDPRYVKTARKIKEISYDEMLELANLGAGVLHPRAVEFAKNYEVPLEVRSSMENERGTMVKEEVSMEQHLIVRGIAFEDQVTRVTVVGIEKYLQSVATIFTALANRGINVDIIIQNATNSETASVSFSIRTEDLPETLQVLQALEGADVHYESGLAKVSIVGSGMISNPGVAARVFEVLADQGIEIKMVSISEIKISTVIDEKYMVSAVEELHEAFGLAEEAAAVRS

SEQ ID NO: 9265 - protein, 498 aa, Sinorhizobium meliloti 1021
MTAVFARTAFHDALKNLSDRQLLRELAYVGGRWVAGRDGTCLEVSDPASGAALAFVASLDAAQTSEAIDAAQKAFRSWHNMLPQARAAILRKWHDLMLEAREDLALLMTLEQGKPLAESRGEIDYAASFIEWYAEEGKRLNAESVTSHLAGAEMIVRREALGVVGIVTPWNFPSAMITRKAAAALAAGCTVVAHPSSETPLSALALAELGERAGLPAGVFNVVTGKAATIVGRMCEDARVRAMSFTGSTEIGRLIASQCAPTMKRLVMELGGHAPLIVFADANVEKAADIAIAAKFATSGQDCLAANRIYVERPALKAFQEAFAARIAGLKVGSGMEPDTDIGPLMHERAVAKVEEQVADALKLGARLAVGGKRHAAGPLFFQPTLLTDVPDDALIMREETFGPVAAVTAFDSEEEVVARANDTEYGLVAYVVTENGARQMRLARALEYGMVAVNRVKITGGPIPFGGWKQSGLGREGSRHGMEAFTELKYLCIDTAA

SEQ ID NO: 9266 - protein, 565 aa, Lactococcus lactis
MHTIFIVVDQGGPTLAFLAKICGSCLAIVISRTERRPHGRLFCFLIKNRGNIMRKIEFFDTSLRDGEQTPGVSFSISEKVTIAKQLEKWRISVIEAGFSAASPDSFEAVKQIADSLNDTAVTALARCVISDIDKAVEAVKGAKYPQIHVFIATSPIHMKYKLKISPEEVLKNIDKCVRYARERVEVVEFSPEDATRTELNFLLEAVQTAVDAGATYINIPDTVGYTTPEEYGKIFKFLIDNTKSDREIIFSPHCHDDLGMAVANSLAAIKAGAGRVEGTVNGIGERAGNAALEEIAVALHIRKDFYQAQSPLKLSETAATAELISQFSGIAIPKNKAIVGANAFAHESGIHQDGVLKNAETYEIITPELVGIKHNSLPLGKLSGRHAFSEKLTELNIAYDDESLAILFEKFKKLADKKKEITDADIHALFTGETVKNLAGFILDNVQIDGHKALVQLKNQEEEIYVSQGEGSGSVDAIFKAIDKVFNHQLKLISYSVDAVTDGIDAQATTLVSVENLSTGTIFNAKGVDYDVLKGSAIAYMNANVLVQKENLQGKVEQISAHDGI

SEQ ID NO: 9267 - protein, 226 aa, Glycine max
MAFPSVTSVTVENVTFPPTVKPPCSPNTFFLAGAGVRGLQIHHAFVKFTAICIYLQYDALSFLSVKWKTKSTHQLTESDQFFSDIVTGPFEKFMQVTMIKPLTGQQYSEKVAENCVAIWRSLGIYTDSEAEAIDKFLSVFKDLTFPPGSSILFTVSPNGSLTISFSGDETIPEVTSAVIENKLLSEAVLESMIGKNGVSPAAKQSLASRLSHLFKEPGVCDPQSHK

SEQ ID NO: 9268 - protein, 430 aa, Aspergillus nidulans FGSC A4
MILQLSPSISNVSTSRKGRSITGADASKQGVRRTWKRLLDGHCGIVNIRHRDARYADLPCEIAAVVPSGARAEGRWTASEWLSKDDERKMARFAQYAMAAAEEALEDAEWKPKAEDQLEATGVCLGSGIGNFDEIYDAVVAYDTKGYKKLSPLFVPKLLINLGAGHISMKYGFMGPNHSATTACTTGAHSIGDAARFIACGDADVMLAGGAESCIHPLAIGGFARARSLATAYNDRPEKSSRPFDADRDGFVVGEEHAKARGARIYAEVKGYGCSGDAHHMTAPKANGGGALLAMKKALKNACLEPSAVDYINAHATSTVIGDAAENAAIKALLLGPGGKQKAADVNVSSTKGAIGHLLGGAGAVEALFTVLAIHENVMPPTINLDRLNDGFDFNYAPNEAQERRIDLALTNSFGFGGTNSSLCFSKHGL

SEQ ID NO: 9269 - protein, 263 aa, Mycobacterium tuberculosis CDC1551
MESGPDALVERRGHTLIVTMNRPAARNALSTEMMRIMVQAWDRVDNDPDIRCCILTGAGGYFCAGMDLKAATQKPPGDSFKDGSYDPSRIDALLKGRRLTKPLIAAVEGPAIAGGTEILQGTDIRVAGESAKFGISEAKWSLYPMGGSAVRLVRQIPYTLACDLLLTGRHITAAEAKEMGLIGHVVPDGQALTKALELADAISANGPLAVQAILRSIRETECMPENEAFKIDTQIGIKVFLSDDAKEGPRAFAEKRAPNFQNR

SEQ ID NO: 9270 - protein, 982 aa, Lycopersicon esculentum
MKHIFKKLHHSNRSNDAQSTSSISSSSSPASSLSSASCTTDHRNSNSVSQSPLSPSTISTASTTTTPAAPVGAGGGGGGGNLSTINRQQDYYTSEEEYQVQLALALSVSSSQSQDPFPSDVNSSNGHGVGRTAVDLARDREDAAADLLSRQYWDYGVMDYEEKVVDGFYDVYNLFTDPASRGKMPSLSELETNPGTSNFEGVIINQRIDPSLEELMQIAHCITLDCPASEISLLVLRLSELVTGHLGGPVKDANIILAKWMEISTELRTSLHTSVLPIGSLKIGLSRHRALLFKVLADHVGIPCRLVKGSHYTGVEDDAVNIVKLPNDSEFLVDLRGAPGTLIPADVLSAKDASFNSPKLNKIPSLPSNSHSGVSYPRRNLLSGQNSVLGDDFSGRSKPEKIESVHSISDAGGSSTAGSSGINKRPSSNQVDWTSPLAIGTSLYKGGRGPNAAGDGLRLNVNVVPYDQNNPEDPKNLFADLNPFQIKGSGNTLLQKNPARNKVSELQQPINTLIPGRPPAPMMWKNRYAPNEVPRKNESDSEGLFPKKNGGSSGYNISSIASTSSNIPQKSSTDTSRLHGNSRPAYRGNDEVASTRNNSSILSAELEFRRLSVQNSQNNNRETSQWEGHSLQSDDLNRTQAYGDDIIVESDHTRNLQAQSIGTNIKLKEPENPTSSGNLGPSQVDPVFDDVGDCEIPWEDLVIGERIGLGSYEKFTHADWNGTEVAVKKFLDQDFSGAALAEFKREVRIMRRLRHPNVVRFMGAITRPPHLSIITEFLPRGSLYRIIHRPHFQIDERQKIKMALDVAKGMDCSHTSNPTIVHRDLKSPNLLVDTDWNVKVCDFGLSRLKHNTFLSSKSTAGTPEWMAPEVLRNEPSNEKCDIYSFGVILWELATLRLPWSGMNPMQVVGAVGFQNKRLEIPKELDPIVARIIWECWQTDPNLRPSFAQLTVALTPLQRLVIPAYVDQLNSRLPQEISVNSTP

SEQ ID NO: 9271 - protein, 575 aa, Lactococcus lactis
MKKIKLEKPTSGSQLVLQTLKELGVEIIFGYPGGAMLPLYDAIHNFEGIQHILARHEQGATHEAEGYAKSSGKVGVVVVTSGPGATNAVTGIADAYLDSVPLLVFTGQVGRQSIGKDAFQEADTVGITAPITKYNYQIRETADIPRIVTEAYYLARTGRPGPVEIDLPKDVSTLEVTEINDPSLNLPHYHESEKATDEQLQELLTELSVSKKPVIIAGGGINYSGSVDIFRAFVEKYQIPVVSTLLGLGTLPISHELQLGMAGMHGSYAANMALVEADYIINLGSRFDDRVVSNPAKFAKNAVVAHIDIDAAELGKIVKTDIPILSDLKAALSRLLQLNKVRTDFNDWIKTVIENKEKAPFTYEPQNHDIRPQETIKLIGEYTQGDAIIVTDVGQHQMWVAQYYPYKNARQLITSGGMGTMGFGIPAAIGAKLAQPNKNVIVFVGDGGFQMTNQELALLNGYGIAIKVVLINNHSLGMVRQWQESFYEERRSQSVFDVEPNFQLLAEAYGIKHVKLDNPKTLADDLKIITEDEPMLIEVLISKSEHVLPMIPAGLHNDEMIGLHFTDKNEEIDNA

SEQ ID NO: 9272 - protein, 321 aa, Haemophilus influenzae 86-028NP
MIKKIAVLTSGGDAPGMNAAIRGVVRSALAEGLEVFGIYDGYQGLYNNKIKQLNRYSVSDVINRGGTFLGSARFPEFKDPNVRAKCAEILRSHGIDALVVIGGDGSYMGAKLLTEEHGFPCVGLPGTIDNDVAGTDYTIGYQTALQTAVDAIDRLRDTSSSHQRISIVEIMGRHCSDLTISAGIAGGCEYIVASEIEFNREELIQQIERSIIRGKRHAIIAITELLTDVHSLAKEIEARVGHETRATVLGHIQRGGSPCAFDRILASRMGAYAVDLLLQGKGGYCVGIQNEQLVHHDIIDAINNMQRVFKADWLKVAKRLE

SEQ ID NO: 9273 - protein, 156 aa, Haemophilus influenzae
NRANTPVLVDGKDVMPEVNAVLAKMKDFCQRIISGEWKGYTGKAISDVVNIGIGGSDLGPYMVTEALRPYKNHLNMHFVSNVDGTHIAETLKKINPETTLFLVASKTFTTQETMTNAQSARDWLLKAAKDESAVAKHFAALSTNAKDVEKFGIDTN

SEQ ID NO: 9274 - protein, 168 aa, Oryza sativa (japonica cultivar-group)
MAALPLATAELCDANAHLIMNGELRALQPVFQVYGRRQVFAGPIVTLKVYEDNVLVREFLEEKGQGRVLVVDGGGSLRCAILGGNPVQQAQNNGWAGIVVNGCIRDVDEINGCDIGVRALNSHPMKANKKGIGEKHVPVTIAGTRICDGEWLYADTDGILISRTELTV

SEQ ID NO: 9275 - protein, 486 aa, Odontella sinensis
MTNKSNKILNTNITKLVNQPYKYGFSTVIEKDIIEKGLNEDVICLISKKKNEPKFLLEFRLKAFKKWKEMKCPDWAQIKFSEIDYQDIIYYSAPKVKKKLNSLDEVDPELLKTFEKLGISLTEQKRLANVAIDAVFDSVSIATTFKEELAECGVIFSSISEAIQEYPELIEKYLGSVVPIGDNYFSALNSAVFTDGSFCYIPKDTICPLELSTYFRINDQKSGQFERTLIVAEKNSQVSYLEGCTAPQYDSNQLHAAVVELVALENADIKYSTVQNWYAGNNYGEGGIYNFVTKRGLCAGSNSKISWTQVETGSNITWKYPSCLLVGDKAKGEFYSVALTNNYQQADTGSKMIHVGKNTRSRIVSKGISAGNSKNTYRGLVNISNKAIGARNYSQCDSLLIGNLSNANTFPFISVQNPTAKIEHEASTSKIGEEQIFYFLQRGIPIEKGVELMISGFCQEVFTELPLEFAAEADRLLTLKLEGSVG

SEQ ID NO: 9276 - protein, 117 aa, Fragaria x ananassa
  misc_feature (99)..(99): Xaa can be any naturally occurring amino acid
MAISTAMKLSLVALLCIVVALPIAQAITCGQVASSIAPCVNYVKSGGAVPAGCCNGIRSLNSAAKTTADRQTTCNCLKQASGAIKGLNPNLAAGLPGKXGVNVPYKISTSTNCAAVK

SEQ ID NO: 9277 - protein, 117 aa, Fragaria x ananassa
MAISTAMKLSLVALLCIVVALPIAQAITCGQVASSISPCVNYVKSGGAVPAACCNGIRSLNSAAKTTADRQTTCNCLKQASGAIKGLNPNLAAGLPGKCGVNVPYKISTSTNCAAVK

SEQ ID NO: 9278 - protein, 385 aa, Lycopersicon esculentum
MANEEAEKKKNTSSSEAKQPLKTAKKKTLGWMEWLRGWFYLVYEMLFQRILASHLQNPMPLPPINDVTCIVTGSTSGIGREIARQLAEAGAHVVMAVRSTNRAQELIRKWQEEWSGKGLPLNIEVMELDLLSLDSVARFAEAWNARMAPVHVLINNAGIFSIGEPQKFSKDGYEEHMQVNHLAPAMLSILLLPSLIRGSPSRIVNVNSTMHYVGFVDPEDMNVVSGKRKYTSVVGYGGSKLAQIMFSSILHKRLPAESGISVVCNTPGIVLTNVARDLPQFLQVGYRLIPYFIFNAEEGSRSTLFAATDPQISEYCEMLKADDWPVCAYISHDCRPTNASEEAHNIETSYKVWEKTLELVGLPSDAVERLIEGEEIKCRYGNSQE

SEQ ID NO: 9279 - protein, 117 aa, Fragaria x ananassa
MASAVMKLALVALICIVVAVPVAQAAITCGQVTHNVAPCFNYVKSGGAVPAACCKGVSNLNSMAKTTADRQQTCNCLKSAAGSIKGLNANLAAGLPGKCGVNVPYKISTSTNCNNVK

SEQ ID NO: 9280 - protein, 385 aa, Solanum bulbocastanum
MANEEAEKKKNTTSSEAKQPLKTAKKKALGWMEWLRGWFYLVYEMLFQRILASHLQNPMPLPPINDVTCIVTGSTSGIGREIARQLAEAGAHVVMAVRSTNRAQELIRKWQEEWSGKGLPLNIEVMELDLLSLDSVARFAEAWNSRMAPVHVLINNAGIFSIGEPQKFSKDGYEEHMQVNHLAPAMLSILLLPSLIRGSPSRIINVNSTMHYVGFVDPEDMNVVSGKRKYTSVVGYGGSKLAQIMFSSVLQKRLPAESGISVVCNTPGIVLTNVARDLPQFLQVGYRLIPYFIFNAEEGSRSTLFAATDPQISEYCEMLKADDWPVCAYISHDCRPTNASEEAHNIETSYKVWEKTLELVGLPSDAVERLIEGEEIKCRYGNSQE

SEQ ID NO: 9281 - protein, 536 aa, Prochlorococcus marinus
MAKDPGRVLIFDTTLRDGEQSPGASLNLEEKLAIAQQLARLGVDIIEAGFPYASQGDFKAVQRIADQVGGEEGPIICGLARASKADIKACAEAIAPAPRKRIHTFIATSDIHLKHKLRKSRADVLKIVPEMVGYARSLASDVEFSCEDAARSDPDFMYEVIESAIAAGAGTINIPDTVGYITPAEFGDLIIGINKNVSNIDESILSVHGHNDLGLAVANFLEAVKNGARQLECTINGIGERAGNAALEELVMALHVRRRYFNPFFGKDSESPTPLTAIRTEEITKTSRLVSNLTGMVVQPNKAIVGANAFAHESGIHQDGVLKNPLTYEIVDAKTVGLAENRISLGKLSGRSAVRARLEELGYDLTREDLNDAFARFKDLADRKREISDRDLEAIVSEQVMQPEARFKLHLVQVSCGTALRPTATVTIADQDGIENTAVALGTGPVDAVCKALRSLTNEKNDLIEFSVKSVTEGIDALGEVTIRLRRDGKIFSGHSADTDVVVAAAQAYINALNRLVYSLKKSSLHPQHDVVKANL

SEQ ID NO: 9282 - protein, 570 aa, Apium graveolens
MATGGDQDVYGEDCAAEDQLVTPWTISVASGYTLLRDPHHNKGLAFTEKERDAHYLRGLLPPAIISQQQQEKKLMQNLRSYEVPLHRYMAMMELQERNERLFYKLLIDNVEELLPVVYTPTVGEACQKYGSIFRRPQGLYISLKEKGKILEVLKNWPEKNIQVIVVTDGERILGLGDLGCQGMGIPVGKLALYTALGGVRPSACLPITIDVGTNNESLLNNEFYIGLKQRRATGKEYADLLQEFMTAVKQNYGEKVLVQFEDFANHNAFELLSKYSTTHLVFNDDIQGTASVVLSGIVSSLKLIGGMLADHTFLFLGAGEAGTGIAELIALEMSKQTKIHLEETRKKIWLVDSKGLIVSHRKESLQHFKKPWAHEHEPCTTLIDAVKAIKPTVLIGTSGQGKTFTKEVVEAMASFNKKPLIMALSNPTSQAECTAEEAYNWSEGRAVFASGSPFDPVKYNNQLYIPGQANNAYIFPGLGLGLVMSGAIRMHDEMLLAASEALACQVTQEHYDKGMTFPPFSNIRTISANIAAKVAAKAYDLGLATRLPRPEDLVKFAESCMYSPNYRIYR

SEQ ID NO: 9283 - protein, 315 aa, Prochlorococcus marinus
MALDQVRIASRRSQLAMVQTNWVKEELEKACPSIDISIEAMATQGDKILDVALAKIGDKGLFTKELEAQMLIGRADIAVHSLKDLPTNLPEGLMLGCITKREDPADALVVNKKYKNYQLNDLPEGSVVGTSSLRRLAQLRHHYPGLIFKDVRGNVITRLEKLDSGEYDCLILAAAGLTRLGFGNRIHQLIPSEISLHAVGQGALGIECVKDKEEILQIIKVLEHKESSLRCLAERAFLKELEGGCQVPIGVNSKIQGQELILTGMVASLDGKQLIRDTKTGSSMHPETIGIELANTLKSQGAMEILEVIFKEARA

SEQ ID NO: 9284 - protein, 330 aa, Pectobacterium carotovorum
MSQSTLKVNELHEETDFDENGLDVFDDKALAEEDTNDSDSAEDELLSQGVPQRVLDATQLYLGEIGYSPLLTAEEEVYFARRALRGDIPSRRRMIESNLRLVVKIARRYNNRGLALLDLIEEGNLGLIRAVEKFDPERGFRFSTYATWWIRQTIERAIMNQTRTIRLPIHIVKELNVYLRTARELSHKLDHEPSAEEIAEQLDKPVDDVNRMLRLNERITSVDTPLGGDSEKALLDILADEKDNGPEDTTQDNDMKQNIVKWLFELNAKQREVLARRFGLLGYEAATLEDVGREIGLTRERVRQIQVEGLRRLREILQVQGLSIEELFRE

SEQ ID NO: 9285 - protein, 271 aa, Ralstonia eutropha JMP134
MTQAFALTHPDQQRLQNLDGFSVEIDPARERADIILHRPPYNVISMAARDQIRAVFETLDADDRVRVIVLRSQGEHFSSGGDIKGFLEASPEHVSKLAWNIAAPARCSKPVIAANRGYCFGVGFELSLACDFRIATHTTEYALPEQKLGQIPGSGGSARLQKMVGVGRTKDIVMRSRRIPGRQAYDWGIVVDCVADAELEAATDALADELRAFSPLAQRTAKKLLNDTEDAPLSIAIELEGHCYSRLRSSDDFREGVEAFHEKRKPAFRGS

SEQ ID NO: 9286 - protein, 541 aa, Deinococcus radiodurans
MSRLTDLPAWQALEDHYYELQGTHLRELFAADPERGEKMNAEGAGLYLDYSKHRVTDETLRLLRELAQATGVEARRDAMFRGEKINVTEGRAVLHTALRAPRDAVIEVDGKNVVPEVHEVLDRMATFADAVRSGEWLGYTGKPIKNIVNIGIGGSDLGPVMAYEALKHYAQRDLTVRFVSNVDGTDLTEKTRDLDPEVTLFIVSSKTFTTQETMTNARSARKWLLGSLKDDAAVTRHFVAVSTNAEEVQKFGIDTANMFGFWDWVGGRYSMDSAIGLSLMVAVGPEHFREMLAGFHDMDEHFRTAPAEQNLPMLMGLLGVWYGDFFGAESLAVLPYDQYLASFPAYLQQLDMESNGKHVTLGGEPVDYQTGPIVWGQAGTNGQHAFYQLIHQGTKLIPCDFIGFCQTLNPLPPHHDLLMANVFAQTEALAFGKTLEQVLADGVAPEVAPHRVFEGNRPTSTILADRLTPRTLGALIALYEHKVFVQGAVWDINSFDQWGVELGKVLAKKIDGELQSEGEPELQHDSSTNALIRRYRARRQG

SEQ ID NO: 9287 - protein, 463 aa, Prochlorococcus marinus str. MIT 9211
MMGEKNTNDSTHIENVVIIGSGPAGYTAAIYAARANLQPLLVTGFAKGGIPGGQLMTTTFVENFPGFPDGVLGPELMDLMKAQALRWGTNLLEADAEEIELKKPPFIIKTTEETIRTNSLIIATGARANKLGIPSEVRFWSRGISACAICDGATPQFRNEELAVVGGGDSACEEAVYLTKYGSHVHLLVRSNQLRATASMSDRVISNPQISVHFETELLDAEGKDWLEKVLIKRKGSNQTRSISVKGLFYAIGHTPNIDLLKNQLEIDNKGYIITKDGRPETSINGVFAAGDVADKEWRQGITAAASGCKAALAAEKWLSKENLASLIKRKNSEPEPSPKNKSTQTTTEETFSEEAIWQKGSYPLRKLYHESNKPLLIVYTSKSCGPCHVLKPQLKRVLNELKGQALGVEIDIELDTEIAKQAGVNGTPTVQLFKSKKLHNEWQGVKQRSVFKEEIINLLKKD

SEQ ID NO: 9288 - protein, 157 aa, Griffithsia japonica
ARGKMKWSVEDNVPDMTGKTVLITGSNSGLGYHCADQLLSRGATIVLACRNADKMGAAAVSLQAAHGTPASRILQLQLDVSDLVSVRAAPAALLELGVSALYGLVLNAGVNGRDVVTFTTDGLERVFVTNILGHWLLTGLLLPLMRDVEGSRVVAVS

SEQ ID NO: 9289 - protein, 361 aa, Gibberella zeae PH-1
MPSTTHSEFGTNTEAIDVAKAFSDGIHGETILITGVNRGGIGFSTAQAFIKSTQDPALIIIANRTLAKANDSIDNLKAEFPNVNYRFLEVDLSSQTSVRKAAEQVISWSDVPTIDLVINSAGVMGINERTITEDGLEMHLATNHIGHWLLTCLIMPKLIKAAEDKPKGSVRIVNITSASPMRSAMRWSDMNFDKKNKDLPQEEQPVYQFLKLWGYTDVEDAAYLPLDGYNRSKVANVLFGIGATKRLFNKYGILSLSAHPGVIWGTELGRNFPQATIDAAKKMGEKGLYTLKSLGAGASTGLVAALDPKLAVDVCEGEGNHGSYLVDCQISDQANPLAVSSSEAERLWEVSEKATGSEFAW

SEQ ID NO: 9290 - protein, 118 aa, Streptococcus pyogenes MGAS10394
MYNRLIIKMKWRKKMALEVTDATFVEETKEGLVLIDFWATWCGPCRMQAPILEQLSQEIDEDELKILKMDVDENPETARQFGIMSIPTLMFKKDGEVVKQVAGVHTKDQLKAIIAELS

SEQ ID NO: 9291 - protein, 108 aa, Vibrio vulnificus CMCP6
MSDKILQLSDEGFENDVINAAGPVLVDFWAEWCGPCKMIAPILDEIAEEYEGKLTIGKLNIDHNAGTPPKFGIRGIPTLLLFKNGSVAATKVGALSKTQLKEFLDANL

SEQ ID NO: 9292 - protein, 219 aa, Zea mays
  misc_feature (210)..(210): Xaa can be any naturally occurring amino acid
MAIPVRSAAAPRRLVPSIPPASSGHVRGLACFGTRTGPRGARGLSMVVADSTSRRAKQADGGDGVLGAPVLGGLGMEGLGDQLSVVMKFGGSSVSSAARMAEVAGLILTFPEERPVVVLSAMGKTTNNLLLAGEKAVGCGVIHVSEIEEWNMVKSLHIKTVDELGLPRSVIQDMLDELEQLLKGIAMMKELTPRTSDYLVSFGECMSTRXIFSAYLNKI

SEQ ID NO: 9293 - protein, 406 aa, Trichodesmium erythraeum IMS101
MTLRVAVVGSGPAGSSAAETLVKAGIETYLFERKLNNAKPCGGAIPLCMVSEFDLPPEIIDRRVRKMKMISPSNVEVDIHIEKEDEYIGMCRREVLDGFLRDRAASLGANLINGTVYKLDLPNNDREPYTIHYSDHSQGDIQGTAKTLKVDLVIGADGANSRVAKAIDAGDYNYAIAFQERIRLPDHLMAYYEDLAEMYVGDDVSPDFYAWVFPKYDHVAVGTGTMKVHQAKIKQLQAGIRARAAKRLEGGQIIKVEAHPIPEHPRPHRVRGRVALVGDAAGTVTKSSGEGIYFAAKSARMCAETIVEASNNGAIIPTEADLKLYLKRWDKKYGMTYKVLDILQRVFYRSDATREAFVEMCADRDVQKLTFDSYLYKTVVPANPLIQMKITAKTIGSMLRGHALAP

SEQ ID NO: 9294 - protein, 338 aa, Citrus sinensis
MGSIAETVCVTGASGFIGSWLIMRLLERGYAVRATVRDPDNKKKVKHLLELPKASTHLTLWKADLAEEGNFDEAIRGCTGVFHLATPMDFESKDPENEVIRPTINGMVSIMRACKNAKTVRRLVFTSSAGTLDVEEHRKPVYDETSWSDLDFVRSVKMTGWMYFVSKTLAEQAAWKFAEENNIDFISIIPSLVVGPFLTSSMPPSLITALSPITRNEAHYPIIKQGQFVHLDDLCSAHIFLFEHPNAKGRYICSSHPATILELAKFLREKYPEFNVPTEFEDVDENMKNMLFSSKKLTDLGFKFKYSLDDMFTGAVDTCRAKGLLPLLCENHVSEVSI

SEQ ID NO: 9295 - protein, 258 aa, Rhodospirillum rubrum ATCC 11170
MAYENILVETNGKVGIVTLNRPKALNALSAGLVRDLGAALDAFEADVNVHVIVLTGSDKAFAAGADIKEMAEKSYMDAYLEDFITKGWERVTTCRKPIIAAVAGFALGGGCEMAMMCDFIIAAQNAKFGQPEINLGTLPGAGGTQRLTRFVGKSKAMDMCLTGRMMDADEAWKCGLVSRIVPVDDLKDEVLKIAEAIADKSLPITMMVKEAVNAAYETTLAQGVRFERRLFQASFATDDQKEGMNAFIEKRQPSFTDR

SEQ ID NO: 9296 - protein, 438 aa, Pseudomonas syringae pv. phaseolicola 1448A
MATPPETPSLRRAITAPMLTLFILGDVLGAGVYALAGTIAGRVGGAIWAPLLIALCFALLTAASYAELVTKYPRAGGAAVYAEKAFGKPLLSFLVGFSMVAAGVTSAAGLAVAFAGDYFQALVSWPAQWVCVGFLVIVALLNARGIKESLSANLVMTLIELSGLAMVIAAAVWFVSQGNGVPQRVFELDTNSPATAILAASLLAFYSFVGFETSANLAEEIKDVRRIYPRALFGALLIAGVVYMLVGVGAAMVLPVEQLKASQAPLMDVVSASGLGIPAPWFAVIALIAVANGALLTMIMASRLTFGMAREGLLPAVMGSVLPQRRTPGVAIFATTVVAIALSFTSTLTTLAETVVLLLLFVFLSVNIAVLVLKRDKVEAGHFQVHWVIPVLAILSCLLLLTQQGPETWLRAGMMLAVGVALYGLTRLGSSVLVSHPR

SEQ ID NO: 9297 - protein, 226 aa, Glycine max
MATPASITNVTVEFLQFPALVTPPASTKSYFLGGAGVRGLNIQEEFVKFTGIGVYLEDKAVSSLGAKWKGKSAAELLDSLDFYRDIIKGPFEKLIRGSKLRTLDGREYVRKVSENCVAHMESVGTYSEAEEKAIEEFRNAFKDQNFPPGSTVFYKQSPTGTLGLSFSKDETIPEHEHAVIDNKPLSEAVLETMIGEIPVSPALKESLATRFHQFFKELEANPNIEN

SEQ ID NO: 9298 - protein, 261 aa, Proteus sp. LE138
MSQSLHLTTRGSVLEIILDRPKANAIDAKTSHEMGEVFMRFRDDPSLRVAIITGAGERFFCAGWDLKAAAEGEAPDADFGAGGFAGLTELFDLNKPVIAAINGYAFGGGFELALAADMIICSDNASFALPEAQLGIVPDSGGVLRLPKRLPPAIVNEMLMTGRRMNAQEALRWGIANRVVSATELMDSARELADQIANSAPLAVAALKEIYRATSELSIEEGYKLMRSGVLKYYPRVLHSEDALEGPLAFAEKRSPEWKGR

SEQ ID NO: 9299 - protein, 515 aa, Haemophilus influenzae 86-028NP
MTDRVIIFDTTLRDGEQALKASLTVKEKLQIALALERLGVDVMEVGFPVSSQGDFESVQTIARHIKNARVAALSRAVDKDIDAAYQALKVAEAFRIHTFIASSALHVEAKLKRSFDDVVGMAVAAVKRARNYTDDVEFSCEDAGRTGIDNICRIVEAAINAGATTVNIPDTVGFCLPNEYGNIIAQVRNRVPNIDKAVISVHCHNDLGMATANSLTAVQNGARQIECTINGIGERAGNTSLEEVVMAMKVRQDFMGVDTRINTQEIHRVSQMVSQLCNMPIQPNKAIVGSNAFAHSSGIHQDGMLKNKNTYEIMSPETIGLKKEKLNLTARSGRAAVKGHMADMGYNEQDYDLDKLYDAFLKLADKKGQVFDYDLEALAFIDMQQGDEDRLVLDKLSAHSTKEYPATAFVQLKLDGEKLSTSSIGGNGPVDAVYNAILNLTGLEIKMSHYNLTAKGEGAEALGQVDIVVEHKGRKFHGVGLATDIVESSALALVHAINAIYRAHKVADIKSHKHH

SEQ ID NO: 9300 - protein, 358 aa, Haemophilus influenzae 86-028NP
MQSYNVAVLAGDGIGPEVMAEAMKVLNKVQEKFGFKLNFNEFFVGGAAIDHCGYPLPAETLKGCDEADAILFGSVGGPKWTNLPPDQQPERGALLPLRKHFKLFCNLRPATLYKGLEKFCPLRADIAAKGFDMVVVRELTGGIYFGQPKGREGEGSQTKAFDTEVYYKYEIERIARAAFEAAMKRNKKVTSVDKANVLQSSILWRETVTEMAKDYPEVTLEHIYIDNATMQLIKAPESFDVLLCSNIFGDIISDEAAMITGSMGMLPSASLNEAGFGLYEPAGGSAPDIAGKGIANPIAQILSAAMMLRYSFNLNEAADAIESAVQKVLASGHRTADLADDSTPVSTAEMGTLITQAI

SEQ ID NO: 9301 - protein, 967 aa, Lupinus albus
MANRNLEKMASIDAQLRQLAPAKVSEDDKLVEYDALLLDRFLDILQDLHGEDMKETVQEIYELSAEYEGKHDPKKLEELGNLITSLDAGDSIVFAKAFSHMLNLANLAEEVQIAHRRRNNLKKGDFADENNATTESDIEETFKRLVRELKKSPQEVFDALKNQTVDLVLTAHPTQSIRRSLLQKHGRIRNNLTELYAKDITPDDKQELDEALQREIQAAFRTDEIRRTPPTPQDEMRAGMSYFHETIWKGVPQFLRRVDTALKNIGINERVPYNAPLIQFSSWMGGDRDGNPRVTPEVTRDVCLLARMMAANLYYSMIDDLMFELSMWRCNDELRVRADEISRSSKKDAVAKHYIEFWKIIPSSEPYRVILGDVRDKLYRKSRGSCHLLAQGYSEIPGEEILTSVDGFLELLELCYRSLCVCGDRAIADGTLLDFLRQVSTFGLSLVRLDIRQESDRHTDVLDAITQHLGIGSYQEWSEEKRQQWLLSELSGKRPLFGPDLPQTEEIKDVLDTLHVIAELPPDNFGAYIISMATAASDVLAVELLQRECRIKHPLRVVPLFEKLADLESAPAALARLFSIDWYRNRINGKQEVMIGYSDSGKDAGRFSAAWQLYKAQEELIEVAKKFGVKLTMFHGRGGTVGRGGGPTHLAILSQPPETIHGSLRVTVQGEVIEQSFGEQHLCFRTLQRYTAATLEHGMHPPISPKPEWRALMDQMAVIATEEYRSIVFQEPRFVEYFRLATPELEYGRMNIGSRPAKRRPTGGIETLRAIPWIFAWTQTRFHLPVWLGFGAAFRQVVPKDVRNLNMLQEMYNQWKFFRVTIDLVEMVFAKGDPGIAALYDRLLVSKNLWSFGEQLRTNFEETKKLLLQVAAHKDLLEGDPYLKQKLRLRDSYISTLNVCQAYTLKRIRDPNYDVKLRPHISKECIEISKVADELITLNPTSEYAPGLEDTFILTMKGIAAGLQNTG

SEQ ID NO: 9302 - protein, 394 aa, Legionella pneumophila str. Paris
MHLKRTLSLTLLAFYGLGTILGAGIYALVGEVAKEAAQFTPLSFLIASIIALFTAISYAELSSRLPHSAGSALYVRRAFHQKWLSGLIGWIVVLTGIISAATLSHGFVKYFQLFFPLPPSLIITILTVILAGVAIWGIRESATLILFMTLMEVGGLLMIIYYGRYSLASIDIKSFSFPHSFDGVLIGAFIAFYAFIGFEDMVNTAEETINPEKTLPKAIFLALISATILYIAVAWVIVLTIPSNTLVKTDMPLIEIIKLQGQSPLLFSIIALISITNGILVQIIMASRLIYGMANQQNAPQIFSSVYSKTQTPVHSTLLVFLMILLFAYALPITTLAKLTSSIILCIFIIIHASLIKIKLTEKKPTNAISFPIVFPMISILLTLAFLIIQFFLK

SEQ ID NO: 9303 - protein, 169 aa, Lycopersicon esculentum
MATQTSNPQSVYDFTVKDAKGKDVDLSIYKGKVLIIVNVASQCGLTNSNYTDMTELYKKYKDQGLEILAFPCNQFGGQEPGNIEDIQQMVCTRFKAEYPIFDKVDVNGDNAAPLYRFLKSSKGGFFGDGIKWNFSKFLIDKEGHVVDRYSPTTSPASMEKDIKKLLGVA

SEQ ID NO: 9304 - protein, 649 aa, Triticum aestivum
  misc_feature (618)..(618): Xaa can be any naturally occurring amino acid
MTSSSAARNQHLDELRALMASHSPPIHALLIPSEDAHQSEYVSERDKRRQFISGFTGSAGLALITTKEALLWTDGRYFLQATNQLSDRWRLMRMGEDPPVEVWIADNLSDEAVIGIDSWCISVDSAQRYEQAFLKNNQTLFQLSSDLVDEVWKDRPPNDATPVIVHPVEFAGRSVAQKMKELREKLQHEKASGIIITALDEVAWLYNVRGNDVHYSPVVHSYAIVTLHGAFFYVDKRKVTTEVKNYMSESGIDIREYDMVQLDVSLLASGQLKGSAVNGSLHMEKDINVAEHSKIWIDSNSCCLALYSKLRPDQALMLQSPIALPKAVKNPMELTGLRKAHIRDGAAVVQYLAWLDNQMQENYGASGYFSEANGSQKKEHLEIKLTEVSVSDKLEAFRAEKEHFKGLSFPTISSVGPNAAIIHYSPEANTCAELDADKIYLCDSGAQYLDGTTDITRTVHFGKPSEHQKSCYTAVLKGHIALDAAVFPNGTTGHALDILARTPLWKSGLDYRHGTGHGIGSYLNVHEGPHLISFRPSARNVPLQASMTVTDEPGYYEDGNFGIRLENVLIVKEADTKFNFGEKGYLSFEHITWAPYQTKLINTALLTPAEIEWVNLYXHSDCQKILESYLNVQEKEWLRKATEPITASS

SEQ ID NO: 9305 - protein, 412 aa, Cytophaga hutchinsonii
MTKEFNVYQYPNGITLLHKQVLSTRIAHCGYIFDVGSRDEDLKTQGLAHFWEHMAFKGTDKRKTFQILSSLEQVGGDLNAYTTKEKIWFHASLPFTYLERAADVLTDISFNSIFPEKEIEKEKKVVLEEMHMYADNPEDAIQDEFETLIFPEHSLGYNILGTEKTLQSFTQQNLKSFLKKNIDTSRVAFVVLSPQSFTEVKYITDKYIPHVKAQHSAKVREKNRGFKPATLIKKIDASQTHCVIGSLGLNIKEERRLGLFLLSNLLAGPGMTSTLNMAMREKKGYVYTIESNFTSYIDTGVYSFYFATESKQFEKALDVFHKEIAKVREKKLSTVQLHRLKEQIKGQLIMAEENNSNFMQMMGKSYLDFGKIDSFDHIIKKIDGISAEVINDLANQLMNPARMSKLIYEPEA

SEQ ID NO: 9306 - protein, 268 aa, uncultured alpha proteobacterium EBAC2C11
MKMLSSLWILASIILILILASAFFSSAETALTAASDARMRQLASKGDERALIVEALRADREGLIGSILIGNNAVNVFGSALATSVAISLFGEGGLVWATIAMTVLLVVFAEVMPKTYAFAYADRYALRIAPVLKWVVRLLSPLSLGLRLLANQMIRPNPIAESDREEELRGLIELQGDDGNADDRERKAMLSSILDLNELSVDQIMTHRGAVSMVNADDHMDDILRNVLGSPHTRHPVFSGKPDNIIGVLHVKDLLRALGEVEKKGKM

SEQ ID NO: 9307 - protein, 383 aa, Coxiella burnetii RSA 493
MKNQSVVIIGSGLAGYLFAKEFRKLDTTTPLEIITANEGVFYSKPLLSTALTNKKSADELAVCTADKMASQLQAIIHTHSMVEVIDPISQTVTTSHKKIAYKKLILACGSYPIAPSLQGDAVSDVHSVNDLTAYGRFRRWINNKNRIAVIGAGLVGCEFTNDLVNGGYQVEVITKEPYPLAKFVPEPIGRALQQALADKGVQWHLQQVASTVNRHQKDYEISMTKGKAVAADGIFSAIGIRARCDLAESINLDRKTGIIVDSYLKTSIENIYALGDCAEVAGEIRQYIAPLLQCARALANHFAGDKKPVHYPPMPIVVKTPACAIVTYPPPKTLKGEWQCNGEGNNQRALFYDHQEKLQGFALSGECVKERMSLTQQLPSVFE

SEQ ID NO: 9308 - protein, 428 aa, Cytophaga hutchinsonii
MRYTPIDNSFFIQNRSKLAEKLVPNALAIFHSNDIYPTNADGTMPFRQNNDLFYFSGIDQEDTILLVFPDASDKRYKEVLFILETNEHLAIWEGAKFSKEEAKKLSGIETIFWFHEFDAILKQLVYDATTIYCNQNEHGRAEKLIDTRNDRFVQTCKTRYPLHEYKRLAPLSNALRSIKSKSEIDTIQKACNITKDAFERILKSIKPGIKEYEIEADIIHEFIKQGSRGHAYQPIIAAGANACVLHYIQNDQVCKEGDLILMDFGAEYGNYASDLTRTVPVSGKFTARQKEVYTSVLTVFKQIKKCIKPGVTLQELNTQTGKFVTEELLRLHLLSKKEVDAPDGSLAYKKYFMHGIGHHLGLDVHDVHVKNEPLKEGMVITLEPGIYIPEEGIGIRLENDILLVTNGNIDLMEHIPLEIEAIESLMSS

SEQ ID NO: 9309 - protein, 295 aa, Mycobacterium fortuitum
MELATPPDTMAPVGSIVLDGKATRDEIFVDLKQRVAKLTEAGRTPGLGTVLVGDDPGSQAYVRGKHADCAKVGINSIRRDLPADITQAQLDETIDELNANPDCTGYIVQLPLPKHLDENAALERIDPAKDADGLHPTNLGRLVLGKDAPLPCTPRGIVHLLRRFDVPIAGAHVVVIGRGVTVGRPMGLLLTRRSENATVTLCHTGTRDLPALTRQADIIIAAVGVPHMVTADMVKPGAAVVDVGVSRVDGKLTGDVAPDVWEVAGHVSPNPGGVGPLTRAFLLTNVVELEESKLA

SEQ ID NO: 9310 - protein, 321 aa, Helicobacter hepaticus
MAKQSGADRELVIGSRGSILALWQAEYIKSCLKAQCGLQSRIQIIKTRGDKILDVPLAKIGGKGLFTKELEEMLLSKDIDLAVHSLKDVPVEFVPELDLAAITQRESANDCFLSVNYPNLNALPQGAKVGTTSLRRSMQIKKYRSDLDTLSLRGNVQTRLEKLHNGAFDAIILAQAGVNRLKINTQDVRYIVPLDFMIPAMGQGALGIEMRKDSIFFDRIAVLNDKQSALCVSAERAFVRTLEGGCQVPIGVYAQFSNNKLTLQAIVGLPDGSEVLQDSVEDSINIDDINASENLGIAFAQKFIDKGAKELLERAAKIAFA

SEQ ID NO: 9311 - protein, 392 aa, Chlorobaculum tepidum
MTQTANAAKKTTSTKASAAKEAKVKVTAEEKAVTEVKKPAAKKKSALAFPFTAIVGQEEMKLSLILNIIDPRIGGVLVMGHRGTGKSTTVRALAEVLPLIPRVKGDIYNRTVEQYIEMEAAGKGAPAIKPEDVETELIPVPVVDLPLGATEDRVCGTIDIEKALTSGVKAFEPGLLAQSNRGFLYIDEVNLLDDHLVDVLLDVAASGKNVVEREGISIRHPARFVLVGSGNPEEGELRPQLLDRFGLHARITTINDVAKRVQIVKLRREFDEDPEAFMKKVSREQQKLRKKIVAAQQLLPQVTMDDAVLTDIAKLCMNLGIDGHRGELTITRTAHAYAAWEGDKKVTMKHVREIAGLCLRHRLRKDPLETVDAGEKIDRELAKVLGEAEAAA

SEQ ID NO: 9312 - protein, 90 aa, Arabidopsis thaliana
  misc_feature (12)..(12): Xaa can be any naturally occurring amino acid
  misc_feature (46)..(46): Xaa can be any naturally occurring amino acid
VRASLHRYEEAXSDAKKTIELKPDWSKGYSRLGAAFIGLSKFDEAXDSYKKGLQIDPSNEMLHSALTAASRSMISIYFISYAFVFKRRDI

SEQ ID NO: 9313 - protein, 406 aa, Mycobacterium tuberculosis H37Rv
MNAHVTSREGVNEFDDGIVIVGGGLAAARTAEQLRRAGYSGRLTIVSDEVHLPYDRPPLSKEVLRSEVDDVALKPREFYDEKDIALRLGSAAVSLDTGEQTVTLADGTVLGYDELVIATGLVPRRIPSLPDLDGIRVLRSFDESMALRKHASAARHAVVVGAGFIGCEVAASLRGLGVDVVLVEPQPAPLASVLGEQIGQLVTRLHRDEGVDVRTGVTVAEVRGKGHVDAVVLTDGTELPADLVVVGIGSTPATEWLEGSGVEVDNGVICDKAGRTSAPNVWALGDVASWRDPMGHQARVEHWSNVADQARVVVPAMLGTDVPTGVVVPYFWSDQYDVKIQCLGEPHATDVVHLVEDDGRKFLAYYERDGVLVGVVGGGMAGKVMKVRGKIAAGAPIAEVLDQTQA

SEQ ID NO: 9314 - protein, 143 aa, Chlamydomonas reinhardtii
LIYSVHAEQSSTIHLHRTLNMVKDLGCKAGVVLNPGTSLSTIEEVLDVVDLILIMSVNPGFGGQKFIESQVAKIRNLKRMCNEKGVNPWIEVDGGVTPENAYKVNSMTGANALVAGSAVFKAKSYRDAIHGIKVSKAPANVMA

SEQ ID NO: 9315 - protein, 86 aa, Brassica napus
  misc_feature (7)..(7): Xaa can be any naturally occurring amino acid
  misc_feature (12)..(12): Xaa can be any naturally occurring amino acid
  misc_feature (15)..(15): Xaa can be any naturally occurring amino acid
  misc_feature (22)..(22): Xaa can be any naturally occurring amino acid
  misc_feature (34)..(34): Xaa can be any naturally occurring amino acid
  misc_feature (41)..(41): Xaa can be any naturally occurring amino acid
  misc_feature (54)..(54): Xaa can be any naturally occurring amino acid
  misc_feature (66)..(66): Xaa can be any naturally occurring amino acid
  misc_feature (69)..(69): Xaa can be any naturally occurring amino acid
  misc_feature (85)..(85): Xaa can be any naturally occurring amino acid
KRRQEVXVYSMXSSXAVVTSPXQATMVAPFTGLXSSSAFPXTRKANNDITSIVXNGGRVNCMQGWXPPXEKKKFETLSYLPDLTXS

SEQ ID NO: 9316 - protein, 502 aa, Methanosarcina barkeri str. fusaro
MRNKKVTVFDTTLRDGEQTPGVSLTSAQKLEIARQLDKLGVDIIEAGFPISSEGDKESVKSISNAGLDLEVCGLARVLKKDVDACFDSDVGLVHTFVPTSEVQRTYTIKKSQEEVIQMAVETVQYIKDNGRRCMFSAMDATRTEPEYLIEVFKAVQEAGCDIINVPDTVGVMVPSAMYRQIKDIADEVTIPIDVHCHNDFGLAVANSLMAVEAGASQVQVTINGIGERAGNADLSQTVMSLTSIYGAKTNIHTEYLVETSKMIENYTGIRLPPNTPVVGQNAFSHESGIHSQGVLEKSDTFEPGIMTPEMVGHKRRIVLGKHTGKHAVKQSLESAGIISNDEQLDEIVSRIKEIANKGKHITDADLYAVASAVLGKASSEDELIKLKEVSVMTGNILTPTAVVKADIEGKETIAAKTGVGPVDAALKAVRDILGESNHFRLQEFRIDAITGGADALADVYIGLENEKGRVVTARSANPDIVMASVEALVNAMNLLYKREEKS

SEQ ID NO: 9317 - protein, 297 aa, Campylobacter jejuni RM1221
MNSLYETLGVSKNASADEIKKAYRRLARKYHPDINKEKGAEEKFKEINAAYEILSDEKKRAQYDQYGDSMFGGQSFHDFSRNTGGVNLDDILKDLFGGGFGGRSRGGFNGFSSKGFSSGFGGFGGFEEEILDSNLELHIPFEKAVKGGEHSFNFQGETIKFKIPHGIKEGEKLRIRSKGKQSRNGARGDLIIIVKIEESPIYTREDDDLYQKVDISLKTALFGGKINIKTLKEGKEEATINITPNSKNNQKIRLKGYGVQNRKSNIYGDMYLNLNVVLPNLDTLDEKFIELLKEKLP

SEQ ID NO: 9318 - protein, 488 aa, Polaromonas sp. JS666
MSAVLADAPSQALPSRVLHESLRIAGEKVSRDRVIEVKHPYSGKIVATVPKATLDDVRRALRIARDYRSTLTRHDRYRILMKAGELVAHRRDEIARLITLESGLCLKDTQYEVGRASDVMLFAANQALVDDGQVFSCDLTAHGKSRKVYTLKEPLLGAITAITPFNHPLNQVIHKIAPAVATNNRVVLKPSEKTPLAAYLIADILYEAGLPPQMLSVVTGDPAEIADELLTSPDVDLVTFTGGVAIGKYIAGKAIYKRQILELGGNDPIIVMDDADIEEAATLAASGSYKNSGQRCTAIKRILVQESVADRFVELLVEKTRALKYGDPFDPAMDMGTVIDEPAAIHFEKVVNEAIAQGAKLLVGNVRRGALYAPTVLDHVRPGMTVVREETFGPVSPVIRFKTLDEAIAIVNGTAYGLSSSLCTNRLDTITRVVQELHVGSVNVREVPGYRLEMTPFGGIKDSGLGYKEGVLEAMKSFCNTKTYSLPW

SEQ ID NO: 9319 - protein, 482 aa, Methanothermobacter thermautotrophicus str. Delta H
MQKPIKKDPNRYHGEKMTEFSEWFHNILEEAEIIDQRYPVKGMHVWMPHGFMIRKNTLKILRRILDRDHEEVLFPLLVPEDELAKEAIHVKGFEDEVYWVTHGGLSKLQRKLALRPTSETVMYPMFALWVRSHTDLPMRFYQVVNTFRYETKHTRPLIRVREITTFKEAHTIHATASEAEEQVERAVEIYKEFFNSLGIPYLITRRPPWDKFPGSEYTVAFDTLMPDGKTLQIGTVHNLGQTFARTFEIKFETPEGDHEYVHQTCYGLSDRVIASVIAIHGDESGLCLPPDVAAHQVVIVPIIFKKAAEEVMEACRELRSRLEAAGFRVHLDDRDIRAGRKYYEWEMRGVPLRVEIGPRDLEKGAAVISRRDTGEKVTADLQGIEETLRELMKDILENLRTRAWERMESEIREAETLEEASRIVDEKRGIISFMWCGEEECGMDVEEKVRVDILGIQEEGSGTCINCGREAPTGLTLPEHIS

SEQ ID NO: 9320 - protein, 358 aa, Ralstonia eutropha JMP134
MITNQQYKIAVIPGDGIGNEVVPEGIRVLEAASAKFGFKLAFTTYDWSCARYHSQGSMMPSDGIERLRDSDAIFLGAVGFPGVPDHVSLWNLLIPIRREFDQYVNLRPVRLLPGVPCPLANKKPGDIDFWIVRENTEGEYSQVGGRMFAGTEHEFVTQEAIFTRRGTDRIMRYAFDLAKKLGRNHVTSATKSNGIFHSMPFWDERFAAVGAEYPDIRTDQYHIDILAARFAMSPERFDVVVGSNLFGDILSDLGPGITGTIAVAPSANINPERKYPSMFEPVHGSAPDIAGQGIANPIGQIWSGAMMLEHLGQPEAAAAIMQAIETVLTHPDRVHTPDLGGRASTQQMGAEIARAVLA

SEQ ID NO: 9321 - protein, 221 aa, Aspergillus nidulans FGSC A4
MSFMRAGNIACSRVGRLVTYRNTRMLSATAFRAETSVKPSSSVADAPTTPLSESTLIQKETPAEAMTRHQPDYDATVDHGTSKFSPVPKRVMDGSEPGETVPAAVLSGAPTDLQARTVRIFRPSKPATQSGEWHSHHWRMDWDILQKGHRWENPLMGWQSSADAMQGTHLNFKTKEDAILFAQKQGYEYFVQEPNERKFVPKAYANNFVHEPKKLKHIRTK

SEQ ID NO: 9322 - protein, 420 aa, Zygosaccharomyces rouxii
MATHEEFIRTQVFGTVFEITNRYTDLNPVGMGAFGLVCSATDTLVGQPVAIKKIMKPFSTAVLAKRTYRELKLLKHLRHENLICLQDIFLSPLEDIYFVTELQGTDLHRLLQTRPLEKQFVQYFLYQILRGLKYVHSAGVIHRDLKPSNILINENCDLKICDFGLARIQDPQMTGYVSTRYYRAPEIMLTWQKYDVEVDIWSAGCIFSEMIEGKPLFPGKDHVHQFSIITDLLGSPPRDVINTICSENTLKFVTSLPHRDPVPFQERFKTVEPDAVDLLRRMLVFVPKKRITAADALVHPYLAPYHDPTDEPTAEAQFDWDFNDADLPVDTWRVMMYSEILDFHKIGGGDGQIDTNAAFDDQVAAAHAAAMAQHHHQTQQQSSGKHTNPTTSSSAATITVTVPIAITMPSLIMVIKRFTT

SEQ ID NO: 9323 - protein, 208 aa, Arabidopsis thaliana
  misc_feature (66)..(66): Xaa can be any naturally occurring amino acid
  misc_feature (123)..(123): Xaa can be any naturally occurring amino acid
  misc_feature (139)..(139): Xaa can be any naturally occurring amino acid
  misc_feature (150)..(150): Xaa can be any naturally occurring amino acid
  misc_feature (179)..(179): Xaa can be any naturally occurring amino acid
  misc_feature (186)..(186): Xaa can be any naturally occurring amino acid
TRKKKKKKSPYYPPPPTRGLTKSEEDLWLSSMVSSARMVASPAQVTMVAPFNALKTSGAFPVTREXNNDITSITSNGGRVNCMQGWPPIGKKNRDTLSYLPDLTDSELDKEVDYLIRTKWIPXDEFELKNGFVYPEHGXNSPGYYDGRDXTMRMLPLFSCTYSAQVLKEVGECKKEYPXAFIKIIXFNNTREVQSIRFIAYKTPSFTG

SEQ ID NO: 9324 - protein, 565 aa, Bradyrhizobium japonicum USDA 110
MRHGSFSGERRQVRSSYNMAFARPCTSRHGRSSFLAAFTPFRHRCILSRPTIPPRSNPINHLTGSAAMAVSQAIPITRHPFANGSYKQMLIDGKWVDAASGKRFETHNPATGELLATVAEGDKEDIDRAVAAARRAFEGPWSKVKPFERQNLLLRLADLVEKNFDELSQLDTLDMGAPLSRTRAYRLRAVGMLRYYAGQTTAIHGETIENSLPGEIFSYTLKEPIGVVGAIIPWNGPLTATIWKIGPAIATGCTVVLKPAEEAPLTSLRIAELAMEAGIPPGVVNVVPGYGETAGAALAAHPDVDKVAFTGSHVTGQSIIRASAGNLKRVSLELGGKSPDIVFADADLDAAVPGAAMAVFANSGQICSAGTRLFVEQSIYEEFVGRVAEFGKKLQVGNGLDPNVQIGPLVSEQQLERVTGYLDIGQKEGARALAGGGRVTEGALSKGFFVSPTVFAGVQDNMRIAQEEIFGPVISAIAFKDMDELVKRANNTTFGLGSGLWTRDVSKAHAVAKSLRAGSVWVNCYQAMDPAVPFGGYKMSGYGRESGKQHVEEYLNVKAVWIKTA

SEQ ID NO: 9325 - protein, 156 aa, Haemophilus influenzae
NRANTPVLVDGKDVMPEVNAVLAKMKDFCQRIISGEWKGYTGKAITDVVNIGIGGSDLGPYMVTEALRPYKNHLNMHFVSNVDGTHIAETLKKVNPETTLFLVASKTFTTQETMTNAQSARDWLLKASKDESAVAKHFAALSTNAKDVEKFGIDTN

SEQ ID NO: 9326 - protein, 365 aa, Synechococcus elongatus PCC 7942
MTRSYRITLLPGDGIGPEIMAVTVDILRAIGRQFDLNFEFEEALIGGSAIDATGEPLPEATLATCRNSDAVLLAAIGGYKWDSLPRSQRPETGLLGLRAGLGLFANLRPAAILPQLVDASSLKREVIEGVDLMVVRELTGGIYFGEPKGCFADEQGRQRAFNTMVYREDEIDRIGRVAFDIARKRGKRLCSVDKANVLEVSQLWRDRMTLLGSDYADVELSHLYVDNAAMQLVRWPKQFDTIVTGNLFGDILSDIAAMLTGSIGMLPSASLGAEGPGVFEPVHGSAPDIAGQDKANPLAQVLSAAMMLRYGLDEPEAAARIEAAVNQVLDQGYRTGDLYSEGMTLVGCKGMGDALLAALESPVSA

SEQ ID NO: 9327 - protein, 156 aa, Haemophilus influenzae
NRANIPVLVDGKDVMPEINAVLAKMKDFCQRIISGKWKGYTGKAITDVVNIGIGGSDLGPYMVTEALRPYKNHLNMHFISNVDGTHIAETLKKINPETTLFLVASKTFTTQETMRNAQSARDWLLKAAKDESAVAKHFAALSTNAKDVEKFGIDTN

SEQ ID NO: 9328 - protein, 620 aa, Chlorobaculum tepidum
MIAFTDIVGMDLAKQALMLLAVDPSLGGVVIPSTVGSGKSTLARAFADILPEGTPFVELPLNVTEDRLIGGVDLEATLASGQRVVQHGVLSKAHKGVLYVDSLSLLDSSAVSHIMDAMSRGAVIVEREGLSEVHPADFMLVGTYDPSDGEVRMGLLDRIGIIVPFTPVNDYRARKQIVSLVMGTRNEEDTQDELRMLRGIIGAAREQLHHVSITNEQIKGLIQTAISLGVEGNRVDIFAIRAAIANAALNQRTEVDDEDLKLAMKLVLVPRATRMPEREPNPEEMAQDEPPPQEEQPQDEAEDQNAPPDEADSDADEEQEETPDMIEELMMDAVETELPDNILNISLASKKKAKSGSRGEALNNKRGRFVRSQPGEIKSGKVALIPTLISAAPWQASRKAEQAKKGIKSTAALIIGKDDIKIKRFRDKSGTLFIFMVDASGSMALNRMRQAKGAVASLLQNAYVHRDQVSLISFRGKQAQVLLPPSQSVDRAKRELDVLPTGGGTPLASALLTGWETAKQARAKGITQIMFVMITDGRGNIPLGAAYDPNATKASKEELEKEVEALALSIQADGIASIVVDTQMNYLSRGEAPKLAQKLGGRYFYLPNAKAEQIVEAALS

SEQ ID NO: 9329 - protein, 407 aa, uncultured alpha proteobacterium EBAC2C11
MALIVQKFGGTSVADLDCIRHVAQRVKIEVDAGNEVAVVVSAMSGATNQLVDWASDIGALHDAREYDTVLATGEQVTVGLLAIALQNIGIDARSWLGWQIPIWSDNVHGAARIDAINGKAIIERLKNGQVAVIAGFQGIGPDGRITTFGRGGSDTSAVAVAAALEADRCDIYTDVDGVYTTDPRIAPKAKKLSRITFEEMLEMASSGAKVLQTRSVAMAMRHNVNLQVRSSFNDTTGTLVVSEDSVVEQETISGIAYSPNEAKITIIGLPDKPGIAAGVFGALADQQVNVDMIVQSASSAAKKTDISFSVGRDDLQKAVDIINKIKVKLEFESVDASPNVAKISVVGTAMRTQPGVAKTMFETLASKGVNMQVISTSEIKISVLIDTEYTELAVRSLHTAYGLDDDS

SEQ ID NO: 9330 - protein, 477 aa, Arabidopsis thaliana
MTMSENSRNLEAGLLLRKNQNDINECRITAVVLFSTFVSVCGSFCFGCAAGYSSVAQTGIINDLGLSVAQYSMFGSIMTFGGMIGAIFSGKVADLMGRKGTMWFAQIFCIFGWVAVALAKDSMWLDIGRLSTGFAVGLLSYVIPVYIAEITPKHVRGAFVFANQLMQSCGLSLFYVIGNFVHWRNLALIGLIPCALQVVTLSFIPESPRLLGKWGHEKECRASLQSLRGDDADISEEANTIKETMILFDEGPKSRVMDFFQRRYAPSVVIGVGLMLLQQLSGSSGLMYYVGSVFDKGGFPSSIGSMILAVIMIPKALLGLILVEKMGRRPLLLVNDLYLQASTGGMCFSSLLLSFSFCFRSLGLLGDPAPMFTCIGVVGFISSFAVGMGGLPWIIMSEIFPMNVKVSAGTLGTLANWSFGWIVAFAYNFMLEWNASGTFLIFFTICGAGIVFIYAMVPETKGRTLEDIQASLTDFLQ

SEQ ID NO: 9331 - protein, 746 aa, Oryza sativa (japonica cultivar-group)
MVIQDRVKLLTSLWGNYSIPKDNPYTDDSDLELEVWALGLRNPWRCSFDSARPSYFYRADVGQIQAFSTWYISEYVYSYVKISEYLLLVVAVQSREFPAFSHPPESSRTVEIARLLRTVTFIYFLPLDAPVQTRTKPPTDSDPTISIARSASLPDRSAPPPRAMADEAKAKGNAAFSAGRFEEAAAHFTDAIALAPDNHVLYSNRSAAYASLHRYPEALADAERTVALRPDWAKGCSRLGAARLGLGDAAGAVAAYEKGLALEPSNGALKDGLAHARQARRPAPASGAGAIGKVFQGPELWSRMAADPTTRPYLDQPDFMRMLRDVQRNPSSLNNYLSDPRMVQVLSLMLNLRLPNNDAPPRPPAQSTPPPPPQQQQHQPETKAREPEPEPEPMEVTEEEKERKERKAAAQEEKEAGNAAYKKDFETAIQHYTKAMELDDEDVSYLTNRAAVYLEMGKYDECINDCDKAVERGRELHADFKIISRALTRKGTALAKIAKCFKDYDVAIETYQKALTEHRNPDTLKKLNDAEIAKKELEQQEYYDPKIADEEREKGGDEDETLILVHSCAGNEFFKQQKYPEAVKHYSEALRRNPKDPRVYSNRAACYTKLGAMPEGLKDAEKCIELDPTFSKGYTRKGAIQFFMKEYDKALETYQAGLKHDPNNQELLDGVRRCVQRINKASRGELSQEELQERQNKAMQDPEIQNILKDPIMQQVLTDFQENPKAAQAHLKNPGVMQKIQKLKNA

SEQ ID NO: 9332 - protein, 360 aa, Cytophaga hutchinsonii
MEKKIAVLKGDGIGPEVTDQALKVLKAVEKTFGHKFHYTEALVGAVAIDATGNPFPEETLKVCQSSDAILFGAIGHPKYDNDPKAKVRPEQGLLAMRKALGLFANIRPVNTYKILENASPLRADLVQNVDFVVFRELTGGIYFGTRGRSEDGNMAFDTCTYTRDEILRISKLAFESARQRKNHVTLVDKANVLASSRLWREVVKEYHAANFADVTLDFMFVDNAAMKIIQQPAFFDVVLTENMFGDIITDEASVITGSMGMLPSASVGSVVGLYEPIHGSYPEGAGLNIANPNGAILSAALLLETSFGMVAEAKAIRAAVEKAMEDGILTIDIRREKPNSTTEVGDYVANLVAKGASVVA

SEQ ID NO: 9333 - protein, 330 aa, Wolinella succinogenes
MALKVAINGTGRIGLCACRVIGNRDDIELVALNTTAPIDTLVHLLKYDSVHRDYDAEKIDEQTIRIGKHRHVKVYSDRDPLKVPFGESGAKVVIECTGAFNSLEKSSIHLHGGIEKVVISAPADNAPTFVYGVNHESYQGESVVSNASCTTNCLAPIAKVLHEAFGIENGLMTTIHSYTNDQNILDVKHKDLRRARAAAMNMIPTSTGAAKAIGLVMPELKGKMSGFSVRVPTPDVSLVDLSVNLSCAITKESINAAMREAALGAMKGLLLVDEEKRVSSDFIGSPYSAIFVPDCTTVVGEKSAKVLAWYDNEMGYSHRLVDMALWVGTH

SEQ ID NO: 9334 - protein, 386 aa, Cytophaga hutchinsonii
MGKRIFVFDTTLRDGEQVPGCQLNTEEKIIVAKALDELGVDVIEAGFPVSSPGDFNSVVEITKAVTRPTICALTRAKEADINIAGEALRFAKRSRIHTGIGSSDIHIEHKLRSTRENILEMAVAAVKQAKKVVHEVEFFCEDAGRADQAFLARMVEAVIEAGADVVNIPDTTGYMLPWQYGERIKYLMDNVSNIDKAILSAHCHNDLGLATANSLAALQNGARQVECTINGIGERAGNTALEEVVMAMECHKETLGLETGINHKKLVPISHLVSTLMRMQVQSNKAIVGRNAFAHSSGIHQDGFLKHRETYEIIDPAAVGADSSSIILTARSGRAALNHRLATIGYMLSKDQLDQAYTQFLDMADHLRKVEDENLHELMRGKVYAK

SEQ ID NO: 9335 - protein, 232 aa, Chlorobaculum tepidum
MSSPSFNVEEHKKMLQSYFNGQGFQRWASIYGDDKLSTVRSTVRQGHAVMMDKAFEWLQKTGLPKGSKILDAGCGTGLFTIRLAKSGYRVKAADIAEQMVNKTREDAEKAGVAGNIKFEVNSIKSVSGTFDAVVCFDVLIHYPAEGFAHAFSNLAGLTKGPIIFTYAPFNNILAFQHWIGGFFPKKERRTTIQMIKDKEMQRVLSELGLKIVSQQKISFGFYHTMLMHVARR

SEQ ID NO: 9336 - protein, 510 aa, Oryza sativa
MDGNAKGGGHSEALKNYNLGRTLGIGSFGKVKIAEHKLTGHRVAIKILNRRQMRNMEMEEKAKREIKILRLFIHPHIIRLYEVIYTPTDIYVVMEYCKFGELFDYIVEKGRLQEDRVALRIFSQIISAVEYCHRNMVAHRDLKPENLLLDSKYNVKLADFGLSNVMHDGHFLKTSCGSPNYAAPEVISGKLYAGPEVDVWSCGVILYALLCGTLPFDDENIPNLFKKIKGGIYTLPSHLSALARDLIPRMLVVDPMKRITIREIRERQRFQIRLPRYLAVPPPDTAQQAKMIDEDTLQDVVNLGYGKDHVCESLRNRPQNEATVAYYLLLDNRFRATSGYLGADYQESLERNFNRFASSESASSNTRHYLPGSSDPHASGLGPHYPVERKWALGLQSRAQPREIMIEVLKALQDLNVSWKKNGQYNMKCRWSVGYPQATDILDVNHSFVDDSIIMDNGDVNGRLPAVIKFEIQLYKSRDEKYLLDMQRVTGPQLLFLDFCAAFLTKLRVL

SEQ ID NO: 9337 - protein, 190 aa, Cucumis sativus
NSLVIGAYGIVCSVLNSETNEMVAVKKIANAFDNHMDAKRTFREIKLLRHLDHENVIGIRDVIPPPLRREFNDVYISTELMDTDLHQIIRSNQSLSEEHCQYFLYQILRGLKYIHSANVIHRDLKPSNLLLNANCDLKICDFGLARPTSENECMTEYVVTRWYRAPELLLNSDYTAAIDIWSVGNRIPAA

SEQ ID NO: 9338 - protein, 735 aa, Robiginitalea biformata HTCC2501
MASQTLIQKENKEIAKQYKELLRISYQTLSDEDKRLIRQAFDVAVDAHKDQRRKSGEAYVFHPIAVPKIVASEIGLDAVSIASALLHDVVEDTPYTLNDIERMFGETVARIVDGLTKIAHLKKDTNISQQAENFRKMLLTLHDDVRVIIIKIADRYHNLLTMDAMPEHKQVKIASETLYIYAPLAHRIGLYNIKTELEDLSLKYTEPEVYNDILSKIEDTKEEQGKYIEDFTAIIQDSLDREGLNYHIKGRMKSIYSIRRKMQAQNVGFDQIYDKFAIRIIYKSDRKNEKFLAWKIYSIVTDHFTPNPVRLRDWISSPKSTGYEALHITVMGPKGRWVEVQIRSERMHEIAEKGYAAHFKYKHGDQKEQGIEIWLNRLQEALESSNGNAVDFVEEFKLNLYSKEIFVFTPTGDLKSLPKGATPLDFAFHIHTEVGLKTRGAKVNGKLVPLNTVLKSGDQVEIITSESAKPNQNWLDYATTGRARSKIRSSLREEKKELAMEGKEMLRRKLKSQKVTLNEDVVNKMVTYFKLQTSLDLFYRVGNGAIDNQQIRDFAASYNNAFISFFKNKIRRKEPPKDIDREEITSKYDMLVFGKEEEKLEYTLSKCCNPIPGDDVFGFVSVNEGIKVHKKNCPNAISLQSNYAYRIISAKWVDSTQQEFTAQIRMSGIDNMGLINDITDLISDEMHVNMRNINFSTDGGTFEGKITVVVKNKAILKKLVSNLKEINGIDKVVRT

SEQ ID NO: 9339 - protein, 486 aa, Ralstonia eutropha JMP134
MQIQNPSLFRQQCHVNGQWVDAADGEVVPVTNPATGQQLGTVPRMTAADVQAAIAAADRALPAWRATSSRERSRLLRRWFDLCMAHQEDLATILTLEQGKPLKESRGEIAYGSGFIEWFSEEARRIYGDVIPAPSSDRRIIVIKQPVGVVAAITPWNFPNAMITRKAGAALAAGCTIVIKPASATPFSALALAALAKEAGIPDGVLNVVTGSASVVGGELTSSPVVRKLSFTGSTDVGKTLLEQCAGTVKKVSMELGGNAPFLIFDDADLDAAVAGVMASKFRNAGQTCVCANRIFVQDGVYDAFAEKLRIAVEAQVVGDGMAPGVDLGPLIDDAAIEKVREHIYDAVSLGAQVFTGGRAHALGGRFFKPTILTDVSPKAKLMNEETFGPLAPLIRFKTEEEAVAMANDTPFGLAAYFYTTNYARSWRVAEALECGIVGLNEGLISTEVAPFGGVKESGVGREGSKYGIEDYVEVKYICAGGLALR

SEQ ID NO: 9340 - protein, 152 aa, Glycine max
MEETPQAPSPHKLIKVSAPSELHDFQQASRSTRSSMARMALLAVFAVLAALAVAEMASGAVTCGDVTSAIAPCMSYATGKASAPSAGCCSGVRTLNGKASTSADRQAACRCLKNLAGSFKGISMGNAATIPGKCGVSVSFPINTNVNCNNIH

SEQ ID NO: 9341 - protein, 272 aa, Griffithsia japonica
RFVQACTRRLMSDVPVGVFISGGLDSSLVASIAKKHLPDGYVFHSFSCGLEGSPDVRAAQKVADYLGTKHHVLTFTVEDGISALRDVIYHLETYDVTTIRASTPMYLLSRLCKQYVKVVLSGEGADEVYGGYLYFHNAETERDFHEETVRRVKLLYTSDVLRGDRSTAAQSLELRVPFLDRDFLDVSMSFSAQDKVTQKGKRIEKWPMRQAFAKEFCGEEFLPDDILWRSKEQFSDGVGYNWIDGLKEFCDKEVSDKLLANASDKFPHQPPK

SEQ ID NO: 9342 - protein, 489 aa, Burkholderia thailandensis E264
MTTAHETLALKDPALLRERAFVAGEWQAADGGATLEVRNPATGALIGTVPAMGAAETRRAIDAANAAWPAWRKKTAKERAAILRKWHDLMIAHADDLALILTTEQGKPLAEAKGEIGYAASFLEWFAEEGKRVYGDTIPSPANDKRIVVTKEPVGVCAAITPWNFPAAMITRKVGPALAAGCPIVVKPAEATPFSALAMAVLAERAGVPAGVFSVVTGEPKAIGGELTSNPIVRKLSFTGSTPVGRLLMAQCAATVKKVSLELGGNAPFIVFDDADLDAAVEGAIASKYRNSGQTCVCTNRFYVHEKVYDAFAEKLTAAVAKLKVGLGTEAGVVQGPLINGAAVQKVESHIADALDKGARVTTGGKRHALGHGFFEPTVLTGVTPDMKVAKEETFGPLAPLFKFSTEEEAIRYANDTEFGLAAYFYSRDIGRVWRVAEALEYGMVGINAGIISNEVAPFGGVKQSGLGREGSHYGIDDYVVIKYMCVAV

SEQ ID NO: 9343 - protein, 313 aa, Pseudomonas fluorescens Pf-5
MSSREIRIATRKSALALWQAEYVKARLQEAHPGLVVTLVPMVSRGDKLLDSPLSKIGGKGLFVKELETALLENQADIAVHSMKDVPMDFPEGLGLFCICEREDPRDAFVSNTYASLDELPEGSVVGTSSLRRQAQLLTRRPDLQIRFLRGNVNTRLAKLDAGEYDAIILAAAGLIRLGFEDRISSSISVDDSLPAGGQGAVGIECRSADIEIHALLAPLHHADTASRVTAERALNKHLNGGCQVPIACYAVLEGEQIWLRGLVGEPSGGLLLSAEARGPRASAAELGVQVADALLAQGADDILRAVYGEAGEE

SEQ ID NO: 9344 - protein, 381 aa, Candida albicans SC5314
MVAPALIYSNHELSTAIDSTHAFEGPEKLLEIWFYESKELSPINLRDIKFDTWIEILNLVHCEVLSKVSSNLCDAFLLSESSLFVFPHKIILKTCGTTTTLACLDLLFETVNKELLQNEGLKATFQSKNIYQIFYSRRSFMFPDRQIHVHGNWQEEVKLLNQYFNNGKSYIVGNNTNWHLYVGGNGKTKNPVASTTTTTTPVVNDCTLEIIMTQLSLEASQQFYTTRKPGDTAIDSNHDLGHDLGQEILKQTGLNELFKFKKQPTMPGLSSSPIKEIHDGFAFTPCGFSSNSINESDYYTIHVTPEPGWSYASFETNMIGDYKAIVDKCINVFQPGQFMVTFLTNTDMEKFECCLDDYKVNHREELDVEDYKLYFVEFVRQ

SEQ ID NO: 9345 - protein, 234 aa, Triticum aestivum
  misc_feature (91)..(91): Xaa can be any naturally occurring amino acid
  misc_feature (186)..(186): Xaa can be any naturally occurring amino acid
  misc_feature (210)..(210): Xaa can be any naturally occurring amino acid
  misc_feature (226)..(226): Xaa can be any naturally occurring amino acid
MADRLTRIAIVSEDKCKPKKCRQECKKSCPVVKTGKLCIEVSPVAKLAFISEELCIGCGICVKKCPFDAIEIINLPKDLEKDTTHRYGPNXTFKLHRLPVPRPGQVLGLVGTNGIGKSTALKVLAGKLKPNLGRFKNPPDWQEILTYFRGSELQNYFTRILEDNLKAIIKPQYVDHIPKAVQGNVXAVLEQKDERDMKNELCVDLELTQXIDRNVRDLSGGDLQRXAITVVAVQ

SEQ ID NO: 9346 - protein, 820 aa, Nostoc sp. PCC 7120
MPMSTLSFWQFFPSAKKPVCDSPSSLQTNPVRHSRSLLAKVIVGGTTLFVVVGAYFSYQTVRSIMLTNLKGQVLSEVEQSRDEIDHWLAMLKVRVEMLANTDLVRSVDWAIASKYLKAEDQRIEDFSLFGLTTPEGWRESTVPNSKRANVTDRRWFQRSIAGYVHVGDPMIARANGISSVPISSPIRRDGNLSSSPIGVVHGSVSVDRIKYVTETLKYGENSYAFTLNSAGQAIIHPNPAFMTTIEKPGIKLVEAADSGLAAIAQKMVNQQQGIELVTLDKTKKYVAFLPLKEANWSVALVIPRENIESQLKLLDIIALAILALAGTLIGVLVYVQSAEQTQLKQSKALADAAKESADSANNAKSEFLANMSHELRTPLNGILGYAQILGRSKVLPDKERQGVNIIHQCGSHLLTLINDILDLSKIEARKLELASQAFHLPSFMQGVVEICHIRVQQKGIEFHYEPDADLPAGISADEKRLRQVLINLLGNAIKFTDRGSVALRVQRTGLEESDPRTKLRFSIVDTGVGIASADINKLFQTFEQVGEQKRKVEGTGLGLAISQQLVQLMGGQIQVKSQLGVGSEFFFEIILPLASDWSQQQTASVGNIIGYEGVKRHILVVDDRWENRAVLLNLLEPLGFIITEAENGQAGLDQLQQHLPDLVITDLVMPVMDGFEMLRKIREQEQLRSLKILVSSASVAQIDQQMSIDAGGDDFLAKPVQVNDLFTLLEKHLELTWKTEDITHKSADQQQLTELIPPPLADLQSWLELVQEGRLKKLIAAAEQLAQESDRYQPFTQQIIQLAKQFQSEQLEQFIQQYLS

SEQ ID NO: 9347 - protein, 506 aa, Methanosarcina barkeri str. fusaro
MGSDSGTESAVDEIQKAAKSDEKFQEAVSAQNLEKKDPIKVIIIGGGACGMAVATKIRRQSDFEITVISRDSHTAYSHCGIPFVLGREIKSFEKLIVKPKDFFKRNRIDVRLNECVSSIDLDLKVVRTGERTYPFDKLVIATGSLPFIPLTGSTNVLPYGVFTLRNLDDGVLFEKALKTVERVCIIGAGTIGIECAVALSRRGVKAILINRSKNLLSRQLDPDISEIIREHLESLGIEVISGELAVYPENFWKEKILYVGERQLPADLVLLASGVKPEVSLALEAGIEIGKAGGIIVNEILQVKAGDKAREEFLPYVYAGGECVEVTDLITGEAKLSQLGTTARHMADIIGNNITGKSTPLGPLANPWVAVAGDLQFGGVGITSKEAESHGIKINTGFSLSRTRASYYPGRKDLYIKLLFKDDILVGAQLAGGEGIKERIDALSLAIRKKTTIRDLLDLETCYTPPVSMLVDPLRLAVKATIRNIKEKKGKQIQEKEMEGKQIQEK

SEQ ID NO: 9348 - protein, 968 aa, Tropheryma whipplei str. Twist
MHERHIGPSQEEIDHMLGFLGYKSLDDLMNAALPNGVQSPPDIKIPSHDELTCLTQLAAYAKMNRIKTSMLGQGFYNCITPAVIRRNILENPSWYTSYTPYQPEISQGRLEMLINFQTMICDLTGLEIANASMLDEASCAAEAMLLAKRVSRSSSNKYLVHNGVFPHIRRVLETRADAVGVEIVDLPEGQSIDFDHFGVYAQYQSASGKLLDLRHLFSRSKRAGAICVIGCDLLMLTLFTSPGELGADIAFGSAQRFGIPMNFGGPLASFLAARKAMERSLPGRLVGVSVDADSNHAYRLTLQTREQHIRREKATSNICTATVLMAIAAVAFAQHHGPKGLRAIAHRINTVAVGFARLLKQTAFRVSSLDIFDTIEINNPTQLCVEAESKHDLLFWKVDDNKLRITFDEVTARLDGDLPERLSKVFGISPDKIRDLGCNYDSCDCSFYSDSQQAREGLSSVASRNISVHSDLARHPLRRFSGYLKHPVFNNYTGEVALMRYLKALSDKDFALDRGMIPLGSCTMKLNAAFQLEPVLWPEFANLHPFAPRGDADGTLQIIDQIETWLANLSGYDAVSLQPTAGSQGELAGLLAIRGYYKSLNLDRDVCLIPASAHGTNAASAVLAGMRVVVVACDQQGNIDLDDLRLKASKNAHALAALMVTYPSTHGVYEDNISEVCSVVHKYGGQVYVDGANSNALIGYLRTGDFGGDVSHLNLHKTFGIPHGGGGPGIGPVVAKAHLAPFLPFRNRVHKPSTDLPAVKHMGGPIASSDYGFAGALYISWAYIFCLGSQGMKRCTAVAVLVANYIAKQLSDTFPVLYTGKNNLVAHEFIMDFREVTRVSGITVDDVCKRLIDYGFHAPTMSFPVPGTLMVEPTESEPFSEIQRFIKTIRSIRAEIDRVIDKTYDPDNNPLKRAPHTLEQIASDKWDRPYSRRTGIVYTSGKYWPASARIDNAYGDRNIFCTCPDLPD

SEQ ID NO: 9349 - protein, 483 aa, Staphylococcus epidermidis RP62A
MGSFFNRMTRKENPTIYQNKDGHLKRTLRVRDFLALGVGTIVSTSIFTLPGVVAAEHAGPAVALSFLLAAIVAGLVAFTYAEMASTMPFAGSAYSWINVLFGELFGWVAGWALLAEYFIAVAFVASGFSANLRGLIAPLGISLPKSLSNPFGSNGGVIDIIAAVVIILTALLLSRGMNEAARMENVLVILKVLAIILFVIVGLTAINFSNYIPFIPEHKVTETGDFGGWQGIYAGVSMIFLAYIGFDSIAANSAEAINPQKTMPRGILGSLIVAIVLFVAVALVLVGMFHYSQYADNAEPVGWALRESGHGIIAAIVQAISVIGMFTALIGMMLAGSRLLYSFGRDGLLPSWLSQLNHKHLPNRALVILTIIGVVIGSMFPFAFLAQLISAGTLVAFMFVSLAMYRLRKREGKDLPKPEFKLPLYPILPAITFILVLLVFWGLSFEAKLYTLIWFIVGIIIYLIYGIRHSKKNDEEAYQVPRE

SEQ ID NO: 9350 - protein, 403 aa, Streptomyces coelicolor A3(2)
MLSSQSAQIVRDTLPTVGASLGTITDLFYRRMFEERPELLRDLFNRANQASGVQREALAGAVAAFATALVKHPDERPDAVLGRIANKHASLGITSDQYTLVGRHLLAAVAEVLGDAVTPAVAAAWDEVYWLMANALIAMEARLYARSDVEDGSVWQSMEIVERHEETPDTASFVLRPADGSPTRPFVPGQYVSVRAELPDGAHQIRQYSLSSAPGGGTWRFTVKRERSLDGQVPDGEVSTWLHTHARPGDVLRVSLPFGDLLLPEGDGPLLLASAGIGVTPMLAMLEHLATAAPDRPVTVVHADRSPALHAHRLELTALVERLPHASLHLWYEDTADHPDASADHVNEGWADLTGLSPVPGTTAFLCGPLSFMKAVRTDLLAHGLSPRAIHYEVFGPDLWLSK

SEQ ID NO: 9351 - protein, 303 aa, Coccidioides immitis RS
MACFLVLKRLLLGPSPPSTQDRLRKRLEQRQLLSDEGESSLQNGQSRRLLDLEAQTYDTFDDNASNASTRSRINPRIISDAILGLSDGLTVPFALSAGLSALGNTKVVVLGGLAELAAGAISMGLGGYVGAKSEMESYQATRRETEELIDAAPEETATRVRQVFAEFGVPDSVVEDISNKLHDSPNLLMGFLLKFHHGEAEPNCNQAWISAITLALGYFVGGFIPLIPYFYIDKVLVALYWSIGVMGVTLLVFGYIKTCIVRGWYGRDNIIAGIKGGLQMILVGGLAAGAAIALVRAIDQGAG

SEQ ID NO: 9352 - protein, 289 aa, Campylobacter coli RM2228
MSILVNKNTKVIVQGFTGKEATFHAEQCMAYGTNIVGGVTPHKGGQTHLGKPVFDTVADAVKATGADVSLIFVPAFAVGDSVIEAADAGIKLAVVITEHTPVKDMMFAKQYANKKGMKIIGPNCPGIITSEECKLGIMPGFIFKKGCVGLISKSGTLTYEAANQVVQGGYGISTAVGIGGDPIIGLAYKELLSEFEKDNETKAIVMIGEIGGSLEVEAAKFIKENISKPVVAFIAGATAPKGKRMGHAGAIVGSADESAAAKKEALKSYGIHVVDSPALIGEEIQKILG

SEQ ID NO: 9353 - protein, 294 aa, Pisum sativum
MATVIDGKAVAQTIRSEIADEVRLLSQKYGKVPGLAVVIVGNRKDSQSYVGMKRKACAELGIKSFDIDLPEDASEAEIIKNVHELNANPDVHGILVQLPLPKHVNEEKVLTEISISKDVDGFHPLNIGKLAMKGRDPLFLPCTPKACLELLSRSGVSIKGKKAVVVGRSNIVGLPASLLLLKADATVTIVHSHTSQPETIIREADIVIAAAGQAKMIKGSWIKPGAAVIDVGTNSVDDPTRKSGYRLVGDVDFEEASKVAGWITPVPGGVGPMTVTMLLKNTLEGAKRTIEQNN

SEQ ID NO: 9354 - protein, 177 aa, Polytomella sp. Pringsheim 198.80
MSSRLYVGNLSWNAKEEDLRTYFGKFGEVEEASIALDRESGRSRGFGFVTLPADVAKDAIEKTNGAEFMGRNIKVNEASPPGERPPRTNNYGGGYGDFNGNGGGRDYGRGGYGRGNGGYGGRNAGYGGRGNFGGQGGYGDNRFGNDNFGGSYGGRGGYRGPRGPSAEENNSNNYGGY

SEQ ID NO: 9355 - protein, 438 aa, Polaromonas sp. JS666
MSQAPIPSASAAAGTHPLPSYLQADKLGPWGNYLQQVDRVIPHLGSLGRWAETLKRPKRILVVDVPINMDDGTIAHFEGYRVQHNVSRGPGKGGVRFHQDVTLSEVMALSAWMSIKNAAVNVPFGGAKGGIRVDPKTVSQGELERITRRYTSEIGIIIGPTKDIPAPDVNTNEQVMAWMMDTYSMNTGSTSTGVVTGKPVDLGGSLGRRDATGRGVFTVGVEAARHIDLDISTSRVAVQGFGNVGGVAGRLFHETGARIVAVQDHGGTIYREAGLDVPALIRHVAETGSVGGFPNAEVIANELFWEVDCDIMIPAALEEQINAANAGRIKARMIIEGANGPTTPEADDILQERNVLVLPDVIANAGGVTVSYFEWVQDFSSFFWDEAEINARLVRIMKEAFAGVWQVAQDHKVTLRTATFIVACKRILHTRQLRGLYP

SEQ ID NO: 9356 - protein, 522 aa, Candida intermedia
MGLEDNRMVKRFVNVGEKKAGSTAMAIIVGLFAASGGVLFGYDTGTISGVMTMDYVLARYPSNKHSFTADESSLIVSILSVGTFFGALCAPFLNDTLGRRWCLILSALIVFNIGAILQVISTAIPLLCAGRVIAGFGVGLISATIPLYQSETAPKWIRGAIVSCYQWAITIGLFLASCVNKGTEHMTNSGSYRIPLAIQCLWGLILGIGMIFLPETPRFWISKGNQEKAAESLARLRKLPIDHPDSLEELRDITAAYEFETVYGKSSWSQVFSHKNHQLKRLFTGVAIQAFQQLTGVNFIFYYGTTFFKRAGVNGFTISLATNIVNVGSTIPGILLMEVLGRRNMLMGGATGMSLSQLIVAIVGVATSENNKSSQSVLVAFSCIFIAFFAATWGPCAWVVVGELFPLRTRAKSVSLCTASNWLWNWGIAYATPYMVDEDKGNLGSNVFFIWGGFNLACVFFAWYFIYETKGLSLEQVDELYEHVSKAWKSKGFVPSKHSFREQVDQQMDSKTEAIMSEEASV

SEQ ID NO: 9357 - protein, 922 aa, Nostoc sp. PCC 7120
MRSSVKTIIGYIHKVCFQDWRSIFMTAPVVAICVMTGGMAGLFQLLEWNTMEQYYALRPNESIDKRILIVTIDEQDITQIGKWPIPDLILAKLIIKLKAQRPAAIGLDIYRDLPVEPGHQEFLGVIKSTPNLIGIKKLVGDQVAPSPTLSELGQIALADLVVDTDGKVRRGLLSAGDSKEKIFLGLAPHLSLMYLQSKGIALEELDPTGTSLRLGKAIFTPLTGEEFSYRGTDVGGYQILLNYRGFQDNFDTVKMRDILSDSISSELIRDRIVLIGTTAKSINDFVNVGYSRNVQDEERRMAGVVVHANLVSQILSAALDGRPLLRVWPEPAEWLLVFCWSFVSSGVTWHGLQVNSQRKQSLPGWPILVILLSISIIFGSSYAAFMIGWWIPVMSPLLTTFLSTIVTTNLYKQSQLEKANQQLQDYSRTLEEKVRDRTQELETAKIAADVANQAKSEFLASMSHELRTPLNGILGYAQILERSENIAPAALEGINIIHQCGSHLLILINDILDLSKIEAGKLELHNTDFDFSYFLTGVVEMCRIRALQKGISFHYLPDPDLPQAINADEKRLRQIIINLLGNAIKFTETGGVNFTIQVLEAGADFNKIRFQVEDTGVGMTPEQLTKIFLPFEQVGDKNKQAEGTGLGLAISCRIAELMGSQIQVDSILGTGSKFWLDLNLNIISHWLQTSSVLQKKKIIGIQDKQPKVLIVDDKWENRAIICNFLRPIGFECLEAANGQEGLNIAATNEPDLIITDLAMPVIDGFEMIQTIRSLPQISKVPIFVSSASVFESDKNKSLQIGGTEFLPKPLELDKLLKYLQDYLQLDWIYAEDSKQTKISENQPSQHNNHQLIVAPPISELDKLLDLSMRGNIKGIHIILDEIEELDLNGDFIGFVTQVRQLSDSFQIKQIRALIKYLKAGVS

SEQ ID NO: 9358 - protein, 119 aa, Zea mays
MGNITKNQTMLLLVFTLLMVIAYHEGEAIQCSQITMYLAPCLSYVKGGGNPPPPCCAGLNNLKASAPGKPDKQAACQCLKNVANAISGFNDDNAKQLPAKCGVSVGVPFSKSVDCNSIN

SEQ ID NO: 9359 - protein, 120 aa, Arabidopsis thaliana
  misc_feature (39)..(40): Xaa can be any naturally occurring amino acid
  misc_feature (45)..(45): Xaa can be any naturally occurring amino acid
  misc_feature (51)..(52): Xaa can be any naturally occurring amino acid
RMCAEAIVEGSQNGKKMIDEGDLRKYLEKWDKTYLPTYXXLDVLXKAFYRXXFVSFSVLLFSCPFTLFYSLFLLLHFQFPYYRGVSFFVSTPVTSFYLLSLVLTSVPLFYFPVPYIFSAP

SEQ ID NO: 9360 - protein, 370 aa, Agrobacterium tumefaciens
MTVRSVFLLPGDGIGPEAMTEVRKLIEYMNSAHNAGFTVSEGLVGGSAYDAHGVAISDADMEKALAADAILFGAVGGPKWDGVPYEHRPEAGLLRLRKDLELFANLRPAICYPALAAASSLKPELVEGLDILIVRELTGGVYFGEPKQIIDLGNGQKRGIDTQIYDTFEIERIASVAFELARSRDNRVCSMEKRNVMKSGVLWNQVVTETHAAKYKDVQLEHMLADAGGMQLVRKPKQFDVIVTDNLFGDMLSDVAAMLTGSLGMLPSASLGAPDAKTGKRKAMYEPVHGSAPDIAGKSIANPIAMIASFAMCLRYSFNMVDEATKLEAAIANVLDKGIRTADIMADGCRQVGTSDMGDAVLAEFKALSA

SEQ ID NO: 9361 - protein, 319 aa, Wolinella succinogenes
MRIGLVCSGGDCAGMNPATKKFVEYSLELGYEPYFIREGLEGLIEGKIEPATLKEVSGILHKGGTILQSSRSKRFFDPAFRLQAYQNLQRHSIEALVTLGGDGSFRAMEVLAKEHSLLYAGIPATIDNDIRASDYALGVDSALNVILESTDRLRDTAESFRRAFVVEVMGRDCGYLALASAIACGAEVCIIPEMGYSLQSLGARLKEELGTGKRRYVLAIVSEGAKASSEVVSWLKEEVGIETRITILGHVQRGGSPSVYDRLMGFRFMQKALDSLSLGKSGVVVLREGRVEFLSSQEASSAPASLPLDMVRLASRLMF

SEQ ID NO: 9362 - protein, 430 aa, Synechocystis sp. PCC 6803
MTLNNDLPLNNIGFTGSGLNDGTEGLDDLFSSSIVDNEPLEALVETPTFASPSPNLKRDQIVPSNIAKIKVIGVGGGGCNAVNRMIASGVTGIDFWAINTDSQALTNTNAPDCIQIGQKLTRGLGAGGNPAIGQKAAEESRDEIARSLEGTDLVFITAGMGGGTGTGAAPIVAEVAKEMGCLTVGIVTRPFTFEGRRRAKQAEEGINALQSRVDTLIVIPNNQLLSVIPAETPLQEAFRVADDILRQGVQGISDIIIIPGLVNVDFADVRAVMADAGSALMGIGVGSGKSRAKEAATAAISSPLLESSIQGAKGVVFNVTGGTDLTLHEVNVAAEIIYEVVDADANIIFGAVIDDRLQGEMRITVIATGFNGEKEKPQAKTSSKPVLSGPPAGVETVPSTTTPEDPLGEIPMAPELDIPDFLQKRRFPRR

SEQ ID NO: 9363 - protein, 292 aa, Zea mays
MAQIIDGKAIAADVRREVAADVAALSSAHGLVPGLAVVIVGSRKDSQTYVNMKRKACAEVGICSIDVDLPEDISETALVAEVHRLNADPAVHGILVQLPLPKHINEEKILSEISIEKDVDGFHPLNIGKLAMKGREPLFVPCTPKGCMELLSRSGVTVKGKRAVVVGRSNIVGLPVSLLLLKADATVSVVHSRTPDPESIVREADIVIAAAGQAMMIKGDWIKPGAAVIDVGTNSVDDPTRKSGYRLVGDVDFAAASKVAGYLTPVPGGVGPMTVAMLLKNTVDGAKRGIVE

SEQ ID NO: 9364 - protein, 116 aa, Arabidopsis thaliana
  misc_feature (11)..(12): Xaa can be any naturally occurring amino acid
MESYQNQSGAXXTHQQLDQFGNPFPATTGAYGTAGGAPAVAEGGGLSGMLHRSGSSSSSSSEDDGLGGRRKKKGITEKIKEKLPGHHGFNKTSSLGSTTAAYDTGTVNHGRKGILG

SEQ ID NO: 9365 - protein, 878 aa, Clostridium perfringens str. 13
MNYLEVKKDIYWVGSLDPELRVFDIIMYTPYGTTYNSYVVKGSEKIAVFETVKEKCFDDYLSKLNSLGIDPKSIDYIVVDHTEPDHAGSVEKLLELSPKAKVIGSMQAIEFLKDIVNKDFEYIVVGDNDTISLGNKTLQFISAPFLHWPDSMYTYIPEDKALITCDSFGSHYSCEEVFNDLVPNEEEYLDALRYYYDCIFGPYKPYVLKAIDKIKDLDIELVCPGHGPILRQDPWKIINTYKEWSTPVKPKINGDKKVTIPYVSAYGYTKELAEEIAKGIQSEHNVEVKLYDLTYSKQEDVLADIGESDGILFGSPTIVGELLPPIRILLANLNPIIHGGKYAAAFGSFGWSGEAVPRIEARLKELKMNIFGPGLRIKFKPSTTELKEAFEFGRDFSRTMFGEKELDYAPNNATETKEVLTGNGKTRYWKCLVCGEIFESPVCPEVCPVCGAGKEQFIEVEMDTFEKNDTNDNFVIIGNGAAGFYAAKTIREINSTASVKLLSSEEVSSYSRPNLSDLLNEEMNLDTFYLAKSSWYKENNIEELLGVTVTSIDKDAKKVILKDGTEIPYTKLILANGSHNFIPPFRIKNNDEEVTLNCENIHEFKGIYSIKDLKDTFDVKEEMKEAKKAVVIGAGPLGLEAAWEMKLAGLDVTVVEFLPNLMNNQLDQEGADIFKNQVSDCGITFITSDECTEIITKDSKLTSLNLKSGKTLDADILLVSTGIRSNIELAKESGIECNRGVIVNERMETSVKDIYACGDVAEFNGLVYGNWPAAIEMGKTAGANACEAEKAFENFTPSIILDALNTHVFSAGLIRFNDSSYEKISSKDESKGQYTKLFFKDNILVGGIIVGDISKAGQIIIAIDNKLSKAAALSNDLL

SEQ ID NO: 9366 - protein, 452 aa, Lactobacillus acidophilus NCFM
MDFTFDSDDNKNAVIKVIGVGGAGGNAVNRMIDDGVQGVSFIAANTDVQALNSNKAENKIQLGPKLTRGLGAGSHPEVGQKAAEESEQTIEDALKGADMIFITAGMGGGTGTGAAPVVAKIARETGALTVGVVTRPFSFEGPKRSKNAAEGISQLKQYVDTLVIIANNRLLEMVDKKTPMMDAFKEADNVLKQGVQGISDLITSTDYVNLDFADVKTVMENQGAALMGIGRASGENRTVEATKLAISSPLLEVSIDGAKQVLLNITGGPDLTLFEAQDASEIVSKAAGDDVNIIFGTSINPNLGDEVVVTVIATGIDSEAEEAASKQLPGRSHQIKAQPKKESEPAQNNDVVQPKVQTVDRPETIQPENNVSEPEVKKPKQTMVDPTSVWDLNNNQDNQRRNTKPAEPEEDSEKFNAFSDQEQEGISQIETSAQDTSDDNSDIPFFKHRGEN

SEQ ID NO: 9367 - protein, 196 aa, Arabidopsis thaliana
MAASMTKPISITSLGFYSDRKNIAFSDCISICSGFRHSRPSCLDLVTKSPSNNSRVLPVVSAQISSDYIPDSKFYKVEAIVRPWRIQQVSSALLKIGIRGVTVSDVRGFGAQGGSTERHGGSEFSEDKFVAKVKMEIVVKKDQVESVINTIIEGARTGEIGDGKIFVLPVSDVIRVRTGERGEKAEKMTGDMLSPS

SEQ ID NO: 9368 - protein, 431 aa, Bacillus anthracis str. Sterne
MTQQSLKRSITWVQGTALTIGAVLGCGILILPSITANSAGPASILSWVIMSILAFPIVATLARLAKMIPSAGGITAYVQMAFNANTSAILGWIMLGSIPIGVPIIALTGAHYIGYVFPISNLSVIGIAALILITSLLLHIKGIELSSKVSVFVICIISLLIVVAVIVSIPYVKLSSFTPFVPNGWSSVGASSVIIFFSFVGWEMITPLAEEFKRPAKDISISLFLGAICISIMYIAISFVTIGTHSYGDKDQIASLSILISKGLGPIGTYITTILAIFISFSAVHANIAGFSRMIYAQAREGHFPSFFAKLHSQFQTPTRVLLVLGGIFSCILIFYGMARPNLEMLLKGPSVIFITSYIFTMLAALKLLKVRDIGWWMAFLSLIICIIVYSFSGWAIFYPVILSVIGWIYIVMNKKYSTITNHSINTSNEN

SEQ ID NO: 9369 - protein, 862 aa, Lotus japonicus
MWSHHGFHLPQNCAAKEQIWGLVATVRHHRNHLFLLRSAVFHSIIFSFSYVVCNGNGSLTLEDSSWKSGNYRCSSKKYEQCTLSQGMTVHDGTFEAGFFHFENPQHHYFGVWYKSISPRTIVWVANRDAPLRNSTAPTLKVTHKGSILIRDGAKGVIWSTNTSRAKEQPFMQLLDSGNLVAKDGDKGENVIWESFNYPGDTFLAGMKIKSNLAIGPTSYLTSWRNSEDPASGEFSYHIDIRGFPQLVVTKGAAITLRAGPWTGNKFSGAFGQVLQKILTFFMQFTDQEISLEYETVNRSIITREVITPLGTIQRLLWSVRNQSWEIIATRPVDLCADYVFCGANSLCDTSKNPICDCLEGFMPQFQAKWNSLDWAGGCVSMEKLSCQNGDGFMKHTGVKLPDTSSSWFGKNMSLDECRTLCLQNCSCTAYAGLDNDVDRSVCLIWFGDILDMSKHPDPDQGQEIYIRVVASKLDRTRNKKSINTKKLAGSLVVIIAFVIFITILGLAISTCIQRKKNKRGDEGIINHWKDKRGDEDIDLATIFDFSTISSATNHFSLSNKLGEGGFGPVYKGLLANGQEIAVKRLSNTSGQGMEEFKNEIKLIARLQHRNLVKLFGCSVHQDENSHANKKMKILLDSTRSKLVDWNKRLQIIDGIARGLLYLHQDSRLRIIHRDLKTSNILLDDEMNPKISDFGLARIFIGDQVEARTKRVMGTYGYMPPEYAVHGSFSIKSDVFSFGVIVLEIISGKKVGRFYDPHHHLNLLSHAWRLWIEERPLELVDELLDDPVIPTEILRYIHVALLCVQRRPENRPDMLSIVLMLNGEKELPKPRLPAFYTGKHDPIWLGSPSRCSTSITISLLEAR

SEQ ID NO: 9370 - protein, 730 aa, Lotus japonicus
MAQKQSIQDDETLVSPEGTFEAGFFRFGNSLRRYFGIWYKSISPRTIVWVANRDAPVQNSTATLKLTDQGNLLILDGLKGIVWSSNASRTKDKPLMQLLDSGNFVVKDGDKEENLIWESFDYPGDTFLAGMKIKSNLATGPTSYLTSWRNAEDPASGEFSYHIDTHGYPQLVVTKGATVTLRAGPWIGNKFSGASGLRLQKILTFSMQFTDKEVSLEYETANRSIITRTVITPSGTTQRLLWSDRSQSWEIISTHPMDQCAYYAFCGANSMCDTSNNPICDCLEGFTPKFQAQWNSLDWTGGCVPIKNLSCQNGDGFPKHTGVQFPDTSSSWYGNSKSLDECGTICLQNCSCTAYAYLDNVGGRSVCLNWFGDILDMSEHPDPDQGQEIYLRVVASELDHRRNKKSINIKKLAGSLAGSIAFIICITILGLATVTCIRRKKNEREDEGGIETRIINHWKDKRGDEDIDLATIFDFSTISSTTNHFSESNKLGEGGFGPVYKGVLANGQEIAVKRLSNTSGQGMEEFKNEVKLIARLQHRNLVKLLGCSIHHDEMLIYEFMHNRSLDYFIFDSRLRIIHRDLKTSNILLDSEMNPKISDFGLARIFTGDQVEAKTKRVMGTYGYMSPEYAVHGSFSVKSDVFSFGVIVLEIISGKKIGRFCDPHHHRNLLSHSSNFAVFLIKALRICMFENVKNRKAWRLWIEERPLELVDELLDGLAIPTEILRYIHIAL

SEQ ID NO: 9371 - protein, 232 aa, Griffithsia japonica
MTDKLIRIAIVNGERCKPKRCSLECKRSCPVVRMGKIGCLEVTSKSKVALISEVLCVGCGICVKKCPFDAIQIINLPKELDKETVHRYGPNSFKLHRLPVPRPGQILGLVGTNGIGKSTALKVLAAKLKPNLGEWKTPPDWTEILNHFRGSELQNYFTRVLEDNIKAIIKPQYVDAIPRAIKGTVADVLSRKDERDAMDKMTTDLQLREVLDREIGVLSGGELSTFCTRHSW

SEQ ID NO: 9372 - protein, 366 aa, Thermococcus kodakarensis KOD1
MLYSGGRLVVKFGGTSVRDDFREAVTFVSRLWDENEVALVVSAIKGVTDALLKFSRTGEGFEWIEKVHRDFAKKYGIPFETLAAPLRELKKLSREDFPSFEAYRDHVLSYGEWLSGLAFAEALRREGIQVELFEPWEILETDGNFGNARVDIAKTSRNLKVVEEALERGRVAVVPGFVGSYNGLRTTLGREGSDYTAAVLGKGLKARAVLIMSGVDGIYTADPRRVVSARLIPFVSYDELYVASKAGMKAIHHGAIDVVRGIPIIFGRTRDWSIGTIAGYESSSLPILVHRVAGEEAVITAVGVAEVPGFDGENGSELGIPLVRLTVPSARLGSTLNLIHLRLIADRISPPRALSIIRGGVSAGNV

SEQ ID NO: 9373 - protein, 241 aa, Schizosaccharomyces pombe
MPKSRRSKVLTLAQTEKKGHEGKAALFSGVQQSLDSFDYMWIFDVTNMRNTYLKRIRDDWKGSRIFMGKTKVMAKALGHTPEEEHAENVSKLTKLLHGAVGLLFTNSKPDEVIGYFESFVQNDFARAGAVAPFTHVIPAGPVYSRAGQIPVEDDILLTHTLEPQVRQLGMPTVLKNGVVTLLADFPLCTEGQQLDSRQTRLLKLFGITAAEFKVGLLGYYSKKGASVEFLQSAPGADEAME

SEQ ID NO: 9374 - protein, 403 aa, Dehalococcoides sp. BAV1
MPNARVEEAIADIKAGRFVIVVDDYDRENEGDLVMASEKVTPDAINFMAKNARGLICVSLIAERLEQLKIPMMVTENTSPYSTGFTVTVEARKKVTTGISAADRAVTVQVLIDPAATREDIAMPGHMFPLRAREGGVLVRAGHTEASMDLARMSGLYPSGVLCEIMNDDGTMARLPQLEQKAAEWGIKIISIKDIISYRRRTEKMVKKVTEAELPTSHGQFKAVAYKSQFDADEHIALVMGDISGPEPVLVRVHSECITGDVFGSKRCDCGEQLDMALNQIAQAGRGVLLYMRQEGRGIGLHNKLCAYALQDKGLDTVEANLELGFAPDLREYGIGAQILVDLGLSKIRMLTNNPKKVVGLEGYGIKVVETVPIIVEPNSFNRHYLETKQRKMGHILNVDKAN

SEQ ID NO: 9375 - protein, 656 aa, Burkholderia thailandensis E264
MCGISGFVGPVACAPETARATLARMTDSLAHRGPDDTGLWIDPDAGVALGHRRLSIVDLSEHGHQPMPSACGRYAMTFNGEIYNFRELRRELEREHRAPEWRGHSDSEVLLAAFSAWGIDRALQKAVGMFALALWNRESRVLTLARDRIGEKPLYYGRIGGSFVFGSELKALRRFPGFGAHPIDRNALCLYLRHASVPAPYTIYEGIRKLPPGTYVQHEGLGDEPAPRRYWSLDRVIAAGRANPFDGDANAAVAQLDHVLRDAIAEQSVADVPLGAFLSGGVDSSVIVALMQTQTAQPVQTFTIGFHEAGYDEAGYAKAVARHLGTSHTELYVKPSDVLATVPRMPSVYDEPFADSSQIPTLLVSELTRRHVKVSLSGDGGDELFGGYTRYFLTPRLWGRLRRVPAAVRMRIAAALHALRPDHADQIAALVQGAWSAAAQRDASPRVGDRLHKLANVMTADSRASLYRLLMSSVHHPERFTLAGHEPQTLIDTPGAWPAGLSFAEQAMAVDTLTYLPTDILTKVDRAAMAVSLETRMPFLDHRVVEFAWRLPEALRIPDGQDKWLLRKLLYRYVPRPLIDRPKQGFCAPVGAWLRGELSDWAAELLRPARLRDEGYLDATRVERLWRQHQSGRMNWQHPLWTVLMFQAWLERQRAE

SEQ ID NO: 9376 - protein, 447 aa, Klebsiella aerogenes
MDQTCTLEGFLTRVQQRDPHQTEFAQAVREVMTTLWPFLEENPRYRQLALLERLVEPERVIQFRVVWVDDRNQVQVNRAWRVQFNSAIGPYKGGMRFHPSVNLSILKFLGFEQTFKNALTTLPMGGGKGGSDFDPKGKSDGEVMRFCQALMTELYRHLGPDTDVPAGDIGVGGREVGFMAGMMRKLSNNSACVFTGKGLSFGGSLIRPEATGYGLIYFTEAMLKRHGLGFEGARVAVSGSGNVAQYAIEKAMELGARVVTASDSNGTVVDEAGFTKKKLARLIDIKERAHGRVADYAREFGLTYLEGQQPWSVPVDIALPCATQNELDVDAARQLIANGVKAVAEGANMPTTIAATDLFLEAGVLFAPGKAANAGGVATSGLEMAQNAARMGWKAEKVDARLHHIMLDIHHACVQYGGEAKQTNYVRGANIAGFVKVADAMLAQGVI

SEQ ID NO: 9377 - protein, 160 aa, Griffithsia japonica
PIVRLPIHPTPNSRRPQPLSTAPPSPASRLSFPPRRRRLCPPAIGAAASASVYDLSAFKNGRPYPFSPLSGKLTLFVNVASYCALTPQYEGLVALHTAYQPKGFEVVASPCNQFGRQEPQPDDEICAFVKERFGARFVLLDKLVVNERPADGRSPRSTVS

SEQ ID NO: 9378 - protein, 419 aa, Erythrobacter sp. NAP1
MRRVVVTGLGLVTPLGGDVETSWKNLIAGESGAGPITRFDTEGQKCTIACEVKGKDHPWGFDADKRVDSKVQRQVDPFIVYGIDAAGQALEDAGLTDLSDEEKERVGCSIGAGIGGLPGIEYESVNLHERGPGRVSPHFVHGRLINLVTGQVQIKYGFMGPNHAVVTACSTGAHSIGDAARMIAMDDADVMLAGGAESTINPLGIAGFAQARALNTNFNDRPKEASRPYDKDREGFVMGEGAGVVVLEEYERAKARGAKIYAEVTGYGLSGDAYHVTAPHPEGKGAELAMKMALRKAGLGPGDIDYVNAHGTSTMADTIELAAVKRVLGDDLSGASMSSTKSAIGHLLGGAGAVEAVFCILAMRDGIVPPTLNLDNPDEGTEGIDLVPHTAKKREVRAVLNNSFGFGGTNASLIMQKVD

SEQ ID NO: 9379 - protein, 448 aa, Salmonella typhimurium
MKKVKKLSLTDLVLYGLVFMVPIAPVSLYGVVYNLSHGMVALVSILWAAIAMFFTAYSYSTLSQHISSSGSAYAYAGVSINPAVGFLTGWILLLDYLLFPTLVAVLGGVAVHAILPQIPVWVWPLIYVAIGTGVNYLGIQQTAKFDKLLVFIQLGILAIFVLLIVRLMLLDSSQITLSFRPFFDSQWFTPGLIATAISVAALNFLGFDAISTLSEESEGGGRAVSKATLLALVLATVLFIIVVAFAAFATGNVDRFAEGNATNEAFFTIAGNVGGIWLKVAFSIIVAFVCAVGNIITAQTAVSRVLFSMGRDRMLPAFLAHVHTTRKTPDYAILFTGGVTLLLSYLFSGKIESISTLVNFGALFAFFVVNLCVFILFNFRMKAQRRIFAHVISPIMGMIVIGYVCLNMNIHALILGISWAAIGIAILCYRKAHNQNIAIDLEGKKLLD

SEQ ID NO: 9380 - protein, 143 aa, Arabidopsis thaliana
METLQIRKPTSLPVSQRPNAAATADDEPGLIRRRLSSLSLNLSNQPAAIAARFPRSKSVSAMGEQAGSSVKEWWEWGWSWILSRKPIFIRDLELNKDEAKSIGSQNRGSIMHVFFKLRSQIRNFMGPSSEDSLPLSCKYKRQR

SEQ ID NO: 9381 - protein, 266 aa, Candidatus Protochlamydia amoebophila UWE25
MFDSYHPKFMKTLVMKFGGASVASPEHFARIADLIIERQCVFPRLVIVVSAMGQTTNELIKLAHQVHPNPPQREYDMLISAGERISMTLLAMILCRKGKDAVSFTGSQSGILTCSQHTSAHIIDVRPQRLIQTLEQGKIVIVAGFQGVSQDKEVTTLGRGGSDTSAVAIGVALKAEKIEFYKDVLGIYNKDPKMYSDAICYPTLNYQEALTIVNQGAKVLHARAIKLAEKNGMPLHVRSFISRHDQGTWITSVDCKKSINPVYEIS

SEQ ID NO: 9382 - protein, 143 aa, Triticum aestivum
  misc_feature (66)..(66): Xaa can be any naturally occurring amino acid
  misc_feature (77)..(77): Xaa can be any naturally occurring amino acid
  misc_feature (80)..(80): Xaa can be any naturally occurring amino acid
  misc_feature (85)..(86): Xaa can be any naturally occurring amino acid
  misc_feature (100)..(100): Xaa can be any naturally occurring amino acid
MGMAEKSSATRKAGLITKTLDRCWSTPMRNKPAEGCFSVYVGAGRQRFVVRTVCVNHPLFRALLEXAEEVFGYAAAXPLXLPCNXXMFAGVLEQIEEEKXMAGRRKCGLARGNSYRLLTGRAVIIDRDIILMIPDNSNFVNNG

SEQ ID NO: 9383 - protein, 629 aa, Cocos nucifera
MAVLERDVMVPWFLWLILVFHPLARVLANSEGDALHSLRTNLIDPSNVLQSWDPTLVNPCTWFHVTCNNDNSVIRVDLGNAQLSGTLVPQLGLLKNLQYLELYSNNISGTIPSDLGNLTNLVSLDLYLNSFTGGIPDTLGKLTKLRFLRLNNNSLSGSIPQSLTNITALQVLDLSNNNLSGEVPSTGSFSLFTPISFANNPQLCGPGTTKACPGAPPLSPPPPFISPAPPSSQGSSASSTGAIAGGVAAGAALLFAAPAIGFAWWRRRKPQEHFFDVPAEEDPEVHLGQLKRFSLRELQVATDNFSTKNILGRGGFGKVYKGRLADGSLVAVKRLKEERTPGGELQFQTEVEMISMAVHRNLLRLRGFCMTPTERLLVYPYMANGSVASCLRERPPSEPPLDWTTRRRIALGSARGLSYLHDHCDPKIIHRDVKAANILLDEEFEAVVGDFGLAKLMDYKDTHVTTAVRGTIGHIAPEYLSTGKSSEKTDVFGYGIMLLELITGQRAFDLARLANDDDVMLLDWVKGLLKEKKLDMLVDPDLQDDYVEAEVESLIQVTLLCTQGSPMERPKMSEVVRMLEGDGLAERWEEWQKVEVVRLDVEMAPPNGNNEWIIDSTDNLHAVELSGPR

SEQ ID NO: 9384 - protein, 611 aa, Candida glabrata
MENKEHHHHHHHHHHHHSNGSYVSNKVSSLADGSRVGNYQIVKTLGEGSFGKVKLAYHVTTGQKVALKSINKKVLAKSDMQGRIDREISYLRLLRHPHIIKLYDVIKSKDEIIMVIEYAGNELFDYIVQRNKMSEQEARRFFQQIISAVEYCHRHKIVHRDLKPENLLLDEHLNVKIADFGLSNIMTDGNFLKTSCGSPNYAAPEVISGKLYAGPEVDVWSCGVILYVMLCRRLPFDDESIPVLFKNISNGVYTLPKFLSPGASDLIKRMLIVNPLNRISIHEIMQDEWFKVDLAEYLVPQDLKQQEQFNKKSGNEENVEEIDDEMVVTLSKTMGYDKDEIYEALESSEDTPAYNEIRNAYILIKDNKSLIKDMKQDNNVTQELDTFLSQSPPTFQQNGDGMKASEDQKKKHSGRRLASSVTQQRTFHQPPFMDQSKEEDSTISIPTSLPQIHRANMLAQGLPAASKISPLVTKKSKTRWHFGIRSRSYPLDVMGHIYIALKNLGAEWANPSEEDLWTIRVRWKYDSDESRLIEDGVKKIPNLMKIVIQLFQIETNNYLVDFKFDGWESTYGDSTISTNMSEDEMSTFSAYPFLHLTTKLIMELAVNSQGN

SEQ ID NO: 9385 - protein, 243 aa, Candidatus Protochlamydia amoebophila UWE25
MKREPQAVKIAPSILAGDFGHLADEAKKAEQAGADSLHLDIMDGHFVPNLTMGSQAVSAINRATNLFLDVHLMIYNPFDYIERFVQAGADSITFHMEATEDVEETLAYIRKCNIRAGLAFNPETSVSMIPKYLDKCDMILLMTVNPGFGGQKFIEKVLDKVQFTRDLCNQLNIRAGGVTLKDNSSTGHQLPPFDIQVDGGITHLNVRRCVEAGANVIVAGTSLFKSPNFADAIKQMRQSAEGH

SEQ ID NO: 9386 - protein, 359 aa, Candida rugosa
MSKSIVLLPGDHVGTEVVAEAVKVLKAIERTTPGTSFSFSTHLIGGAAIDATGVPLPDEALEAAKASDAVLLGAVGGPKWGTGDVRPEQGLLKIRKELGLYANLRPCSFASSKLVDLSPLKREIVEGTDFVVVRELVGGIYFGERKEDDGSGVASDTETYSVPEVERITRMAAFLALQHNPPQTVWSLDKANVLASSRLWRKTVTRVMTEEFPTVPFQHQLIDSAAMILVQKPTKLNGVVLTSNMFGDIISDEASVIPGSLGLLPSASLASLPDTNTAFGLYEPCHGSAPDLPAGKVNPLACILSAAMMLRLSLDNAAAADRIEQAVREVIDSGVATADLGGSSSTGEVGDAIVKALEK

SEQ ID NO: 9387 - protein, 501 aa, Oryza sativa (japonica cultivar-group)
MSFRGEESGGEDGGRTASASDLRKPFLHTGSWYKMSSAGGGGGMGSRLGSSAYSLRDSSVSAVLCTLIVALGPIQFGFTCGFSSPTQDAIISDLGLTLSEFSLFGSLSNVGAMVGAIASGQIAEYIGRKGSLMIAAIPNIIGWLAISFAKDSSFLFMGRLLEGFGVGVISYVVPVYIAEIAPQTMRGALGSVNQLSVTIGILLAYLLGMFVPWRILSVLGILPCSILIPGLFFIPESPRWLAKMGKMEDFESSLQVLRGFETDIAVEVNEIKRTVQSSRRRTTIRFADIKQKRYSVPLMIGIGLLVLQQLSGVNGILFYAASIFKAAGLTNSNLATFGLGVVQVVATGVTTWLTDKAGRRLLLIISTTGMTITLVVVSVSFFVKDNITNGSHLYSVMSMLSLVGLVAFVISFSLGLGAIPWIIMSEILPVNIKSLAGSVATLANWLTAWLITMTASLMLSWSNGGTFAIYAAVCAGTLVFVCLWVPETKGRTLEEIAFSFR

SEQ ID NO: 9388 - protein, 641 aa, Triticum aestivum
MSKLLVIALLLLPLINQGIYLATAWDDQDFFKYCPPSQCSQDGPEVRFPFCLESSNTSAAAAASCGCAGRSIRKLACSGRDTILFHPVLGPYNVSAIDYGRSSMKLIPLVDPCFVLQQKPVISRSSSSPQADVINDEKRSLQFFEWTSTALVRCSREFAPGAADGIAGPVSCLSNTTHFFYLVHGYEDMSLLPLDCKVVPLSDGVGGGLIPMYMFYNPMSDTLRVSFKESIERILSFAEMTVYWFNGYTCRQCERSGGRCAFSSQSVGPFCMPGPHGSRIKVIAATSSVAAFVVLLLTVATVLYLSLKTRYNAEIHMKVEMFLKTYGTSKPTRYTFSEVKKMARRFKEKVGQGGFGSVYKGELPNGVPVAVKMLENSTGEGESFINEVATIGLIHHANIVRLLGFFSEGMRRALIYEFMPNESLEKYIFSDDSNIFQNLLVPEKLLDIALGIARGMEYLHQGCNQRILHFDIKPHNILLDYNFNPKISDFGLAKLCARDQSIVTLTAARGTMGYIAPELYSRNFGGVSYKSDVYSFGMLVLEMVSGRRNADPRIGSQDDVYLPEWIYEKVINGEELALTLETTQEEKDKVRQLAMVALWCIQWNPRNRPSMTKVVNMLTGRLQSLQMPPKPFVSYENEPMP

SEQ ID NO: 9389 - protein, 356 aa, Thermococcus kodakarensis KOD1
MRIEKLAALMEEKGFSGALVSPGANFYYLTGLHIHEAGERLTVLAVNPDGEYHILAPSLYQNVIKDFPVTFWRDGENPYSKLGTIMKELGIGGKVLVENTMRADWLIGIFHSDNRFDPYPLNVLMRELRMRKDKEELKLMQKAAEVADRVFEEILSWDIVGMTEKELALKIELRIRELSDGISFQPIVASGENGANPHHEPGNRKIRKGDMVILDYGARWKGYCSDITRTVAIGKPDEKLLEIYRIVKEAQEDAFQSVREGIKAKEVDRAARETISKAGYGEYFTHRTGHGLGLDVHEEPYIGPDGEVVLKNGMTFTIEPGIYLPGLGGVRIEDDVAVINGRGKRLTRADRELVIL

SEQ ID NO: 9390 - protein, 525 aa, Bacillus cereus ATCC 10987
MTTFRELGLSDSLLQSVESMGFEEATPIQAETIPHALQGKDIIGQAQTGTGKTAAFGLPLLDKVDTHKESVQGIVIAPTRELAIQVGEELYKIGKHKRVRILPIYGGQDINRQIRALKKHPHIIVGTPGRILDHINRKTLRLQNVETVVLDEADEMLNMGFIEDIEAILTDVPETHQTLLFSATMPDPIRRIAERFMTEPQHIKVKAKEVTMPNIQQFYLEVQEKKKFDVLTRLLDIQSPELAIVFGRTKRRVDELSEALNLRGYAAEGIHGDLTQAKRMSVLRKFKEGSIEVLVATDVAARGLDISGVTHVYNFDIPQDPESYVHRIGRTGRAGKKGIAMLFVTPRESGQLKNIERTTKRKMDRMDAPTLDEALEGQQRLIAEKLQNTIENENLAYYKRIAEEMLEENDSVTVVAAALKMMTKEPDTTPIALTSEPPVVARGGGSKKRGGNGGGYRDGNRNRSRDGRGGDGRNRDRNRDGRNRDGNRDRNRDGGNRGRRGEGQGRPGSSNGRGERKHHSRKPQA

SEQ ID NO: 9391 - protein, 462 aa, Trichodesmium erythraeum IMS101
MVQIVDSTLREGRQTAPGINFSWEQSLKIAKLLHSLGIDIIEVCHPVVSIEQKQIVREIVASNLCPVIAHARANLADIEAVKETSAQWVGIFLGINEETRLTRARWTISKIFNCIKESVMYAKTLGLKVRYTAEDASRTDYCLLKSVYSVAIEAGADCICFSDTVGIMEPNEVTETIEKLKSDFSTVPLEVHFHNDRGLAMANALAASDAGAERISSSVNGLGERCGITDTLGLLVNLYYKGLRSLPSGEIIQRTSKYVAAFSRYPVNFNQPISGGNAFIHTAHLHQKAVKRDPSSYSWILPEYVGKTMELSGKSIPSVHSLFLTPIVKCASELGYHRYGDSVGHLMIDECMVPNCRQSCIVREIRVVEEKPLAYVDVQTLYVDSLFLFLGHELGMKGLQVEVCLGQVVQKIDSPASVFIPAGVAHTYRILNGSGFCINHVLSGSYNDSLLEPLDISSNSYS

SEQ ID NO: 9392 - protein, 308 aa, Campylobacter coli RM2228
MKELVIATRKSQLALWQSEHVAQILKNTHQIEVLLEGFKTKGDVLLDSPLAKIGGKGLFTKELEESMLRKEAHLAVHSLKDVPSFFPQGLVLAAVSKREQSNDAMLSQNYKDFLSLPKGAKIGTTSLRRKMQLLLLRPDLEIISLRGNVNSRIEKLKNGDFDAIILAMAGIKRLDLDKQVNFVYTFSKDELIPAASQGALGIESIDDEQILEFLKCLNDDNALIETTIEREFISTLEGGCQVPIGINAELLNDEICVRAILGLPDGSEILKEKRMIKKSEFKGFGESLAKEFIAKGAKEILKKAESMI

SEQ ID NO: 9393 - protein, 159 aa, Prochlorococcus marinus str. MIT 9211
MKVSVTETSVQTSTGTIKKLGEYSGKVLLIVNVASYCGNTPQYSGLQELQNKFKDKGFAVLGFPCNDFGNQEPGTLDEIKEFCSVKFGADFEIFNKVHAKGFTTEPYTTLNKADPAGDVSWNFEKFLIGKDGSVVGRYEPSVQPLSEALISAIQLALDS

SEQ ID NO: 9394 - protein, 468 aa, Pseudomonas fluorescens Pf-5
MRIELIKSRANLFLTTINLPRLPMIESVEDFLARLKKRDPDQPEFHQAVEEVLRSLWPFLEANPHYLSSGILERICEPERAVVFRVSWVDDQGKVRVNRGFRIQMNSAIGPYKGGLRFHPSVNMGVLKFLAFEQTFKNSLTSLPMGGGKGGSDFNPKGKSDAEVMRFCQAFMSELYRHIGADVDVPAGDIGVGAREIGFLFGQYKRLSNQFTSVLTGKGISYGGSLIRPEATGFGCVYFAEEMLKRRGDRVEGKRVAISGSGNVAQYAARKVMDLGGKVISLSDSEGTLYCESGLSEEQWLAVLELKNVQRGRISELASQFGLEFRAGQTPWDLPCDIALPCATQNELDAEAARTLLRNGCTCVAEGANMPTTLEAVDIFIDAGILFAPGKASNAGGVAVSGLEMSQNAMRLLWTAGEVDSKLHNIMQSIHHACVHYGEENGRINYVKGANIAGFVKVADAMLAQGVV

SEQ ID NO: 9395 - protein, 136 aa, Arabidopsis thaliana
  misc_feature (9)..(9): Xaa can be any naturally occurring amino acid
  misc_feature (31)..(31): Xaa can be any naturally occurring amino acid
  misc_feature (82)..(82): Xaa can be any naturally occurring amino acid
  misc_feature (97)..(97): Xaa can be any naturally occurring amino acid
EGDAISPIXHVTPENGFSSPSFETVGLDFQXLALSQLVTRVFFCFEPNQFFVAVPSSVGANSSKPEISVALEDFGCKKRPFXFFGKKSGPVLFPPFXKLGKYCGSPRFPLKCEWSTPNICTSEGEKGEGFYQNFFS

SEQ ID NO: 9396 - protein, 413 aa, Thauera sp. DNT-1
MIKSIVIVGAGLAGTTAARALRARGYAGRIHLIGNESQLPYDRPSLSKGVLGGAQEIPPLLMEAAWFESEGIELHLGDPVFAINAKERLVTLHSGLSLDFDRLLFATGMRPRKLSIPGGNLEGVFSLRNFADCAALRQAFTAAKSLVIIGGGLIGCEVATSARKAGLEVTILECADELLTRVLGRQIGAWCREQLEAMGVRIELNAHISHLSGERSVRSLVFADGREVEAELVLVSIGGDPEDTLLNAAGVACNQGVVVDACGQTSSPDIYAAGDVAVWPLRHGGRRALETYINSQQQAEAAVAAMLGEYNPVPQVATSWTEIAGHRIQMIGDMQGPGEYVQRGEFEPNQQTVLFRVLDGKALAAVAINSTKDFGGVSRLVMSEIEIVPDHLADTDISIRELLKGNAARTVTA

SEQ ID NO: 9397 - protein, 95 aa, Pseudoalteromonas tunicata D2
MQLNLTGRHVEITEPLRDYVTNKFAKLERHFDHINNVHVILDIEKLVQKAEATLHVTGGELFATSEHEDMYAAIDALIDKLDRQVIKHKEKNSRH

SEQ ID NO: 9398 - protein, 443 aa, Pichia anomala
NSLYTALKDLFESMIEHESKTGVVSPSHLVETLKKENELFRSTMHQDAHEFLNFLLNEVIDTINNLHHCRKNALHDLFEGLLTNQTKCLTCENVSSRDETFLDLSIDLTDNETLETCLKQFSASEMLNGSNKFYCDNCHSLQEAEKKMGLRKLPKILALHLKRFKYSEEQQRNVKLFQKIKYPLYFKLESDIPAEKKEDGLKFYQLYGVVVHIGGGPHHGHYVALVKTIQHGWLLFDDETVEKIDEKFVLRFTGDSPDLATAYVLFYQEISEEKYEQVINKPVEEEVKPSEKDEIQEKVIRVNSNNNSISSSQPSTISSDTNKPIRPPPVSVVEPQDKNRLRTPSLSSIARLKSKSSQNTVTTTSTPASSISAPQAPLAKNVNDANTIDTPTPTPSNPQPITPTNNNPQSTSTSSSFWRRKEKEAKEAKVGSVEDKREGEKEE

SEQ ID NO: 9399 - protein, 150 aa, Trichodesmium erythraeum IMS101
MEVQFREFNPFDVWIWLEFSTVPSMAEKHYIEELFDSWFLLGKLGGFNAENLQVQEVGIEISYMEYSYNVASQSMMAVMHNMGDVEYEGLWGRCWFDLGTSDALAIDILVNSFQQLSKELVKIEKLIIGGQNEDWLVPENNYEKGWFDEN

SEQ ID NO: 9400 - protein, 388 aa, Bradyrhizobium japonicum USDA 110
MDSLCRTSGMNTLSNTITVAVVGGEGIGPEVTDQSHRILKWFSDRRGAPVILREAQYGLIPYLATGKVLPDDTVEAMEEADAILWGATGGPETTEVPPAARKAGSLLSLRSKYDLYANLRPIVANPALADSAPLKAAVLKDVDFIIIRELTSGIYFGEPRGIETLPDGQRRGFNTQQYTTSQIRRVARTAFELARTRKGRVCSVDKANVLETSVLWREEVTALHEAEFSDVELTHLYVDNAAMQIVRAPSQFDVMVTCNIFGDILSDCAAMASGSLGMLPSVSLGPPDRLGRRKALYEPVHGSAPDIAGKGIANPLGSILSVAMMLRITLHRPEDAALLEKAVDTALAAGARTADIAEPGAKRLSTQEMGDAVLNALDKVVGKEREHA

SEQ ID NO: 9401 - protein, 336 aa, Mycobacterium tuberculosis CDC1551
MKLAIIAGDGIGPEVTAEAVKVLDAVVPGVQKTSYDLGARRFHATGEVLPDSVVAELRNHDAILLGAIGDPSVPSGVLERGLLLRLRFELDHHINLRPARLYPGVASPLSGNPGIDFVVVREGTEGPYTGNGGAIRVGTPNEVATEVSVNTAFGVRRVVADAFERARRRRKHLTLVHKTNVLTFAGGLWLRTVDEVGECYPDVEVAYQHVDAATIHMITDPGRFDVIVTDNLFGDIITDLAAAVCGGIGLAASGNIDATRANPSMFEPVHGSAPDIAGQGIADPTAAIMSVALLLSHLGEHDAAARVDRAVEAHLATRGSERLATSDVGERIAAAL

SEQ ID NO: 9402 - protein, 349 aa, Bacillus cereus G9241
MNREELFDVTVIGGGPAGLYSAFYSGLREMKTKIIEFQPQLGGKIHVYPEKMIWDIGGLLPVTGEKLIEQLVQQGLTFQPEVVLNTKVESIIRNEDGTFTLKANDGKEHFSKTVIVATGSGILKPQKLSIEGAERFEVSNLNYTVKSLKRFKDKTIIISGGGNSAVDWANELEPIAKKVYVAYRKEELSGHEAQVKQLLNSSAECFFHTSITKLIAGDSHEAIEYVELTNHETGEVSHLPIDEVIINHGYERDITLLENSELDVAIIDNFYIAGNANSESSVDGLYAAGDILKHEGKLHLIAGAFQDAGNAVNKAKQFIQPDASEYGMVSSHNEVFKKRNRELIKQMMK

SEQ ID NO: 9403 - protein, 506 aa, Phalaenopsis hybrid cultivar
MSIFLIATLFLSLSLHLLLRRFRRRRRILPLPPGPLNFPIVGALPFIGSMPHSGLALLSRRYGPIMFLKMGIRQVVVASSSSAARSFLKTHDSRFSDRPLDIISKQVSYNGQNMVFADYGPKWKLLRKVSNLHLFGPKAMSRWADVRRDEAFSMSHFLKKQSDSKNPVLLSNLLVCSMANVIGRISMSKRVFDEEGKEAKEFKEIIKELLVGQGASNIGDLVPAMRWLDPQGARKKLLGLNQRFVRMISKFLAEHGESRGEREGNPDLLDLIVADKIAGDDGEGLSEENIKGFISDLFVAGTDTSAMVIEWAMAEMLKNPAILRRVQEETDRIVGRDRLLEESDIPNLPYLQAICKEALRKHPPTPLSIPHYASEPCEVEGYHIPGKTWLLVNIWAIGRDPEVWEKPLEFDPERFMEGKMARIDPMGNDFELIPFGAGRRICAGKLMGMVMVQYFLGVLVQGFDWSLPEGVVELDMEEGPGLVLPKAVPLLVTARPRLPAAAYGVV

SEQ ID NO: 9404 - protein, 420 aa, Streptomyces coelicolor A3(2)
MPRAKTFVIVGGGLAAGKAAEELREHGHDGPLLVIGDERERPYIRPPLSKGYLLGKEDRESIHVHPESWYREHDVDLLLGTSVTSVDARGRAVTLDDGRRVPYAGLLLATGSSPRRLSVPGADLEGVLYLRRVGDSERLKEAFTEGARIVVVGGGWIGLETAAAARAAGAEVTVLERGELPLLKVLGREAAEVFAGLHRDHGVDLRPHARIEAVTGTGGRVDGVRLADGTHLPADAVVVGVGITPNVRLAEEAGLDVRNGIVTDARLRTSAAGVHAAGDVANAYHPRLGRHLRVEHWANALHQPRTAALSMLGQDAVYDRLPYFYTDQYDLGMEYTGYAEPGGYDRVVFRGSREERRFLAFWMSGDRVLAGMSVNLWDVIGTIRALIESGAETDDAALADPSVPLESLLPPHARPTGDQA

SEQ ID NO: 9405 - protein, 166 aa, Triticum aestivum
  misc_feature (92)..(92): Xaa can be any naturally occurring amino acid
  misc_feature (102)..(102): Xaa can be any naturally occurring amino acid
  misc_feature (116)..(116): Xaa can be any naturally occurring amino acid
  misc_feature (146)..(146): Xaa can be any naturally occurring amino acid
  misc_feature (148)..(148): Xaa can be any naturally occurring amino acid
MAPTVMASSATSVAPFQGLKSTAGLPVSRRSNGASLGSVSNGGRIRCMQVWPIEGIKKFETLSYLPPLSTEALLKQVDYLIRSKWVPCLEFXSKVGFIFREXHNASPGYYDGRYWXTMWKLPMFGCTDATQVINEVEEVKKEYPDXYXRIIGFDNIRQVQCVSSSP

SEQ ID NO: 9406 - protein, 214 aa, Staphylococcus epidermidis ATCC 12228
MVKILPSLLSIDFLNLKEELQLLETAKVDGLHFDVMDGKFVPNISIGIPILDAVRQQSHLPIDVHLMIEQPENYINLFAEHGADMISVHVESTTHIHRAIEQIKQLGKKAGVVINPGTSVETILPILSIVDYVLVMTVNPGFGGQTFIEQCVTKIEQLNQLKHENHLTFDIEVDGGINDQTSKRCVEQGATMLVTGSYFFKQEDYAKVTSLLKE

SEQ ID NO: 9407 - protein, 476 aa, Xanthomonas axonopodis pv. citri str. 306
MFKQLWATKHPHASHEAADGLGLQRALGPWGLTALGIGAVIGGGIFVITGQAAADHAGPAIMLSFVLAAVCCAFCAMAYAEFAAMVPVSGSAYTYTYATFGELAAWFIGWMLVLEYGVSASAVAVSWTGYFLSLLEHFDIHLPAAFVSAPLDGKLQPTGAIANLPAAGIVLLLTWLCYVGIRKSSAMNMAMVILKTGLILLVIAVGWKYVDTSNWHPFIPANEGPGKYGMEGVLRGAAMVFFAYIGFEAVSVAAQESHRPQRDLPIGMILSLVICTVLYIAMAAVMTGLVPYTLLGTDEPVVTAVAAHPQLAWLRVVVEVGALIGLSSVVLVMIIGQPRIFMIIARDGLLPSIFTRIHPKYRTPHVNTVITGVGIALLAAVFPLDVLGELTSMGTLIAFAAVCAGVLILRRTHPELPRPFRMPAAWLICTAGVLSCLALLSAMTLHNWMLMGLWTLVGLVIYFGYGYRHSRLRDGR

SEQ ID NO: 9408 - protein, 493 aa, Xanthomonas axonopodis pv. citri str. 306
MYRMLKSLLRVKPIEPAGHVDAGEPVEGSLQGEATLQRTLTAKHLIMLGIGAVIGAGIFVLTGQAAANHAGPAVMLSFVFAGIACAFAGLCYAEFAAMMPVSGSAYSYSYATLGEGIAWFIGWCLVLEYLFAGSSVAVGWSAYLISFITGTLGLPFPAELAGAPLAWDGHGFVSSGNLVNLPAVLIVAAVSILCYVGVTQSAFANAIVVAIKVVVICLFVGFGIAYIDPANWHPFIPENTGPGQFGWDGVFRAASIVFFSYIGFDAVSTSAGETKDPQKNMPIGILVSLAICTIIYIIVCAVLTGLLPYTQLGTAKPVATALEAHPQLTWLKTAVEIGAIAGLSSVVLVMLMAQPRIFYTMAKDGLMPKLFGKVHPKFRTPYVGTLFVGVVAALLAGVIPLNVLGELVSMGTLLAFATVCAGVLVLRFTKPDLARPFRVPLAMVICPLGALACLFLFFQAFQEHWKVFVGWTVIGLAIYFGYGIHHSRLAKRA

SEQ ID NO: 9409 - protein, 185 aa, Arabidopsis thaliana
  misc_feature (21)..(21): Xaa can be any naturally occurring amino acid
  misc_feature (107)..(107): Xaa can be any naturally occurring amino acid
  misc_feature (140)..(140): Xaa can be any naturally occurring amino acid
  misc_feature (152)..(152): Xaa can be any naturally occurring amino acid
MVSSMLSSADVDTSPAQATMXINCTGLNSSAAFPGTRRTNKDITSIAYNGGICSCMNVWPPIGKITFETLSYLPDLSDVELAKEVDYLLRNKWIPCVEFELQHGFVXREHGNTPGYYYGRYWTMCKLPLFGCTDSAQVLXEVEDCQKEPPGXFLRIIGFDHTRKVQWISSIAYKPPSYTEAKFLF

SEQ ID NO: 9410 - protein, 156 aa, Haemophilus influenzae
NRANTPVLVDGKDVMPEVNAVLAKMKDFCQRIISGEWKGYTGKAITDVVNIGIGGSDLGPYMVTEALRPYKNHLNMHFVSNVDGTHIAETLKKVNPETTLFLVASKTFTTQETMTNAQSARDWLLKAATDESAVAKHFAALSTNAKDVEEFGIDTN

SEQ ID NO: 9411 - protein, 537 aa, Candidatus Protochlamydia amoebophila UWE25
MEFRMSKTSPSHFFNYSASKKLQELAKHPLDLTKELTPERVTQYVAEAGGFKLLYGTERVTNDVLAALKQLSEESHALDKMNRMQDGEVMNFIERFPSENRPALHTATRDLFDYPRTAKKAQEAAQLAKAELEKLRQFLEKNDQNYHFTDLVTVAIGGSDLGPRAHYHALEHLLKPGHHVHFISNVDPDDVAGVFRKIPDLKRTLVAVVSKSGTTLETATNEELVREKFRQAGLDPKKHFVSITMPGTPMDNQEQYLKTFYMWDWIGGRYSTTSMCGALMLSFAFGINTFWEFLKGAHEMDRIALETNLNKNLPLLAALLGIWNRNFLDYPTVALIPYSQALLRYTAHIQQVDMESNGKHIDQQGIMTNFHTGPIIWGEPGTNSQHSFFQLIHQGTATVPVSIIAFKENLYGEDLEFQGTTSQEKLLSNLFAQSLALATGQISENPNKTFLGNRPTNILLAKKLTPYTLGALLSFFENKVAFQGFIWGINSFDQEGVQLGKVLANRLINEFANQRKKTKPSSFAIGEAYLKHLDHFS

SEQ ID NO: 9412 - protein, 303 aa, Aspergillus oryzae
MKNERAYLVHVIVHHLRWRGFLILPRLHKPKPHHIPPQHKPKETRKTMSPQSTPFEEGAFLPGGHNTDPPLPPNDPTIGTKLNHSMLRIRDPQRSLHFYITLMGMRTVFTMNTGPFTMYYLGFPSSAEDRADLSAWAAKVSDPANLTQTLGLLELFHIHGTEKPVDEGGVEMANGNAPPNLGFGHLGFTVPDVGATVERLRAEGVKVVKELGVTTRESIPLSEWEEKRGVGVGEIHPNYKVFFDQIAYVADPVSFFFFFFWFRIVVIEADWVFRMGILLKFFRRIGSENVRGGVLMLDTAVDE

SEQ ID NO: 9413 - protein, 291 aa, Geobacter metallireducens GS-15
MSILINKDSKIVVQGITGRSGLFHTQQCRDYGSRIVAGVTPGKGGIHIEGIPVFNTVEEAVRYTGANVSMIFVPPPGAADAILEAADAGVDLAVCITEGIPVRDMVPVKRILQGSKTRLVGPNCPGVITPGECKVGIMPGYIHKPGKIGVVSRSGTLTYEAVKQITEAGLGQSTCVGIGGDPIIGMQFIDVLKLFNEDKQTEAVFMIGEIGGSAEEDAAEWIRENMKKPVAAFIAGVTAPPGKRMGHAGAIITGGKGKAEDKIRTLGECGVVVAPSPTKMGAAMLEALGKK

SEQ ID NO: 9414 - protein, 462 aa, Streptococcus thermophilus LMG 18311
MAFEIIMPKLGVDMQEGEIIEWKKQEGDVVNEGDILLEIMSDKTNMELEAEDSGVLLKITRQAGEIVPVTEVIGYIGAEGEVVADNAAIAPAAEAAPQVEKVADVETPAAKPQPQVAIVHEGGKIRATPKARKVAREMGIDLAQVLGTGAKGRIHADDVENFKGAQPKATPLARKIAADLGIDLATVSGTGFGGKITKEDILAISAPAQVKVAAAAPAVEAKPEKVLPEGVEVIPMSAMRKAISKGMTHSYLTAPTFTLNYDVDMTNLIALRKQVLDPIMNKTGMKVTFTDLIGLAVVRTLMKEEHRYLNASLINDAQNIELHKFVNLGIAVGLDDGLVVPVIHGADKMSLSDFVVASKDVIKKAQAGKLKAAEMSGSTFSITNLGMFGTKSFNPIINQPNSAILGVSATIQTPVVVDGEVVVRPIMGLCLTIDHRIVDGMNGAKFMVDLKHLLENPMELLI

SEQ ID NO: 9415 - protein, 355 aa, Porphyra yezoensis
MNSTTKENKETIRPVFPFTAIVGQEEMKLALILNVIDPKIGGVMIMGDRGTGKSTTIRAIADLLPKIEVVKDDLFNSHPMDVDLMSDENKKTLQDGVALTTSYINVPMVDLPLGATEDRVCGTIDIEKALTEGIKTFEPGLLAKANRGILYVDEVNLLDDHLVDILLDSAASGWNTVEREGISVRHPARFVLVGSGNPEEGELRPQLLDRFGMHAEIRTVKDPELRVKIVEQRTNFDQNPRRCIEDCQKTQNDLKEKIAEAQLLLSNITIDYDLRIKISQVCGELDVDGLRGDIVTNRAAKAYAAFNGQQNVKSSDIGKVITLCLRHRLRKDPLEAMDSGEKVQKVFNKIFEEEN

SEQ ID NO: 9416 - protein, 421 aa, Oryza sativa
MNGQPRFHDMIGGGGKGMQDNEINGLFNMPSYHKFVEGSQMSVDSADGFNMANYVGGSVAMSVDNSSVGSNESRTVILKHPGLRDAPTASYSVGNSVFRPNRVAAHTLNEDALARVLMDPSHPTEILSNYEEWAIDLGRLDMGVPFAQGAFGKLYRGTYNGEDVAIKLLEKPENDPERAQALEQQFVQEVMMLSRLRHPNIVRFIGACRKSIVWCIITEYAKGGSVRQFLARRQNKSVPLRLAVKQALDIARGMAYVHALGFIHRDLKSDNLLIAADKSIKIADFGVARIEVKTEGMTPETGTYRWMAPEMIQHRPYDHKVDVYSFGIVLWELITGMLPFTNMTAVQAAFAVVNKGARPVIPQDCLPALSHIMTLCWDANPEVRPAFTDIVCMLESAEMEILSNVRKARFRCCITEPMTTD

SEQ ID NO: 9417 - protein, 413 aa, Glycine max
MATHAALASTRIPSNTRFPSKASHSFPTQCALKRLEVTEFSGLRSTSCVTYANSARESSFFDLVASQLTPKQTNGSTPVRGETVAKLKVAINGFGRIGRNFLRCWHGRKDSPLEVVVVNDSGGVKNASHLLKYDSMLGTFKADVKILDNETITVDGKSIKVVSSRDPLKLPWAELGIDIVIEGTGVFVDGPGAGKHIQAGAKKVIITAPAKGADIPTYVVGVNEGDYTHEISNIISNASCTTNCLAPFVKILDAEFGIVKGTMTTTHSYTGDQRLLDASHRDLRRARAAALNIVPTSTGAAKAVSLVLPQLKGKLNGIALRVPTPNVSVVDLVVNVEKKGLTAEDVNAAFRKAAEGPLKGVLDVCDVPLVSIDFRCSDVSSTIDSSLTMVMGDDMVKVVAWYDNEWGYRLVGT

SEQ ID NO: 9418 - protein, 503 aa, Nierembergia sp. NB17
MMQLSTELAIAAIIFLLAHILISKTSGRRLPPGPRGWPVIGALPLLGDMPHVSLAKMAKKYGPIMYLKVGTCGMAVASTPHAAKAFLKTLDINFSNRPPNAGATHFAYNAQDMVFAPYGPRWKLLRKLSNLHMLGGKALEDWSNVRANELGHMLKSMLDLSREGQRVVIADMLTFAMANMIGQVILSKRVFVDKGVEVNEFKNMVVELMTVAGYFNIGDYIPCLAWLDLQGIEKGMKILHKKFDVLLTKMFDEHKTTSHEREGKSDFLDMVMANRDNSEGERLSTTNIKALLLNLFTAGTDTSSSVIEWALTEMLKNPSILKKAQVEMDQVIGKNRRLLESDISNLPYLRAICKETFRKHPSTPLNLPRISSESCEVDGYYIPKNTRLSVNIWAIGRDPDVWENPLKFNPERFLSGKYAKIDPRGNDFELIPFGAGRRICAGTRMGIVMVEYILGTLVHSFDWKLPSDVIELNMEEVFGLALQKAVPLEAMVTPRLPLNVYAP

SEQ ID NO: 9419 - protein, 331 aa, Ralstonia metallidurans CH34
METEMSNHAGDAPFLELRLSERRKEADGILSFELVHPDGEQLPAFDAGAHILVDIVPGVSRAYSLCNDPAERHRYVIAVLRTEDSRGGSVGMHQAIEPGQLVRVSAPRNEFELVQSAGRSLLFAGGIGITPLLSMAETLANADREFELHYCTRDAAKTAFTSRIETRFSKQARIYHDLASKEQPFDARKVLKQGGSDDHVYACGPSGFIEHILSTAAELGWEKRQLHREFFGSPTTQNDGSAETAFDLILASSGKKVHVPCGVSAATALLEAGISLSMSCEQGICGTCVTTVLNGMPDHRDHYLTDDDRSRNDCFMPCCSRSLTAELLVDL

SEQ ID NO: 9420 - protein, 467 aa, Staphylococcus epidermidis ATCC 12228
MLKRFHKGIIISLAIEKGMIRMKANKYLIFILGALGGLLYGYDNGVISGALLFIHKDIPLNSTTEGIVVSSMLIGAIVGAGSSGPLADKLGRRRLVMLIAIVFIIGALILAASTNLALLIIGRLIIGLAVGGSMSTVPVYLSEMAPTEYRGSLGSLNQLMITIGILAAYLVNYAFADIEGWRWMLGLAVVPSVILLVGIYFMPESPRWLLENRNEEAARQVMKITYDDSEIDKELKEMKEINAISESTWTVIKSPWLGRILIVGCIFAIFQQFIGINAVIFYSSSIFAKAGLGEAASILGSVGIGTINVLVTIVAIFVVDKIDRKKLLVGGNIGMIASLLIMAILIWTIGIASSAWIIIVCLSLFIVFFGISWGPVLWVMLPELFPMRARGAATGISALVLNIGTLIVSLFFPILSDALSTEWVFLIFAFIGVLAMIFVIKFLPETRGRSLEEIEYELRERTGARTE

SEQ ID NO: 9421 - protein, 335 aa, Leptospira interrogans serovar Copenhageni str. Fiocruz L1-130
MTRIAINGFGRIGRLVFRAGIKDPNLEFVAINDLVTPDNLAYLLKYDSTHGRFQGTVEHTEKELIVDGKKILCVSERDPEKLPWKDLKVDYVIESTGLFTDRVGAEKHIKAGAKKVVISAPAKDKDIPTFVMGVNNEKYNPSNDHIVSNASCTTNCLAPIVKVVLDNWGIEEGLMTTIHATTATQPTVDGPSKKDFRGGRGAMQNIIPASTGAAKAVGLCIPEVNGKLTGMSFRVPTPDVSVVDLTVRTTKETSLKEISAKMKAASEGAMKGILGYTEDMVVSNDFVSSTLSSIFDMDACIELNSRFFKLVSWYDNEMGYSNRVLDLIRYMAKKG

SEQ ID NO: 9422 - protein, 618 aa, Mycobacterium tuberculosis CDC1551
  misc_feature (113)..(113): Xaa can be any naturally occurring amino acid
  misc_feature (288)..(288): Xaa can be any naturally occurring amino acid
MSAPTKPHSPTFKPEPHSAANEPKHPAARPKHVALQQLTGAQAVIRSLEELGVDVIFGIPGGAVLPVYDPLFDSKKLRHVLVRHEQGAGHAASGYAHVTGRVGVCMATSGPGXTNLVTPLADAQMDSIPVVAITGQVGRGLIGTDAFQEADISGITMPITKHNFLVRSGDDIPRVLAEAFHIAASGRPGAVLVDIPKDVLQGQCTFSWPPRMELPGYKPNTKPHSRQVREAAKLIAAARKPVLYVGGGVIRGEATEQLRELAELTGIPVVTTLMARGAFPDSHRQNLXMPGMHGTVAAVAALQRSDLLIALGTRFDDRVTGKLDSFAPEAKVIHADIDPAEIGKNRHADVPIVGDVKAVITELIAMLRHHHIPGTIEMADWWAYLNGVRKTYPLSYGPQSDGSLSPEYVIEKLGEIAGPDAVFVAGVGQHQMWAAQFIRYEKPRSWLNSGGLGTMGFAIPAAMGAKIALPGTEVWAIDGDGCFQMTNQELATCAVEGIPVKVALINNGNLGMVRQWQSLFYAERYSQTDLATHSHRIPDFVKLAEALGCVGLRCEREEDVVDVINQARAINDCPVVIDFIVGADAQVWPMVAAGTSNDEIQAARGIRPLFDDITEGHA

SEQ ID NO: 9423 - protein, 560 aa, Leptospira interrogans serovar Copenhageni str. Fiocruz L1-130
MNLNGAELMIRFLEFAGVEIVSGIPGGASLPIYDALYESKIRHILARHEQGAGFIAGGMARANGKPGVCFASSGPGVTNLITAVADAKMDSIPLIVITGQVPVSMIGTDAFQEIDTFSLSVPITKRSYLVKKIEDLIQILPQAWKTAIEGRPGPVWIDVPKDVASAKIDWDISREKEIWNIQKIEFKDTIDLEWKKTFKELLSKAKKPVFYIGGGLNRPLAAELFCILLEKLNFPTVSTLMGLGICPYEHPRFLGMLGMHGSRAANLVLEEADLLVALGVRFDDRATGKLNEFCPNAKIVHVDIDATEIGKLKNPNLFLKHGVENFITQILEEDLSSEHLSSEEWLNQVQTLKTLYGFSIPKENQILHPVSILQSISNILGEKAIITTDVGQHQMWVAQYYPFRKQGSFLTSGGLGTMGFGLPAAIGAALVFPEKRIVCISGDGSILMNIQELDTLRELNLDVTILLINNGHLGLVRQQQELFFSSRFSASKFVIPANFIKIASSFGIPSFELSNECSQVEILEQALIRKGPSFVLLQVEPDLQVLPMVPPGKANREMIY

SEQ ID NO: 9424 - protein, 373 aa, Nostoc sp. PCC 7120
MYDTIIVGAGPAGGAAAYHLAKKGRSVLVLEKESLPRYKPCGGGVSPIVAEWFDFDFSPAISLKVDSFRFTWNLGDPVEAKIETKEPVWMVRRDVFDHFLVQQAQKQGAELRDNTEVTGIEFKSDRWQVDTVNGPVTSRYLIAADGAKGPMAKWLGFKERKRRLAGALEAEVPANVEDKSTIHFEFGLVKNGYIWNFPKEDGYSIGVGTFIGGQPQDFKKILVEYSQLFNIDVKTSKQYGHPIALWDGNQKLHTQNAILAGEAACVVDPMTAEGIRPSIYSGVMAAGAVDKALSGDINALEQYTEIIHESWGAEMAWAQKLAGAFYRFPSVGYQVGVKRPTAPKIMGKILCGEMSYSSVAGRALKRLIPGFRG

SEQ ID NO: 9425 - protein, 336 aa, Xylella fastidiosa Temecula1
MNMAIKVGINGFGRIGRNILRSAVQNFGSNIDIVAINDLLEADYLAYMLQYDSVHGRFKGEIAIEGTALILNGKKIRLTAERDPGNLQWADAGAEIVIESTGLFLTQESAGKHLAAGAKKVIISAPSKDETPMFVYGVNHNSYNGEPIVSNASCTTNCLAPLAKVINDKWGITRGLMTTVHAATATQKTVDGPSNKDWRGGRGILENIIPSSTGAAKAVGKVIPSLNGKLTGMSFRVPTSDVSVVDLTVQLNTPATYKEICTEVKQQSEGPLRGILGYTEDKVVATDFRGETCTCVFDADAGIALDPTFIKLIAWYDNEWGYSNKCLEIAKVIAAK

SEQ ID NO: 9426 - protein, 288 aa, Solibacter usitatus Ellin6076
MSVLVDKNTKVIVQGFTGKEGTFHAQQSIAYGTNVVGGVVPGKGGTQQLERPVFDTVEQAVKATGANASVIFVPPPFAADAIMEAADAGVELVVCITEGIPALDMVKAWAFLQGKKTRLIGPNCPGIISPGKCKIGIMPASIHREGHVGVVSRSGTLTYEAVGQLTKLGIGQSTCIGIGGDPIIGTTFLDALELFNADPDTHAIIMIGEIGGNAEETAAAYVKAHVKKPVVGFVAGQTAPPGRRMGHAGAIIAGGSGKAEDKIAAMADAGITICSTPAELGEKVKSRL

SEQ ID NO: 9427 - protein, 294 aa, Wolinella succinogenes
MSILINKETRVIVQGFTGKEGTFHSEQCLAYGTQILGGVTPGKGGSTHLGLPVFDTVEEAVRETGAWASMVFVPPAFVADAVMEAASSGIKLAVVITEGAPIKDMVVAKRYAQKCGMEIIGPNCPGIITSEECKIGIMPGSIFKSGSIGLISKSGTLTYEASHQIVQAGFGISTAIGIGGDPVIGLGYKELLDRFEKDEKTEAIVLIGEIGGTLEIEAASFIKERVKKPVVAFIAGQTAPKGKRMGHAGAIVSGGSGSAKEKMDALREAGVRVIESPADIGKAIVSLLHPAQTL

SEQ ID NO: 9428 - protein, 156 aa, Haemophilus influenzae
NRANTPVLVDGKDVMPEINAVLAKMKDFCQRIISGEWKGYTGKAITDVVNIGIGGSDLGPYMVTEALRPYKNHLNMHFVSNVDGTHIAETLKKVNPETTLFLVASKTFTTQETMTNAQSARDWLLKAAKDESAVAKHFAALSTNAKDVEKFGIDTN

SEQ ID NO: 9429 - protein, 384 aa, Candida albicans SC5314
MGKQYISTVSASQAHKSDILGVAITNKFTVSVSSDGYAKFWDNKQDEVHSPKEFVQSVFIDKSGIHAVAAYENVLPSSTLKVTLLAFACFNGSIIFRYYINDDFSTIESLTDDIKSFESNCWTPGFYRDPESKQDYFITTKTNGTTEVHLLNIVDENEKAVITFEKFGQLKGNSSSFPNSLAICPTENKKCAVGYINGDVLLYDFVSLKLIYTFRSSDLVTSRNSQSTSIPRVLAFSPGGTLLAVARDNQAAGSITLYDVEHGENVGSLATPSHSAKSVVGGFAHQGWILGLSFDEEGKHLASCGFDKCIRVWNLETSEREATISISISDLDDTTHNDQDESVASGVAFIKKGVRGGSGGDSNEGLCVVSFDRGIRWYREAGGI

SEQ ID NO: 9430 - protein, 396 aa, Lactobacillus acidophilus NCFM
MAEKEHYVRTKPHVNIGTIGHVDHGKTTLTAAITTVLAEKGLAKAEDYSQIDAAPEEKERGITINTAHVEYETENRHYAHMDAPGHADYIKNMITGAAQMDGAILVVAATDGPMPQTREHILLARQVGVNYIVVFLNKCDLVDDPELIDLVEMEVRDLLTEYDYPGDDIPVVRGSALKALQGDKEAQDQIMKLMDIVDEYIPTPERQTDKPFLMPVEDVFTITGRGTVASGRIDRGTVKVGDEVEIVGLVDKVLKSVVTGLEMFHKTLDLGEAGDNVGVLLRGVDRDQVVRGQVLAAPGSIQTHKKFKAQVYVLKKDEGGRHTPFFSDYRPQFYFHTTDITGEIELPEGTEMVMPGDNTEFTVTLIKPAAIEKGTKFTIREGGRTVGAGQVTEILD

SEQ ID NO: 9431 - protein, 175 aa, Oryza sativa
MAPSVMASSATTVAPFQGLKSTAGMPVARRSGNSSFGNVSNGGRIRCMQVWPIEGIKKFETLSYLPPLTVEDLLKQIEYLLRSKWVPCLEFSKVGFVYRENHKSPGYYDGRYWTMWKLPMFGCTDATQVLKELEEAKKAYPDAFVRIIGFDNVRQVQLISFIAYKPPGCEESGGN

SEQ ID NO: 9432 - protein, 310 aa, Triticum aestivum
MAFLNMEQHTWAFTFGILGNIISLMVFLSPLPTFYRVYRKKSTEGFQSTPYLVTLFSCLLWMYYAFLKSGSELLLTINAVGCVIESLYIAMYLVYAPKSARLLTAKLFIGLDVGLFGLIALVTMLASHGPLRVQVVGWICVAVALGVFAAPLSIIRLVIRTKSVEFMPFSLSFFLVLSAVIWFAYGALKKDIFVAMPNVLGFLFGVAQMALYMAYRNKKPATVVLVHEEMKLPEHVKEVAGGAKPQGGAPTEGRISCGAEVHPIDVLPAVADVEQAAAAADEDVIRDDQNMLRPEQPAVIKPDVAIVVQA

SEQ ID NO: 9433 - protein, 351 aa, Geobacter sulfurreducens PCA
MNLTKTLRANILSLAALVALSGAAIGAEAAPAKKEDKTDKPAAAPAKQEEKNVAPLDPAAVVVKVNGVAITRAEVDRAKKVLMSQNRMTQPVTPDIAQKVEEAAVSQLIAKELLYQAGRKQEIKDLDKQIQERVSQSKARFPSQEEYLKTLKSMDMTEKDVETFAREDLVINNLIEKDVVAKTTVSDEEAKKFYNDNIDKFKRDETVKASHILIKVEPNASADDKKKAKEKAEAILKQVKGGADFAEVAKKESGCPSAPQGGDLGFFGKGQMVPPFEKAAFAMKPGEVSDVVETQFGYHIIKLTDKRPAETVKFEETKDRIVQFLKQQKVQEGINEYVENLKKAAKIEMAK

SEQ ID NO: 9434 - protein, 309 aa, Bacillus cereus ATCC 14579
MRKIIVGSRKSKLALTQTNWFIDQLKALGLPYEFEVKEIVTKGDVILDVTLSKVGGKGLFVKEIEHALLTKEIDMAVHSMKDMPAVLPEGLMIGCTPKRVDPRDAFISKNGASFKELAEGAILGTSSLRRSAQLLAARPDLQVKWIRGNIDTRLRKLKEEDYDAIILATAGLQRMGWDNDVITEHLDDTLCVPAVGQGALAIECREDDKDLLQLLAHINDTITERTVAAERVFLHKLEGGCQVPIAGYATLTENDAIELTALVGSMDGSVLLKETVVGTNPEEVGLEAADRLIKQGAKELILAANKEQQ

SEQ ID NO: 9435 - protein, 112 aa, Mycoplasma arthritidis
MKKLEKITPQQEDFAKWYTDVIKNGDLMAYGSSKGAIIFKPLSFGIWDNIRKIADEKFKEKDVANVYLPLLIPEGLLQKEKDHLEGFNPELATVTEVGGKKLAEKFFIRPTS

SEQ ID NO: 9436 - protein, 144 aa, Glycine max
MLVLLTGNSLLDHSSLLRNSYQTPSAGNLGSAGDIEFMDPAIMAVGKGRLQGALNSPALDIRSNFMPQLNYFENDARLQLLMQRSLVPQQNLRFSEIGNTFSQLGDSYAVSSRLDQSQVSNLGPFQQLSLQVDSRGSPGNELEF

SEQ ID NO: 9437 - protein, 491 aa, Shigella flexneri 2a str. 301
MNTQYNSSYIFSITLVATLGGLLFGYDTAVISGTVESLNTVFVAPQNLSESAANSLLGFCVASALIGCIIGGALGGYCSNRFGRRDSLKISAVLFFISGVGSAWPELGFTSINPDNTVPIYLAGYVPEFVIYRIIGGIGVGLASMLSPMYIAELAPAHIRGKLVSFNQFAIIFGQLLVYCVNYFIARSGDASWLNTDGRRYMFASECIPALLFLMLLYTVPESPRWLMSRGKQEQTESILRKIMGNTLATQAVQEIKHSLDHGRKTGGRLLMFGVGVIVIGVMLSIFQQFVGINVVLYYAPEVFKTLGASTDIALLQTIIVGVINLTFTVLAIMTVDKFGRKPLQIIGALGMAIGMFSLGTAFYTQASGIVALLSMLFYVAAFAMSWGPVCWVLLSEIFPNAIRGKALAIAVAAQWLANYFVSWTFPMMDKNSWLVAHFHNGFSYWIYGCMGVLAALFMWKFVPETKGKTLEELEALWEPETKKTQQTATL

SEQ ID NO: 9438 - protein, 317 aa, Thermotoga maritima MSB8
MVFFDTGSLKKKEIKDKYDIVVVGGGPAGLTSAIYARRAGLSVLVVEKAIEGGYVNLTHLVENYPGFPAISGEELASKFKEHAEKFGADIYNAEVVKLEVQGDKKVVELDDGKRIEAPVVIVATGANPKKLNVPGEKEFFGKGVSYCATCDGYLFAGKDVIVVGGGDSACDESIFLSNIVNKITMIQLLETLTAAKVLQERVLNNPKIEVIYNSTVREIRGKDKVEEVVIENVKTGETKVLKADGVFIFIGLDPNSKLLEGLVELDPYGYVITDENMETSVKGIYAVGDVRKKNLRQIVTAVADGAIAVEHAAKHYF

SEQ ID NO: 9439 - protein, 292 aa, Bacillus subtilis
MKKIAIAAITATSILALSACSSGDKEVIAKTDAGDVTKGELYTNMKKTAGASVLTQLVQEKVLDKKYKVSDKEIDNKLKEYKTQLGDQYTALEKQYGKDYLKEQVKYELLTQKAAKDNIKVTDADIKEYWEGLKGKIRASHILVADKKTAEEVEKKLKKGEKFEDLAKEYSTDSSASKGGDLGWFAKEGQMDETFSKAAFKLKTGEVSDPVKTQYGYHIIKKTEERGKYDDMKKELKSEVLEQKLNDNAAVQEAVQKVMKKADIEVKDKDLKDTFNTSSTSNSTSSSSSNSK

SEQ ID NO: 9440 - protein, 107 aa, Wolbachia endosymbiont of Drosophila melanogaster
MSDDITPVNDQNFKSEVTDYKGFVLVDFWAEWCGPCKSLMPRIEQLAKDRKGKIKICKFDIDEGTEVPSKYGVQSIPTLIIFQDGKEIARKIGATNDLLSWVDSEIS

SEQ ID NO: 9441 - protein, 317 aa, Nitrosomonas europaea ATCC 19718
MTTTRHCKLLILGSGPAGYTAAIYAARANLNPVLITGMAQGGQLTTTTDVDNWPADVAGVQGPELMERFLKHAERFQTEVIFDHIHTANLSEKPFELIGDQGTYTCDALIIATGASAKYLGLPSEEAFMGKGVSACATCDGFFYKNQDVAVIGGGNTAVEEALYLSNIARKVTVVHRRDKFRSEKIMIDKLMGKVKSGKIELALDHVLEEVKGDDSGVTGIRIRHVRDDTARDLELQGVFIAIGHHPNTDLFQGQLEMKNGYIITQGGNEGNATATSIPGIFAAGDVQDHIYRQAITSAGSGCMAALDAERYLEKSA

SEQ ID NO: 9442 - protein, 343 aa, Mycobacterium tuberculosis CDC1551
MRIGVLTGGGDCPGLNAVIRAVVRTCHARYGSSVVGFQNGFRGLLENRRVQLHNDDRNDRLLAKGGTMLGTARVHPDKLRAGLPQIMQTLDDNGIDVLIPIGGEGTLTAASWLSEENVPVVGVPKTIDNDIDCTDVTFGHDTALTVATEAIDRLHSTAESHERVMLVEVMGRHAGWIALNAGLASGAHMTLIPEQPFDIEEVCRLVKGRFQRGDSHFICVVAEGAKPAPGTIMLREGGLDEFGHERFTGVAAQLAVEVEKRINKDVRVTVLGHIQRGGTPTAYDRVLATRFGVNAADAAHAGEYGQMVTLRGQDIGRVPLADAVRKLKLVPQSRYDDAAAFFG

SEQ ID NO: 9443 - protein, 112 aa, Herbaspirillum seropedicae
MKQVTAIIKPFKLDEVRESLAEVGVTGLTVTEVKGFGRQKGHTELYRGAEYVVDFLPKVKIEVVVDDKVVEQAVDAIIKAARTGKIGDGKIFVQEVEQVIRIRTGETGPDAV

SEQ ID NO: 9444 - protein, 74 aa, Populus alba x Populus tremula
CMPGMTGYELLKKIKESSSFREIPVVIMSSENVMARIDRCLEEGAEEFIAKPVKLSDVKRLRDYYMASREVRSV

SEQ ID NO: 9445 - protein, 112 aa, Actinobacillus pleuropneumoniae serovar 1 str. 4074
MKKIEAIIKPFKLDDVREALTDAGITGMTVTEAKGFGRQKGHTELYRGAEYAIDFLPKIKLEIVVADDQVDACIEAIIDTAQTGKIGDGKIFIYDVERVIRIRTGEENEDAL

SEQ ID NO: 9446 - protein, 400 aa, Thermotoga maritima MSB8
MAKEKFVRTKPHVNVGTIGHIDHGKSTLTAAITKYLSLKGLAQYIPYDQIDKAPEEKARGITINITHVEYETEKRHYAHIDCPGHADYIKNMITGAAQMDGAILVVAATDGPMPQTREHVLLARQVEVPYMIVFINKTDMVDDPELIDLVEMEVRDLLSQYGYPGDEVPVIRGSALKAVEAPNDPNHEAYKPIQELLDAMDNYIPDPQRDVDKPFLMPIEDVFSITGRGTVVTGRIERGRIRPGDEVEIIGLSYEIKKTVVTSVEMFRKELDEGIAGDNVGCLLRGIDKDEVERGQVLAAPGSIKPHKRFKAQIYVLKKEEGGRHTPFTKGYKPQFYIRTADVTGEIVGLPEGVEMVMPGDHVEMEIELIYPVAIEKGQRFAVREGGRTVGAGVVTEVIE

SEQ ID NO: 9447 - protein, 317 aa, Actinobacillus pleuropneumoniae serovar 1 str. 4074
MTVKHAKLLILGSGPAGYTAAVYAARANLNPVLVTGMQQGGQLTTTDEIENWPGEYEHTTGTGLMDKMLKHAEKFNTEIVFDHINSVDLSKRPFTLKGDINTFTCDALIIATGASAKYLGLPSEEAFKGKGVSACATCDGFFYRNKPVAVVGGGNTAVEEALYLANIASEVHLVHRRDSFRAEKILLGRLQKRVEEGKIILHTDRTVEEVLGDNMGVTGVRLASTKDESKEEIKVDGFFVAIGHAPNTAIFDGQLELDNGYIKVKSGLEGNATATSVAGVFAAGDVMDHNYRQAITSAGTGCMAALDAERFLDALEA

SEQ ID NO: 9448 - protein, 419 aa, Nitrosomonas europaea ATCC 19718
MAIKNAFYAQSGGVTAVINASAAGLLETARAHSDKIGKVYAGRNGIIGALTEDLIDTSAESTEAIRALRHTPSGAFGSCRYKLKSLEDNRREYERLIEVFKAHDIGYFFYNGGGDSADTCLKVSQLAGTLGYPIQAIHVPKTVDNDLPITDCCPGFGSVAKYIAVSMLEASFDVASMAKTSTKVFILEVMGRHAGWIAAAGGLASNEDHEVPIIILFPEVTFDQEKFLAKTDHYVKEYGYCTVVVSEGVKGTDGKFLSDQGLRDAFGHAQLGGVAPVIANIVKNGLGLKYHWGVADYLQRAARHIASGTDVEQAYAMGKAAVEYAIAGHNSVMPTIERISSSPYAWKTGMVELSKVANVEKMMPADFISEDGFGITGKCREYLSPLIEGEDYPPYKNGLPDYVRLKNVAVTKKLAEFKI

SEQ ID NO: 9449 - protein, 587 aa, Nocardia farcinica IFM 10152
MAFSVQMPALGESVTEGTVTRWLKQEGDTVEVDEPLLEVSTDKVDTEIPSPAAGVLSKIVAQEDDVVEVGGELGVISEAGEAPAESAPAPEAPAAEAPAEESAAAEPEPEPAQAEQAPAQQPAASGDAAEGTPVQMPALGESVTEGTVTRWLKSVGDQVEVDEPLLEVSTDKVDTEIPAPVAGTLLEITAQEDDVVAVGGQLGVIGSGKPAAASAPAPAPAPETKAEPKPEPAPEPKPEPAPEPKPEPKPEPAPAPKAEQPAPAAQAQPQAPAPADSGATPYVTPLVRKLAEEHGVDLNSIKGSGVGGRIRKQDVLAAAEAKKAPAAAAAPAAKAPSAPAPAPQLAHLRGTTQKASRIRQITATKTRESLQTTAQLTQVHEADVTKIAALRAQAKAAFKEREGVNLTFLPFFAKAVVEALGVHPNVNASYNEDTKEITYHASVHLGIAVDTEQGLLSPVIHNASDLSLAGLARAIADIADRARNGGLKPDELAGGTFTITNIGSQGALFDTPILVPPQAAMLGTGAIVKRPVVVTDETGGESIGVRSMCYLPLTYDHRLIDGADAGRFLTTIRHRLEEAAFEADLGL

SEQ ID NO: 9450 - protein, 303 aa, Kluyveromyces lactis NRRL Y-1140
MSVVAIKNAVSKLVAKNQEVPLLSSDSSNSNSNSTTNLNSHRYSASPQDGDIESSKHTGGFDDYDNEDDGTSGLFGKIDPRVMSDMIIGLSDGLTVPFALTAGLSSLGDSKLVITGGFAELISGAISMGLGGYLGAKSESDYYKSEVSQEKRKFYSNTQLINHEIEDILMEMNPEFSENTVISFVKDMQRDPELMVDFIIKYGRGLDEPDDNRQWISALTIGGGYFAGGFVPLIPYFFVETVGTGLLISIALMTFTLFWFGYFKSQVSMNDCTLQKKLLEGLQMIAVGGTAAGAAWFFVKVIE

SEQ ID NO: 9451 - protein, 451 aa, Lactobacillus acidophilus NCFM
MKVVKFGGSSLASGQSVEQALNIILNDPERQVIVVSAPGKRNNADTKVTDLLIKYAEQVLKHEETDAIVKQIFARYQEIGYFFGLNDEKLQIIQNILLALPNQNYPDNNYLMAAFKAHGERLNARLIALILQHENIKSRFLDPVDAGLIVTGEPNDALVNPESYLNLDQIKIDPNEKIIFPGFFGITPSGNIATFSRGGSDITGAILARGFHANIYENFTDVNGIFAANPNIVMHPISIKKMTYREMRELSYAGFSVFHDEALIPAIQGQIPINVKNTQEPDNPGTMIVPEKNFSPDNTITGVTSQKHFSALYLHKYLLNKEAGFTLRILQILYKHNIPYEHMPSGIDDITIIFNNDFLNDQLIDQICNEIQATINPDQLEWIDDYAIIMVVGEGMKKTPGVSRQILDSLASQGITPRMINQGASQISIMIGTKKEKADKAVKIIYQDFFN

SEQ ID NO: 9452 - protein, 1008 aa, Chlamydomonas reinhardtii
MPHEFKTAVVWFRRDLRVDDNPALVAALAAAPNVIPVFIWAPEEEGQFQPGRCSRWWSKHSLVDLQQALAALGSRLVIRRSTDSTAALLQLVTELGAEAVFFNHLYDPISLMRDHDCKRGLTAAGVAHRTFNGDMLYEPWDVLDPNKQPYSTFDDFWNSVRAMPVPPPFPVSAPASMPAVPAAVPSMTVAEVDWFFTPEQEASSDQLKFKWKPGVGGAISELEHFLAERLTEFEHDRAKVDRDSTSRLSPWIHIGSISVRYIFYRVRQCQAEWLAAGTDRAQSCDDFLQQMGYREYSRYLAFHFPFIHERSLLGHLRACPWRIDQHAFKAWRQGQTGYPIVDAAMRQLWSSGWCHNRGRVVAASFLVKDLLLPWQWGLKHYWDAQIDADLECDALGWQYVSGGMSDAHPFSYMMDLEKEARRFDPDGEYVRRWLPALSRLPTEYIHAPWKAPASVLAAADVELGCNYPLPIITRSDAKANVDYACGVLEKSAVAPTGSESSGRYPYRAPTYPNAGGGGGASGGVDGAGSSGGNPTAAMGASGGAGPSSGTGTGGQGGAFRGRGDGGGSAPVSQQGGMLPPGVAVCVTAGTGGTQPDSRTVSGAHAGVSNSAGGVACDMPPPSHSHPRGGSSGVAAAGVGGVSGGPSSGGAAAPGATRKATAPGGAVFYHPGEASGEGHALLERILQQQRRQRGAANRQDGSGTNQPPPPVSMPGMLDAAGAAGGGGGGGGGLAGLPGVLQGLHGGAGATAAPAVAWAGRVAAGGVDDMDAVALWQQQQQLLQGGAAAFAFEQAMELLLARRRAGDGVSGFCGGDAPGRGGGDADEADGLMLEEDSEEVVSNTVDLHLSAFTGASCHRQSGTARGARAAERRLKKEAGSPEVTDGGGSAGAGCGEEDAMQCEDEEHGERGSPARRTADEEAQPPAEEGGAGSEDAGAAASEGDEAEGYGSESASEDNGGATPVEEADQMVVDGGGGGGGGGGGGGGRGGGQHKRRRSQLEGEQGDAAWE

SEQ ID NO: 9453 - protein, 418 aa, Geobacter sulfurreducens PCA
MATDITMPKLSDTMTEGRLVAWKKGVGDRVERGDIIAEVETDKATMELEAFASGVLAEQRVKPGELVNVGTVIGVIGGADEVKPTEKAAAAPPELADWQPPPEAPANGAEPEIPERVLELPEASAPPAPLPPGDDTKASPAVRRLAREKGIDLHQVRGSGPEGRILMEDLDQVAANEEPPAAQAGQVSAGESPAPPEAEPMTRMRGAIARITAEAWRTIPHFYETVEIDMKEAGEIVRELKGSGNAVTYNDLVLKAAALALVQFPRMNASFRDGGVVAHREVNIGFAVAMEEGLQVPVVKGCQSLALKEIALQTVRLAERARSGAITQEEISGGTFSVSNLGMYGIDEFAAVIMPPQAAILAVGAVADRPVVRDGQLAVARTMRATLSCDHRVVDGAYAAQFLGELRRVLENPVLMLV

SEQ ID NO: 9454 - protein, 67 aa, Arabidopsis thaliana
  misc_feature (41)..(41): Xaa can be any naturally occurring amino acid
  misc_feature (43)..(43): Xaa can be any naturally occurring amino acid
  misc_feature (46)..(46): Xaa can be any naturally occurring amino acid
  misc_feature (55)..(55): Xaa can be any naturally occurring amino acid
  misc_feature (57)..(58): Xaa can be any naturally occurring amino acid
  misc_feature (66)..(66): Xaa can be any naturally occurring amino acid
MASSMLSSATMVASPAQATMVAPFNGLKSSAAFQATRKVTXAXTSXTSNGGRVNXMXXWPPFGKRXF

SEQ ID NO: 9455 - protein, 328 aa, Geobacter sulfurreducens PCA
MPEMNYRDALNLALKEEMRRDPSVVVWGEDVALYEGSFKVTRGLLAEFGEERVKDTPISENSIVGVAVGAAMGGLRPVAELMTVNFALLAMDQIVNHMAKIRSMFGGQTYLPMVVRAPGGGGSQLGAQHSQSLETYFMHCPGIHVAVPATPADARGLLKAAIRDDNPVMFLEHELLYNSKGEVPDDPESVIPFGKADVKREGKDLTIVAYSRMTILALQAAEELAKEGISCEVVDLRTLTPLDTATFTASVKKTGRAVVVEECWRSAGLGGHLAAIIAEECFDRLLAPVRRVSGLDVPMPYSRKIEKLCIPQPETIAAAVRETLSGTY

SEQ ID NO: 9456 - protein, 563 aa, uncultured crenarchaeote
MCGIVGILSKKERNVAPLIGKMLSCMKNRGPDGMGLSTENQIVYSDTFDNPLFSQVEGHDVLGHSRLAIVGGSCGQQPFVSCDKKLILEHNGEIYNYKEIRKNLSAHHTFTTSTDSEVIVHLLEDHYQNTKGDLIEAIRRTVTQLDGIYVLAIREQSTGDIVLVRDGIGVRQIYYGESSDFIAFASERKALWKIAMSDQIKRLLPGYALVISRKEGSSNFKTTLFPISVNTKKSICEKYSILYTDIDSAVNAYGDTLVESMRKRVSDFKKIGIVFSGGIDSVIVAYLAKQMAPEVICYTSGIKGSSDILNSLEIAEKLDLKLEIEQMTESDVESTIPKIISIIEDDNMGQVEVAIPIYGAVKLAHEQGIRVMLTGQGADELFGGYSWYSKIVKKHGYEKIQGYLIEDIKLLYKETLEREDKITMSQSIELREPFLDTNLIDTVLRIDPRLNIQNNGNNYDNLGKRVHRKLAEKLGIPKEIAYRIKEAAQHGSGIHNTLNTLAMKNGFTESKVNSSYLDKLKKRELIGSSQRYGHLFEKEQIWSLEPHIQMYLENISKNILPRN

SEQ ID NO: 9457 - protein, 449 aa, Shigella flexneri 2a str. 301
MSEIVVSKFGGTSVADFDAMNRSADIVLSDANVRLVVLSASAGITNLLVALAEGLEPGERFEKLDAIRNIQFAILERLRYPNVIREEIERLLENITVLAEAAALATSPALTDELVSHGELMSTLLFVEILRERDVQAQWFDVRKVMRTNDRFGRAEPDVAALAELAALQLLPRLNEGLVITQGFIGSENKGRTTTLGRGGSDYTAALLAEALHASRVDIWTDVPGIYTTDPRVVSAAKRIDEIAFAEAAEMATFGAKVLHPATLLPAVRSDIPVFVGSSKDPRAGGTLVCNKTENPPLFRALALRRNQTLLTLHSLNMLHSRGFLAEVFGILARHNISVDLITTSEVSVALTLDTTGSTSTGDTLLTQSLLMELSALCRVEVEEGLALVALIGNDLSKACGVGKEVFGVLEPFNIRMICYGASSHNLCFLVPGEDAEQVVQKLHSNLFE

SEQ ID NO: 9458 - protein, 479 aa, Erwinia carotovora subsp. atroseptica SCRI1043
MSTTQKRMYINGEFVENRSGKWIDVVNPATEQVISQVPEGSADDAKRAIDAAEAAQPSWEALPAVERGVWLHKIAAGIREREAELTDTIIAEGGKTHGLAQTEVLFTADYLDYMAEWARRYEGEIIQSDRPNENIFVFRKAIGVTTGILPWNFPFFLIARKAAPALITGNTIVIKPSEITPNNAVIFAEIIHKIGLPKGVINFVTGYGPTVGQELAGNPKVGMVSLTGSVAAGIATMTAAAQNVTKVSLELGGKAPAIVMDDADLDLAVKAIVSSRVINSGQVCNCAERVYVQKGIYDEFIIRIKAAMEQVTFGNTAEKKTLDMGPLISAAALQRVEDKVAKAVSQGAKVLLGGKSESGTGYFYPPTLLVNVTQEMPIMHEEVFGPVLPVATFDTLEDAIAMANDSEYGLTSSIYTQNINTAMKALKGLKFGETYINRENFEAMQGFHAGWRKSGVGGADGKHGLQEYLQTHVAYLQFH

SEQ ID NO: 9459 - protein, 139 aa, Brassica napus
  misc_feature (7)..(7): Xaa can be any naturally occurring amino acid
  misc_feature (9)..(10): Xaa can be any naturally occurring amino acid
  misc_feature (12)..(12): Xaa can be any naturally occurring amino acid
  misc_feature (16)..(18): Xaa can be any naturally occurring amino acid
  misc_feature (21)..(22): Xaa can be any naturally occurring amino acid
  misc_feature (29)..(29): Xaa can be any naturally occurring amino acid
  misc_feature (34)..(38): Xaa can be any naturally occurring amino acid
  misc_feature (45)..(49): Xaa can be any naturally occurring amino acid
  misc_feature (51)..(52): Xaa can be any naturally occurring amino acid
  misc_feature (54)..(54): Xaa can be any naturally occurring amino acid
  misc_feature (58)..(60): Xaa can be any naturally occurring amino acid
  misc_feature (62)..(63): Xaa can be any naturally occurring amino acid
  misc_feature (65)..(65): Xaa can be any naturally occurring amino acid
  misc_feature (82)..(82): Xaa can be any naturally occurring amino acid
  misc_feature (85)..(87): Xaa can be any naturally occurring amino acid
  misc_feature (91)..(91): Xaa can be any naturally occurring amino acid
  misc_feature (101)..(101): Xaa can be any naturally occurring amino acid
  misc_feature (111)..(111): Xaa can be any naturally occurring amino acid
  misc_feature (115)..(115): Xaa can be any naturally occurring amino acid
  misc_feature (118)..(119): Xaa can be any naturally occurring amino acid
  misc_feature (121)..(122): Xaa can be any naturally occurring amino acid
  misc_feature (127)..(127): Xaa can be any naturally occurring amino acid
  misc_feature (131)..(131): Xaa can be any naturally occurring amino acid
  misc_feature (133)..(133): Xaa can be any naturally occurring amino acid
MASSMLXSXXGXTSPXXXTMXXPFSGLKXSAAFXXXXXGNNDITXXXXXGXXVXCMKXXXPXXKXKFETLSYLPDLTEVELXKEXXXLLRXKWIPCVEFEXQHGFAYREHXSTPXYYXXRXXTMWKXPLFXCXDSAQVL

SEQ ID NO: 9460 - protein, 543 aa, Cichorium intybus
QQIEQPYRTGYHFQPPSNWMNDPNGPMLYQGVYHFFYQYNPYAATFGDVIIWGHAVSYDLVNWIHLDPAIYPTQEADSKSCWSGSATILPGNIPAMLYTGSDSKSRQVQDLAWPKNLSDPFLREWVKHPKNPLITPPEGVKDDCFRDPSTAWLGPDGVWRIVVGGDRDNNGMAFLYQSTDFVNWKRYDQPLSSADATGTWECPDFYPVPLNSTNGLDTSVYGGSVRHVMKAGFEGHDWYTIGTYSPDRENFLPQNGLSLTGSTLDLRYDYGQFYASKSFFDDAKNRRVLWAWVPETDSQADDIEKGWAGLQSFPRALWIDRNGKQLIQWPVEEIEELRQNQVNLQNKNLKPGSVLEIHGIAASQADVTISFKLEGLKEAEVLDTTLVDPQALCNERGASSRGALGPFGLLAMASKDLKEQSAIFFRVFQNQLGRYSVLMCSDLSRSTVRSNIDTTSYGAFVDIDPRSEEISLRNLIDHSIIESFGAGGKTCITSRIYPKFVNNEEAHLFVFNNGTQNVKISEMSAWSMKNAKFVVDQSVKSAA

SEQ ID NO: 9461 - protein, 909 aa, Oryza sativa
MTDTTDDIAEGISFQAFEDDCRLLGSLLHDVLLRELGPRFIHLLERITILAQSAVNMRSAGVEDTAVVVEKQLGAELAAMSLEDSLCLARAFSHHLNLMTIADTYHRVRKARNFADLSKSCDDTFAKLIQSGVSPEELYDTVCKQEVEIVLTAHPTQINRRTLQYKHLRIAHLLEFNERADLSLEDKEILIEDLVREITAIWQTDELRRHKPTPVDEARAGLHIVEQSLWKAIPHYLRRVSNALKKNTGKPLPLTCTPIKFGSWMGGDRDGNPNVTAKVTRDVSILSQWMAIDLYIRELDTLSFELSINRCSEKLANLANDILLKECNDGESQIRMSKLPGNPKHKLMNTRRRLELLLEDLPCDRDTSEYYDTSDKLLEPLLLCYQSLQSCGSSVLADGRLADLIRRVATFGMVLMKLDVRQESGRHTETLDAITSYLDLGVYSEWDEQKKLDFLTRELKGKRPLVPPYIQVTADVQEVLDTFRVAAELGSDALGAYVISMASNKDARLTVSGDLGRPCPGGTLRVVPLFETVNDLREAGPAIRKLLSIDWYRDHIIKNHNGHQEVMVGYSDSGKDAGRFTAAWELYKAQEDVVAACNAFGIKVTLFHGRGGSIGRGGGPTYLAIQSQPPGSVMGTLRSTEQGEMVQAKFGLPQTSVRQLEIYTTAVLLATLRPPQPPRDDKWRGVMEEISRVSCAQYRSTVYENPEFIKYFQEATPQAELGYLNIGSRPAKRRTTPGISNLRAIPWVFAWTQTRLVLPAWLGVGRGLQDACDKGHTHELRAMYEEWPFFQSTVDLIEMVVAKADAPMAKHYDDVLVHDAGRRTLGAELRQELARTENCVLAVSGHKKLSANNRSLRKLIDSRLTYLNPMNMLQVEVLRRLRQDDDNRKLRDALLITINGIAAGMRNTG

SEQ ID NO: 9462 - protein, 422 aa, Polaromonas sp. JS666
MAIVEVKVPQLSESVAEATMLQWKKKIGEAIAIDEILIEIETDKVVLEVPAPSAGVLTELVVADGGTVVSDQVIARIDTEGKAGAGAPAPAAAAAAAPAAAASSVPAPAAGGSMAGVPMPAAAKLMADANLAAGSVPGTGKDGRVTKGDVLGATAAGAVKSVAASPVPTGAPTTSLPQVAAQVKPADLGDRPEQRVPMSRLRARVAERLLQSQSTNAILTTFNEVNMAPVMEMRKRFQEKFEKEHGVKIGFMSFFVKAAVHALKKYPVLNASVDGNDIVYHGYFDIGIAVGSPRGLVVPILRNADQMSFADIEKKIAEYGAKARDGKLGIEEMTGGTFSISNGGVFGSMLSTPIINPPQSAILGVHATKDRAVVENGQIVVRPMNYLAMSYDHRIIDGREAVLGLVAMKEALEDPARLLFDI

SEQ ID NO: 9463 - protein, 306 aa, Dehalococcoides sp. BAV1
MSTLLYDVIIIGGGPAGLTAALYTGRSKLKTLVIERAFVGGQITRSEKVDNYPGFPEGITGFDLTQQMQIQAEKYGVEITSAEVNAIHKTKDHFEVVTETGGLSGRCIIICGGTERNKLEVPGEEEFSGRGVSYCATCDAPFYNDKVVAVVGGGNMAFYEALHLSEFAKKVYLIHRRQGFRADAVLMDKAKNKSNIELVLDTVVTSINGQDSIQSLSLNNLKTLKTSTLPIDGLFVAVGLQPNTTYLKGVVDMDKNGSILVNNQMETSVSGILSAGDIRSGSIRQVISAAGDGAVAALSAKRYLDL

SEQ ID NO: 9464 - protein, 164 aa, Oryza sativa
MDNYQGQHGYGADRVDVYGNPVGAGQYGGGATAPGGGHGAMGMGGHAGAGAGGQFQPAREDHKTGGILHRSGSSSSSSSSEDDGMGGRRKKGIKEKIKEKLPGGNKGNNHQQQQMMGNTGGAYGQQGHAGMTGAGTGVHGAEYGNAGEKKGFMDKIKEKLPGQH

SEQ ID NO: 9465 - protein, 121 aa, Triticum aestivum
MDRRRIRVLLVEDEEIHRVLARAVLRAAGVEADEAENGAEAVRRVRERVGGGGAYDLILTDKQMPVMDGHEATRQIRAMGVTTPIVAVSSDSLPSDVQAFIAAGADDFTPNPLTNENVGHI

SEQ ID NO: 9466 - protein, 180 aa, Triticum aestivum
KSSDCCKITREPGPVKGGSTVIAFAQDPDGYMFELIQRGPTPEPLCQVMLRVGDLDRAIMFYEKALGMKLLRKKDVPQYKYTIAMMGYAEEDKTTVLELTYNYGVTEYNKGNAYAQVAIGTDDVYKSAEAVELVTKELGGKILRQPGPLPGLNTKITSFLDPDGWKVVLVDHADFLKELH

SEQ ID NO: 9467 - protein, 284 aa, Arabidopsis thaliana; identical to SEQ ID NO: 608

SEQ ID NO: 9468 - protein, 459 aa, Emericella nidulans
MSNLPVEPEFEQAYKELASTLENSTLFEQHPEYRRALQVVSVPERVIQFRVVWENDKGEVQINRGYRVQFNSALGPYKGGLRFHPSVNLSILKFLGFEQIFKNALTGLNMGGGKGGSDFDPKGKSDSEIRRFCTAFMTELCKHIGADTDLPAGDIGVTGREVGFLFGQYRRIRNQWEGVLTGKGGSWGGSLIRPEATGYGVVYYVQHMIKHVTGGKESFAGKRVAISGSGNVAQYAALKVIELGGSVVSLSDSKGSLIVKDESASFTPEEIALIADLKVARKQLSELATSSAFAGKFTYIPDARPWTNIPGKFEVALPSATQNEVSGEEAEHLIKSGVRYIAEGSNMGCTQAAIDIFEAHRNANPGDAIWYAPGKAANAGGVAVSGLEMAQNSARLSWTSEEVDARLKGIMEDCFKNGLETAQKFATPAKGVLPSLVTGSNIAGFTKVAEAMKDQGDWW

SEQ ID NO: 9469 - protein, 186 aa, Zea mays
  misc_feature (101)..(101): Xaa can be any naturally occurring amino acid
MAAGAGAGASAPVAWLLAAAVAAAALAASASAQSGCTTTLISLYPCLNYISGNVSTPPPSCCSQLASVVQTSPQCLCAALSSDSSSLGGVTIDRTRALQAXLPQACSVKTPPASKCNSVGGGSAPGAATPAAPSSGVPATAAAGTGSGSKATPTAPFLTSGGASVRGAVSLALAFAAVTVYAISAM

SEQ ID NO: 9470 - protein, 510 aa, Nocardia farcinica IFM 10152
MVRELTHFIGGQHVAGTSGKFGDVYDPNIGQVQARVPLASKSEVEAAIANAEAAQQEWAAFNPQKRARVMMKFLALVQDEMDSLAALLSSEHGKTIADAKGDIQRGLEVIEFAVGIPHLLKGEYTEGAGTGIDVYSMRQPLGVVAGITPFNFPAMIPLWKAGPALACGNAFVLKPSERDPSVPLRLAELFLEAGLPAGVFNVINGDKEAVDTLLHDPRIKAVGFVGSTPIAQYIYETATANGKRAQCFGGAKNHAIVMPDADLDDVADQLIGAGYGSAGERCMAISVAVPVGEETADRLVAKLTERVHKLNVGRSDDPGADFGPLVGKDGVDRVNNYVQIGIDEGAELVVDGRGLTVEGGEDGYFVGATLFDKVTPEMRIYKEEIFGPVVSVVRAKDYEEGLRLANEHEYGNGVAIFTRDGDTARDFAARVQVGMVGINVPIPVPIAYYTFGGWKRSGFGDLNQHGPDSIRFYTKTKTVTQRWPDGGSRAVLSGRSAGSASNAFVIPTMD

SEQ ID NO: 9471 - protein, 169 aa, Oryza sativa
MASSATTVAPFQGLKSTAGMPVARRSNSSFGNVSNGGRIRCMQVWPIEGIKKFETLSYLPPLTVEDLLKQIEYLLRSKWVPCLEFSKVGFVYRENHKSPGYYDGRYWTMWKLPMFGCTDATQVLKELEEAKKAYPDAFVRIIGFDNVRQVQLISFIAYKPPGCEESGGN

SEQ ID NO: 9472 - protein, 130 aa, Kluyveromyces lactis NRRL Y-1140
MSGKGGKAGSAAKASQSRSAKAGLTFPVGRVHRLLRKGNYAQRIGSGAPVYLTAVLEYLAAEILELAGNAARDNKKTRIIPRHLQLAIRNDDELNKLLGNVTIAQGGVLPNIHQNLLPKKSSKAKASQEL

SEQ ID NO: 9473 - protein, 263 aa, Sinorhizobium meliloti
MSDTVLIEISAGIALLTLNRPEKLNALNYELIDRLLALLDRIEIDETVQAVILTGAGDRAFSAGGDIHEFSGSVAKGVNAATRDFVRRGQQLTHRLEAFPKPVIAAVNGLAYGGGCEVTEAVHLAIASERARFAKPEIKLAMPPTFGGTQRLPRLAGRKRALELLLTGDAFSPQRALDMGLVNAVVPHEQLIASARALAGRTIRHSPLATAAIITAVTRGLNMAIGEGLLCESEQFARMVPSHDLKEGLAAWKERREPRYAGR

SEQ ID NO: 9474 - protein, 545 aa, Shewanella sp. MR-7
MTILTQSTTWQALAAHSHQIPHMRELFAGDPARFSNMSLSTCGLFLDYSKNRATPETLNLLQTLAQEAKLDAKIKAMFAGDIINTTEKRAVLHTALRSTAEQSIVAEGQDIVPEVQQTLNKMQQFVTSVTSGQWKGFTGKAITDIVSIGIGGSFLGPKIVSQALRPYWITGLNCHFVANVDGTSISEKLKLLDPETTLFIMSSKSFGTQETLTNTLTAKAWFLAKGGSQSDVAKHFVAVTSNVAKATDFGIDADNIFPMWDWVGGRYSLWSAIGLPIALLIGMDNFRSLLKGAHQMDTHFANAPLAENMPVIMGLFSLWYGNFFNAQSHVVLTYDHYLRGLPAYFQQLDMESNGKSVTLNGTHVDYSTGPVIWGGEGTNGQHAYHQLLHQGNALIPADFIMPLQSHNPIGEHHDQLASNCFGQTQALMQGRTLDEALAELSKSSLSDEEKLLIAKHKVMPGNKPSNTLLMDKLTPETLGALIALYEHRTFVQGAIWDINSFDQWGVELGKSLGNDVLARIGAEQDATALDASSNGLINLYRQGKI

SEQ ID NO: 9475 - protein, 649 aa, Lactobacillus acidophilus NCFM
MCGIVAFYDPKINDKQAVIGKMMATIKHRGPSSDGYYTNDEVALGFRRLSIIDLRGGSQPIYNEDKTRAIIFNGEIYNFKPLREELIKAGHTFTTKADTEVLLHGYEEWGMDGLLKRVRGMFAFLIWDDNNKTLYGARDFFGIKPMYYSNQDGHLLVGSELKSFLEYPKFKRELNVEAVKPYLMNQYNDLEETFFKGVYRFPAGHWFEYKDGEMKTHQYWDAEYKENSLSFEETLKRINDDLKETVDLYRNADVKVGAFLSEGIDSSYLTSLLNPDDVFSVSFDDSTYDEASKAKALADINHWKFFSEKVDADEAMRDFPEMQYHMDEPDANPSIIPLWYLCKLARKHVTVALSGEGADELFAGYVNYGMHTHNDVIKVFTSELKKLPKNKQVKLAHKIKKMPNFPGKVHMYTNLAEPSEFYVGQSVIYDMDYPTIFTSKDANSILQPTYRNKLTVNGIYQKDFKKVKGIDNVKQMQYIDLHHFMLNDIEQKADKISMAHSLEVRVPYLDKKIAELANSIPTKYLVNRHDTKYALRKASEKVLPDEWAKRPKLGFPTPIKQWLKEPRFYKQVRSLFEEEFVNDIFDQKKIIKLLDDNYEGDGSHRRQIWAIYTFLVWYKLFFVDYENTVKKYQHVQPEVANLISQGKLL

SEQ ID NO: 9476 - protein, 264 aa, Nocardia farcinica IFM 10152
MTDFETILLERKPTSAGKGAVGWITLNRPKALNALNAQVLDDVIAALDELERDDEVGAVVITGSERAFAAGADIKEMQPKSYMDMFMDDYFARWDRLADFRKPTIAAVAGYALGGGCELAMICDILIAADTAKFGQPEIKLGVIPGIGGSQRLTRAIGKAKAMDLVLTGRTMDVEEAERAGLVSRIVPAAELLDTAQQVAETIASMSLPVAMIAKEAVNRSFETTLAEGLRFERRVFHSLFAIEDQKEGMAAFVEKRPAQFGNR

SEQ ID NO: 9477 - protein, 135 aa, Brassica napus
  misc_feature (2)..(2): Xaa can be any naturally occurring amino acid
  misc_feature (12)..(12): Xaa can be any naturally occurring amino acid
  misc_feature (26)..(28): Xaa can be any naturally occurring amino acid
  misc_feature (33)..(33): Xaa can be any naturally occurring amino acid
  misc_feature (43)..(43): Xaa can be any naturally occurring amino acid
  misc_feature (45)..(45): Xaa can be any naturally occurring amino acid
  misc_feature (49)..(50): Xaa can be any naturally occurring amino acid
  misc_feature (55)..(55): Xaa can be any naturally occurring amino acid
  misc_feature (58)..(60): Xaa can be any naturally occurring amino acid
  misc_feature (62)..(62): Xaa can be any naturally occurring amino acid
  misc_feature (64)..(64): Xaa can be any naturally occurring amino acid
  misc_feature (67)..(67): Xaa can be any naturally occurring amino acid
  misc_feature (71)..(73): Xaa can be any naturally occurring amino acid
  misc_feature (79)..(80): Xaa can be any naturally occurring amino acid
  misc_feature (82)..(83): Xaa can be any naturally occurring amino acid
  misc_feature (85)..(85): Xaa can be any naturally occurring amino acid
  misc_feature (93)..(93): Xaa can be any naturally occurring amino acid
  misc_feature (99)..(100): Xaa can be any naturally occurring amino acid
  misc_feature (104)..(104): Xaa can be any naturally occurring amino acid
  misc_feature (107)..(109): Xaa can be any naturally occurring amino acid
  misc_feature (122)..(122): Xaa can be any naturally occurring amino acid
  misc_feature (125)..(125): Xaa can be any naturally occurring amino acid
  misc_feature (130)..(130): Xaa can be any naturally occurring amino acid
  misc_feature (133)..(134): Xaa can be any naturally occurring amino acid
MXSSMLSSAAVXTSPAQATMVAPFTXXXSSAAXPVTRKANNDXTXIASXXGRVSXMKXXXPXAXKKXETLXXXPDLTEXXLXXEXDYLLRNKXIPCVEXXLEHXLVXXXHGSTPGYYDGRDXTMXKLPLXFGXXD

SEQ ID NO: 9478 - protein, 355 aa, Trichoderma atroviride
MSRSTAPNASASRKISFNVSEQYDIQDVVGEGAYGVVCSAIHKPSGQKVAIKKITPFDHSMFCLRTLREMKLLRYFNHENIISILDIQKPRSYDSFNEVYLIQELMETDMHRVIRTQDLSDDHCQYFIYQTLRALKAMHSANVLHRDLKPSNLLLNANCDLKVCDFGLARSAASQEDNSGFMTEYVATRWYRAPEIMLTFKEYTKAIDVWSVGCILAEMLSGKPLFPGKDYHHQLTLILDVLGTPTMEDYYGIKSRRAREYIRSLPFKKKVPFRTLFPKTSDLALDLLEKLLAFNPVKRITVEDALKHPYLEPYHDPEDEPTAPPIPEEFFDFDKHKDTLSKEQLKQLIYQEIMR

SEQ ID NO: 9479 - protein, 135 aa, Glycine max
  misc_feature (39)..(39): Xaa can be any naturally occurring amino acid
MSNSHKVYLVDVVVRSVAITDSCEHSIHDAILAAVIVSXETSAGGSPISRRRAERDLSQLKIEVVDAVSGESGEIELSSSMLRKIEAERAELTKQDSADVVSGNGDTFFFSVWFFKDEFRVSIKRSDIRVHGAQV

SEQ ID NO: 9480 - protein, 406 aa, Mesorhizobium sp. BNC1
MRRVVVTGLGIVSSIGNNAQEVTASLREAKSGISFSPDFAEHGFRCQVWGAPSLDPTDLVDRRAMRFLSKGGAWNHVAMEQAIADSGLEEQDITHERTGIIMGSGGPSTRIIVEAADTTREKGSPKRIGPFAVPKAMSSTASATLATWFKIHGVNYSISSACSTSAHCIGNAYELIQWGKQDMIFAGGHEDLDWTMSNLFDAMGAMSSKHNDTPSTASRAYDVTRDGFVIAGGAGVLVLEELEHAKARGAKIYAEIVGYGATSDGYDMVALSGEGAVRCMRQALSTVKGKVDYINTHGTSTPVGDSGEIGAVRQVFGNEIPPISSTKSLTGHSLGAAGAQESIYSILMMQEGFIGESAHITELDPEFEGVPIVRKRIDNAKIDTVLSNSFGFGGTNATLVFQRYAG

SEQ ID NO: 9481 - protein, 354 aa, Brassica napus
  misc_feature (168)..(168): Xaa can be any naturally occurring amino acid
  misc_feature (198)..(198): Xaa can be any naturally occurring amino acid
MMSGSRLIIFAIISTTVFTVGSIRLLPEDASSDFMEAPAYINGPECSVLPQNRLLLACDPSAVHIAMTLDPAYLRGTVSAVHSILKHTSCPQNIFFHFIASGSSHVKTLSSVFPSLSFKVYTFDETLVKDLISSSIRQALDSPLNYARSYLSEILSSCVHRVIYLDSXVIVVDDIKKLWKTSLTGSRTIGAPEYCHAXNFTKYFSDSFWSDRNLSRVFDSKSPCYFNTGVMVIDLERWREGDYTRKIENWMRIQKEERIYELGSLPPFILVFSGEIEAIDHQWNQHGLGGDNVVSSCRSLHPGPVSLIHWSGKGKPWVRLDDGKPCPVDYLWAPYDLHKSQRQYLQYNQELEIL

SEQ ID NO: 9482 - protein, 482 aa, Shewanella sp. MR-7
MLLKDPSLLRQQCYINGQWCDAQSKETVAIANPATGAVIASVPVMGQAETQAAIAAAEAALPAWRALTAKERGAKLRRWFELLNENSDDLALMMTTEQGKPLAEAKGEVTYAASFIEWFAEEAKRVYGDTIPGHQGDKRIMVIKQPVGVTAAITPWNFPAAMITRKAAPALAAGCTMVVKPAPQTPFTALALAVLAERAGIPAGVFSVITGDAIGIGNEMCSNPVVRKLSFTGSTQVGIKLMEQCAPTLKKLSLELGGNAPFIVFDDANIDAAVEGAMIAKYRNAGQTCVCANRIYVQAGVYDEFARKLSIAVGKLKVGEGITEGVTTGPLINRAAVEKVQSHLEDALSKGATVVAGGKPHSLGGNFFEPTVLTHVDSSMRVAREETFGPLAPLFKFTDVDDVIKQANYTEFGLAAYFYGRDISLVWKVAEALEYGMVGINTGLISTEVAPFGGMKSSGLGREGSKFGIEEYLEIKYICMSV

SEQ ID NO: 9483 - protein, 639 aa, Lactobacillus reuteri
MCGIVAFVDNEKPQIKDQLIQKMKDRIIHRGPDAEGQYVDDDVALGFRRLSFIDVKSGNQPIFNEDSSKAIEFNGEIYNFEELREELISKGHTFKTHADTEVILHGYEEWGKDVVNKLRGMFGFVIWDFKTKEMFGARDHFGIKPLYYAKMNGTFFVGSEIKAFLDHPNFKKELNKEALKPYMTFQYPVTQETFFKGVYRLPEGHYFTYKDGQFEMTQYWDENFEPEDETFDEAVNKIDEVVKNSVKAHTFADKGIKVGSFLSAGVDSSLVTALMRPDNTFSIGFDSTYDETKQARELAAKMGLKNTDEKLTNEEAFHAFPMIQYYLDEPDSNPSVVPLYFLNKLAKDNGYKALLSGEGADELFAGYIDYGFNTKVKFIRWVTDQLKKMPRERRYKFAKWLDGKHFHGQEHMYRNLAPARDTFIGQAYIFSPEEAADYLQPEFDCGPSIADILNPLFDKMEDKDIDEVAKKQYVDLHRFMPGDICLKADKMSMANSVEIRVPLLDKEVMKVAETTPTKYLFNYKDTKWAFRMAANRHLPEEWATRPKMGFPTPVRAWLREKKYYQEVRELFEQDFVKEFFDQEKLLKLADDNFEGKVDGRRKIWTIYTFLTWYKLYFIDNFKPDESGIDRAQKAATTEV

SEQ ID NO: 9484 - protein, 737 aa, Aspergillus nidulans FGSC A4
MSPAHGHCDAAFQPLRDLFDQLLSNESELGASICVNIDGRNVVDLWGGYSNEERTKAWEQDTITTIWSTTKVITALAANILIERGLLDPSKKVSTYWPEFAANGKENVLVSHVLSHSSGLPSWESPNTIKDIYNAEKAAEKIAAQAPWWTPGEQLGYHLVTQGCLVGELVRRTTGQSLAQFIADEITEPLGADYRLGVPEPEWPRTADIIPPPPPEPTPALDPESVAAKAYAGVPIPADAVMTASFRNAELGASNAFTNARALARIASIVALGGTVDGKQYLSPAAIDQMLQEQIRGQDQVLFVNLRWGLGVGLPVPETVPWLPSNSRLCFWGGWGGSVMIMDLDRRMSIALKVNRMFESRTSDAGENAVGLLSGGFFVDTAGPGFSSTRSSYYDAIMQIIKSLWVQTFPSKPTLTAATLPPQTGKVIIITGATSGLGFELARILYKSGATVYIGARNESKAKATIETITASASSTALAASAGKLHFLPLDLADLRTIKPFVESFLSRESRLDILFNNAGVASIPLSNRTAQNLEPHLGTNCAGPYLLTQLLSPILVSTAQKHSTAPNTVRVVWSSSMLVDALAPRSGIRPSDLDPPSPNMNLNYALSKTGNWFLADRLAKQLGERGVVSITQNPGNIYTPIFDNAPRLTVWLSKPIYYKPEQGVNTMLWAGFSDGVTVERGGGYVIPFGRWHPYPRKDLLEAIMDKEEDGNEAENRGRGYAKAFEEWCDLVTREFR

SEQ ID NO: 9485 - protein, 409 aa, Geobacter sulfurreducens PCA
MEIKIPSVGESVFEALVATWLRQDGDAVRKDEPVCEIETDKITMELNAEADGVLSIAVPAGTTVKIGTVIGTIREGAAAPVAESPAPAQAAAAAPAAEPPLSPSVRKMARERGISPEAVPGTGRGGRVTVDDLFSFAEKREQGASPAGAPPPAAPQPPAQQPRPAAEQPRQAEPPEADRTTRTPMTPIRKRIAERLMAARQQTAMLTTFNEADLGRIVELRARHKEQFAKRHGVSLGFMSFFVKACVEALKAFPLVNARIDGNDIVRHHYYNIGIAIGADKGLVVPVLRDADRLHFWEIEQAIAAFVEKIKTNRLELSDLEGGTFSITNGGVYGSLLSTPILNPPQSGVLGMHAIQDRPVARDGQVVIRPMMYLALSYDHRIIDGREAVGFLRTVKEYVEDPEELFLEG

SEQ ID NO: 9486 - protein, 346 aa, Bordetella bronchiseptica RB50
MQALGARRPARPFRVPIIAGVEHTAGGWFVNPPKHAKVLILGSGPAGYTAAIYAARANLAPLVVTGLAQGGQLMTTTDVDNWPADPDGVQGPDLMQRFLRHAQRFDAGVVSDAIHTVRLDRRPFALTGDQGAYTCDALVIATGASAKYLGLPSERAFMGKGVSGCATCDGFFYRNRDVLVVGGGNTAVEEALYLSNICRTVTVVHRRDRFRAEPILVDRLQARAALGKVKFEYFHELDEVLGDASGVTGARLRDNRDGTARDVAAKGVFIAIGHAPDTGLFEGQLALRNGYIVTRGGLSGLATMTSIPGVFAAGDVQDQIYRQAVTSAGTGCMAALDAQRWLEGAA

SEQ ID NO: 9487 - protein, 465 aa, Aspergillus oryzae
MADVGDRMFCHACGGVWLRRDHGLECPHCHSEFTEIIEIPPDTEEEVPDPPTSVPEDRSAPPRNPWADHNPWDHDNMNTDTPDWGSGNGFRHHTYRSPDGRFTFSSTTYTRRGSSGQQMPVDPLMPMVRGLDTIFHGLADTYRQTEYRQPNERDSSPGLWRTDRQNQGFGPNGSRIYSTSFDIDMNTRSNGGVGSEFHTTGGLHPRDADGPQPMGTPLRTLGEYVLSLGCGEIEKVTDLYSILELFRADFGNNGPPGGGPGVRVMTGPNPIAILSTLLNLDRHGDAVYSQEELDRVISQLIDQNARGTAPPPAAPNEIQSLPKKKVDQEMLGSEGKAECSICMDPVELGTEVTVLPCKHWFHYNCIEMWLSQHNTCPHCRRGINIPAGPEGSSDNPVVINSSPETSPRRPSGAAPEHSGQSPPRWNGPGPETGGQEQDQGQSSRNDNQGGGFAGWVRSHFGGGNQ

SEQ ID NO: 9488 - protein, 162 aa, Hordeum vulgare
MSAAEGAVVFSEEKEALVLKSWAIMKKDSANLGLRFFLKIFEIAPSARQMFPFLRDSDVPLETNPKLKTHAVSVFVMTCEAAAQLRKAGKITVRETTLKRLGGTHLKYGVADGHFEVTRFALLETIKEALPADMWGPEMRNAWGEAYDQLVAAIKQEMKPAE

SEQ ID NO: 9489 - protein, 135 aa, Pasteurella multocida subsp. multocida str. Pm70
MRILHTMLRVTNLERSIQFYQQVLGMRLLRTSDNPEYKYTLAFLGYDDEENASVLELTYNWGVTEYELGTAYGHIAIGVEDIYATCDAVRQAGGKITREPGPVKGGKTVIAFVEDPDGYKIEFIENKHAQSGLGN

SEQ ID NO: 9490 - protein, 1097 aa, Oryza sativa
MMTMSDDGDRTCPLCAEDMDITDQQLKPCKCGYEICVWCWHHIIDMAEKEDTEGRCPACRTRYDKDRIVKMAATCDRTVVEKNVDKKQKTQKVKSKAAVTVEAKKHLASVRVIQRNLVYIIGLPANLCNESILERREYFGQYGKVLKVSVSRPTGAPSQQAPTNNSISVYITYAKEEEAIRCIQAVHNFVLEGKVLRACFGTTKYCHAWLRNMTCGNPDCLYLHDVGSQEDSFTKDEIISAYTRSRVPQMASNVSQRRAGTVLPPQAEDFSYSAVVAAKHPIKNGITNTANQSRLSPPNSSSGRSTLPPAASWGHRDLNTRTTATGVASSQSLTKSKADPQSNSFSSSSTVSSTKLPSSWNDDTSTVPKMTEGRDSLSKTLKPYKPGIAKETQAVTSLESSLDIDFSTIPSAWNDDDVTSDGMSKGSDEKQVVNDNGKFECSVSSKPAESGHLTSKSTTSPKKDIAVNSTRQSPLNCVSSPSISKSEVKDGDGDYQVTNMASKTSTSVIRKDQSNQAAIDTATEDTRSESTDIDRLSVGVSSVTLSRKDGVQSIAENQQPDAILSTSVVVPFSQNLKLAECNDSTCQPSSDKHRDWCSDIQSSVSPQLNDIESYAVATDKSHGRVLDAADQASSSPYVHFPNTSPISLWNGKEINHTSTSDRTSTMMQPGLLSSVDSTSTMLNGHQEGLGTIYAPGKVSEHPRMKNHQPGAVGAVRIDNIGSFDKAVSVNKDESSIIADILSLEFDPWDESYSTANNFAKMLSASEKNDVLFDARSWKTKTSNSESRFSFARQDNQGSLLDSSMRNYKSEQNFSLPSQNSHGTIYQSGIAFQSPEEGFSKSNSLTMLDMLATGTSKPKVSAPPGFSAPARVPPGFSSGFSSHEGLNPPPGFSSHNGPNPPPGFSSQGGSNQIYGSAYSETRPFDDLLGINTSHYQPQLARQTSDIEFVDPAILAVGKGRMPGISDSGLEMKTSHTFPSQLQTSNDPRFQLLMQQNVPSHQNVGFAEHVQDAFNPMNDNYLASRLIPQNHGSLSSYTQMSLQQPRSSHLTNGHWDGWGDLRQGNNVSMPDMSRMLYPTEANNFHMLGSNDLYNRAFGL

SEQ ID NO: 9491 - protein, 428 aa, Solibacter usitatus Ellin6076
MTSSNNPLRDIEMTTLANGVRVITEAMQHVRSVSVGIWIGAGSRRETTEQNGISHFIEHMLFKGTTTRSAEDIARAVDALGGNLDAFTAKELVCFNTKVLDQHLSQAFEVLADLVLNPMFREEDIEKEKGVILEEIKMEADSPDYLVHEIFSSNFWKDHPLGKPILGTPQSVRRFDSTMIRDFYRSVYSPANMVVTAAGHMTHEGLTALVQQYFASLPPGPAAPPDLQPSTHARIALRNKKSLEQVHLCLGVPSYPLPHEERFACYVLNTLLGGGMSSRLFQNIRERQGLAYAVFSELNPYRDTGCLSIYAGTSAESARQVVESITTEFRQLKGDRVGDEELRRAKDHLKGSLMLGLESTASRMSNLARQEMYFGRFFTLDELVESIEAVTAEDVRRIAQTFFDSRQIALTILGNLENFRITREELGC

SEQ ID NO: 9492 - protein, 415 aa, Arabidopsis thaliana
MTTMSNLPAEVLEEILSRTPVTSLRTMRSTCKKWNNLSKKKIIPEAARKQQGLMLIKKKICSLSFSLHEIHKDDYVVPCINQVDIPRNIEVEKIFHCDGILLCVIEDNCSLLVWNPYLGQTRRIEVSSDADMNDRYALGYDNNNSSHKILRIKKDFKNSDGLGYEIYRFASNSWSLLDEEVMKPEWDVWSVQRSSVSLKGNTYFLLQGNDYDDQEDEEEEDDEEYEDDDDVLPKDNFLLCFDYTTERFGPRLLLPFNPHVEETVALSCIGEERLVMLYQSFKTYKGIEIWVTDKIDPKAVSWSKFLKVDITPLTGFPVDFYADSFVIDEEKKVAAVFDIHCSYQKAHIIGEDGYLKCVNMGRASDVGNGQPLVFSSYVPSLVKVPVKQPKGKRKGRSSETKSNKNKKGRKIKIIG

SEQ ID NO: 9493 - protein, 485 aa, Arabidopsis thaliana
MSSPRSNKPKIVNGPGGYILQDVPHLIDYLPDLPTYPNPLQDNPAYSVVKQYFVHADDSVPEKVVVHKDGPRGVHFRRAGPRQKVYFESDEVHACIVTCGGLCPGLNTVIREVVSSLSYMYGVKRILGIDGGYRGFYAKNTIPLNSKVVNDIHKRGGTIIGTSRGGHDTNKIVDSIQDRGINQVYIIGGDGTQRGASVIFEEIRRRRLKVAVVGIPKTIDNDIPVIDKSFGFDTAVEEAQRAINAAHVEAESNENGIGFVKLMGRYSGYIAMYATLASRDVDCCLIPESPFYLEGEGGLFEFIERRLKDHGHMVIVLAEGAGQDLMCKSMESTPMDASGNKLLKDVGLWLSQSIKDHFKKNKMVMNLKYIDPTYMIRAVPSNASDNVYCTLLAQSAVHGAMAGYTGYTSGLVNGRQTYIPFYRITETQNNVVITDRMWARLLSSTNQPSFLGPKDTSEEKKELPETPLLDDGAVDIPPVTKEVTK

SEQ ID NO: 9494 - protein, 184 aa, Pseudomonas aeruginosa PAO1
MKPRVLLSVLALAGLPLSGWAADCPELLQGQLTKLRSKESIDLCQRYAGKPLVVVNTASHCGFTPQFKGLEALYQRYKGQGLEVLGVPSDDFKQEAADTAETAKICYGNYGVTFAMTQPQHVRGDEAIPLFRQLAEQSGQAPRWNFYKYVVDRQGRVVAQFSSKTTPDDPQLQAAIEKAIASQP

SEQ ID NO: 9495 - protein, 112 aa, Mycobacterium sp. KMS
MKLITAIVKPFTLEDVKTGLEQTGILGMTVSEVQGYGRQKGHTEVYRGAEYSVDFVPKVRVEVIVDDSAVDKVVDVIVQAARTGKIGDGKVWVSPVDTVVRVRTGERGADAL

SEQ ID NO: 9496 - protein, 286 aa, Bacillus cereus G9241
MVAVIIKGNEVAEKKRAQLTEEVVKLKEQGIVPGLAVILVGEDPASRSYVKGKEKGCEQVGIYSELIELPETITEERLLAEIDRLNGDDRINGILVQLPLPKHIEEKAIIERISPEKDVDGFHPISVGRMMTGQDTFLPCTPHGIVELVKETNLDISGKHVVVIGRSNIVGKPVGQLFLNENATVTYCHSKTQNMKELTKLADILIVAVGRPKMVTADYIKEGAVVIDVGVNRLETGKLCGDVDFDNVLDVAGYITPVPKGVGPMTITMLLHNTVESAKRAGVVCK

SEQ ID NO: 9497 - protein, 666 aa, Arabidopsis thaliana
  misc_feature (178)..(178): Xaa can be any naturally occurring amino acid
MINFSLSLTKSMSYSFIWMLFVIHISCVLSADGNHILCSPSFTCGNQRGLLYPFWIAGRKECGHPDFELDCNAGVPELSISSVKFRILGADYDSGIITLARSDNIDDPCLPNSFTTSFNETVLPLASTTDLLTIYYDCNRNVSSFVSTFVKELDCPDDGTDDRRNYYLTRKLTLLPPXLKLEGNSFLLNDFGGSCSRNVSNPASRTALNTLESTPSTDNLKIALEDGFALEVNSDCRTCIDSKGACGFSQTSSRFVCYYRQEPQNPTRNKVILKLFFIVIYVLGIGAASFAMMGVILVVTCLNCLIRRQRKTLNDPRMRTSDDSRQQNLKALIPLKHYSYAQVTSITKSFAEVIGKGGFGTVYRGTLYDGRSVAVKVLKESQGNGEDFINEVASMSQTSHVNIVTLLGFCSEGYKRAIIYEFMENGSLDKFISSKKSSTMDWRELYGIALGVARGLEYLHHGCRTRIVHFDIKPQNVLLDDNLSPKVSDFGLAKLCERKESILSLMDTRGTIGYIAPEVFSRVYGRVSHKSDVYSYGMLVLDIIGARNKTSTEDTTSSTSSMYFPEWIYRDLEKAHNGKSIETAISNEEDEIAKKMTLVGLWCIQPWPLDRPAMNRVVEMMEGNLDALEVPPRPVLQQIPTATLQESSTFSEDISAYTEICSINVA

SEQ ID NO: 9498 - protein, 658 aa, Yarrowia lipolytica CLIB122
MRTASLTTAKLLLTLIARLPLLHALPYGGLSRSGSYSPYEHDDDTLDPESSDFWLYMFVSFVLVVAGGVFAGLTIALMGQDEVYLHVISQSGESHERKAAEKVLRLLKRGKHWVLVTLLLANVITNETLPIVLDRCLGGGWRAVVIATVAIVIFGEVIPQSISVRYGLSVGAYFAPFVLGLMYILYPLAYPTALLLDHLLGEDHGTVYKKAGLKTLVTLHQTMGVERLNEDEVTIISAVLDLKEKPVGTIMTPLDDVYTMSSDTVLDEKVVDQILQAGFSRIPIHAPGEPTNFIGMLLVRILISYDPEDALPVSSFPLATLPETRPDTSCLNILNYFQEGKSHMVIVSESPGDAYGALGVLTLEDVIEELIGEEIIDESDVYIDVHRAIRRTNPGPLSKRNLVSYVQNSPRNSIGNYESVSHFLSRSLSRDEAGKVQHQSHSNLGPHGSSQLAANPTITVSSSPKTGLKLGNNTATPHDASAPGPFQKKHHRIEPLNLAANPKETSNTKVTIKKSGSGHRPTGSSDLVHHPDHPEGGTSTQYGTIFETEQGAVVDALNDPEINTRLSPRTGMSPRTAAVNGVNGARPSAIPSRPDLGTEIHSFRSGGIIESVVNVQGVHKTIIEAAVSDNDFEEEDSPKSSNGSSRRGSRRALLDSSP

SEQ ID NO: 9499 - protein, 414 aa, Bradyrhizobium japonicum USDA 110
MTEIRVPTLGESVTEATIGRWFKKAGDPVAVDEPLVELETDKVTIEVPAPSAGTLSEIIAADGATVAVGALLGQITEGAAGAAKPAAAPAKPAAAPAAAAAAAAPAPAAKAPPADAPLAPSVRKLSAETGIDASTVPGSGKDGRVTKGDMLAAIERAASAPTPVNQPAAAVQVRALSPADDAAREERVKMTRLRQTIARRLKDVQNTAAMLTTFNEVDMTNVMALRAHYKDAFEKKHGSKLGFMGFFTKAVVQALKDIPAVNAEIDGTDLIYKNYYHIGVAVGTDKGLVVPVVRDCDHKSIADIEKGIADFGRRARDGQLKIDEMQGGTFTITNGGIYGSLMSTPILNAPQSGILGMHKIQERPMVVAGKIEVRPMMYLALSYDHRVIDGKEAVTFLVRVKESLEDPARLVLDL

SEQ ID NO: 9500 - protein, 401 aa, Thermotoga maritima MSB8
MNVVVQKYGGSSVATPERIKNVAQRIKKKVDEGYKVVVVVSAMGKTTDNLIKLAKEISPRPDSRELDMLLATGEQVSAALLSMALKDLGVKAKSLNAFQVKIKTTPHHTSARIVDIDDSVIRENLKDYDVLVVTGFQGVNEHGDLTTLGRGGSDTSAVALAAKLRVPCEIYSDVDGIYTCDPRVHPRAKKLAYITYDEALELTALGAKVLHSRSVEIAKKYGIPIYCASSFTEEEGTMVVERLPEWLEEPVVTGATISHGQIKVSISFLPKDVKYITAIFEEVGKRALNVDMISLVPSNGKVFLSFTILEDHKEDLDEALKEALRDVEGWKSTYEGGFAKLSIVGVGMRTSPGVAARFFEALERAGVTPELVTTSEIKISCLVPEEKAEEALKSVIEEFEL

SEQ ID NO: 9501 - protein, 294 aa, Bradyrhizobium japonicum USDA 110
MSILIDKNTKVICQGFTGKNGTFHSEAAIAYGTKMVGGTSPGKGGSTHLGLPVFDTVRDAREKTGADASVIYVPPPGAADAICEAIDAEIPLIVCITEGIPVIDMVRVKRSLAGSKSRLIGPNCPGVMTAGECKIGIMPANIFKTGSVGIVSRSGTLTYEAVFQTSQEGLGQTTAVGIGGDPVKGTEFIDVLEMLLADPKTESIIMIGEIGGSAEEDAAQFLKDEAKRGRKKPMVGFIAGVTAPPGRRMGHAGAIISGGKGDAGSKTDAMKSAGITVSPSPARLGHTLAEKLKG

SEQ ID NO: 9502 - protein, 567 aa, Oryza sativa (japonica cultivar-group)
MASSALICDTEQWKGLQAHVGAIQKTHLRDLMDDAERCKAMTAEYEGIFLDYSRQRATGETMEKLFKLAEAAKLKEKIEKMFSGDKINSTENRSVLHVALRAPRDEVIKSDGVNVVPEVWGVKDKIKQFSETFRSGSWVGATGKALTNVVSVGIGGSFLGPLFVHAALQTDPEAAESAKGRQLRFLANVDPVDVARSIKDLDPETTLVVVVSKTFTTAETMLNARTLKEWIVSSLGPDAVAKHMIAVSTNLELVEKFGIDPKNAFAFWDWVGGRYSVCSAVGVLPLSLQYGFPIVQKFLEGAASIDKHFRSSSFEKNIPVLLGLLSVWNVSFLGYPARAILPYSQALEKFAPHIQQLSMESNGKGVSIDGVQLSFETGEIDFGEPGTNGQHSFYQLIHQGRVIPCDFIGVVKSQQPVYLKGEIVSNHDELMSNFFAQPDALAYGKTPEQLHSEKVPEHLISHKTFQGNRPSLSLLLPSLSAYEIGQLLSIYEHRIAVQGFLWGINSFDQWGVELGKSLASQVRKSLHASRMEGKPVQGFNSSTASLLTRYLAVEPSTPYNTTTMPKV

SEQ ID NO: 9503 - protein, 321 aa, Ralstonia metallidurans CH34
MSMNTSQIELRLKRITFEAERISSFEFVSADANPLPGFQPGAHIDLHLQQGMIRSYSLANAASADPLYYRVAVQREPNGRGGSRWAHDKLRVGDKVWATPPQNDFPLDECASSTVFFVGGIGITPVLPMLRRLDAIGREWKLMYASRSPGETAFAEELQRIDAGRGRIVHFHDSEPGQRLEIRATVAALPASTHVYCCGPTGMIDDFLAVTAERDPSTVHYERFGAAQQAATEGGFDVVLHRSGAKYRVEPGKTILDVLLDNNVAVPYSCCNGVCGSCRTEIIDGQADHRDDFLSDEEKQANQAIMVCCSGARSKTLVLDL

SEQ ID NO: 9504 - protein, 709 aa, Magnaporthe grisea 70-15
MCGASVIVSLRRKHEETNGAAAAKTSDKESRLAKSLDALAHRGPDARGVWIDPTGEVGLAHTRLAIIDLSAEGNQPLHDDQDHIHAVITGEIYDHDRLRRECVEAGYRFKGHSDSEVVVALYQRYGAPGFLEHCRGEFSMVVYDDRSGEVFACRDRSGIKPLFYTIVQNELWFSSEVKGFLGMGWKPEWALESIAMGVTQVGSSTIFQGVNRIEPGFYMKVTADGDITHSKYWDFDYPDKTVVDNRSMEDMVQELREALVDAVRLRLRADVPVGIYLSGGLDSSMIAGIAKKLIDEEGATAGSQKASERMTTFTLAVNSDQDNSVYNEASIASRTAKFLGVKEKTLNADEQLLASTFEDACWHIEQPISTLSMCAKVALSKLARDSGVTVILTGEGADETFAGYPWMLPDLTAEADHSRPDAPINRDIDNLRGPIRKQLFDMWANLGSTEMPKLLQQVKPETWAKMNFVSTPVVSDGSSGVGLIHPKLRAKYNLDDRISKTQDCIGEDVLKKVREKWHPLNSSLYLNHKTLLANTIIPSNGDRTEMANSVEGRPPILDHKVLELASKLPPSVQVGYFPDGANLNSGKTVFRSNNADGELMARFREKFLLREAARPFVTDEIYSRPKHSFMASSNYHAGGPIHQVLKRLLTKENVEAVGFLDWPKIEAHLASAFDPQLAHVAGQNFAPCLQAASFVTISQKFGVARASVE

SEQ ID NO: 9505 - protein, 647 aa, Nocardia farcinica IFM 10152
MCGLLGFLTADAATSEVVDQVYNALHCMRHRGPDERGTWHDDHLVFGFNRLSIIDIEHSHQPLRWGPPENPERYALTFNGEIYNYLELREELAAAHAAEFGDAPMFRTEGDSEAIVAAYHYWGAEAVAKLRGMFGFAIWDTQTRELFLARDPFGIKPLFLATGPGGTAFGSEKKSLLDLLPALRLSDDLDPRALEHYTVLQYVPEPETLHKGIRRLESGTYAVVRPGAAPQVTRYFTPRFPVRPFAPGSAQTRYNEIAAALEDSVAKHMRADVTVGSFLSGGIDSTAVAALAMRHNPNLITFTTGFEREGYSEVDVAAESAAAIGARHIVKVVSPAEFAAAIPEIVWYLDDPVADPALVPLYFVAKEARKHVKVVLSGEGADELFGGYTIYREPLSLKPFEYLPRGLRRLAGRLSERIPDGTRGKSLLHRGSLTLEERYYGNARSFNDAQLRAVLREFRPEWTHQDVTAPIYAQSRGWDPVARMQHLDLFTWLRGDILVKADKMTMANSLELRVPFLDTEVRRVAEQLPFDQKITKDTTKYALRQALEGIVPAHVLHRAKLGFPVPLRHWLRGTELYDWAHTQIAESQTDHLLDKAAITAMLVEHRAGRADHSRRLWTLLVFMVWHGIFVEDRIKPDIQEPVYPVTL

SEQ ID NO: 9506 - protein, 424 aa, Zea mays
MPLLPLLPVMASTFSPTSAARALLPGSTSRPLFLAASASSGRIQPSRKGLDFRRGRFTVCNVAAPTAAEQEATATASAAKETQRPVYPFAAIVGQDEMKLCLLLNVIDPKIGGVMIMGDRGTGKSTTVRSLVDLLPDIRVVVGDPFNSDPDDPEVMGPEVRQRVLQGDTGLPVTTAKITMVDLPLGATEDRVCGTIDIEKALTEGVKAFEPGLLAKANRGILYVDEVNLLDDHLVDVLLDSAASGWNTVEREGISISHPARFILIGSGNPEEGELRPQLLDRFGMHAQVGTVRDAELRVKIVEERARFDRDPKTFRESYHDEQEKLQQQISSARSNLGAVQIDHDLRVKISKVCSELNVDGLRGDIVTNRAAKALAALKGRDSVTVEDIATVIPNCLRHRLRKDPLESIDSGLLVIEKFYEVFS

SEQ ID NO: 9507 - protein, 112 aa, Haemophilus influenzae Rd KW20
MKKIEAMIKPFKLDDVRESLSDIGISGMTITEVRGFGRQKGHTELYRGAEYMVDFLPKVKLEVVVPDELVDQCIEAIIETAQTGKIGDGKIFVYHVERAIRIRTGEENEDAI

SEQ ID NO: 9508 - protein, 481 aa, Burkholderia sp. 383
MANVTYTDTQLLIDGEWVDAASGKTIDVVNPATGKPIGKVAHAGIADLDRALAAAQRGFDAWRKVPAHERAATMRKAAALVRERADAIAQLMTQEQGKPLTEARVEVLSAADIIEWFADEGRRVYGRIVPPRNLGAQQTVVKEPVGPVAAFTPWNFPVNQVVRKLSAALATGCSFLVKAPEETPASPAALLRAFVDAGVPAGVIGLVYGDPAEISSYLIPHPVIRKVTFTGSTPVGKQLAAMAGLHMKRATMELGGHAPVIVAEDADVALAVKAAGGAKFRNAGQVCISPTRFLVHNSIRDEFTRALVKHAEGLKVGNGLEEGTALGALANPRRLTAMASVVDNARKVGARIETGGERIGTEGNFFAPTVIADVPLEADVFNNEPFGPVAAIRGFDKLDDAIAEANRLPFGLAGYAFTRSFANVHLLTQRLEVGMLWINQPATPWPEMPFGGVKDSGYGSEGGPEALEPYLVTKSVTVMAV

SEQ ID NO: 9509 - protein, 366 aa, Triticum aestivum
MASSAAAAVPESDRAALVKAFDESRTGVRGLVESGVSTVPDLFVHPDPYASVPLAPPGVSIPVVDLSLPAPVAAAAAAAAARDWGFFHLVNYEALVPADYPARALAAVRAFNELPAPERSAHYGRAMGGGVSYSSNVDLYRSAAASWRDTIQVGFGPTRPDTERIPPVCRSEILEWEAHTTAVARAVMALLSQGLGLSEAALEEASCLEGKVMVCHYYPVCPEPERTMGLVPHTDPGVLTVLAQDDVGGLQVKHTNEDGESYWVDAKPVPGALVINVGDLLQIMSNDKYTSVDHRVVMNSREEARVSIAVFFNPGKRGDSVFYGPLPELVSSENPAKYRSFTMSEFFGAFFKRDLASKALLDNFKL

SEQ ID NO: 9510 - protein, 351 aa, Wolbachia sp.
VVANTDAQALEKSLCDKKIQLGINLTKGLGAGALPDVGKGAAEESIDEIMEHIKDSHMLFITAGMGGGTGTGAAPVIAKAAREARAAVKDRAPKEKKILTVGVVTKPFGFEGVRRMRIAELGLEELQKYVDTLIVIPNQNLFRIANEKTTFSDAFKLADNVLHIGIRGVTDLMVMPGLINLDFADIETVMSEMGKAMIGTGEAEGEDRAISAAEAAISNPLLDNVSMKGAQGILINITGGGDMTLFEVDAAANRVREEVDENANIIFGATFDQAMEGRVRVSVLATGIDGRNNKSETSPISQSEDSEKEKFKWPYSQSESTQDKILETKPSEQVSEGAKWGSNIYDIPAYL

SEQ ID NO: 9511 - protein, 106 aa, Pasteurella multocida subsp. multocida str. Pm70
MEVLHSTDATFTADVVNSDVPVLLDFWAPWCGPCRMISPILDEIAAEFSGKVKVVKINIDENQATPAQLGVRSIPTLVLFKNGKAVATQVGALPKNQLANFINQNI

SEQ ID NO: 9512 - protein, 548 aa, Yersinia pestis biovar Medievalis str. 91001
MKNINPSQTAAWKALQQHFEQMKDVTISSLFAKDDQRFNRFSATFDDQMLVDFSKNRITSETLEKLQDLAKETDLAGAIKSMFSGEKINRTEDRAVLHIALRNRSNTPIVVDGKDVMPEVNAVLAKMKQFCDRVISGDWKGYTGKAITDVVNIGIGGSDLGPYMVTEALRPYKNHLNMHFVSNVDGTHIAEALKPLNPETTLFLVASKTFTTQETMTNAHSARDWFLSAAGDPAHVAKHFAALSTNAKAVGEFGIDTNNMFEFWDWVGGRYSLWSAIGLSIALSVGFEHFEQLLSGSHAMDKHFAETPAEKNLPVLLALIGIWYNNFFGAETEAILPYDQYMHRFPAYFQQGNMESNGKYVDRNGHPVDYQTGPIIWGEPGTNGQHAFYQLIHQGTKLIPCDFIAPAISHNPLSDHHAKLLSNFFAQTEALAFGKSLEDVEAEFAAAGKTPEQVAHVAPFKVFEGNRPTNSILLREITPFSLGALIALYEHKIFTQGVILNIYTFDQWGVELGKQLANRILPELADDQEVTSHDSSTNALINRFKNWR

SEQ ID NO: 9513 - protein, 113 aa, Arabidopsis thaliana
  misc_feature (38)..(38): Xaa can be any naturally occurring amino acid
  misc_feature (45)..(45): Xaa can be any naturally occurring amino acid
  misc_feature (48)..(49): Xaa can be any naturally occurring amino acid
  misc_feature (53)..(53): Xaa can be any naturally occurring amino acid
  misc_feature (58)..(58): Xaa can be any naturally occurring amino acid
  misc_feature (62)..(62): Xaa can be any naturally occurring amino acid
  misc_feature (65)..(65): Xaa can be any naturally occurring amino acid
  misc_feature (67)..(67): Xaa can be any naturally occurring amino acid
  misc_feature (75)..(75): Xaa can be any naturally occurring amino acid
  misc_feature (78)..(79): Xaa can be any naturally occurring amino acid
MASSMLSSAAVVTSPAQATMVAPFTGLKSSAAFPVTRXTNKDITXILXXGGRXSCMKXWPPXGKXKXFETLSYLXDLXXFIRKSLLVYSFVIILLAFFIFFLFFLLSFYSYYC

SEQ ID NO: 9514 - protein, 461 aa, Yersinia pestis biovar Medievalis str. 91001
MIQVAPQQTRDAPSATVVAKFGGTSVASFDAMSRSADVVLSNPDVRLVILSASAGITNLLVALADGSEPEKRADHLEDIRHIQYDIIARLTDSTVIREEIDRMLENIAMLSEAASLATSPALTDELVSHGELMSTLLFVELLRQRQVAVEWFDVRKVMRTNDRFGRAEPDTSALAELAQTLLAPRIEDAIVVTQGFIGSEGKGRTTTLGRGGSDYTAALLGEALNVSRIDIWTDVPGIYTTDPRVVPAAKRIDKIAFEEAAEMATFGAKILHPATLLPAVRSDIPMFVGSSKDPAAGGTLVCNETYNPPLFRALALRRKQTLLTLHSLNMLHARGFLAEVFNILARHSISVDLITTSEVSVALTLDTTGSTSTGDSLLTTSLLTELSSLCRVEVEEDLALVAIIGNNLSQACGVGKEVFGVLDPFNIRMICYGASSHNLCFLVPGNDADKVVQTLHYNLFE

SEQ ID NO: 9515 - protein, 508 aa, Bacillus thuringiensis serovar konkukian str. 97-27
MILDADIKTQLSQYLQLMENDILLKVSAGNDDVSKDMLALVDELATMSSKITVEKVELERTPSFSVNRPGEDTGVVFAGIPLGHEFTSLVLALLQVSGRAPKVEQKLIDQIKNIQGEYHFESYISLSCHNCPDVVQALNVMSVLNSGITHTMIDGAAFKEEVESKDIMAVPTVFLNGESFGSGRMTLEEILAKMGNGPDASELSDKDPYDVLVVGGGPAGASAAIYAARKGIRTGIVAERFGGQVMDTMGIENFISVKRTEGPKLVASLEEHVKEYDIDVMNLQRAKRLEKKELIEVELENGAILKSKSVIVSTGARWRNVGVPGEAEFKNKGVAYCPHCDGPLFTGKDVAVIGGGNSGIEAAIDLAGIVKHVTVLEFMPELKADAVLQERLNSLPNVTVLKNVQTKEITGTDKVNGISYIDRETEEVHHVELQGVFVQIGLVPNTDWLGETVERVRGEIVTDKHGATNVPGVFAAGDCTNNPYKQIIISMGSGANAALGAFDYLIRN

SEQ ID NO: 9516 - protein, 313 aa, Arabidopsis thaliana
MAALQTLREWIGIQQFPPATQSKLLEILGKYKEEDVSSLTVLVIGKSGVGKSSTVNSVIGEKAAAVSTFQSEGLRPTLVSRTRSGFTLNIIDTPGLIEGGYVNDQAINIIKRFLLNMTIDVLLYVDRLDVYRVDDLDRQVVGAITDAFGKEIWKKSALVLTHAQFSPPDGLNYNHFVSKRSNALLKVIQTGAQLKKQDLQGFSIPVILVENSGRCHKNESDEKILPCGTSWIPNLFNKITEISFNGNKAIHVDKKLVEGPNPNERGKKLIPLMFAFQYLLVMKPLVRAIKSDVSRESKPAWELRDSGLASRRS

SEQ ID NO: 9517 - protein, 635 aa, Dechloromonas aromatica RCB
MCGITGIFDTRSKRDIDRAVLHRMNESQIHRGPDEGGTHVEPGVGLGHRRLSIIDLSTGQQPLYNEDNSVCVVFNGEIYNYQELIPELQALGHVFHTRSDTEVIVHAWEAWGESCVDRFRGMFAFALWDRNRETLFLARDRLGVKPLFYALLDDGTFLFGSELKSLLAHGGLKRDIDPCAVEEYFALGYVAEPRSIFKQALKLPPASTLLVRRGQPVGTPREYWDVRFTLDNPISDADAQAELTHRLEESIKLRMISEVPLGAFLSGGVDSSAVVALMAGLSQKPVNTCSIGFSDPAFNESEFAKMVADRYQTNHHLDIVESDDFDLIDTLARLYDEPYADSSAIPTYRVCQLARKHVTVALSGDGGDESFGGYRRYRLHMMEEKMRSALPLGLRRPLFGALGKLYPKADWAPRVFRAKTTFEGMARNSVEAYFHSVSILRAPMRDRLFSTQFKSALSGYDALKVFTDHAAKADTTDPLALIQYLDLKTYLIGDINTKVDRASMAHSLEVREPLMDHKLVEWLATLPSTLKIRGQEGKYLLKKSMEPHLPNDVLYRPKMGFSVPLARWFRGPLKTRVQESILGSRLADTGWFNRDYLQKLVTDHNNGSRDYSASIWTILMFEAFLRNVMEQGEAA

SEQ ID NO: 9518 - protein, 148 aa, Brassica napus
  misc_feature (82)..(82): Xaa can be any naturally occurring amino acid
  misc_feature (84)..(84): Xaa can be any naturally occurring amino acid
LFLLDSGAQYVDGTTDITRTAHFSEPSAREKECFTRVLQGHIALDQAVFPEGTPGFVLDGFARSSLWKIGLDYRHGTGHGVXAXLNVHEGPQSISFRYGNMTPIQSGMIVSNEPGYYEDHSFGIRIENLLHVKDAETPNRFGGATYLG

SEQ ID NO: 9519 - protein, 332 aa, Desulfotalea psychrophila LSv54
MSEKNMIQTTYREAVRAAMREAMQRDKRVFLLGEDVGRYGGCFAVSKGLLEEFGPERIIDTPLSESAFTGAGIGAALGGMRPIVEIMTVNFSLLAADQIINNAATFLHMSGGLFNVPLVIRMSTGGGKQLAAQHSHSLEGWYAHVPGIKVLTPATLEDARGMLWTALEDPDPVLIFEHQGLLNMEGPLAADAGAVDIDRALIRRRGRDLTIITYGASLFKALEAAEALAGEGIEAEVIDLRTLRPLDEETFLSSIATTHRALIVDEGWRSGGISAEISARIMEGAFYDLDVPVERICGAEVPMPYAKHLEDAAMPQAETIVTTAKRMVASND

SEQ ID NO: 9520 - protein, 283 aa, Triticum aestivum
MSAVVCGKRSSSIFADDLLLQQASSSPPSSHHSSPAAKRSRYAHHHHRRDGRDALLNHLRAAFPAMDPQLLERALEASGDDLDDAIKSLKELHLMESNQANLSATGSAFENGPTAVQPSVEGIVTSGGVDTATEHQPPADGQQPGNSGPEWVDLFVREMSNASDMDDARARASRALEALTKSILEGAGAEAAQSLHQENMMLKEQMTAVLSQNAVLKRAVAIQHERQKEFDERSHEVQGLKQLVLQYQEQLRTLEINNYALQMHLKQAQQSSSMPGRYNPDVF

SEQ ID NO: 9521 - protein, 513 aa, Yarrowia lipolytica CLIB122
MIIIETLIGAVVFVAVYVAFVKLDYYRRKAKFETSDMPVAYNGLLGWKGLRHMLTVFNNDIGPVGWREVFATYGKTLKYYAFPSNTILTYDPDNIKAMLATQFKDFSLGLRKEALAPSLGYGIFTLDGSSWSHSRALLRPQFSREQISRLESVETHVQEMMSCIDRNQGAYFDIQRLFFSLAMDTATDFLLGEAVGNLQEILHPEMPRTGTTFQVAFDRAQRLGSLRIICQEAFWVVGSLFWRRDFNNTNQHIHDYVDRYVDKALLARKEKSEIYTNPDKYIFLYELARETTNKITLRDQVLNILIAGRDTTASTLSWIFMELAKKPDIFHKLREAILNDFGTSCESISFESLKKCDYLRQVLNEGLRLHPVVPVNLRVAVRDTTLPRGGGPQGDKPIFVAKGQKINYAIFWTHRDKEYWGEDAEEFRPERWETTSGGALGKGWEFLPFNGGPRICLGQQFALTEMGYVITRLLQEYSDISIQPSDAAVKVRHSLTMCSAQGINISLTRAKEE

SEQ ID NO: 9522 - protein, 356 aa, Yarrowia lipolytica CLIB122
MSKPKPSEVRTLAFNVSDHYQILDMVGEGAYGIVCSALHTPSGQKVAIKKITPFGRSMFCLRTLREIKLLRHFSHENIIGILDVQKPASFESFNEVYLIQELMDTDLHRVIRTQELSDDHCQYFVYQTLRAIKALHSANVLHRDLKPSNLLLNASCDLKICDFGLARSAASTEDNFGFMTEYVATRWYRAPEIMLTFKEYTKAIDMWSIGCILAEMLGGRPLFPGRDYHSQLTMILDVLGTPTMEDYYSVKSRRAREYIRSLPFKKKLPFSQLFPKANPLAIDLLEKLLTFNPAKRITVEEALVHPYLEQYHDADDEPTAEPIPDEFFDFDRNKDELSVEQLKTLIYNEIMYWKRP

SEQ ID NO: 9523 - protein, 588 aa, Ralstonia metallidurans CH34
MEMTRATSETDANPDTSGGDGGHEPVSGLEAPYSLLESRSHQMFPTLTAAEIERIHRFGEVRSWRAGEMLFSTGDVGRGMYVVLSGHTRIIQRDGLGNRSTITEEGPGQFLAEVGQLTGKPALVDALAIEDTVALVIAPERLRALLVAEADLGERIMRALILRRVGLIERGSGPVLVGRGTQPLLLALQAFLRRNGHPHKVIDIETDHDSTCLLDLSNAPQSDFPMVICPDGSILRAPDEGQLASCLGLVPEFDPEHVYDVIVVGAGPAGLATAVYAASEGLSVAVIDCRSPGGQAGASARIENYLGFPTGISGQALAGRAFVQALKFGAHLAIPLEAKALHCGENPIRIELSDGRQIPTRTVVIATGAQYRRAEIDSLDRYEGRGVYYWASPVEAKLCKDEHAMLVGGGNSAGQAAVFLASHAREVHILVRGEGLEATMSRYLIDRIRSLPNVTLHTHAQITALEGEEWLSIVRYREQTQGADCISVPMRHVFLFIGAAPNTEWLRACNVETDAKGFVLTGYEAHRSCTERADFTLETSVPGVFAIGDVRSGSTKRVAAAVGEGAAVVAQIHRYLADLQPVALAVRM

SEQ ID NO: 9524 - protein, 119 aa, Glycine max
  misc_feature (85)..(85): Xaa can be any naturally occurring amino acid
MARVALVAVFAVLAALAVADMASGAVTCGDVTSAVAPCMSYASGKASAPSGACCSGVRTLNAKASTPADRKAACNCLKKPGRGRXISMGNAASIPGKCGVSVSIPISTKTNCNKYILKS

SEQ ID NO: 9525 - protein, 354 aa, Frankia sp. EAN1pec
MTVTRGPEARAHALLARRPLRLGTRRSALARAQSEKVAETLRTRLSRPVELVPIVTAGDQSQVAISQIGGTGVFVSALRDALLAGEIDLAVHSLKDLPTATPDGLVLAAVPRRADTRDVLVSPSGRRLSELGPGARVGTGSPRRAAQLLALGHGFEVVPIRGNVDTRIKKAIDGEVDAVVLAHAGLDRLDRLDAVTEIISPEVMLPAPGQGALAIECVRTPAGGGPAHDQTGPEAGRGFDEGLAELLRFVLDDATSSVAVRAERAFLAGIEAGCTAPVGALAHVLPGTDARLVAGGDDAPAVGEIRLRAVVAAPDGGRVLRRELTGSAVDPEALGQRLADELLSAGAHTLMGTS

SEQ ID NO: 9526 - protein, 1296 aa, Debaryomyces hansenii CBS767
MDPLVNYEYPVPPQEYQQKRYQNPNQVPEITNKEQVVPQSALPATPRMLRSVSGNQKNSGSDSYSQEDQPAEENDRSMTPQQLDKYQQYVSSANYQMDASHSKNSSLNQPQHSKRGTSASHSRTPSVNRQPQPPPTPPTWNSQFPNQPNQQQPVTSPQRKQELLPPAAISSPSSKPPTVGNAASANKTRPMPQQHPGQNNEHGHHHHSHHHNQQQQALQQQQQQQFHRKSIGDWDFIKTIGAGSMGKVKLAQHNSTSEICAVKIVPRAAKLFQRAHANDPPILNAQAAAQRQKEFEKEVTRDKRTIREGALGRLLFHPFICRLYEMVPMTNHYYMLFEYVEGGQMLDYIVSHGSLKEKNARKFARGIALALEYCHSNNVVHRDLKIENIMINSKGDIKIIDFGLSNLYSPKSLLKTYCGSLYFAAPELLSAKPYTGPEVDVWSFGVVLYVLVCGKVPFDDQSVSILHEKIKRGNVEYPSFLSKECVSLLSRMLVVDPTKRASLFEVVQHPWMNRGYEAPQSCYLPKRKPLELPLDPEIVKSIASFDIGTVQSVTEEMTSILTSVEYQMSCENWYKITEKGRKYASAPNAHILPDPTGGFHPLISIYYLVHEMKMRKKAKEHSAKAQLEQANSKQASQQGNLQAPRQDETLQYEPEQQKREERLPGLSFPEQAHTSASPATFQKSSPSPPRDQKEESIPEQQPHSPRESMANTDTLDPNGGKPGGFNSLFRRLSSKKYKNSPSSPNRNQTSPDASDHNIAPPPIPRVSIVPDSQEHIPSPSSNKSHKNDPMVRRGVSMKVTAKEKSSSSKVDLHSSTSNTPKPQPEVSTQPTKTSHNRSSSTSTNNAVNKYRGYVPEQYLPPLPNINPNTNTLVPPASGSNSPLKVAPGAEGRKLHPTARAKSVGGHVRKESYGRSNRAQKQPHPTLPNALASQNSDEIIDEGSTRDDGFFDDVTLDEVDYQEIPQLTEEQIIDQFNHAKQNSMPSIEYPKTLFLKGFFSVQTTSTKPLPVIRYNIINVLSKLGVKFQEVKGGFVCAHAPSLQIKPAQPDDISTNTSTMIDSQQEEKKSEETSEEQRLYGDAFKSTSSSIERNSDIPTRIKTPEQNPGESQMKSPTRQASLHLNTQNLSPPSANSGKTHRPSNSVGGHRRKFSIGNSLLGSYRKKNGSQIMMPPNTPATAKLNKLLYGMDGDELEDEDEDETSKQFTEDDSVDSLNGLMIGGGSDMLISSTLEHKAKHQHSPSSGNSHLAKRSPLKFEIHIVKVPLVGLYGVQFKKLLGNTWNYKTLAGQILNELNL

SEQ ID NO: 9527 - protein, 264 aa, Ralstonia metallidurans CH34
MSLRYGSVLYAVKGSVAIVTLNRPEFRNALGGTIREDIIEVMAVAEANDSVRAIILTGAGSAFCSGGDLNELYLRAVQGQTIAEKTEPIRDRTLLAVYEAKKPVIAAVNGPAMGAGMNLALAADIRIASKEARFSQAHTMRGMMPDYGGTYLLPALLGSSKAYELICTGATLDAEEALRLGLVSDVVEPSTLMDRARTMAQAIALNAPIPIRLAKRAVQQHNLGGLREALARETAAQNVCYESQDAREGLRSFLEKRTPTFQGK

SEQ ID NO: 9528 - protein, 148 aa, Xanthomonas axonopodis pv. citri str. 306
MTDAPLLIACPSCAAMNRIAPTRLRDAPNCGSCHKPLFPGTPVALSAADFDKHAVRSALPLVVDFWAPWCGPCLSMAPQFAAAAAALEPQVRLAKVDTDLHPALGTRFGIRSIPTLLVIQGGQELGRHSGAVSSTQIVTWVRSVLSKR

SEQ ID NO: 9529 - protein, 581 aa, Tropheryma whipplei str. Twist
MVRISGAQAVIKSLEELGIDLVFGIPGGAILEVYNSLFSSSIRHILVRHEQGAGHAAEGYACSSGKLGVCLATSGPGATNLVTAIADAYMDSVPILAITGQVYSHLLGSDAFQESDIIGITMPITKHAFSVKRATEIPAAIFAGAKIATTGRPGPVLIDITKDAQQDEFDFMWPPKSIDLSGYSVAQNIPDTLAQFADGFFDMLSGSIRPVIYAGGGTVRSGASEELIRFAEGFGIPVVTTLTARGVLPDSNRLNLGMPGMHGTVAAILALQKSDLLIALGTRFDDRVTGRLDSFAQNARVVHVDIDPAEIGKNRRPDLFVIGDVKEVLGYINSHSENKTTGDLTAWWRSLEKMRQIYPLVFPQKSSDGNLSPGYVIKRLGELSGPDAIYATGVGQHQMWASQAISFSRPNSFLTSGGAGTMGYAVPAAMGAKAANPEKIVWAIDGDGCFQMTNQELATCSVNGLPIKVAVINNRSLGMVRQWQGLFYNKRYSQTDLNTGDAYIPDFCKLAESYSCASCRVSSVDEVDNAIEFALAINDRPVVIDFVVCKDSMVWPMVPQGLGNSHLKYLQDVSPVWHDNE

SEQ ID NO: 9530 - protein, 484 aa, Rhodospirillum rubrum ATCC 11170
MVATQNTVDTVREATEAYKYGFVTDIAVDIAPKGLNEDIVRLISAKKGEPEWMLEWRLKAFRHWLTLTEPDWAKVSYPPIDYQDVHYYAAPKLSEGPKSLDEVDPELLETYAKLGIPLKEQELLAGVVAVDAVFDSVSVATTYKKKLGQMGVIFCSISEAIREHPELVRKYLGSVVPYSDNYFATLNCAVFTDGSFVYVPKGLRCPMELSTYFRINERNTGQFERTLIVCDDGAYVSYLEGCTAPQRDENQLHAAVVELVALDDAQIKYSTVQNWYPGDKNGKGGIFNFVTKRGACRGKNSKISWTQVETGSAVTWKYPSCILQGDNSMGEFYSVAITNNAQQADTGTKMIHIGRNTRSRIISKGIAAGRSDQTYRGLVRMLPKAEGARNFTQCDSLLIGDRCGAHTVPYIESRNPTAKVEHEATTSRIGDDQLFYCLQRGIAEEDAVALIVNGFCKEVLQTLPMEFAVEAQKLVSISLEGSVG

SEQ ID NO: 9531 - protein, 353 aa, Bacillus cereus G9241
MEKIERLRSAFDEAGIDGILLTNEHSRRYMANFTGTAGVVLISKKHARFITDFRYVEQASKQAVGYEIVQHAGLIIDEVAKQVKELGIQKLGFEQDTLTYGSYSAHKEAIDAEFIPTSGLVEKLRLIKTDSEIKILKEAAQIADAAFEHILSFIRPGVSEIEVSNELEFFMRKQGATSSSFDIIVASGLRSALPHGVASEKVIETGDFVTLDFGAYYKGYCSDITRTIAVGEPSDKLKEIYNIVLEAQLRGVNGIKAGLTGREADALTRDYITEKGYGEYFGHSTGHGIGLEIHEAPGLAFRSDTVLEPGMAVTVEPGIYIPGIGGVRIEDDIIVTSEGNEVITKSPKELIIL

SEQ ID NO: 9532 - protein, 421 aa, Rhodospirillum rubrum ATCC 11170
MSQSVRVTRLPGGLTVATDFVPSVESLTLGAWVATGTRHEAPAVNGVSHLLEHMAFKGTRKRSARQIAEEIEAVGGHLNAYTSRENTAYYARVLREDEDVALDILGDILQHSTFDPTELGREREVVVQEIYQAIDTPDDIIFDHFQETAFPDQALGRPVLGTEKVVRGLTREIVDGYMRAHYAPERTVVAAAGRIDHDAFVAKVTEHFSALPGRGIPAEEPGRYAGGVFREERDLEQVHIVLGFEGICHGDDDYYAASVLSTLHGGGMSSRLFQEIRENRGLAYSIYSFSSSYQDTGLYAIYAGTSEKEAAELIPVLCDETARLADSLTEVEVARARAQLKASILMALESTSSRCEQMARQIQVYGRPIGIDEVVAKLDGVTIDQVAACARRIFTRPPTLAAIGPLAGVEDYDKIVARLKP

SEQ ID NO: 9533 - protein, 155 aa, Triticum aestivum
HYRTSLYKKAGWYRSGIPGISSTHASDKIEAILRPWRVSHVSSGLLEMGIRGVTVSDVRGYGAQGGSTERYEGSEFSEDTFIAKVKMEIVVCKEQVEPVIDKIIEKARTGEIGDGKIFLIPVADVVRVRTGERGVHAERMIGGLSDKLPPVITIS

SEQ ID NO: 9534 - protein, 701 aa, Flavobacterium psychrophilum
MAVLSKIRQKSFLVIAVVGIALFAFIIGALIENGGFGKTARNAGTINGVDISFEEFREKVDMAQKSQPGQNMTIMQATNGVWDQEVRRVLLEKQCEKLGLRIGDDQLINIIKEDPQFAQTPQFLNAAGKFDKAKFNEALLSLKKGSPEQWGKWLEDEKRIMQSTKEQMYSTMIQSGFYTTQAEAKFNYELENNKVTFDVVSVPYSTIEDKKVEPTDAELIAFMKKDEKKYKADESRELEYVFVEDKASAEDKKIIEDKVNGLLNPVADNPVTTTVNEARVGFKNASNLVEFVNANSDIKYDSTYVSKKDLPVEHAEALFNLAPGQFYGPYMFGDYYGITKNLGRKVNANAKASHILISYEGTQVPNKKEKRTKEQAKAKAVSLLAQVLANPSAFQMLAYTNSDDSSSQQGGDLGYFSQGQMVKPFNNFVFSNPVGKIGLVETDFGFHIINVTDKQDAVRLATLAQKISPSEVTSDKVFTTATKFEMAANEKAFDVAAKEMKLIVAPAAKLLALDENVQGIGNQREIVRWVFGAKEGEIKRFNIPTGHVIARLKKVNEAGLLPIEEAKMAIGTKLRNEKKAELIKVKMSGSTLEAVSKATGSPVKEVLDVVAANAYIQTIGVEPRVVGTAFSLKNGVVSQTIDGNSGVFKIKVKSSIKAPVAANYTDISARLSGQSKGSVSGRVYNALKKDATIEDNRAQFN

SEQ ID NO: 9535 - protein, 1267 aa, Kluyveromyces lactis NRRL Y-1140
MSCAVQAAVVAMKDNSSHGQVPYRANNEHLNRVVQSVTDATKRLSQISTASSNANVNNTKTSKRRNRDTVGPWKLGKTLGKGSSGRVRLAKNMETGKLSAIKIVPKKFVKSNQIKQLPYGIEREIIIMKLISHPNVMGLYEVWENKSELYLVLEYVEGGELFDYLVSKGKLPESEAIHYFKQIVQAVAYCHGFNICHRDLKPENLLLDKKKRSIKIADFGMAALETSDKLLETSCGSPHYASPEIVLGRKYHGSPSDVWSCGIILFALLTGHLPFNDDNVKKLLLKVQSGKYQMPQWLSVEAKDLISRILVVDPNRRITIDQILQHELLTKYDQKSRSKSNSDLNLLNRTPNIVSFSSERDIDETILSNLQILWHGAARKHLVTRLMKPGFTEEKMFYSLLWNYQEKQQKSMQKDLIPVPTLKTSSASSVSPLNISSDVNSVTNTAKKQQQSSNGTVLPASMAPTISAFGQQISSDSSESSTLQAPKIHQKSHFSISSLKNGSSKSPKKTKQGFIASSSSSKLFQPNFGAKSSSQSISKSSSKKSLTPTTPKKRTLQNSASKRSLYSLQSISKRSINLNELLHDELQHEYPPPPLPSISSSEHTSSKLESIVDDYDRSTSVHGATMDNFLGESGQHMKAQQNEKLTQPSKNILAQPKLNNQPQTENRQSVTSMKRKTADNTIATVPVSMTPLKDMTNTFQSKSMYVSSLDPKRNKPKPSLENLLRKVSVPQRIKSRSTIRKLRDSGDWTVSGEAQALFGGKGSSEGENQLQRQKTNPSKLTAPETVLTTSTPMTDIKPDLLRMPSSLINSSMTFKDLSQFIMNIDEDKVPVTQASNPVNTDHEKLSENQTLMIENDSNRFETSSNYDDYNVNTAPAVTTAGDIDIFEDAPDDANESVTTSESMIDQSQLNLKKKAASIDSIDTSHVLTPATDVRVSLYINQMDKLDNLPRETTEQIISKFKLSPIKDIKQKRFSNGDRDLTITGSMISMFKDLDGDESRAEYDDNGLGLLGSALDTRPVENETNEDTNGTTVKRNSTVLVSSINGDNLDLSTEEQKNDDGNHGQGQTRRVTLLFDDGSSESEQVFKPVAAERRQPTLNANSTTTNNVGSKRKSNYINKLPKIKEDEVKPITSMKSSSPVNWFSKLLQRIKTSKPKRTVYEYRTSSIPFDNIHILLMTQFGKNGVDCELKKMERKGDKEYVTYDCNFGGIKRNRPKSKFTVEMRCMNGTETVLSLETRSKRFVNDKDTMASFERFNKDVAGAISAQEE

SEQ ID NO: 9536 - protein, 285 aa, Triticum aestivum
  misc_feature (203)..(203): Xaa can be any naturally occurring amino acid
MVHGGEEALRRQYAIGDEIGRGRFGTVRRCHSNATGEALALKTTPKASLRDPLDLALAEQEPKLHLLASSPPCSPHLVALHAAFDDADAVHLVVDLCAGGDLLSLLSARGGRLPEREAAGLAAQIASALAACHRRGVAHRDVKPDNLLFDAGTGALKLADLGSAEWFGDGSRMSGIVGTPYYVAPEVVAGREYGEKVDVWSAXGVVLYMTLSGSVPFYGATAPEIFEAVLRGNVRFPPRAFAGVSPEAKDLMRRMLCKDVSRRFSAEQVLRHPWIASCGGNAVAG

SEQ ID NO: 9537 - protein, 320 aa, Pseudomonas aeruginosa
MFELVDNIAQTAVIKVIGVGGGGGNAVNHMAKNNVEGVEFICANTDAQALKNIAARTVLQLGPGVTKGLGAGANPEVGRQAALEDRERISEVLEGADMVFITTGMGGGTGTGAAPIIAEVAKEMGILTVAVVTRPFPFEGRKRMQIADEGIRALAESVDSLITIPNEKLLTILGKDASLLAAFAKADDVLAGAVRGISDIIKRPGMINVDFADVKTVMSEMGMAMMGTGCASGPNRAREATEAAIRNPLLEDVNLQGARGILVNITAGPDLSLGEYSDVGNIIEQFASEHATVKVGTVIDADMRDELHVTVVATGLGARL

SEQ ID NO: 9538 - protein, 230 aa, Lactobacillus acidophilus NCFM
MSKLVLIRHGQSEWNLSNQFTGWVDVNLSEKGVEEAKKAGRLIKEHGLEFDQAYTSLLTRAIKTLHYALEESDQLWIPETKTWRLNERHYGALQGLNKKATAEKYGDEQVHIWRRSYDVLPPAIDDDNEFSQAHDRRYANLDPHIVPKAENLHVTLDRVMPFWEDNIAPDLLDGKNVIIAAHGNSLRALTKYIENISDDDIMDLEMKTGEPVVYTFDENLDVVNKEKLDD

SEQ ID NO: 9539 - protein, 490 aa, Xanthomonas campestris pv. campestris str. ATCC 33913
MPRFPDQLLYIGGRYVPARGGHTFEVVNPATGEVLANVHNADADDLDAAVDSAKAGQRHWAALTVVERSRILLRAVALLRERNDALAELETLNTGKPLSETRSVDIVTGADVLEYYAGVAQALQGVQVPLREGSFFYTRHEPLGVVGAIGAWNYPIQIALWKAAPALAAGNAMIFKPSEVTPLTALKLAEIFTEAGLPDGVFNVLPGDGASVGHALTEHPEIEKISFTGGTATGRKVMASASSSSLKDVTMELGGKSPLIVCADADLDLAADIAMMANFYSSGQVCTNGTRVFVPRALRTAFEARLLARVQRIHIGDPLDERTTFGPMVSAAHMQRVLEHIEQGKAEGARLLFGGERLRDGALAQGCYVAPTIFSDCTDVMTIVREEIFGPVLSLLTYDDEDEAITRANATSYGLAAGVVTPDLSRAHRLIHRLEAGICWINTWGESPAPMPVGGYKQSGVGRENGLATLQAYTRTKSVQVELERYASVF

SEQ ID NO: 9540 - protein, 480 aa, Xylella fastidiosa Temecula1
MSFLPSFLKRKSIDLITVHEEGRRLVPTLSWPHLIAFGIGAIVGTGIYTLIGVGAEKAGPAVLLSFVIAGVICACAALAYAEMATMMPVAGSTYTYSYVALGEGIAWIVGWSLILEYSLVVSTVAVGWSGYMTGFLKSVGVDMPLALTAGPYAGGIINLPAAVITCVVAGLLIVGTKESTTLNAVLVVVKIIALSVFVVIALPHFDMAHLKPFMPYGFIKSIDTGGVERGVMAAAAIIFFAFYGFDAISTAAEETKNPSRDLSIGIIGSMIGCTLIYVLVALAAIGAMHYTVFGPSTEPLALILRQLDQGNTARLIGAAAIIALPTVLLAFLYGQSRILFVMSRDGLLPRGLSTVNARTGTPIATTLFTAVLVATAAGLVPLGEIAALANAGTLTAFIAVALCLLVLRVREPQRVRAFRTPLAWVVGPIAIAGCLYLFWSLPKMTQYLFLLWNALGLCVYLVYGRHTSLLSKAVSIDTPR

SEQ ID NO: 9541 - protein, 156 aa, Pichia angusta
MPAVQDFVVGTIVGSFGEFYRVSLSNFSTPAVLGFYAFPNASKKNRPKLKTGDLVYARVAAVDPDLDVELECFDATTGKEGGFGHLEGGFVFEVRLAYARYLLRQQDAPVLTKLMRKYQFELAIGANGRIWIKSDTLPNTIECMKAIQRAQTDKQS

SEQ ID NO: 9542 - protein, 203 aa, Shewanella sp. MR-7
MISILVSDVIENNEFANLGAPNEKDIMIKLPLVIFASLLSTSAFAATCPSYLDVEVRKLHSDEKINLCELTQGKPVLLVNTASNCGYTPQFKALEALHKEYKDKGLVVIGFPSDDFFQEENDEKDTAKVCYINYGVTFTMLATSPVRGSDANSVFKYLGDKAGSPKWNFYKYVVSGDGNTVQQFNSKVKPDSAELKQAIESVL

SEQ ID NO: 9543 - protein, 436 aa, Coccidioides immitis RS
MSMLKENGDHLLIDEHSVLPSTAQQPLKGCPSDAAPRGGSISTEETWQDGRADSICPERDGELHCKRPGDVASAFDKRILLSETPSGLGEVESSLGVRWAPLSISPRRRFQTLVVLYHTVSIAIFLTAFFFSCAIPLFWPLLLPYLIYISLFSKVATDGSLRRRSRFLRSLRIWTYFAGYFPAKLHRSELLPPTRKYIFGYHPHGIISHGAFAAFATEALGFSELFPGITNTLLTLDSNFRLPFYRDYALAMGLGSVSRESCENLLSRGGADGEGMGRAITIVVGGARESLDAQPHMIRLVLKRRKGFIKLAIRTGADLVPVLAFGENELYKQVASDQHPLIHKFQLLVKRTMGFTIPLFHARGVFNYDVGLMPYRRPLNIVVGRPIQVMQERNKDNIEDAYVDELHARYVAGLQKLWEEWKDTFATERASELEIN

SEQ ID NO: 9544 - protein, 327 aa, Shewanella sp. MR-7
MGHAKRGKVGVLLLNLGTPDAPTASAVRRYLAEFLSDPRVVEIPKLLWMLILHGIVLRVRPAKSAALYQKVWTEAGSPLMDISLRQTAKLSEKLTADGHQVSVHLAMRYGNPSVASTLQTMHQQGIDKLVVLPLYPQYAAPTTGSAFDAIARELTQWRYLPSLHFIHTYHDNPDFIAALVNSIRADFEQQGKPQKLVLSYHGMPERNLHLGDPYYCFCMKTTRLVAEQLGLTADEFVMTFQSRFGKAKWLQPYTDATMQALPSEGVRDVAIVCPAFSADCLETLEEIVGENGHIFANAGGEKFRYIPALNDNDDHISMMANLVKPYL

SEQ ID NO: 9545 - protein, 112 aa, Solibacter usitatus Ellin6076
MKKIEAIIQPFKLDEVKEALKSIGIDGMTITDVRGHGRQKGHKEVYRGQEYNVDLLPKVKLELVVPSDRADEVIKTLIQSARTGKIGDGKVFVFDIAEAIRIRNDDHGESAL

SEQ ID NO: 9546 - protein, 149 aa, Arabidopsis thaliana
  misc_feature (109)..(109): Xaa can be any naturally occurring amino acid
GPPALKAGKEGAEYLGTGPPKFHFSGQDGIDAKKDGIYPVGTLDGAPFKASPPVFLMSRKIKSLGGKRVLSGEGAAEIFGGALFFHKAPTKKKFPQKTWRRGFISPPKXRHHQFFLLTLIRRAGDNLQIKALPKYDCLKANKSTSAFGL

SEQ ID NO: 9547 - protein, 644 aa, Solibacter usitatus Ellin6076
MCGIAGFVTVQPSDSPSIIERMTDTIRHRGPDDFGFYRDPWASLGFRRLAIIDVSGGHQPMPNEDQSKFIIFNGEIFNHASLRPALEQAGHRYSNRSDTETILHSYEQYGADCVLRLRGMFAFAIWDKNTRKLFCARDRLGKKPLYYFWDGRTFAFASEIKALFEHPSISPQFEESLLPEYLAFGYVSEDRTLFRGIRKLMPGHHLTLHLGAPNPQPVIRQYWEIPDPQPEQRDDASWISECRDRMEQTVQMRLMSDVPLGMFLSGGVDSSAIAALMKRNFSGPVKTFAVGYQEAEFSELSYARHVAGAIGTDHHEVVVGMEDFFNALPRLIWHEDEPITWPSSVSLYFVSKLAREHVTVVLTGEGSDEMFGGYARYRFYAMNERWMRFYRILPRAVRTAIRSQVATTSLLSSTLRRKLQHTFVGRAEDLESLYLDNFYSAFSQSQQRDLFPALAATSPYANFRRYWDSKPGLNPLPRMLFADQKTYLIELLMKQDQMSMATSIESRVPFLDHEFVEFSTRVPEHMKLRNGEGKYIVKKAIEGLVPHEIIYRKKMGFPTPLRQWLLDPRAAHLFDMMRAKDGLLASCIDPARLDDLLLRQTSGREDVTDRIWRLLTLQLWGDMFFTGKREERWDGLMAAARPAV

SEQ ID NO: 9548 - protein, 470 aa, Sulfolobus solfataricus P2
MMSQEVIEVRSPSNLNVIGTVKRMHKDEVRGEIEEAYKGFEIISKMPLYKRTAILRKVSEILEREQERLAKLLAMEAGKPIRDSRVEVLRASRLFRHAAEEVGMVLEGKNYRVDAYEYPPGNENRIVVSTREPIGVVTAILPFNFPINSFAHKVAPALAVGNSVVVKPSINTPLAAIEMKKILVEAGLPDSAVRVVTGYSSEIGDEIITHPLVGLITLTGSTQTGLKIASKAVSLGKRIIMELGGSDPIIILEDANIERASSIAVRARFEYAGQNCNAGKRIIVREEIYDKFVKAFNDKARALKVGDPLDETTDVGPVINKESVENLNSVLADAKAKGGKVEILNKGPESGSFFPLTMVTNPSLDMLVLKSEVFGPIVPIVSVKSDEEAIRIANSTEYGLQSAIFTNDVNRALKLSRELKFGAVIINDSTRLRWDSLAFGGFKKSSIGREGVRETMLEMTENKLIAITLL

SEQ ID NO: 9549 - protein, 414 aa, Dehalococcoides sp. BAV1
MVAEVMAASGIKTYFGSCPTPTPVISHGVVNLKAAGAVIITASHNPAIWNGFKVKSADGASAPTYMITAIETEIAKLGDNPSVSRLDFDTAVSRGLIELTDLAPAYFEQISKLVDIEKLREAGFNIAIDSMYGAGIGYFKHLLEGGCNRLNEINAEPNPNFPDMLQPEPIAPNLNKLMRLVKDIRSDIGLATDGDSDRLGVVDEMGNFLNQLQVFSLLALYILEVKGLRGPLVKTITNSSMIDKLGKLYNVPVFETKVGFKYVSPVMIEQNALIGGEESGGYGFAGHVPERDAILAGAYFLDFMITTGKSPAKMLEYLYSKVGPHYYNRVDYTFDEARREEIMNHLANQKPDSLAETKVSSTDRLDGFRYKLEDGSWLLIRFSGTEPLLRIYAESPSQDKTAALLENGRRLSGI

SEQ ID NO: 9550 - protein, 494 aa, Lycopersicon esculentum
MSSVSSKYPAIASSSDNESCKPLLQVREIPGDYGFPFFGAIKDRYDYYYSLGADEFFRTKSLKYNSTIFRTNMPPGPFIAKDPKVIVLLDAISFPILFDCSKVEKKNVLDGTYMPSTDFFGGYRPCAFLDPSEPSHATHKGFYLSIISKLHTQFIPIFENSVSLLFQNLEIQISKDGKANFNDISDAMSFDFVFRLLCNNTNPLDTKLGTTGPKCFDLWMLPQLAPLVTLGLKFVPNFLEDLMLHTFQLPFFIIKSKYQKLYDAFNEHAGSTLDDAEKSGIKGDEACHNLVFLAGFNAYGGMKILFPSLMKWVASGGKSLHTPLANEIRTIIKEEGGSITLSAINKMSLVKSTVYEVLRIEPPIPFQYGKAKEDIMVQSHDSNFLIKKGEMIFGYQTFATKDAKIFENPEEFIAERFMGSEGEKLLKYVYWSNARETDSPTVDNKQCAGRDLAVLLCRLLLVEFFMRYDTFTVESSKYLAGPLITFKTLEKKAI

SEQ ID NO: 9551 - protein, 411 aa, Chlamydophila caviae GPIC
MISIVLIFLIICFTLCSGFISLSQIALFSLPTSLISHYKRSRYKKQQLVASLLSHPHHLLITLIFLDIGLNIGIQNCVAILVGDQASWLLIVGFPLALTLILCEILPKAVALPFNTQIATFVAPLILVFTKILRPLLYWAISGINYIVQWILSSQKMDIIQPQELKEVLQSCKDFGVVNQDESRLLYGYLSLSDCSVKERMKPRQDVLYYDIQTPLDNLYDLFSQQHCSRVPVCNDNLQNLLGICTAKALLLHGKPLQSSEDLLPLLKKPYYMPETISAKTALCHLAAEDETLGMIIDEYGSIEGLITQEDLFEIVSGEIIDQRSEKVLYTMSGKDVIIAAGTLELSDLSEIFNINLPTNNNSATLGGWFTEQMESIPITGTKLTWNNLMFQVLDAAPNRIRRVYIRKIHD

SEQ ID NO: 9552 - protein, 226 aa, Hordeum vulgare
MASSSTLFCLSALLVLASRQATAYDPSPLQDFCIADMKAPVRVNGFACKDPMAATPEDFFNAAMLDQPRDTKASKVRSNVTTINVINFPGLNTLGISLARIDYGPLGVNTPHIHPRATELLTVLEGTLYLGFVTSNPNRLFSKIVKKGDVFVFPKAMIHFQMNLAHDKPAAALSSLSSQNPGVISIANAVFGSKPPISDDVLATAFQVEKDLIHWLQSQFWENNNY

SEQ ID NO: 9553 - protein, 226 aa, Hordeum vulgare
MASSSTLFCLSALLVLASWQATAYDPSPLQDFCIADMKAPVRVNGFACKDPMAATPEDFFNAAMLDQPRDTKASKVRSNVTNINVINFPGLNTLGISLARIDYGPLGVNTPHIHPRATELLTVLEGTLYLGFVTSNPNRLFSKIVKKGDVFVFPKAMIHFQMNLAHDKPAAALSSLSSQNPGVISIANAVFGSKPPISDDVLATAFQVEKDLIHWLQSQFWENNNY

SEQ ID NO: 9554 - protein, 140 aa, Brassica napus
MAASVMLSSVTLKPAGFTVEKMSARGLPTLTRAPSSFKIVASGVKKIKTDKPFGVNGSMDLRDGLDASGRKGKGYGVYKFVDKYGANVDGYSPIYNEDEWSASGDVYKGGVTGLAIWAVTLAGILAGGALLVYNTSALAQ

SEQ ID NO: 9555 - protein, 574 aa, Kluyveromyces lactis NRRL Y-1140
MCGIFASFRNPDVQAYKPKALQLSKRIRHRGPDWSGNIVKNSTILVHERLAIVGLDSGAQPITSEDGSYTLAVNGEIYNHIMLREECASYPFKTLSDCEPIIPLYEKYDIDAPKHLDGMFAWCLYDSKKDRIIAARDPIGITTLYMGRSSASPKSVWFSSELKCLTDDCDEIIAFPPGHVYDSETDKLTRYFTPDWLDESRIPTTPVDFKAVRESLEKAVRKRLMAEVPYGVLLSGGLDSSLIAAIAARETEKTNAELDPVVYDSDPHQLAGLDEQGHLHAAGWSRLHSFAVGLPNAPDLQAARKVATFIGSIHHEHTFTLQEGLDALDDVIYHLETYDVTTIRASTPMFLLSRKIKAQGVKMVLSGEGSDEIFGGYLYFAQAPSAAEFHVESVKRVKNLHLADCLRANKSTMAWGLEARVPFLDRDFLQLCMNIDPNDKMIKPAEGKIEKYILRKAFDTTDEPDLKPYLPEEILWRQKEQFSDGVGYSWIDGLKDAAESTISDEQFAQPKAEWGDDIPTTKEAYWYRLKFDALFPQKTAASTVMRWIPKADWGCAEDPSGRYAKIHEQHVDKK

SEQ ID NO: 9556 - protein, 481 aa, Xanthomonas campestris pv. campestris str. 8004
MFPGEPMSSVSIDGAPDAGENTRFIILISCVATIGGFLFGFDSGVINGTVDGLKQTFQSSAAETGFEVASMLLGCAIGAFFAGRLVDRWGRRAVLIISAALFLLSAIGAGASHSSGFFIFARVMGGFAVGAASVISPAYIAEVASARYRGRLATMQQIAIISGLFCAFLSNYLLANAAGASTEPLWGGQAAWRWMFWMQAIPSLLFLLLLLVIPESPRYLVVKGRREQALVVLKRLYGNAAAQTKLGEISASMSADQHKPKFSDLISKTTGKIRPIVWIGVGLAVFQQLVGINVVFYYGAVLWQAVGFSEQDALLINVLSGGLSIGACLVTVMLVDKIGRKPLLWIGSAGMAVSLALVTYAFATASLDPNGKLAMSDAMGMLALVAANVYVVFFNASWGPVMWVMLGEMFPNQIRGSGLAIAGAAQWTSNFAITVSFPILLGSIGLAGAYGIYTVAAFISVFFVLKYVYETKGKELEQMEG

SEQ ID NO: 9557 - protein, 183 aa, Pyrococcus furiosus
MVGGDRRFKVSKLMAYILRHSPWEFGLEPDEEGFVELADLIRAIKTVYPWVTEEFIKEIVEKDSKGRYEIRGSKIRARYGHSYPVVLKHEEDTESKVLYHGTIRENLKGILKEGIKPMKRQYVHLSLSYEDAYYTGRRHGKDVVVLLIDAECLRRKGYKILKAGKRVRIVKHVPVECISEILD

SEQ ID NO: 9558 - protein, 112 aa, Wolinella succinogenes
MKKIEAIIKPFKLDDVKNALTELGVTGMTVTEVKGYGRQQGHTELYRGAEYVVDFIPKIKIEIVVGDGEADKIVDTIVATAKTGKIGDGKIFVTDVSKVVRVRTGETDEEAI

SEQ ID NO: 9559 - protein, 684 aa, Sinorhizobium meliloti
MATKVKENEEADVEREGAPDGPLLDLSDDAVKKMIKAAKKRGYVTMDELNSVLPSEEVTSEQIEDTMSMLSDMGINVIEDEEAEEAAASDDDDGADEGESEGGELAPASGTALAASKKKEPTDRTDDPVRMYLREMGSVELLSREGEIAIAKRIEAGRETMIAGLCESPLTFQALIIWRDELNEGQTLLREIIDLETTYSGPEAKAAPQFQSPEKIEADRKAAEEKEKVRRTRTAANDDDITNVGGEGQAPEEEEEDDDESNLSLAAMEAELRPQVMETLDVIAETYKKLRKLQDQQVEARLAATGTLSPAQERRYKELKDELIKAVKSLSLNQNRIDALVEQLYDISKRLTQNEGRLLRLAESYGVKREAFLEQYSGAELDPNWMKSISNLAGKGWKEFARAENQTIRDIRQEIQNLATETGISIAEFRRIVSMVQKGEREARIAKKEMVEANLRLVISIAKKYTNRGLQFLDLIQEGNIGLMKAVDKFEYRRGYKFSTYATWWIRQAITRSIADQARTIRIPVHMIETINKIVRTSRQMLHEIGREPTPEELAEKLAMPLEKVRKVLKIAKEPISLETPVGDEEDSHLGDFIEDKNALLPIDAAIQANLRETTTRVLASLTPREERVLRMRFGIGMNTDHTLEEVGQQFSVTRERIRQIEAKALRKLKHPSRSRKLRSFLDS

SEQ ID NO: 9560 - protein, 185 aa, Triticum aestivum
MAPTVMASSATSVAPFQGLKSTAGLPVSRRSNGASLGSVSNGGRIRCMQVWPIEGIKKFETLSYLPPLSTEALLKQVDYLIRSKWVPCLEFSKVGFIFREHNASPGYYDGRYWTMWKLPMFGCTDATQVINEVEEVKKEYPDAYVRIIGFDNMRQVQCVSFIAFKPPGCEESGKGLNSSLTTGHI

SEQ ID NO: 9561 - protein, 225 aa, Hordeum vulgare
MASSTSLLYLLTGLLALASWHATAYDPSPLQDFCIADMKSPVNGFACKDPMAATSDDFFNPAMLDKARDTKASKVRSNVTNINVINFPGLNTLGISLARIDYGPLGVNTPHIHPRATELLTVLEGTLYLGFVTSNPNRLFSKIVTKGDVFVFPKAMIHFQMNLAHDKPAAALSSLSSQNPGVISIANAVFGSNPPISDDVLATAFQVEKDLIHWLQSQFWENNNY

SEQ ID NO: 9562 - protein, 663 aa, Coccidioides immitis RS
MPPQKEKSSLKRGRASGGNHEQDVKKPRRSERLSSQLAQSQAARANKAYLPPLIQQDSTATEIHKEATVTPPEGRPSQLRHHTPGPESLTQLSSPPGDTQAFSQNPSRVYVSGVEEEAAEGVWGYLIPLDNKFGDTLVLKKRDTCFSSPIGGVTNNRNGASRSKRSKGKGMPTPLQLNPSGYLIGRHSECDLILDIPTISNRHCLIFHENREGDSVAILEDLSSNGTFVNEAIVGRNNRRELEDGDEVTVLDEARFIFRYPRNRDAGGFRQQYRILEQLGKGHFATVYLCAERATGIKYAVKRFEKRPGDSHRSDNDTLQQEIAMLKSVNHTNVLCLKDTFDESDGVYLVLELAPEGELFNWIVSHQKLKEDETRHVFRQLFQGLKYLHDRNIVHRDIKPENILLMDKHLTAKLADFGLAKIIGEDSFTTTLCGTPSYVAPEILENSRQRRYTRAVDIWSLGVVLYICLCGFPPFSDELYSAEHPYTLAEQIKLGNFDYPSPYWDSVGDLALDLIDRMLTVDVDQRASIDECLQHPWLTGKYPSVADSTDGLTGAMGQLDFSKRKIERERTLLSDINDVPVSQVYDDSRQEGYGQVKIFDKNTAGKRVHNQPAKGLKYRQEPKPDVNRDPVEFMHMGGRGDQTLFAHDPDSRYESDKVPRRKR

SEQ ID NO: 9563 - protein, 574 aa, Nanoarchaeum equitans Kin4-M
MIQMRIAIIDRTKCKPNKCNYECYNFCPLNRAGKKCIEIIDGKPVIDESICIGCGLCVKKCPFKAIKIINVPEAKGEVVFQYGPNSFRLFSLPIVKMGKSIGILGPNGIGKTTAIKILSGQLKPNFGDYNKEYSWEEIIEKFKGTELQNYFELLSKGQIKVIHKIQEIQKLREVFKGKTVRELIKLDNPLLKEFGLDKILDRKIENLSGGELQKLLIYASLSKEGDVYIFDEPTNFLDIRERLRVALKIKALNKTKIVIDHDLLILDYIVELIHIAYGQKAAYGKFSQPKGNNTAINEYLKGYLKSENIRIRDFELYFLEGTEKERGKTIYLEWKPFTIDLGNFKLEAEKGEVYKKEIIGIVGPNGIGKTTFIRALKGDFDVKPIEKKITISYKPQYIEPKEVTVRKLFEQMNPNYRNEFYDSLLIRPLELYELFDHDLTTLSGGELQKVITAAALLKEADLYLIDEPTAFLDIEERVRIARAIRNIIKEKGKAAFVIDHDLMFMEYISDSIMVFEGEPSKYGKANKPLPIKEGLNLFLKNMGITIRKVNGRPRINEPGSRLDREQKAQGLYYY

SEQ ID NO: 9564 - protein, 374 aa, Burkholderia sp. 383
MTLAGTLEIVDELRAGRMVLLVDEEDRENEGDLVIAADHVTPDAINFMARFGRGLICLTLTAERCEQLKLPPMADHNGTPFGTAFTVSIEAAEGVTTGISAADRAHTIRAAVRAGARPDDLVQPGHVFPIAARPGGVLVRAGHTEAGCDLAALAGLTPASVICEVMNDDGTMARLPELKVFAAQHGLKIGTIADLIHYRREHESLVERVGERPLHTPWGRFRAIEYRDTVHGAPHLALVRGEPDPSTPVLTRVHECHSLLDLLDAEPSAHSWPLHAALQRIDAAGCGVAVLLDCDMRGDPMRAPASHARRDGRVTGIGSQILRELGVRRLNVLSSPFRLPALSGHDLEIMAFIPLGDDDPESARGALASPLRVA

SEQ ID NO: 9565 - protein, 393 aa, Staphylococcus aureus subsp. aureus MSSA476
MQFDNIDSALMALKNGETIIVVDDENRENEGDLVAVTEWMNDNTINFMAKEARGLICAPVSKDIAQRLDLVQMVDDNSDIFGTQFTVSIDHVDTTTGISAYERTLTAKKLIDPSSEAKDFNRPGHLFPLVAQDKGVLARNGHTEAAVDLAKLTGAKPAGVICEIMNDDGTMAKGQDLQKFKEKHQLKMITIDDLIEYRKKLEPEIEFKAKVKMPTDFGTFDMYGFKATYTDEEIVVLTKGAIRQHENVRLHSACLTGDIFHSQRCDCGAQLESSMKYINEHGGMIIYLPQEGRGIGLLNKLRAYELIEQGYDTVTANLALGFDEDLRDYHIAAQILKYFNIEHINLLSNNPSKFEGLKQYGIDIAERIEVIVPETVHNHDYMETKKIKMGHLI

SEQ ID NO: 9566 - protein, 247 aa, Sulfolobus tokodaii str. 7
MENEKVEEPVLHYTHEADVFRTRVFGIQDGLIGVGAIALGAAGYSQDPLLVLVTGLIATIAQAFSMGIGEYISTRVRNQIIENEIQKERYEIEKYPEKEKEELKQFYLSKGLPEKEAEEIAERLMKNKDIVLHEMMIHELKLFPEEFEKPLKLGFIMALYLIIGGLIPLVPFILSLFVKIPFMFSIISSILLVLLTLGVFGSMTSKYTGLSKFRGAFEQIGTGLLALVGSYIGGAIIGYFLPIHVAI

SEQ ID NO: 9567 - protein, 452 aa, Streptococcus thermophilus LMG 18311
MKVIKFGGSSLASATQLEKVLNIVKSDPERRFVVVSAPGKRNDEDTKVTDALIKYYKHYIKGADVKADQEWIINRYQAMVDELGFKSKEMVKIAKAITDLATLPIEDNDFLHDTFLAAGEDNNAKLIAEYFRNNDIEARYVHPREAGILVSSEPGNARILPGSYDKLEELRESDEVLIIPGFFGVTSDNQICTFSRGGSDITGSIVAAGVKADLYENFTDVDGIFAAHPGVVYEPHSIPELTYKEMRELAYAGFSVLHDEALLPAYRGKIPLVIKNTNNPDHPGTRIILEHQGATVPVVGIASDDKFVSINMSKYLMNREVGFGRKVLQILEDLNIRWEHMPSGIDDLSIIIRERELTPIKEQEILSYLTRELGVDEVEIEHGLSILVIVGENMRDHIGVTATAAKALSEKNINLEMISQGSSEVSVMFVIETEQEKEAVRALYDAFFRSNN

SEQ ID NO: 9568 - protein, 353 aa, Sulfolobus tokodaii str. 7
MKRIARLRELMKERMIDYVILGPGSNMFYLTGFTEEQMERPLFLIIDSWNVYFLAPKLYEEQLSHFNIPVVSYSDDENPYKKLNIEKGKSIAIDDTLWSSFTIDIINNFSPSQIIKANEIMKELRIIKQDEEIEIMKEGVRIAEKSFLNAINHIKPGLNEKKIAKMLVDEFLNNGADGVSFEPIVTSGPNTSMPHLRSTTREIKQGDILIFDFGIKYKGYSTDTTRVVSIGKPIEEIVKIFEIVKEAQQKAEDMIKENVQACEIDKVARQVISNYGFSKYFIHRTGHGIGIDVHEEPYIAPNYKRKIEKNMVFTIEPGIYLPEKFGIRIEDMVYVNSKAVVMNNLQKDEIFIV

SEQ ID NO: 9569 - protein, 634 aa, Zea mays
MDGCDCIEPLWPTDDLLVKYQYISDFFIALAYFSIPLELIYFVKKSSFFPYRWVLIQFGAFIVLCGATHLINLWTFTTHTKTVAMVMTIAKISTAVVSCATALMLVHIIPDLLSVKTRELFLKNKAEELDREMGLIRTQEETGRHVRMLTHEIRSTLDRHTILKTTLVELGRTLGLEECALWMPSRSGSSLQLSHTLRHQITVGSSVPMNLPVVNQVFSSNRAIIIPHTSSLARVRPLAGRYVPPEVAAVRVPLLHLSNFQINDWPELSAKSFAIMVLMLPSDSARKWHVHELELVEVVADQVAVALSHAAILEESMRARDLLMEQNVALDLARREAEMAIRARNDFLAVMNHEMRTPMNAIIALSSLLLETELTPEQRLMVETVLKSSNLLATLINDVLDLSKLEDGSLELEIKAFNLHAVFKEVMGFIKPIASIKRLSVSVMLAPDLPLCAIGDEKRLMQTILNISGNAVKFTKEGHITLVASIVKADSLREFRTPEFHPTASDEHFYLKVQVKDTGCGVSPQDLPHVFTKFAHPQSGGNRGFNGSGLGLAICKRFVSLMGGHIWIDSEGTGRGCTATFVIKLGVCDNTNTYQQQLVPLVWPSSADSNLSAPKVLPDGRGSVSLKSRYQRSV

SEQ ID NO: 9570 - protein, 446 aa, Pyrococcus abyssi GE5
MRVVKVKKTVVIIGGGAAGMSAASRVKRLKPEWDVKVFEATEWVSHAPCGIPYVVEGISPTEKLMHYPPEVFIKKRGIDLHLNAEVIEVDTGYVRVREKDGEKSYEWDYLVFANGASPQVPAIEGVDLKGVFTADLPPDAVAIREYMEKNRVEDVVIVGGGYIGLEMAEAFVAQGKRVTMIVRGERILRRSFDKEVTDIIEEKLKQHVNLRLQEIVLRIEGKDRVEKVVTDAGEYRADLVILATGIKPNIELARQLGVRIGETGAIWTNEKMQTSVENVYAAGDVAETKHVITGRRVWVPLAPPGNKMGYVAGSNIAGKEIHFPGVLGTTVTKFLDVEIGKTGLTETEALKEGYDIRTAFIKASTRPHYYPGGKEIWLKGVVDNETNRLLGVQAVGAEILPRIDAAAAMLMANFTTKDAFFTDLAYAPPFAPVWDPLVVLARVLKF

SEQ ID NO: 9571 - protein, 126 aa, Thermococcus kodakarensis KOD1
MNEKARLLRIRAKLKRKKPRFLRQEWWRYPKFKNDPKWRRPKGIDSKMRLKKKGKPRSPSIGWSSPKAVRGLHPSGYEEVLVHNVKELEAIDPTRQAARIAGTVGARKREMILARAKELGVKVLNP

SEQ ID NO: 9572 - protein, 230 aa, Bordetella pertussis Tohama I
MSNVVPTPVFPLFAQPFATRLERALQHLRIGRPVILMDDFDRENEADLIVAADKLTVPVMAQLIRDGSGIVCLCLPGETLDRLELPPMVDSNRSRYSTAFTVSIEAREGVTTGVSAVDRVTTIRAAIAPGARSGDVVSPGHVFPLRAQPGGVLTRRGHTEGSVDLAALAGLRPAGVLCELMNADGTMMRGASLERYAAKEGLVALAIDELAAHLQARGATGAPAELAVAA

SEQ ID NO: 9573 - protein, 557 aa, Arabidopsis thaliana
  misc_feature (90)..(90): Xaa can be any naturally occurring amino acid
MGKSKSATKVVAEIKATKPLKKGKREPEDDIDTKVSLKKQKKDVIAAVQKEKAVKKVPKKVESSDDSDSESEEEEKAKKVPAKKAASSSXESSDDSSSDDEPAPKKAVAATNGTVAKKSKDDSSSSDDDSSDEEVAVTKKPAAAAKNGSVKAKKESSSEDDSSSEDEPAKKPAAKIAKPAAKDSSSSDDDSDEDSEDEKPATKKAAPAAAKAASSSDSSDEDSDEESEDEKPAQKKADTKASKKSSSDESSESEEDESEDEEETPKKKSSDVEMVDAEKSSAKQPKTPSTPAAGGSKTLFAANLSFNIERADVENFFKEAGEVVDVRFSTNRDDGSFRGFGHVEFASSEEAQKALEFHGRPLLGREIRLDIAQERGERGERPAFTPQSGNFRSGGDGGDEKKIFVKGFDASLSEDDIKNTLREHFSSCGEIKNVSVPIDRDTGNSKGIAYLEFSEGKEKALELNGSDMGGGFYLVVDEPRPRGDSSGGGGFGRGNGRFGSGGGRGRDGGRGRFGSGGGRGRDGGRGRFGSGGGRGSDRGRGRPSFTPQGKKTTFGDE

SEQ ID NO: 9574 - protein, 445 aa, Acidobacteria bacterium Ellin345
MSKAQQLVRSVGLFDATMLVMGGIVGSGIFINPYVVAQQVHTAPLILGAWLAGGVIATLGAFIYAELAGRQPSVGGQYAYLRDAIHPLAGFLYGWVLLLVIQTGGMAAVTVTFARYFLVLTHWAVPERVVAVVTLSLLTLINCLGVKFGSRVQSALMILKIGAIAFLVVAGFLYIREPFAVGGTVLDRPLSPGLLSSFGAAMVPVLFAFGGWQTANFVAGEVRDPRKNLARALLLGVAGVIVLYLAVNFVCVRALGPVGLAATRVPATDVMRLAMAQRGATIVTLGITVSTLGFLSQSILTAPRVYFAMAEDGVFFRAVAKVNEKTHVPILAIVLQSVWTIVVALTGRYEQILNYVVSMDFVFFGLTACTLFVFRKRSSLENGASGGFQVPGHPWTTLVFIAASWLVVTNTIYKYPANSLLGFAILLVGMPVYWLWRRKGKVLSQ

SEQ ID NO: 9575 - protein, 335 aa, Vanilla planifolia
SIDAQLRLLAPAKVSEDDKLVEYVALLLDRFLDILQDLHGEVVRETVQELYELSAEYESKHDPKKLDELGNLLISLDPGNSIVIASSFSHMLNLANLAEEVQIAFRRRIKLKKGDFADEASATTESDFEETLKRLVGKLKKTPQEIFDALKNQTVDLVLTAHPTQSVRRSLLQKHGRIRNCLTQLYAKDITPDDKQELDEALHREIQAAFRTDEIRRIPPTPQDEMRAGMSYFHETIWKGVPQFLRRVDTALKNLGINERLPYNAPLIQFSSWMGGDRDGNPRVTPEVTRDVCLLARMMAANLYFSQIEDLMFELSMWRCSDELRLRADELQRSS

SEQ ID NO: 9576 - protein, 168 aa, Vanilla planifolia
RQVSTFGLSLVKLDIRQESERHTDVMDAITRPFEIGSSREWSEEQRQQCLLSELAGKRPLFGPDLPRTEEIADVLDTFQVIAELPSDGFGAYIISMATSSPDVLAVELLQREFRVPKPLRVVPLFEKLADLEAAPAAVSRLFSIDWYRDRINGKQEVMIGYSDSGKDA

SEQ ID NO: 9577 - protein, 178 aa, Frankia sp. EAN1pec
MTVHDFTVEATDGTSRSLRDYAGKTLLIVNVASKCGLTPQYEGLEALYRDLKGRGLEILGFPCNQFGGQEPGTDAEIQEFCSTNFDVTFPVFSKIEVNGPGAAPLYDYLRSEAPGDFGPESGFLYEHIKRSRPEAIGTDEVKWNFTKFLVDGEGKVVRRFEPTVTPDELRGELDTSLA

SEQ ID NO: 9578 - protein, 465 aa, Oryza sativa (japonica cultivar-group)
MDDDGETPMPSLELHKLPTLAGAAIPNPIARHPLYHPSPSFFISPTDVVLRDILFDASPASAAGERRRRHVAAYHRAGPRREVAFDPATVRAAIFTCGGLCPGTNTVVRELVVGLSELYGVRGGVFGVRNGYRGFYSDEVVPLDPAAVEHWHKAGGAALGTSRGGFDLARIVDAIERHGFNQVYAVGGDGTMRGAARIHREVRRRGRLAVAVAGIPKTVDNDVGVVDRSFGFHTAVEAAQQAIAAGHVEAESAANGVGLVKLMGRSAGHIALHATLSSRDVDCCLIPEEDFYLRGAGGLFDFLYRRIKDNGHAVVVVAEGAGQRLIPRTTTTSASGACAGADESGNETFLDVGAWLKAEMRAWWEEEHAGEVFTVKYIDPTYMIRAVPANAGDNLYCTLLAHAAIHGAMAGYTGFVSGTINGNYAYIPMDEVAEAKNPVDTKDHKWAWVRSITNQPDFIRAGPTS

SEQ ID NO: 9579 - protein, 385 aa, Phaeodactylum tricornutum
MKVATTLTLAFICCASAFGLNGQTTSVMKKVGFGAGSKPMVQAIDVQGNRLGSNMQPLKSAVANEDAPRGGATKSPVDIGLLLYFGLWYLGNYYYNITNKLALNAAGGKVGFPMTISSLQLGVGSIYALFLWLAPDARSRPKISMDDIVKMLPVALCFMGAHSASVFAMGMGAVQFAQIVKASEPAFAAVLSQFVYGKKSRRHKWLCLPIVIGGVILASVKELDFAWSALIAACIANMFAAVRGNENKKLMETPGLKDRIGTVGNQFAITTVLGFILSLPVLFLREGSRFGEFVQLAKTTPAIWMNLVASGLWFYGYNECATMTLKKTGAVTQSVANTAKRVIVIVGVALVLGESLSPIKLIGCSIGIGGVFLYSIIDNLVKPKK

SEQ ID NO: 9580 - protein, 71 aa, Glycine max
  misc_feature (47)..(47): Xaa can be any naturally occurring amino acid
FKALPGDIFLGKASFGGLPFRFSDCSSPKPGGVFGPFGCGPIQNPFXKPPFVFKVGEISALVDSPRGVPLF

SEQ ID NO: 9581 - protein, 105 aa, Brevibacillus choshinensis
MAIVNGTDQNFSQEVEQGGTVLVDFWAPWCGPCKMIAPVLEQMDSEVGSKLKIVKVNVDDNPDSAGRFGVMSIPTLIVFKDGQPVDKVIGFQPKEALMATVGKHL

SEQ ID NO: 9582 - protein, 319 aa, Lactobacillus sakei
MKRIGILTSGGDAPGMNAAVRAVARKAMHEGLEVYGINYGYAGLVAGDIFKMDPITVGDKIQRGGTFLYSARYPEFAQVEGQLKGIEQLNKFGIEALVVIGGDGSYHGALRLTEHGYNAIGLPGTIDNDIPFTDQTIGFDTAVNTVLESIDRIRDTAASHERTFVVEVMGRGAGDIALWAGVAGGAQDIIIPERDFDVKAVAEKLRASREHGQKHAIIVLAEGVMHADEFSEKLSEYGDFHLRSTVLGHVVRGGSPTASDRVLASRLGSKAVELLLEGKGGVALGIEKNEIIAHDMLDLFNHKHHAMLDLYDLNEDLAY

SEQ ID NO: 9583 - protein, 591 aa, Arabidopsis thaliana
MLVAGNALNCLFIDSSGFQRYLGFGVTNLNGATVKSYKQEGFVIDERGKLKRFNRKKLSRKRCGSLRGRGWKYGSGFVDGIFPVLSPIAQKILSFIQKETDPDKVADVLGALPSTHASWDDLINVSVQLRLNKKWDSIILVCEWILRKSSFQPDVICFNLLIDAYGQKFQYKEAESLYVQLLESRYVPTEDTYALLIKAYCMAGLIERAEVVLVEMQNHHVSPKTIGVTVYNAYIEGLMKRKGNTEEAIDVFQRMKRDRCKPTTETYNLMINLYGKASKSYMSWKLYCEMRSHQCKPNICTYTALVNAFAREGLCEKAEEIFEQLQEDGLEPDVYVYNALMESYSRAGYPYGAAEIFSLMQHMGCEPDRASYNIMVDAYGRAGLHSDAEAVFEEMKRLGIAPTMKSHMLLLSAYSKARDVTKCEAIVKEMSENGVEPDTFVLNSMLNLYGRLGQFTKMEKILAEMENGPCTADISTYNILINIYGKAGFLERIEELFVELKEKNFRPDVVTWTSRIGAYSRKKLYVKCLEVFEEMIDSGCAPDGGTAKVLLSACSSEEQVEQVTSVLRTMHKGVTVSSLVPKLMAKSLTVN

SEQ ID NO: 9584 - protein, 250 aa, Cynodon dactylon
MERVEVQGGASSAGQVRKKRMRRKSTGPDSIAETIKRWKEHNQKIHEDRKAPAKGSKKGCMAGKGGPENGNCAYRGVRQRTWGKWVAEIREPNRGNRLWLGSFPTALEAAHAYDEAARAMYGPTARVNFSESSADANSGCTSALSLLASNIPPASQRSDDKDEVESVETEVHEVKMEVNDDMRSVHVERKTLEVFQSEESVLRKEGDVSYDYFHVEDVLEMIIVELNAAKKIEVHEEYQDGDDGFSLFTY

SEQ ID NO: 9585 - protein, 369 aa, Nitrosomonas europaea ATCC 19718
MTISSTEEILADFRNGKMVILIDEEDRENEGDLVLAADFVTPEAINFMARYGRGLICLTLTEERCHQLKLPMMVADNHSPLGTNFTVSIEAATGVTTGISAADRACTVQAAVKADARPEDLVQPGHIFPLKAQKGGVLARAGHTEAGCDLGRLAGLTEAAVICEILKENGEMARLPDLIEFAGKHTLKIGTIADLIHHRNLTESLVSRFAERPLHTAHGEFRLIAYHDKIAGVTHIALVKGTWNTGEEVLVRVHEPLSVIDLLEADDHSHSWSIHDAMAVIAQAGKGVVVLLHRKNDASVLTDRILRARPRQPDKPVPDLRQHGIGAQILKDLGVSKMRLLATPRRMPSMTGFSLEVAGYLEPGNRIRK

SEQ ID NO: 9586 - protein, 439 aa, Arabidopsis thaliana
MMSNLPLDLVEEILSRVPATSLKRLRSTCKSWNNCYKDQRFTEKHSVIAAKQFLVLMLKDCRVSSVSVNLNEIHNNIAAPSIELKGVVGPQMQISGIFHCDGLLLCTTKDDRLEVWNPCTGQTRRVQHSIHYKTNSEFVLGYVNNNSRHSYKILRYWNFYMSNYRVSEFEIYDFSSDSWRFIDEVNPYCLTEGEVSLKGNTYWLASDEKRDIDLILRFDFSIERYQRLNLPILKSDYETEALSVVREKQLSVLLKRNDTLEREIWVTTNDKIDHTTKNLLWIKFLAIDQRTCYHWSCVSFFIDEEKKMAVFCDGYIGGINETSRRMFYIIGEDKYYRELYVGDSPIRSHRPFVFNYVPSLVQIPQATVIPKRRRQQLSLVLQRCRASKVDVWITDKIDTKEVQWSKFFTVDVDIGGRAMLSYDSFFIDKEKGMALLCGL

SEQ ID NO: 9587 - protein, 266 aa, Rhodopirellula baltica SH 1
MKRILITGATDGIGLETAKALVSRGHHVLIHGRNADKLKQVEQSLNSLSSEASIESHLADLSDINEVESLAGSVAAKHDHLDALINNAGVLSTSDPMTPDGLDVRFVVNTIAPYVLAKRLRSRMDSSGRIVNVSSAAQKPVDMAAFRGELQLDDLEAYSQSKLALTMWSRGLADKLGTDGPAIIAVNPGSLLSSKMVHQAFGVPGKDITIGANILVRAALDEEFADASGQYFNNDAGEFGTPHADALDAEKNAAIIDHLESVLATV

SEQ ID NO: 9588 - protein, 433 aa, Clostridium tetani E88
MYKKWKCLVCGVIFDGDVPPNPCPVCGASSDNFEEVLVARNDFADDSKLNFVIIGNGAAGFYAADSVRNRNKNCNITMISKEKTYSYYRPLLSEYLNKEKLPSNFYLSKENWFEEKNINLILNTAVNNINPVDKKVLLSNGKTLNYDKLILANGGYNFIPPIEGKDKKGVFTLRGLEDSENIKDYAKKIKHATVIGGGLLGLEAAWELRNIGLDVSVIEFFDRLLPRQLDEKAGKLFQDSIKQSNVDIILGDSLVEILGDNSVESIKLKSGKEIKTDMVLFSIGIRSNKELAENCGLKTDKAVIVNEKMETNIDDIYACGDVAEFNGKNYGNWPAAVQMGKVAGANASGDNLNFKDFVSAIIFRAMNTKMFTCGNCDDNMVNVAYEDPKNGTYKKLFFEKDILVGATLLGDISSSGKLVEQIKNKTSINDIIK

SEQ ID NO: 9589 - protein, 598 aa, Oryza sativa
MGVLGSRVAWAWLVQLLLLQQLAGASHVVYDDLELQAAATTADGVPPSIVDSELRTGYHFQPPKNWINDPNAPMYYKGWYHLFYQYNPKGAVWGNIVWAHSVSRDLINWVALKPAIEPSIRADKYGCWSGSATMMADGTPVIMYTGVNRPDVNYQVQNVALPRNGSDPLLREWVKPGHNPVIVPEGGINATQFRDPTTAWRGADGHWRLLVGSLAGQSRGVAYVYRSRDFRRWTRAAQPLHSAPTGMWECPDFYPVTADGRREGVDTSSAVVDAAASARVKYVLKNSLDLRRYDYYTVGTYDRKAERYVPDDPAGDEHHIRYDYGNFYASKTFYDPAKRRRILWGWANESDTAADDVAKGWAGIQAIPRKVWLDPSGKQLLQWPIEEVERLRGKWPVILKDRVVKPGEHVEVTGLQTAQADVEVSFEVGSLEAAERLDPAVAYDAQRLCSARGADARGGVGPFGLWVLASAGLEEKTAVFFRVFRPAARGGGAGKPVVLMCTDPTKSSRNPNMYQPTFAGFVDTDITNGKISLRSLIDRSVVESFGAGGKACILSRVYPSLAIGKNARLYVFNNGKAEIKVSQLTAWEMKKPVMMNGA

SEQ ID NO: 9590 - protein, 1065 aa, Bacillus thuringiensis serovar konkukian str. 97-27
MDKKVSAIPQPKTYGPLGNLPLIDKDKPTLSFIKLAEEYGPIFQIQTLSDTIIVVSGHELVAEVCDETRFDKSIEGALAKVRAFAGDGLFTSETDEPNWKKAHNILMPTFSQRAMKDYHAMMVDIAVQLVQKWARLNPNENVDVPEDMTRLTLDTIGLCGFNYRFNSFYRETPHPFITSMTRALDEAMHQLQRLDIEDKLMWRTKRQFQHDIQSMFSLVDNIIAERKSSENQEENDLLSRMLNVQDPETGEKLDDENIRFQIITFLIAGHETTSGLLSFAIYFLLKNPDKLKKAYEEVDRVLTDSTPTYQQVMKLKYIRMILNESLRLWPTAPAFSLYAKEDTVIGGKYPIKKGEDRISVLIPQLHRDKDAWGDDVEEFQPERFEELDKVPHHAYKPFGNGQRACIGMQFALHEATLVMGMLLQHFEFIDYEDYQLDVKQTLTLKPGDFKIRIVPRNQTISHTTVLAPTEEKLKKHEIKKQVQKTPSIIGADNLSLLVLYGSDTGVAEGIARELADTASLEGVQTEVVALNDRIGSLPKEGAVLIVTSSYNGKPPSNAGQFVQWLEELKPDELKGVQYAVFGCGDHNWASTYQRIPRYIDEQMAQKGATRFSTRGEADASGDFEEQLEQWKQSMWSDAMKAFGLELNKNMEKERSTLSLQFVSRLGGSPLARTYEAVYASILENRELQSSSSERSTRHIEISLPEGATYKEGDHLGVLPINNEKNVNRILKRFGLNGKDQVILSASGRSVNHIPLDSPVRLYDLLSYSVEVQEAATRAQIREMVTFTACPPHKKELESLLEDGVYQEQILKKRISMLDLLEKYEACEIRFERFLELLPALKPRYYSISSSPLVAQDRLSITVGVVNAPAWSGEGTYEGVASNYLAQRHNKDEIICFIRTPQSNFQLPENPETPIIMVGPGTGIAPFRGFLQARRVQKQKGMKVGEAHLYFGCRHPEKDYLYRTELENDERDGLISLHTAFSRLEGHPKTYVQHVIKEDRIHLISLLDNGAHLYICGDGSKMAPDVEDTLCQAYQEIHEVSEQEARNWLDRLQEEGRYGKDVWAGI

SEQ ID NO: 9591 - protein, 293 aa, Pseudoalteromonas tunicata D2
MSDDNSQSSQGSSGKTWLGRIAQMFQGEPQNREELVEVIMDAQERDVIDPETKKMMKGVLGVSQLKVRDIMIPRSQMITLDIEQSLSELLPIMVESTHSRFPVVCEDKDHVEGILLAKDLLPLILNSHDEIPSLATFLRPAMVVPESKRVDTLLNEFRQQRYHMAIVVDEYGGVSGLVTIEDILEIIVGEIEDEHDNEEETQDIRQVATHVYAVQALTPLEDFNEFFHTQFDTQEADTIGGIVLHAFGHMPTRGETIEVGSFQFKVTSSDNRRLQQLQVTVPKNSQTEAEAAA

SEQ ID NO: 9592 - protein, 401 aa, Staphylococcus aureus subsp. aureus NCTC 8325
MVTRSVLKFGGSSVSDFTKIKRIAEMLKERVNQDEQLIVVVSAMGNTTDQLMTNVSTLTKAPKQQELALLLTTGEQQTVSYLSMVLNDIGMNAKAMTGYQAGIKTIGHHLKSKIAQINPQTFEQAFQENDILVVAGFQGINEHQELTTLGRGGSDTTAVALAVSNQIPCEIYTDVDGVYATDPRLLPKAKRLDIVSYEEMMEMSALGAGVLETRSVELAKNYNIPLYLGKTLSNVKGTWIMSNEEILEKKAVTGVALDKHMMHVTISYPLPDNQLLTQLFTELEEGAVNVDMISQIVNLDGLQLSFTIKDSDFHQISMILETLKNQYEALAYKINEHYVKISLIGSGMRDMSGVASKAFLTLIENNIPFYQTTTSEISISYVIDDFNGQQAVEKLYDAFNI

SEQ ID NO: 9593 - protein, 469 aa, Geobacter metallireducens GS-15
MQIKFGTDGWRGVIARDFTFDNLSRVAQATMEYLIREGLAPRGLVIGYDRRFLSREFAERVAEIAAGNGIRVWLTAGYAPTPAVSWAVHELGAGGGVMITASHNPPAYNGFKVKESFGGSARPSTTKILEEMVAANDAAGREIKARPLAEALADGSVATFDPKGGYFRQLARYVDLEAIRKANLPVVVDPMFGAGAGFVPELLPGVREIHGDENPSFGGQPPEPTEEHLTELAALVASGRYRIGLALDGDADRIGAVDETGEFFSSHRIFTVILRHLVERKGLTGGVVKTVSTTRMVDLLAEKFGLPLHETPIGFKHICELMLDHDILMGGEESGGLGVKGHIPERDGILMGLLLLEAMAVSGKGVRQLLDETMDEIGRFCYRRIDLPIADAAKELLIARLKQGGIASIAGRNVARENFRDGFKFIFEDGSWLLIRPSGTEPVLRLYSEAGDAQTVEELLAAAREIAGL

SEQ ID NO: 9594 - protein, 361 aa, Oryza sativa (japonica cultivar-group)
MGSSSGSDRLRDLQAFDDTKAGVKGLVDAGVTTIPAIFHHHPLLLDDAEEDADVIPVIDLQADVDRGHLVGQVRAAAQCVGFFQVVNHGIPGELLEEMLAAVRRFNEQPAEGKKAWYSRDSGRRVKFNSNFDLFQSPAANWRDTLLLELTPRPGPAAEEIPPACRGVVGEYVEAVQRLGGALLELLSEALGLPPEYLGGLGGGLATMAAHYYPPCPEPHLTLGTTRHSDPSFLTVLLQESKGLQVLMRQRQRWVDVPPVAGALVVNIGDLLQLVSNDLFRSVEHRVLATTAAAEPRLSVACFFRPDYACTRVYAPVTTTPPPPLYRSTTMPEFLSHYRAKGLDGRSALHHFRIPPPSSPPH

SEQ ID NO: 9595 - protein, 156 aa, Thermococcus kodakarensis KOD1
MSRGRFSYSFQNFDPERMARASGRDLRISPKHSVELLREIRGMMLNDALRYLDDVIAKKRPVPMKRFNDSQGHKPGKGFGPGRYPVKVAKAVKKILLNAKNNAEQKGLDVDRLKIIHAAAHRGPVLRGYIPRAFGRATPFNEQTTHIEIVVEEIRR

SEQ ID NO: 9596 - protein, 469 aa, Acidobacteria bacterium Ellin345
MIVMKFGGTSVEDAAAISRVAGIVRDRAKQKPAVVVSALGGFTDSLVAMGKAAAKGDLAAALKLWKAGRQRHLAVLAGVKGAGAAEEQVQELFGNLQDVLKGIAALGELSPRTQDNVLSFGEMLSSVMVVALFKAAGVDAIHIDARQCIVTDNCHTKAVPLLDQTNSRLRSALKEHLAKNRVPVLGGFVGATEDGTQTTLGRGGSDFSAAIVGAALGAKKIEIWTDVEGMLTTDPRICKDARRIEVIGFEEASELAYFGAKVLHPATLIPAVESNIPVYVLNSRNPKSTGTCIQQHAPHSATTFRAIALKKGTKILNIRAPRLLINHGFLRSLFEVFEKHSLSPDLVNTSEVSVSVALDGTRDVKALVSDLKRLGQVDVENGKAIVCLVGDNIRGRVGICADVFAVVAKHGVNIHMVSQGASEINISFVAEENEAVRAVKALHAHFFEEEKLTFAAKGDEVYAGCSGVA

SEQ ID NO: 9597 - protein, 474 aa, Aquifex aeolicus VF5
MKVVIVGNGPAAASAVEAFRKVDRDSEIIILSDEEFPTYAPNCMENVIRDDISKEALFYKGGEKFYEKYRVDFRPKTEVVGIDNKRKVVITKKGEEISYDKCLLAAGAYSFIPPIDGVDLERVTTAKNLYDAYKIRSWILSGKITKAVIIGAGPIGIEDAETLRHMGIDVTVIEVFDRILPRMLDRQMGKLYQKPLEEEGIEFLLEHQVVAIHGKNGEVEAVEVKKRGTDKTFFIKTDMVIISTGVRPRTYLVEGTDIEIHMDKKLNKPIGGILVNEYQQTSDPDVYAAGDIASGVDMWGNHRWIALFPPAQQAGYVAGFNMAGLKVRNNGLVDYNAVKTRSVTAGSGGLFEDADESFFLEYKEYLVKVFLKDGKVRGYQFVGVPKYPKLNPRNPLIRVLNKINTWEEKVLLDKGLGLEASGALFHFFVKLNREFKEVHRRLVEEMFVRAMANPSREIPLFTVQEGEVLKTVGK

SEQ ID NO: 9598 - protein, 157 aa, Pyrococcus abyssi GE5
MMKFKKVVVGGTFDRLHLGHKALLRKAFEVGKIVYIGLTSDDMVKNKPYAEKILPYERRLKDLIEFLEVNNFRRYRIIKINNAIGFTTRIRSLEAIVVSEETYKGALLVNRAREEVGLRPLEIIVIPIIKSKLGDKISSSLIRAGLIDPFGNPIKRE

SEQ ID NO: 9599 - protein, 286 aa, Yarrowia lipolytica CLIB122
MSTLYKTLSGESSKPEKTEKKDDGVTNKQRVLIITSRGVTFRQRHLISDLQTMLPHGRKESKLDTKSKLYQLNEIAEMYNCNNILYFEARKHMDLYMWMAKAPNGPTAKFHIQNLHTMDELNFTGNCLRGSRPILSFDSSFDDTPHNAVIKEMLTQTFGVPKGARKSKPFFDHVFTFSLVDNKVWFRNYQIQETVNEENPRETDISLVEIGPRFVMTLITMLEGSFGGPVIFENKQYVSPNTVRSQMKQQAAEQAASRAEAAFKRKVKVRDAVIAADPLADSVIFK

SEQ ID NO: 9600 - protein, 113 aa, Brassica napus
MFRAMSTRKVHGGYEKLVEDEPKLKRVTSVPASVYGNSRNPVQEEVKKTPTVKPTGGSVHPLLSFFDVRFQKKKKKTKKSLATAKPEFARYMAYVKEGGVWDPNSNAPVIHYR

SEQ ID NO: 9601 - protein, 336 aa, Mycobacterium sp. KMS
MNLAIIAGDGIGPEVIGEAVKVLDAVLPEVEKTTYDLGARRYHATGEILPDSVLEELKVHDAILLGAIGDPSVPSGVLERGLLLRIRFALDHHINLRPAKLYSGVTGPLAGNPEIDFVVVREGTEGPYTGTGGAIRVGTPHEVATEVSLNTAFGVRRVVEDAFRRAQQRRKHLTLVHKNNVLTFAGALWWRTVQEVGAEYPDVEIAYQHVDSAMIHIVTDPGRFDVIVTDNLFGDIVTDLAAAVCGGIGLAASGNIDATRTNPSMFEPVHGSAPDIAGQGIADPTAAIMSVALLLAHVGETDAAARVDKAVEAHLSSRGDQELGTAAVGDRIVGLL

SEQ ID NO: 9602 - protein, 490 aa, Staphylococcus aureus subsp. aureus COL
MTSKSSPLIFERSREGRYAYSLPKSDIKTNSVESLLDDKFIRKNKAEFPEVAELDLVRHYTELSNKNFGVDNGFYPLGSCTMKYNPKINEKVARIPGFSESHPLQDEDQVQGSLEIIYSLQEELKEITGMDEVTLQPAAGAHGEWTALMIFKAYHENNGEGHRDEVIVPDSAHGTNPASASFAGFKSVTVKSNERGEVNIDDLKRVVNENTAAIMLTNPNTLGIFEKNIMEIREIVHNAGGLLYYDGANLNAIMDKVRPGDMGFDAVHLNLHKTFTGPHGGGGPGSGPVGVVKELASYLPKPMVIKDGDKFKYDNDIKNSIGRVKPFYGNFGIYLRAYTYIRTMGATGLKEVSEAAVLNANYIKARLSKHFEIPYKQYCKHEFVLSGVRQKEFGVRTLDMAKRLLDFGVHPPTIYFPLNVEEGMMIEPTETESKETLDYFIDTLISIAEEAKNDPDKVLEAPHTTVIDRLDEATAARKPILKFENLKQEK

SEQ ID NO: 9603 - protein, 448 aa, Staphylococcus aureus subsp. aureus COL
MSHRYIPLTEKDKQEMLQTIGAKSIGELFGDVPSDILLNRDLNIAEGEAETTLLRRLNRIASKNITKETHTSFLGAGVYDHYAPSVVDAMISRSEFYTAYTPYQPEISQGELQAIFEFQTLICELTDMDVANSSMYDGMTSFAEACILAFSQTKKNKIVVSKGLHYQALQVLHTYAKTRKEFEVVEIDLDGTVTDLKKLEAAVDDETAAVAVQYPNFYGSIEDLKKIHSFIEDKKALFIVYANPLALGLLTPPGSFGADIVVGDTQPFGIPAQFGGPHCGYFATTKKLMRKVPGRLVGQTQDDEGNRGFVLTLQAREQHIRRDKATSNICSNQALNALASSIAMSALGKQGIYDIAVQNIEHANYAKQQFIKKGFEVLDGTSFNEFVVKFDKPIQQVNEELVKYNIIGGFDLGVVSDDFKNHMLIAVTELRTKDEIDTFVEKAGELND

SEQ ID NO: 9604 - protein, 113 aa, Acidobacteria bacterium Ellin345
MMTKVEAVIQPSKLDAVKDALLAIGIDGMTVLEARGHGRQKGHTEFYRGREYTVDLLPKIKIELVVPDERTEEVVKAIADASRTGKIGDGKIFLSRIDDAIRIRNDERGPGAL

SEQ ID NO: 9605 - protein, 114 aa, Sinorhizobium meliloti
MATVKVDTSNFSEEVLQSAEPVIVDFWKNGCQPCDMIVPFLEQIATELAGKVKVVKINKAENPELVARYGVRGYPTLALFKDGEVADIDYDYEPGSLRSSISEALASLRNLNTE

SEQ ID NO: 9606 - protein, 453 aa, Kluyveromyces lactis NRRL Y-1140
MTSVWHETYDGSTIAFIFMGCALVFIMVPGLGFLYSGLARRKSALSLIWAVIMATLVGMVQWYFWGYSLAFSKTAINHKFIGDLNSFGFRNVYGYADPEDPTTYPELAWAAFQGMFLCVTLSIIAGATAERGRLLPHMVFLFCFATIVYCPVTFWVWCPDGWAARWGVLDWAGGGPVEILSAVGGFVYSAFLGKRHESQLINFRPHNVSMVTLGTSLLWFGWLGFNGCTSLDPNMKSVFALLNTNLSAAFGGMTWCLLDYRLEKKWSTVGLCSGIICGLVAATPSAGCITLYASVIQGITAGVVCNFSTKIKYVLKVDDAMDILAEHGIAGVVGLIFNAFFAADWIIGSDGATEHGGGWLSHNWKQMYMQIAYIAAVTGYAAVVTAIICFVLNKIPGLQLRADEEAEDRGMDEDQIGEFAYDYVEVRRDYYSWGVPNDTDSGNEKITGPQTPI

SEQ ID NO: 9607 - protein, 584 aa, Acidobacteria bacterium Ellin345
MAKLVADLLIERLIHWGVDTVFGLPGDGVDGLFEALRTHQEKLRFIQVRHEEAAAFAACGYAKYTGRLGVCIATSGPGGIHLLNGLYDAKCDGQPVLAITGHTFHDLIGTSYQQDVDLDKLYMDVAAYNQRIMGPGHVESALDEAVRTALSRRTVAHLTIPKDIQEWRASNFHRSPANVPDHSGAIFEPAYPQPPQELLRRAADILNQGRKVAILVGQGCLAARAEVEQVAELLAAPVAKALLGKAVLPDRSPYTTGGLGLLGTAPSQDAMEECDTLLIVGTSFPYLEFYPKPGKAKCVQIDIDATRIGLRHPADVGLVGDSRTALRALVPLLKRREDRSFLETAQKRMESWNELMKERGTRTDLPMKPQVVTHTLNQLLRDDAIVSTDSGTITTWTARYIEMRGTMQFSVSGTLATMANGLPYSIGASVAHPGRQVVCIIGDGGLTMLMGEPATLVKYKLPVKIVVIKNNVLGQIKWEQMVLDANPQFGVELQPIDFAKVAEACGVAGFKLENPADAERVLRSALEHDGPALVEATVDANEPPLPGNVSLKQALHFAEALASGQKDAAEIIKTVVENKVREVI

SEQ ID NO: 9608 - protein, 210 aa, Escherichia coli K12 [sequence omitted]

SEQ ID NO: 9609 - protein, 478 aa, Nocardioides sp. JS614
MHGLSVHLSRRCLRARPAPAVRRDPHPDGSPSARATHEQTARPAPGHLRLRCIGTARLPIHLKSTRERTDRCTTCTPTGVPPATTPTTRAATRTSPRPSRPRSTCGTTAASARTTTSLGRMTTTHTGTSGSLRLAVIPGDGIGPEVTAEALKVLEVASPAGVKFEQTRYDLGAERYLATGEVLPDSVLEEIREHDAILLGAVGGKPNDPNLPPGILERGLLLRLRFELDHYVNLRPSRIFPGVASPLANPGEVDFVVVREGTEGPYTGNGGALRVGTPHEIATEVSVNTAFGVERVVRDAFARAQRRPRKKLTLVHKTNVLVNAGAVWWRITQQVAAEYPEVSVDYMHIDAAMIFMTTDPARFDVIVTDNLFGDIITDLAAAITGGIGLAASGNVNPDRTAPSMFEPVHGSAPDIAGQQKADPTAAILSASLLLDHLGYADAAAVIETAAIADLAAREPGAARRTADVGEAIAARVAG

SEQ ID NO: 9610 - protein, 443 aa, Shewanella sp. ANA-3
MSQQNPGLKQSLSLWQVVVMGLAYLTPMAVFDTFGIVSEITSGHVATSYLLALAGILFTAFSYGHLVRKYPYAGSAYTYAQKTFSPNVGFMVGWSSLLDYMFMPMINMLLAKIYLTAMFPNVEPWIFIFGLVAVMTVLNLRGIDLVANFNGVIVFAQIAIILVFIGLMAHSLSLGEGEGVIASVRPFYSEEISLAPLFTGATILCFSFLGFDGLSSLSEETKDAKRVIPRAIVLTALIGGVIFVSVSYFLQLFFPDISRFQQLDAVLPEIALYVGGNLFQSVVLVATTIAVLASGMAAHAGVARILYVMGRDNMLPNKGFGYIHPKWRTPAFNVILVGLLALSAVSFDLEMALALVNFGALVAFTFVNLSVIVQFYIKEKRNQSLKDHFQYFVLPLCGAATIGVLWINLEPQSLELGLIWAAVGILYLALRSLRLRKAVELQN

SEQ ID NO: 9611 - protein, 288 aa, Thermus thermophilus
MILVNRETRVLVQGITGREGQFHTKQMLTYGTKIVAGVTPGKGGMEVLGVPVYDTVKEAVAHHEVDASIIFVPAPAAADAALEAAHAGIPLIVLITEGIPTLDMVRAVEEIKALGSRLIGGNCPGIISAEETKIGIMPGHVFKRGRVGIISRSGTLTYEAAAALSQAGLGTTTTVGIGGDPVIGTTFKDLLPLFNEDPETEAVVLIGEIGGSDEEEAAAWVKDHMKKPVVGFIGGRSAPKGKRMGHAGAIIMGNVGTPESKLRAFAEAGIPVADTIDEIVELVKKALG

SEQ ID NO: 9612 - protein, 326 aa, Shewanella sp. MR-7
MSRINSTAAEELVDFSVDTAEFDLDKEDIAADLVQELGLEQQVQDDLQKNLDATQLYLGEIGFSPLLSAEEEVYFSRKALKGCEKSRNRMIESNLRLVVKIARRYNNRGLALLDLIEEGNLGLIRAVEKFDPERGFRFSTYATWWIRQTIERAIMNQTRTIRLPIHVVKELNVYLRTARELAQKLDHEPTAEEIAEKLQVSSVDVSRMLKLNEKITSVDIPLGGDNDKALLDVLADDDNVGPDYKVQDEDISNSVVKWLNELNTKQREVLARRFGLLGYEPSTLEDVGAEIGLTRERVRQIQVEALKRLRDLLGAQGLSVEALFRN

SEQ ID NO: 9613 - protein, 530 aa, Nocardioides sp. JS614
MDLHGAFHVYDTTLRDGAQQEGLNLSVTDKLSIARQLDGLGVGYIEGGWPGANPKDTEFFRRAAAELDLQHARLAAFGATRRAGVKAADDPLVAALRDSGASVVTVVAKSYDRHVELALRTTLEENLAMIRDTVSHLRAEGQTVFLDAEHFFDGYRANRDYALEVLRTAYDAGAEVIALCDTNGGMLPGWVSDVVHDVRENAQVRVGIHCHNDTGCAVANTLAAVDAGATHVQGTINGYGERTGNADLLAVVANLELKLDRQVLPPGLLTEATRIAHAVAEVTNFPPASRQPYVGSSAFTHKAGLHASAIKVDPNLYQHMDPAGVGNDMRLLVSDMAGRASIELKGRELGFDLSGDRDLVARITERVKVLESRGFTFEAADASFELLLIEEVEGQRPSYFDVESWRVITETLAKRSAGEEAVSEATVKLKAGGVRYVVTGEGNGPVNALDHALREAIVQAYPQVAKFELIDYKVRILDQGHGTDAITRVLIETSDGETSWVTVGVGANVIEASWGALVDGLTFGLRKHEA

SEQ ID NO: 9614 - protein, 462 aa, Zea mays
  misc_feature (126)..(126): Xaa can be any naturally occurring amino acid
  misc_feature (281)..(281): Xaa can be any naturally occurring amino acid
  misc_feature (305)..(305): Xaa can be any naturally occurring amino acid
CVKTKLNCFGSTTGLVSILQKSFVIPIRCNNQPVQMGCNILQCTSSSFPCTYSGLPISDKKLRKYDLMVWVEKVADRLPNWKARLLILAGRTAMVRFVLSAIPVYLLIAMKIPKWVINSIDKIRRXFIWKGRKEVNGGNCLVSWDIVTRPLNLGGLGISNLLKSWSSLEFPIQQHVKRFFTSSIVTLVGNGYNTLFWTDRWLDGSRIQDFAPAVVANVGKRAISSRTVARALENWQWVNDIETPLNLSRLQQYLHLWDALKGVVLTNEADRHVWIHSSSGXFSSKSCYKAFFMGSITFEPWKRLXKTWAPPKCKFFLWLPIRNKCWTTNRLQKRGLDHPEVCPLCDQEPENIQHLLCTCIFARQFWRCILSSLGLANLSPASNESSFAEWWRKMCKQVHKSKRRYFNSIIILGAWSLWLHRNKAVFYGVRPSINGIKRVFLDELDCWSLAGARHLGPWCCHY

SEQ ID NO: 9615 - protein, 132 aa, Zea mays
MAASMISPSALVAPPSRAQGLPSLGRRASSFAVVCGTGKKIKTDKPFGIGGGLTVDKDASGRKVKGKGVYQFVDKYGANVDGYSPIYNENEWSPSGNVYVGGTTGLLIWAITLAGLLGGGALLVYNTSALSG

SEQ ID NO: 9616 - protein, 1169 aa, Dechloromonas aromatica RCB
MKLFQLQANQRTYNLAALGFFVIMVAAMVVNALIVNYNPETRSFIASGETHFRFYGVLLGLVMAAALFLSYHRGNTLALKLSTLIAIITVTSGLQLRAFDFAVPQAIWIPFILALAVTNIRWSLFVFAITVALTCYRFPNAFQSPLGAQVTAIILTLLTVSRLVQDLLVKNATKAEQKARDMAADIACKNQQLKESQDALDATLAAIPDILFEMDEIGTYLAIRTNDEHLLAASKNELMGRTVSDVLPPQAAAVVHQALAEAKRQGKSYGRVIKLPLAQGDAWFELSVARKDRTDMEGSRFIVISRDITSRHRAEEEAQRLSQVIEQSPESIVITDLKTHIIYANSAFKDASGYTVEEAIGRPAAFLGSGRTPAATKDVMWFTLEQGKVWQGEFINRRKDGSDYLEQVIISPLRDSSGEVTHYVAIKRDITTLRQQEQEIARDRKRLINVLSGTGAGPWEWDIDSGKLILDGASSNLVGRSLAEFGDDHLEAWFSRIHPEDRLVLEKSLADHLAGDSERFEIEYRIQHADQRWVWIQVRGKVIDWSKDRKPLTMYGVHLDITAHKQAEEQRQYLESILHSAIEAIGEGFSVYNAADRLTWCNEQYRRLYTISAPAFVPGNSFEEIIRYGIEHGQYPEAQANPEAWVQRRLLAHRQSESNFIQKLADGRWLDVRERKTADGSIVGFRVDITELMHAKQAAEAANRAKSEFLATMSHEIRTPMNSILGMAQILCGPDVSDPRSRDYGRVILESGKTLLTILNDVLDLAKVESGRVELDPTPWLPQQLAQDILALFRGVAQGKGLIISAEWDGPRTQEYLADGYRLKQMLSNLVSNALKFTAIGSVDIRISEIDRTNDFATLEFSVTDTGIGISSEKQQGLFQPFTQADGSTTRRYGGSGLGLSIVRHLAELMGGEAGLESEEKKGSRLWFRIPAPLATSTSAANESNATSQAQSGLVPSFSGSVLVAEDNALERKVLGTLLSRLGLCVTFATDGREAVSAACADDRPDMILMDCLMPGLDGYAAAREIREHEAQCGLPRIPVVAISASVFAEDRECCLQSGMDHFLPKPFVVSDLRRILVDVLAPEAAPAGTPGICAAKTTIFDRAQLRRAIEALIPLLELGKFDALQRFSELQSSAINTDIADEIDEIADSVKTFQFQAALGRLRALVNG

SEQ ID NO: 9617 - protein, 167 aa, Zea mays
MAMETCFRAWALHAPAGSKDRLLVGNLVLPSKRALAPLSVGRVATRRPRHVCQSKNAVDEAPPPPEKNWDGLVMACETPVLVEFWAPWCGPCRMIAPVIDELAKDYAGKITCCKVNTDDSPNVASTYGIRSIPTVLIFKGGEKKESVIGAVPKSTLTTLIDKYIGSS

SEQ ID NO: 9618 - protein, 451 aa, Triticum aestivum
EFGTRETEVAGTQIILAREYLKDVAISTEQLKYLVMEALPRGCQGHRAELYAARVAKCLAAMEGREKVFAEDLKKAVELVILPRSIISDNPQEQQNQPPPPPPPPPPQNQDNAEDQDEKEEDEEKDEEEKEDDDEENEKQDDQIPEEFIFDAEGGLVDDKLLASAQQAQRKKGKAGRAKNVIFSEDRGRYIKPMLPKGPVRRLAVDATLRAAAPYQKLRREKSLDKTRKVFVEKTDMRAKRMARKAGALVIFVVDASGSMALNRMQNAKGAALKLLAESYTSRDQVAIIPFRGDYAEVLLPPSRSIAMARKRLEKLPCGGGSPLAHGLSTAVRVGLNAEKSGDVGRIMIVAITDGRANVSLKKSNDPEAAAASDAPRPSTQELKDEILDVSAKIFKAGMSLLVIDTENKFVSTGFAKEIARVAQGKYYYLPNASDAVISAATKTALADLKS

SEQ ID NO: 9619 - protein, 112 aa, Geobacter sulfurreducens PCA
MKKVEAIIKPFKLDEVKEALNEIGIQGITVGEVKGFGRQKGHTELYRGAEYVVDFIPKIKMEIIVADDIVSKVVDTIEQAAKTGRIGDGKIFVTPVEEVIRIRTGERGEDAL

SEQ ID NO: 9620 - protein, 315 aa, Magnaporthe grisea 70-15
MFGFFETKFNPTKDIPDLSGKVILVTGGNIGLGQSSVLELARHNPKHIFLAARNEEKARKAIESVSWELGTDKASVVSFLPLDLSSFDSIRKAAETVNSKTDELHILLNNAGIMMTPATTTKEGYEEQFGTNHMGHALLTRLLLPVLEKTAQGGKVDVRIVNLSSAGEGLAPTNAFDDLSRYKSPMEDVASHTRYGVSKLANIYHAQMLARKYPSIKAVSVHPGVVNTNLTRGLKETYPWIVPYVAPIAGALFFKTPAEGAKNQLWASTNEKVISGEFYWPVGLLGKGSEKSKDTEAAEKLWDWTEKELDAYLKQ

SEQ ID NO: 9621 - protein, 415 aa, Nocardioides sp. JS614
MRPLVHFTADAGWINDPHGLTFHRGRYHLFHQYVPESMVWAPNCHWGHATSSNLLTWTRHRVAIAPGDGDDGIWTGSLALTGQDATILYTSVAQPDLGLGRVRLATPADDSWEIWSKGDIVVTPPDELDLIAFRDPFVVRDAAGWRMFIGAATREGDALALTYTSPDLSSWIYEGIALQRSTKEKDPVWMGALWECPQVFEVDDHWVMVSSVWDNDVLHYAGYALGDRDSYSAGKLMPTEWGQLSFGDSYYAPSYFLDEDELPCLMFWMRGVSDADDGWASCLSLPYSLTVRDDRLVAEPHAALAEARGDALAAGADARAYDLEWDPTASQAELVLASDLGKSATLRATEGRIHLERPGVDAQSMPWPGGPVRVVVDGPVLEVSCAGGLLGGPIAPATRWDGPAEACSAWRLAID

SEQ ID NO: 9622 - protein, 367 aa, Roseovarius nubinhibens ISM
MSTPSLLILPGDGIGPEVMTEVRKVIDWFGAKRDLAFDVSEDLVGGAAYDKHGVPLHDDTMARAQEVDAVLLGAVGGPKYDELDFSVKPERGLLRLRKEMDLFANLRPAQCFDALADFSSLKKDVVAGLDIMIVRELTSGVYFGEPRGIFEEGNERVGINTQRYTESEIERAARAAFELAMRRNKKVCSMEKANVMESGILWREVATRVGKDYPEVELSHMYADNGAMQLVRAPKQFDVILTDNLFGDILSDCAAMLTGSLGMLPSASLGAPMANGRPKALYEPVHGSAPDIAGQGKANPIACILSFAMALRYSFDQGDEATRLENAIEAVLASGARTADLMGPEGGTPLSTAEMGDKVIEALDQSL

SEQ ID NO: 9623 - protein, 898 aa, Yersinia pestis biovar Medievalis str. 91001
MNIASNPAASNTKDKWVRGHMNEQYSAMRSNVSMLGTLLGDTIKEALGEHILDRVETIRKLSKSSRAGNEASRQELLTTLQNLSNDELLPVARAFSQFLNLTNTAEQYHSISPHGEAASNPEALAQLFTRLKDKKLSDQDMRSAVDDLSIELVLTAHPTEITRRTLIHKLVEVNTCLSQLDHNDLADYERNKIMRRLRQLVAQSWHTDEIRKLRPSPVDEAKWGFAVVENSLWEGVPAFLREFNEQLENSLDYRLPVEAVPIRFTSWMGGDRDGNPNVTAEITRHVLLLSRWKATDLFLRDIQVLVSELSMSECTPELRELAGGEEVLEPYRQLMKNVRTQLTNTQAYLEARLKGERVLPPHDLLVSNDQLWEPLYACYQSLKACGMEIIANGQLLDTLRRVRCFGVPLVRIDVRQESTRHTDAIAELTRYLGLGDYESWSESDKQAFLVRELNSKRPLVPLKWEPSAETQEVLETCRVIAEAPQGSIAAYVISMAKVPSDVLAVHLLLKEAGCPFTLPVAPLFETLDDLNNADDVMTQLLGIDWYRGLIQGKQMVMIGYSDSAKDAGVMAASWAQYRAQDALIKTCEKAGITLTLFHGRGGSIGRGGAPAHAALLSQPPGSLKGGLRVTEQGEMIRFKFGLPEVTISSLALYAGAILEANLLPPPEPKKEWIEVMDLLSDASCDMYRNYVRENPEFVRYFRAATPELELGKLPLGSRPAKRRPDGGVESLRAIPWIFAWTQNRLMLPAWLGAGAGLQRAIDAGKQDVLATMCRDWPFFSTRIGMLEMVFAKADLWLAEYYDQRLVDKSLWPLGQQLRDQLAADIKVVLAIANDDHLMADLPWIAESIALRNVYTDPLNVLQAELLHRSRQQEHPDACVEQALMVTIAGVAAGMRNTG

SEQ ID NO: 9624 - protein, 530 aa, Oryza sativa
MCGILAVLGVADVSLAKRSRIIELSRRLRHRGPDWSGIHCYQDCYLAHQRLAIVDPTSGDQPLYNEDKSVVVTVNGEIYNHEELKANLKSHKFQTASDCEVIAHLYEEYGEEFVDMLDGMFAFVLLDTRDKSFIAARDAIGICPLYMGWGLDVCRIKILVLIYVPSKKFKVFVTGHEVGFFFDVISGSLFKAIIKRLMTDVPFGVLLSGGLDSSLVASVVSRHLAEAKVAAQWGNKLHTFCIGLKGSPDLRAAKEVADYLGTVHHELHFTVQEGIDALEEVIYHVETYDVTTIRASTPMFLMSRKIKSLGVKMVLSGEGSDEIFGGYLYFHKAPNKKEFHEETCRKIKALHLYDCLRANKSTSAWGVEARVPFLDKNFINVAMDIDPEWKMIKRDLGRIEKWVLRNAFDDEEKPYLPKHILYRQKEQFSDGVGYSWIDGLKDHANEHNAARLTVPGGPSVACSTAKAVEWDAAWSKNLDPSGRAALGVHDAAYEDTLQKSPASANPVLDNGFGPALGESMVKTVASATAV

SEQ ID NO: 9625 - protein, 92 aa, Zea mays
MSNRRSRSRQSGSSRITEEQISDLVSKLQDLLPEARLQSNARVPSARVLQETCNYIRNLHQEVDDLSERLSELLATSDMSSAQAAVIRSLLM

SEQ ID NO: 9626 - protein, 250 aa, Triticum aestivum
MEFTGPEHAAGTPPGTRAPSDASSGNSGAAGSWEARYRECLRNHAAAQGGHAVDGCGEFMPSGAHDLLRCAACGCHRSFHRRDDGQQHPRLFLPAPAATPTTAPRVPLLMPPPQHHHPYAAGHPLAPPFAYNPHHHQYQRTPSGGGTTTESSSEEPGPGPPSTSAPGQGHGQARRPKRFRTRFTAEQRGQMLALAERVGWRMLKQDEALVEQLCAQAGVRRQVFKVWMHNNKHHRRQPQPPQSQQQQQQR

SEQ ID NO: 9627 - protein, 125 aa, Pyrococcus abyssi GE5
MATFKLVISDPKTGIAKQIEITGPEAEKLIGKRIGDQIPVKELGINLNELFGKEFPEDVKMEIRGGTDKDGFPMRPDIHGPRRVRILLSKGPGFRPKEKGERRKKTVRGNTISPEIVQVNVKLVY

SEQ ID NO: 9628 - protein, 379 aa, Oryza sativa
MSKQTYNVVVLPGDGIGPEVVEQATRVLELISSKSDSFSINLKPFDFGGAAIDSTGKPLPDDTLEACKTADAILMGSVGGPKWGVGKVRPEQGLLALRKELDLYANIRPCLFPSESLLSHSPLKPEVAKGVSFIVVRELVKGLYFGDRQEANLDDPSSDGAAYDTMVYNKFDVERITKLASYLALQSSPPAPLHSIDKANVLATSRLWRKVVQDTVDTQFASQGITVDHQLVDSASMVMVSNPRKLNGIVLTENMFGDILSDESSVIPGALGLLPSASLSGLPDGKSRCNGLYEPIHGSAPDIAGRGIANPVGTILSAAMLLRYSLHQPELADKVEAAVRKVLDAKDIGGHELRTADLGGKHGSKDVGDAVIAALEALL

SEQ ID NO: 9629 - protein, 352 aa, Escherichia coli CFT073
MLYYLHIRWITSMCKKTSGNRFHFAFQSSEVVMIKKIGVLTSGGDAPGMNAAIRGVVRSALTEGLEVMGIYDGYLGLYEDRMVQLDRYSVSDMINRGGTFLGSARFPEFRDENIRAVAIENLKKRGIDALVVIGGDGSYMGAMRLTEMGFPCIGLPGTIDNDIKGTDYTIGFFTALSTVVEAIDRLRDTSSSHQRISVVEVMGRYCGDLTLAAAIAGGCEFVVVPEVEFSREDLVNEIKAGIAKGKKHAIVAITEHMCDVDELAHFIEKETGRETRATVLGHIQRGGSPVPYDRILASRMGAYAIELLLAGYGGRCVGIQNEQLVHHDIIDAIENMKRPFKGDWLDCAKKLY

SEQ ID NO: 9630 - protein, 367 aa, Polaromonas sp. JS666
MSFAPEPSFSHGKPPAASCATAILLCNLGTPDAPTAPALRRYLAEFLSDPRVVEIPRPIWWLILHGIILRLRPKKSATKYASIWTPEGSPLKVWTQKQALMLRGYLGARGHTVEVRYAMRYGNPSIASQLNQLKADGATRILILPAYPQYSGTTTASVFDAVYSWAARVRRIPEFRFVNNYHDDPGYISALAERVRTHWRHYGQAGQLVMSFHGVPERTLKLGDPYHCECHKTARLLAEKLGLGKDRYKVTFQSRFGKAKWLEPYTEPTLIRMAQAGIERVDVVCPGFTGDCLETLEEIAMEARHAFLKAGGKEFHYIECLNDSPTWIAALAEFSARQLAGWPTQAPRDTEALRKSGERALAMGAPR

SEQ ID NO: 9631 - protein, 306 aa, Thiobacillus denitrificans ATCC 25259
MHTLTIASRESALAMWQAEHIRDRLRELHPECKVNILGMTTRGDQILDVTLSKIGGKGLFVKELEVALAAGEADLAVHSMKDVPMELPPGFELAVIGEREDPRDAFVSNRYARLSDLPPGSVVGTSSLRREAQLRARYPHLTVKPLRGNVGTRLKKLDEGQFDAILLAAAGLKRLGLGARIKSLLSVEESIPAAGQGALGIEIRSGNTAVAAMLAPLNDPVTAACVRAERQVSRVLGGSCQVPLGAHASYKDGRLLLEGFVAKPDGSRFLVDRAEGDASDPEAVGQALADKLLAQGARAVLDALPA

SEQ ID NO: 9632 - protein, 320 aa, Yarrowia lipolytica CLIB122
MAATDPKKYLFNHTMLRIKDPKVSVPFYEKHFGMKVLGHYKFEQFKFDIYYLAYDHPESPYYGKPVWDRQGVLELTHNYGTENDANYKINNGNVEPHRGFGHICFSVDNIEKVSADLENGGVKFQKKLTDGRQKDIAFALDPDGYWIELITNHEAKLVANETNPSSYRFNHTMLRVKDPKKSIEFYTEKLGMRLFRTSKHENAKFTLYFLSYDKDFEVNDASRAGDREGLLELTHNWGTEDEADFSYHNGNAEPQGFGHLAITVDDIEAACERFNKIGVKFKKQLDEGGMKYIAFILDPDGYWIEVIPPYNLPLENHAKI

SEQ ID NO: 9633 - protein, 363 aa, Ashbya gossypii ATCC 10895
MEEHTSTAGDANRPAKAYEQMEGEQKLDNDEIALYDRQIRLWGMAAQARMRNTRVLLVNFGALGGEVAKNLVLSGIGSLTILDNRVAAAEDLGSQFLLAEEDLGRLRAEVGAARLRDMNPRVSLAVDARNVTEQPAEYFAGHDLVVATDCSRADLEKINAACRARGVPFYAGGLHGLWGYVFVDLVQFDSTEEKAVTVDAPITALGSVSERREVVSVRREHEEDPRSAREIVTTRNYYRPFSEVLAQGTLAGRLTPRQLRRLLPALPLTLAAFLHGHGNDDVASFEAEVKKMCHQLGSSPSNVPAECTELFLRQIGVELPPVAAVIGGAMAQDIINTMGKRQSPLNNFVVLDGITLDMQIFEL

SEQ ID NO: 9634 - protein, 544 aa, Xanthomonas axonopodis pv. citri str. 306
MQNFVPSLAQLSNRGLGMEGIDANNAKKWPATARCPSSLASPAMSESVPRVSLLIDGELVVSASTQWQDVVNPADQSVLAQVPFATTAEVDAAVAAASRAFVTWRKTPIGTRARIFLKYQQLIRENMPELAALLSAEQGKTLADAEGDVFRGLEVVEHAAAIGNLQLGELANNVANGVDTYSLLQPLGVCAGITPFNFPAMIPLWMFPMAIATGNTFVLKPSEQDPMVTMRLVELALEAGIPKGVLNVVHGGEEVVNALCDHPDIRALSFVGSTKVGTHVYRRASLAGKRVQCMMGAKNHAVVLPDANREQTLNAMVGAAFGAAGQRCMAASTLVLVGESRAWIPELVAKAKSLKIGAGNAPGTEVGPLISCAARARVEGLIASGVEQGATLELDGRAPQVPGFEQGNFVGPTIFSGVKPGMRIYDEEIFGPVLVILEAATLDEAIALVNANPNGNGTALFTQSGAAARRFQEDIDVGQVGINVPIPVPVPLFSFTGSRASKLGDLGPYGKQVVMFYTQTKTVTARWFDDQTLGHGVNTTISLK

SEQ ID NO: 9635 - protein, 440 aa, Haemophilus ducreyi 35000HP
MTAYTSWQTPHLFIFIQQDYILDSIPLSSLFITLIILLLLSAFFSSAETGLMSLNRYKIRHLTAQGHKGAKLAEKLLNKTDVLLSLILICNNLINIAASAIATMIGIRLAGDTGIAIATGILTLVMLVFSEILPKTIAVIYPEKISFLASYILTPLKKLLMPLVFLMNLIIKYLMKLMRIRQHEKSGLSIEELRSVVLEAGKFIPTAHQEMLISILDMEKVTVEDIMVPRNDIGGIDIEDDWKAIIRQLNHAAHGRVVLYKGNMDKNILGILRIREAFRLLLDKEEPSKKTLIRAVDEAYFIPEGTPLITQLMHFKTNKERLGLVVDEYGDIKGLVTLADILEEIVGEFTTSTAPTLAEEVKQQSDGSVIIEGSANLRDLNKLFNWHLPINEVRTFNGLILEHLEKIPIEGTQFRLNQLNITVLEVADNMVKKVKVELIE

SEQ ID NO: 9636 - protein, 265 aa, Xanthomonas axonopodis pv. citri str. 306
MSDWEGRLHTGLQVERDGHVAIVTLSNPPANTWTVHSLAALRDLVRALDADRSIYALVITGEGEKFFSAGADLKQFADGDKANARGAARRFGEAFEALSAFRGVSIAAINGYAMGGGLECALACDLRIAEQHAQLALPEASVGLLPCAGGTQNLPRLVGEGWAKRMILLGERIDAATAQRIGLVEEVVGKGESRALAVAWAQRAGKQSPVSVAACKQLVQSTRHGTHAAALIAEREAFVDLFEHADQAEGVAAFLDKRAPQWSNR

SEQ ID NO: 9637 - protein, 245 aa, Oryza sativa
  misc_feature (200)..(200): Xaa can be any naturally occurring amino acid
  misc_feature (213)..(213): Xaa can be any naturally occurring amino acid
MPSRTAPFISRLRLLRTAAALSPFSSSAPPRHSPRILRAIPVGAPHPPRVSAAVSPLVRPVAAGFALFSMATAASSAASVHDFTDYAFWCLQDASGKDVDLSTYKGKVLLIVNVASQCGLTNSNYTELSQLYEKYKDQGFEILAFPCNQFGGQEPGTNEEIVQFACTRFKAEYPIFDKVDVNGDNTAPIYKFLKSSKGGXLFGDNIKWNFSRXLVDKEGRVVQRYAPTTSPLSMEKDIKKLLGSS

SEQ ID NO: 9638 - protein, 498 aa, Brucella suis 1330
MRNIGHFIGGKHVAGKSGRTADIFQPLDGTVQGKVALATKEEVRAAVENAKAAQPAWAATNPQRRVRVLRKFIELVEAEYDSLAELLAREHGKTIADARGDIQRGLEVVEVCLGAAHMLKGEFTDNAGTGIDTYSMRQPLGVVAGITPFNFPAMIPLWKAGPAIACGNAFILKPSERDPGVPMRLAELFQEAGLPAGIFNVVNGDKESVDALLDDPDVQAIGFVGSTPIAQYIYGRGCANGKRVQCFGGAKNHLLIMPDADMDQTVDALIGAGYGSAGERCMAISVAVPVGEDTANRLMEKLIPRVESLKIGPSTDNSADYGPLVTKAALDRVRGYVDLGVEEGAKLVVDGRNFKMQGYENGFYMGGCLFDHVTPDMRIYKEEIFGPVLSIVRAKNYEEALALPSDHEFGNGVAIFTRDGDAARDFASRVQVGMVGINVPIPVPIAYYTFGGWKASGFGDLNQHGPDAFRFYTKTKTVTSRWPSGVKDGAEFVIPTMK

SEQ ID NO: 9639 - protein, 418 aa, Escherichia coli
MRGSHHHHHHGSMKRVVITGLGIVSSIGNNQQEVLASLREGRSGITFSQELKDSGMRSHVWGNVKLDTTGLIDRKVVRFMSDASIYAFLSMEQAIADAGLSPEAYQNNPRVGLIAGSGGGSPRFQVFGADAMRGPRGLKAVGPYVVTKAMASGVSACLATPFKIHGVNYSISSACATSAHCIGNAVEQIQLGKQDIVFAGGGEELCWEMACEFDAMGALSTKYNDTPEKASRTYDAHRDGFVIAGGGGMVVVEELEHALARGAHIYAEIVGYGATSDGADMVAPSGEGAVRCMKMAMHGVDTPIDYLNSHGTSTPVGDVKELAAIREVFGDKSPAISATAAMTGHSLGAAGVQEAIYSLLMLEHGFIAPSINIEELDEQAAGLNIVTETTDRELTTVMSNSFGFGGTNATLVMRKLKD

SEQ ID NO: 9640 - protein, 323 aa, Gibberella zeae PH-1
MASTTETNNYKFNHSMIRVKDPKASTKFYEFLGMSLVKKLEFPDNKFDLYFFGYDSPNALSHNKSTFDRQGLIELTHNYGTENDPEYKVNNGNQDPHRGFGHTCIAVDNIQAACQRIEDAGYKFQKKLTDGRMRNIAFVLDPDGYWVEVVARNDYKETENVKETDVSTYTMNHTMLRVKDAEKSLKYYQEVLGMSRLRTLENPEAGFNLYFLGYPGDQPFPEGQDDKAITHREGLLELTWNYGTEKEENFKYHDGNSEPQGFGHICVSVDNLEAACKRFEDMDVSWKKRLTDGRMKNVAFLLDPDGYWIEIVQNEKFSGKENF

SEQ ID NO: 9641 - protein, 372 aa, Coccidioides immitis RS
MSQERKDDRPAASSEQDKHHEPGTPVAPSGFQGLLSLATPLTRFVLYPMDQLKLVGSNLRQMVSKKFDPEKDIIDQDGKVILITGGNAGLGKETVLQLAKHNPLRIYLAARNSSKAQAAIDDIQKQLPQHADIRHLPLDLSSFTSIRAAAREFTSSNERLDTLILNAGVMDPLPNRTEDGFEVDFGTNHLGHFLFTKLLLPTLTKTAQETKSAGKPADVRIIVVASMAWQMSPPLSTMLSTDSLLALNPPTRYGASKAANIAFASELARRYPELSCVSLHPGVIITGLYDSLMATNPVARVGLRIAKSITVDEKQGSLNHLWTAGSERGALRSGEYYTPVGVGGWKNKWAEDRELGRTLWEWSEEAIRDQKK

SEQ ID NO: 9642 - protein, 503 aa, Arabidopsis thaliana
MYRTAASRARALKGVLTRSLRPARYASSSAVAETSSSTPAYLSWLSGGSRAALTSLDMPLQGVSLPPPLADKVEPSKLQITTLPNGLKIASETTPNPAASIGLYVDCGSIYEAPYFHGATHLLERMAFKSTLNRTHFRLVREIEAIGGNTSASASREQMSYTIDALKTYVPEMVEVLIDSVRNPAFLDWEVNEELRKMKVEIAELAKNPMGFLLEAIHSAGYSGPLASPLYAPESALDRLNGELLEEFMTENFTAARMVLAASGVEHEELLKVAEPLTSDLPNVPPQLAPKSQYVGGDFRQHTGGEATHFAVAFEVPGWNNEKEAVTATVLQMLMGGGGSFSAGGPGKGMHSWLYRRVLNEYQEVQSCTAFTSIFNDTGLFGIYGCSSPQFAAKAIELAAKELKDVAGGKVNQAHLDRAKAATKSAVLMNLESRMIAAEDIGRQILTYGERKPVDQFLKSVDQLTLKDIADFTSKVISKPLTMGSFGDVLAVPSYDTISSKFR

SEQ ID NO: 9643 - protein, 291 aa, Nocardia farcinica IFM 10152
MAWNPTQIPDQTGRTFVITGANGGLGAETTKVLADKGATVVMACRNVAKAQQVADGIPGDVRVAELDLADLASVRAFAERAEEFDVLINNAGLMYIPFSRTADGFETQFGVNHLGHFALTGLLLDKIRDRVVTLASIAHRQTPKLWIDDLNYERRRYYRNLAYAQSKLANLMFARELQRRLAEAGSPKRSYAVHPGVSATELFARTETPLDRIAKPIIRLVGHPPAKAAHSTLFAATMPDADPGTYWGPNRLFQSQGPVEPSPSTRLSKNPELMRRLWAESERMTGVTYPV

SEQ ID NO: 9644 - protein, 177 aa, Zea mays
  misc_feature (136)..(136): Xaa can be any naturally occurring amino acid
  misc_feature (167)..(167): Xaa can be any naturally occurring amino acid
SCYSEEKEPIHTSSLTGAKKVREILEGHESWCKSEFQMEPAIFETTTNFLRRENLLRDTRGVIVEKQLGMFMYMISNNASNQMLQKAFQHSGETIHRKISEVFDIVPTLTQCFVKLPSSIQTHTKIATDSRFMPFXNCIGAIDGTHIPTTIAEHRAPPYRNMKGTLXHNVMVACDFD

SEQ ID NO: 9645 - protein, 518 aa, Gibberella zeae PH-1
MAKRRERVPAFGLMGQDSIYLQVLSGDPAESQSKNAKRVLKLLNRGKHWVLVTLLLANVIVNESLPVVLDRTLGGGVAAVVGSTVLIVIFGEIVPQSICVRYGLPIGGYMSTPVLLLMYITAPISWPIAKLLDWILGEDHGTLYKKSGLKTLVTLHKSLGEISERLNQDEVTIITAVLDLKDKPVAEVMTPISDVYTLAEDHILDEETMDDILSSGYSRIPIYRSGNHLDFVGMLLVKTLITYDPEDRIPVREVPLGAIVETRPETSCLDIINFFQEGKSHMVLVSEFPGSDHGALGVVTLEDVIEELIGEEIVDESDVYVDVHKAIRRLTPAPRARRIHAAATAASVIASKKAPGDSILVDIEDHDAPSHHEPETASFHSNYEGGFHNAARTAIHMKRRTSDGGIEGTPVVVKASLDEMRSKLRLGPANRAANPRSNTRSLFKIKQGLSANGTPPSDNSRPLPPRAQSHMGFVNPQGSPARSHGHERTPLLGVGEDNEHAVEDDETHENTGHKTNGH

SEQ ID NO: 9646 - protein, 112 aa, Xylella fastidiosa Temecula1
MKLITAIIRPFKLDEVREALSKVGVSGITVTEVKGFGQQKGHTELYRGTEYVIDFLPKIKIEMVVTDEHLDAVIEVIRIAAVTGKIGDGKIFVTKIEQVVRIRTGEIDIDAL

SEQ ID NO: 9647 - protein, 510 aa, Petunia x hybrida
MAGGFAAGSGGGDYEGKVTTFGIMTCLVAATGGLLFGYDIGISGGVTSMDEFLLKFFPNVYHKEKALKAGGNQYCKFDDHLLQLFTSSLYLAALVASFAASITTKAFGRKISMLIGGLIFLVGAVLNGAAMNLAALIIGRLLLGVGIGYANQSVPVYLSEMAPPKLRGALNVCFQMAVTLGIFVANMVNYGTSSMKKNGWRVSLVLAAVPAIIMTVGAVFLPDTPNSLIDRGQKEKAKAMLQKIRGTNNVDNEFEDLIIASDMSKLVTDPWGNIMKPRYRPQLTIAVLIPFFQQLTGINVIMFYAPVLFKTLGFGDEAALMTAVITGLVNVFATLISIFTVDRFGRRFLFLAGGLLMLICQAAVGSVIGSVFGTDGLGTFSKGLGNVTVGLICLYVAAFAWSWGPLGWLVPSEVFPMEIRSAGQSITVSVNMFFTFVIGQLFLTMLCEMKFGLFFFFAGFVVLMTLFIFFFLPETKGIPIEEVNRIWKNHWFWKSYVPNDDDDHHSKNQV

SEQ ID NO: 9648 - protein, 324 aa, Arabidopsis thaliana
  misc_feature (53)..(53): Xaa can be any naturally occurring amino acid
  misc_feature (72)..(72): Xaa can be any naturally occurring amino acid
  misc_feature (82)..(82): Xaa can be any naturally occurring amino acid
MDGEELTEQETALYDRQIRVWGANAQRRLTKAHILVSGIKGTVAEFCKNIVLXAGVGSVTLMDDRLANMEAXLNANFLIPPXENVYSGKTVAEICSDSLKDFNPMVRVSVEKGDLSMLGTDFFEQFDVVVIGYGSRATKKYVNEKCRKLKKRVAFYTVDCRDSCGEIFVDLQDYKYTKKKLEEMVECELNFPSFQEAISVPWKPIPRRTAKLYFAMRVIEVFEESEGRKHGECSLLDLARVLEIKKQLCEANSVSESHIPDILLERLITGTTEFPPVCAIVGGILAQEVIKAVSGKGDPLKNFFYYDGEDGKGVMEDISDSFTS

SEQ ID NO: 9649 - protein, 718 aa, Oryza sativa
MSVPAIAVYTSPPGAVYTSSSSSELEASSRGSAPCATAAPPSPASSHRHQAIAGGLSCLFSSPTAAPRAAAAQDELGALWHDRSGEATAVGGGGGGGGYSYPQPSSPFKWRDMLHHSPVPLFHSPASSPASRSPSASWLAGRERERLFSSFVRNALGSCVDYAPVAALPLGVSAAVGVGAGELAFELDEHLSEAEPSCEPYARDLLAGAQARHRIFHDELVVKAFFEAERAHRGQTRASGDPYLQHCVETAVLLAKIGANATVVSAGLLHDTIDDSFMDYDQIFRMFGAGVADLVEGVSKLSHLSKLARDNNTASRTVEADRLHTMFLAMADARAVLIKLADRLHNMKTIEALPLVKQQRFAKETMEIFVPLANRLGIASWKDQLENICFKHLNPEEHKELSSKLVISFDEALLTSTLDKLDKGLRDEGISYHSLSGRHKSLYSIYSKMIKKNLTMDDVHDIHGLRLVVDTEQDCYQALDIVHKLWPRVAGRFKDYILHPKLNGYRSLHTVIMCEGIHPFEVQIRTKEMHLQAEYGFAAHWRYKEGGCKHSFVLQMVEWARWVLTWQCEAMSKERSSGLGRSDAIRPPCPFPSHSEDCPYSYTRQCNHDGPIFVIMLEHDKMSVQELPANSTVVDLMERVGANSPRCSPYSFPLKEELRPRVNHKPISDPNRKLCMGDVVELTPALPHKSLTEYREEIQRMYERGGFALATTRDGPAS

SEQ ID NO: 9650 - protein, 382 aa, Bacillus halodurans C-125
MLEFEMDMDQLAQIKVIGVGGGGSNAVNRMIENGLQGVDFISVNTDAQALHLSKAEVKLQLGGKLTRGLGAGANPEIGKKAAEESREQIEEALQGADMVFITAGMGGGTGTGAAPVIAEVAKEIGALTVGVVTRPFTFEGRKRSTQAAAGIAALKEKVDTLIVIPNDRLLEIVDKNTPMLEAFREADNVLRQGVQGISDLIATPGLINLDFADVKTIMKDKGSALMGIGIATGENRAGEAAKKAISSPLLETSLDGAQGVLMNITGGSNLSLYEVHEAAEIVSAASDAEVNMIFGSVINEDLKDEIVVTVIATGFDDAENRRAQQQSNFNRQAAPKQPLKSKEKEAEKKEPRFTSQPEADDNESLDTLDIPAFLRNRRRKSR

SEQ ID NO: 9651 - protein, 199 aa, Asparagus officinalis
LDEYSKFHGYSPAVVTGKPIDLGGSLGRDAATGRGVVFATEALLAEYGKSISGLTFVIQGFGNVGSWAAQLIHERGGKVIAIGDVSGAIKNSNGIDIPALVKHKSGGGVLKDFRGSDAFDPKELLVHECDVLLPCALGGVLHRENAADVKAKYIIEAANHPTDPEADEILSKKGVVILPDIYANAGGVIVSYFEWVQNI

SEQ ID NO: 9652 - protein, 183 aa, Zea mays
  misc_feature (131)..(131): Xaa can be any naturally occurring amino acid
  misc_feature (169)..(169): Xaa can be any naturally occurring amino acid
MKFNVANPTTGCQKKLEIDDDQKLRAFYDKRLSQEVSGDALGEEFKGYVFKIMGGCDKQGFPMKQGVLTPGRVRLLLHRGTPCFRGHGRRTGERRRKSVRGCIVSQDLSVLNLVIVKKGEKDLPGLTDTEXSQGMRGPKRASKIRKLVNLGKDDDVRKYVNTYRPQSLXRKVRSEQSPQIQRL

SEQ ID NO: 9653 - protein, 253 aa, Nocardioides sp. JS614
MHVTWTADGHVARVALCRPPVNAFSREMIADLEMVLAEVESSDARAVVVTGGSRFSAGVDVGLLAQAPPEDAIPRNASFQRVFDRIQHHRLPFVAAVNGYALGGGCELAMACDIRVAARDAFFALPEIGLGGLPGIGGMARVQRLVGPGKARQLVLTGDRIPAEEAYRIGLVEELAEPGCAETVAQEVAERIAARPPLSVQAGKRALDQGADVSLVAAQQIDLRYCGEIAGTEDRQESLRAFLEKRPPVVVGR

SEQ ID NO: 9654 - protein, 171 aa, Carboxydothermus hydrogenoformans
IENYPGFAHGISGPELTAQMEEQAKRFGAKKLLAEVKGIELAGADRIVKTTKGNFVAKVVIIASGAAPKLLGCPGEQEFRSRGVSYCATCDAAFYEGANVMVVGVGDSTVEEPVTLPILLISNLVHPPDTLKPPNSPRKAFATKTGILWTPCGRIIAPLFENSLKLVPVNF

SEQ ID NO: 9655 - protein, 307 aa, Aspergillus oryzae
MSVIDWGVVAPWTRCSFVLTGASEGGLGGATALALASARPSHLVLLARTENKVRTVISTIKEISPETQPAFVHIELEDLDSVRRAAADVLSLTSKIDVLINNAGVMAIPWSKSKSGLEKTLAINHIGHFLLTKLLMPSILAAGPGSRIVNVTSAAYRMAPFFFDDWNFSDGQTYHPLAAYGQSKTANILFTVGLAQRYKEHGILSFAAHPGYIPGTSLLLHGPDLDPSAMDEVARKNTGFPFGPDPPKSLEQGISTTLVAALSPELTDASGAYMEDCQVCEAREYARDPKLADRLWSLSEELASEAF

SEQ ID NO: 9656 - protein, 137 aa, Brassica napus
MDGEELTEQETALYDRQIRVWGANAQRRLTKSHILVSGIKGTVAEFCKNIVLAGVGSVTLMDDSLVNEEALNANFLIPPDENAYRGKTVAEICCDSLKDFNPMVLVSVEKGDLSARSTEFFEKFDVVVIGYGSLATK

SEQ ID NO: 9657 - protein, 339 aa, Geobacter metallireducens GS-15
MNVFKTARRQIIALSAIALLAGTAGANAAPTAKADAKAGEAPSATTAVARVNGVDITRAELERAKKIILSRNQMASAAMNDEMSKKVEEAALNQLIAKELLFQAGKKQEIKDLDKKIQEKVAEHKARFKSQADYEKALKEMDMTEKEVETFTREDMVIGNLIETKIVANTKITDDEAKKFYNDNKDKFRREEAVRASHILVSADQKASPEEKKKAKEKAEALLKQLKGGADFAELAKKESSCPSSAQGGDLGFFGKGQMVPEFEKTAFNLKPGEVSDVVETQFGYHIIKLAEKKDAETVPFEEAKERIVQFLTQQKVQAGIGEYVDELRKKGKVEILSK

SEQ ID NO: 9658 - protein, 354 aa, Chromobacterium violaceum ATCC 12472
MKIAILPGDGIGPEIIAQAERVLEVLRRDGLKIETEHAPLGGAAYDQYGVPYPEATQKLAREADAVLLGAVGGPAYDKLDRPLRPERGLLAIRKDLNLFANLRPAILYPELANASTLKPEVVAGLDIMIVRELTGDIYFGQPRGIAVNELGEREAYNTMRYSESEVRRIAHVAFGIAMKRNRKLCSVDKANVLETTEFWKEIMIEVAKEYPQVELSHMYVDNAAMQLVRNPKQFDVMVTGNIFGDILSDEASMLTGSIGMLPSASLDQNNKGLYEPSHGSAPDIAGQNLANPLATILSAAMMLRYSFGQEAAARRVEDAVKKVLAQGYRTADIYEAGCEKVSCSGMGDAVVAAM

SEQ ID NO: 9659 - protein, 142 aa, Glycine max
  misc_feature (24)..(24): Xaa can be any naturally occurring amino acid
  misc_feature (113)..(113): Xaa can be any naturally occurring amino acid
  misc_feature (126)..(126): Xaa can be any naturally occurring amino acid
FSFGIDAIEDVLYHIETYDVTTIXACTPICLMSRLIKSLGVKWVIPREGSSEIFGGYLYLHKAPYKEEFLREPCLWIKALDHYDRLRANRSTFGWGLEARVPFWDKACINAAXEFSPEWNMMKRDXGRIEKWVLRRAFDDEE

SEQ ID NO: 9660 - protein, 303 aa, Candidatus Phytoplasma solani
DQIDNAPEERERGITTKTSHVEYETSNRHYAHVDCPGHADYIKNMITGAAQMDAAILVVSGADSVMPQTREHILLARQVGVPKIVVFLNKCDLCPDEEILELVEMEVRELLSKYDFPGDDTPIIRGSALKALEGDKHYIAQVNELINALDSYIEDPVREVDKPFLMPVEDVFTITGRGTVVTGRVERGQVKAGDEIEIIGLKDTRKTIVTAIEMFKKDLDFAQAGDNVGALLRGINREDVQRGQVLAKPGSVKPHFQFVAQAYILTKEEGGRHTAFFSQYRPQFYFRTTDITGVVELQGDVKM

SEQ ID NO: 9661 - protein, 879 aa, Erwinia carotovora subsp. atroseptica SCRI1043
MNEQYSAMRSNVSMLGTLLGDTIKEALGENILDKVETIRKLSKSSRAGNEKHRQELLTTLQNLSNDELLPVARAFSQFLNLTNTAEQYHTISPHGEAASNPAQLSSAFKRLKESKDLSERDIRDAVESLSIELVLTAHPTEITRRTLIHKLVEVNTCLKQLDHNDLADYERNQVMRRLRQLIAQSWHTDEIRKIRPTPVDEAKWGFAVVENSLWEGVPAFLRELDEQLEQAFGYRLPVDAVPVRFTSWMGGDRDGNPNVTAEVTRHVLLLSRWKAADLFLRDIQVLVSELSMSECTPELLELAGGSEVQEPYRAIMKSLRSQLSCTLSYLEARLTGEERLPPKDLLITNEQLWEPLHACYQSLKTCGMGIIADGSLLDTLRRVRCFGVPLVRIDVRQESTRHTDALAEITRYLGLGDYESWSESDKQAFLIRELSSKRPLLPRYWEPSADTKEVLDTCRVIAKAPQGSIAAYVISMARTPSDVLAVQLLLKEAGCPFALPVAPLFETLDDLNNADDVMTQLLSIDWYRGFIQGKQMVMIGYSDSAKDAGVMAASWAQYRAQDALIKTCEKAGIALTLFHGRGGSIGRGGAPAHAALLSQPPGSLKGGLRVTEQGEMIRFKYGLPDVTISSLALYTGAILEANLLPPPEPKQEWHEVMDELSRVSCDMYRGYVRENPDFVPYFRAATPELELGKLPLGSRPAKRRPNGGVESLRAIPWIFAWTQNRLMLPAWLGAGAGLQKVVDDGKQEQLEEMCRNWPFFSTRIGMLEMVFAKADLWLAEYYDQRLVEEKLWPLGKQLRDQLAADINIVLAISNDDHLMADLPWIAESIALRNVYTDPLNVLQAELLHRSRQQKQPDADLELALMVTIAGVAAGMRNTG

SEQ ID NO: 9662 - protein, 368 aa, Glycine max
MEKELVELYEAAKKAADAAISGDGKHEESRCIDALEQLKKFPVNYKILVNTQVGKHLKVLTKHPRLKIKAFAIDLIEIWKGIIIKETSKNKNGGSDSKVESANGEKSKAGKMQKSPSVKVEKGETVKVEKIDRNGTTKSSSENMKKVQNDVKNEKTDRSASVKVEKIAKEEKPVSGAKKMSSSSAAPPKLKTMIKSNDATRDKIREILHEALSKVTGEADEDLVDVVNNSDPIRVAVTVESVLFEKWGPSNGAQKVKYRSLMFNLKDSNNPDFRRKVLLGVIEPEQLINMSTAEMASEQRKQEYQKITEKALFECERGGPPKATTDQFKCGRCGQRKTTYYQMQTRSADEPMTTYVTCVVCNNRWKFC

SEQ ID NO: 9663 - protein, 303 aa, Candidatus Phytoplasma solani
DQIDNAPEERERGITIKTSHVEYETSKRHYAHVDCPGHADYIKNMITGAAQMDAAILVVSGADSVMPQTREHILLARQVGVPKIVVFLNKCDLCPDEEILELVEMEVRELLSKYDFPGDDTPIIRGSALKALEGDKHYIAQVNELINALDSYIEDPVREVDKPFLMPVEDVFTITGRGTVVTGRVERGQVKAGDEIEIIGLKDTRKTIVTAIEMFKKDLDFAQAGDNVGALLRGINREDVQRGQVLAKPGSVKPHFQFVAQAYILTKEEGGRHTAFFSQYRPQFYFRTTDITGVVELQGDVKM

SEQ ID NO: 9664 - protein, 92 aa, Brassica napus
MAKKTKKVGIVGKYGTRYGASIRKQIKKMEVSQHSKYFCEFCGKYGVKRKAVGIWGCKDCGKVKAGGAYTMNTASAVTVRSTIRRLREQIEG

SEQ ID NO: 9665 - protein, 434 aa, Streptococcus mutans UA159
MAFSFDAASVQGAVIKVIGVGGGGGNAINRMIDEGVAGVEFIAANTDIQALSSSKAETVIQLGPKLTRGLGAGGQPEIGRKAAEESEEALTEALTGADMVFITAGMGGGSGTGAAPVIARIAKGLGSLTVAVVTRPFGFEGSKRGNYAIEGINELRDEVDTLLIISNNNLLEIVDKKTPLLEALSEADNVLRQGVQGITDLITSPGLINLDFADVKTVMASKGNALMGIGIGTGEERVVEAARKAIYSPLLETTIDGAEDVIVNVTGGLDMTLTEAEEASEIVNQAAGHGVNIWLGTSIDDSMKDEIRVTVVATGVRPDKADQVSGIRRQASSYTQPRAQQQAPSSNSAQPNFERRQNFDFDLNESPEMPAAEPQQTQSSSEPQQSAFGDWNLRRENIARPTEGEIDSQLKMSSFSADSDDDDELETPPFFKNR

SEQ ID NO: 9666 - protein, 482 aa, Ralstonia metallidurans CH34
MQLKDPSLFKQLAYVDGQWISADSGATFDVTDPATGEVIARVADLGAAETTRAVAAAEVAQKAWAAKTGKERANILRRWFDLMLANTDDLAYLMTREQGKPLAEAKGEIAYAASFIEWFAEEAKRVDGEVLATPAADKRLVTLRQPVGVCAAITPWNFPAAMITRKVAPALAAGCAIVIKPAELTPLSAFALAELAHRAGVPAGVLQVVTGDARNIGGVLTASPIVRKLSFTGSTEVGRILMAQSAPTIKRLSLELGGNAPFIVFDDADVDAAVEGAIVAKYRNGGQTCVCANRFYIQDGIYDAFAAKFAERTAQLRVGNGLEAGVVIGPLIEDAAIEKVNSLVEDATSKGGKVLAGGGKHPLGGTYYTPTVIGNATADMRMAREEIFGPVAPLFRFKQDDEAVAAANATEYGLAAYLYTRDISRAWRTAEALEYGMVGLNTGLISNEVAPFGGIKQSGVGREGSRHGIEEYLEIKYLCLQM

SEQ ID NO: 9667 - protein, 353 aa, Thiobacillus denitrificans ATCC 25259
MKIAVLPGDGIGPEIISQAVKVLEALKSEGAKIEMETAPIGGAGYDAAGDPLPEATLKLAREADAVLLGAVGGPQYDTLDRPLRPERGLLRIRKELNLFANLRPALLYPELASASSLKPEVVSGLDLMIVRELTGDVYFGQPRGIETRNGERVGFNTMLYSESEVRRVAHVAFGIAMKRGKKLCSVEKANVLECSELWKEIMIEVAKDYPEVELSHMYVDNAAMQLIRAPKQFDTIVTGNIFGDILSDAASMLSGSIGMLPSASLDEHNKGMYEPIHGSAPDIAGKNLANPLATILSVAMMYRYTFADLATADRIENAVKQVIAKGYRTGDIWTEGTQKVSCSEMGDAVVVAL

SEQ ID NO: 9668 - protein, 254 aa, Zea mays
  misc_feature (223)..(223): Xaa can be any naturally occurring amino acid
MNALAATSRNFKQAAKLLGLDSKLEKSLLIPFREIKVECTIPKDDGTLASYVGFRVQHDNARGPMKGGIRYHHEVDPDEVNALAQLMTWKTAVANIPYGGAKGGIGCSPGDLSISELERLTRVFTQKIHDLIGIHTDVPAPDMGTNAQTMAWILDEYSKFHGYSPAVVTGKPVDLGGSLGRDAATGRGVLFATDALLAEHGKGIAGQRFVIQGFGNVGSWAAXLITEAGSKVIAISDVTGAVKNSHGIDIAQLM

SEQ ID NO: 9669 - protein, 479 aa, Oceanicola granulosus HTCC2516
MTNGTHTVEKIGGTTMSKVHELIDPLFIGDRDAAQIYNRVFVVSAFGGITNLLLEHKKSGKPGVYALFINDEDDHGWLDALNEVSAAMREAHAEVLEHKADIQLADDFVRDRMEGARSCLFDIQRICSYGHFRLSTQLMVIRELLSGLGEAHSAFVTALMLQRRGVAARFVDLTGWRDEAEKTLEQRIAAGLDEVDLTSELPIVTGYAQCTEGLMKEFDRGYSEVTFSRIAAQSQAREAIIHKEFHLSSADPKIVGADAVKKLGQTNYDVADQLSNMGMEAIHPSAAKTLRRAGVPLRVANAFDAGDPGTLIDDRPADKAAVEIVTGLPIVAIELFEQDMVGVKGYDAAILEAMRKNNVWIVSKSSNANTITHFVAAVSRDKVRRVVEELEALYPAATITDEALSLVSVIGRDLRGLRVLSRGLAALDEQEIDVIAAQQTSRRVDSQFVVARDAQSAAVKALHDEFFPVKAEATKLKAA

SEQ ID NO: 9670 - protein, 57 aa, Arabidopsis thaliana
TPPQTTMATTGTLKSFTGLRQSSTELTNFVSHVPSSLSLPQRRTFLRVTVVRATFKL

SEQ ID NO: 9671 - protein, 334 aa, Neisseria gonorrhoeae FA 1090
MSIKVAINGFGRIGRLALRQIEKAHGIEVAAVNDLTPAEMLLHLFKYDSTQGRFQGTAELKDDAIVVNGREIKVFANPNPEELPWGELGVDVVLECTGFFTNKTKAEAHIRAGARKVVISAPGGNDVKTVVYGVNQDILDGSETVISAASCTTNCLAPMAAVLQKEFGVVEGLMTTIHAYTGDQNTLDAPHRKGDLRRARAAALNIVPNSTGAAKAIGLVIPELNGKLDGSAQRVPVATGSLTELVSVLERPATKEEINAAMKAASSESYGYNEDQIVSSDVVGIEYGSLFDATQTRVMTVGGKQLVKTVAWYDNEMSYTCQLVRTLEYFAGKI

SEQ ID NO: 9672 - protein, 1056 aa, Staphylococcus epidermidis ATCC 12228
MINKKNNLLTKKKPIANKSNKYAIRKFTVGTASIVIGATLLFGLGHNEAKAEENSVQDVKDSNTDDELSDSNDQSSDEEKNDVINNNQSINTDDNNQIIKKEETNNYDGIEKRSEDRTESTTNVDENEATFLQKTPQDNTHLTEEEVKESSSVESSNSSIDTAQQPSHTTINREESVQTSDNVEDSHVSDFANSKIKESNTESGKEENTIEQPNKVKEDSTTSQPSGYTNIDEKISNQDELLNLPINEYENKARPLSTTSAQPSIKRVTVNQLAAEQGSNVNHLIKVTDQSITEGYDDSEGVIKAHDAENLIYDVTFEVDDKVKSGDTMTVDIDKNTVPSDLTDSFTIPKIKDNSGEIIATGTYDNKNKQITYTFTDYVDKYENIKAHLKLTSYIDKSKVPNNNTKLDVEYKTALSSVNKTITVEYQRPNENRTANLQSMFTNIDTKNHTVEQTIYINPLRYSAKETNVNISGNGDEGSTIIDDSTIIKVYKVGDNQNLPDSNRIYDYSEYEDVTNDDYAQLGNNNDVNINFGNIDSPYIIKVISKYDPNKDDYTTIQQTVTMQTTINEYTGEFRTASYDNTIAFSTSSGQGQGDLPPEKTYKIGDYVWEDVDKDGIQNTNDNEKPLSNVLVTLTYPDGTSKSVRTDEDGKYQFDGLKNGLTYKITFETPEGYTPTLKHSGTNPALDSEGNSVWVTINGQDDMTIDSGFYQTPKYSLGNYVWYDTNKDGIQGDDEKGISGVKVTLKDENGNIISTTTTDENGKYQFDNLNSGNYIVHFDKPSGMTQTTTDSGDDDEQDADGEEVHVTITDHDDFSIDNGYYDDESDSDSDSDSDSDSDSDSDSDSDSDSDSDSDSDSDSDSDSDSDSDSDSDSDSDSDSDSDSDSDSDSDSDSDSDSDSDSDSDSDSDSDSDSDSDSDSDSDSDSDSDSDSDSDSDSDSDSDSDSDSDSDSDSDSDSDSDSDSDSDSDSDSDSDSDSDSDSDSDSDSDSDSDSDSDSDSDNDSDLGNSSDKSTKDKLPDTGANEDYGSKGTLLGTLFAGLGALLLGKRRKNRKNKN

SEQ ID NO: 9673 - protein, 126 aa, Brassica napus
MADRLTRIAIVSSDRCKPKKCRQECKKSCPVVKTGKLCIEVTVGSKLAFISEELCIGCGICVKKCPFEAIQIINLPRDLEKDTTHRYGANTFKLHRLPVPRPGQVLGLVGTNGFGKSTALKIWQGA

SEQ ID NO: 9674 - protein, 350 aa, Ustilago maydis 521
MSGPLVLITGITGFLSAHVLDAVLASPANYKVRGTLRSISKKDEILARLSAQDRERVEFVQVADIATSDLLAAVRGVEIIHHVASPYQLNVQDAERDLLIPAVEGTLNLLRFAKHEKSVKKIVITSSFAAVTNFKDGGPYRPGFVYTADCWNPSSYEDAIKAGGAGAFSYSVSKKLAEKAAWDYLANEKPHFEIACINPPMIYGATLQPVAKLSSLNTSSKTIYGLINSADSMPEDRLPLFCHARDVGDAHVATTEKPDGMGQRWLLCGGKFTWAHAVKFIAEQYPDLQDRLPKGWKEASANPRDLNTIVDLDTKPAQTKLGMQFRDWQITLKESLDSLLELEKRPGWKN

SEQ ID NO: 9675 - protein, 328 aa, Oryza sativa (japonica cultivar-group)
MGGGGGAEEELTAQETALYDRQIRVWGVDAQKRLSKAHVLVCGMNGTTTEFCKNIVLAGVGSLSLMDDHLVTEDDLNANFLIPHDESIYGGRSRAEVCCESLKDFNPMVRVAVEKGDPSLIDGEFLDKFDIIVVSCAPIKTKLLINDNCRKRSKHIAFYAIECKDSCGEIFVDLQNHSYVQKVGGEPKPKELAYPSLQEAISVPWKNLPRKTTKLYFAMRVLENYESSEGRNACEASLSDRPAVLALRKDMCDKMSLSESQIPTALLERLLAAGKKQHPPVCAILGGILGQEVIKSISGKGDPIKNFFYYDAADGKGIAEDIPPLSSD

SEQ ID NO: 9676 - protein, 164 aa, Zea mays
SYFIIVFILIYLPGEREAEGEQSLHTSAAFPFPATPHRFASSALYSSSYSSPPTRNRRERKGKPAAAPAPSNQQIGTSVLRNPSMAEESGRPLPKFGEWDVNDPASADGFTVIFNKARDEKKGGNGQDTDSPSKDPRTERVESYAAKPSTKKWFCCVTASPTQS

SEQ ID NO: 9677 - protein, 479 aa, Streptomyces avermitilis MA-4680
MSSTFRNYIDGAFADASDGRTLDVVDPTTGDVYATSPLSGAADVDAAMAAAAAAFPVWRDATPSVRQRTLLKIADAMEARADELVAAESRDTGKPLHLTRSEELAPAIDQVRFFAGAARMLEGRSAGEYMEGMTSIIRREPVGVCAQVAPWNYPLLMAVWKFAPALAAGNAVVLKPSDTTPASTVLIAEIIGGVLEELGLPRGIFNVVCGDRETGRLMVEHPTPAMASITGSVRAGIQVAQSAAKDVKRVHLELGGKAPAVVFEDADLAKAVEDLVVGGFFNAGQDCTAATRVLVHESVHDEFVAALAKAAADTKTGQPDDEDVLYGPLNNAGQLAQVSGFIERLPEHATIEAGGHRVGEKGYFYAPTVVSGLRQDDEIVQNEVFGPVMTVQSFTDEAQAVQYANGVDYALASSVWTKDHARAMRMSKNLDFGCVWINTHMALVAEMPHGGFKKSGYGKDLSAYGFEDYTRIKHVMTSL

SEQ ID NO: 9678 - protein, 414 aa, Podospora anserina
MPRDELPSLLLLPFPPDPSSRSLLNTAYRPSITAALSRLKRPNGASKLTVAVECPILHGQFLRSKTLSWTEAQALVAGIYTIISVVSAQLGIGTEIDGGPNSVDATVVMIDHNRNKRFTEDFRPAIETNNTTVIDLATFASAYHPWNYIFHVRSEVGLQFYQTYLKLAEGRQTLLQEQLIPVEGGITMHVAPQGNIPRPTPARTPGVPVVCLGGTFDYLHPGHKLLLTAAALLLKVPRKDDANMQPCTYIIGITGDELLKNKKYAEFVQSWETRARNVILFLSRILELSERGWKDTQQPRRVEERDGDVKAWFRDGTILVHCVRIQDPFGPTITVENVDALVVSGETRSGGKAVNDKRAEQGWKTLEVFEVDVLDAEDVLEEKEVTKTEENFSAKISSSAIRQQRALARPGTKI

SEQ ID NO: 9679 - protein, 957 aa, Erwinia carotovora subsp. atroseptica SCRI1043
MTQTLSQLEHDGAFIERHIGPSVSQQQHMLSVVGATSLDALIRQIVPADIQLPSPPAVGEAVTEHEALAELKAIAGRNQRYKSYIGMGYSAVLMPPVILRNVLENPGWYTAYTPYQPEVSQGRLEALLNFQQVTQDLTGLDLASASLLDEATAAAEAMAMAKRISKLKQAERFFVADDVHPQTLDVVRTRAETFGFEIVVGKAEEALKDDAVFGVLLQQAGTTGELHDYSDLMAALKARKVVSCVASDIMALVLLTAPGKQGADIVFGSAQRFGVPMGYGGPHAAFFACRDEHKRAMPGRIIGVSRDAAGNTAFRMAMQTREQHIRREKANSNICTSQVLLANIAGMYAVFHGPEGLKRIAGRIHRLTDILAAGLTQGGLLLRHRSWFDTLTIEVADKDVVLSRALSFGINLRSDLASAVGITLDEATTREDVLALFAVLLGDDHGLDIEALDASIAQEVATIPAGLLRHDAILSHPVFNRYHSETEMMRYLHRLARKDLALNQAMIPLGSCTMKLNAAAEMLPITWPEFAELHPFCPPEQALGYRQMIEQLSGWLVQLTGYDAVCMQPNSGAQGEYAGLLAIRRYHESRNEAGRHLCLIPSSAHGTNPASAQMAGMEVVVVACDKQGNIDLHDLREKAQAAGEQLSCIMVTYPSTHGVYEETIREVCQIVHQYGGQVYLDGANMNAQVGITTPGYIGADVSHLNLHKTFCIPHGGGGPGMGPIGVKAHLAPFVPGHQVVKIDGVLTEQGAVSAAPFGSASILPISWMYIRMMGAEGLKQASQMAILNANYIATRLQQAYPVLYTGRDGRVAHECILDIRPLKESTGISEMDIAKRLIDYGFHAPTMSFPVAGTLMVEPTESESQVEIDRFIDAMLAIRSEINRVAQGEWPLDDNPLVNAPHTQAELVADWAHPYSRELAVFPAGSEHKYWPSVKRLDDVYGDRNLFCSCVPMSDYA

SEQ ID NO: 9680 - protein, 330 aa, Sorghum bicolor
MARAGVSTAPLSRLHSLPPRPSLLHNPQPNVLLLRPQQRKAPATTAAALPTAADLPELSLPAAAAAAAALAAAVSLSDPERRRRAQAEAAGGGDKEAVRAYFNSTGFERWRKIYGSATEGVNRVQLDIREGHAQTVAAALSMLRDSPLELAGTTVCDAGCGTGSLAIPLAAEGADVLASDISAAMVSEAQRQASLAQATAPGSTTFRMPRFEVRDLESLEGRYDVVVCLDVLIHYPREEAKAMIRHLASLADKRLLISFAPRTLYFDFLKRVGELFPGPSKATRAYLHAEADIEDALRQAGWRVANRGFISTQFYFAKLFEAVPVASSSS

SEQ ID NO: 9681 - protein, 367 aa, Buchnera aphidicola (Tetraneura caerulescens)
MIKKFKLAILAGDGIGPEVMEEGIKILEVIKKKFMLKLDIKEYLVGGVAIDKFGTALPKSTIDGCLNADAVLFGSVGGDKWKHLPVEQQPERAALLPLRKILNLFVNIRSSKLYSSLSHLSPLKSKIVNNGFDILCVRELIGGIYYGIPKGQKMDNYKRRYAVDTSIYYEEEITRIANFAFEIATFRRKKVTSVDKANVLETSILWREVVNKVAKKYPEISLNHLYVDNASMQIIKNPMDFDVILCPNLFGDILSDECGMITGSIGMLPSASLNKSKFGLYEPAGGSAPDISGKNIANPIALILSISMLFKYSFEQLNIADAIESSVINVLKDGYRTFDILTTNTNEKLLSTSSMGSKISDYLKHEE

SEQ ID NO: 9682 - protein, 334 aa, Propionibacterium acnes
MSAIRLGTRASTLATTQSEMVAGLLRSEGLDVNLTTITTHGDTSTASLAAMGGIGVFASAIRAALLEGEADIAVHSFKDLPTGRPLGLAIGAVPARADPRDALVARDGLTLHDLPQEASVGTGSPRRAAQLLAVRPDLTIVDIRGNVDTRLGRVKGLGRYAKNGGKEDLDAVVLAASGLARLGHSGAVTEFLDPSVVLPAPAQGALAVECRTADSRHGKLAKALARIDDRRTRLAATAERAVLSHLEAGCAAPIGALAQLKPVSGKSLQVLTLDVVVAAVDGSRTVREQVSVELPAEVEPALAAAHTLGVTAAEELLDDGAADVADLKASGSTR

SEQ ID NO: 9683 - protein, 330 aa, Thermococcus kodakarensis KOD1
MFSLGGFSRGGEYEKKTWDVLIIGAGPAGFTAAIYAARYGLETLIISKDLGGNMALTDLIENYPGFPEGISGSELTNRMHEQVKKLGVDVIFDEVVRIDPAECAYYEGPCKFTVKTANGKEYKARTIIIAVGAAPRKLRVPGEEELTGKGVSYCATCDGPLFKGKKVIVVGGGNTALQEALYLKSIGVDVTLVHRRQQFRADKILQDRFKESGIPAILDTVVTEIIGKDKVEAVRLKNVKTGEETVMEVDGVFIFIGYEPKTDFVKHLGITDEYGYIPVDMYMRTKVPGIFAAGDITNVFKQIAVAVGQGAIAANSAKEFLEEWKNKNSE

SEQ ID NO: 9684 - protein, 538 aa, Podospora anserina
MVVDTAYYDTLGVKPTATELEIKKAYRKLAIVHHPDKNPNDPNAHAKFQEIGEAYQVLSDEDLRKAYDKYGKESARPTEGFVDPAEFFSSIFGGESFVDWIGEISLMKDLTATMDITMSAEEEEAAAAAAAEAEAAAAAKDGEFPGTADALKESLKTSGGESSSAVPPDKPPVPAVVVEEETPTKKAKEAGYNTYNPSATEEVPPPYTKSSSPGPGSGASTPKPGGRTQIPIRPALMDRPSDEVSQQTDEGDKKGKKSKAGLSKEQREQLAALDKERQRIRQERVDTLARKLLDRISVWTETDHGKDVTRAFQEKTRLEVEELKMESFGIDILHAIGATYFSKGTTLLRSQKFFGMGGFISRMKDKGTLVKDTWNTISSAIDAQQTMEEMARLEQQGGEEWTDEKKIEYERRVTGKILTAAWRGSKFEIQSVLRDVCDAVLNDKKVPHGKRLERAQALVYIGEICLAAKRSPEEEGDYMAFEQLVAEAAMKKEKESKKKGKDKKKDDEDKKAAKPGDKAWEEAAASAANSAPNVPSSS

SEQ ID NO: 9685 - protein, 168 aa, Buchnera aphidicola (Tetraneura caerulescens)
MKEKIIIFDTTLRDGEQSLQSSLTVQEKIKIAFSLEKMGIDVIEVGFPVSSPGDFKSTEIISSNIKNSTVCGLARCVEKDIEAAALAMSKSSNFRIHLFLGTSPLHIKSKLKRNFREIVDLAVYSIKKAKKYTDDVEFSCEDAGRTEIDNLCKIVELAIKAGANTINI

SEQ ID NO: 9686 - protein, 66 aa, Glycine max
  misc_feature (29)..(30): Xaa can be any naturally occurring amino acid
  misc_feature (34)..(34): Xaa can be any naturally occurring amino acid
  misc_feature (37)..(40): Xaa can be any naturally occurring amino acid
  misc_feature (42)..(43): Xaa can be any naturally occurring amino acid
  misc_feature (47)..(47): Xaa can be any naturally occurring amino acid
  misc_feature (50)..(50): Xaa can be any naturally occurring amino acid
  misc_feature (52)..(52): Xaa can be any naturally occurring amino acid
  misc_feature (56)..(58): Xaa can be any naturally occurring amino acid
  misc_feature (61)..(63): Xaa can be any naturally occurring amino acid
MVLALALGDLHIPHRAPDLPAKFKSMLVXXKIQXIIXXXXLXXNEIXDLXKXLTCXXXHIXXXPIN

SEQ ID NO: 9687 - protein, 514 aa, Saccharomyces cariocanus
MLLQAFIFLLAGFAAKISALMTNETSDRPLVHFTPNKGWMNDPNGLWYDEKDAKWHLYFQYNPNDTVWGTPLFWGHATSDDLTHWQDEPIAIAPKRNDSGAFSGSMVVDYNNTSGFFNDTIDPRQRCVAIWTYNTPESEEQYISYSLDGGYTFTEYQKNPVLAANSTQFRDPKVFWYEPSQKWIMTAAKSQDYKIEIYSSDDLKSWKLESAFANEGFLGYQYECPGLIEVPTEQDPSKSYWVMFISINPGAPAGGSFNQYFVGSFNGTHFEAFDNQSRVVDFGKDYYALQTFFNTDPTYGSALGIAWASNWEYSAFVPTNPWRSSMSLVRKFSLDTEYQANPETELINLKAEPILNISNAGPWSRFATNTTLTKANSYNVDLSNSTGTLEFELVYAVNTTQTISKSVFADLSLWFKGLEDPEEYLRMGFEVSASSFFLDRGNSKVKFVKENPYFTNRMSVNNQPFKTEDDLSYYKVYGLLDQNILELYFNDGDVVSTNTYFMTTGNSLGSVNMT

SEQ ID NO: 9688 - protein, 177 aa, Zea mays
MNSLAIRVSKLLRSSPPLLHPNHLLHGRSWFSTGPIDEEGLEEDFEETISERPELQPQGVDPRKGWGFRGVHRAIICGKVGQAPLQKILRNGRTVTIFTVGTGGMFDQRLMGATNQPKPAQWHRIAVHNEVLGSYAVQKLAKNSSVYVEGDIETRVYNDSISSEVKSIPEICIRRDG

SEQ ID NO: 9689 - protein, 122 aa, Arabidopsis thaliana
MAGAVGTSMLGSLIVFTVILSLQEIYRGKLASSELFTILGGFTSSLLFLFSLTFIGNFQESSGIKSGWGAVILAEIIALIAAGTVHRVCITTCFLFSAGLLYEVNKISGYMLSKTESKSKRH

SEQ ID NO: 9690 - protein, 340 aa, Cordyceps bassiana
MSRANPPNNASASRKISFNVSEQYDIQDVVGEGAYGVVCSAIHKPSGQKVAIKKITPFDHSMFCLRTLREMKLLRYFNHENIISILDIQKPRGFDSFNEVYLIQELMETDMHRVIRTQVLSDDHCQYFIYQTLRALKAMHSANVLHRDLKPSNLLLNANCDLKVCDFGLARSAASQEDNSGFMTEYVATRWYRAPEIMLTFKEYTKAIDVWSVGCILAEMLSGKPLFPGKDYHHQLTLILDVLGTPTMEDYYGIKSRRAREYIRSLPFKKKVLFRTLFADTSDLALDLLEKLLAFNPVKRITVEEALKHPYLEPYHDPEDEPTAPPIPEEFFDFDKHKDN

SEQ ID NO: 9691 - protein, 287 aa, Chlamydophila caviae GPIC
MLLKGAPVAERVLNKIKQEISNSSTRPGLAVVLIGNDPASEVYVGMKVKKATDLGMVSKAHRLSSDATLTDILKLIDRLNNDPMIHGILVQIPLPKHLDANAVIQAISPEKDVDGLHPINMGKLLLGQLGGFAPCTPAGIIELLHYYEIPLHGRHVAVVGRSNIVGKPLAAMLMQKHPSTNATVTLLHSQSENLTEILKTADIIIAAVGVPLFIKETMISSHAIVVDVGTSRVAANNDKGYTLVGDVDFNNVVAKCKAVSPVPGGVGPMTVAMLMKNTWESYKKSSS

SEQ ID NO: 9692 - protein, 473 aa, Deinococcus radiodurans R1
MSQPQPPSRLLVMKFGGTNMQSAHAIRHSASLAGRSVREGVKVVVVVSAMAGVTNGLLHLADAAQSGDIARANDEIAALRTRHFTAAQELGAAPDSETVRELRELHETLRQAVYGVYLLRELTPRSRDLIVAFGERLSAPLMSLALEQSGLRARHLTGGEAGILTDTNFGNARPLPGTYERVGDRLSGFLSAGVTPVIAGFMGETEQGAITTLGRGGTDFSATIVGKALGADEVWAWKDVDGVMSADPRVVGDASNIGVLSYGEVMELAYFGAKVLHPLAVTPLQDSGIPLRVKSAADPDFAGTLVRSQAEEIPGRPVKAVTAIKNVSLLTVTGAGVLGVPEVIASVFTAIARENITLLMVSQSSSMSNVSLAVPSADAARALQALRAGLSSELNVEETNGVAVLAIVGSGMRGQQGVSARLFTALASEDINILMISQGSSELNISVALSGEEVDRATAAVHAAFTLSQPVGA

SEQ ID NO: 9693 - protein, 609 aa, Bacillus cereus ATCC 14579
MCMCGITGWVDWKEDLSNQHVILKKMANSIEHRGPDAEGFWFSPHAAFAHRRLIVIDPEGGTQPKTFRAGDYTYALTYNGEIYNFRELKEQLQKCGHAFETHSDTEVLLHAYLEWKEDCVQHLNGIFAFALWDDQKQQLFLARDHLGVKPLFYTERNDSIIFGSEIKALLAHPSVPAEIDADGINEIFGLGLFRTPGCGVFKHIQEVRAGHSITFTRHKKVVTKYWNLESKFHTDSIEDTSSHILSILQDTVKRQLIADVPLVCMLSGGLDSSGITALAGKEFAAENKTLHTYSVDFVNSAKDFELTFARTGLDAPWVKRVSEHVGTAHHDIIVNAEELANHLFVPLHAKDLPSAGEMETSLYLLFCEMKKDATVALSGESADEVFGGYPWFHQEELLYVDKFPWLTNWKNTSPLLLNEVSNQCNLENYIDTRFQEAILEVPTLEGESKKSAKQRQMFYLFLTRFLPFLLDRKDRMSMAVGFEVRVPFCDYRLVEYLWNVPFNIKSIDNIEKGILRRALQPALPDDVRNRRKSAYPTSQDPHYLQTIRNLTLDMCSHKNNPIFSLINHSILLSIADQSNKEINNFEARSAMEYMLQVNEWLKTYHIHIA

SEQ ID NO: 9694 - protein, 161 aa, Kluyveromyces lactis NRRL Y-1140
MSKFYELAPKDKKGEPFPFTQLEGKVVLIVNVASKCGFTPQYKELEALYKKYEDKGFIVLGFPCNQFGHQEPGTDEEISQFCQLNYGVSFPILKKVDVNGSEADPVYDFLKNEKSGLLGFKGIKWNFEKFLVDKKGTVVERYSSLTKPSSLEEPIEKLLNE

SEQ ID NO: 9695 - protein, 113 aa, Lactococcus lactis subsp. cremoris
MKKIEAIIRTDKLEDLKKALSDNGLVHGMTVSQVLGYGEQKGFAEYVRGQRIETTLLSKIKIEIVSIDEKVDQIVNVITKAVRTGEVGDGKIFIQPVERVIRIRTSEEDAQAL

SEQ ID NO: 9696 - protein, 106 aa, Wolinella succinogenes
MGKYIELNASNFDEVTKKGVSLVDFWAPWCGPCRMVAPVIEELAADFEGKANVCKVNTDEEQELAVKYGIRSIPTILFFKDGEIVDQMIGASSKQAFKEKLDSLIG

SEQ ID NO: 9697 - protein, 410 aa, Blastopirellula marina DSM 3645
MSIELKVPEAGESIQEVQIGRWMKKEGDEVNEDESLVELETDKASMEMPAPAKGVLREIFKREGDLVTVGEVIGILDDGAAAAAPAAAPAEKPAAAEVEKPAPTPAPAATSGRGKASRPTIINSSSTPAKPSASSNGESEVKHAPAPAKAEEPKKAPPAPAKSQQLAPRAETSLAPQAGEKIVPMPLIRRRIAETLKSAQHNAALLTTFNQVDMTNVMALRKKYGQWFLDQWGVKLGFMSFFIKATIDALKQQPALNAEIRDGDKIVYRDYYHVGVAIGSKKGLVVPVLRNAERMRFAEIELAIADFAARANENRLSAAELSGGTFTITNGGVYGSLMSTPIVNPPQSGVLGMHTIEERPVARDGQVVIRPMMYLALTYDHCMVDGREAVMTLKRICDAIEEPARMLLEA

SEQ ID NO: 9698 - protein, 1338 aa, Kluyveromyces lactis NRRL Y-1140
MSFLKKKSSTAGHSRSGSASSILNKHVDPANISEFYPSSLDHKVTSGLKNDYSFDSSSKGSRKSSGGSTNSLTSERLLFNWDVTDPSQWTMPRIIQWFRANDFNDQWITFFKRNSISGNKFLKLLAYDNFAPYEKSLQQSKSSSYERFQYLLKKTLEENVVKGNNRNGNRIINNSRSSSESAKVSQRLSTSFSTHIRSTSESALLNIENITKDSSSSEPTTSKKQEASNYSLPLRQAKTNSASALYRRSLISLRNASSTKDNASKNDIKITIPPRPLSTTENTNKSPTTPSSVSPSHTAYTGIFRRQHKTSSSESSLFTSIFGHGVVEEPEETPKPRPVENRRIPAASTVNASTSKQSINVDDKARLWDKIKRKGQLPAEPSSQPAARIIIEEVKESPKAEPPEIVIPEEIYPKRPSDSRELFIMLTKDNSTFSPFNVQPHLGTDVSELKKAVALALGLTHSNFSIHLTDFGAEFGSQIPDGLLADFQKTSFQNIPNKLYIQDLEKKANLNPRPRTETLASQHSTAASTKSKTSVKSNASAASNGEGSSSDLTSIDDQGSSHRRAYPQTPSHYYDNSTSAETDYWSFKDSVPETISDAPHITLPKSRPSLKLNSSVLNTHASEKSTFRIIRQTSDTDIDFNKRRESPYVRVAELAPKRKAPKPPVNGNPVTSGSLPSAAAKNVSESPLESPPKLDRNGKTIYQKNKPRPPPPLTTELGSRRSVSSLSGQDLNEVKESPVQSFTPASTQVMVPQPYKGALETLKPRKSSADLSIRPRMSLRQFSRSNSSLNRKVLSTSRQTLNRTNSKPLVTSSTAADIFDENDISFADAPELSDSDDYSASSDEIIWSRDRKSISNDVPEFSFNTEDTIDLVGTDTTQVSVGATEGSDTPKKMALRPSPDVVYQNLEKFFPDADLDNPILEGLTPPPSPNADSSPPSPRGFEKSLKTKSEQQPAFLSSRGESSQFLTPVKSLKPPKRTKTIRIIAQEASEARKNEVSQKLQRKNTKMWGTKVVEITDKRTISINKSRNSRGEYKEFAWIKGEIIGKGSFGAVYLALNVTTGEMLAVKQVTVPEFSSQDESAISMVEALKSEVSTLKDLNHVNIVQYLGFEEKNGIYSLFLEYVAGGSVGSLIRMYGRFDDQLIRHLTKQVLEGLAYLHSKGILHRDMKADNLLLDNDGVCKISDFGISRKSNNIYSNSDMTMRGTVFWMAPEMVDTAHGYSAKVDIWSLGCVVLEMFAGKRPWSNFEVVAAMFQIGKSKTAPPIPDDTKDLVSPAGQSFLDQCFEIDPEMRPTADSLVGHPFCKTSSSFDFPKTKLAQFIKSNDKLNSSRLRISSQEL

SEQ ID NO: 9699 - protein, 290 aa, Pseudomonas syringae pv. tomato str. DC3000
MSQETAYIFDATSANFDQQVIDKSFDQPVLVDFWAEWCAPCKVLMPLLQQITESYQGELLLAKVNCDAEPDVVSRFGIRSLPTVVLFKDGQPVDGFAGAQPESEIRKILEQHVVMPPPPAADPLKQAQALFAESRFSEAEAVLKQLLGEDNTNAAALILYARCLAERGELSEARAVLDAVTGDAHKAELAGAKAQLTFLAEAATLPDAAELKSRLAQNPQDDEAAHQLAIQQLSRQQYEAALDGLLKLFIRNRNYAEGLPHKTLLQVFDLLGNDHPLVTAYRRKLFAALY

SEQ ID NO: 9700 - protein, 316 aa, Wolinella succinogenes
MVLDVAIIGGGPAGLSAGLYATRGGAENVVLFEKGMVGGQITSSSEMENYPGVAHVMSGLDFMEPWREQCFRFGLQHEMAEVSRIARQSEGNFAIHLSDGRIFEARSVIVTTGGKPKKAGVKGELEFFGRGVSTCATCDGFFYRNRDVAVIGGGDTALEEALYLANICSHVYLIHRREEFRAAPLSVEKVKKNPKITLLTSRVIEEIVGDASGVNGVKIRHKESKEVETLSVMGVFVFVGYDVNHQVLKQEDGSFLCEVNEKGEVVVDLSMKTNIPGLFAAGDLRIEAPKQVVCAAGDGASAALSALAYLEHLKES

SEQ ID NO: 9701 - protein, 590 aa, Pseudomonas fluorescens PfO-1
MCGLAGELRFDQQPADLAAIERITHHLAPRGPDAWGFHAQGPIALGHRRLKIMDLSDGSAQPMIDSQLGLSLAFNGAIYNFPELRAELEALGYAFYSGGDTEVLLKGYHAWGEALLPKLNGMFAFAIWERDAQRLFIARDRLGVKPLYLSRTGQRLRFASALPALLKGGDINPILDPVALNHYLNFHAVVPAPRTLLAGIEKLPPASWMRIEADGTTEQKTWWTLPYGPHADEKNLTLEDWRDRVLDSTREAVAIRQRAAVDVGVLLSGGVDSSMLVGLLREVGVENLSTFSIGFQDAGGERGDEFQYSDLIAKHYGTQHHQLRIDEKEIIEQLPAAFRAMSEPMVSHDCIAFYLLSREVAKHCKVVQSGQGADELFAGYHWYPQVDGAADPYAAYREAFFDRSYDDYAATVQPKWLTANDAAGDFVKEHFAQPGADAAVDKALRLDSTVMLVDDPVKRVDNMTMAWGLEARTPFLDYRLVELSARIPGQFKLPDGGKQVLKEAARRVIPSEVIDRKKGYFPVPGLKHLQGETLSWVRELLLDPSQDRGLFNPAMLDQLLTDPQGQLTPLRGSKLWQLAALNLWLSEQGI

SEQ ID NO: 9702 - protein, 328 aa, Mycoplasma pneumoniae M129
MSPKTTKKIAILTSGGDAPGMNATLVYLTRYATSSEIEVFFVKNGYYGLYHDELVPAHQLDLSNSLFSAGTVIGSKRFVEFKELKVREQAAQNLKKRQIDYLVVIGGDGSYMGAKLLSELGVNCYCLPGTIDNDINSSEFTIGFLTALESIKVNVQAVYHTTKSHERVAIVEVMGRHCGDLAIFGALATNADFVVTPSNKMDLKQLESAVKKILQHQNHCVVIVSENIYGFDGYPSLTAIKQHFDANNMKCNLVSLGHTQRGFAPTSLELVQISLMAQHTINLIGQNKVNQVIGNKANVPVNYDFDQAFNMPPVDRSALIAVINKNII

SEQ ID NO: 9703 - protein, 303 aa, Candidatus Phytoplasma solani
DQIDNAPEERERGITIKTSHVEYETSKRHYAHVDCPGHADYIKNMITGAAQMDAAILVVSGADSVMPQTREHILLARQVGVPKIVVFLNKCDLCPDEEILELVEMEVRELLSKYDFPGDDTPIIRGSALKALEGDKHYIAQVNELINALDSYIEDPVREVDKPFLMPVEDVFTITGRGTVVTGRVERGQVKAGDEIEIIGLKDTRKTIVTAIEMFKKDLDFAQAGDNVGALLRGINREDVQRGQVLAKPGSVKPHFQFVAQAYILTKEEGGRHTALFSQYRPQFYFRTTDITGVVELQGDVKM

SEQ ID NO: 9704 - protein, 641 aa, Bordetella pertussis Tohama I
MCGIVGIWGPLRDKANVLAESCRRIRHRGPDSNGYWEDAEADLALAHVRLAILDLTEAGHQPMVSACGRYVIVLNGEIYNHMELRERLQQDGLAPAWRGHSDTETVLACFAGWGIEQTLQAAVGMFAIVLWDRAERKLALMRDRMGEKPLYYGYSQANLLFGSELKAFMPVPGFGRELDRNALASFMRHNYIPAPQSIYAGIRKLPPGAWVEIDAAQMRRGELPEPQVYWSARRAADQGLGDRRRFESDAQAIDALEQVVSQAVRGQMLSDVSLGAFLSGGIDSSTVVALMQAQSAQPVRTFAIGFHEKGYNEAEHAKAVAAHLGTEHTELYVTAEDGLAVVPSLADMYDEPFADSSQIPTSLVTRMARQHVTVALSGDGGDELFGGYSRYFRVDNWWRKCAAMPGPLRHLAGAALRGSAALPGAGAWRGKVGKLGELLGADTRGEFYRLFVSYWADPGRVVIGGTEPLSPFEQPMEGSTFDAMMKLDTVTYLPDDILVKVDRAAMAVSLETRVPLIDHRVYEFAWQLPFEYKVRGGTGKWLLRQLLYRHVPQAMVDRPKRGFAVPLAAWLRGPLRDWAEALLDPARLRQEGWFEPEPILRKWREHLSGHRNWDSHLWGVLMMQAWLDRYRAGAGDEAGRR

SEQ ID NO: 9705 - protein, 303 aa, Candidatus Phytoplasma solani
DQIDNAPEERERGITIKTSHVEYETSKRHYAHVDCPGHADYIKNMITGAAQMDAAILVVSGADSVMPQTREHILLARQVGVPKIVVFLNECDLCPDEEILELVEMEVRELLSKYDFPGDDTPIIRGSALKALEGDKHYIAQVNELINALDSYIEDPVREVDKPFLMPVEDVFTITGRGTVVTGRVERGQVKAGDEIEIIGLKDTRKTIVTAIEMFKKDLDFAQAGDNVGALLCGINREDVQRGQVLAKPGSVKPHFQFVAQAYILTKEEGGRHTAFFSQYRPQFYFRTTDITGVVELQGDVKM

SEQ ID NO: 9706 - protein, 963 aa, Dechloromonas aromatica RCB
MPLNLPLSALEQHDEFIGRHIGPCSTEMATMLTAIGADSLEQLIDQTVPAAIRLPADLPLPAPRREHEALADLKAMASKNVVNKSCIGMGYYDTLTPKVILRNVMENPGWYTAYTPYQAEIAQGRLEALMNFQQMVIDLTGLEIANASLLDEATAAAEAMTMARRVSKSKSNRFLVDANCFPQSIDVVKTRAAYFGFELVIGNIDAHKDGDFFGALLQYPGDNGEVRDLTDVIAGLKAKGTTVAVASDLMALVLLKSPGAMGADIALGSSQRFGIPMGFGGPHAAFFATREAFVRSMPGRIIGISKDARGNTAYRMALQTREQHIRREKANSNICTSQVLLANMAGMYVVYHGAEGLRTIAGRIHRLTAILAEGLKRASVNLLTKQFYDTVHFDLGARAESVYNDALAAGYNLRRVSAGVLGISFDETTTRDDVATLFKLIAQTTLDVATIDAQVAAADSALPDSLIRSDAVLQHPVFNTHHTEHEMLRYLKSLQNKDLALDHSMISLGSCTMKLNATSEMIPVTWPEFGGIHPFAPRDQAVGYLEMITSLTEWLKTVTGFDAICMQPNSGAQGEYAGLVAIDRFHASRGEEHRNVCLIPKSAHGTNPATAQMANMKVVVVDCDENGNVDVADLKAKAEEHKDDLACLMITYPSTHGVFEEAIRDICAIVHANGGQVYMDGANLNAQVGLTSPGFIGADVSHMNLHKTFAIPHGGGGPGMGPIGLKAHLAPFMADHVVQPTGDANRVNAGQGAVSAAPFGSASILTISWMYLAMLGGAGVKKATQVAILNANYVAKQLNAHYPVLYVGKNGRVAHECILDIRPIKAATGIAEIDIAKRLMDYGFHAPTVSFPVAGTIMVEPTESESKAELDRFIGAMIAIREEIRQIENGVWTADNNPLKNAPHSQADVMDAEWKHPYSRQQAVFPLPWVAANKFWPSVNRIDDVYGDRNLNCACPPMEAYAD

SEQ ID NO: 9707 - protein, 363 aa, Pseudomonas syringae pv. tomato str. DC3000
MALNNIEELVEDIRQGKMVILMDDEDRENEGDLIMAAECVKPEHINFMARFARGLICMPMTRERCETLKLPLMAPRNGSGFGTKFTVSIEAAEGVTTGISAADRARTVQAAAAKEAKAEDIVSPGHIFPLMAQAGGTLARAGHTEAACDLARMAGFEPTGLICEVMNDDGTMSRRAELEEFTLQHDIKIGTIADLIHYRMIHERTVQRIAEQPMDSELGSFNLVTYRDSVEGDVHLALTLGKICAEEPTLVRVHNMDPLRDLLMVKQPGRWSLRAAMRAVSEAGSGVVLLLGHPLDGDVLLAHIRETAGQQPIKTPTTYSTVGAGSQILRDLGVRKMRLMSSPMKFNAISGFDLEVVEYVPSE

SEQ ID NO: 9708 - protein, 276 aa, Pasteurella multocida subsp. multocida str. Pm70
MTLAKDKLPATFPQPTEVQYLVCCDMDETYIPYHPDNQVTSGITELEHFLLEEGKKKGILLGWITGTNKTSALRKAKRTISQSPHFLCCSLGTEFYWITQGEFVPSTTWQQRIATSGYQQQKVDQIVEQILAQGIRLDRQPEDYQGPYKTSFYYLIRDEMEKDIAWIRSLAEQAQLRVLITRANPAAGDPENSYDVDFIPKCCGKDQAILFLMEELKLDKQQVLAFGDSANDFAMFAVAGNGYLVANADKHAIERYGKCLDKPYCHGILSVLRQLP

SEQ ID NO: 9709 - protein, 463 aa, Enterococcus faecalis V583
MSIFRKKEITVPVNDSGGMKKNLKTMDLIFLGIGAVVGTGIFVVTGVAAERYAGPGLVLSFLVAAAAIILSGLCYAEFASRIPVIGGPYAYMYVVFGEIVAWMTGWMIICEFFLAVSSVASGWSGYVHGFLDSLGFSLPQALSGAYNPTNGTYIDLIAMLVVVAVTFWVSLEAKTALRLNNLMVFVKFGIILLFVLVGIFYVKPTNWQPFIPYGFSGVFSGAALVFFAFLGFDAVSMAAEEVKNPKKDIPKGIIGSIIISTLLYIVVTLVLTGIVPFTDLGVKDPVAFAMRFINHGAIATIISVGAILTLLTVTIAMMYSLARVIYAISKDGLLPQFMSKIDEKRHTPKNATYVAGFLAMVFAGIVPMEMLAELTNIVTLFYLMFLALGIIKLRTMKGEPQAGEFKVPLVPVLPLISIVVCAALMFQLSLATWQVFGVAVVIGLAIYFFYGRHHSIVRFETKE

SEQ ID NO: 9710 - protein, 475 aa, Saccharomyces cerevisiae
MLSRATRTAAAKSLVKSKVARNVMAASFVKRHASTSLFKQANKVESLGSIYLSGKKISVAANPFSITSNRFKSTSIEVPPMAESLTEGSLKEYTKNVGDFIKEDELLATIETDKIDIEVNSPVSGTVTKLNFKPEDTVTVGEELAQVEPGEAPAEGSGESKPEPTEQAEHRKVSPQGKTQVRKRLQRKKLLQRKKPLQRKKLQNQKRTDQPKKTVSKAQEPPVASNSFTPFPRTETRVKMNRMRLRIAERLKESQNTAASLTTFNEVDMSALMEMRKLYKDEIIKKTGTKFGFMGLFSKACTLAAKDIPAVNGAIEGDQIVYRDYTDISVAVATPKGLVTPVVRNAESLSVLDIENEIVRLSHKARDGKLTLEDMTGGTFTISNGGVFGSLYGTPIINSPQTAVLGLHGVKERPVTVNGQIVSRPMMYLALTYDHRLLDGEKLLSFLKTVKELIEDPRKCCYGDLKFAAHTNLIS

SEQ ID NO: 9711 - protein, 288 aa, Clostridium tetani E88
MTIRYDIAVIGSGPAGLSAAINAKIRNKNIIVFGNKDLSNKVAKAPLVNNYLGLPNIKGKDLKETFQNHIDKMGIQITYERVNAVYAMGEYFSLMVNDKMYESTSLIMATGIEYTKPLKGEEEFLGRGVGYCATCDAPLYKNKNVIIIGHNKEAEDEANFVSELTSKTYYVPMYKGNYSLNNNIEVIKDRPLEVKGQDRVEKLVFKNGELNTDGIFVLKDSISPGQLVPGLEIEDGHIKVDRNMKTNIEGCFAAGDCIGKPYQYIKAAGEGQVAALNAVSYLDSIKNK

SEQ ID NO: 9712 - protein, 403 aa, Magnaporthe grisea 70-15
MKQLLSVAIVAPESGFSGFVVYRPSIYYQRQITFCPRQIKLLGMKSYSIASIPADGIGPEVIDASIAVLNTLADTLGSFNIEFTHFDWSSDTYKKTGKYIPDGGLDKLKKHDAILFGAVGSPEVPDHVSLWGLRLAICQPFQQYANVRPTKIFRGTRSPLRDCATSDLDWVIVRENSEGEYAGQGGRSHRGLPWETATEVAIFTRHGVERIMRFAFELARNRPRKLLTVVTKSNAQRNGMVLWDEVAAEVARDFPDVTWDKMLVDAMTCRMVLKPESCDTIVASNLHADILSDLAAALAGSIGIAPTSNLDPSRQNPSMFEPIHGSAFDITGKGVANPVATFWTSAEMLAWLGEKDASMKLLEAVERVCEKGVVTADLGGTATTKQVTDAVIDEIKALYGKSS

SEQ ID NO: 9713 - protein, 105 aa, Clostridium tetani E88
MIKEINDSVFNSEVLNSDKVTVVDFWAPWCGPCRMLGPVIEELSQEMSEQVKFVKVNVDENPMSATEYKVASIPTVAVFKDGKIQETLVGFRPKQAMQSSIEKHI

SEQ ID NO: 9714 - protein, 151 aa, Glycine max
MKQPTFPNAAAEETKPEQNQTAPKQKSKKFPTATELISHYQKQGGLEPAEASVKVIEDLQNALVRVASSSKNASSKNKLLADARKIDAISGRLAVVDAKLETKPGYVETFALGLASGAALNGISAVWPHVTRGIGQVWSAVKSGTDPSAAS

SEQ ID NO: 9715 - protein, 421 aa, Streptomyces rochei
MRRVVITGIGVVAPGGVGTADFWALLTEGRTATRRITLFDASSFRSRIAAEADFDPAGHGFAPDEARRLDRVAQFALVAAREAVADSGLVLAAEGERTGVSLGTAVGCSSGLDETYAHVSESGRPLAAGSRTAEARLGDYLVPSSVAAEVARDSGALGSVAVVSTGCTSGLDALGHATELIREGSADIMVAGGAEAPITPITLASFDAIRATSARNDEPETASRPYDRTRDGFVLGEGSAVLVLEEHDRAVRRGARIYAEVSGFATRSNAYHMTGLRPDGGEMAEAIRVALDEARLNPADVHYVNAHGSGTKQNDRHETAAFKASLGQHAHRVPVSSVKSMIGHSLGAIGGLEIAASALAIAHDTVPPTANLHEADPACDLDYTPLTAREQRTDTVLSVGSGFGGFQSAMVLTSRHTGAAA

SEQ ID NO: 9716 - protein, 272 aa, Pseudomonas aeruginosa PAO1
MNTAVEPYKASSFDLTHKLTVEKHGHTALITINHPPANTWDRDSLIGLRQLIEHLNRDDDIYALVVTGQGPKFFSAGADLNMFADGDKARAREMARRFGEAFEALRDFRGVSIAAINGYAMGGGLECALACDIRIAERQAQMALPEAAVGLLPCAGGTQALPWLVGEGWAKRMILCNERVDAETALRIGLVEQVVDSGEARGAALLLAAKVARQSPVAIRTIKPLIQGARERAPNTWLPEERERFVDLFDAQDTREGVNAFLEKRDPKWRNC

SEQ ID NO: 9717 - protein, 1063 aa, Saccharomyces cerevisiae
MDDYHVNTAFSMGRGNQQDDGNSERNSMHTQPSTMAPATLRMMGKSPQQQQQQNTPLMPPADIKYANNGNSHQAEQKERQVELEGKSRENAPKPNTTSQSRVSSSQGMPKQFHRKSLGDWEFVETVGAGSMGKVKLAKHRYTNEVCAVKIVNRATKAFLHKEQMLPPPKNEQDVLERQKKLEKEISRDKRTIREASLGQILYHPHICRLFEMCTLSNHFYMLFEYVSGGQLLDYIIQHGSIREHQARKFARGIASALIYLHANNIVHRDLKIENIMISDSSEIKIIDFGLSNIYDSRKQLHTFCGSLYFAAPELLKANPYTGPEVDVWSFGVVLFVLVCGKVPFDDENSSVLHEKIKQGKVEYPQHLSIEVISLLSKMLVVDPKRRATLKQVVEHHWMVRGFNGPPPSYLPKRVPLTIEMLDINVLKEMYRLEFIDDVEETRSVLVSIITDPHYGLLSRQYWTLAAKMNAESSDNGNAPNITESFEDPTRAYHPMISIYYLTSEMLDRKHAKIRNQQQRQSHENIEKLSEIPESVKQRDVEVNTTAMKSEPEATLATKDTSVPFTPKNSDGTEPPLHVLIPPRLAMPEQAHTSPTSRKSSDNQRREMEYALSPTPQGNDYQQFRVPSTTGDPSEKAKFGNIFRKLSQRRKKTIEQTSVNSNNSINKPVQKTHSRAVSDFVPGFAKPSYDSNYTMNEPVKTNDSRGGNKGDFPALPADRENMVEKQREKQIEEDIMKLHDINKQNNEVAKGSGREAYAAQKFEGSDDDENHPLPPLNVAKGRKLHPSARAKSVGHARRESLKYMRPPMPSSAYPQQELIDTGFLESSDDNKSDSLGNVTSQTNDSVSVHSVNAHINSPSVEKELTDEEILQEASRAPAGSMPSIDFPRSLFLKGFFSVQTTSSKPLPIVRYKIMFVLRKMINEFKEVKGGFVCMQRFSSNNVAAKREGTPRSIMPLSHHESIRRQGSNKYSPSSPLATNTHQRNSSITETYGDDKHSGTSLENIHQQGDGSEGMTTTEKEPIKFEIHIVKVRIVGLAGVHFKKISGNTWLYKELASSILKELKL

SEQ ID NO: 9718 - protein, 502 aa, Pseudomonas aeruginosa PAO1
MAKAIPQLIDGEWRGSRSRELVEVTDPATQDVLALAPKATADEIEQAIASAQRAFETWREVPAPERARLMLRYQHLLKEHHDELGELLARETGKNLADAKGDVWRGIEVVEHAANVASLMMGETVENVAREIDTASWIQPLGVCAGITPFNFPAMIPLWMFPLAIACGNTFVLKPSEQDPLTPNRLAELFLEAGAPKGVLQVIHGGREQVDALLTHPDIRAISFVGSVAVGQHVYRTGTAHLKRVQAFAGAKNHMVILPDANKAQVLGNLVGASCGAAGQRCMAISAAVFVGAAREWIPELAERMAVLRPGHWQDPDAAYGPLISPQARQRVLRLIAEGKAEGAECLLDGSQCQVEGYPNGNWLGPTLFRAVTPKMGLYREEIFGPVLACLEVESLEEAIALVNANPYGNGTSLFTRSGGAARRYQHAVQVGQVGINVPIPVPLPFFSFTGWKGSFYGDLHAYGKQAVRFYTETKTVTSRWFDDEPTTDESSAGPNMTIHLK

SEQ ID NO: 9719 - protein, 1153 aa, Saccharomyces cerevisiae
MPNPNTADYLVNPNFRTSKGGSLSPTPEAFNDTRVAAPATLRMMGKQSGPRNDQQQAPLMPPADIKQGKEQAAQRQNDASRPNGAVELRQFHRRSLGDWEFLETVGAGSMGKVKLVKHRQTKEICVIKIVNRASKAYLHKQHSLPSPKNESEILERQKRLEKEIARDKRTVREASLGQILYHPHICRLFEMCTMSNHFYMLFEYVSGGQLLDYIIHDGSLKEHHARKFARGIASALQYLHANNIVHRDLKIENIMISSSGEIKIIDFGLSNIFDYRKQLHTFCGSLYFAAPELLKAQPYTGPEVDIWSFGIVLYVLVCGKVPFDDENSSILHEKIKKGKVDYPSHLSIEVISLLTRMIVVDPLRRATLKNVVEHPWMNRGYDFKAPSYVPNRVPLTPEMIDSQVLKEMYRLEFIDDIEDTRRSLIRLVTEKEYIQLSQEYWDKLSNAKGLSSSLNNNYLNSTAQQTLIQNHITSNPSQSGYNEPDSNFEDPTLAYHPLLSIYHLVSEMVARKLAKLQRRQALALQAQAQQRQQQQQVALGTKVALNNNSPDIMTKMRSPQKEVVPNPGIFQVPAIGTSGTSNNTNTSNKPPLHVMVPPKLTIPEQAHTSPTSRKSSDIHTELNGVLKSTPVPVSGEYQQRSASPVVGEHQEKNTIGGIFRRISQSGQSQHPTRQSGTYSSKENLQHICQNQMKFPSKYRKAIVVLYQTYIPSARRYPSYVPNSVDVKQKPAKNTTIAPPIRSVSQKQNSDLPALPQKRQLIVQKQRQKLLQENLDKLQINDNDNNNVNAVVDGINNDNSDHYLSVPLSVPKGRKLHPSARAKSVGHARRESLKFTRPPIPAALPPSDMTNDNGFLGEANKERYNPVSSNFSTVPEDSTTYSNDTNNRLTSVYSQELTEKQILEEASKAPPGSMPSIDYPKSMFLKGFFSVQTTSSKPLPIVRHNIISVLTRMNIDFKEVKGGFICVQQRPSIETAAVPVITTTGVGLDSGKAMDLQNSLDSQLSSSYHSTASSASRNSSIKRQGSYKRGQNNIPLTPLTTNSIHQRKTSIPMSPNYGNQSNGTSGELSSMSLDYVQQQDDILTTSRAQNINNVNGQTEQTNTSGIKERPPIKFEIHIVKVRIVGLAGVHFKKVSGNTWLYKELASYILKELNL

SEQ ID NO: 9720 - protein, 327 aa, Pyrobaculum aerophilum str. IM2
MQMGDLMDVDYDVIIVGAGIAGLSAALYTARQRLKTLVISRDLGGQLNMTTLIENYPAIPKISGPELAKRVEQQARTFGAEIIFDEVKAVEKHGDVFVVKTEGGDEYKSLAVILAFGKTPKELGVPGESKFKNRGVSYCTICDAPFFKGQDIALISWGDLAREPVTILSSVANKFYWIYPGEKPIHDDEFIEQAKRLGKAVFVPNSEVVEIKGDTKVKSVVVKNRKTGETQELPVSAVFIEVGYVTKSDFVKHLVELNERGEIIADWEGKTKTPGVFAAGDIVAYPYKQAVISAAMGVAAALSATAYVMKLKGKPVHSLVDWRAEKK

SEQ ID NO: 9721 - protein, 344 aa, Streptomyces rochei
MRSLTYSQAISEATVQCMEADPAIVLAGQSVDDYKGVYGTTGEAFARFGSARVIDIPNGENAFAGIAIGAATMGLRPLLVHTRDDFMFLAMDALINLAAKWRYMYGGKRGVPVVSRGVVGRGWGQGATHSQSLQSLFGHFPGLHVATPASPADAKGLLVTALQGDTPVVLLENRGLYDLRGEVPSEPVAVPFGKGRVVRAGDDVTIVAASLMVHEAERAAGVLAARGISAEVVDVRSIRPLDDALICASVAKTGHLVVADTSWARYGFTAEVVAVVAENVPGALKAPVRRVTPPDCPAPVSWPLENAFNPGAETVVRACLEVLGVAGGAVPRIRNVMAGFAGPY

SEQ ID NO: 9722 - protein, 519 aa, Buchnera aphidicola (Chaitophorus populeti)
MKEKIIIFDTTLRDGEQSLQSSLNTQEKIEIALALEEMNIDIIEAGFPISSPGDFKSVQEICKKIKNSTVCSLARCIDKDIKIAAKAMSQLNHFRIHLFLGTSKLHIESKLKKNFTEIQDMAIRSIKLAKKYTDDIEFSCEDAGRTSIDNLCSIVEILIKNGVKTINIPDTVGYTIPNEFSKIISELFIRVPNIDQAIISVHCHNDLGMAVGNSISAIQSGARQIEGTITGIGERAGNTALEELIMAIKTRKKMLNFFTDIKHQKIYKTSKIISKICYISIPINKANIGANAFAHSSGFPQDGIIKNRKNYEIFSPKSLDNQNKFNFTSRSGRTAVKNRMPEMGYTEKDYNLKKLYKKFLELADKKGQILDYDLQTLAFIKNHSKKTLNLILKNIFFHLNLQIKQIFTLNYGVKIYFIKLKFIPKMEYFRGYINLYKKLLKLIFYLKKFKIKSIHKKKKIWGKVYIIAKYQNETFYGKNTSQDIVTAIIQSMINILNNILQYKKIKKKNQKSLIKNLLR

SEQ ID NO: 9723 - protein, 490 aa, Xanthomonas axonopodis pv. citri str. 306
MPRFPDQLLYIGGRYVPARGGHTLEVVNPATGEVLANVHNAGVDDLDAAVDSAKAGQQRWAALTTVERSRILLRAVALLRERNDALAQLETLNTGKPLSETRSVDVVTGADVLEYYAGVAQALQGAQVPLREGSFFYTRHEPLGVVGAIGAWNYPIQIALWKAAPALAAGNAMIFKPSEVTPLTALKLAEIFTEAGLPDGVFNVLPGDGASVGTALTEHPQIEKISFTGGTATGRKVMASASSSSLKEVTMELGGKSPLIVCADADLDVAADIAMMANFYSSGQVCTNGTRVFVPRALRHAFEARLLARVQRIHIGDPLDERTTFGPLASAAHMQRVLEHIEQGKAEGARLLCGGERLQDGALVQGYYVAPTIFSDCTDVMTIVREEIFGPVLSLLTYDDEDEAVTRANATTYGLAAGVVTPDLARAHRLIHRLEAGICWVNTWGESPAPMPVGGYKQSGVGRENGLATLQAYTRTKSVQIELERYASVF

SEQ ID NO: 9724 - protein, 555 aa, Ashbya gossypii ATCC 10895
MATTNTFSDFKLASELPAWAKLQELYEKKGKTLSLKEAFATDEQRFQKYSRTFSNHDGSKILFDFSKNLVDDEILGALAQLAREANVTQLRDQMFNGEHINSTEDRAVYHVALRNRANKPMYVDGKNVAPEVDAVLQHMKEFSEQVRSGAWKGYTGKSIKDVVNIGIGGSDLGPVMVTEALKHYAGPLKVHFVSNIDGTHLAETLKEVDPETTLFLVASKTFTTAETITNATSAKNWFLSKTGNNPAHISKHFAALSTNETEVAKFGIDTKNMFGFESWVGGRYSVWSAIGLSVALYIGFDQFEDFLKGAEAVDKHFTSTPIEDNIPLLGGLLSVWYNNFFDAQTHLVVPFDQYLHRFPAYLQQLSMESNGKSVTRGNVFANYSTGSILFGEPATNAQHSFFQLVHQGTKVIPSDFILAAQSHNPIENNLHQKMLASNFFAQAEALMVGKDEAQVKAEGATGGLVPHKVFSGNRPTTSILVQKITPANLGALIAYYEHVTFTEGAIWNINSFDQWGVELGKVLAKVIGKDLDTTGETTSHDASTNGLINQFKAWL

SEQ ID NO: 9725 - protein, 363 aa, Buchnera aphidicola (Chaitophorus populeti)
MHKKYKIAILPGDGIGPEVMQETYKIIEIIKKKLLINIQTSEYDIGGISIDKHGIALPKKTLIGCEKSDAILLGSIGGPKWDILPPKERPEIASLLPIRKHFNLFANLRPSILHKKLNYLSPLKKNNIKDGFDILCVRELTGGIYFGKPRIEINKKNMHYAIDTSIYHKYEIQRIAEIAFQESLKRRCKVTSIDKANVLYTSKLWRKTVNKISKKYPKVHLSHLYFDNAVMQIIKNPNQFDVILCPNLIGDVISDECGSLTGSIGMLPSASLNTKNFGLYEPAGGAAPDTQGKNIANPIAQILSLSMLIKHSLKMNHISNLINTAVYKTLLKGFRTHDISHDKNFVTTKEMGNEIVKSFIEEL

SEQ ID NO: 9726 - protein, 114 aa, Triticum aestivum
MAENAELLEWPKKDKRRFLHVVYRVGDLDRTIQFYTECFGMKLLRKRDVPEEKYSNAFLGFGPETSNFVVELTYNYGVSSYDIGTGFGHFAISTQDVSKMVEAVRAKGGNVTTR

SEQ ID NO: 9727 - protein, 124 aa, Brassica napus
MSGVWVFNKNGVMRLVENPYNQSGGDWSESSSSGGSQQQRMRRKILVHLPTSEVVSSYKSLERILKCLGWERYYNGDNADHLLQFHKRTSIDLISLPRDFSKFNSIHMYDIVVKNPNVFHVRDM

SEQ ID NO: 9728 - protein, 245 aa, Bacillus cereus G9241
MIKLVLIRHGQSLWNLENRFTGWTDVDLSENGLSEAREAGAILKKNGYTFDVAYTSVLKRAIRTLWIVLHEMDLAWVPVHKSWKLNERHYGALQGLNKDETAQKYGEEQVHIWRRSIDVRPPALTEDDPRYEMNDPRYKALKKGEFPLTECLVDTEKRVLAYWHSEIAPKLKNGNKVIISSHGNTIRSLVKYLDNLSSDGVVSLNIPTSIPLVYELDDDLRPIRHYYLSMDGEVPEGEIPKHISF

SEQ ID NO: 9729 - protein, 562 aa, Glycine max
MAPTTTVPIGTLPSGSVTGRLASVYSEVQKTRVDHALPLPSVLKHPFTILDGPPSSAAGNPDEIAKLFPHLFGQPSAALAPSGAVQTQKKLKIGVVLSGGQAPGGHNVISGIFDYLQERAPGSTLYGFKGGPAGIMKCKYVELTSEYIYPYRNQGGFDMICSGRDKIETPEQFKQAEETAKKLDLDGLVVIGGDDSNTNACLLAENFRSKNLKTSVIGCPKTIDGDLKCKEVPTSFGFDTACKIYSEMIGNVMIDARSTGKYYHFVRLMGRAASHITLECALQTHPNITIIGEEVAAKKLTLKNVTDYIVDVVCKRAEINYNYGVILIPEGLIDFIPEVQHLIAELNEILAHDTVDEGGLWKKKLTDQSLKLFDFLPQAIQEQLMLERDPHGNVQVAKIETEKMLIQMVETELEKRKQEGKYNGEFKGQSHFFGYEGRCGLPTNFDATYCYALGYGAGALLHSGKTGLISSVANLCAPVEEWTVGGTALTSLMDVERRHGKFKPVIKKAMVELEGAPFKKFASLRDEWALKNCYISPGPIQFSGPGSEVINHTLLLELEALA

SEQ ID NO: 9730 - protein, 430 aa, Oryza sativa
MDKLDGSARLMIVSDLDQTMIDHNDPKNLSLLRFQALWESEFSQDSLLVFSTGRSPISYRGLRTQKPLITPDITIMSVGTVIAYGEEMIHDVGWAEFLSNKWDRDIVVEETAKFSISMSALKIVSMQPERSQGPHKVSFFVDKEGAREVMDSLPETLNRRGLDVKIIFSSGEALDVLPQGAGKGQALLYLLKKFNSDGKPPNSTLVCGDSGNDAELFSVPSVHGVMVSNAQEELLQWYEENARGNPMMIHATERCAAGIMQAIGHFNLGPNVSPRDLEFPYPKLDAIKPADVVVKFYVLYEKWRRGEVQKAPSIIQYLKRITHPNGTTIHPSGRECSLHASIDALSSCYADKQGKKFQLWVDRIVASSIGTINWLVRFDKWEMEGNVRYCCLTTLLLTMKPETEDGFEITHIHKTWLEGYSAGNEHACIL

SEQ ID NO: 9731 - protein, 583 aa, Xylella fastidiosa Temecula1
MNRSAHSATRNGASWLTHALEAEGVDTLFGYPGGTIMPFYDALVDSRLTHILVRHEQGAALAANGYARASGRVGVCVATSGPGASNLITGIADAMLDSVPMVCLTGQVASSLLGTDAFQELDVFGLTMPIVKHSFLVRSIQDLPSMVQDAFRIAREGRPGPVLIDLPKDVQMTDASHLQDHVSAAVMAPPQAEAAMIIEAAAAIASAEKPVIYGGGGIALADAVNVFRTFVDTTSIPTTLTLRGLGALPHAHPHYLGMLGMHGTRAANMAIQECDLLLVIGARFDDRATGKVNEFAPFARIVHLDADAYEINKLRNADIAVPGNLATTLTALSALLSPSTADPHISSSRYEWHERCIGNRERFGVRYDAPGNDIYAPALLKRLSEMAPVDTIIACDVGQHQMWVAQHCKFEDPRNHLTSGGLGTMGFGLPAAMGAQFAYPERTVVLVSGDGSFMMNVQELTTIARCKLPLKIVLLDNNSLGMVRQWQELFFAERYSEIDLSDNPDFTALVQVFGIPAKRITVRSDVEQGLAYLLAQPGPALLHVQIDARANVWPLVPPNTANSTMLESNPAHVQKETPHAIPA

SEQ ID NO: 9732 - protein, 358 aa, Candida glabrata CBS 138
MLQFRTPLTRLTPMARLATRSAVRMASTKTMTVREALNSALAEELDRDDDVFIIGEEVAQYNGAYKVTKGLLDRFGERRVVDTPITEYGFAGLAVGAALKGLKPIVEFMSFNFSMQAIDHVVNSAAKTHYMSGGTQKCQIVFRGPNGSAVGVAAQHSQDYSAWYGSIPGLKVLVPYSAEDARGLLKAAIRDPNPVVFLENELLYGEQFEVSEEALSPDFTLPYTAKVEKEGKDISIITYTRNTEFSLAAAKILEEKYGVSAEVINLRSIRPLDIDAIVKTVKKTNHLITVESTFPSFGVGAEIIAQVMESEAFDYLDAPIQRVTGADVPTPYAKELEDFAFPDPETIVRAAKEVLSIE

SEQ ID NO: 9733 - protein, 218 aa, Mycoplasma mobile 163K
MKLISPSLLNVEESKRAEIATKMIELGIKWIHYDFMDGKFVPETAISFENYMEIKEKSPSHIKDIHLMVQDVSFYVEKFLNKAEYITFHFEALNYNEIKKILKKYHGLQKFGIALKPKTNIEQIYEYLPYVDLVLIMSVEPGYGGQKFIPNSLEKITKLKKYLLERSLDIVIQVDGGINEESGPQAFESGADILVSGSYLVKNLTKEQIDSLFPKEKN

SEQ ID NO: 9734 - protein, 144 aa, Glycine max
MGAFTEKQEALVSSSFEAFKANIPQYSVVFYTSILEKAPAAKDLFSFLSNGVDPSNPKLTGHAEKLFGLVRDSAGQLKANGTVVADAALGSIHAQKAITDPQFVVKEALLKTIKEAVGDKWSDELSSAWEVAYDELAAAIKKAF

SEQ ID NO: 9735 - protein, 160 aa, Raphanus sativus
MESEGKIVFTEEQEALVVKSWSVMKKNSADLGLKLFIKIFEIAPTAKKLFSFLRDSPIPAEQNPKLKPHAMSVFVMCCESAAQLRKTGKVTVKETTLKRLGANHSKYGVVDEHFEVTKYALLETIKEAVPEMWSPEMKSAWGQAYDHLVAAIKAEMKPSH

SEQ ID NO: 9736 - protein, 556 aa, Pseudomonas syringae pv. tomato
MTMLNDPSKKYRAFPTIDLPDRTWPSKTIDAAPIWCSSDLRDGNQSLIEPMDSVKKLRFWKTLVSVGVKEIEASFPAASQTDFDFVRTLIEDGHIPDDTTIQVLTQAREDLIARTFESLRGAKKAIVHLYNATCPSFRRIVFNQDKAGVKEIAVNAAKLFVKYAAQQPETQWTFEYSPETFSATELEFAKEVCDAVIEVWNPTPENKVILNLPATVEVATPNIYADQIEWFGRHITRRDSVLISLHTHNDRGTGVAATELGLMAGADRVEGCLFGNGERTGNVDLVTVALNLYTQGINPELDFSDIDGVRKVVEECNQIPVHPRHPYVGDLVHTAFSGSHQDAIRKGFTQQKEGELWEVPYLPIDPADIGRSYEAVIRVNSQSGKGGIAYLLEQEYGISLPRRMQIEFSQVVQGETDRLGLEMTAEQIHALLRREYLQANTPYALISHRLQEENGNSAVDAEVHVDGETQHWRGKGKGALEALVAGLPVAVEIMDYNEHAIGSGTTAKAAAYIELRVNGDRAVHGVGIDENITTASFRALFSALNRSLSQAQAKAA

SEQ ID NO: 9737 - protein, 435 aa, Saccharomyces cerevisiae
MTTNEEFIGTQIFGTVFEITNRYNDLNPVGMGAFGLVCSATDTLTSQPVAIKKIMKPFSTAVLAKRTYRELKLLKHLRHENLICLQDIFLSPLEDIYFVTELQGTDLHRLLQTRPLEKQFVQYFLYQILRGLKYVHSAGVIHRDLKPSNILINENCDLKICDFGLARIQDPQMTGYVSTRYYRAPEIMLTWQKYDVEVDIWSAGCIFAEMIEGKPLFPGKDHVHQFSIITDLLGSPPKDVINTICSENTLKFVTSLPHRDPIPFSERFKTVEPDAVDLLEKMLVFDPKKRITAADALAHPYSAPYHDPTDEPVADAKFDWHFNDADLPVDTWRVMMYSEILDFHKIGGSDGQIDISATFDDQVAAATAAAAQAQAQAQAQVQLNMAAHSHNGAGTTGNDHSDIAGGNKVSDHVAANDTITDYGNQAIQYANEFQQ

SEQ ID NO: 9738 - protein, 519 aa, Xylella fastidiosa Temecula1
MNTSISSQPPCIRIFDTTLRDGEQSPGCSMPAQQKLVMARALDALGVDIIETGFPASSQSDYEAMTLIARELRRPTLAVLSRCLQADIETSARALESATKPRLHVFLSTSPLHREHKLRMSKEQVLESVHKHVSLSRTLIDDVEFSAEDATRTEEDFLIEVTRVAIAAGATTINLPDTVGFSTPEEIRNMFTRVIANVEGANKVIFSAHCHDDLGLAVANSLAAIEGGARQIECTINGIGERAGNCALEELTMVLKVRNAFYNIDTSIHTSRIVSTSQLLQRLVGMPVQRNKAVVGANAFAHESGIHQHGMLRHRGTYEIMRPQEVGWVCSHMVLGRHSGRAAVEQRLRALGYLLEEEDLKLVFEEFKQLCEKQRLVTDVDLQVLMQDTTVQHGYRLASMTISDVGNRANALVELSDPQGQRVAETAQGNGPVDALFGALAAATGVKLELDSYQVHSVGIGADARGEANLSVRHNDTQYEGTGTSKDIIEASALAWLEVANRLLRNPENMQNKQNTALA

SEQ ID NO: 9739 - protein, 223 aa, Propionibacterium acnes KPA171202
MVVRITPSILNANLANLASEVGRIPSADGLHIDVMDGHFVPNLVMGAPFVESLRPATNLMFDVHLMIENPDWWARQYVEAGAQSVTFHLEAATAPIKLARELRSMGARASVALRPATPVEQLADILTEFDQILLMTVEPGFGGQKFLDPVLAKIRKARKLIDATRKDIWLQIDGGVSADTIERAAEAGADTFVAGSAVYRSDNPDHVVASLRNRALAAQVCAH

SEQ ID NO: 9740 - protein, 533 aa, Pichia jadinii
MSLTKDASEDQEDIKSLTMNTSLVDSSIYRPLVHLTPPVGWMNDPNGLFYDSSESTYHVYYQYNPNDTIWGLPLYWGHATSDDLLTWDHHAPAIGPENDDEGIYSGSIVIDYDNTSGFFDDSTRPEQRIVAIYTNNLPDVETQDIAYSTDGGYTFEKYENNPVIDVNSTQFRDPKVIWYEETEQWVMTVAKSQEYKIQIYTSDNLKDWSLASNFSTKGYVGYQYECPGLFEATIENPKSGDPEKKWVMVLAINPGSPLGGSINEYFVGDFNGTEFIPDDDATRFMDTGKDFYAFQAFFNAPENRSIGVAWSSNWQYSNQVPDPDGYRSSMSSIREYTLRYVSTNPESEQLILCQKPFFVNETDLKVVEEYKVSNSSLTVDHTFGSSFANSNTTGLLDFNMTFTVNGTTDVTQKDSVTFELRIKSNQSDEAIALGYDYNNEQFYINRATESYFQRTNQFFQERWSTYVQPLTITESGDKQYQLYGLVDNNILELYFNDGAFTSTNTFFLEKGKPSNVDIVASSSKEAYHRGPAD

SEQ ID NO: 9741 - protein, 221 aa, Zingiber officinale
  misc_feature (219)..(221): Xaa can be any naturally occurring amino acid
DVLPDSIDWREKGAVVPVKNQGGCGSCWAFDAIAAVEGINQIVTGDLISLSEQQLVDCSTRNHGCEGGWPYRAFQYIINNGGINSEEHYPYTGTNGTCDTKENAHVVSIDSYRNVPSNDEKSLQKAVANQPVSVTMDAAGRDFQLYRNGIFTGSCNISANHYRTVGGRETENDKDYWTVKNSWGKNWGESGYIRVERNIAESSGKCGIAISPSYPIKEXXX

SEQ ID NO: 9742 - protein, 221 aa, Zingiber officinale
DDLPDSIDWRENGAVVPVKNQGGCGSCWAFSTVAAVEGINQIVTGDLISLSEQQLVDCTTANHGCRGGWMNPAFQFIVNNGGINSEETYPYRGQDGICNSTVNAPVVSIDSYENVPSHNEQSLQKAVANQPVSVTMDAAGRDFQLYRSGIFTGSCNISANHALTVVGYGTENDKDFWIVKNSWGKNWGESGYIRAERNIENPDGKCGITRFASYPVKKGTN

SEQ ID NO: 9743 - protein, 594 aa, Chromobacterium violaceum ATCC 12472
MDTIPQRIASLRAAMKNAGADACLVPSSDPHISEYLPQRWQARQWLSGFTGSMGTLIVGADFAGLWADSRYWVQAEQELAGTGIQLMKIDTAASSLHLQWLADNLRTGQTLAVDGDVLGLAAAKALQAALEPRGVIVRADLDLIDAVYAGRPALPAAAVYQHDGDYAPESRAAKLARVREAMREAGADRHFISTLDDIAWLFNLRGADVSYNPVFIAHALIETDNATLFVAPGKIDAALAAQLAADGVRIADYAAAKPALSALPGGALLIDPRRVTLGLRRAVADRVRVIEAINPSTLMKSRKSAAEAEHVRRAMEQDGAALAEFFAWFEANVNRARITELTIDDEITAARARRPGFVSPSFGTIAGFNANGALPHYHATPEAHSEIQGDGLLLIDSGGQYLGGTTDITRVVAVGTPSAAQKRDFTLVLKGTMALSMAHFPRGTLSPMLDALARAPLWQHDIDFGHGTGHGVGYFLNVHEGPQSISRAVPEPHMAMQEGMITSIEPGVYRAGQWGVRIENLVLNVASERNQFGDFLKFETLTLCPIDRRCIDLSLLTQPEIAWLNGYHAEVRARLLPLVDGAARDWLLANTETL

SEQ ID NO: 9744 - protein, 380 aa, Mycoplasma pneumoniae M129
MDWIQTAGAGTQLPENNIKIAVFGIGGAGNNIIDDMLRMHPELQTANVQFFALNTDLQHLKTKRYVQNKAVIQFEESKGLGVGGDPQKGAVLAHHFLEQFHKLSDSFDFCILVAGFGKGTGTGATPVFSKFLSNKGVLNLSIVSYPAMCEGLKAREKAAKGLERLNQATDSFMLFRNDRCTDGIYQLANVAIVKTIKNIIELINLPLQQNIDFEDIRSFFKKPAQRLENEANLFRVTNTFTFSFDAHNTIEHFSHKLKNFEYEGFFDHKVEGAQKVILKVLVNQGLYPLDLTQIQEIIWAKIDNHNLEVQLGVDFTDANPSVQLFFLMEKKQAVSSDFIQKPAFISVKEVNQKPAKPFQVLNDLKELGLKYVKQQTGFNY

SEQ ID NO: 9745 - protein, 334 aa, Medicago truncatula
MGSMAETVCVTGASGFIGSWLVMRLMERGYMVRATVRDPENLKKVSHLLELPGAKGKLSLWKADLGEEGSFDEAIKGCTGVFHVATPMDFESKDPENEMIKPTIKGVLDIMKACLKAKTVRRFIFTSSAGTLNVTEDQKPLWDESCWSDVEFCRRVKMTGWMYFVSKTLAEQEAWKFAKEHNMDFITIIPPLVVGPFLIPTMPPSLITALSPITGNEAHYSIIKQGQFVHLDDLCEAHIFLFEHMEVEGRYLCSACEANIHDIAKLINTKYPEYNIPTKFNNIPDELELVRFSSKKIKDLGFEFKYSLEDMYTEAIDTCIEKGLLPKFVKSTNK

SEQ ID NO: 9746 - protein, 339 aa, Medicago truncatula
MGSVSETVCVTGASGFIGSWLVMRLMERGYTVRATVRDPDNMKKVKHLLELPGANSKLSLWKADLGEEGSFDEAIKGCTGVFHVATPMDFESKDPEKEVINPTINGLLDIMKACKKAKTVRRLVFTSSAGTLDVTEQQNSVIDETCWSDVEFCRRVKMTGWMYFVSKTLAEQEAWKFSKEHNIDFVSIIPPLVVGPFIMPSMPPSLITALSLITGYEAHYSIIKQGQYIHLDDLCLAHIFLFENPKAHGRYICCSHEATIHEVAKLINKKYPEFNVPTKFKDIPDDLEIIKFSSKKITDLGFIFKYSLEDMFTGAIETCREKGLLPKVTETPVNDTMKK

SEQ ID NO: 9747 - protein, 467 aa, Yersinia pseudotuberculosis IP 32953
MKNDSSTLKRGLSARHIRFMALGSAIGTGLFYGSAEAIRLAGPAVLLAYLIGGAAVFMVMRALGEMAVHDPVAGSFGHYASRYLGPLAGFLTGWTYTFEMVVVALADVTAFGIYMGLWFPDAPQWVWVLSIIFFIGALNLCSVKVFGEMEFWLSLLKVAAIIAMIAAGLGIMMFGFGAGHDSTGVSNLWAHQGFMPNGITGVIASFAVVMFAFGGIEIIGVTASEAKDPGKVLPRAINTVPIRILLFYVLTLFVLMAIYPWKSIGQNGSPFVEIFSSLGINSAANILNLVVITAAISAINSDIYGAGRMMYGLAQEGLAPKSFSRLTRNGVPYMTILVMAITLLCGVVLNYLIPKNVFLVIASIATFATVWVWLMILVSQVAMRRSMSKAQVARLAFPVPFWPLAPILTILFMAFIIAVLGYFPATRIAMYVGLAWVALMTLAWWIWLRKAPSCVIQERVKSSEIPS

SEQ ID NO: 9748 - protein, 393 aa, Anaplasma marginale str. St. Maries
MTEGRKPHINVGTIGHVDHGKTTLTAALTTVLTRRLSGANKVVKYDEIDKAPEERARGITISTAHVEYETEGRHYAHVDCPGHADYIKNMITGAAQMDVAILVVSATDGAMPQTREHILLAKQVGVKDIVTWINKCDVVEDEEMLSIVEMEVRELLSNYGYDGDGVDVVRGSAVKALEESSDGPWSEKIMELVGALEKIELPVREKDKPFLMSVEDVFSIPGRGTVVTGRIERGVIKVGDKVDIVGLRDLQSTVCTGVEMFHKALETGEAGDNAGILLRGIKKEDVERGQVLSAPGQIRSYKAFKAEVYILKKEEGGRHTPFFSNYQPQFYVRTTDVTGSIKLPSGVEMVMPGDNLSIEVALDKPVALDKGLRFAVREGGRTVGSGIITEILE

SEQ ID NO: 9749 - protein, 341 aa, Sorghum bicolor
MQHLGVLLVLAALTASPLAAAWRPWPPRANGTTAGLGASKKFEGSSEFVKLEYHMGPVLASAITVHPIWYGAWPAAQKRTIRAFLRSLAPPPDSSARIPPPSVSAWWRTVRLYTDQTSANVSAAVTLGAEKCDARMSRGARLSRMDIQSVVRDAVTARTRPLPVDSSGGVYLVLTSPDVSVEDFCGQVCGFHYFTFPSVVGYTLPYAWVGNSARRCPEVCAYPFAIPSYVPGRKAEAPPNGDVGVDGMVSVIAHELAELASNPLANAWYAGSDPSFPTEIADLCEGIYGTGGGGAYTGQLLTDARSGAAYNVNGVGGRRFLVQWVWNPVLSYCSGPNALDQ

SEQ ID NO: 9750 - protein, 284 aa, Streptococcus mutans UA159
MTEIIDGKALAQKLQLHLANKVEQMKEKHGLVPGLVVILVGDNPASQVYVRNKERSAIKAGFKSETICLSDSISEEELIEIIEGYNQDPSFHGILVQLPLPAHINDKKIILAIDPHKDVDGFHPMNTGHLWSGRSMMVPCTPAGIMEMLSAYHVDLEGKHAVIIGRSNIVGKPMAQLLLEKNATVTLTHSRTKHLSEVTRCADVLIVAIGQGNFVTEEFVKEGAVVIDVGMNRDKNGKLIGDVNFDHVAQKASLITPVPGGVGPMTITMLLEQTYQAALRSVTK

SEQ ID NO: 9751 - protein, 425 aa, Malus x domestica
MDRLEAPARLMIVSDLDHTMVDHHDTENLSLLRFNSLWEANYCHDSLLVFSTGRSPTLYKELRKEKPMLTPDITIMSVGTEITYGNAMVPDDGWVEVLNQKWDRNIVKEEASKYSELKLQAETEQRPHKVSFYVEKAKAQAVTKALSEVFEKRGLDVKIIYSGGMDLDILPQGAGKGQALAYLLKKFKSEGSSPVNTLVCGDSGNDAELFSIPEVYGVMVSNAQEELLQWHAENAKGNTRIIHATERCAAGIIQAIGHFKLGPSLPPRDIADFSDFKLENPNPGHELVKFFLFYEKWRRAEVENSEIYLASLKADCSPSGTFVHPSGVEHSLSDSINALRNCYGDKQGKQFRVWVDGVLATHVGSNTWLVKFDKWELSGEERYAIKGTAVISSKGSGVSDGFTWIRVHQTWYKGYEAKDDSTWFF

SEQ ID NO: 9752 - protein, 411 aa, Clostridium thermocellum ATCC 27405
MKYVIIGNSIAAVGAVEGIRKIDTEGEITIIGKEPYHVYSRPLISYLLYGKTDEERMKYRGSSFYDTMNCKVILGREAVKINDAKKEVVLDNGEVINYDKLLVATGSLPFVPPMKGLEGVEKRFSFLSLDDAKKLESAISPSSKVLIIGAGLIGLKCAEGISKKVESITVVDLADRILSSILDKDGAEIVKSHIEKENIKFVLNAKVEEFINSNEALLDSGEKVEFDVLVVAVGVIPNTGLIKDINGKVNRGIVVDEFCQTSIPDIYAAGDCCESFDITSEQNRVLALLPNAYMQGECAGINMAGGKKEFGKAIPMNAISFFGLHIITAGSYVGEVFSKINGDNYKKLFVKDGLLKGYIMIGDVDKAGIYTSLIREKTPLSEIDFELIFERPGLMAFTRKERQRMLGGVVR

SEQ ID NO: 9753 - protein, 364 aa, Burkholderia xenovorans LB400
MKTYRIATIPGDGIGKEVIPAGAQVLEALARTSKSFAFEFENFGWGGDYYREHGVMMPADGLDAIRNKDAILFGSAGDPDIPDHITLWGLRLKICQGFDQYANVRPTRILPGIDGPLKRCKPGDLNWVIVRENSEGEYSGVGGRVHQGHPIEAATDVSILTRAGVERIMRFAFRLAQSRPRKLLTVITKSNAQRHAMVLWDEIALEISKEFPDVKWDKELVDASTARMINRPATLDTIVATNLHADILSDLAAALAGSLGIAPTGNIDPERRYPSMFEPIHGSAFDIMGKGLANPVGTFWSVVMLLEHLGEFDAAQRVMQAVEAVTADTSLHTGDLGGTATTAQVTAAVCAFIENAVSSAARAA

SEQ ID NO: 9754 - protein, 99 aa, Brassica napus
GKKRKHSETESAAPPKKDDSAPERPKRTLLGWKDKAQDAEETKPAPGFRNKEKVLVTCSRRISFRYRHLMLNMVSLLPHCKKDSKVEAKSSKGATLNEL

SEQ ID NO: 9755 - protein, 1082 aa, Magnaporthe grisea 70-15
MIQKYGGHAVKFSFSNSPLDNIFGLRFAWEFYRHGRRDEYLKFTHRSFAQSGAGRANPYTYEVNLGGVRTIWTADPENIKAMLGSQFEDYGRGKAFQSRWHDLLGTGIFNADGREWHDSRHRLRPLFNRQRVSNLDSFERQIQIMINRHLGGGRTVDLKDVISRFALDAIGDYAMGFQVNALADRKNDFLDALERIKTIQNIKECAGPLSWLVPTPGFKRDLKVLDDFMEPLIEHAASLPQSVLDEMEKTDHGWTYVKACASVSRDRHFLKYELMSVILAGRDTVSGTLVWTFLELVKRPDLMADLRREIENTVGIGRDAPRPTHDDLRSMRLVKNTLNETLRLYPTVSLNLRTALRDTSLPRGNDHDGNKPVGLAEGTPVIFSSHILQLSPETYEQSPPGTSPPHVFDPYRWEEWKPKPWTYIPFGGGPRICIGQEFALAEMAFLLVRLLQNYSRLEMRCEMRGNSDEGWERPNGSASIVEQFMMEKGRVRISGDVTLSPRDKDSQLVKIISTKPTMIVTIPVLLATYILYWTVRLVKNILRANATGLPVRWTPVAPTNPFWIVLGKPTSRVLRAILPSFLSNWTYFSTFDWHWLDRLYLDFEVHEKNGDTFLHATPSGLMLHTRDPQVAQQILHTCPKPDDVAKSLELCGPNLVSSSEVDWPRHRKVTVSTLSDRNNRLVWSETVRQTLNVLQSYQPGHGEIIDPEGDIRRIYLNMFSAVCFGRPLDAEKEPGETTDGKLPGGHKRSYRYCLETSLRDIFILHTVPSWIKYLPPALVPHKISEFFAASREMMQYLDEMIRRCQDEAQEGGEESKSGDNLLRITVRSGLQSNTKEPQGRSYLSKEEVRGNLLIYSLAGHESNAHTLTYALYLLAACPDVQDWLAEELAAITLLDGQLSAEETYFGIMAKLPRTLAVMYETLRLYPSIIFLPKTTASRSVSIDLGHVEGQSKAIIPPNTNIWVNMCGMQVLPEVWGDDARTFRPSRWINSSGQLAAPSLVAGSAYVAWGGGKRVCPGQRFSQAAFAASVVALLTGGKRVHVVPREGEEEGMARRRVLEVLDDSFVGTTIHMRRAGDVKLVVA

SEQ ID NO: 9756 - protein, 92 aa, Oryza sativa
MTTMDKGRALPKFGEWDVKNPASAEGFTVIFQKARDDKKTTGPGNARVGIPPAFRSTDDDGGYRPEFKPAESYQQHTPPKRVKKKWAFCAGC

SEQ ID NO: 9757 - protein, 376 aa, Nicotiana benthamiana
MADANMGGGGGGQFPDFPSVLTHGGQYVQYDIFGNFFEITTKYRPPIMPIGRGAYGIVCSVLNTELNEMVAVKKIANAFDNYMDAKRTLREIKLLRHLDHENVIGLRDVIPPPLRREFSDVYIATELMDTDLHQIIRSNQGLSEDHCQYFMYQLLRGLKYIHSANVLHRDLKPSNLLLNANCDLKICDFGLARPNIENENMTEYVVTRWYRAPELLLNSSDYTAAIDVWSVGCIFMELMNRKPLFAGKDHVHQIRLLTELLGTPTEADLGFLQNEDAKRYIRQLPQHPRQQLANVFPHVNPLAIDLVDKMLTLDPTRRITVEEALDHPYLAKLHDAGDEPICPVPSSFDFEQQGIGEEQIKDMIYQEALSLNPEYA

SEQ ID NO: 9758 - protein, 436 aa, Aspergillus oryzae
MLAKTMFLSRVVPRLTPKALLLTRPFTTTTPKNKLTPQQIQIVKSTIPALQDHGVAITTLFYQRLLQQHPQLKNIFNTAHQATGEQPAALAHAVWAYATNIEHPEALKTAISRIGHKHASLGITADQYPIVGEGLLAAIKEVLGDAANDQVLDAWKAAYGELAGYFIDFESGLYRQAEATPGGWKGWRKFFISKKVHEGEEIISFYLTPVDKGALPAYKPGQFVSVKCFVPELGVYQPRQYSLSDVPNGEYFQISVKREFGLGQKPAGRISNVLHEGLPVGAELDVSMPFGDFVLDVNATTPVVLISGGVGLTPMMSMLKTIVDQGGSRRVVFIHAVRNGRVHAMKDRLAKIISENPQVQRAVFYEEVSKKDKQGVDYDFKGRADLHKIKDQVVLPDADYYICGPKLFMNAQSNSLKDMGVKEDRIHMEVFGSPAE

SEQ ID NO: 9759 - protein, 478 aa, Oceanicola granulosus HTCC2516
MAAEAILVWVRRELRLGDHPALAEAAATGRPVVPVFLCDETVEARGAAAQWRLGLGVAAFAEALAGAGSRLVLRRGGAAAALVALAREAEAGEVWWSRAHEPVAAALERDVAGALAAEGIGTRAFEGHVLFPPESVATKTGGYYKVYTPFWKSVRDRDVGTPLPPPKRLTAPGRWPESERLEAWGLGAEMRRGADVVAEHVVVGEAAAARRLERFVEERLADYPQARNRFDVEGTSGLSENLAVGEISARSCWQAGLMARDAGNPGAETFLKEVAWRDFAYHLLHHTPRLATDNWRPEWAAFPWNTDEDAPEVVAWQRGRTGVALVDAAMREMYVTGRMHNRGRMIVGSYLTKHLLSHWRIGQRWFDAHLTDWDPANNALGWQWVAGSGPDASPFFRVFNPDGQAEKFDPDGAYRRKWVAEGQDDPPATALAYFAAIPRKWSMSADDPYPQPVVGLAEGRARALAAYKGRQDADAAGG

SEQ ID NO: 9760 - protein, 410 aa, Blastopirellula marina DSM 3645
MQFRHEVLDNGLQIVAEINPNAYSLSSAFFVKTGSRDETAEIAGVSHFLEHMVFKGTPRRSAADVNRELDEMGSQSNAYTSEEQTVYYAVVLPEFQEQVVDLLADIMRPSLRVSDFETEKQVILEEIMKYDDQPPFGGHERIMASYFGQHPLGNSVLGTAETVGALSADRMMDYFNRRYSPHNIVLAASGRVDFDALVEQAKRHCGDWERSETSRDLSRPAGKTGFEVIHKETAAQEYLIQLADCPASEDADRFAARLLTTIFGDDTGSRLFWALVDPGLAEFASSDPYEFQSAGVYMNYLCCSPEEAASNLAILTEEIAKLEKNGVTLAELEQAKNKVCSSTVLRSERPSSRLFSVGNGWIQRGKYHTVAESVAAYKSVTLDDVHAVLAKYPLSKSNTLAIGPLAELSR

SEQ ID NO: 9761 - protein, 772 aa, Oryza sativa (japonica cultivar-group)
MLGRRVVMLPSAAAALGLRRGRARMRLGCVLEHVAPRLAVASAALLGAGEVIAAAAAAGKSGGAGHAAVASTLAQLTVTAVAIASGACLSTKVDFLWPRIEQLPDTLIFEGVEVTGYPIFEDPKVQKAIVFASTAHIGQFRKTGDPYVTHCIHTGKILAALVPSTGERAINTVVAGILHDVIDDTAENLKSIEEQFGDDVASLVSGVSKLSYINQLLRRHRQKNTGGSTLTSEEYFSYALPIRKAEAVAQETLAVWCSLASRLGVWALKAELEDLCFAVLQDLLQAVLPFDLLLDRKRRSYFLNNLHGSSETSVPKPKIVDDAAVALASLAACEEELEQELLISTSYIPGMEVTLSSRLKSLYSMYCKMKRKHVGIKQIYDARALRVIIGDKNGALHGPAVKNCYSVLDIVNRLWTPIDGEFDDYIINPKGSGYQSLHTAVQASDNSPLEVQIRTQRMHEYAEYGLAAHWLYKESKVDYRSGTSNKIGQSTSYPSSSSEDENYIQDVMPSKYSSMKMGHPVLRIEGSQLLAAVIVSIDKGGKELLVAVSFGLEASEAVAERRSCFQLKRWETYARVYKKVSEKWWCAPGHGDWSTNLEKYTLCQDGIFHKQDQFGRLLPTFIQLIDLTEEEEEEYWMVVSAIFEGKEASSLTPDSSNTERSTSEPPSSTPLSDPINNKVHLLRTMLQWEEQVRRGASLVEKSLSVGTCTEPILREVAIICWPYGKIMRMSLGSTAADAARRMGVEGKLLWVNGQLVLPQTELKDGDIVEVRM

SEQ ID NO: 9762 - protein, 924 aa, Silicibacter sp. TM1040
MSDKITFTLDGAQVTADAGMTIWEVANGRGLKIPHLCHKPQPGYRPDGNCRACMVEIEGERTLAASCIREPSEGMVVTTNNARAENARKMVMELLVADQPAQEVAHDKSSHMWDMAELNGVSESRFPKLEEGHIPLLDDSHVAMSVNLDACISCGLCVRACREVQVNDVIGMAGRGHNAYPTFDIADPMGESSCVACGECVQACPTGALMPATVVDENQVGDRKDFDSETESVCPFCGVGCKVSLKVKDGKVKYVEGINGPANEGRLCVKGRFGFDYIHHPHRLTKPLIRREDAPDKGLNVDPGNLMTHFREASWDEAMDLAAKGLIKLRDADPKSVAGFGSAKCTNEEAYLFQKFIRQGFKHNNVDHCTRLCHASSVAALIENVGSGAVTATFNEIENADVAIIIGANPIENHPVAATYFKQFTKRGGKLIVMDPRGVGMRRYADEMLQFRPGADVSMLNAIMNVIVEEELYDSQYIHRWTENWEAEKEHLRQFTPEKMSEICGIEPEQLRRVARTFAGAEAGMIFWGMGVSQHIHGTDNSRCLISLALMTGNVGKPGAGLHPLRGQNNVQGASDAGLIPMFLPDYQTVTSDDVRRSFTDVWGGGDFSNEKGLTVTEIVDQVYAGNIKGMYIQGENPAMSDPDADHAREAFAKLDLMIVQDIFLTETANFADIILPASTLYEKNGTVSNTNRQVQRVRPAVTPPGEAREDWKITVELAQRIGLPWAYSDVSEVFAEMKLNMKSLDNITWERLEVETITYPSLHETDPGQAIVFGDGFPRPEGRARFTPASVIPPDEAPDADFPMIMTTGRQLEHWHTGSMTRRSLVLDAVEPEANCSLHPRTLRTLGVEPGEMVRLSTRRGSIEIMARADRAVAEDMVFVPFAYVEAAANILTNPAIDPYGKIPEFKFSAVRVEKAEGQIAAE

SEQ ID NO: 9763 - protein, 152 aa, Lycopersicon esculentum
MSSFSEEQEALVVKSWGSMKKDAGEWGLKFFLKIFEIAPSAKKMFSFLKDSNVPLDQNPKLKIHAKSVLVMTCEAAVQLRKAGKVVVRDSTLKKIGATHFKYGVVDEHFEVTKYALLETIKEASQEMWSVEMKNAWGEAYDQLVSAIKTEMK

SEQ ID NO: 9764 - protein, 311 aa, Chlamydophila caviae GPIC
MTHTKVIIIGSGPAGYTAAIYASRALLSPILFEGFFSGIAGGQLMTTTEVENFPGFPEGILGQKLMDNMKSQAAHFGTQILPKDVTSVNFTKRPFVIMSNEEKYTCDTCIIATGASAKRLEIPGASDNEFWQKGVTACAVCDGASPIFKNKDLYVIGGGDSALEEAMFLTRYGKRVYIVHRRDTLRASKVMIKKAEANEKITFLWNSEIVKISGDTVVRSVDILNNVSKEISSRDAAGVFFAIGHKPNTDFLAGQLALDEHGYIITDKGTSKTSVPGVFAAGDVQDKYYRQAITAAGSGCMAALEAERFLD

SEQ ID NO: 9765 - protein, 133 aa, Arabidopsis thaliana
MASSMLSSAAVVTSPAQATMVAPFTGLKSSASFPVTRKANNDITSITSNGGRVSCMKVWPPIGKKKFETLSYLPDLTDVELAKEVDYLLRNKWIPCVEFQLEHGFVYREHGNTPGYYDGRYWTMWKLPLFGCT

SEQ ID NO: 9766 - protein, 563 aa, Zea mays
  misc_feature (137)..(137): Xaa can be any naturally occurring amino acid
MEAPALRITARLGLALDSATAERQREASAPVAEPAAPRLKKAAVRCQRAVGAAVADKKDAPVSVAQDRSGDRGAAPELTVEMNFSRSSVASAERMQEVADLILSFPEEHPVVVLSAMGKTTNKLLMAGEKAVGSAAXKASEIPELAVIKDLHLRTVDELGLDRSIVSGLLDELEQLLKGVAMMKELTLRTRDYLVSFGECMSTRIFAAHLNKIGVKARQYDAFDLGFITTDDFTNADILEATYPAVARRLHVEWINDPAIPIVTGFLGKGWRSGAITTLGRGGSDLTATTIGKALGLREIQVWKDVDGVLTCDPNIHANAIPVPYLTFDEAAELAYFGAQVLHPQSMRPARDGDVPVRVKNSYNRRAPGTVITKSRDMSKSILTSIVLKSNVTMLDIVSTRMLGQYGFLAKVFSIFEDLGISVDCVATSEVSISLTLDPSKLWSRELIQQELDHVVEELKKFAVVHLLQRRSIISLIGNVQRSSLILEKAFNVLRRNGVNVQMISQGASKVNISLVVNDSEAKQCVQALHSAFFENGFLSEVEGADVPQNGASLNSNGAVYGN

SEQ ID NO: 9767 - protein, 728 aa, Arabidopsis thaliana
MSVDQKRCWATLKENNCVHDECRSMCLKKNPKGHVCFFGSVNRKLDPVSDLYVIGRSDLLCIFVNYSKELLLDICDILEVQFYRVQRRCSLEDWMTKLLSDIELARSVVVASFLELEATARSACQVVDQNASDSNDDGNSTSLSSLVHPNSGGSSLLSSDYGSDTAYETSELGSASLGQDDVSETDTGDLTLDEDLTNPTEKLVKFSMSNIDEGLSMSQTIIEQLEDFPKHRVHLGYANDITETNSYNGKASKGVFRANNDLRCRSESETSHSVMHDRKLSLESADGVSLLAGETSTSSILSSIVHSQLDVNHDISVGNLEIPGNGRIVLPLKMHSKLNRILLTMNERLLNSKTDMEDLIARLNQETAVKEYLNRKVDDLEVELETTKQRNKENLEQALMTERQSVTKMQWDMEELRQKTFEMELKLKSKEDGSSDSKTSGNSTISESHELLQEMDATKQQLEDLSRRYVELEAKSKADIKVLVREVKSLRRSHMEMEKELTRSLTEKSDTEKLLQQERIIVENTLEARRRLYSDCEILHDRLKVNNTNLSMDESSNNREDLSEVSNALQDQIEYVPRPEDHVLGIVVDCKGENYWIDIKGPQLALLPVLAFEGANRRNYPKFEAKLLDNVIESGKAAGFGPLKDGFMFETSTGLSRMLLSSPTCPVLEALGKKLSFETAFGLNGRCWVHAAAPRIVIIVANALMNSETLSGTQQRIMVEKLLEKISD

SEQ ID NO: 9768 - protein, 112 aa, Brassica napus
MAIALRFFTCLVLTVCIVASVDAAITCGTVTSSLAPCATYLSSGGEVPPPCCAGVKKLNGMAQTTADRQQACKCLKAAAQGINPSLASSLPGKCSVSIPYPISMSTNCDNVK

SEQ ID NO: 9769 - protein, 161 aa, Trema virgata
MSSSEVDKVFTEEQEALVVKSWAVMKKNSAELGLKFFLKIFEIAPSAKNLFSYLKDSPIPLEQNPKLKPHAMTVFVMTCESAVQLRKAGKVTVRESNLKRLGAIHFKNGVVNEHFETRFALLETIKEAVPEMWSAEMKNAWGEAYDQLVAAIKFEVKPSST

SEQ ID NO: 9770 - protein, 276 aa, Kluyveromyces lactis NRRL Y-1140
MAGIGESRSELLSWLNDLLKLDYTKVEQCGTGAAYCQIMDSIYGDLPMNRVNFCAGSEYEYFTNYKILQSCFTKHKIEKSVLVERLVKCRFQDNLEFLQWIKKFWTQHKDESEYDAEVRRKGRAGPSNPSAVSGNKRPVSSSTASKPPIRHIRSNVIQNNIRKSSNEQLLSLQTELSETRNQLSELEKECSQYKELNTAYLKERDFYFGKLRDIEIIAQSTQDLCDEGVYENDKELRPFLNRIQQILYATEEQTEPFVEENVEQASTNPIIDEETF

SEQ ID NO: 9771 - protein, 534 aa, Coccidioides immitis RS
MRWQLWGFLTALLAINGLANDVELNQDDSRRQQCSGMYGKKAWGGDVDPFIHVALEKLPPKEPSPLMSLIIFEWKDEGLIGRFAPGDKEKFQKETICDRHNVEAGLCDEQSLGAFILEPNATSRAQSALISMAVNLTSAKPIKYPIKKTGFYCVSTYAFTGDDYKGIVTFRNAYGELSAPQIPKLAFYGGLTILYAVIGIFWAFLYVQHRHDILPVQNYITAILVFLVVEQLMTWGFYDYQNRHGMNAMAKVLMFIVAVLNAGRNSFSFFLLLIVCMGYGVVKPSLGRKMIYVRFLAIGHFVFGVIYAVASLSIAPESAGPLVLLVVLPLAATLTAFYVWTLNSLSATMKDLVERKQRVKAMMYKKLWWCILGSIMVIFGFFFINSFLFASKRVVDYIPEHWKTRWFVLDGWLNIVYLFDIAFIAYLWRPTMNNRRFAMSDEIAQDDDGFEIRSLTSSLDDEERVGSNANNRPIGGAHAEHSPAPAAAESLSHPQQARHSIDADHFAVGEEDRWSDDESPRNSTERKGLMHKDD

SEQ ID NO: 9772 - protein, 357 aa, Mycosphaerella graminicola
MAEFVRAQIFGTTFEITSRYTDLQPVGMGAFGLVCSAKDQLTGQAVAVKKIMKPFSTPVLSKRTYRELKLLKHLKHENVISLSDIFISPLEDIYFVTELLGTDLHRLLTSRPLEKQFIQYFLYQILRGLKYVHSAGVVHRDLKPSNILVNENCDLKICDFGLARIQDPQMTGYVSTRYYRAPEIMLTWQKYDVEVDIWSAGCIFAEMLEGKPLFPGKDHVNQFSIITDLLGTPPDDVISTICSENTLRFVQSLPKRERQPLKNKFKNADPQAIELLERMLVFDPRKRVKAGEALADPYLSPYHDPTDEPEAEEKFDWSFNDADLPVDTWKIMMYSEILDYHNVDSANNGEGQENGGA

SEQ ID NO: 9773 - protein, 307 aa, Staphylococcus aureus subsp. aureus MSSA476
MTKKMGLLVMAYGTPYKESDIEPYYTDIRHGKRPSEEELQDLKDRYEFIGGLSPLAGTTDDQADALVSALNKAYADVEFKLYLGLKHISPFIEDAVEQMHNDGITEAITVVLAPHYSSFSVGSYDKRADEEAAKYGIQLTHVKHYYEQPKFIEYWTNKVNETLAQIPEEEHKDTVLVVSAHSLPKGLIEKNNDPYPQELEHTALLIKEQSNIEHIAIGWQSEGNTGTPWLGPDVQDLTRDLYEKHQYKNFIYTPVGFVCEHLEVLYDNDYECKVVCDDIGANYYRPKMPNTHPLFIGAIVDEIKSIF

SEQ ID NO: 9774 - protein, 250 aa, Haemophilus ducreyi
MTQQMTLTAEISADLLGYRLDQALAQLFPDYSRSRIKVWIENDLVKVNGIIVNRARGKVFGGEQIEIQAEIEEEIRFEPQNIPLNIVHEDDDIIIINKPKNLVVHPGAGNPDGTVLNALLYYYPPIAEVPRAGIIHRLDKDTTGLMVVAKNIPAQTHLVTALQKRRITREYEAIASGIMTQGGKVDEPMARHPTKRTAMAVHPMGKPAITHYRIMERFRNYTRLRLRLETGRTHQIRVHMAHIAHPLLGD

SEQ ID NO: 9775 - protein, 276 aa, Oryza sativa
  misc_feature (136)..(136): Xaa can be any naturally occurring amino acid
  misc_feature (252)..(252): Xaa can be any naturally occurring amino acid
DEEDESMVGGGVRVGKEKVKEMVMSGGGGGWEAVIRHEVGGSGKTTLAMEIFKDHKIRGYFSDRVFFETISQSANLDTIKMKLWEQISGNLVLGAYNQIPEWQLKLGPMDKGPVLVILDDVWSLSQLEELIFKFPXGCKTLVVSRFKFPSLVTRTYEMELLDEEAALSVFCRAAFDQESVPRTADKKLVWQVAAECRGLPLALKVIGASLRDQPPKIWLSAKNRLSRGETISDSHETKLLERMAASIECLSXKVRECFLDLGCFPEDKKIPLDVLI

SEQ ID NO: 9776 - protein, 504 aa, Zea mays
MLPSFVSPTASAAASVTPPPRPIPGSYGPPVLGPLRDRLDYFWFQSQDEFFRKRAAAHRSTVFRTNIPPTFPFFVGVDPRVVAIVDAAAFTALFDPDLVDKRDILIGPYNPGAGFTGGTRVGVYLDTQEEEHARVKTFAMDLLHRSARTWSADFRASVGAMLDAVDAEFGKDDGSDKKPSASYLVPLQQCIFRFLCKAFVGADPSADWLVDNFGFTILDIWLALQILPTQKIGLVQPLEELLIHSFPLPSFLIWPGYYVLYRFIEKHGAEAVAYAEAQHGIGKKDAINNMLFVLGFNAFGGFSVFLPFLVAKVGGAPALRERLRDEVRRAMVGKGKDGEFGFATVREGMPLVRSTVYEMLRMQPPVPLQFGRARRDFVLRSHGGAAYQVSAGEVLCGYQPLAMRDPEVFERPEEFVPERFLGDEGARLLQHLFWSNGPETAQPGPGNKQCAAKEVVVDTACMLLAELFRRYDDFEVEGTSFTKLVKRQASPSVAQAAAAAGAQQ

SEQ ID NO: 9777 - protein, 150 aa, Zea mays
  misc_feature (121)..(121): Xaa can be any naturally occurring amino acid
  misc_feature (134)..(134): Xaa can be any naturally occurring amino acid
HLYHPQHILYRQKEQFSDGVGYNWIDGLKSFTEQQVTDEMMNNAAQMFPYNTPVNKEAYYYRMIFERLFPQDSARETVPWGPSIACSTPAAIEWVEQWKASNDPSGRFISSHDSAATDHTXAVSRRWPTAAATXANGTVNGKDVAVAIAV

SEQ ID NO: 9778 - protein, 430 aa, Malus x domestica
MMNMNRRLNGSARLMLVSDLDCTMVDHDAPDNLSLLRFNALWESYYRHDSLLVYSTGRTPITYKPLRNQKPLLTPDITILSVGTEIMYGGGDDMVPDLGWQQFISHRWDRAIVVEETNQFPQLIPQAEKNQRPHKVSFKVDKVMALEIMNALSERLEKRGVDINIIYSRGVDLDILPKRADKGQALAYLLKKFNNEEKLPHDTLVCGDSGNDAELFSLPQVYGVMVSNAQEDLLQWYAENVSDNPDMLHATERCAAGIIQAIGHFHLGPNVSPRDLKDFRKCKVEMSSPAHEVTKFYLFYERWRRAEVEKSEEYMQNLKSVLQSSGIFVHPSGVDLPIHQCIDSLARLHGDKQGKQFWTWLDRLSSVQIGSNAWLVKFNKWELCENERRCCLTTVLMSSKGEGPDDFTWLHMHQTWLYGLEIKEPERWLF

SEQ ID NO: 9779 - protein, 359 aa, Aster yellows phytoplasma
HGKTTLTAAITQVLSTRGLAKSRAYDQIDNAPEERERGITIKTSHVEYETEKRHYAHVDCPGHADYVKNMITGAAQMDAAILVVSGADSVMPQTREHILLARQVGVPKIVVFLNKCDLSPDEQILELVEMEVRELLSQYDFPGDDIPVIRGSALKALEGDAHYVAQVNELIETLDTYIEDPVREVDKPFLMPVEDVFTITGRGTVVTGRVERGQVKAGDEVEIVGLKETRKTIVTAVEMFKKDLDFAQAGDNVGALLRGINREDVQRGQVLAKPGSVKPHSKFVAQVYVLTKEEGGRHTAFFSQYRPQFYFRTTDITGVVELQGDVKMVMPGDNAELVVTLNNPIAIEEGTKFSIREGG

SEQ ID NO: 9780 - protein, 171 aa, Triticum aestivum
  misc_feature (43)..(43): Xaa can be any naturally occurring amino acid
  misc_feature (105)..(105): Xaa can be any naturally occurring amino acid
  misc_feature (135)..(135): Xaa can be any naturally occurring amino acid
MAALPLATAEVCDANSHLITGGRAAPRCSPVFQIYGRRQVFAXGPIVTLKVFEDNVLVREFLEEKGQGRVLVVDGGGSLRCAILGGNPVQQAQNNGWAGIVVNGXCIRDVDEINGCDIGVRALASHPMKANKKGXGEKHVPVTIAGTRICDGEWLYADTDGILVSRTELIV

SEQ ID NO: 9781 - protein, 231 aa, Glycine max
MAVSELEVDGVVFPPLARPPGSEHAHFLAGAGVRGMEIGGNFIKFTAIGVYLQADAAVSALAAKWAGKPAADLASDAAFFRDVVTGEFEKFTRVTMILPLTGAQYSDKVTENCVAYWKATGVYTDAEAAAVDKFKEAFGPHSFAPGASILFTHSPAGLLTVAFSKDSSVPESGGVAIDNARLCEAVLESIIGEHGVSPAAKLSLATRVAELLEGAALAGGEPAAEAVSVSV

SEQ ID NO: 9782 - protein, 425 aa, Actinidia chinensis
MDRLNKSARLMIVSDLDHTMVDHHDPENLSLLRFNALWEAYYRHDSLLVFSTGRSPTLYKELRKEKPMLTPDITIMSVGTEITYGTSMVPDEGWVEVLNKKWDRNIVTEETSKFPELKLQAETEQRPHKVSFYVQKDKAQEVMKELSEKFVKRGLDVKIIYSGGMDLDMLPQGAGKGQALAYLHKKFKAEGKLPQNTLVCGDSGNDAELFTIPEVHGVMVSNAQEELLQWHAENAKNNPKVIHATERCAAGIIQAIGHFNLGPSKSPRDVMDSSDSVPENFEPGHDIVRFFLFLERWRRAEMEYSELYLAGLKALSFPSSVFVHPSGIEQSILDCTNALRRSYGDKQGKQYRVWVDQVTTTEIGSNIWLLKFNKWEISGDERRGCVATVLLSSEDLSPSEGFTWVHMHQTWLDGAGAKDHTDWVC

SEQ ID NO: 9783 - protein, 342 aa, Nicotiana tabacum
MGVDYYKVLGVDKNATDDDLKKAYRKLAMKWHPDKNPNNKKAAEAKFKQISEAYDVLSDSQKRAVYDQYGEDGLKGGVPPPGAGGPGGGSPFFSTGEGPQSFRFNTRSADDIFAEFFGFSSPFGGAGGRGPRFGGMFGDDMFASFGEGGGGGGASMYQSAPRKEAPIQQNLPCNLEDLYKGTTKKMKISREVADASGKRMQVEEILTINIKPGWKKGTKITFQEKGNEQPGVIPADLVFIIDEKPHRVFSRDGNDLIVTQKISLVEALTGTTVQLTTLDGRNLTIPVNSVIQPNYEHVVPGEGMPLPKDPTKKGNLRIKFDIKFPVRLTTTQKAGIKELLGS

SEQ ID NO: 9784 - protein, 513 aa, Lactobacillus reuteri
MLRKGMQILNDPFKNKGTAFTIEERKKYGLLGLLPSCVRTIEEQADEIYRLYQSKNSRIEQRHLLMEVFNTNRTLFFYLMEKHIAEFMPVVYDPVIAEAIEQYNERYIKPQDAAYLSIEHPDLIKEELADAADGRDIRLIVVTDAEGILGIGDWGVNGVDISVGKLMVYTAAAGIDPSQVLPVSIDAGTNNEKLLKDPHYLGNRMKRVEGQPYFDFIDKFVDAVEGLFPKSLLHFEDFGRGTAARILDKYQDKILTFNDDIQGTGIIALAGVLGAMNISKEKLTDQTFLTFGAGTAGMGIAKMLYDELIRQGLTPEEAKKHFYLVDRQGLLFDDTPGLTPKQKPFTRQRSEFANADELTNLLAVVKAVHPTVMIGTSTQPGSFDEAVVKEMAAHTLRPVIFPLSNPTKLAEAKAADLLKWTDGKALIATGIPVKDIEYNGTVYQIGQANNALIYPGVGFGALAAEAKVLNDNMLAAAAHALSGLVDPEKPGAAVLPPVSKLTEFSKRVAERVA

SEQ ID NO: 9785 - protein, 425 aa, Actinidia chinensis
MDRLSSSARVMIVSDLDHTMVDHHDSENLSLLRFNALWEAYYRHDSLLVFSTGRSPTLYKELRKEKPMLTPDITIMSVGTEITYDTSMVPDEGWVEVLNQKWDRNIVMEETSKFSELKLQAETEQRPHKVSFYVQKDKAQEVMKTLSDKLVKRGLDVKIIYSGGMDLDILPQGAGKGQALAYLHKKFKTEGKLPPNTLVCGDSGNDAELFTIPEVHGVMVSNAQEELLHWHAENAKNNPKVIHATERCASGIIQAIGHFNLGPSISPRDVMDSSDSVPENFEPGHDIVRFFLFLERWRRAEMAYSELYLAGLKALSFPSSAFVHPSGIEQSILDCTNALRRSYGDEQGKQYRVWVDQVTTTEIGSNIWLLKFNKWEISGDERRGCIATVLLSSKDLSPSEGFTWVHMHQTWVDGAGAKDHTDWVC

SEQ ID NO: 9786 - protein, 143 aa, Triticum aestivum
PVETFNPIRQGIHHDILLSNFFAQTEALMVGKNEEQVRAEMGTNVVENIVPHKIFKGNKPTNSFLFQKLTPATLGSLIAMYEHKIFVQGAIWDINSYDQWGVELGKQLAKAILPELSASGEVASHDASTNGLINHYKKNKKQY

SEQ ID NO: 9787 - protein, 350 aa, Anaplasma marginale str. St. Maries
MSRTSNKKVAVVLLNLGGPGSLCEVEKFLFSLFSDRRILGLPYPLRMLVAMIISKLRARSARKIYSLMGGKSTILEETEHQASALEKRLNSSAAGKIYKVFVCMRHSKPGSREALHAVRDYQPEHVVLLPMYPQYSSTTTLSAIEDWNNSARKACYAPDTRIICCYHTHKDYIAAHCKLILDEYNKAAMGHSSPRILFSAHGLPVHIVKRGDPYQEQIRQSVCAIVEQLGIRALDYSICYQSKVGPTQWLEPSTQLEILRAKDDGVPVVVVPISFVSEHSETLVELDIEYKALMPEEQQYFRVPTLGVNTLFIECLYKLVCTLDANAAPCCAKYGLCWKKVRGDTHAETR

SEQ ID NO: 9788 - protein, 217 aa, Vibrio fischeri
MKLNQDSLTSKFGSPIERVEQAIKSVQQGNGVLLLDDESRENEGDLIYSVDHLTSEQMALMIRSCSGIVCLCLTEDKADYLELSPMVEHNESVNQTAFTISIEAKKGVTTGVSATDRVTTIKTACKNGALPHELAKPGHVFPLRAKDGGVLTRRGHTEGTVDLMRLAELTPAGVLCEVTNSDGSMAKTPEIIIFAEQHHLPVLTVNDIALYRKEKSN

SEQ ID NO: 9789 - protein, 393 aa, Nicotiana benthamiana
MDGSGQQSDTMMSDAGAEQPPPAAQPVAGMDNIPATLSHGGRFIQYNIFGNIFEVTAKYKPPILPIGRGAYGIVCSALNSETIENVAIKKIANAFDNKIDAKRTLREIKLLRHMDHENIVAIRDIIPPPQREAFNDVYIAYELMDTDLHQIIRSNQGLSEEHCQYFLYQILRGLKYIHSANVLHRDLKPSNLLLNANCDLKICDFGLARVTSETDFMTEYVVTRWYRPPELLLNSSDYTAAIDVWSVGCIFMELMDRKPLFPGRDHVHQLRLIMELIGTPSEAEMEFLNENAKRYIRQLPLYRRQSFTEKFPHVHPDAIDLVETMLTFDPRRRITVEGALAHPYLNSLHDISDEPICMTPFSFDFEQHALTEEQMKELIYRESLAFNPEYQHM

SEQ ID NO: 9790 - protein, 329 aa, Chromobacterium violaceum ATCC 12472
MNSHLFDDRKTHMSAPRHSPLLILGSGPAGYTAAVYAARANLKPVVITGLAQGGQLMTTTDVDNWPADAEGVQGPELMQRFQQHAERFGTEILFDHIHTTHLSEKPIRLVGDAGEYTCDALIIATGASAQYLGLPSEEAFAGKGVSACATCDGFFYRNQDVAVVGGGNTAVEEALYLANIARHVTLIHRRDTFRAEKILVDKLMSRVAEGKISLKLNATLDEVLGDDSGVTGVRVKLNDGGSENLALTGVFIAIGHKPNTDIFKGQLEMDSTGYLITKGGRDGNATLTSIDGVFAAGDVQDHIYRQAVTSAASGCQAALDAERYLDSLK

SEQ ID NO: 9791 - protein, 490 aa, Acidobacteria bacterium Ellin345
MSTTAQTELLQVQNFVNGEWRTSHSGDVLEIYNPATAEPLAHVPLSGADEVNEAVRAAAAAWPAWRETPPGDRIQYIFKLKQLMEEHFEEIARTVTIENGKTLTEARGEVRRGIENVEVACGIPLMMQGYNLENISRGIDEIMYRHPIGVVAAITPFNFPAMIPFWYLPYAIATGNCFILKPSERVPFTMQKVFELIHQIGLPKGVINLLNGGKPAVDALLDHPEVRAISFVGSTPVARYIYERAAKNGKRVQCQGGAKNYAVILPDADMKVATNIVGESAFGCAGQRCLALSVGVTVGEAQKGFREAVSEFAAHLKTGNGLEAGTQMGPVITAQSKSRIEEVIDHAVKQGAKAVTDGRGYRVANHERGNFLAPTILDEVPADSDVPQTEIFGPVLSLVHADSLEHAIELLSKSAYGNAASLFTTNGAHARRFRHEAPAGNIGINIGVPAPVAYFPFSGWKESFFGDLHGQGRDAIEFYTDKKVVIERWS

SEQ ID NO: 9792 - protein, 667 aa, Novosphingobium aromaticivorans DSM 12444
MASNDKTDSGDAPLIDLNDASIKKLIARAKRRGIITYDELNEALPQDQMSSEQIEDIMAAISEMGVNIVESDEDAVDPEERAQDDELDEAETVEDRPDVIKRKETVERTDDPVRMYLREMGAVELLSREGEIAIAKRIEAGRDTMIMGLCESPITFHAIIQWSEALNAGEMQLREILDLDAMLSKEPQPENLSEDGEEAEPEISEATAGPTFKEEEDIEEEETADDEDDELRERRARPAEEEEEDNTLSLAQMEAQLKPAALERFAEITSLFRQFEKIQAERLNALGMGNDFPAARETQYQKLREDLTAQVESVQFHASKIEYLVDNLYAFNRRLTTLGGQMLRLAERHKVPRKDFLDMYVGRELDDGWLQGLAGRDKRWAAFAANEATPVERIRAEISDIASATGMSLGEFRRIVNMVQKGEREARIAKKEMVEANLRLVISIAKKYTNRGLQFLDLIQEGNIGLMKAVDKFEYRRGYKFSTYATWWIRQAITRSIADQARTIRIPVHMIETINKLVRTSRQFLHEQGREPTPEEMAERLSMPLEKVRKVMKIAKEPISLETPIGDEEDSHLGDFIEDKNAIIPVDAAIQANLKETVTRVLASLTPREERVLRMRFGIGMNTDHTLEEVGQQFSVTRERIRQIEAKALRKLKHPSRSRKMRSFLDQ

SEQ ID NO: 9793 - protein, 648 aa, Arabidopsis thaliana
MASTEALLPVTSLQDPLSESRSDQIPETRRRRPIKVHLAVYSGLLLIALYVTLIVTHDGSKAEIATESRPRMAGVSEKSNDGVWISSDDGKVEAFPWNNTILSWQRTAFHFQPEKNWMNDPNGPLFYKGWYHFFYQYNPNAAVWGDIVWGHAVSKDLIHWLYLPIAMVPDQWYDANGVWTGSATFLDDGSIVMLYTGSTDEFVQVQNLAYPEDPSDPLLLKWVKFSGNPVLVPPPGIGAKDFRDPTTAWKTSSGKWRITIGSKINRTGISLIYDTTDFKTYEKHETLLHQVPNTGMWECVDFYPVSKTQLNGLDTSVNGPDVKHVIKASMDDTRIDHYAIGTYDDSNATWVPDNPSIDVGISTGLRYDYGKYYASKTFYDQNKGRRILWGWIGESDSEAADVQKGWSSVQGIPRTVVLDTRTHKNLVQWPVEEIKSLRLSSKKFDMTIGPGTVVPVDVGSATQLDIEAEFEIKTDDLKLFFDDDSVEADNKFSCETNGGSTARGALGPFGFSVLADEGLSEQTPVYFYVTKGKHSKLNTVFCTDTSRSTLANDVVKPIYGSFVPVLKGEKLTMRILVDHSIVEGFAQGGRSCITSRVYPTKAIYGATKLFLFNNAIDATVTASFTVWQMNNAFIHPYSSDDLGVPSST

SEQ ID NO: 9794 - protein, 369 aa, Triticum monococcum
MSSFAGLTVVANGKRCSDWTPDTGATDGSGYHLLLIQDYSRTRRQVTTGEHISSHPFTVGGHRWSVRYYPNGDKPNCAGFVSLYVDLLDDTFEKPIDVQFDFSFVDPAVKHKKPANIGESGTPVPDVFSQVNSAWGREKFIEKDAVERWAKHMGNYLAIRCDIVVVRDHAELVLPDIGQHLHHLLETELGADVRFEVGGELFAAHRYILAARSSVFRAQLFGPMKEGATTMPGAIVIEDMKANVYRAMLSFIYTDTLPTMEKAEEDEEGVMWLQDLLVAADRYDLQRLKFLCEEKLSEHIRVSTVASTLALAERHHCRMLKEACFQLLQVQTPSCLQEVMASSGWEHIVMAYPSVLNELIAKLISLNQK

SEQ ID NO: 9795 - protein, 227 aa, Neisseria gonorrhoeae FA 1090
MELVFIRHGQSEWNAKNLFTGWRDVKLSEQGLAEAAAAGKKLKENGYEFDIAFTSVLTRAIKTCNIVLEESDQLFVPQIKTWRLNERHYGRLQGLDKKQTAEKYGDEQVRIWRRSYDTLPPLLDKDDAFSAHKDRRYAHLPADVVPDGENLKVTLERVLPFWEDQIAPAILSGKRVLVAAHGNSLRALAKHIEGISDEDIMGLEIPTGQPLVYKLDDNLKVIEKFYL

SEQ ID NO: 9796 - protein, 392 aa, Listeria monocytogenes str. 4b H7858
MSTVDKIGKTADQAIYEKKQGNKVIVVVSAMGKSTDKLVAMAEEISEAPDKREMDMLLSTGEQITIALLAMTLKEKGHDAISYTGWQAGIETEAVHSNARIADIDSARIESALDAGQIVVVAGFQGFTTDGEITTLGRGGSDTTAVAIASALNAVKCAICTDVVGVFTTDPRYVKKAQKLEQITYDEMLELANLGAGVLHPRSVEYAKNFRIPLEVRASHEQVPGTMIEEDLTMENTKVVRGIAFEDQITRVTIHWKQKEAMRVSKVFTKLAENNIDVDIIIQGITGLGHGNLSFTIKTSALLATLAVLEESKELLQIEKLESEQDLAKVSIVGSGMVSNPGVAAQMFEALTENNIPIKMISTSEIKVSTVVPARKMVEAAQVLHDQFELDK

SEQ ID NO: 9797 - protein, 123 aa, Triticum aestivum
  misc_feature (23)..(23): Xaa can be any naturally occurring amino acid
  misc_feature (77)..(77): Xaa can be any naturally occurring amino acid
MAATGEETVRASHILIKHEGSRXRKASWKDPEGRVISATTRADAAARLGDLRAQILAGRGSFADLAAQHSDCSSARXRGGDLGTFGRRQMQKPFEDATYALKVGEISDIIDTESGVHIILRTA

SEQ ID NO: 9798 - protein, 435 aa, Magnaporthe grisea 70-15
MTVLPLEPEFSQAYNELAGTLEDSTLFEKYPELRTALSVVSIPERVIQFRVVWEDDSGALRVNRGYRVQFSSALGPYKGGLRLHPSGGADFDPKGKSDAEIRRFCVAFMTELSKHIGADTDVPAGDIGVGGREIGYMFGAYRKLRNRFEGVLTGKGLDWGGSLIRPEATGYGLVYYVGHMLEYAGVGGWAGKRVAISGSGNVAQYAALKIMELGGTVVSLSDSRSALVAVEGGRTITEADVKRVMELKDRRRPLSDLLPESEEGGSTSPGGLKHLPGARPWTHVGKVDVALPCATENEVSKEEAEALVAAGCRFVAEGSNMGCEQGAIDVFEANRRSKGKGDAVWYAPGKAANCGGVAVSGLEMGQNSSRLKWSREKVDKELANIMETAFRTGLDTAKEYVNRASDDELPSLVAGSNIAGFVKVARAMQAQGDWW

SEQ ID NO: 9799 - protein, 224 aa, Ralstonia solanacearum
MSTYTAIRKVASAPQVDAALIAALQALPVAAISDNMHRNMGTGSLQPFHKPVANTMAGTAVTARSRGGDNLTYLRALEFCRPGDVLVIDAGGDLQNAVVGGILTYYAARIGVVGVVIDGAVRDVAELREREFPVYARGVTHRGPYKDGPGEINVPVSVGGMIVHPGDVVVGDQDGLLAIPPADVPLLIDKARAVLAAEAETMRAMQEDRWDRSFIDALEARCNN

SEQ ID NO: 9800 - protein, 73 aa, Haloarcula marismortui
PTGRFGPRYGLKIRVRVRDVEIKHKKKYKCPVCGFPKLKRASTSIWVCGHCGYKIAGGAYTPETVAGKAVMKA

SEQ ID NO: 9801 - protein, 206 aa, Oryza sativa (indica cultivar-group)
MASRRRTLLKVIILGDTGVGKTSLMNQYVNKKFSNQYKATIGADFLTKEVQFEDRLFTLQIWDTAGQERFQSLGVAFYRGADCCVLVYDVNSMKSFDNLNNWREEFLIQASPSDPDNFPFVLLGNKVDVDSGNSRVVSEKKAKAWCASKGNIPYFETSAKDGTNVEEAFQCIVKNALKNEPEEELYVPDTVDVVGGNRAPRSSGCC

SEQ ID NO: 9802 - protein, 165 aa, Thermococcus kodakarensis KOD1
MRKKYRKVVVGGTFDRLHLGHKALLRKAFEVGKIVYIGLTSDEMVRNKPYAERILPYEHRLKDLLKFIEVNGYTNYRIIKIHTAIGFADSMKSLEAIVVSEETYKGALIVNRAREEKGLKPLDIVTIPIIKSYLGDKISSSLIRAGLIDPFGRPLHWKGNSPKDV

SEQ ID NO: 9803 - protein, 608 aa, Ashbya gossypii ATCC 10895
MSNANHHHQQQKMYTGGRNMPHGMHRPGSIPIGQRIGKYQVIKTLGEGSFGKVKLAHHVSTGQKVALKIINKKVLAKSDMQGRIEREISYLRLLRHPHIIKLYDVIKSKDEIIMVIEYAGNELFDYIVQRDKMSENEARRFFQQIISAVEYCHRHKIVHRDLKPENLLLDEHLNVKIADFGLSNIMTDGNFLKTSCGSPNYAAPEVISGKLYAGPEVDVWSSGVILYVMLCRRLPFDDESIPVLFKNISNGVYSIPKFLSQGAANLIKRMLIVNPLNRITIHEIMEDEWFKVDLPDYLVPVDMKADATSKPGTDDERIDEALVAVLANTMSYDKDEIYEALEDPNQTDPTVLEIRDAYLLLKENKSLIDGLRSNKQKLDQLDTFLSQSPPTFESHSQLGPGSGFQAALGGSQHGDQNPHQVKRLASRQRTYQLSFSEQQDEDSTIAILPSSLPQIHRANMVAQGSPAAVKISPLSNKKSKTRWHFGIRSRSYPLDVMGEIYLALKNLGAEWAKPSEEDLWTIRVRWKYDVGTQQNERIPDLMRMVIQLFQIETNNYLVDFKFDGWESSSGNPISSSSTDDEMSTFSAYPFLHLTTRLIMELAVNSQSS

SEQ ID NO: 9804 - protein, 396 aa, Haemophilus ducreyi 35000HP
MFEPVYEVTQDAVIKVVGVGGGGGNALNHMVDSHLNEGVGGVEFFSVNTDAQVLRTSSVRQTIQIGANITKGLGAGANPNVGRQAAEEDREALSNMLAGADMVFISAGMGGGTGTGAAPVIADIAKSQGSLTVAIVTKPFRFEGNKRMNYAEQGIQELSKHVDSLIIIPNDKLLKVLPKNTKMIDAFNAANDILRNAVLGITDMITSPGLVNVDFADVKTVMSEMGRAMMGTGIAEGEDRAERAVHDAVASPLLEDVDLSGAKGILVSISSDDNLELNEVDVIMDYIHSFAAADATIVFGTSIYPEAEGKLRVTLVATGIGQPEELTLPKTSIVHPSAQPQIQPTQPAFTQPHQQTYAQQPTQFGHSQQTAPKPQQVDSSQVWSPNSIPGFMRNGQ

SEQ ID NO: 9805 - protein, 387 aa, Medicago truncatula
MISQVKYTSSLPFTNFGSSNFIPRPKLCTLPIVQHVGKNTNNLSLSSLKPLYISSTENFSFSTTKLTRRETECHAYEADRSQPLEINIDIAGEQAAQKLKIGLYFATWWALNVVFNIYNKKVLNAFPYPWLTSTLSLAAGSLIMLISWATRVAEAPKVNLEFWKALFPVAVAHTIGHVAATVSMSKVAVSFTHIIKSGEPAFSVLVSKFLLGEAFPLQVYLSLLPIIGGCALAAVTELNFNMIGFMGAMISNVAFVFRNIFSKKGMKGMSVSGMNYYACLSILSLLLLTPFAIAVEGPTMWAAGWQTAVSPNWWVAAQSVFYHLYNQVSYMSLDQISPLTFSIGNTMKRISVIVSSIIIFHTPIQPNNALGAAIAILGTFLYSQAKQ

SEQ ID NO: 9806 - protein, 562 aa, Shewanella sp. MR-7
MDDNKRPLYLPFAGPAILEAPLINKGSAFSEEERIFFNLEGLVPYAIETIEEQASRAYDQFRSFNNDLDKHIYLRNIQDTNETLFYRLVQNHISEMMPIIYTPTVGLACERFSKNYRRNRGLFISYPNKDRIDDILNNSTRQKVKIIVVTDGERILGLGDQGIGGMGIPIGKLSLYTSCGGISPAYTLPITLDVGTDNPQLLEDPMYMGWRHPRIGGEEYAEFIEAFMQAVHVRWPDTLIQFEDFAQKNAMPILERYKERYCCFNDDIQGTAAVTVGSLLAACKAAGTELNKQRVAFLGAGSAGCGIAEAIVAQMVSEGISDEQARSQVCMVDRWGLLLDNMPNLLPFQQKLAQKCADISHWNNFSDNISLLDVVNNVKPTVLIGVSGAPGLFTEEIVRAMHSHCERPIIFPLSNPTSRVEATPKDILHWTSGQALVATGSPFEPVVVDGETYEIAQCNNSFIFPGIGLGVLASGARHVSDAMLMASSRALAECSPLAINGSGPLLPKLEDIHSVSKHIAFAVGKVAIEQGLSLPASDELLMQSIEDNFWKPEYRRYKRTSF

SEQ ID NO: 9807 - protein, 502 aa, Pseudomonas aeruginosa UCBPP-PA14
MAKAIPQLIDGEWRGSRSRELIEVTDPATQDVLALAPKATADEIEQAIASAQRAFETWREVPAPERARLMLRYQHLLKEHHDELGELLARETGKNLADAKGDVWRGIEVVEHAANVASLMMGETVENVAREIDTASWIQPLGVCAGITPFNFPAMIPLWMFPLAIACGNTFVLKPSEQDPLTPNRLAELFLEAGAPKGVLQVIHGGREQVDALLTHPDIRAISFVGSVAVGQHVYRTGTAHLKRVQAFAGAKNHMVILPDANKAQVLGNLVGASCGAAGQRCMAISAAVFVGAAREWIPELAERMAALRPGHWQDPDAAYGPLISPQARQRVLRLIAEGKAEGAECLLDGSQCQVEGYPNGNWLGPTLFRAVTPKMGLYREEIFGPVLACLEVDTLEEAIALVNANPYGNGTSLFTRSGGAARRYQHAVQVGQVGINVPIPVPLPFFSFTGWKGSFYGDLHAYGKQAVRFYTETKTVTSRWFDDEPTTDESSAGPNMTIHLK

SEQ ID NO: 9808 - protein, 597 aa, Nocardioides sp. JS614
MATEVNLPALGESVTEGTVTRWLKQVGDSVAVDEPLLEVSTDKVDTEIPSPIAGTLLEIRANEDDTVEVGAVLAVIGDAGESSGDSGGAQAEAQPDPEPEPEAQPEPEPAQEQAQQEAQQPAAEQPAPAAEAKPSGGSGTAVTLPALGESVTEGTVTRWLKSVGDEVAVDEPLLEVSTDKVDTEIPSPVAGTLLEIKVAEDETVEVGAELAVIGSGQAAPAESKPEPTPEPEPEPTPEPEPEPEAAPEPEPAPAPQEQAAPPAPAPAAAAQPTAQPAAQPVASGDGPGYVTPLVRKMAAQHGVDLASVTGTGVGGRIRKQDVLDAAKAQQQAQQQAQQPAQAAPAAPAAPSAPVSSGAPSPLRGTTVKMSRLRKIIATRMVDSLQTSAQLTQVVEVDVTNIARLRDEAKADFLSREGVKLSYLPFFAKAAIDALKHHPALNATIDTEAGEVTYYDRENLAIAVDTEKGLITPVIKDAGDLSIAGLAKKIADVAQRTRTNKIGPDELSGGTFTITNLGSVGALWDTPIVNKPQVAILGPGAVVKRPVVIDDPNLGETIAVRYMVYLALTYDHQLVDGADAGRFLTDVKQRLESGQFEV

SEQ ID NO: 9809 - protein, 411 aa, Shewanella sp. MR-7
MYTMDSNKMKRVVITGMGVVSSIGNNKQEVTESLKAGRSGITHSAQFEEMQLRSHVWGNIKLDPSELIDRKALRFMGDAAAYAYIAMQEAIKDAQLTEEQYSDPRVGLIVGTGGASSSNQVQAADILREKGVKRVGPYIVPRIMSSTASACLATPFKIKGMNYSISSACATSAHCIGHAVELIQMGKQDMVFAGGSEEVDWTLTMGFDAMGALSTKYNDTPEKASRTYDADRDGFVISGGGGILIVEELEHALARGAKIYAEVIGYGASSDGYDMVAPSGEGAVRCMQMALADVDTPIDYINTHGTSTPVGDVRELEALREVFKDKCPPVASTKSMTGHALGAAGVHEAIYSLIMMENSFIAPSINIDNLDEAAKDMPIVREYRDAELNTVMSNSFGFGGTNATLVMRKYK

SEQ ID NO: 9810 - protein, 161 aa, Trema virgata
MSSSEVDKVFTEELEALVVKSWAVMKKNSAELGLKFFLKIFEIAPSAKNLFSYLKDSPIPLEQNPKLKPHAMTVFVMTCESAVQLRKAGKVTVRESNLKRLGAIHFKNGVVNEHFETRFALLETIKEAVPEMWSAEMKNAWGEAYDQLVAAIKFEVKPSST

SEQ ID NO: 9811 - protein, 328 aa, Chlamydophila caviae GPIC
MPKHVTLEIREAIREAIDEEMARDPNVCILGEEVAEYNGAYKVTKGLLDKWSSSRVIDTPISEAAFAGIGVGAALTGLRPIIEFMSWNFSLVAADQIISHAAKMHYMTGGKFSVPIVFRGPNGAAAQVSCQHSHCVEALYANIPGLIVISPSNPYDAKGLLKSAIRNDNPVLFLENELEYSLKGEVPVEEYLVPIGKSRVIEEGKDLTIITYGRMVSVVKEAVKIAKQRYGLSIEILDLRTIKPLDISGIFSSVKKTGNCIVVEEGHYFAGISAEIITRITEHVFDYLDSPPLRVCQKETPMPYNKTLEQATLPNVNRILDTIEKIMR

SEQ ID NO: 9812 - protein, 239 aa, Schizosaccharomyces pombe
MKLNISYPANGTQKLIEIDDDRRLRVFMEKRMGQEVPGDSVGPEFAGYVFKITGGNDKQGFPMFQGVLLPHRVRLLLRAGHPCYRPRRDGERKRKSVRGCIVGQDLAVLALAIVKQGEQDIPGLTDVTVPKRLGPKRASKIRRFFNLSKEDDVRQFVIRREVVPKKEGKKPYTKAPKIQRLVTPRTLQHKRHRFALKRRQAEKNREEAAEFAQLMAKRVAEAKQKKEVVKARRASSMKK

SEQ ID NO: 9813 - protein, 580 aa, Ashbya gossypii ATCC 10895
MTTAEEYKKEGNSAFAAKDFEKAIELFGKAIEVSEQPNHVLYSNRSACYASMRKFREALADAQECVRIKPDWSKGHNRLGAAHYGLGDLDEAEESYKKALELDSSNKAAQDGLAQVQATQQQRMEQPDLGFGQMFQDPNLIQKLKNNPKTAEMMKDPQLVAKVLQFQSNPQAISTELMRDPRLMTVMAAILGIDLSMDSPEPKSAAPADAPAPSAEQPSEAKPEPTPAASQPAPAAEKEEEPEQMHVNNDRSKAEEAKAKGNELYKKRQFDEAIANYEKAWDLHKDITYLNNRAAAEYEKGDYESAIKTLEKAVEEGRELRADYKVIAKSFARLGNAHYKLADLKKAIEYYEKSLTEHRTPEVLNKLRSLEKEQKKREAEAYIDPEKAEEARLQGKEYFTNADWPNAVKAYTEMIKRAPEDARGYSNRAAALAKLMSFPDAIKDCDMAIQKDPNFVRAYIRKATAQIAVQEYAAAIETLDTAREKDAEVNNGSNTREIDQLYIKATQQRFQPANANESPEETYARAVKDPEVAAILQDPVMQSILSQAQQNPAALQEHMKNPQVFKKIQTLIAAGIIRTR

SEQ ID NO: 9814 - protein, 161 aa, Trema virgata
MSSSEVDKVFTEEQEALVVKSWAVMKKNSAELGLKFFLKIFEIAPSAKNLFSYLKDSPIPLEQNPKLKPHAMTVFVMTCESAVQLRKAGKVTVRESNLKRLGAIHFKNGVVNEHFETRFALLETIKEAVPEMWSAEMKNAWGEAYDLLVAAIKFEVKPSST

SEQ ID NO: 9815 - protein, 512 aa, Magnetospirillum magnetotacticum MS-1
  misc_feature (340)..(349): Xaa can be any naturally occurring amino acid
MHHGAGSAEFKWRHLIEAVEEFGQGFTVFDRDLNLILCNNRFLEMLNFPASLVHPGTVFADFMRFNALRGEYGPGDVEELVAERVDRARGFAPHCFERERPDGTVIEVRGTPLPGGGFVTTYTDITERKRAERMLIHAKDKAEETARIKANFLATMSHEIRTPMNGVLGMLHLLTGSPLTPEQRDHLETAQSSARSLLSIINDILDFSKLEAGQMKMESTRFDLYRLMEEMGALLKGAAMDKGLDLRLHIAANVPRHHCGDSNRLRQILTNLMGNAVKFTERGGVEVLVEALPDSRLRFQVADSGIGIDPAAASGLFSEFVQADSSITRRFGGTGLGLSXXXXXXXXXXGEIGFDSVPGQGTTFHVVLPFTPASDDGRAAAIEEQIPDLPPMAVLLAEDNPVNQKLTTVLLNRWGQQVTLARNGAEAIAALARQHFDLVLMDVHMPGIDGLEATRRIRAMSGPVSRIPIIAMTADALDGDAALCLEAGMDDYVAKPVDPALLLAALHRAVRR

SEQ ID NO: 9816 - protein, 581 aa, Triticum aestivum
MGAPKWVVAPLALLLLLQLAGASHDVRRSLEAEAASPSVPASILSPLLRTGYHFQPPMNWINDPNGPLYYKGWYHLFYQYNPKGAVWGNIIWAHSVSRDLINWIALDPAIKPSIPTDQFGVWSGSATILPNGTVAMLYTGIDRPGTNYQIQNIAFPKDPSDPLLREWVKPGYNPIAIPEAGMNATQFRDPTTAWHAGDGLWRMLVGGLKPGTLRGMAILYRSRDFKHWVRAKHPLHSALTGMWECPDFFPVREPGHPDGLDTSEFGPHYKYVLKNSLDLTRYDYYTVGTYNNRTERYVPDNPTGDVYQRLQYDYGNFYASKTFYDPAKNRRVLLGWANESDSVAHDNAKGWAGIHAIPRKIWLDPSGKQLLQWPVEELDQLRGKAVSVGDKLVKPGQHFEVTGLQSYQSDVEVSFEVSSLDKAEPFDPAYANDAQKLCGMKNADVKGGVGPFGLWVLASDNLAEKTAVFFRVFKDGHGKPLVLMCSDPTKCLNTAGLYKPTFAGFVDTDISSGKISLRSLIDRSVVESFGAGGRTCILSRVYPSMAIGKDAHLHVFNNGVTDIKVSKLTAWEMKKPMMNGA

SEQ ID NO: 9817 - protein, 562 aa, Glycine max
MAPSTTVPNGTLPSGSVTGRLASVYSEVQKTRVDHALPLPSVLKHPFTILHGPPSSAAGNPDEIAKLFPHLFGQPSAALARSDAAQTQKKLKIGVVLSGGQAPGGHNVISGIFDYLQERAPGSTLYGFKGGPAGIMKCKYVELTSEYIYPYRNQGGFDMICSGRDKIETPEQFKQAEETAKKLDLDGLVVIGGDDSNTNACLLAENFRSKNLKTSVIGCPKTIDGDLKCKEVPTSFGFDTACKIYSEMIGNVMIDARSTGKYYHFVRLMGRAASHITLECALQTHPNITIIGEEVAAKKLTLKNVTDYIVDVVCKRAEINYNYGVILIPEGLIDFIPEVQHLIAELNEILAHDTVDEGGLWKKKLTDQSLKLFDFLPQAIQEQLMLERDPHGNVQVAKIETEKMLIQMVETELEKRKQEGKYKGEFKGQSHFFGYEGRCGLPTNFDATYCYALGYGAGALLHSGKTGLISSVGNLCAPVKEWTVGGTALTSMMDVERRHGKFKPVIKKAMVELEGAPFKKFASLRDEWALKNCYISPGPIQFSGPGSEVINHTLLLELEAQA

SEQ ID NO: 9818 - protein, 326 aa, Mycoplasma mobile 163K
MAKIKVNNIEAVTNALEIMMEKDKDVVLWGEDAGYEGGVFRATKGLQAKFGDKRIFDAPISEAAIAGVGVGAAIYGLKPVVEIQFSGFSFPAMMQLFTHAARYRNRSRGRFTVPMVVRIPMGGGIRALEHHSEALEALYAHIPGLKVILPSTPYDTKGLLIAAIKDPDPVIFFEPKKIYRAFKEEIPAEEYEVEIGKANVLTEGTDITLVTYGAQVHDSLAAIRELGSEMSVELIDLRTIKPLDIDTILESVKKTGKLIVVHEAVKSFSVSAEIITRVNEELFEYLSAAPVRLTGYDITVPLAKGENFFVISKEKIIAKLRELKAE

SEQ ID NO: 9819 - protein, 582 aa, Dechloromonas aromatica RCB
MMPAPPQPIDRDVPLDEESTAKIGFLYSVFLLAGLVAFVMGFVRWQTSVAMGFVDFGFAGFNFGLLLYLRRNPQKVEIVSTLSLSLSFVLFLAIYLLATNNTMRLSLFFLLAASGFFLKGRKIGRLWLSGIILAIVAVHASGLFATGYSTLDIATTCVYLIALFFIFENYESFKEKERERKQSEEEALRAKEIAEAENQAKSRFLTTMSHEIRTPMNGILGMAQLMLVSRLTEQEQHDHARTILNSGQSLLALLNDILDFSKIEAGKLELTPAVFSPRQIVDEAATLFAESAKAKGLVIEAVWHGPIDQRYLADPMRLRQMLANLINNSIKFTGSGFVRIEGREIEPMADASLLEFSVTDSGIGIPPEKLTLLFRPFSQADSSTTREYGGSGLGLSIVHNLAKLMGGDAGVESEPGKGSRFWFRVQAIQQTANVDSRKTARTTSIEVPAEAPTLAGLVLIVEDNPVNRKVAQAMLGKMGIQSKSVDNGQEAVDAIAQGMRPNLILMDCQMPVMDGFEATTQIRRWEMANGQPRLPIVALTAGAFEEDRQNCLAAGMDDFLTKPVNMADLSASINRLLGKPTS

SEQ ID NO: 9820 - protein, 251 aa, Triticum aestivum
MKLNIANPTTGCQKKVEIDDDMKLRNLYDKRISQEVVGDLLGEEFEGYIFKIMGGCDKQGFPMKARSANFPGRVRLLLHRGTSCFRGHGRRVGERRRKSVRGCIVSQDLSVINLVIVKKGKNDLPGLTDTEKPRMRGPKRASKIKKLFNLGKDDDVRQYVNTYRRSFTNKKGKTVSKAPKIQRLVTPLTLQRKRARIADKKKRIAKKKSEAAEYQKLLAQRLKEQRDRRSESMAKRRSKLSAATKAPAASA

SEQ ID NO: 9821 - protein, 98 aa, Nicotiana tabacum
WLRTGFRVFFGCLAFFISVALPFLPSLAGLIGGIALPVTLAYPCLMWIMIKKPQTYTSTWFVNWSLGLLGLVLSVLLVFGAIWTIAIQGMDVHFFKPQ

SEQ ID NO: 9822 - protein, 405 aa, Aquifex aeolicus VF5
MAKEKFERTKEHVNVGTIGHVDHGKSTLTSAITCVLAAGLVEGGKAKCFKYEEIDKAPEEKERGITINITHVEYETAKRHYAHVDCPGHADYIKNMITGAAQMDGAILVVSAADGPMPQTREHVLLARQVNVPYIVVFMNKCDMVDDEELLELVELEVRELLSKYEYPGDEVPVIRGSALGALQELEQNSPGKWVESIKELLNAMDEYIPTPQREVDKPFLMPIEDVFSISGRGTVVTGRVERGVLRPGDEVEIVGLREEPLKTVATSIEMFRKVLDEALPGDNIGVLLRGVGKDDVERGQVLAQPGSVKAHKRFRAQVYVLSKEEGGRHTPFFVNYRPQFYFRTADVTGTVVKLPEGVEMVMPGDNVELEVELIAPVALEEGLRFAIREGGRTVGAGVVTKILD

SEQ ID NO: 9823 - protein, 358 aa, Cordyceps bassiana
MAEFVRAQIFGTTFEITSRYSDLQPVGMGAFGLVCSARDQLTNQNVAVKKIMKPFSTPVLAKRTYRELKLLKHLRHENVISLSDIFISPLEDIYFVTELLGTDLHRLLTSRPLEKQFIQYFLYQIMRGLKYVHSAGVVHRDLKPSNILVNENCDLKICDFGLARIQDPQMTGYVSTRYYRAPEIMLTWQKYDVEVDIWSAGCIFAEMLDGKPLFPGKDHVNQFSIITELLGTPPDDVINTIASENTLRFVKSLPKRERQPLRNKFRNADDSAIDLMERMLVFDPKKRITAAEALSHDYLAPYHDPTDEPVAEEKFDWSFNDADLPVDTWKIMMYSEILDYHNVEAGASGLEDGSVPAQ

SEQ ID NO: 9824 - protein, 108 aa, Yersinia pestis biovar Medievalis str. 91001
MSDKIIHLSDDSFDTDVLKASGLVLVDFWAEWCGPCKMIAPILDEIAEEYEGRLTIAKLNIDDNQGTAPKYGIRGIPTLLLFRDGEVVATKVGALSKGQLKAFLDANL

SEQ ID NO: 9825 - protein, 631 aa, Arabidopsis thaliana
MESSILKSPNLSSPSFGVPSIPALSSSSTSPFSSLHLRSQNHRTISLTTAGKFRVSYSLSASSPLPPHAPRRRPNYIPNRISDPNYVRIFDTTLRDGEQSPGATLTSKEKLDIARQLAKLGVDIIEAGFPAASKDDFEAVKTIAETVGNTVDENGYVPVICGLSRCNKKDIETAWEAVKYAKRPRIHTFIATSDIHLKYKLKKSKEEVIEIARNMVRFARSLGCEDVEFSPEDAGRSEREYLYEILGEVIKAGATTLNIPDTVGITLPSEFGQLIADIKANTPGIQNVIISTHCQNDLGLSTANTLSGAHSGARQVEVTINGIGERAGNASLEEVVMAIKCRGDHVLGGLFTGIDTRHIVMTSKMVEEYTGMQTQPHKAIVGANAFAHESGIHQDGMLKHKGTYEIMSPEEIGLERSNDAGIVLGKLSGRHALKDRLNELGYVLDDGQLSNLFWRFKAVAEQKKRVTDADLIALVSDEVFQPEAVWKLLDMQITCGTLGLSTSTVKLADSDGKEHVACSVGTGPVDAAYKAVDLIVKEPATLLEYSMNAVTEGIDAIATTRVLIRGDNNYSSTNAVTGESVERTFSGTGAGMDIVVSSVKAYVGALNKMLGFKEHTSTLSKTPLETNEVPA

SEQ ID NO: 9826 - protein, 291 aa, Oryza sativa (japonica cultivar-group) [sequence omitted]

SEQ ID NO: 9827 - protein, 230 aa, Streptococcus mutans UA159
MVKLVFARHGESEWNKANLFTGWADVDLSEEGTQQAIDAGKLIKEADIKFDLAFTSVLTRAIKTTNLALEYSDQLWVPVEKSWRLNERHYGGLTGKNKAEAAEKFGDEQVHIWRRSYDVLPPAMAKDDPYSAHTDRRYANLDDTVIPDAENLKVTLERALPYWEDKIAPALKDGKNVFVGAHGNSIRALVKHIKQLSDDDIMGVEIPNFPPLVFEFDENLNVTAEYYLGK

SEQ ID NO: 9828 - protein, 883 aa, Escherichia coli CFT073
MNEQYSALRSNVSMLGKVLGETIKDALGEHILERVETIRKLSKSSRAGNDANRQELLTTLQNLSNDELLPVARAFSQFLNLANTAEQYHSISPKGEAASNPEVIARTLRKLKNQPELSEDTIKKAVESLSLELVLTAHPTEITRRTLIHKMVEVNACLKQLDNKDIADYEHNQLMRRLRQLIAQSWHTDEIRKLRPSPVDEAKWGFAVVENSLWQGVPNYLRELNEQLEENLGYKLPVEFVPVRFTSWMGGDRDGNPNVTADITRHVLLLSRWKATDLFLKDIQVLVSELSMVEATPELLALVGEEGAAEPYRYLMKNLRSRLMATQAWLEARLKGEELPKPEGLLTQNEELWEPLYACYQSLQACGMGIIANGDLLDTLRRVKCFGVPLVRIDIRQESTRHTEALGELTRYLGIGDYESWSEADKQAFLIRELNSKRPLLPRNWQPSAETREVLDTCQVIAEAPQGSIAAYVISMAKTPSDVLAVHLLLKEAGIGFAMPVAPLFETLDDLNNANDVMTQLLNIDWYRGLIQGKQMVMIGYSDSAKDAGVMAASWAQYQAQDALIKTCEKAGIELTLFHGRGGSIGRGGAPAHAALLSQPPGSLKGGLRVTEQGEMIRFKYGLPEITVSSLSLYTGAILEANLLPPPEPKESWRRIMDELSVISCDLYRGYVRENKDFVPYFRSATPEQELGKLPLGSRPAKRRPTGGVESLRAIPWIFAWTQNRLMLPAWLGAGTALQKVVEDGKQSELEAMCRDWPFFSTRLGMLEMVFAKADLWLAEYYDQRLVDKALWPLGKELRNLQEEDIKVVLAIANDSHLMADLPWIAESIQLRNIYTDPLNVLQAELLHRSRQAEKEGQEPDPRVEQALMVTIAGIAAGMRNTG

SEQ ID NO: 9829 - protein, 376 aa, Dehalococcoides ethenogenes 195
MAKTSFVPNPARIKVFGCGGGGCNAVTRMVREEIQGVEFIAINTDAQALAITEAPIRLQIGERVTRGLGAGGDHNMGQKAAEESRDEIREIVNGADMVFVTAGMGGGTGTGSAPIVAEESKKSGALTIAVVTKPFTFEGAHRVSTAKEGINRLLGKVDTLIIIPNDRLLDLCDQKTGVDAAFKMADDVLRHGVQAISEVITVPGLINLDFADVRAVMKDAGPAWMSIGYGSGKNRASDAAKSALASPLLDVSITGSKGVLFNIVGGPDLSLMEVNEAADVIKQAVDPDANIIFGVASDASMGSNVKITLIATGFVSKMGMAEEEGDDAITRQLKGIKTEDELDVPSFLRRPLFNRARPVAPPVDSHSNKPSSRISW

SEQ ID NO: 9830 - protein, 119 aa, Glycine max
ANLNVACVAAVKCMVVAAMIAAHMAQAAFTCTRDAGDMSHSFMTLESGRKPSHACCNGLKSLSSAANTTYDRQRAYTCLINLANNMGQSLNAGHAPSLPDKCGVNIPYMISTSTNCASI

SEQ ID NO: 9831 - protein, 503 aa, Triticum aestivum
MEAGGKDGNPLKNYRIGKTLGIGSFGKVKIAEHIKTGHKVAVKILNRRKIKNMEMEEKVKREIKILRLFMHPHIIRLYEVIEAPADIYVVMEYVKSGELFDYIVEKGRLQEEEARRFFQQIISGVQYCHRNMVVHRDLKPENLLLDNNCDVKIADFGLSNVMRDGHFLKTSCGSPNYAAPEVISGKLYAGPEVDVWSCGVILYALLCGTLPFDDENIPNLFKKIKGGIYTLPSHLSGPARDLIPRMLVVDPMKRITIREIREHPWFEAQLPRYLAVPPPDTAQQVKKIDEESLVKVISLGFDKNLLVESIHNRLQNEATVAYYLFLDNKSRTTTGYLGAGYQEAMESSFSPITPSETQSPAHGNRQQPYMESPVGLRPHFPADRKWALGLQSRAHPREVMTEVLKALQELNVYWKKIGHYNMKCRWSPPGFPGQENMSHTNYNFSAEPIETDDLGDKLNLIKFELQLYKTRDEKYLLDLQRASGPHLLFLDLCAAFLAQLRVL

SEQ ID NO: 9832 - protein, 493 aa, Ralstonia solanacearum
MALTFDQLRHTGLIRTDNLIDGRWSAGADGARYAVTDPATGSIIAQVADSSAADARAATDAAARALPAWRDTLPAERAAILRRWHAAIVANADALGRLISLEQGKPFAEGRGEVMYGASYVAWFADEATRIYGDLIPQQQRGKRMSAIKEPIGIVAAITPWNFPLAMIARKIAPALAAGCTVVAKPAEDTPLTALALAQLAQEAGLPPGVLNMIAASRERGVAAVADWLQDGRVRKITFTGSTPVGKHLARESAGTLKKLSLELGGNAPFIVFDDADLDAAIAGLLSAKFRNGGQTCVCPNRVYVQAGVYDRFAAMLAARVSALKVAPATDPDAQIGPMINARAVDKIERHVQDAVAHGARVLAGGKRLPEVGAHFYAPTVLADAHPGMALCGEETFGPVVPLFRFTDEAEAVQAANDTPFGLAAYFYSQDVRRIDRVAHALEAGIVGINEGALASEAAPFGGVKESGYGREGSKYGLDDYLSIKYLCQGGLA

SEQ ID NO: 9833 - protein, 413 aa, Clostridium thermocellum ATCC 27405
MNFDTIESAIEDIRQGKMIVVVDDEDRENEGDLLMAAELVTPEHINFMATYGRGMICAPITEARAKELGLELMVTKNSEHMRTAFTVTVDHKSTTTGISAFERAKTIKELSNPDAKPDDFVRPGHVFPLIAKEGGVLKRAGHTEAAVDFAKLAGLYPAGVICEIMNDDGTMARVPQLMEFVKKHGLKLVTIADLIKYRRNNEKLIRRAAEAKLPTEYGDFKIVAYENVINGEHHVALVKGDVANSDEPVMVRVHSECLTGDAFHSLRCDCGEQLHKAMEMIGKEDKGVLLYMRQEGRGIGLVNKIRAYELQDQGKDTVEANVLLGFPPDLREYGIGAQILYDLGVRKIRLLTNNPKKLIGLGGHGLEIVERVPIEIKGNEINSFYLKTKKEKMGHLLTSINTTEHQEGESNGN

SEQ ID NO: 9834 - protein, 284 aa, Zea mays
MASPIPREWVGLQQFPPATQTELHELLGKLKEEDVSTLTILVMGKGGVGKSSTVNSIVGERIATVSAFQSEGLRPMMWSRTRAGFTLNIIDTPGLIEGGYINEQAVDIIKRFLLGKTIDVLLYVDRLDAYRMDTLDGQVIRAITNSFGKDIWRRSLVVLTHAQLSPPDGIEYNDFFTRRSEALLRYIHSGAGIKKREYGDFPLPIALVENSGRCKTNEHGEKILPDGTLWVPNLMKEITIVISNGSSPTHVDQKLIDGPNPNNRRKLFIPLILAVEYHNLFYAQ

SEQ ID NO: 9835 - protein, 361 aa, Ralstonia solanacearum
MTRKTYRIAVIPGDGIGREVMPEGLRVLDAAARRFGIDLEYQHIEWASCDYYLQHGRMMPDDWKAQLQGADAILFGAVGWPATVPDHISLWGSLLKFRREFDQYINLRPVRLFEGVPCPLANRKPGDIDYYVVRENTEGEYTSLGGIMYEGTDREVVIQESVYSRKGAERLLKFAFDLARSRARKHVTLATKSNGIAISMPWWDARADEVATHYPEVTLDKQHIDILTARFVLQPGRFDVVAATNLFGDILSDLGPATTGTIGLAPSANLNPDRTFPSLFEPVHGSAPDIYGKNIANPIAMIWSAALMLDFLTEGQGAGRAAHDAIVAAIEAVLKGGPRTPDLGGSANTTQVGEAIASHLA

SEQ ID NO: 9836 - protein, 379 aa, Xanthomonas axonopodis pv. citri str. 306
MNFAPVPELIEELRAGRMVVIVDDEDRENEGDLIMAAELVKPSDINFMVTHARGLVCLSLTRERCAQLGLAPMVRNNTAQFQTNFTVSIEAAEGVTTGISAYDRAHTVRTAVRPDARPQDLSQPGHIFPLISQPGGVLTRAGHTEAASDLPMLAGLEPAGVLVEVLNPDGSMARRPQLEVFAREHGLKMGSIADLIAYRLANEHTVERVDEREITTEFGPFKLVTYRDRIAHDLHFALLRGRADPQTPTLVRVQVENPLADLLHWQRDDFGVAATDALRAIAAEGQGVMVVLSAPRDSESLLARLRQQPEAAANAKDVSQWRRNGAGAQILADLGLGKLRVLGTPRRQVGLAGFGLEVVEYLECHAGEGVRSVPPSAVP

SEQ ID NO: 9837 - protein, 538 aa, Pyrococcus furiosus
  misc_feature (1)..(1): Xaa can be any naturally occurring amino acid
  misc_feature (20)..(20): Xaa can be any naturally occurring amino acid
  misc_feature (48)..(48): Xaa can be any naturally occurring amino acid
  misc_feature (331)..(331): Xaa can be any naturally occurring amino acid
  misc_feature (448)..(448): Xaa can be any naturally occurring amino acid
  misc_feature (464)..(464): Xaa can be any naturally occurring amino acid
  misc_feature (473)..(473): Xaa can be any naturally occurring amino acid
  misc_feature (489)..(489): Xaa can be any naturally occurring amino acid
  misc_feature (491)..(491): Xaa can be any naturally occurring amino acid
  misc_feature (495)..(495): Xaa can be any naturally occurring amino acid
XGSSHHHHHHSSGLVPRSHXEQLEEDCVHRYGVNAFVLYRLPVVKEGXVVGIVGPNGTGKSTAVKILAGQLIPNLCGDNDSWDGVIRAFRGNELQNYFEKLKNGEIRPVVKPQYVDLIPKAVKGKVIELLKKADETGKLEEVVKALELENVLEREIQHLSGGELQRVAIAAALLRNATFYFFDEPSSYLDIRQRLNAARAIRRLSEEGKSVLVVEHDLAVLDYLSDIIHVVYGEPGVYGIFSQPKGTRNGINEFLRGYLKDENVRFRPYEIKFTKTGERVEIERETLVTYPRLVKDYGSFRLEVEPGEIKKGEVIGIVGPNGIGKTTFVKXLAGVEEPTEGKIEWDLTVAYKPQYIKADYEGTVYELLSKIDASKLNSNFYKTELLKPLGIIDLYDREVNELSGGELQRVAIAATLLRDADIYLLDEPSAYLDVEQRLAVSRAIRHLXEKNEKTALVVEHDVLXIDYVSDRLXVFEGEPGKYGRALPPXGXREGXNRFLASIGITFRRDPDTGRPRANKEGSVKDREQKEKGEYYYIA

SEQ ID NO: 9838 - protein, 429 aa, Zea mays
  misc_feature (197)..(197): Xaa can be any naturally occurring amino acid
ILLNWVDKIADRLPNWKARLLNLAGRTALVRFVLSAIPVYLFLAMNVPKWVINKIDKIRKGFVWRGRKEVNGGSCLVAWDSVTRPLKYGGLGIPNLQHMCWALQTKWLWLQKTDQSRPWHGLTIPIQQHVKDLFAASLISYVGNGSNTLFWTDKWLNGCSIRDLAPEVASKVSKRALTSLTVSQALVNRQWIAHIKXPLSLIGIHQFLFLWDTLGEVQLSQEEDRHVWRHEASGLFSSKSCYKVLLFGSTVFEPWKRLWKTWAPPKCKFFLWLAIRNKCWTADILQLRGMPHPDVCPMCDQAQETIQHLLTACIFARQFWHTILAAIGLGHLTPTADEENFADWWGKASHKVVKTRKKGLNSLIILVAWCLWLQRNRAVFHGESPSLPRIFRCFSDEYVCWVMAGAKEFGGLGSVAALGVVGSSSSNNL

SEQ ID NO: 9839 - protein, 470 aa, Ustilago maydis 521
MSWDRDQAPIGDETADRTRTLVNEWRRRLEILSLEIREGASFTPDDHRVSRKRSRYRTTTSTIVDEGEKMSGADALPAFVIHATSSRPSTWNSKTTLSQRRLEGCNTPSRLVHYSGETHPASSSWRLSRYAPTFTKDDMDVEHDEMDADDGEMGDVRIAVTGGSIASSHVFMKGHGTFLSADTDEILSSMCGTVERVNKLISVRPARSRYAAEVGDLVIGRITEVGPKRWKVDINAKTDSALQLSSINLPGGIQRRKIESDELQMRSFFQENDLLVAEVQMMFQDNSSALHTRSLRYGKLRNGILVTVSPNLIQRLKSHFVHLKHDELQLDVDLVIGLNGYIWIAKHFAYTQPSNSSTTATAPASASAADQTGLAGSGIGMDIDATYSDQNDADLSISLRRQIQRVAKCIHILNTYHHPISDTSILDLIHISVVYIGPILQHQEQQDWHKLPSLTSLMVQQLQSASSLTS

SEQ ID NO: 9840 - protein, 169 aa, Vibrio sp. Ex25
MEYNTSALCDIYLDQVDVVEPMFSNFGGRASFAGQITTIKCFEDNSLIRETLEQDGLGRVLLIDGGGSLRKALIDAEIATIAEESEWEGIVVYGCVREVDELEDMNLGIQALASIPVGATSQGIGELDVPVNFGGVSFLPEDYIYADSTGIILSPEPLNIDLELDEEEE

SEQ ID NO: 9841 - protein, 305 aa, Bacillus cereus ATCC 14579
MLVMAYGTPYKEEDIERYYTHIRRGRKPSPEMLEDLTERYRAIGGISPLATITLEQAKKLEKRLNEVQDEVEYHMYLGLKHIEPFIEDAVKDMHNDGIQDAIALVLAPHYSTFSVKSYVGRAQEEAEKLGNLTIHGIDSWYKEPKFIQYWVDAVKGIYNGMSDAEREKAVLIVSAHSLPEKIIAMGDPYPDQLNETADYIARGAEVANYAVGWQSAGNTPDPWIGPDVQDLTRELNEKHGYTSFVYAPVGFVAEHLEVLYDNDFECKVVTDEIGAKYYRPEMPNASDAFIDCLTDVVLKKKESVL

SEQ ID NO: 9842 - protein, 373 aa, Zea mays
MAPTTATKDDSGYGDERRRELQAFDDTKLGVKGLVDSGVKSIPSIFHHPPEALSDIISPAPLPPSPPSGAAIPVVDLSVTRREDLVEQVRHAAGTVGFFWLVNHGVPEELMGGMLRGVRQFNEGPVEAKQALYSRDLARNLRFASNFDLFKAAAADWRDTLFCEVAPNPPPREELPEPLRNVMLEYGAAVTKLARFVFELLSESLGMPSDHLYEMECTQNLNVVCQYYPPCPEPHRTVGVKRHTDPGFFTILLQDGMGGLQVRLGDGQNGGCWVDIAPRPGALMVNIGDLLQLVTNDRFRSVEHRVPANKSSDTARVSVASFFNTDVRRSERLYGPIPDPSKPPLYRSVRARDFIAKFNTIGLDGRALDHFRL

SEQ ID NO: 9843 - protein, 185 aa, Triticum aestivum
MATILENIQKARFLPTRPLRDDLPTFQGGGGGKGEESHLMGLRKRLSSFSGKIQPISSASAEWAFRRTRSAPSLAAEFAGGPLKRWWDWGLGWLLSKKLGFAGDLEMNEEEAAALGRGSRGTWAHVLYKVRSGVRRLVASDHSLPTSQRLRGASLPPSSSARQHCKPAPQFAYTQSFQYGQAMAH

SEQ ID NO: 9844 - protein, 476 aa, Magnetococcus sp. MC-1
MVQHSPTVIVWFRRDLRLSDNPALLAATAMGQVLPVYIHENNQQEGGGGAWRWGLQQALAALNADLQGKLCCYVGDPARLLPEVAHAVGATGVYWNRLYTPQAIKRDRAIKQSLIERGLQVRSFNGSLLWEPWQVLKADKTPYKVFTPYYRRGCLVQDVPRQPMDAPPTVTWATLPAAAPAPSMQALDALLLGDVSWHKKWHGIWSMGEEAAQTRFEHFLSHGLACYDQGRDFPGRDCTSRLSTALQYGLLSPNQVWYGLEHAKADEHSVDKFRSELAWREFAYYQLFHFPSLPHKNFQPKFDHFPWLEDEVALGRWQTGQTGIPIVDAGMRELWQTGVMHNRVRMLVGSFLVKNLLLDWRAGAAWFKDCLVDYDLAINSASWQWVAGCGADAAPYFRIFNPVTQGEKFDRNGTYTRRFVPELANLPDQYLFKPWMAPASILRQAGVRLGQDYPEPLVDLAASRAQALAAFQALKI

SEQ ID NO: 9845 - protein, 508 aa, Burkholderia mallei ATCC 23344
MTGSTHSNDSRVRALAHFIGGRALDGASDRYGDVFDPALGTVTARVPLASGAEVDAAVAAAAAAFPAWSETSPLKRARVMFKFKELLDRHHDELAELITREHGKVFSDAKGEVMRGIEVVEFACGIPNLLKTDFTDQIGGGIDNWNLRQPLGVVAGITPFNFPMMVPCWMFPVAIACGNTFVLKPSERDPSASIRLAELLKEAGLPDGVFNVVHGDKTAVDALIAHPDVAALSFVGSTPIAEYIHTQAARRGKRVQALGGAKNHLVVMPDANLDQAVDALVGAAYGSAGERCMAISVAVAVGGVADALVERLAERAKALKIGNGMNADVEMGPLVTAAHRAKVSAYIDAGVAAGAKLVVDGRRHVVAGGENGFFLGGTLFDDVTTDMSIYREEIFGPVLAVVRVPDFASAVELINAHEFANGVSCFTSDGGIARAFARKIQVGMVGINVPIPVPMAWHSFGGWKRSLFGDHHAYGEEGVRFYTRYKSVMQRWPDSIAKGAEFTMPVAK

SEQ ID NO: 9846 - protein, 501 aa, Arabidopsis thaliana
MENGKCNGATTVKLPEIKFTKLFINGQFIDAASGKTFETIDPRNGEVIATIAEGDKEDVDLAVNAARYAFDHGPWPRMTGFERAKLINKFADLIEENIEELAKLDAVDGGKLFQLGKYADIPATAGHFRYNAGAADKIHGETLKMTRQSLFGYTLKEPIGVVGNIIPWNFPSIMFATKVAPAMAAGCTMVVKPAEQTSLSALFYAHLSKEAGIPDGVLNIVTGFGSTAGAAIASHMDVDKVSFTGSTDVGRKIMQAAAASNLKKVSLELGGKSPLLIFNDADIDKAADLALLGCFYNKGEICVASSRVFVQEGIYDKVVEKLVEKAKDWTVGDPFDSTARQGPQVDKRQFEKILSYIEHGKNEGATLLTGGKAIGDKGYFIQPTIFADVTEDMKIYQDEIFGPVMSLMKFKTVEEGIKCANNTKYGLAAGILSQDIDLINTVSRSIKAGIIWVNCYFGFDLDCPYGGYKMSGNCRESGMDALDNYLQTKSVVMPLHNSPWM

SEQ ID NO: 9847 - protein, 143 aa, Brassica napus
MSSKKVEGSSAPANRRDPYEVLSVARDATDQEIKSAYRKLALKYHPDKNANNPEASDLFKEVAFSYSILSDPEKRRQYDNAGFEALDADGMEMEIDLSNLGTVNTMFAALFSKLGVPIKTTVSANVLEEAMSRPGPPMFLRRL

SEQ ID NO: 9848 - protein, 482 aa, Burkholderia mallei ATCC 23344
MKVSARELRYEQGIDRLLELAGARDDTEYADVADEFASAPSSAFAHDLGEPDSLDHQASDESAGAGSFGDKPTRPAHGDTDVDTDWRDDDAPPSGSNDAAPVDTAASTDPLALFVRRMHAVPLLTHAQEIALAAEIEAGREQVLQALAEALDRLDLASLPADPALGRARAALQRARARGDEGARAFARARTAAYAALAAHGWPSAEVDAVRRAMRRLPTSPEKSDAGAQRAFADGEARISAATARMAEANLRLVLSIARKYASRGLDLADLLQEGNLGLLRAIEKFEHRRGFKFSTYATWWIRQAISRAIAERARTIRVPVHVGDEARRVRKAADRIERRSGVSASLAELSEATGLPAERLRAVLTLPREPRSLNAPLGDDDQAEFGDIVEDTSTPSLFDALAHGQMCDVVTSLLKTMSAQEADILRRRFGIGGDEPWSYEQIAARAGVSREQVRRIEKRALQTLRVTAEACNAHDFLDVQP

SEQ ID NO: 9849 - protein, 369 aa, Vibrio vulnificus CMCP6
MPISTPQEIIEDIRLGKMVILMDDEDRENEGDLIMAAEHITPEAINFMAKYGRGLICLTMTKERCQRLGLPPMVQDNNAQYTTNFTVSIEAAEGVTTGISAADRARTVQAAVAKEAKAADLVQPGHIFPLAAQDGGVLTRAGHTEAGCDLARLAGFEPASVIVEILNDDGTMARRPDLEVFAEQHGLKLGTIADLIEYRNNTETTIERVAECKLPTEFGEFDLVTYRDTIDNQIHFALRKGTMGDQTPLVRVHLQDTFTDLLRSDRNAERSWTLDKAMKRIGQEGGVLVILGNEESPELLIHRVKMFEAQDKEEAPKLAKKQGTSRRVGVGSQILADLGVHDMRLLSSSNKKYHALGGFGLNVVEYVCE

SEQ ID NO: 9850 - protein, 633 aa, Lactobacillus plantarum WCFS1
MCGLVGCLTDRRKVDNAAYDQVVREMTKMIVHRGPDDEGYFADDNITMGFRRLSIIDLAGGHQPLSYDNERYWLTFNGEIYNYVELREQLIQEGYTFKTDSDSEVILGMYAKYQAKLTTYLRGMFAFVIWDKQEKTLFAARDQFGIKPFYYAIAGDDFYYASESKAIYKILKDKHFDQEALQDYLTFQYVPETETLTKEIKMLAPGCSLTKQLGHAPQIKRYYHWEFHPVVRSEQDYATRLKETLIDSVKIHMRSDVPVGTFLSGGIDSSIVVAIAKQFNPNLKTISVGFERPGYSELDVAQETAAKLNVDNVQMTITPEAFMAAFPHFVWSMDDPLADPAAVPQYFLTKEAVKHVKVCLTGEGADELFGGYTIYHEPESLKAFRYTKPINGALQRIAAMMPAGMRGRSLLMRGTTPLEKRYVGNAFIFNETEKQQFMKHYNRDHSFQQTTRVFYDEAKHYDLISKMQFIDMHTWLNGDLLHNADRTALAHSLELRTPFVDREVFNLAAEIPANLRISHGTTKYILRKAVEDIVPAHVLYRKKLGFPVPIRLWLKDEMYDWAKNIIVTSQTDQYFDKTYFLKLLDDHRAGIRDNSRQLWTVLTFMMWHKLYVEADMLMDSVTANHLAEQVEIG

SEQ ID NO: 9851 - protein, 260 aa, Bordetella pertussis Tohama I
MSAQTPDAAEVLVDRADGILTITINRPQARNAINLAVARGIAAAVDELDASDDLRIGILTGAGGSFCAGMDLKGFLRGERPSIEGRGFGGLTARPPRKPLIAAVEGYALAGGFELVLACDLVVAADNAQFGVPEVKRGLAATAGGLVRLQRQLPYRIALELALTGDMFPARRAHGYGLINQLTEPGQALEAAPELARRIVANGPLAVAASKRVVVESQDWPADEVWERQAALTDHVFESADAREGSAAFAEKRQPVWQGK

SEQ ID NO: 9852 - protein, 454 aa, Saccharomyces pastorianus
MSEPEFQQAYDEVVSSLEDSTLFEQHPKYRKVLPIVSVPERIIQFRVTWENDKGEQEVAQGYRVQYNSAKGPYKGGLRFHPSVNLSILKFLGFEQIFKNSLTGLDMGGGKGGLCVDLKGRSNNEIRRICYAFMRELSRHIGQDTDVPAGDIGVGGREIGYLFGAYRSYKNSWEGVLTGKGLNWGGSLIRPEATGYGLVYYTQAMIDYATNGKESFEGKRVTISGSGNVAQFAALKVIELGGTVVSLSDSKGCIISETGITSEQIADISSAKVNFKSLEQIVGEYSTFTENKVQYISGARPWTHVQKVDIALPCATQNEVSGDEAKALVAQGVKFVAEGSNMGSTPEAIAVFETARATASTLKESVWYGPPKAANLGGVAVSGLEMAQNSQRITWSSERVDQELKKIMVNCFNECIDSAKKYTKEGNALPSLVKGANIASFIKVSDAMFDQGDVF

SEQ ID NO: 9853 - protein, 620 aa, Aspergillus oryzae
MASQAPADTPVASDAAVTQTLPDRTKNPADKDAPQGDVSKNAAKKAAKAAEFAAKKAEKAANKAAGKQEPKKPAAAKAPKKKIDGAALIGIDVSKEEDFPGWYQQVLTKGDMLDYYDVSGCFILKSFRADMTQPASYFIWEEIQDWFNARIKKIGVKNCSFPLFVSEDVLNREKDHIEGFAAEVAWVTHAYDSSRPSYIGSSPLEKKIAIRPTSETVMYPYYSKWIRSHRDLPLKLNQWNSVVRWEFKNPQPFLRTREFLWQEGHTAHLTKDGAHDEVMHILDLYAQIYEELLAVPVVKGQKTEKEKFAGGLYTTTVEGYIPATGRGIQGGTSHGLGQNFSKMFNITVEDPSTKPDEKKPPLHVWQNSWGLSTRTLGVMVMIHSDNRGLVLPPRVADTQTVIVPVGITAKTSDEEREKLYAEIDGLINILTGAGVRAISDKREGYSPGWKFNDWELRGVPLRIEFGPGESVGQFVTAARRDIPGKDGKSSIQISELSTAVPALLEQIQKDLYSRAEETFRTHRKLITNWDDFTPALNDKNICVIPHCLTEECEDQIKDMSARKAEEDSGVPEDAKAPSMGAKSLCIPFEQPEGIVAGETKCVNPKCTRLAEKWCMFGRSY

SEQ ID NO: 9854 - protein, 145 aa, Chlamydomonas reinhardtii
MMLSTRTAVPCSGRTAFGAVRPVCRPARASTVTRVANVTEASFDDEVLKASAGQPVLVDFWASWCGPCKLVAPLMDWAEKEYGGKLKVVKIEHDANPKLIAQYKVYGLPTLIVFKEGQELANSKREGAITKALLEQYLTKNGITK

SEQ ID NO: 9855 - protein, 517 aa, Streptococcus mutans UA159
MKFTELHLAEDILSAVAKVGFVEPSPIQELTIPLALEGKDVIGQAQTGTGKTAAFGLPTLNKIDVTNNVVQALVIAPTRELAVQSQEELFRFGREKKVKVRSVYGGSSIEKQIKALKSGAHIVVGTPGRLLDLIKRKALKLNHVETLILDEADEMLNMGFLEDIEAIISRVPETRQTLLFSATMPDAIKRIGVKFMKEPEHVKIAAKELTTDLVDQYYIRVKENEKFDTMTRLMDVEQPELSIVFGRTKRRVDELTRGLKLRGYRAEGIHGDLDQGKRLRVLRDFKNDNLDILVATDVAARGLDISGVTHVYNYDIPQDPESYVHRIGRTGRAGKHGQSITFVAPNEMGYLQIIEKLTKKRMKGMKPATAQEAFQASKKVALKKIERDFADEKIRSNFDKFTKDAEKLAAEFSPEELAQYILTLTVQDPEMLPKVEIAREKPLPFKFAGKGKGGNRRREDRRGGRDSRRNHRDGGRREFKRTSNKNRKDFENKSNKRPHRTSSEKKSGFTIRNKGDR

SEQ ID NO: 9856 - protein, 454 aa, Saccharomyces monacensis
MSEPEFQQAYDEVVSSLEDSTLFEQHPKYKKVLPIVSVPERIIQFRVTWENDKGEQEVAQGYRVQYNSAKGPYKGGLRFHPSVNLSILKFLGFEQIFKNSLTGLDMGGGKGGLCVDLKGRSNNEIRRICYAFMRELSRHIGQDTDVPAGDIGVGGREIGYLFGAYRSYKNSWEGVLTGKGLNWGGSLIRPEATGYGLVYYTQAMIDYATNGKESFEGKRVTISGSGNVAQFAALKVIELGGTVVSLSDSKGCIISETGITSEQIADISSAKVNFKSLEQIVGEYSTFTENKVQYISGARPWTHVQKVDIALPCATQNEVSGDEAKALVAQGVKFVAEGSNMGSTPEAIAVFETARATASTLKESVWYGPPKAANLGGVAVSGLEMAQNSQRITWSSERVDQELKKIMVNCFNECIDSAKKYTKEGNALPSLVKGANIASFIKVSDAMFDQGDVF

SEQ ID NO: 9857 - protein, 168 aa, Pyrobaculum aerophilum str. IM2
MFRNYGVKITPEQIARAYAPEQRMSWKKSVEVARFIKGMTLKQAKTWLEDVVKLKRPVPIKTFKKKQAHHATPWEGWPVAKWPVKVARRFLQVLENLENNARFRGLDVDRVVIVHAAAHKGFKIPNIMPRAFGRATRFDEQTVNVELVAVELPKEVLPKRYKLNLVKR

SEQ ID NO: 9858 - protein, 914 aa, delta proteobacterium MLMS-1
MGKSAEIVAREALERSEEKFRMLFDLFPDATVLIDLSTGLPVQFNRTAHTQLGYSAEEFAQLQIPDYEAQETPEETAAHIQTIMESGRDDFETQHRTKGGAILDIRVTVMKLEIGAKPHFLCVFRDISEQKQLQRTLQESRDRLEVAADSAQIGVWDYDVERDILVWDEWMYRIYNISADDFTGAYEAWSQALHPEDFSWVTALFSQALLDPKVQFNPVFRIIWPNGTIRTIKATSKVALNSSGKAIRVVGSNRDITEQHQAQEELKKSEAQLTIAKEQAEAASAAKSAFLANMSHEIRTPMNAIVGFSRLALQDELPPKPRDYLEKIDQSAHSLLKIINDILDFSKIEAGKLTMEEVPFDLSEVLDNVGQMMAMRTEEKGLELLFALGPEVPPNLIGDPLRLSQVLINLTNNAVKFTEQGEIVLQVSCPEPTADPVELQFAIKDSGIGMNEEQIARIFQPFTQADDSTTRSYGGTGLGLSIVRRLVESMGGEVEVSSTPGKGSTFSFNAIFPRDSQASPRCLLPPADIECFDHRPALRSGKRRTPSVNHADLLARLAGARVLVAEDHPLNREIAQELLTAVGIEVDMANNGREAVEMARQGAYQGVLMDIQMPVLDGYRATAAIRALPGGEELPIIAMTAHALEEERKKSLEAVMNDHVSKPVDAEVLYQTLARWLKRPEGNAGTAPGSGSPTAARRVNPAEIGNELFSQLPGINSGAALARLHGNTSLYGRLLTNFREDYRQNGVEELRRALTSNDYPTLERLAHTMKGNAATIGAEELAALAAQLEQKAKTTPASHTLESLINDIKAETERVTTAIDQTQHPGDTTDDLLAGTADSPPGSPPPDEEEITKLQDELALLLEQHDLGAIDHFAALQTAMASRAPTPLLNDLERQIQKLDFVTAAKTLNQMRRA

SEQ ID NO: 9859 - protein, 330 aa, Aspergillus oryzae
METSPTPQPPLRIGTRRSNLAMVQAEGIRNCLQKIAPDRSFEIEALRTLGDRDQLTALYNFGAKSLWTTELEEKLNAGELDVIVHCLKDMPTSLPDSCELAAIPPRDDPRDALIVKAGLPYTSLKSLPEGAVVGTSSVRRSAQLRRLYPHLRFANLRGNVETRLAKVDNSDSEYTCMVMSAAGLERVGLEHRISQYLGSKDGGILHAVGQGALGLEIRKGDRKMQELLGQLADQQSTLACLAERSLMRTLEGGCSAPIGVETEWISAGALSIHAIVVSLDGTKSVEDTIVSNVKTVEEATALGKELAARLVKAGAGEILNNINANRPPKN

SEQ ID NO: 9860 - protein, 496 aa, Nicotiana tabacum
MVLSKTASESDVSIHSTFASRYVRTSLPRFKMPENSIPKEAAYQIINDELMLDGNPRLNLASFVTTWMEPECNKLMMDSINKNYVDMDEYPVTTELQNRCVNMIAHLFNAPLGDGETAVGVGTVGSSEAIMLAGLAFKRKWQNKMKAQGKPCDKPNIVTGANVQVCWEKFARYFEVELKEVKLSDGYYVMDPEKAVEMVDENTICVAAILGSTLNGEFEDVKRLNDLLIEKNKETGWDTPIHVDAASGEFIAPFLYPELEWDFRLPLVKSINVSGHKYGLVYAGIGWAIWRNKEDLPDELIFHINYLGADQPTFTLNFSKGSSQVIAQYYQLIRLGFEGYKNVMENCQENARVLREGLEKSGRFNIISKEIGVPLVAFSLKDNSQHNEFEISETLRRFGWIIPAYTMPPNAQHVTVLRVVIREDFSRTLAERLVIDIEKVLHELDTLPARVNAKLAVAEANGSGVHKKTDREVQLEITTAWKKFVADKKKKTNGVC

SEQ ID NO: 9861 - protein, 987 aa, Ashbya gossypii ATCC 10895
MSVETAYGVAFRSLATTDERLYKATVQFYKRLSFATVKLYDKFKNHGDEMLLSGTSQSSRHETWLMSFKLSEVDSSGCRVPQQEAERKLQSDGAMIKVRLVNEVAAADCGALRVSYYSGSFAEAAAAFPDREEVSEHEFRIRDPLGNEIALTDTPHLHDAVLGEQAVGADFFLSGSGETHRLAQGRETAAALMRSLRETPGAPDSKPKKKLAVMTSGGDSPGMNAAVRAVVRAGIYYGCDVFAVYEGYEGLLKGGEYLKHMQWSDVRGWLSEGGTLIGTARCMEFRERKGRKQAAANLIEQGIDALVVCGGDGSLTGADLFRSEWPSLVEELVSDGRFTAQQVHPYRNLTIVGLVGSIDNDMSGTDSTIGAYSALERICEMVDYIDATAKSHSRAFVVEVMGRHCGWLALMAGIATAADYIFIPERAAPQNKWQDEMKEVCRRHKAKGRRNITVIVAEGALDTELNPITAEQVKTALVELGLDTRITTLGHVQRGGTAVAHDRWLATMQGVDAVKAVLEMTPDTPSPLIGILEEKIIRIPLMESVKLTKQVAAAIQEKDFDKAISLRDTEFIELYESFISTTIKDSTAVPESGPLRVAIVHVGAPSAALNAATRAASLYCLANGHKPFAIINGFSGLIQTGEVRELSWIDVEDWHNLGGSEIGTNRCAAADDMGAVAYHFQKNEFDGLIIIGGFEGFKSLQQLYSARSQYPVFNIPMVMIPSTVSNNVPGTEYSLGTDTCLNALVNYTDAIKQSASATRRRVFVVEVQGGHSGYVASFTGLVTGAVSVYTPEKKIDLHSIQEDLALLKENFRHDQGENRNGKLLIRNEQASSIYTTELIADIIAEQSNGRFGVRTAVPGHVQQGGVPSSKDRVAACRFAVKSVKFLESWNEKAKQAASHDDRQLGFRYVKGVKTPMLPNNDASAAVICVNGSTVSFKPVNDLWQNETDVELRKGHDIHWSEFTKVGDILSGRCNLRKEVDAMRAASA

SEQ ID NO: 9862 - protein, 673 aa, Zea mays
METRDTDATPLPYSYTPLPAADAASAEVSGTGRTRSRRRPLCAAALVLSAALLLAVAALVGVGSRPGAVGMTESAASSPTPSRSRGPEAGVSEKTSGASDDGGRLRGAGGNAFPWSNAMLQWQRTGFHFQPQKNWMNDPNGPVYYKGWYHLFYQYNPDGAIWGNKIAWGHAVSRDLIHWRHLPLAMVPDQWYDTNGVWTGSATTLPDGRLAMLYTGSTNASVQVQCLAVPADDADPLLTNWTKYEGNPVLYPPPGIGPKDFRDPTTAWIDPSDGAWRVVIGSKDDDGHAGIAVVYRTTDLVHFELLPGLLHRVDGTGMWECIDFYPVATRGRASANGVDMSDAIASNGAVAGDVLHVMKASMDDDRHDYYALGRYDAAANAWTPIDAGRDVGIGLRYDWGKFYASKTFYDPAKRRRVLWGWVGETDSERADVSKGWASLQGIPRTVLLDTKTGSNLLQWPVEEVETLRTNSTDLSGITIDYGSVFPLNLRRATQLDIEAEFQLDRRAVMSLNEADVGYNCSTSGGAAGRGALGPFGLLVLADRRLRREQTAVYFYVAKGLDGSLATHFCQDESRSSSATDIVKRVVGSAVPVLEDEATLSLRVLVDHSIVESFAQGGRSTATSRVYPTEAIYANAGVFLFNNATAARVTATKLVVHEMDSSYNHDYMAPVADI

SEQ ID NO: 9863 - protein, 355 aa, Silicibacter sp. TM1040
MPRNSERTVWTDAEMLECVSIIPEMDNTASFTFKAPSGALFEYDAGQFMTLEIPVPGGPLHRTYTISSSPSRPRTITITAKAQADSIGTRWMLDNLRPGSRIKALGPAGLFTNAGSMAKKFLFISAGSGITPMMSMTTNMWDDGDNLDIVFVNCAKRPSEIIFRQRLEQMASRSEGLDLKFVVEEPDPYRPWTGYQGMFNQLMLGLMAPDYLEREVYCCGPEPFMQAVRDALAGLGFDMDNYHQESFHAPVETSAEQPDFDDVVPDDDTKAEVTFAASGVTAKVAETDTILAAARANGLNIPSGCTFGVCGTCKVKKTSGEVHMVHNGGISDDDIDAGYILACCSNPIGKVAVDI

SEQ ID NO: 9864 - protein, 423 aa, Oryza sativa (japonica cultivar-group)
MDKLNGSARLMIVSDLDHTMVDHHDEENLSLLRFGALWESVYCQDSLLVFSTGRSPTLYMELRKEKPMLTPDITIMSVGTEITYGEEMVPDDGWVEYLNNKWDRNIVVEETANVSELKLQVESEQRPHKVSFYVDKKSAQEVIKSLSEKLEKRGLDVKIIYSGGQDLDVLPQGAGKGQALAYLLKKLSSCGKPPNNTLACGDSGNDAELFSIPGVHGVMVSNAQEELLQWYSENAKDNPKIIHATERCAAGIIQAIGHFKLGPNVSPRDVDFPYVKENPVKPTDAVVKFYVLYEKWRRAEVPKSDSVTQYFKNITHANGVIIHPAGLECSLHASIDALGSCYGDKQGKKYRAWVDRLVVSQCGSEGWLVRFNLWELEGDVWSCCLTSLALNAKPETPEGFVVTHIHKTWLKGYSSADEQSSKL

SEQ ID NO: 9865 - protein, 120 aa, Zea mays subsp. parviglumis
MARMQQLAVATTAVVALVLLAAATSEAAISCGQVASAIAPCISYARGQGSGPSAGCCSGVKSLNNAARTTADRRAACNCLKNAAAGVSGLNAGNAASIPSKCGVSIPYTISTSTDCSRVN

SEQ ID NO: 9866 - protein, 512 aa, Geobacter sulfurreducens PCA
MAEQKTIKIFDTTLRDGEQSPGNSMNIEEKLRVAKQLQKLNVDVIEAGFPIASEGDFEAVMRVAQTIKGPEIAGLCRANDKDIDRAWEALKYAGEKGRIHTFIATSDIHMKHKLKMSPSQVMDAAVKAVKRAKSYTPNVEFSCEDAVRTNLKFMAEVVEAVIDAGVTTVNIPDTVGYTIPFEYFNIIKYLKENVPNIEKAVISVHCHNDLGLAVANSIAAVQAGAGQVECTINGIGERAGNCSLEEFVMAIRTRHDILPFKTNVATDQIVPASRLLSTITGIGVQPNKAVVGANAFAHESGIHQHGVLMEKSTYEIMTPESVGLRANVLVLGKHSGRHAFKKRLTELGYELSDEDLNKAFERFKALADMKKEVFDEDLDAIVADEVMRPSEKYRLAHITVTCGSFAVATATVQMEIDGVAVRTAELGDGPVDATLKAIKKLTKTKARLQQYNVGSITGGTDAQGEVTVRLVDGDETVVGRGSSTDIIEASAKAYINALNRLHFRKERAPESL

SEQ ID NO: 9867 - protein, 492 aa, Prochlorococcus marinus str. MIT 9313
MTTAPLPRSRRRTVRLQEASLLEGPMLLLRSIRGFSSNRSLTWLACVPLALFGLGLFNLSAHAAEMPELNAAFLANNLWLLVATILVIFMNAGFAMVEAGMCRQKNAVNILAKNLFVFALAVSSYWFIGYSLMYGDPVSAGWLYFNGLFFDPAVTPELISEAGLVPSVDFLFQAAFAGTAATIVSGLVAERVKFGEFVVFSLVLTGFIYPIAGSWEWNGGWLNTAFGEGVEFIDFAGSSIVHSVGAWAGLVGAMLLGPRIGKFVGGKAQAIPGHNMSIATLGALILWIGWYGFNPGSQLAMDQWVPYVAVTTTLAAAGGAIGATIISTLCSGKPDLTMIINGILAGLVSITAGCGNLTLVGAWVAGLIGGFIVVFSVSALDSLGIDDPVGAFSVHGICGIWGTLVIGLWGFDIQGDGSALGLFVGGGASQLWAQFVGCAAYAIWTVVTCWIAWSVIGALFGGIRVTEAEEIEGLDIGEHGMEAYPDFASAGN

SEQ ID NO: 9868 - protein, 425 aa, Nicotiana tabacum
MDQLTSAARLMIVSDLDHTMVDHHDPENLSLLRFNALWEANYRENSLLVFSTGRSPTLYKELRKEKPMLTPDITIMSVGTEITYGNSMEPDDGWEAFLNDKWDRKIVTEETSKFPELTLQSETEQRPHKVSFYVQKDKAQDITGTLSKRLEERGLDVKIIYSGGMDLDILPQGAGKGRALAYLLKKLKSEGKLPNNTLACGDSGNDAELFSIPDVYGVMVANAQEELLQWRAANAKDSPKVIHATERCAAGIIQAIGHFNLGPNTSPRDVTDMSDCKMENFVPAYEVVKFYLFFEKWRRGEIENSDLHLSNLKAVCRPSGTFVHPSGVEKYLEDCINTLRTCHGDKQGKQFRIWVDLVLPTQVGSDSWLVSFKKWELCGEERQCCITTVLLSSKNVTVADGLTWTHVHQTWLQGAAASDSASWFF

SEQ ID NO: 9869 - protein, 499 aa, Mycoplasma pneumoniae M129
MSSPKKNFKKPQPKTENQKQALNEERIAELKKSRILGKNRPFKKMIYVDTKAQRKQKHENVAFLKTLQENKESDVPKKRRGRKPKHAPLKEKNNLKLFDILEGSLKSHTENDDTNKVISLLVEVWEKKNKKKDNNSLSNKDIVNVLSKFELPDDEIIFVLDELRDKGIELPHDVEEHIHEFRANQDLSIIDEDIEELTTKNISNRDKVDDNVRFFLGSLDSSKMLDFESEQRIAKVLNSTDEESRKYAINQLVTSNLRLVVSIAKKHLERGLDFNDLIQEGNLGLLKAISKFNWSLGNKFSTYATWWIKQAITRAIADQARTVRIPVHMVETINRLAKAERALNQELGREPTAEELAEKMGGQAEGFTVKKIAEIKRLSLDPVSLDKTVGHDEESQFGDFVRDTDAQMPDEFTESRSNYEKIDELLNNCLSEQEELIVRMRIGMPPYNETKTLDEVSQKIKIPREKIRQIETKAIRKLRQAVRNNHMSLSFMRGNEKKD

SEQ ID NO: 9870 - protein, 120 aa, Zea mays subsp. parviglumis
MARTQQLAVVATAVVALVLLVAATSEAAISCGQVASAIAPCISYARGQGSGPSAGCCSGVRSLNNAARTTADRRAACNCLKNAAAGVSGLNAGNAASIPSKCGVSIPYTISTSTDCSRVN

SEQ ID NO: 9871 - protein, 425 aa, Nicotiana tabacum
MDQLTSAARLMIVSDLDHTMVDHHDAENLSLLRFNALWEANYRDNSLLVFSTGRSPTLYKELRKEKPMLTPDITIMSVGTEITYGNSVVPDDGWEAFLNNKWDRKIVTEETSKFPELTLQSETEQRPHKVSFYVQKDKAQDIMKTLSKRFEERGLDVKIIYSGGMDLDILPQGAGKGQALAYLLKKLKSEGKLPNNTLACGDSGNDAELFSIPDVYGVMVANAQEELLQWHAANAKNNPKVIHATERCAAGIIQAIGHSNLGPSTSPRDVMDLSDCKMENFVPAYEVVKFYLFFEKWRRGEIEHSEHYLSNLKAVCRPSGTFVHPSGVEKSLQECVTLFGTCHGDKQGKQFRIWVDQVLPVQVGSDSWLVSFKKWELSGEDRRCCITTVLLSSKNKTVADGLTWTHVHQTWLNGAAASDSASWFF

SEQ ID NO: 9872 - protein, 349 aa, Triticum aestivum
  misc_feature (297)..(297): Xaa can be any naturally occurring amino acid
  misc_feature (303)..(303): Xaa can be any naturally occurring amino acid
MEARDGGSAPLPCSYAPLPEDAEAAATVGRVRRTAGLLCAALLLATVAVLLVVAALAGVRLAGQLPAGGIVVMSGHQTTVDTAPMSASSRGPESGVSEKTSGAGARGGMLRADAGGNAFPWSNAMLQWQRTGFHFQPEKNWMNDPNGPVYYKGWYHLFYQYNPDGAIWGNKIAWGHAASRDLLRWRHLPVAMSPDQWYDINGVWSGSATVLPDGRIVMLYTGSTNASVQVQCLAFPTDPSDPLLINWTKYENNPVMYPPPGVGDKDFRDPTTAWFDGSDDTWRLVIGSKDDHHAGMXNTYKTXFIDYELSLAALRVQGGVWSGSLVPVGGWGHHLGRWPGFTTRGDFAL

SEQ ID NO: 9873 - protein, 110 aa, Zea mays subsp. parviglumis
ATAVVALVLLAAATSEAAISCGQVASAIAPCISYARGQGSGPSAGCCSGVKSLNNAARTTADRRAACNCLKNAAAGVSGLNAGNAASIPSKCGVSIPYTISTSTDCSRVN

SEQ ID NO: 9874 - protein, 545 aa, Azoarcus sp. EbN1
MTEPFTPPHRLSAWSTLENHAARLRTMRIAELFEHDAARFATLSFGHRGLLLDLSKQSIDAPALAALVDLAGQARLPDGIEALFAGEHLNFTEDRAVLHMALRGACAAPLEDAATLAQSQQRMRAFTVALRSGTMTGATGKPIRLVVNLGIGGSDLGPRMAAQALVPTGLRATPEVRFVANIDRRELDEALADADPASTLFVVSSKSFATAETLANAQAARAWLQAGLGAGCDPALHFTAVSNATDAAAAFGIPAERVFPLPEWVGGRYSVWSTIGLPLMIAIGASEFDAFLAGARAMDEHFRTAPPGENLPVLMGLAGLWNTDFLGIESLALLPYAHGLRSFAAWLQQLEMESNGKRCLRDGSGSVIHTSPIVWGGVGTVGQHAFHQLFYQGTRRVALDFIVPVAAADDVSQRSLVENAFAQSAALMSGRDLDTALASLRAKGLAESEAAVLAPHLVCPGNQPSTTVLLPALDAFSLGQLMALYEHKVFVQGWIWGINSFDQYGVELGKEMARSLSAGSGENHDASTAGLMAAAEAMRRTPDRS

SEQ ID NO: 9875 - protein, 505 aa, Bdellovibrio bacteriovorus HD100
MPQKSLSGYLNLGSVIFSYFHSGLDFKSPPCYLSVFHFFRGVPVSQNEFSTLPLSPELLTVVQELGFETLTPIQQESIPLLLAGKDIIGQAKTGSGKTAAFSLPILNKINLDQPLLQALILCPTRELASQVVTEIRKLGRRLPGLKVLAMTGGQSGREQADALENGVQIVVGTPGRLADFVGRNRIDLSAVKTVVLDEADKMLDMGFADEIKTVMRDLPGSRQTVLFSATFPESIEHLSRKYQRHAQQVIIEDEEQNLIEQLVYDSEDNDKTNVLMRILQQHPSDSTIIFCNTKNAVAEIAERLNDLGAASGCLHGDMEQRERDRVMAMFRNGSHRILVATDVAARGLDIDNLELVINFDLPLSPEIYVHRIGRTGRAGKTGVAVTIAHPKDTLKLGQFEELTGGKFARPSLGFKNQYGLNKTLKEAPMKTISISGGRKDKLRPGDILGALTGAAGGLTSADVGKIEIQDKISFVAVSAKVADGAMQKLRDGRIKGQKFQVKFVK

SEQ ID NO: 9876 - protein, 227 aa, Chromobacterium violaceum ATCC 12472
MRTFRIAPSILSADFARLGQEVKDVVAAGADIIHFDVMDNHYVPNLTMGPMFCEAIRPHSSAPIDVHLMVKPVDALAAAFAKAGADIITFHPEGSEHIDRTLGLIKDAGCKAGLVFNPATPLSYLDHVMDKLDMILIMSVNPGFGGQSFIPHALEKIKLARRRIDEYTAKHGGEIWLEVDGGVKVDNIAQVAAAGADTFVAGSAIYGQKDYKAVIDAMRAELARVQA

SEQ ID NO: 9877 - protein, 194 aa, Oryza sativa
  misc_feature (107)..(107): Xaa can be any naturally occurring amino acid
  misc_feature (134)..(134): Xaa can be any naturally occurring amino acid
  misc_feature (168)..(168): Xaa can be any naturally occurring amino acid
MLVRNLNDVKYDNQSSVFLLRNKDFKYQYAPLYAERLTRMRKQVVDAAKKKWPQAAIKNLAELAPNEKCIIIGTLFKDMKNKPNILKELAESDDSVPIQPVLNRDAXYIDLETDQLLLEDELQRIVLIDAPNSXVNIIAANRLCTGMIIGLLGSENEKSEFEIEDYCXQRIDFQYAPSTKLPRQIKSSRNDYIV

SEQ ID NO: 9878 - protein, 607 aa, Oceanicola granulosus HTCC2516
MFQSFDATSRPEQGPPRLAALREVMAADGLDGFLVPRADAHQGENVAPCDERLAWLTGFTGSAGFAAVLADEAGLFVDGRYRLQVREQAADVFTPVDRYEVQLGDWLAERLSLDARVGFDPWLHTVGQVAALRERLDEAGILLAPCDNLVDRLWDDRPPPPDRPFRAHDTALAGESAADKRARLAAELREAGQRAALLTLPDSIAWLLNIRGADVARTPVPRAFALLRDDGSVELFCGPGQADPVADHLGPDVAVLPRDGLRAALSETEGPVRLDPASAPQVLADTLAEADVEVVHGDDPCLLPKARKTDAELAGMREAHLRDGAAMCRFLAWLDATAPDGGLTEIAVVTALESFRRETNALQDISFETICGAGPNGAIVHYRVTEATDRPVQPGELLLVDSGGQYLDGTTDITRTVIVGTPEPEQRACFTRVLQGMIAVSRARFPKGVAGAHLDVLARTPLWLAGLDYDHGTGHGVGAYLGVHEGPQALSRRSGVPLEPGMILSNEPGYYRADAFGIRIENLLAVREAPPIEGGDARVMYDFETLTWVPIDRRLIDGALLSRPERDWIDAYHAATFTRIAPRLEGAALAWLEQACAPLPRPGGTDS

SEQ ID NO: 9879 - protein, 503 aa, Arabidopsis thaliana
MASLLLTSSSMITTSCRSMVLRSGLPIGSSFPSLRLTRPYDKATLFVSCCSAESKKVATSATDLKPIMERRPEYIPNKLPHKNYVRVLDTTLRDGEQSPGAALTPPQKLEIARQLAKLRVDIMEVGFPVSSEEEFEAIKTIAKTVGNEVDEETGYAPVICGIARCKKRDIEATWEALKYAKRPRVMLFTSTSEIHMKYKLKKTKEEVIEMAVNSVKYAKSLGFKDIQFGCEDGGRTEKDFLCKILGESIKAGATTVGFADTVGINMPQEFGELVAYVIENTPGADDIVFAIHCHNDLGVATANTISGICAGARQVEVTINGIGERSGNAPLEEVVMALKCRGESLMDGVYTKIDSRQIMATSKMVQEHTGMYVQPHKPIVGDNCFVHESGIHQDGILKNRSTYEILSPEDVGIVKSENSGIVLGKLSDVHAVKDRLKELGYEISDEKFNDIFSRYRELTKDKKRITDADLKALVVNGAEISSEKLNSKGINDLMSSPQISAVV

SEQ ID NO: 9880 - protein, 639 aa, Debaryomyces hansenii CBS767
MSMSEGTEQPQLVPETNTPVQTPSSDNFFQGDKGASQLEQQKKNVEPEKPLSPPNPSPSPEKHRMDEEPEQEPAEKRPKLDEKRHQDEQDDQSEKFDQGEQAEHGEQSEQPEQQQQQQKGLPVFTDPAPKPAPEPDMNNLPANPMPKHQAKFAINVIKAVKRLRDAGPFVHPVDIVKLNIPFYYNYIPRPMDLSTIERKINANAYEEPSRIVEDFNLMVANCCKFNGEQSGISKMAKNVQAHFEKHMLNMPPKVLPNNGATVPANSRRRAVVADSGDKKNSVAAHRPKRTIHPPKSKELPYDVRPRKKKYAAELRFCNQTVKELISKKHYNYNFPFLAPVDTVALNIPNYAEVVKEPMDLGTIQTKLANNQYENGDEFERDVRLVFKNCYAFNPEGTDVNMMGHRLESIFDKKWVNRPVPQPTPANSDLDDSSDEDDDEPEINESMLSSVPAIQFLENQLIRMKQELDELKKQHLDKLREQRDAKRKRKRSKKSKSRKNSSVEHPNQPTVTYEMKKQVSEMVPNLTDKKLQSLVKIIKDDVDLSNEEEVELDMDQLEDRTVLKLYNFLFGKKASSSLLNKKKKKLSAGAGLDQLEQLRSQLQLFEDADRPSSNNGMMNIGNDQESSDDDDVSSESSEEE

SEQ ID NO: 9881 - protein, 419 aa, Thermus thermophilus
MPLKAYRPPEDPGLWDTYLEWLERALKVAGVHPTTLEYLAHPKRLVTLSLPVVMDDGKVRIFQGYRVVHDIARGPAKGGVRLDPGVTLGQTAGLAAWMTLKAAVYDLPFGGAAGGIAVDPKGLSPRELERLVRRYTAELVGLIGPDSDILGPDLGADQQVMAWIMDTYSMTVGSTVPGVVTGKPHALGGSEGRDDAAGLGALLVLEALAKRRGLDLRGARVVVQGLGQVGAAVALHAERLGMRVVAVATSMGGMYAPEGLDVAEVLSAYEATGSLPRLDLAPEEVFGLEAEVLVLAAREGALDGDRARQVQAQAVVEVANFGLTPEAEAYLLGKGALVVPDLLSGGGGLLASYLEWVQDLNMFFWSPEEVRERFETRVARVVDAVCRRAERDGLDLRMGALALALERLDEATRLRGVYP

SEQ ID NO: 9882 - protein, 498 aa, Coxiella burnetii RSA 493
MKKIYHYINGKFVDAKGETYQEVYNPATGEVSAQVAFGTAEEVEEAVESARNAFASWSSVTPLRRARVIFKFKALLDKNIDKLAELLTSEHGKILEDAKGEVLRAIELTEFSCGTPYLLKGSYSENVGTDVDSYTIRQPLGVCVGITPFNFPVMISAWMFVSAIACGNTFVLKPSEKDPSAALFLAELMQEAGLPAGVLNIINGNGATVDRLITHPKVAAVSAVGSTAAAEHIYQTAIAHGKRAHTFGGAKNHCVITPDADIDEAADAILGAAYGAAGERCMAVSVVVAITDTVGDALVQRLKEKIPQLQIAAGTESRADFGPLVTKEHLEKVKAYIHLGVEEGAELIVDGRDLETLKHKKGFFLGGCLFDHVKPSMRIYQEEIFGPVLCVTRVSNFEEALALINKNEYGNGVAIFTKSGEMARYFASKVSVGMVGINVPIPVPVAYHTFGGWKRSIFGDIHMHGAENVHFYTKQKTVTVRCWPREKTTESAYHMQSH

SEQ ID NO: 9883 - protein, 547 aa, Oceanicola granulosus HTCC2516
MPGHEELKPRITVFGVGGAGGNAVNNMIEKQLDGVEFVVANTDAQALAQSRSSAKIQMGVKVTEGLGAGARATVGAAAAEESIEQIVDHLAGAHMCFITAGMGGGTGTGAAPIIAQAARELGVLTVGVVTKPFQFEGGKRMKQAEDGVEALQKVVDTLIIIPNQNLFRLANENTTFTEAFALADDVLYQGVKGVTDLMVRPGLINLDFADVRAVMDEMGKAMMGTGEAEGDNRAIQAAEKAIANPLLDEISLHGAKGVLINITGGYDLTLFELDEAANQIREKVDGEANIIVGSTLDTEMEGRMRVSVVATGIDAAEKTDDVPLPRRSMSAPLRQQVSAETQAEPAPAPQPRPAAPAPQARAAAPAPAPRPAPPAPQPAPQPEAYAQQQEPGLFDDDGHQGHGHDENVFDDEDTGALPPPAYRPRPTPSVEAEPEAFVAPRATGGSKPSPEAMSRLQAAVARAPGSRPAAPSAERRAEEEEEKPRFGLNSLINRMTGHAEQPQQQQAAAAPQQRRPQVTPIHQEPENEADPEQERIEIPAFLRRQAN

SEQ ID NO: 9884 - protein, 572 aa, Oryza sativa (japonica cultivar-group)
MGKASKKSVAVAVAPAAVPAKGKGGKKREAEDEIEKAVSAKKQKAAAAPPAKAVPAPKADAKKAKKQPPPKKAASSSSGSSSEEDSSESEEEVKVQVKKTTKPVKQESSSDESSDESSDDEDAKPADPVANNGLKKGKPASSDSESDSDDEMDEDEKPAAPVKKTSVTAQKKKDDSDSSESESDESDSDEDVPTKSKAPAVAAKNDDSTDGSESESDSEDEDAAPKGAAKKESSSDEEDDSSEESSDDEPKQPQQKKAQEESSEESSEEDSDEEDEKLAKTPKKKTPAATKSQNDEPKTPASNQSQGTESATLFMGNLSFNLNQDQVKEFFQEVGEVISVRLATHEDGSSRGFGHVQFASSEEAKKALELHGCDLDGRPVRLDLAHERGAYTPHSRNDTGSFQKQNRGSSQSIFVKGFDSSLEESKIRESLEGHFADCGEITRVSVPMDRETGASKGIAYIDFKDQASFSKALELSGSDLGGYNLYVDEAKPKGDSRDGGGRRGGRSGDRFGGRSGDRFGGRSGGRFGGRDGGRRGGRGGRDGGRRGGRGGFQSRQSAGTASTGKKTTFGDE

SEQ ID NO: 9885 - protein, 578 aa, Ashbya gossypii ATCC 10895
MPYYSDPSAKYKPFVNSVKLTNRQWPSRTIEKAPRWLATDLRDGNQSLPDPMSFDEKKLMLNKLVEMGYKEIEVAFPSASNIDFEFTQYAVKAVPDDVYVQVLSPCREELISRTIESLRGARNAIVHIYLATSACFRNVVFGKMTEEESIKKAAACTALVRKLTKDDPSQQGTNWMFEFSPETFSDTEPEFVIKICEAVKEAWGPSKDVPIIFNLPATVEVATPNIFADQVEYFATHISEREKVCISLHPHNDRGCAVAAAELAQMAGADRVEGCLFGNGERTGNVDLVTLGLNLYTQGVSPNIDFSDMSSIIDVVEKCNKISVHPRAPYGGQLVVCAFSGSHQDAIKKGFSQYEKDLVTAQEKHGPEAVVPWKVPYLPLDPGDIGRTYEAIIRVNSQSGKGGASWIILKNMGLDLPRGLQVDFSRVVQRETENLQRELKCQELIDLFAGEYFLSTPCDSQIRLVDYDFSRHQGVCSLKVQISVNNETRDMEGTGNGPISCFVNAVNSAVGANLNVNDYHEHSLGNRSNSQAATYISLESDQALQWGVGIHEDVTEASFLCLISCINGLRRSGSFSFF

SEQ ID NO: 9886 - protein, 425 aa, Acidobacteria bacterium Ellin345
MASALRNVRKEVLPNGLTVLTEEMDHIRSVSIGIWVKNGSRHEDPQVNGISHFIEHMVFKGTTTRNAEAIAREVDSIGGNMDAFTGKEMVCFNVKILDEHVPVAMDVLSDMVLNPVFDGAEIDREKGVIQEEIKMDEDNPDYLVHEIFTQNFYKDHPLGKPILGTKETVKGFDRDIVLGNYGRKFAPGNLIVAAAGNINHKSFVDEVRRRFEHLKPSLNGFHQEPPKTHARIIMRNKKSLEQVQICLGVPAYSISDKRRYVCYILNTLLGGGMSSRLFQDIREKQGLVYSIFSELNPFQDSGSLAVYAGTSRESAPKVVTQVVKEFGNFKREMVSVEELQRAKAQLKGSLMLGLESSTARMSNLARQEMYYDHFHTMDEIIAKIEVVTREEVCEMANEIFRAEDIAVTVLGNMNGVKISRDQLAC

SEQ ID NO: 9887 - protein, 568 aa, Clarkia gracilis
MASPALISETEAWKDLKAHLEGIKRTHLRELMGDTERCQSMMVEFDNIFLDYSRQQASPDTINKLYNLADAAHLKQKIDRMYNGDHINITENRSVLHVALRAPRNSAICSDGKNVVPDVWNVLDKIKDFSDRVRNGSWIGATGKELKDVIAVGIGGSFLGPLFVHTALQTDPEASKNARGRELRFLANVDPIDVARNISGLNPETTLVVVVSKTFTTAETMLNARTLREWISSALGPSAVAKHMVAVSTNLPLVEKFGIDTINAFAFWDWVGGRYSVCSAVGVLPLSLQYGFAVVEKFLQGAHSIDQHFSSAPFEKNIPVLLGLLSVWNVSFLGYPARAILPYSQALEKLAPHIQQVSMESNGKGVSIDGLPLPFESGEIDFGEPGTNGQHSFYQLIHQGRVIPCDFIGVVKSQQPVYLKGEVVNNHDELMSNFFAQPDALAYGKTPEQLKKENVSEHLIPHKTFTGNRPSLSILLPTLDAYRIGQLLAIYEHRVAVQGFVWGINSFDQWGVELGKSLATQVRKQLHASRVKGEPVEGFNFSTKTLLTRYLEATSDVPADPSTLLPNI

SEQ ID NO: 9888 - protein, 377 aa, Lilium hybrid division I
MENVKGPVVVTGASGYVGSWLVMKLLQYGYTVRATVRDPRDLRKTKPLLDLPGADERLTIWKADLSEDGSFDEAINGCTGVFHVATPMDFDSEDPENEVIKPTINGVIGIMKSCKKAGTVKRIIFTSSAGTVNVHEHQMPEYDESSWSDIDFIRRVKMTGWMYFVSKILAEKAAWDFAKENDIQFISIIPTLVVGPFITTTMPPSMLTALSLITGNEAHYSILKQIQLVHLDDVCNAHIFLFENPEAIGRYICSSYDTTIYDLARKIKDRYPQYAIPQKFEGIDDQIKPVHFSSKKLIDLGFKYQYTFEEMFDEGIRSCIEKNLIPRQTQERYYADDKLNLCCTKMTNDKLDLGGMKLNSLDEIVRGHNEQVSVALQ

SEQ ID NO: 9889 - protein, 1048 aa, delta proteobacterium MLMS-1
MLNKKITFKFLFIPPVLAAAVATLVIILLSLYLLKNEYAKQQTEVMQYYQQQEGTSTAALRRHQAGWEEFDRRYRQVMLSSIAGLALMLVVSFLVMRRFINPMYKIVAALRDLAYASGKPPDLEGIEQLQNDRILELTELANAVLSFHDALNDRHRVEKELRKLSLAVDQSPSGIIITDLDGNIEYANQAFLACTGYQKMEVLGRNPRFLKDESTLESHYQEMWNTIAAGHTWKGEFYNRRKDGREYIEANTVAPIKQADGSITNYLAIKDDVTDKMKMEVELLRHRDHLAELVEEQTVSIKAIVETAADGIITIDQQGKILSFNPAAEVIFGYPAGEMIGSKINRLMPEPHRSQHDQYLRNYLQSGTAKVINTQVEVMALRRDGSTFPLSLAVSAMEIGGEKRFTAIFRDISSQKEAEKALVTARQAAEAANRTKSDFLANMSHEIRTPMNAVIGLSHICLQTELTPKQRDYLEKVHNSAHSLLGILNDILDLSKIESGRLEVEEIPFNLEEVLDRLHTLVDARIAAKPLQFKLDLPPEVPVNLRGDPLRLGQVLTNLVGNAVKFTEEGEIAVTVAVVAEAEQEITLSFTVRDNGIGMTQEQCARLFQPFSQADTSTTRKYGGTGLGLSISRQLVELMGGEIRVESEAGKGSSFIFTLPLQKDAAISPALAAPLQTAQAAAKLSGAHLLLAEDDEVNRLVARELLARVGIRLTTVEDGAQALERLAREEFDGVLLDLQMPVMDGITAAGKIREQAKFKDLPIIAMTANAMTEDLKRCFQAGMNDHIGKPIEPDKMVATLGKWITPARPQPMPPESLSPLDKTGEPAASTPESPPPATTPGVEPPQLPGVRVKESIQRLNGNVELYYRILTRFRDDQAQVIDRLRQLLSHGDRQQAERLAHTLKGLAGTIGAITIETSAAKLEQQLAQGLDDDRETLLHSLDEELSPLFKAIDLALEQRRRQPAQAPGPTAPGPDREALAHLVNQARAQLEDFDSGAEETVTRIKAALGADKQTEESLARLNACLGRYDYEDGLQELQKLAQLIGLPW

SEQ ID NO: 9890 - protein, 432 aa, Triticum aestivum
  misc_feature (214)..(214): Xaa can be any naturally occurring amino acid
  misc_feature (332)..(332): Xaa can be any naturally occurring amino acid
  misc_feature (340)..(340): Xaa can be any naturally occurring amino acid
MGSLLSSLLGKPEPPPPMVLVPPLFDYPPIAARTRMAVPAYELMFGKLPLRSLFEDYFDNAGTISSRIMLKPLEDPHVDLVANVAAAGDKASGTEVKGDALFRWQKYLYDPHTFVDVQVSTSEPMLKLRSCAYFPEYRLGAFGTIPLLMGNRLSSEDYAVLGVRYGSENLSIGASFVPLPESAEVPYGAWLVGRKGSLCAGAQYKPLSGNTTRXEHPMPYTDPKNWNYAISDGVASTSPLSPSFNFSLELARNTQLIASFYQHLVVQRRIKNPFEDDQIVGITNYIDLGLELATGIDKSKPAESGTNSLFQLGASWPANQNFLLKGKLGPSXSSVALAFXSWWRPSFTFSVPAENDHSKGTTSYGFGIRVEDLRKPSYERADPNYVMMSTNKEHLAPAALREFGQRPMFQADVDSGNFDHLPPELRPMSKII

SEQ ID NO: 9891 - protein, 396 aa, Alkalilimnicola ehrlichei MLHE-1
MSKSKFERKKPHVNVGTIGHVDHGKTTLTAAMTVVLAEAFGGDARAFDQIDNAPEEKARGITIATAHVEYETSERHYAHVDCPGHADYVKNMITGAAQMDGAILVVSAADGPMPQTREHILLARQVGVPYIVVYLNKADMVDDEELLELVEMEVRELLSDYDFPGDDTPVITGSALKALEGDDSEIGKPSIIKLAEAMDEYIPTPERPVDQPFLMPIEDVFSISGRGTVVTGRVERGVIKTGEEVEIVGLKETQKTTCTGVEMFRKMLDQGEAGDNIGALLRGTKRDEVERGQVLCKPGSITPHTKFECEVYVLSKDEGGRHTPFFNGYRPQFYFRTTDVTGSCELPEGVEMVMPGDNVKMTVSLIAPIAMEDGLRFAVREGGRTVGAGVVSKIIE

SEQ ID NO: 9892 - protein, 1211 aa, delta proteobacterium MLMS-1
MAHYLKEQLYQEIRQSPELFDFIQEAALDGLWFWDLEQPEHEWMSPKFWQILGYDPSTKQHLSSEWQDIINQDDLKATTENLEKHLANPDHPFDQVVRYRHLKGHTVWVRCRGLAIRDKQGRPIRMLGAHNDITEYKQQQLALEEAQATLRQSEDKYRTLVENLPVLIYRSEVDAPWAMLHASQNAEQLCGYSSDEFLSGQLTWVDVIVAEDLPLVEAAVQHAIKAREKYTVEYRIRHQKGHVIWVSETGSAQDYDQNGHPAYLDGVIADITDRVQAQKEISAQEAKFRGLFELSPVGIAMNDFATGEFLEFNAAVNEPAGYTPEEFKQLSYFDVTPMEYMEDEKRQLESMEKIGRYGPFEKEYIRKDGSRYPVLLNGFKTTTPEGKTVIWSIIQDISEIKKAQEAAEAANRSKSEFLANMSHEIRTPMNAIIGLGQLALKSQPPPPPRLYDYLEKITGSAATLLTLINDILDFSKIEAGKLAIDQVPFDLSEILNQLDHLMAGQAAEKGLELLFAVDPTVPRLLVGDPHRLGQVLINLTANAIKFTETGEVTISFEVVDPTAEPLTLRVAVRDTGIGMSPEQIERIFQPFTQADGATTRKHGGTGLGLSIAGRLVKLLGGEIRVESTPGAGSTFSFTCLLGRHEPHKALCPLPPVDLRGLRVLVVDDNATARQVLRQTLASFSFRVEEADSGRRALSLLARAAEEGQPYELVILDWVMPEFDGLECAAAIAADPLIEPQPLLILLTAHGREEIREEAAGRGLRHFLTKPVLPSTLYDTIMECFGQEGISRESDPGQRSDELESAAREKLAGSRLLVAEDNALNQQVAAELLAVVGIHCDLANNGREAVEQYRRQTYDGVLMDIQMPEMDGYQATGAIRALPVGQQVPIIAMTAHALAGEREKCLAAGMDEHIPKPVEANLLYRTLLRLLPPRTATATGNETATGTTTRAETKAGSLIATEAEPPAASPAPNTANTPTPYPSSSIKAEAAVDNTSWPPLPGIDSRPALLRLNRNFGLYSRLLHEFHEQYRQGDGFQQMAATLAAGDLPRLVLLAHSLKGAATTIGAEKLAELAADLERQAKARADRQTLEELLAAIKQQAEPTLAALDKLPGGNPMTAASAPATEDVPKAPKISGTDSPDSPASVPTDLIALKDNLAQLLAAHDLGALEQFTALRRALGSQATDPRWLELERMVKKLDFAKAAALLAKLKL

SEQ ID NO: 9893 - protein, 520 aa, Mesorhizobium loti MAFF303099
MTGIALSPIGALWGIVGAKTHGTVEMGAALTHRGCYMAMEEGPTFSFGARHSAEIWPISVDDDIAVVYSGFPFVVDEETRTPRYLSAEDIRTEFLRFGADFFRVLCGHYAIAVYCYTRHRLILVRDAFGVQSLSWASSNENFAFSTEYKALLSLPWVERNLDHDAARGFVDDGWAPAGRTFLRHISMVLPGSILIWQNGNLETIHLRQDLCKTRPPFRPISVRHVEMTVRETIGWQANDFSPRYGVMLSSGVDSAVIAATLRRIRRDSEIHTFTVGYGYDDPEIIGASATASVLGTQHHEIIVRPDALTALLTDTIVAVDNPGGYEEFPCLYALHQEARQFVDIIFSGNAADTLFAGMPYHRDLLSTDDAIYRRLCNDLTVRDERLAAQELLAGRHGLNFRMPYAERILIDLALEIPDFQKLSPENDKIIFREAARQILPDEITMRPKRIQHLLYDDSMCSWLAERIEWICSSSLLRTHSLGELEGAAILPPRNLELTEESFKAAWNVVALATWASIYLA

SEQ ID NO: 9894 - protein, 252 aa, Myxococcus xanthus
MEGAVATLTLNDTARRNVMTPELGDALCARVAELKGRDDVRAVVLTGAGGAFSAGGDLKMLERLRQVSFEDARAFMLGFYARYLSVLDLPVPVIAAVDGPAIGAGLCVALACDVCLVAEDSKLALNFVQLGLHPGMGATYLAPRRAGAQAAAELLLTGRRFDGKEAVKLGLALEAAPAGQVLTRARELAGRIAANAPLAMRALKQRLGLDRAELQRALEEEARFQAESYGSQDLGEGLAAAAARRAPVFQGR

SEQ ID NO: 9895 - protein, 119 aa, Zea mays subsp. parviglumis
MARMQQLAVTTAVVALVLLAAATSEAAISCGQVASAIAPCISYARGQGSGPSAGCCSGVRSLNNAARTTADRRAACNCLKNAAAGVSGLNAGNAASIPSKCGVSIPYTISTSTDCSRVN

SEQ ID NO: 9896 - protein, 375 aa, Capsicum annuum
MVDANMGAAGGQFPEFPNIVTHGGQYVQYDIFGNFFEITTKYRPPIMPIGRGAYGIVCSVFNAELNEMVAVKKIANAFDNYMDAKRTLREIKLLRHLDHENVIGLRDVIPPPLRREFSDVYIATELMDTDLHQIIRSNQGLSEDHCQYFMYQLLRGLKYIHSANVIHRDLKPSNLLLNANCDLKICDFGLARPNLENENMTEYVVTRWYRAPELLLNSSDYTEAIDVWSVGCIFMELMNRKPLFAGKDHVHQIRLLTELLGTPTESDLSFLRNEDAKRYIRQLPQHPRQQLAKVFPHVNSLAIELVDKMLTLNPTGRITVEEALAHPYLAKLHDAADEPVCPVPFSFDFEQQGIGEEQIKDMIYQEALVLNPEYA

SEQ ID NO: 9897 - protein, 120 aa, Zea mays subsp. parviglumis
MARMQQLAVATATVVALVLLAAATSEAAISCGQVASAIAPCISYARGQGSGPSAGCCSGVRSLNNAARTTADRRAACNCLKNAAAGVSGLNAGNAASIPSKCGVSIPYTISTSTDCSRVN

SEQ ID NO: 9898 - protein, 391 aa, Arabidopsis thaliana
MTMMFDLTQDLVKEILSRVPITSLGAVRSTCKGWNALSKDRILCKAKPKQQFHQGFMLSDYRLRSMRFNISGTFKENGEEFVNLSVKEIGNFLNKVEISHMYYCGGILLCVTTDTRLVIWNPYLGQIRWIQLKTETMYSTFCLRYDNNKNHKILRFLDNKQGSYEIYDLKSYSWRAFDVIPKWDIDDDGQSASVKGNTYFRTIDETPNLLICFDFTAERFGKLLDPPFQHGWMSLSWVREEKLVALYQHLDTSMIEIWITTKIEPNALSWTSFLKCYIEQLIALDFWFDIDYNNFFIDEEKKLAVVIDKVESEDCKRSNSHINSYIIGDDGYLKKMNSLGNTARSYTAIMLSSCYVSSLVQIDDPIARRRRRERNSKRKEKKRKGTTNNKV

SEQ ID NO: 9899 - protein, 116 aa, Bdellovibrio bacteriovorus HD100
MGKKIYVGNLSYSLDDQSLADTFAEFGNVESARIVIDRETGRSKGFAFVEMSTDDEAATAIAKLNGVELMGRAMNVSEAKPMAPRENRGGFGGGRGGGGGGNRGGGFGGGNRGGRF

SEQ ID NO: 9900 - protein, 394 aa, Capsicum annuum
MDGPAQQTDTVMAEAAAAQQPAPPSQPVAGIDNIPATLSHGGRFIQYNIFGNVFEVTAKYKPPIMPIGKGAYGIVCSALNSETNEHVATKKIANAFDNKIDAKRTLREIKLLRHMDHENIVAIRDIIPPPQREAFNDVYIAYELMDTDLHQIIRSNQGLSEEHCQYFLYQILRGLKYIHSANVLHRDLKPRNLLLNANCDLKICDFGLARVTSETDFMTEYVVTRWYRPPELLLNSSDYTAAIDVWSVGCIFMELMDRKPLFPGRDHVQQLRLLMELIGTPSEAEMEFLNENAKRYIRQLPLYRRQSFVEKFPHVNPAAIDLVEKMLTFDPRRRLTVEDALAHPYLTSLHDISDEPVCTTPFSFDFEQHALTEEQMKELIYREGLAFNPEYQHM

SEQ ID NO: 9901 - protein, 530 aa, Chlamydophila abortus
MDRKGFLDSPSTKILQDLAVAPVDLTTPGIISQERVERFSLSIGGFTLSYATERVDEGVVSALTDLASERGLVSSMQAMQSGEVVNYIDNFPSESRPALHTATRAWVKEIPLTGNAEDIALRSKIEAQRLKDFLHQYRDAFTTIVQIGIGGSELGPKALHRALKGCCPSDKKVYFVSNIDPDNAAEVLQEIDCSKTLVVTVSKSGTTLETAVNEEFIADHFLKQGLHFRDHFIAVTCEGSPMDDRSKYLEVFHIWDSIGGRYSSTSMVGGVVLGFAYGFDVFFQLLEGAAAMDLAALAPQMSENLPMLAAMLGIWNRNFLGYPTSVIVPYSAGLEYFPAHLQQCGMESNGKSIAQTGEIIGFATSPILWGEVGTNSQHSFFQCLHQGSDVIPIEFIGFLDNQRGRDIVISGSTSSQKLFANMVAQSIALAKGRENTNPNKSFRGNRPSSLLVAERLTPYTMGALLAFYEHKIVFQGFCWGINSFDQEGVTLGKDLANQVLGIMQGQAKEGACLEAEALLKLFNSTQKKKS

SEQ ID NO: 9902 - protein, 359 aa, Acinetobacter sp. ADP1
MSKQILILAGDGIGPEIVGAAEQVLTKVNEKFELGLTWEHGLLGGSAIDAHGEPYPAVTSEQAKKADAILLGAVGGPKWDTIERSIRPERGLLKIRSELNLFANLRPALLYPQLADASSLKPEIVAGLDILIVRELTGGIYFGQPRGIRELENGEKQGYNTDVYSESEIKRIAKVAFELAALRGSKVCSVDKANVLEVTELWKQTVTELQQAQYPNIQLSHMYVDNAAMQLVRAPKQFDVIVTGNLFGDILSDEAAMLTGSIGMLPSASLDENGKGMYEPCHGSAPDIAGQNVANPLATILSVAMMLRYTFREEAAAKAIEDAVGQVLDQGLRTADIMSEGMQRVGTVEMGQAVVAALA

SEQ ID NO: 9903 - protein, 103 aa, Lactobacillus plantarum WCFS1
MVAATTDKTFTTDTASGVTLTDFWATWCGPCRMQSPVVEQLADEMGDKVTFNKMDVDANPETASNFGIMSIPTLLVKKDGEVVDTLVGYHSKEQIQQTLAQYL

SEQ ID NO: 9904 - protein, 549 aa, Haemophilus influenzae 86-028NP
MKNINPTHTQAWKSLEAHKAELSNTTIQDLFKQEKNRFDDYSLTFNNQILVDFSKNNINQTTLSHLRQLAQECALDSAKEAMFTGEKINRTENRAVLHTALRNRTNTPVLVDGKDVMPEVNAVLAKMKDFCQRIISGEWKGYTGKAITDVVNIGIGGSDLGPYMVTEALRPYKNHLNMHFVSNVDGTHIAETLKKVNPETTLFLVASKTFTTQETMTNAQSARDWLLKAAKDESAVAKHFAALSTNAKDVEKFGIDTNNMFEFWDWVGGRYSLWSAIGLSIALSIGFENFEALLNGAHEMDKHFRTTPIEKNIPTTLALVGLWNTNFLGAQTEAILPYDQYLHRFAAYFQQGNMESNGKYVDRDGNVINNYQTGPIIWGEPGTNGQHAFYQLIHQGTTLIPCDFIAPAQSHNPLADHHNKLLSNFFAQTEALAFGKTKEEVEAEFVKAGKSLDDVKNIVPFKVFTGNKPTNSILVQKITPFTLGALIAMYEHKIFVQGVIFNIFSFDQWGVELGKQLANRILPELTDSEKVASHDSSTNGLINQFKAWR

SEQ ID NO: 9905 - protein, 109 aa, Zea mays subsp. parviglumis
TAVVALVLLAAATSEAAISCGQVASAIAPCISYARGQGSGPSAGCCSGVRSLNNAARTTADRRAACNCLKNAAAGVSGLNAGNAASIPSKCGVSIPYTISTSTDCSRVN

SEQ ID NO: 9906 - protein, 556 aa, Novosphingobium aromaticivorans DSM 12444
MTMLKNPSAKYRPFPQIDLPDRQWPSRTITKAPRWLSTDMRDGNQSLIDPMDAEKKSRFFDLLLKVGIKEIEVGFPSAGATEYDFIRGLVDSGRIPDDVFVQVLTQSREDLIKTSFESLAGAKQAIVHVYNAVSPLWRQVVFGMEKSDVKDIAIAGAKHLRDQAARFPQTDWHFEYSPETFSTAELDFSIECCEAVMEILQPTVEKPIILNLPATVEAATANIYADQIEYFCRNLPGRDRAVISLHTHNDRGTGVAAAELGLMAGADRVEGCLFGNGERTGNCCLVTVGLNMYTQGVDPELDFSDIDEVIQTVEYCNQLPVHPRHPYGGELVFTAFSGSHQDAIKKGFAAQEKRNDELWSVPYLPIDPADLGRSYEAVIRVNSQSGKGGFAWVLEQDQGLKLPKKMQAHFSRHVQELADELGRELQAADIWGVFRKAYRLDAPQHLQLIDYEETRGADGTRIFAGKIEVDGKVQSVSGRGNGLISSVVATLRDGFGVEIDITDYSEHAMGAGSNARAAAYVECRTADGRTIWGVGIDEDVATASVRAVLSAANAVG

SEQ ID NO: 9907 - protein, 589 aa, Thermobifida fusca YX
MTEQMTGAQSLIRALEHVGVDVVFGIPGGAILPAYDPLYDSTKVRHILMRHEQGAGHAAEGYAYATGRPGVCIATSGPGATNLVTPLADAYMDSVPVVAITGQVASPAIGTDAFQEADICGITMPITKHNFLVRDPSKIASTIAEAFHIASTGRPGPVLVDIAKDALQAQTRFEWPQRPELPGYRPVTKPHGKQVREAARLIAEAKRPVLYVGGGVFKSGASKELRVLAELTGIPVVTTLMALGTFPSSHPQNLGMPGMHGTVAAVGALQRADLIVALGARFDDRVTGKLSSFAPHATIVHADIDPAEISKNRYADVPIVGDCREVIADLIVAVRADQAAGRQGDYTAWWEQLNRMRETYPLGYTEPEDGSLAPQYVIKRIGQIVGPDATYVAGVGQHQMWAAQFIDHQRPGSFVNSGGAGTMGFAIPAALGAKVGDPDRVIWAIDGDGCFQMTNQELATCAIEGIPIKVAVINNGNLGMVRQWQTLFYDGRYSNTNLHTAPTPEDGKVRIPDFVRLAEAYGCVGLRCDRAEDVDATIEKAMAINDVPVVIDFTVHHDAMVWPMVPAGVSNDDIQYARDMAPEWDDEEE

SEQ ID NO: 9908 - protein, 478 aa, Oceanobacillus iheyensis HTE831
MGKKNKQFVEKITAMEDDFAQWYTDVVKQADLVDYGQVRGTMIIKPYGYAIWENIKNELDRMFKETGHTNVAFPLFIPESLLQKEKDHVEGFAPEVAWVTHGGEEELTERIAVRPTSEVLFCDYYSNNIHSYRDLPKLYNQWGNVVRWEKTTRPFLRSSEFHWQEGHTAHATDEEATEETNRMLETYAKLVEEYLAVPVLKGRKTDKEKFAGAKFTLTIEALMHDGKALQSGTSHHFGTGFAEAFDINYLDKDGKSQFVHQTSWGLSTRIMGALIMVHGDNRGLVVPPKIAPTQAMIVPIAQHKEGVLDKAYELRDKLAKVARVDIDGSDKMPGWKFNEYEMKGIPVRVEMGPKDIEKEQVVLVRRDTGEKEFVPVAEVETRLVELLDEVQSNLYQRALDHRNEMTTVAKDMDEFKEKIEEGGFIKAMWCGDVSCEESIKEETTATSRCIPYEEEKVADTCVCCGKKAKELVYWARAY

SEQ ID NO: 9909 - protein, 676 aa, Nostoc punctiforme PCC 73102
MPAPTINPTITAFPLTAVVGQEAIKLALLLAAVDPGLGGVAIAGRRGTAKSVMARAIHALLPPIEVVKGSISNCDPNHPEEWDDQLLAEYADKDIQDVPVEIIPAPFLQIPLGITEDRLLGSVDVEKSVKQGDTIFQPGLLATANRGVLYVDEINLLDDQISNQLLTVLSEGRNQIEREGISFQHPCKSLFIATYNPEEGGLREHLLDRIAIALSADGVLGLDQRVAAVEQAIAYSKSPQDFLKQYNEDLDSLKTQIILAREWLKEVIITHEQIAYLVDESIRGGVQGHRAELFATRVAKAAAALEGRTTVNAEDLRRAVELVIVPRATVVQTPPPDQAPPPPPPPPQQNQEEPQDESEEEQEEQEEQENQEQEPPSIPEEFIFDPEGVILDDNVLYFTQMAKRQGKSGSRSVIFSDDRGRYIKPMLPKGKARRIAVDATLRAAAPYQKARRERQPDRKVIVEQSDIRSKRLVRKAGALVVFVVDASGSMALNRMQSAKGAVMQLLTEAYQNRDQIALIPFRGEQAEVLLPPTRSIALARNRLERLPCGGGSPLAHGLTQAVRVGLNAQMSGDIGQVVLVAITDGRGNIPLARSLGEQIEPGEKPDIKGELLEIAARIRALGMQLLVIDTESKFVSTGFAKELSQTAGGKYYHLPKATDQAIAAMTKGAIADLKSR

SEQ ID NO: 9910 - protein, 278 aa, Lactobacillus plantarum WCFS1
MQSKLAVIIGGTSGVGKHTAIDLANQNYHVIIVGSRADKGRQAQADISQATGNQAVQLALADLSTKTGVQQFAHQLAAMTDHIDILLNSIGVILPERHLSADGYDLNLVLNYLTHFWTIQALLPLLKHSDQARILLVGALPFVINHAKVSLPDFDAPATSKYNAMTVTAQATAARVLLTLALSERLTATNVTINIFHPGYVPDSNFGAGGSWVSRLAGRILGESFSRKNSPIGAWLATAPELTHTSGHFYDDRLRQVRLSKQYTRSKANDLWRLSSQY

SEQ ID NO: 9911 - protein, 411 aa, Magnaporthe grisea 70-15
MSTSGKKATATALAQKYAPQIANKTVLVTGVSPNSLGATFVTAIAVASPALLILAGRNAAKVEETTKAIQAAAPHVPVRFLNLDLADRESVRKAAGEVLSWQDVPGIDVLVNNACLIGSEYKLIDGFEAHFVVNYLHPFLFTNLLLPKVIAVKGRVVNVASDCHRWHHIRFSDLNFDVSVSWKISQRSAARLQPRQNGKIYNMWQAYGQSKTANMLFSLALARRLGGRGIVTNSVHPGIIQTNAASHLDPAEILRLIAAEEVERQCGLANQAFLSYKTVDEGTATHVYAAFEPGLKDHNGAYLLDSHVADPVEDPVAPWGTSEADAEKLWRLITRRIPPSKSHIKGGKSKHLEANYYDQRLAPLLKRPDRSHPPDDFCREIPPAAPKQDKKIVYINTHNAKRINLVNLNEA

SEQ ID NO: 9912 - protein, 354 aa, Thermobifida fusca YX
MSARTVKLAVIPGDGIGPEVVAEGLKVLSAVAPRHGLTLDTTEYELGAQRWHATGEVLPDAVEEELRQHDAILLGAVGDPTVPSGVLERGLLLRLRFNFSHYVNLRPVRLYPGVTTPLAGVAPEDIDMLVVREGTEGPYAGMGGVLRKGTPHEIATQDSVNTRLGVERVVRYAFAKAAERPCHKLTLVHKDNVLTYAGELWQRVVREVGAEYPQVEVDYLHVDAATMFFVTQPRRFDVVVTDNLFGDIITDLGAAVAGGIGLAASGNINPEGDFPSMFEPVHGSAPDIAGQGKADPTATILSVSLMLEHLGYADAAAQIDQAVAEDLQERAKNGGVRSTTQIGDDIAQRVAEQG

SEQ ID NO: 9913 - protein, 400 aa, Dehalococcoides ethenogenes 195
MAKQKFDRSKPHCNVGTIGHVDHGKTTLTAAITRTLSTKGWADFRAYDQIDNAPEEKARGLTIAISHIEYQTETRHYAHIDCPGHADYIKNMITGAAQMDGAILVVSAPDGPMPQTREHVLLIHQVEVPAVVVALNKCDMMDDEELLELVELEVRELLTKNSFPGDEIPIVRVSAIKALECGCGKRECEWCGRIWKLMDAVDSYIPIPPRPVDKPFLMKVEDVFSIKGRGTVATGRVERGIIKGGDEVDLVGLHHEPRKIVVTSLEMFHKILDSAEPGDAVGLLLRGVEREDIERGMVLAKPGSIKPHINAEAEVYVLSKDEGGRHTPFFNGYKPQFFFGTTDVTGEIHLPEGVEMVVPGDHVKMKISTIYPVAMEKGMRFAIREGGKTVGAGAISQVLS

SEQ ID NO: 9914 - protein, 158 aa, Oceanobacillus iheyensis HTE831
MSVHDFTVTTIEGEEKRLSDYKGKVILIVNTASQCGFTPQLEDLQKLYKQYQDNDFEILGFPCNQFGNQDPGASEEISAFCQKNYGVTFQMFKKVDVKGKEAHPLYKHLTEEKKGILGGQIKWNFTKFLIDQNGNVIERFSPQKNPNTLNKDIEVLLR

SEQ ID NO: 9915 - protein, 502 aa, Zea mays
  misc_feature (116)..(116): Xaa can be any naturally occurring amino acid
MPIHLAPSTDPPSPARARMAMLLRKVWGSVLARAAAPGADPRARRAQAHRAEQYQYHGSLSLGALDAVPTDVLAQILRLLGPLDAARSSAVCRAWRVLASDNGLWAFFLRLGPEPXDLVVFAETHLAAGPASHPWLYYDSSPQLSFKQIYGLRALVPGTLIVDGGSGYCKYGWSKYAAPSGRCATFLEFGNIEAPMYARLRHFFSTIYTRMQIKPSTQPVIVVLPLCHSDDTESARASRKQYKETLYSVLFDMNVPAVCAVDQAVLSLYASKRTSGIVVHIGFNTTSVVPIFQGRVMYEIGVETVGQGALKLTGFLKELMQRRNISCESLYTVRTIKEKLCYVAADYEAELRKDTQASCEIDGEGCFTLSEERFKTPEILFQPHMGGMRAMGLHKAVSLCMDHCYVSGTVGDDSWYKTVILAGGSSCLPGLPERLEKELHQLLPPYMSEGIRVLPPSFGTDSAWFGAKMISNVSTFTEAWCAKKKQFRQKTGRSGTLFANSW

SEQ ID NO: 9916 - protein, 253 aa, Streptococcus bovis
GPMPQTREHILLSRQVGVKYLIVFMNKIDLVDDEELLELVEMEIRDLLSEYDFPGDDLPVIQGSALKALEGDTQYEDIIMELMDTVDEYIPEPERDTDKPLLLPVEDVFSITGRGTVASGRIDRGTVKVNDEVEIVGIREDIQKAVVTGVEMFRKQLDEGLAGDNVGVLLRGIQRDEIERGQVLAKPGSIHPHTKFKGEVYILTKDEGGRHTPFFNNYRPQFYFRTTDVTGSIELPAGTEMVMPGDNVTIDVE

SEQ ID NO: 9917 - protein, 635 aa, Burkholderia xenovorans LB400
MRLRRPLPVAKVAYNPVASAQIALQCIGRLGYSVENAMSQTVGDFIIDRLHAWGVRRIYGYPGDGINGVFGALNRAHGKIEFVQVRHEEMAAFMASAHAKFTGELGVCIATSGPGASHLLTGLYDARLDHMPVLAIAGQQARAALGGHYQQELDLVSMFKDVAGAFVEQASVPSQVRHLVDRAVRTALAERKVTALVLPNDLQDLAYEAPARKHGTLHSGVGYRRPRLVPYPDDLQQAAEVLNAGKRVAILVGAGALHATDEVIAVADKLGAGAAKALLGKAALPDDLPWVTGSIGLLGTKPSYDLMTECDTLLVIGSGFPYAEFLPKEGAARGVQIDLKADMLSLRYPMEVNLVGDSVETLRALLPLLEQKQDRGWREKIEGWTADWWKTLDKRAHEAGRKGMNPQRSVWELSPRLPANAIVTSDSGSCANWYARDLKVQRGMMCSLSGGLASMGAAVPYAIAAKFSHPERPVIALVGDGAMQMNNMAELITVAKYWKQWASPRWICMVLNNSDLNQVTWEQRVMEGDPKFEASQDIPSVPYHRFAELIGLKGIYVEDPERMGAAWDEALAADRPVVIEVKADPDIPPLPPHITLAQAKAFASTLIKRDPNEGSVIIETAKQVLGAVLPGHRDK

SEQ ID NO: 9918 - protein, 565 aa, Alkalilimnicola ehrlichei MLHE-1
MADVKEVRVPDIGDFAEVDVIEVLVAPGDRIEKEQSLITLESDKASMEVPSSEAGVVKEVKIKVGDKVSEGDVVVLVEAEEGGDSPAEAPTGSDAGASAPAAGGSDAPAAGGGEAVQVKVPDIGDFAEVDVIEVLVSPGDTVEQEQSLITLESDKASMEVPSSHAGVVKEVKVKVGDKVSEGDTVAVLESQGAGGGATASAPAKEAGEAAKPSQEPAETYAADSQREAAAPESYKANAYLLTDSRPPQAPPPIDREAHRRAHASPAVRRFARELGVDLGQLQGRGSGRKGRILKEDVQAYVKQALAGGGAAAAPAGQAGGAGIPPIPEVDFSKFGEVERQPLSRIQKLSGPHLQRSWLNVPHVTQFDEADITELEAFRKSMKTEAEKAGVKLTPLAFMVKASAAALRAFPRFNSSLAPAGDELILKKYVNIGVAVDTPNGLVVPVIRDADRKSVYQIAEDLGTLSAKARDGKLGPSDMQGGCFTISSLGGIGGTAFTPIVNAPEVAILGVSRSSMKPVWNGSEFEPRLMLPLSLSYDHRVIDGAAGARFTAWLAQALGDIRRLLL

SEQ ID NO: 9919 - protein, 391 aa, Rickettsiella grylli
MSNEFDSSNAPIQNAVIKVIGVGGGGGNALEHMLAQDITGVEFICANTDAQALRNSSAECLLQLGQQITKGLGAGANPEVGRLAAEADRERIRAALEGANMVFITAGMGGGTGTGAAPVVAEIAKQMKILTVAVVTKPFEIEGKKRLRLAEEGIKQLSQYVDSLITIPNNKLMSVLDKDISFLDAFKAVNDVLFGAVKGIAALITRTGLINVDFADVKTVMSEMGMAMMGTGIGTGSERARQAAEAAIGSPLLEDIDLAGARGVLVNITAGPDLSMREFGEVGEVIKKFTSEEANVVIGTVIDPEMCEELRVTIVITGLLGNFSQGIPKGTGDSNLVRAADGSLDYHQLERPTVLRKQGIVSSTRSTSENASTDIEYFDIPAFLRRQEEVS

SEQ ID NO: 9920 - protein, 331 aa, Coccidioides immitis RS
MSRYAEVHKQPAGPGDARPTALQVIEDEGLEGNMKDKVFLITGCSSGIGIETARAIAATGARVFLAVRDLTRGRTACESFLEPGRVELLQLDTSSLSSVKAAASNFLEKSQTLNVLICNAGIMMIPTYEESADGFEIQLATNYLGHFLLFWLLKEAMLKASTPDFNSRLVNVSSSGHHASEVQFEDINFHRGGAYAPSKAYGQSKLAQIYMANYVDRHYGPAGLHALSLMPGGIFTNLQKHVPQEIKDGWTSNPEIMMVLKSHEQGAATTVVAAVAKEWEGRGGKYLEDCEASSPEALVQGFRGFKEYAFDEGKEERLWELTLDMLGLAEA

SEQ ID NO: 9921 - protein, 357 aa, Candida glabrata CBS 138
MGKKIVFNISSDFQLKSLLGEGAYGVVCSAVHKPTGEIVAIKKIVPFDKPLFALRTLREIKILRRFQHENIISIFDIQKPESFEKFNEVYIIQELMQTDLHRVIATQTLTDDHIQYFIYQTLRAIKTLHGSNVIHRDLKPSNILINSNCDLKVCDFGLARIIDSGENGDNEVDKIGMTEYVATRWYRAPEVMLTNAKYSRAMDIWSCGCILGELFLKRPLFPGKDYRHQLLLIFGLIGTPDSSDKSMECIESRRARQYIASLQKYPPVRPLQKAFPGVNPVGVDLLSRMLVFDPRERISADDALAHPYLSTYHVPEDEPAGEPIPPDFFQFDQYKEVLTTKDLKKLLWNEIFHEQAT

SEQ ID NO: 9922 - protein, 308 aa, Alkalilimnicola ehrlichei MLHE-1
MPQDKLRIATRRSPLAMWQAEHVAAELRRHHPGLEVELVPMVTRGDRILDQALSRIGGKGLFIKELEQGMEEGRADLAVHSMKDVPWRMPDGFALPVILERHEPTDAFVSNHYRRLDDLPEGGHLGTASLRRQCQAKARRPDLRVSTLRGNVNTRLAKLDAGEFDAIILAASGLSRLGFDERIARRLPPEESLPAVGQGALGIECLAEDRRVQELVAPLDHGPTHTLLKAERAMNARLQGSCQVPIAGYACYQGEEIWLRGLVGSPDGQEIVRGEVRGPIAQAAELGDRLGGELLERGAARILADLAD

SEQ ID NO: 9923 - protein, 121 aa, Zea mays subsp. parviglumis
MARTQQLAVVATAVVALVLLAAAATSEAAISCGQVASAIAPCISYARGQGSGPSAGCCSGVRSLKNAARTTADRRAACNCLKNAAAGVSGLNAGNAASIPSKCGVSIPYTISTSTDCSRVN

SEQ ID NO: 9924 - protein, 550 aa, Vibrio sp. Ex25
MLKNINPTQTQAWKALTAHFESAQDMDLKELFAQDAARFDKYSARFGSDILVDYSKNLINEETLKHLFALANETELKSAIEAMFSGEAINQTEGRAVLHTALRNRANTPVMVDGEDVMPAVNAVLEKMKSFTERVIGGEWKGYTGKAITDIVNIGIGGSDLGPYMVTEALAPYKNHLNLHFVSNVDGTHIVETLKKVNPETTLFLIASKTFTTQETMTNAHTARDWFLESAGDQAHVAKHFAALSTNATAVSEFGIDTANMFEFWDWVGGRYSLWSAIGLSIALAVGYDNFVELLEGAHEMDKHFVSTDLESNIPVILALIGIWYNNFHGAESEAILPYDQYMHRFAAYFQQGNMESNGKYVDRQGNAVTYQTGPIIWGEPGTNGQHAFYQLIHQGTKLIPCDFIAPAISHNPASDHHQKLMSNFFAQTEALAFGKSEETVKEELVKAGKNTEEVAAIAPFKVFEGNRPTNSILVKQITPRTLGNLIAMYEHKIFVQGVIWNIFSFDQWGVELGKQLANQILPELADESQISSHDSSTNGLINAFKAFKA

SEQ ID NO: 9925 - protein, 336 aa, Arabidopsis thaliana
MNTLINVTQSLINPSRILFFFCLSSFMESDPNPSAWNQYINPRDCTQGLCSTFCPQWCTYINFSPPPISYEQFLNDGVASNPNLSPLVIAIFGIFATAFLLAAYYTLVSKYCANDTTNEAASESGRSDIILDVNSPERGDQDDPFALESSTAGLDDTLIKKIGFFKLKKHQNGFKINGTDCSICLGEFNEDESLRLLPKCNHTFHVVCIDRWLKSHSNCPLCRAKIIVPTTQQPEHHVVVMNLDRFTSNVGSAEGNVVVDDHREEVSVSISSHHPSWFSAADIVLRISRDGEEEEGNYDLENGNREKLVDLKRSFSSGGLVLGTQGRTRRSLNICP

SEQ ID NO: 9926 - protein, 121 aa, Zea mays subsp. parviglumis
MARTQQLAVVATAVVALVLLAAAATSEAAISCGQVASAIAPCISYARGQGSGPSASCCSGVRSLNNAARTTADRRAACNCLKNAAAGVSGLNAGNAASIPSKCGVSIPYTISTSTDCSRVN

SEQ ID NO: 9927 - protein, 256 aa, Zea mays
MNALAATSRNFRQAARLLGLDSKLEKSLLIPFREIKVECTIPKDDGTLASFVGFRVQHDNARGPMKGGIRYHPEVDPDEVNALAQLMTWKTAVAAVPYGGAKGGIGCSPGDLSRSELERLTRVFTQKIHDLIGTHTDIPAPDMGTNSQTMAWIFDEYSKFHGHSPAVVTGKPIDLGGSLGRDAATGRGVMYATEALLAEYGKSISGSTFVIQGFGNVGSWAAQLIHEKGGKVIALGDVSGTIRNKAGIDVPALMKH

SEQ ID NO: 9928 - protein, 487 aa, Prochlorococcus marinus str. MIT 9313
MASAPLPLAAAPIHFGTDGWRGVIGVDITVERLLTVAAAAAQELAYRAPTELKSRSVIIGYDRRFLAPEMAEAIAAAVRGCELEPLLTETPVPTPACSWAVVQHQAIGALVVTASHNPPEWLGLKIKGAFGGSVEDTFTAAVEQRLAAGGISVPINGITKRFDGRGQHLKGLREKLDLTSLIKGLQKMGLKVIIDPMHGSAAGCIAELLDPHNQGLVQEIRAQRDPLFGGNPPEPLAPYLSQLIAAVQASSATGQPAVGLVFDGDGDRIAAIDEAGNFCSTQLLMPLLIDHLARAKQLPGKVVKTVSGSDLMRLVAEDLGREVLELPVGFKYIAAEMLSGDVLVGGEESGGVGFGMHLPERDALFAALLVLEALVEGGQPLGARMKALQERCRGSSFYERFDLRLADMDSRQRLETLLEQTPPATVADQPVQTVIRTDGVKFRLGPSHWLMLRFSGTEPLLRIYCEAPSETDVKAALNWAKQLAERT

SEQ ID NO: 9929 - protein, 590 aa, Escherichia fergusonii
MHTPSRLSALRRWLQENNLDGMIVPRADAWQSEYCAPYDEKLAWLTGFDGSAGLALILKNTALLFVDGRYQVQARLQVNMDEIEIHHLHNEPLAEWLTANAGAGMRIGFEALLMTNTEFGQLSATPCELVPLSQSPFDTLWHDRPAAPAGRIREMPVEVSGESSLAKRQRVAAVLAAHDADYLAVTLPDNIAWLLNVRGTDIPSSPVPLSFALLDRDGSVEWFVNDNKLSELPESVRNAFRIAPQDAFIERCQRLSQGKRVMVDADSAPVALRFAIEPEGEIVWRTDPITLMKATKNPVELAGYRECHHQDGAAWVNFLAWLSREVPLREAAGKPLTELEAQAQQLAFRKQQPGFIEQSFATISASSSNAAMCHYHSSEASNKPIGHHHFYLNDSGGQYHNGTTDATRTLAWGSVPPQQKLHYTAVLRGFLSLITLPFPSGSQGHQLDAFARRPLWEMGLDYDHGTGHGVGHQLLIHENPHRLAKKVNPWPLVAGTIMTIEPGYYLADSHGIRIENQVEIVESRPGFCTFSSLTLIPIDLSQVELQLLNEQEKQWLDEYHQQVREALLPLVDSDARQWLLEATMPVRVNH

SEQ ID NO: 9930 - protein, 117 aa, Zea mays subsp. parviglumis
MQQLAVATAVVALVLLAAAATSEAAISCGQVASAIAPCISYARGQGSGPSAGCCSGVRSLNNAARTTADRRAACNCLKNAAAGVSGLNAGNAASIPSKCGVSIPYTISTSTDCSRVN

SEQ ID NO: 9931 - protein, 311 aa, Magnaporthe grisea 70-15
MTDITSYKFNHTMLKVKDPKASIAFYKHLGMDLLSEYKVPDHKLELYFVAGDSAISASHGTHQSDREGVLELSYSYGIENTSGGDQEPRGLRPVCLSVDNVKTTCKALCDAGYRINCNSEEETAHVLDPDGFWIKLIAHRSLGRIDDTATADCKGSKVHHTMIGVRDKNVSRKFYEQVFGMTWKYEQHSTQAGRDRFLLGCGKPHTSGPSVDISKPDVKCEGLLELLCSEDTKNKDGMEHHNGNLEPDDPGHICISVDDVHAACERLESLGVQWQKRLMDGPFRVAFVHDPDGNLIEIIQNEMYKPVKHEA

SEQ ID NO: 9932 - protein, 527 aa, Thermobifida fusca YX
MLDDSFHVFDTTLRDGAQREGINFTVADKLAVAKLLDEFGVGFIEGGWPGANPKDTEFFRRAQTELSLKHAQLTAFGSTRRAGTTAAKDPQVLALRDSGAPVVTLVAKSDDRHVELALRTTLEENLEMIADTVSFLLGQGQRVFVDCEHFFDGYRHNPEYALRVVRTAAEAGASVVVLCDTNGGMLPSDVFQIVSEVREATGARLGIHAQDDSGCAVANTLAAVDAGATHVQCTANGYGERVGNANLFSVVPALVLKRGRNVLPEGCLREMTRVSQAIAEIANIAPATHQPYVGISAFAHKAGLHASAIKVDPDLYQHIDPALVGNDMRMLVSDMAGRASVELKAKELGVDLSGDRETLGRIVERVKDMEMAGYSFEAADASLELLLREEIGQPVRYFEVESWRTISERRPDGSSASEATVKLYVKGERVVATGEGNGPVNALDRALRSALESVYPDLATMELVDYKVRILEGTSGTDAVTRVLIDCSDGQGEWTTVGVGENVIEASWTALEQALTYGLLRRGYTQQ

SEQ ID NO: 9933 - protein, 579 aa, Phaseolus vulgaris
MCGILAVLGCSDSSQAKRVRVLELSRRLKHRGPDWSGLHQYGDCYLAHQRLAIVDPASGDQPLFNEDKTIAVTVNGEIYNHEELRKQLPNHTFRTGSDCDVIAHLYEEHGENFVDMLDGIFSFVLLDTRDNSFIVARDAIGVTSLYIGWGLDGSVWISSELKGLNGDCEHFESFPPGHLYSSKEREFRRWYNPPWFSEAIPSAPYDPLALRHAFEKAVIKRLMTDVPFGVLLSGGLDSSLVAAVTARYLEGTNAAKHWGTKLHSFCVGLEGAPDLKAAREVADYIGTVHHEFHYSVQDGIDAIEDVIYHIETYDVTTIRASIPMFLMSRKIKSLGVKWDICGEGSDEIYGGYLYFHKAPNKEEFHQETCRKIKALHKYDCLRANKSTFAWGLEARVPFLDKEFIEVAMNVNPEYKMIKKEEGRIEKWVLRRAFDDGEHPYLPKHILYRQKEQFSDGVGYGWIDGLKGHAEKHVTDRMMLNAANIFPFNTPTTKEAYYYRMIFERFFPQDSARLSVPGGPSVACSTAKAVEWDAAWSNNLDPSGRAALGVHASAYGNQVKAVEPEKTIPKMEVSPLGVAI

SEQ ID NO: 9934 - protein, 161 aa, Lactobacillus salivarius subsp. salivarius
LLNQSKDTIIYLCVLKKQHLFQSDKPESIETTLKNAADGRDIRLIVVTDAEGILGIGDWGVDGVDIAIGKLMVYTAAAGINPAQVLPVSIDAGTNNKELLNDPLYLGNKHKRVYGEKYNELIDKFVAAVQKLFPESMLHFEDFGRSNADVILNKYKDKILT

SEQ ID NO: 9935 - protein, 120 aa, Zea mays subsp. parviglumis
MARMQQLAVATTAVVALVLLAAATSEAAISCGQVASAIAPCISYARGQGSAPSAGCCSGVRSLNNAARTTADRRAACNCLKNAAAGVSGLNAGNAASIPSKCGVSIPYTISTSTDCSRVN

SEQ ID NO: 9936 - protein, 373 aa, Oryza sativa
MGGNPAMRAGLALVVVVVAVVVGDVGAALPRFAEAPEYRNGEGCPAAVAGAGVCDPGLVHIAMTLDAHYLRGSMAAIYSLLKHASCPESIFFHFLAAADGGEGCGGGVGELRTAVAASFPSLRFEIYPFRADAVTGLISASVRAALEAPLNYARNYLADLLPKCVPRAIYLDSDVLAVDDVRRLWETRLPAAAVVAAPEYCHANFSRYFTETFWSDPQLGDRVFAGRRRAPCYFNTGVMVIDLRRWRVGNYRRRIEVWMELQKEKRIYELGSLPPFLLVFAGEVEAVDHRWNQHGLGGDNVLGSCRPLHKGPVSLMHWSGKGKPWDRLDAGKPCPLDHTWKSYDLYIAEGDSSSASAPFALSSSALPAAAFSW

SEQ ID NO: 9937 - protein, 164 aa, Triticum aestivum
MHPTRWELTYMVDLQAAALVIGRGRGSKSQPISPSPAELNTTTTANSIGMARGAATQLVLVSMVAAMLLVACDAAISCGQVTSALSPCISYARGNGANPPAACCSGVRSLAGAARSTADKQAACKCIKSAAGGLNAGKAAGIPLKCGVSVPYAISSSVDCSKIR

SEQ ID NO: 9938 - protein, 515 aa, Haemophilus influenzae R2866
MTDRVIIFDTTLRDGEQALKASLTVKEKLQIALALERLGVDVMEVGFPVSSQGDFESVQTIARHIKNARVAALSRAVDKDIDAAYEALKVAEAFRIHTFIASSALHVEAKLKRSFDDVVGMAVAAVKRARNYTDDVEFSCEDAGRTGIDNICRIVEAAINAGATTVNIPDTVGFCLPNEYGNIIAQVRNLVPNIDKAVISVHCHNDLGMATANSLTAVQNGARQIECTINGIGERAGNTSLEEVVMAMKVRQDFMGVDTRINTQEIHRVSQMVSQLCNMPIQPNKAIVGSNAFAHSSGIHQDGMLKNKNTYEIMSPETIGLKKEKLNLTARSGRAAVKGHMADMGYNEQDYDLDKLYDAFLKLADKKGQVFDYDLEALAFIDMQQGDEDRLVLDKLSAHSTKEYPATAFVQLKLDGEKLSTSSIGGNGPVDAVYNAILNLTGLEIKMSHYNLTAKGEGAEALGQVDIVVEHKGRKFHGVGLATDIVESSALALVHAINAIYRAHKVADIKNHKQH

SEQ ID NO: 9939 - protein, 162 aa, Lactobacillus rhamnosus
VVADSIEQYNELFLDPQNAAFVSVDAPEDIEATLKNAADGRDIRLVVVTDAEGILGMGDWGVNGVDIAIGKLMVYTAAAGIDPSQVLPVSIDAGTNNQKLLDDPLYLGNRHKRVSGEQYYDVIDKFVAAEQQLFPDSLLHFEDFGRDNAQVILDKYKDQIAT

SEQ ID NO: 9940 - protein, 116 aa, Zea mays subsp. parviglumis
MQQLAVATAVVALVLLAAATSEAAISCGQVASAIAPCISYARGQGSGPSAGCCSGVRSLNNAARTTADRRAACNCLKNAAAGVSGLNAGNAASIPSKCGVSIPYTISTSTDCSRVN

SEQ ID NO: 9941 - protein, 358 aa, Haemophilus influenzae R2866
MQSYNIAVLAGDGIGPEVIAEAIKVLNKVQEKFGFKLNFNEFFVGGAAIDHCGYPLPAETLKGCDEADAILFGSVGGPKWTNLPPDQQPERGALLPLRKYFKLFCNLRPATLYKGLEKFCPLRADIAAKGFDMVVVRELTGGIYFGQPKGREGEGAQTKAFDTEVYYKYEIERIARAAFDAAMKRNKKVTSVDKANVLQSSILWRETVTEVAKEYPEVTLEHIYIDNATMQLIKAPESFDVLLCSNIFGDIISDEAAMITGSMGMLPSASLNEEGFGLYEPAGGSAPDIAGKGIANPIAQILSAAMMLRYSFNLNEAADAIENAVQKVLASGHRTADLADDSTPVSTAEMGILIAQAI

SEQ ID NO: 9942 - protein, 178 aa, Lactobacillus brevis
NPVVYDPTVADSIEQYSHLFTDPQNAAFISVDAPEDIEATLKNAAGDRDIRLVVVTDPKNFGYGPTGVLTGLDIAVGKLMVYTAAAGMIQHKSCQLALMAGTNNQTLLNDRYYLGNHHERVYGDKYHAVIDQFVAAEQKLFPESLLHWEDFGRSNAQVILDKYKDKIATFNDDIQGTG

SEQ ID NO: 9943 - protein, 210 aa, Brassica juncea
MLCSEYESPVTLGGEYCPKLASSCPKKPAGRKKFRETRHPVYRGVRLRKSGKWVCEVREPNKKSRIWLGTFLTAEIAARAHDVAAIALRGKSACLNFADSAWRLRIPETTCPKEIQKAAAEAAVAFQAELNDTTADHGLDVEETIVEAIFTEESSEGFYMDEEFMFGMPTLWASMAEGMLLPPRPYNSDLTMTSTEMLTCPFGVMSTCNH

SEQ ID NO: 9944 - protein, 968 aa, Arabidopsis thaliana
MAGRNIEKMASIDAQLRQLVPAKVSEDDKLVEYDALLLDRFLDILQDLHGEDLRETVQELYELSAEYEGKREPSKLEELGSVLTSLDPGDSIVISKAFSHMLNLANLAEEVQIAHRRRIKKLKKGDFVDESSATTESDIEETFKRLVSDLGKSPEEIFDALKNQTVDLVLTAHPTQSVRRSLLQKHGRIRDCLAQLYAKDITPDDKQELDESLQREIQAAFRTDEIRRTPPTPQDEMRAGMSYFRETIWKGVPKFLRRVDTALKNIGIDERVPYNAPLIQFSSWMGGDRDGNPRVTPEVTRDVCLLARMMAANLYYNQIENLMFELSMWRCTDEFRVRADELHRNSRKDAAKHYIEFWKTIPPTEPYRVILGDVRDKLYHTRERSRQLLSNGISDIPEEATFTNVEQFLEPLELCYRSLCSCGDSPIADGSLLDFLRQVSTFGLSLVRLDIRQESERHTDVLDAITKHLDIGSSYRDWSEEGRQEWLLAELSGKRPLFGPDLPKTEEISDVLDTFKVISELPSDCFGAYIISMATSPSDVLAVELLQRECHVKNPLRVVPLFEKLADLEAAPAAVARLFSIDWYKNRINGKQEVMIGYSDSGKDAGRLSAAWELYKAQEELVKVAKKYGVKLTMFHGRGGTVGRGGGPTHLAILSQPPDTVNGSLRVTVQGEVIEQSFGEAHLCFRTLQRFTAATLEHGMNPPISPKPEWRALLDEMAVVATEEYRSVVFQEPRFVEYFRLATPELEYGRMNIGSRPSKRKPSGGIESLRAIPWIFAWTQTRFHLPVWLGFGAAFRYAIKKDVRNLHMLQDMYKQWPFFRVTIDLIEMVFAKGDPGIAALYDKLLVSEDLWAFGEKLRANFDETKNLVLQTAGHKDLLEGDPYLKQRLRLRDSYITTLNVCQAYTLKRIRDANYNVTLRPHISKEIMQSSKSAQELVKLNPTSEYAPGLEDTLILTMKGIAAGLQNTG

SEQ ID NO: 9945 - protein, 180 aa, Lactobacillus fructivorans
NSVVYDPTIADSIENYSRLYVNPQNAAFLSIDHDDPETIRESLKNTAAGRNIKLIVVTDGEGILGIGDWGTQGIDIPVGKLMVYSAAAGIDPSEVLPVVMDVGTTNKSLLDNPLYLGNHQDRDYGQKYYDFVDKFVKEAEDLFPNLYLHFEDFGRRNASNILDKYKDDYLVFNDDIQGTG

SEQ ID NO: 9946 - protein, 253 aa, Streptococcus mitis
GPMPQTREHILLSRQVGVKHLIVFMNKIDLVDDEELLELVEMEIRDLLSEYDFPGDDLPVIQGSALKALEGDTKYEDIIMELMNTVDEYIPEPERDTDKPLLLPVEDVFSITGRGTVASGRIDRGTVRVNDEIEIVGIKEEIQKAVVTGVEMFRKQLDEGLAGDNVGVLLRGIQRDEIERGQVIAKPGSINPHTKFKGEVYILTKEEGGRHTPFFNNYRPQFYFRTTDVTGSIELPAGTEMVMPGDNVTIDVE

SEQ ID NO: 9947 - protein, 296 aa, Escherichia coli
DNVLRIATRQSPLALWQAHYVKDKLMASHPGLVVELVPMVTRGDVIGKGLFVKELEVALLENRADIAVHSMKDVPVEFPQGLGLVTICEREDPRDAFVSNNYDSLDALPAGSIVGTSSLRRQCQLAERRPDLIIRSLRGNVGTRLSKLDNGEYDAIILAVAGLKRLGLESRIRAALPPEISLPAVGQGAVGIECRLDDSRTRELLAALNHHETALRVTAERAMNTRLEGGCQVPIGSYAELIDGEIWLRALVGAPDGSQIIRGERRGAPQDAEQMGISLAEELLNNGAREILAEVY

SEQ ID NO: 9948 - protein, 412 aa, Anaplasma marginale str. St. Maries
MGRILVKKFGGTSLKDVECILRVANIVRQSVERGHKLVVVVSAMGRFTDEAVTTAQEVSELASEAQLSEYDVVVSSGEQVSCGLLALALQRIDIKATSIMGWQIPINTTGEHSRARIIEIKPDRILSLLNEHDVVIVAGFQGIHNARITTLGRGGSDISAVAIAAALRLDACYMYTDVAGVYTANPCLVPSARKLDHVTYNDMVEISASGRAILNVRSVEMAMRCGVRIHVMSSSQEAKGTLVSFGCEREMESRIITGIAISKKIASVSLGGVPAVPGIAAALLPIAEGNIDVDMIMQTVDGELRNITFTVQEEDLQKTQDILLQHKHNILYESLAVTDSLAKVSLVGACMISRPGVASRVFSALASGGIAVLAVSTSEIKITVLMHEQSAAPALSLLHEEFALDRESVLCT

SEQ ID NO: 9949 - protein, 474 aa, Pyrobaculum aerophilum str. IM2
MQEFQNIHATISHVESVEEVLGIEKKFSYQVELKGRITKDMVEEISRLKGEPDWMRRLRLRMLELFEKLPTPKWVRAVQEIDLEALVHYAKPQTETVSSWDQLPKEIREYYEKLGLPEIEAKALLGLGAQFDSEIIYFNLKKKLQEKGVIMLPMEEAVRKYPDLVQRYFMRVFPPEHKFAALHGALWSGGVFIYVPPGVRIEQPLETFFFIGQSMESQMEHSIVVADKDAYVHWIEGCSAPRLLKYSFHNGMVEGYAHEGATLKITTVQNWSRNVVNFNNKRAIAEARAKVHWVEGSIGSKTTYTFPSTVLKGEGASTEIVGITAAKGTYWKENGAKVWHLAPRTSSRVVNKSISAEGGVAVYRGIVHVQRGAKYAKSHVQCDSLVLDKDSATLTVPHDQVFEETAVVTHEATASTISEEKLAYLRARGFTEDDAKAAIVLGFVGDILKDLPFEYAVVLGRVIELEFGKLSKVG

SEQ ID NO: 9950 - protein, 636 aa, Vibrio vulnificus CMCP6
MAIEINVPDIGADEVEVTEILVSVGDKVEEEQSLITVEGDKASMEVPASQAGIVKEIKVVAGDKVTTGSLIMVFEVEAAGAPGAAAAAPVPAVAPVAAPAAASELKEVCVPDIGGDEVEVTEILVAVGDSIAEEQSLLTVEGDKASMEVPAPFAGTLKEIKVAAGDKVSTGSLVMVFEVAGSGAAAPAPVAAAAPAAAPAAVSGVKEVNVPDIGGDEVEVTEIMVTVGDTVSEEQSLITVEGDKASMEVPAPFAGTVKEIKVAAGDKVSTGSLIMVFEVAGAAPVAAAAPAQAAAPAQAAAPAPAVAPVAKAEAQATTSDFKENDEYAHASPVVRRLAREFGVNLSKVKGSGRKSRILKEDVQAYVKDALKRLESGAVAAASGKGDGAALGLLPWPKVDFSKFGETEVQPLSRIKKISGANLHRNWVMIPHVTQWDNADITELENFRKEQNAIEAKKDSGMKITPLVFIMKAAAKALEAFPAFNSSLSDDGESLILKKYVNIGIAVDTPNGLVVPVFKDVNKKGIYELSEELMVVSKKARAGKLTAADMQGGCFTISSLGGIGGTAFTPIVNAPEVGILGVSKSEIKPVWNGKEFAPRLQLPLSLSYDHRVIDGAEGARFITYLNECLSDIRRLVL

SEQ ID NO: 9951 - protein, 437 aa, Coxiella burnetii RSA 493
MHSRFQKGKIPNSVLKRDLGLIGATMMGLGSIVGTGIFVSIGVAAGVTGPSVVLAIVLAALVATCNALSSAQLAASHPVSGGTHEYGYRYLHPALGFTAGWMFLCAKIASAATAALGFAGYLLHLLGITSISMIPIAVSIAILLTLLVLSGLKKSNLANLIIVSIILISLITFVLSGLPHLFSMGLPHFKPFFPTAAPSGLRNFLYATALMFVAYTGYARIATLGEEVKNPKRFIPQAIILTLIISAVLYIAVAVVAISIVGADHLSQAAQNRATPLETAARALNRRGLDIILAFGACTAMLGVLLNLMLGLSRMALAMGRKRDLPSMFGTLSKKQRTPSAAILGVGLAIIGLSLIGNVEITWAFSAFTVLIYYFITNLAALQLPKADRLYPRIFPVGGLIACLFLAFWVPLMIWSIGIGLIAVGLAWKYFMARLWI

SEQ ID NO: 9952 - protein, 220 aa, Helianthus ciliaris
QYGRETRHTGDYENPIHSTGGQYDQDVRQTDEYGNPVRITDEYGNPVHSATGGTMGDYGSTGLGQGTGGLGTGVGHTTGGTGTDYTSGGRSTGQTGYQGLGTESEFGGTTGTFQNQPSATPIGGTGLSSGTGAGFGGIGTGTGTGILHRSGSGSSSSSEDDGQGGRRKKKGVMQKIKEKLPGGHSQEEQYQSQTTTTGYGETHEKKGMMEKIKEKLPGHH

SEQ ID NO: 9953 - protein, 253 aa, Streptococcus pneumoniae
GPMPQTREHILLSRQVGVKHLIVFMNKVDLVDDEELLELVEMEIRDLLSEYDFPGDDLPVIQGSALKALEGDSKYEDIVMELMNTVDEYIPEPERDTDKPLLLPVEDVFSITGRGTVASGRIDRGIVKVNDEIEIVGIKEETQKAVVTGVEMFRKQLDEGLAGDNVGVLLRGVQRDEIERGQVIAKPGSINPHTKFKGEVYILTKEEGGRHTPFFNNYRPQFYFRTTDVTGSIELPAGTEMVMPGDNVTIDVE

SEQ ID NO: 9954 - protein, 183 aa, Hevea brasiliensis
MASSMLSTAAVACINRASPAQASMVAPFTGLKSTSAFPTTRKTTTDITSIASNGGRVQCMQVWPPRGKKFYETLSYLPPLTREQLAKEVEYLLRKGWVPCLEFELEHGTVYREYHRSPGYYDGRYWTMWKLPMFGCTDAVQVLQELDEMIKAYPDCYGRIIGFDNVRQVQCISFLAYKPKGAE

SEQ ID NO: 9955 - protein, 199 aa, Medicago sativa
YSHNLEFSEEKIELTFATNYLGHFLLTKMLLEKMIDTANKTGIQGRIINISSVIHSWVKRSCFCFKDMLTGKNYNGTRAYAQSKLAMILRVKEMARQLKARNARVTINAVHPGIVKTGIIRAHKGLITDSLFFIASKLLKTISQSASTTCYVALSQKIEGVSGKFFTDCNESSCSRLANDESEAKKLWNNTNNLLHKPT

SEQ ID NO: 9956 - protein, 353 aa, Medicago truncatula
MGSYVGTPFSLSSLMCHEQDESTLIFEEDEDESTFFINSSLDNNNNNPWFLLDDEEEYIQYLFKQETGLGFGSITHFLCYDDHDVEVEDDDSSKSLFWLRNARLHAIDWIFNTQAKFGFTVQTAYLSINYFDRFLSKRSIDESKPWAIQLLSVACLSIAAKMEEQSVPPLSEYPIEYRFENKVIKNMELLILSTLEWKMGLPTPFAYLHYFFTKFCNGSRSETIITKATQHIVTMVKDFNLMNQRPSTIASASILAAFDSTLTKKEIDLRISLVSSCGNLESEHVFSCYNVIQEKIRDKVNKTPSSDLLSTESNSTCVVVENKFNACVGVKRKLSYEEMNIEDFPPGQKLRQP

SEQ ID NO: 9957 - protein, 361 aa, Ralstonia solanacearum
MKTYRIATIPGDGIGKEVVPAGREVMEALAAAGAGFRFEFENFDWGGDYYRQHGAMMPADGLDALRGKDAILFGSAGDAQIPDHITLWGLRLKICQGFDQYANVRPTRILPGIDAPLKRCGPQDLDWVIVRENSEGEYAGVGGRVHQGHPIEAATDVSMMTRAGVERIMRFAFRLAQSRPRKLLTVITKSNAQRHAMVMWDEIAVQVSKEFPDVQWDKELVDAATARMVNRPASLDTIVATNLHADILSDLAAALAGSLGIAPTGNIDPERRYPSMFEPIHGSAFDIMGKGLANPVGTFWSVVMLLEHLGEQAAARRLMQAIEAVTANPALHTRDLGGNATTVQVTRAVCECLAVSQAQAA

SEQ ID NO: 9958 - protein, 357 aa, Mesoplasma florum L1
MKKQEIVNKLLESNSAEAILFYSPENRYWFSRFKSSLGYLLITKTKSYLLVDGRYITAARNSNNIPKDIEIREFSNNLFVQMKEILKEHNVKKLGFESDWVHYAEFEKYASIFTEQTLVPINCSEIRIVKDEWEIEQLQKACDITNEVFEAILEYVKPGMTEKELQRFVDNEFLVKGAEKISFDTIIASGVNGSMPHAVPTDKKIEIGDLVTIDMGCYYNGYCSDQTRTIAIGEIDAKLEDIYNAVYEAQSLGISLVSEGVNAGEIHKQVYDFIEKRGYGGYFTHGLGHGYGVEIHEEPYASAAGNTILKENMTLTIEPGIYIPGLGGVRIEDDILVLKDGYRMLTSATRELVKLKF

SEQ ID NO: 9959 - protein, 447 aa, Leuconostoc mesenteroides subsp. mesenteroides ATCC 8293
EWYHVKTKDFVHYEKLGIAIPKFQNKWEAVATGSVIKNTNKFFSDLPKKAIIAYFTSYTPTGQKQYVAYSIDNGVTYQPYSDGAIMSASSAKAHFRDPYVFFNKETKKMTMYLAEDDKIGVYTSGDGKNFNYVGATPLNSGALNGKDLGLIECPNLKTMCDTTTGTTKTVMFFGANGYNYGQTSGSYYMVGHLDDNGVFVAEQQPKRVDDGSDYYASNYFQTSDNTNILSIGWLGNWGYSCKKIVDANNEQSYKLGSLSLAHQLNLTKVNGEYTMASSLVKPYDSLTKTVKDTINTSQLSKDNDGYYQLLDTQRWTSQNFYLQMTNKKKETVCGNIHLSFKQKDSTVDLNYNADTGYYTVSRQTKNIADSDANTEYNKKFVEQSGVVNPNVFKLHVYTDKTSVEFEFENSGRTYSLLKYSTEENLLFNIETDSENDLFYSMSNIDNK

SEQ ID NO: 9960 - protein, 115 aa, Triticum aestivum
MARGAATQLVLVSMVAAMLLVACDAGLSCGQVTSALSPCSSYARGNGANPPAACCSGVRSLAGAARSTADKQAACKCIKSAAGGLNAGKAAGIPLKCGVSVPSAISSSVDCSKIR

SEQ ID NO: 9961 - protein, 966 aa, Prochlorococcus marinus str. MIT 9211
MIRQFSDCEEFCDRHIGIDACAQESMLAALGFTDLEDFVASVIPNQILNQNSSSNLLSKGSNELQALEQLNEIARKNIVNRSLIGLGYFGTLMPPAIKRNILENPAWYSSYTPYQAEISQGRLEALFNFQTLISELTGLPISNASLLDEATAAAEAMSLSLLVHKASHARKFFVDQAVFPQTIEVLRTRAEPLNIVLEQIDPRNCEIDEKVFGLLIQLPGSDGRLWDPSLAIEKAHRVGALATVAIDPLAQVLLKPVGELGADIAIGSSQRFGVPMGFGGPHAAFFATKETFKRQVPGRLVGQSVDQDGQIALRLALQTREQHIRRDKATSNICTAQVLLAIIASFYAIYHGPEGLEAIAKRIACFRKRLEDVLRILGYPLEPISGFDTISVNCEEATEIHKLAALKGFNFRILPLGASIEKATGFAISLDELSNEEEINSLSEIFAKVKGEVYKTPSTCDLNIEDCLSELPLRQTPWLNQKVFHSFRSETELIRYIQLLASKDFSLVHGMIPLGSCTMKLNATAELIPVSWKEFSSIHPLAPIEQSQGYEQLIKELESWLSELTGFNGASLQPNAGSQGEYAGLLVIREWHKSRGHQNRNVCLIPTSAHGTNPASAVMSGFRVVSIICDEQGNIDLRDLVQKVEVHSSELAALMITYPSTHGVFEPKIREICELVHDHGGQVYLDGANLNAQVGLCKPGEYGADVCHLNLHKTFCIPHGGGGPGVGPIAVAKHLLPYLPGHPFRKCGGVNSIGAVSAAPFGSASILPISWMYIRMMGLNGLRKASSVAILSANYLASRLDPYYPILFRGPNGNVAHECILDLRPIKTKTGIEVDDIAKRLMDYGFHAPTVSWPVAGTLMVEPTESESLAELDRFCDAMISIRKEIEAIESGDSDLNNNVLRLSPHTLQTVTSEDWDRPYSRQQAAFPLKGQIKNKFWPAVSRIDNAFGDRNLVCSCPSMEDFAEN

SEQ ID NO: 9962 - protein, 319 aa, Fusobacterium nucleatum subsp. nucleatum ATCC 25586
MEYFKKFKERKIMEKIYDVIIVGAGPAGLTAGIYAGRGNLSTLILEKEGIGSMIMTHQIDNYPGSHIGASGKEIYDTMKKQALDFGCEIKPATVLGFDPYDEIKVVKTDAGNFKTKYIIIATGLGKIGAKKVKGENKFLGAGVSYCATCDGAFTKGRVVSLVGKGDEIIEEALFLTRYAKEVNIFLTSDDLDCNEELKEAILSKENVKITKKVKLLEIKGEEFVTELELEIAGNKETISTDFVFLYLGTKNNIELYGEFVNLSEAGYIITDETMKTRTDKMYAIGDIREKDVRQVATATNDGVIATTFILKEILKSKKK

SEQ ID NO: 9963 - protein, 536 aa, Rhodococcus sp. 19070
MSFQVALSFEDGVTRFIKCGPNETVADASYKARINIPLDCRDGACGTCKALCESGNYDGGDYIEEALTDDEAEQGFCLPCQMVPESDLVLQIATTSDVAKTAAATYTATITDLQRFSPSTVGFTVEIPNRDDLVFLPGQYVNITVPGTEQTRSYSFSTGPNDPQLSFLVKITEGGLMSEYLSDRAQVGDTLQFTGPFGSFFLRERKRPALLLAGGTGLAPLLAILSKMQEEGSDLPVHLVYGVSFDQDLVELDKLEAYTRSLPNFTFDYCVSDPESTAPNKGYVTGLFEPKHLNDGDVDVYLCGPPPMVEAVRTHLSDEGISVTNFYFEKFNNSATPGAAEPAPRPTERELEAATRAAEETGLPVSLGAAEQVPVGNYEIGEEHPPVTESDAQFDARMALELGALELTIGRLTDAQLVEFRILAEASTASIDHDRFTDAGAFTDTNAAFHEFLFRCCGNPVLLEAYNRLEVTQLMRKVLRTAQWVDEQIPHDHLQIVRAFERKDRAAARDLIVSHAEHAKATMRRAIEESAKVELA

SEQ ID NO: 9964 - protein, 96 aa, Vibrio sp. Ex25
FIMDKVDMILLMSVNPGFGGQSFIPHTLDKLRAVRKMIDESGRDIRLEIDGGVKVDNIREIAEAGADMFVAGSAIFGQPDYKQVIDQMRTELAEVK

SEQ ID NO: 9965 - protein, 584 aa, Zea mays
  misc_feature (7)..(7): Xaa can be any naturally occurring amino acid
ERSRHLXTSGISEIPEEATFTNVEQFLEPLELCYRSLCACGDKPIADGSLLDFLRQVSTFGLALVKLDIRQESDRHTDVLDSITTHLGIGSYAEWSEEKRQDWLLSELRGKRPLFGSDLPQTEETADVLGTFHVLAELPADCFGAYIISMATAPSDVLAVELLQRECHVKQPLRVVPLFEKLADLEAAPAAVARLFSIDWYMNRINGKQEVMIGYSDSGKDAGRLSAAWQMYKAQEELIKVAKHYGVKLTMFHGRGGTVGRGGGPTHLAILSQPPDTIHGSLRVTVQGEVIEHSFGEEHLCFRTLQRYTAATLEHGMHPPISPKPEWRALMDEMAVVATKEYRSIVFQEPRFVEYFRSATPETEYGRMNIGSRPSKRKPSGGIESLRAIPWIFAWTQTRFHLPVWLGFGAAIKHIMQKDIRNIHILKEMYNEWPFFRVTLDLLEMVFAKGDPGIAAVYDKLLVADDLQSFGEQLRKNYEETKELLLQVAGHKDVLEGDPYLKQRLRLRESYITTLNVCQAYTLKRIRDPSFQVSPQPPLSKEFTDESQPAELVQLNEQSEYAPGLEDTLILTMKGIAAGMQNTG

SEQ ID NO: 9966 - protein, 109 aa, Zea diploperennis
ATALVALVLLAATSEAAISCGQVASAIAPCISYARGQGSGPSAGCCSGVRSLNNAARTTADRRAACNCLKNAAAGVSGLNAGNAASIPSKCGVSIPYTISTSTDCSRVN

SEQ ID NO: 9967 - protein, 548 aa, Oryza sativa (japonica cultivar-group)
MSAAHLLRHSRKLRTLRDALDYDRSALVRYFSAASASFPTKGGAAAGVEKRIGGARFPQCKQPGKELETFKVSLGGLNGRYACRRAPNNCIPTTITGLNGSLSCGQVSSARSFSSSADLPPHQEIGMPSLSPTMTEGNIARWLKKEGDKVSPGEVLCEVETDKATVEMECMEEGYLAKIIHGDGAKEIKVGEIIAVTVEEEGDLEKFKDYKPSTSAAPAAPSEPKAQPEPAEPKVKETEPSRTPEPKAPKTEEASQPGGRIFSSPLARKLAEDNNVPLSSVMGTGPDGRILKADIEDYLASVAKGGKREALAAPGLSYTDVPNTQIRKVTANRLLSSKQTIPHYYLTVDARVDNLIKLRGELNPLQESSGGKKISINDLVIKAAALALRKVPQCNSSWMSDFIRQYHNVNINVAVQTEHGLFVPVIRDADKKGLGTIAEEVKQVAQRARDNSLKPEDYEGGTFTISNLGGPFGIKQFCAIINPPQSAILAIGTAEKRVIPGSVDGQYEFGSFMSATMSCDHRVIDGAIGAEFLKAFKGYIENPNSMLL

SEQ ID NO: 9968 - protein, 630 aa, Magnaporthe grisea 70-15
MCLLYAGIAALLFRYPTCPANLVPAPSGTTAALPRIAPELEVAEGHRADSSEMLLSPAHSVMFATGSVLVAASVAAAQNVMPFVNPAVPTGVPIPGNYSGPLRPRVHFTPPQHFMNDPNGMFRDANGIWHVYYQYNPTGLVAGNQHWGHATSQDLYHWNNQKIAIFPPEETIFAYSGSIVVDVNNTSKFFPPGKKDGVVAILTLAQFMEDGTAGPQTQALAYSMDGGFTFEYYDKNPVIGGTSSQFRDPKVFWFQPPPGSQFMEGYWVMAVAYSHEFAVGIYTSTDLKDWTPRSNFTNRGLLGAQYECPGLVKMPIRDGVGGPVIGEAYVLIVSVQPGAPLGGSVTQYFPGNFNGTHFFPFDDATRLTDFAKDNYAAQYFEGLPSNMNAVNMGWASNWAYAQLTPTGQLEGWRGGLTLPRSNYLTKAPRIGWTMVDEPYNLAPVLSVNPNDGDSELTEADSKSLDMTAWNSGAFLLDVLVTGLEFKKLNPDASLNFTLSAPGNSSESLKFGMYFAGDRPFFIDRGHARSLFEDNVFFTDKFSTADVWDTTPGSNWTLRAIIDRSIAEFFVDGGIHSATVTIFPSQPLSVLGVQSGGLNTGAKVNLSVKPLQDTWVRNGRPPSGDADGDDA

SEQ ID NO: 9969 - protein, 178 aa, Oenococcus oeni
PIVYDPTIADTIENYSELFVEPQGAAFLDINHPENIQSTLKNAANGRDIKLLVVSDAEGILGIGDWGVQGVDIAVGKLMVYTVAAGIDPSTVLAVVIDAGTNNEKLLKDPMYLGNKFNRVRGDKYYDFIDKFVNHAESLFPNLYLHWEDFGRSNASNILNSYKDKIATFNDDIQGTGI

SEQ ID NO: 9970 - protein, 621 aa, Glycine max
MATVIRNPILFPSTSHHPNQNHTFLTLRFSQTLRSSLRSKSRFAVSCSQSEPPPPHPSSSRRRPPYIPNLIPDPSYVRIFDTTLRDGEQSPGASMTSKEKLDVARQLAKLGVDIIEAGFPAASKDDFEAVKMIAQAVGNAVENDGYVPVICGLSRCNEKDIRTAWEAVKYAKRPRIHTFIATSPIHMEYKLRMSKDKVVDIARNMVKFARSLGCDDVEFSPEDAGRSDREFLYEILGEVIKVGATTLNIPDTVGITMPSEFGKLIADIKANTPGIENVIISTHCQNDLGLSTANTIEGARAGARQLEVTINGIGERAGNASLEEVVMALRCGAHVNGNLYTGINTKHIFLTSKMVEEYTGLQIQPHKALVGANAFAHESGIHQDGMLKHKGTYEIISPEDIGLERTNEAGIVLGKLSGRHALRKRLEELGYELNDDQVQTLFWCFKAVAEQKKRVTDADLRALVSDEVFQAEPVWKLGDLQVTCGTLGLSTATVKLLSSDGSTHVACSIGTGPVDSAYKAVDLIVKEQVTLLEYSMNAVTEGIDAIATTRVVAIRGESETSTITTHALTGETVIRTFSGTGAGMDVVVSSVKAYIAALNKMSGFKESSQSAEKISISSLKI

SEQ ID NO: 9971 - protein, 420 aa, Thermus thermophilus HB27
MGPLLVWHRGDLRLHDHPALLEALARGPVVGLVVLDPNNLKTTPRRRAWFLENVRALREAYRARGGALWVLEGLPWEKVPEAARRLKAKAVYALTSYTPYGRYRDAKVQEALPVPLHLLPAPHLLPPDLPRAYRVYTPFARRFLGVEAPLPAPEALPKGPEEGEIPREDPGLPLPEPGEEAALAGLRAFLEAKLPRYAEERDRLDGEGGSRLSPYFALGVLSPRLAAWEAERRGGEGARKWVAELLWRDFSYHLLYHFPWMAERPLDPRFQALPWQEDEALFRAWYEGRTGVPLVDAAMRELHATGFLSNRARMNAAQFAVKHLLLPWKRCEEAFRHLLLDGDRAVNLQGWQWAGGLGVDAAPYFRVFNPVLQGERHDPEGRWLKRWAPEYPSYAPKDPVVDLEEARRRYLRLARDLARG

SEQ ID NO: 9972 - protein, 106 aa, Brassica juncea
VCQKETVCVTGASGFIGSWLVMRLLERGYFVRATVRDPGNLKKVQHLLDLPNAKTQLTLWKADLSDEGSYDDAINGCDGVFHIATPMDFESKDPENEVIKPRVNGN

SEQ ID NO: 9973 - protein, 178 aa, Lactobacillus hilgardii
PVVYDPTIADTIENYSHLFLDPQNAAFLSIDDQDDIEASLKNASAGCDIKLIVVTDGEGILGIGDWGVQGVDISVGKLMVYTAAAGVDPKSVLPVVLDVGTNRKELLADDLYMGNHTQRVTGDKYYNFVDKFVETAENLFPDMYLHFEDFGRSNAANILNKYKDNILTFNDDIQGTGI

SEQ ID NO: 9974 - protein, 714 aa, Prochlorococcus marinus str. MIT 9313
MVASGSAATANTRSRDRAGQDMATRAFPLAAITGHGTLKLSLLLAAVDPELGGVVIAGGRGTGKSVLARGLHALLPPIDVLDLEALSKDQQTSQIHRPIGLNLDPKLPEEWDEASQRLITKQGATDEENSKEPLPSRVIPAPFVQVPIGITEDRLVGAVDVTASLTSGTPVFQPGLLAEAHRGVLYLDELNLLDDGIVNLMLAAVGAGENRVEREGLSLSHPCRPLLIATYNPEEGAMRDHLLDRFAIALSADQLISNEQRVEITEAVLAHGQCSVSFAAKWAQETEALATQLLLARQWLPDVQISHAQIEYLVNEAIRGGVEGHRSELYAVRVARAHAALSGRDQVEADDLQVAVRLVIAPRALQLPPQEEQMEPPPPEQQQAPPPPDQSQEDTSEEDEDEEDDEDTPEEQTSPPVPEEFMLDPEAIAIDPDLLLFSAAKSKSGNSGNRSAVLSDSRGRYVRPIIPRGPVRRIAVDATLRAAAPYQKARRSRQPDRTVIVEEGDLRAKLLQRKAGSLVIFLVDASGSMALNRMQGAKGAVIRLLTEAYENRDEVSLIPFRGEQAEVLLPPTKSITAAKRRLEVMPCGGGSPLAHGLTQAARVGANALSKGDLAQVVVVAITDGRGNVPLGTSLGQPQLEGEDPPDLKQELLDVASRYRSLGIKLLVIDTERKFIGSGMGKDLAEAAAGKYVQLPKATDQAIAAIAMEAIDQVK

SEQ ID NO: 9975 - protein, 178 aa, Leuconostoc mesenteroides subsp. mesenteroides
PVVYDPIVAESIEQYNEIYTNPQNAAFLSIDHPENIESSLKSVADGRDIELVVVTDAEGILGMGDWGVNGVDIAVGKLMVYTAAAGIDPATVLPVSIDAGTNNKILLENPLYLGNKHERIAGEKYLEFIDEFVTAEQKLFPASLLHWEDFGRSNAQVILDKYKDSIATFNDDIQGTGI

SEQ ID NO: 9976 - protein, 488 aa, Escherichia coli
MKKVNHWINGKNVAGNDYFQTTNPATGEVLADVASGGEAEINQAVAAAKEAFPKWANLPMKERARLMRRLGDLIDQNVPEIAAMETADTGLPIHQTKNVLIPRASHNFEFFAEVCQQMNGKTYPVVDKMLNYTLVQPVGVCALVSPWNVPFMTATWKVAPCLALGNTAVLKMSELSPLTADRLGELALEAGIPAGVLNVVQGYGATAGDALVRHHDVRAVSFTGGTATGRNIMKNAGLKKYSMELGGKSPVLIFEDADIERALDAALFTIFSINGERCTAGSRIFIQQSIYPEFVKRFAERANRLRVGDPNDPNTQVGALISQQHWEKVSGYIRLGIEEGATLLAGGPDKPSDLPAHLKGGNFLRPTVLADVDNRMRVAQEEIFGPVACLLPFKDEAEGLRLANDVEYGLASYIWTQDVSKVLRLARGIEAGMVFVNTQNVRDLRQPFGGVKASGTGREGGEYSFEVFAEMKNVCISMGDHPIPKWGV

SEQ ID NO: 9977 - protein, 111 aa, Zea diploperennis
AVATALVALVLLAATSEAAISCGQVASAIAPCISYARGQGSAPSAGCCSGVKSLNNAARTTADRRAACNCLKNAAAGVSGLNAGNAASIPSKCGVSIPYTISTSTDCSRVN

SEQ ID NO: 9978 - protein, 620 aa, Arabidopsis thaliana
  misc_feature (89)..(89): Xaa can be any naturally occurring amino acid
MGASHSTNVNNHPHSRNASNHPLTNSNSTSSRHSASSSDRLSVSNLRSQLTTIYRNQEEEEEEEEEEEEEEEGGKEKRAEEEAKSFSLXVRDFDLSGLNCIRVSRRNYILMDPHKKVALETEFFTEYGEASRYQIQEVIGKGSYGVVASAIDTHSGEKVAIKKSNDVFEHVSDATRILREIKLLRLLRHPDIVEIKHVMLPPSRREFRDIYVVFELMESDLHQVIKANDDLTPEHYQFFLYQLLRGLKFIHTANVFHRDLKPKNILANSDCKLKICDFGLARVSFNDAPSAIFWTDYVATRWYRAPELCGSFFSKYTPAIDIWSIGCIFAEMLTGKPLFPGKNVVHQLDIMTDLLGTPPPEAIARIRNEKARRYLGNMRRKPPVPFTHKFPHVDPLALRLLHRLLAFDPKDRPSAEEALADPYFYGLANVDREPSTQPIPKLEFEFERRKLTKEDVRELIYREILEYHPQMLQEYLRGGEQTSFMYPSGVDRFKRQFAHLEENYGKGEKGSPLQRQHASLPRERVPAPKKENGSHNHDIENRSIASLVTTLESPPTSQHEGSDYRNGTSQTGYSARSLLKSASISASKCIGMKPRNKSEYGESNNDTVDALSQKVAALHT

SEQ ID NO: 9979 - protein, 177 aa, Lactobacillus plantarum
NPVVYDPVVADSIEQYNELFLDPQNAAFVSVDAPEDIEATLKNARGRRDIRLVVVTDAEGILGMGDWGVNGVDIAIGKLMVYTAAAGIDPSQVLPVSIDAGTNNQKLLDDPLYLGNRHKRVSGEQYYDVIDKFVAAEQQLFPDSLLHFEDFGRDNAQVILDKYKDQIATFNDDIQGT

SEQ ID NO: 9980 - protein, 927 aa, Staphylococcus aureus subsp. aureus NCTC 8325
MNMKKKEKHAIRKKSIGVASVLVGTLIGFGLLSSKEADASENSVTQSDSASNESKSNDSSSVSAAPKTDDTNVSDTKTSSNTNNGETSVAQNPAQQETTQSSSTNATTEETPVTGEATTTTTNQANTPATTQSSNTNAEELVNQTSNETTSNDTNTVSSVNSPQNSTNAENVSTTQDTSTEATPSNNESAPQSTDASNKDVVNQAVNTSAPRMRAFSLAAVAADAPVAGTDITNQLTNVTVGIDSGTTVYPHQAGYVKLNYGFSVPNSAVKGDTFKITVPKELNLNGVTSTAKVPPIMAGDQVLANGVIDSDGNVIYTFTDYVNTKDDVKATLTMPAYIDPENVKKTGNVTLATGIGSTTANKTVLVDYEKYGKFYNLSIKGTIDQIDKTNNTYRQTIYVNPSGDNVIAPVLTGNLKPNTDSNALIDQQNTSIKVYKVDNAADLSESYFVNPENFEDVTNSVNITFPNPNQYKVEFNTPDDQITTPYIVVVNGHIDPNSKGDLALRSTLYGYNSNIIWRSMSWDNEVAFNNGSGSGDGIDKPVVPEQPDEPGEIEPIPEDSDSDPGSDSGSDSNSDSGSDSGSDSTSDSGSDSASDSDSASDSDSASDSDSASDSDSASDSDSDNDSDSDSDSDSDSDSDSDSDSDSDSDSDSDSDSDSDSDSDSDSDSDSDSDSDSDSDSDSDSDSDSDSDSDSDSDSDSDSDSDSDSDSDSDSDSDSDSDSDSDSDSDSDSDSDSDSDSDSDSDSDSDSDSDSDSDSDSDSDSDSASDSDSDSDSDSDSDSDSDSDSDSDSDSDSDSDSDSDSDSESDSDSDSDSDSDSDSDSDSDSDSASDSDSGSDSDSSSDSDSESDSNSDSESVSNNNVVPPNSPKNGTNASNKNEAKDSKEPLPDTGSEDEANTSLIWGLLASIGSLLLFRRKKENKDKK

SEQ ID NO: 9981 - protein, 734 aa, Chromobacterium violaceum ATCC 12472
MTQGKWQSTSWRLLLAIGIALSCVFAGVAYIQHRQSQILTNAVLYQDDNIIWAYFQLEAENLHLQTALHAAQHDQMSPEDLQQRYDIFVSRVGIIRGGQYRRLLQDQPQFLLMQARLDAFIRQGDAYFSAANAANDHARQARLERLSASLSDGLHDLSLQANQAAALQVDNRNRTMQQYIAVSNWLMTFEWLLIFGFGFTVIRQLRQLEKRRQTLETLTDNLEEARSQAEAGSLAKSAFLANMSHEIRTPLNGVLGMLALLADSHPSASQANYIRTAEESARHLLLLLNDVLDASKLESGKLELAPVTCNLAYLLRQVTNLMNAQAQAKGLMLNLEMASEIPQWVELDPTRLRQIVLNLLSNAIKFTERGGVTVHASATAGEQPGTAQLLLVVTDTGIGMDQATLSKLFKRFSQGDGSTARQFGGSGLGLEISQSLAQLMGGGISVSSVPGQGSCFQLTLPLRVIAAPDLPPETAEASFSHDVLGRPLRILVVDDNAVNRKYLQALLERLNQQPTLASDGPEALRLAASQPFDLTLMDLHMPGMDGAETARRLRKEAQTPGMPIVALTADAFPETRQQMLAQGLDDFLTKPLGRDQLLAVLQKLFPPEPGAAPQTREEPALDARTIADFIELLSEEQYRQLVEQYFSSHQESIRQLQLNQQQPDRESLFHLAHGLKGGAVTLGFASLAQRCLELEQQSVQSNCTPAPQIALVIAQFQATRQACIAQGYLHCQVG

SEQ ID NO: 9982 - protein, 161 aa, Pediococcus parvulus
IADTIENYSDLFIQSQNAVFLSIDDPDSMKASLKNAADGRDIRLIVVTDAEGILGIGDWGTNGVDISVGKLMVYTAAAGIDPSQVMPVVLDVGTNNQDLLKNPMYLGNRHERITGDRYYKFVDQFVNTAEDLFPKLYLRFEDFGRDNAANILNKYKDQITT

SEQ ID NO: 9983 - protein, 340 aa, Magnaporthe grisea 70-15
MDDSDSDSDSDAGAQLAMAGGEGDIVTPGQVITEDPQWMRGHGTYTFPASPAIMSSVAGTVSRTNKLLSVRPMRARYTPEVGDLVVGRIVEVQARRWKVDVGGVQLAALPLSAINLPGGILRKRTETDELQIRSFFAEGDLLVAEVQQLFGDGGASLHTRSLRYGKLRNGVFAAVSGTGGGGVVRARRQVWTMEIASTGTSATWQDKQQKAASSQAPPSIDVVLGVNGYVWISKHVEDPTEGDGSANATGTGISNMEEAVSAKMYSSQNAPIDPVTMREIVRVRGVITALVENGVRVDEDMVERAYREAVEMARASEGGEDDIYLGGERGAQLAAVLTGR

SEQ ID NO: 9984 - protein, 267 aa, Burkholderia xenovorans LB400
MTEPFLIVEHEGAVLSARLNSPQTRNALSEPAQMDELVELCNRVRRDRTVKAVVLSGEGSAFCAGGNVKDMRERGGIFAGSPHDLRESYRNTIQRIPLALYELDVPVIAAINGPAIGAGLDLACMCDIRIASDKALFAESFVKVGIVPGDGGAWLLPRAIGMQRASLMAFTGETIDAAKALEWGLVAEVVPADRLITHALGLAQRIAGNASHALRLTKRLLREGQHMRLDSLLEMSAAYQALAHHTHDHLEAVNAFLEKRAPQFTDR

SEQ ID NO: 9985 - protein, 950 aa, Neisseria gonorrhoeae FA 1090
MKLSELFNPNEFAARHLSFGDEAALLAAVGEKSMDEFVGNTLPQSIRMPSELDLPEALTEADALAKLKGIASKNVINKSYIGLGYYPTRVPNVILRNVLENPGWYTAYTPYQAEIAQGRLEALLNFQQVCIDLTGFPVAGASLLDEATAAAEAMAMAHRVGKVKSERFFVDARVYPQTLDVMKTRAKYFGFELVVSDFAQADEGEYFGALFQYVGKDGDVQDLQDVIGRLKAKGTIVAVAADIMSLVLLKSPAELGADIALGNTQRFGVPMGFGGPHAAYFAFKDEFKRSAPGRIIGVSKDASGKPALRMALSTREQHIRREKATSNICTAQALLANLAGMYAVYHGPKGVKRIANRIHTLASVFADALVSDGLKVVHEVFFDTVTVDFGSKEKADQVFAAALESGYNLRSVNNTQVAAAFHETSVYEDLADLYRAFTGKDTFTFADDVKGRLNAELLRQDDILQHPVYNSYHTEHEMLRYLKKLEDRDLAMNRSMISLGSCTMKLNATAEMLPITWTEFSDIHPYAPEAQTAGYRELLADMENSLKAITGFDAISFQPNSGAQGEYSGMLAIRRYQEAQGEAHRNICLIPKSAHGTNPATAAMLGLKVVVVDTDEHGNVNIDDLKAKAEQHRDALSAIMITYPSTHGVYEEGIRDICRIIHENGGQVYMDGANLNAQIGIMQPAEVGADVLHMNLHKTFCIPHGGGGPGMGPIGLKAHLAPFAPGHTLTDTHSASAGQTSVAAAAFGSASILPITWMYLTMMGKQGMEQATRWALLNANYVAKRLSEDYPILYTGKNGRIAHECIVDLRPLKAESGITETDIAKRLMDYGFHAPTVSFPVAGTLMIEPTESESKAELDRFIAALKSIRREVQKVIDGEWPKDDNPLVNAPHTAADITGEWAHPYSREEAVFPLPFVREHKFWPFVNRVDDVYGDRNLVCSCPPMENYED

SEQ ID NO: 9986 - protein, 322 aa, Streptomyces avermitilis MA-4680
MNTAQHKIGSGFGATSTAVDVLHGIDLSGQLAIVTGGYSGLGLETTRALTGAGARVVVPARRPDVAREAVAGIDGVEVDELDLGDLESVRGFAERFLASGRTIDIVINNAGIMACPETRVGPGWEAQFATNHLGHFALVNRLWPAVEPGGARVVSVSSGGHHLSGIRWDDVHWTHDYDKWEAYGQAKTANVLFAVHLDRLGRESGVRAFSLHPGGILTPLQRHLAKEEMVERGWIDENGDLVHPDAFKTPEQGAATQVWAATSPQLAGMGGVYCEDCDIAEPASADGERGGVKDWATDPEQAARLWDLSAELTGVNAFASRA

SEQ ID NO: 9987 - protein, 104 aa, Brassica napus
MMLRGRVMRLASRHLGSHGFSTEIFVSRLSFYTTEEEFKKVFSPFGAIEEVRLVRDNQTGRLKGFGFVRYSSQEEAQKAIKAMDGRILRGRLIFAEMAKEHGTV

SEQ ID NO: 9988 - protein, 739 aa, Glycine max
MESCNCIDPQVPADDLLMKYQYISDFFIALAYFSIPLELIYFVKKSAVFPYRWVLVQFGAFIVLCGATHLINLWTFRIHSRTVAVVMTTAKVLTAVVSCATALMLVHIIPDLLSVKTRELFLKNKAAELDREMGLIRTQEETGRHVRMLTHEIRSTLDRHTILKTTLVELGRTLALEECALWMPTRTGLELQLSYTLRQQNPVGYTVPIHLPVINQVFSSNRAVKISPNCPVARLRPYAGKYMPGAVVAVRVPLLHLSNFQIYDWPEVSTRSYALMVLMLPSDSARQWHVHELELVEVVADQVAVALSHAAILEESMRARDQLIEQNVALDLARREAETAIRARNDFLAVMNHEMRTPMHAVIALSSLLQETDLTAEQRLMVETILKSSNLLATLINDVLDLSRLEDGSLQLEAATFNLHSLFREVLNLIKPVASVKKLSLTSHVASDLPMYAIGDEKRLMQTILNVVGNAVKFSKEGCISITAFVAKPESFRDARIPDFLPVPSDNHFYLRVQVKDSGSGINPQDIPKLFTKFAQNQSLTRNPAGSGLGLAICRRFVNLMEGHIWVESEGIGKGCTVTFIVKLGIPDRSNEFKLPFVPKVPGNHGSTNFAGLKVLVMDDNGVSRTVTKGLLMHLGCDVTTASSSEECLRVVSLEHEVVFMDVCTGLDGYELAVRIHEKFTKHQDRPLIVALTGNTKKVTKENCMRVGMDGLILKPVSVDKMRGVLSELLERRVLFESV

SEQ ID NO: 9989 - protein, 681 aa, Arabidopsis thaliana
MSGSVSGCGSGGCSIVWFRRDLRVEDNPALAAAVRAGPVIALFVWAPEEEGHYHPGRVSRWWLKNSLAQLDSSLRSLGTCLITKRSTDSVASLLDVVKSTGASQIFFNHLYDPLSLVRDHRAKDVLTAQGIAVRSFNADLLYEPWEVTDELGRPFSMFAAFWERCLSMPYDPESPLLPPKKIISGDVSKCVADPLVFEDDSEKGSNALLARAWSPGWSNGDKALTTFINGPLLEYSKNRRKADSATTSFLSPHLHFGEVSVRKVFHLVRIKQVAWANEGNEAGEESVNLFLKSIGLREYSRYISFNHPYSHERPLLGHLKFFPWAVDENYFKAWRQGRTGYPLVDAGMRELWATGWLHDRIRVVVSSFFVKVLQLPWRWGMKYFWDTLLDADLESDALGWQYITGTLPDSREFDRIDNPQFEGYKFDPNGEYVRRWLPELSRLPTDWIHHPWNAPESVLQAAGIELGSNYPLPIVGLDEAKARLHEALSQMWQLEAASRAAIENGSEEGLGDSAEVEEAPIEFPRDITMEETEPTRLNPNRRYEDQMVPSITSSLIRPEEDEESSLNLRNSVGDSRAEVPRNMVNTNQAQQRRAEPASNQVTAMIPEFNIRIVAESTEDSTAESSSSGRRERSGGIVPEWSPGYSEQFPSEENRIGGGSTTSSYLQNHHEILNWRRLSQTG

SEQ ID NO: 9990 - protein, 951 aa, Arabidopsis thaliana
MNDGDVSRQIQQMVRFIRQEAEEKANEISVSAEEEFNIEKLQLVEAEKKKIRQDYEKKEKQADVRKKIDYSMQLNASRIKVLQAQDDIVNAMKDQAAKDLLNVSRDEYAYKQLLKDLIVQCLLRLKEPSVLLRCREEDLGLVEAVLDDAKEEYAGKAKVHAPEVAVDTKIFLPPPPKSNDPHGLHCSGGVVLASRDGKIVCENTLDARLDVAFRMKLPVGIQASFRIGLVLPRVVASTERQISSTVLKRASESVSFSFAPYINGFGFSSLSNFSLSYESFPTETSIRYFHASRETLAKRKEDADRLLSHRERKKQTVKTKGKFSKREKKTDKPPVEAPYVPPRLKRLAKGLPGKTVDIFEGMTLLELSKRTGESVAVLQSILINVGETFSSEFDTISVDVAELLAMEIGINVRRQHSTEGSEILPRPPVVTVMGHVDHGKTSLLDALRNTSVAAREAGGITQHVGAFVVGMPDSGTSITFLDTPGHAAFSEMRARGAAVTDIVVLVVAADDGVMPQTLEAIAHARSANVPVVVAINKCDKPGANPEKVKYQLTSEGIELEDIGGNVQAVEVSAAKSTGLDKLEEALLLQAVDMDLKARVDGPAQAYVVEARLDKGRGPLATIIVKAGTLVRGQHVVIGCQWGRLRAIRDMIGKTTDRATPAMPVEIEGLKGLPMAGDDVIVVESEERARMLSEGRKRKYEKDRLLKAEEARLEEAAARLETESEEGFVRVELPIVVKSDVQGTAQAVADALRTLNSPQVSVNIVHSGVGAISHSDLDLAQACGACIVGFNVKGGSTGNLSAAQGSVKVFHHRVIYHLLEDIGNLIVEKAPGVSEMEVSGEAEVLSIFKILGKRRTEEDGVNIAGCKVMDGRVCRSGLMRLLRSGEVVFEGSCASLKREKQDVEQVGKGNECGLVFGDWNDFRVGDVIQCMEPVIRKPKFISSESGAVRIEC

SEQ ID NO: 9991 - protein, 108 aa, Azoarcus sp. EbN1
MSEHIHYVTDGNFEAEVLQSQTPVLVDYWAEWCGPCKMIAPILDDVAKEYAGKLKVAKLNIDENQETPAKFGVRGIPTLMLFKGGNVEATKVGALSKSQLTAFIDSNL

SEQ ID NO: 9992 - protein, 394 aa, Magnetococcus sp. MC-1
MDQSTVILDDTTLRDGEQSAGVAFSLEEKLKIATLLDRAGVPELEVGIPAMGEEERQDIRAIAQLGLRARLLVWLRMHDADISHLPGLGVAMADLSTSASDQQIRHKLGRNRRWVLNTIQHQVTRVSQEMGIEVCVGCEDASRAEIDFLLRMGETAQKAGAKRLRFADTLGILDPFTTYERFKTLRANLDLELEIHAHDDLGLATANTLAAIRGGASHANTTVNGLGERAGNAPLEEVAVALQTLHGGYTGIQCDQLQVLSQFVESASGRPLSCQKSVVGSAVFRHESGIHVDGLLKDRRNYQGVDPDILGRHHELVLGKHSGRQGVIDAYGRMGIAISQELAGQLLQSVKGFATRYKRSPEQAELQSFYRFLTEPAPLTPANHGGLLHATPRV

SEQ ID NO: 9993 - protein, 396 aa, Mesoplasma florum L1
MNNNTQEFSQKAKIKVIGVGGGGNNAVSRMFEQGAHGVDFYIANTDAQVLAGSNVPNKIILGEKSTKGLGAGANPEVGKTAALESENDLRAALEGADLIFVTAGMGGGTGTGAAPVIARIAQETGALVVAIVTKPFRFEGKYRNTFAEEGIIELKKYVDSTIVISNDRLLEFIGAKPIQEAFAEADAILKQGVQTITDLIAVPALINLDFADVKTVMSKKGNALFGIGLGTGPDKANLAANDAISSTLLEAAIVGAKDVIVNVTGGEGISLNDAYDVVDVVNQAIDNPEVNIVFGVAINKELTEKDELVVTVIATGFDEEMIKSSANLGTKSNAASTFANLRTSSLYKSTHVEEEQKAPTSFEEDVLHAHQTMHSVNSGASTYSDDTEDDFPTFLK

SEQ ID NO: 9994 - protein, 469 aa, Burkholderia mallei ATCC 23344
MQTESNGRPGAGGGAARPALQQTLGTWQLWGIAVGLVISGEYFGWSYGWASAGTLGFVVTALFVAAMYTTFIFSFTELTTSIPHAGGPFAYARRAFGPTGGYLAGVATLVEFVFAPPAIALAIGAYLHVQFPGLEPKHAAMGAYLVFMALNIVGVQIAATFELVVTLLAIFELLVFMGVVSPGFAWSNFVKGGWAGADHFSAGAFHGMFAAIPFAIWFFLAIEGVAMAAEEAKHPKRSIPIAYVAGILTLVALAIGVMVFAGGAGDWTKLANINDPLPQAMKYIVGANSGWMHMLVWLGLFGLVASFHGIILGYSRQIFALAREGYLPEWLAKVHPRFKTPYRAILAGGVVGIAAIYSDELIQFGGQTLTANIVTMSVFGAIVMYIVSMAALFKLRRVQPRMERPFRAPLYPFFPAFALVAALVCLGTMVYFNALVASIFVAFVALGYGYFLATRAQREAAPADALLEE

SEQ ID NO: 9995 - protein, 221 aa, Glycine max
MKVVYFLVAILALTSTVVSAYDPSPLQDFCVAAKEKDGVFVNGKFCKDPKLVKAEDFFRHVEPGKTDNPLGSNVTQVFVDQLPGLNTLGIALARIDFAPKGLNAPHTHPRGTEILIVLEGTLYVGFVTSNQDGNRLFTKVLNKGDVFVFPIGLIHFQLNVGYGNAVAIAGLSSQNPGAITIANALFKANPPISSEVLTKAFQVDKSIIDYLQKQSWYDNNN

SEQ ID NO: 9996 - protein, 132 aa, Brassica napus
  misc_feature (2)..(2): Xaa can be any naturally occurring amino acid
  misc_feature (11)..(11): Xaa can be any naturally occurring amino acid
  misc_feature (16)..(16): Xaa can be any naturally occurring amino acid
  misc_feature (32)..(32): Xaa can be any naturally occurring amino acid
  misc_feature (35)..(35): Xaa can be any naturally occurring amino acid
  misc_feature (40)..(40): Xaa can be any naturally occurring amino acid
  misc_feature (47)..(47): Xaa can be any naturally occurring amino acid
  misc_feature (51)..(51): Xaa can be any naturally occurring amino acid
  misc_feature (60)..(61): Xaa can be any naturally occurring amino acid
  misc_feature (65)..(65): Xaa can be any naturally occurring amino acid
  misc_feature (67)..(67): Xaa can be any naturally occurring amino acid
  misc_feature (70)..(70): Xaa can be any naturally occurring amino acid
  misc_feature (75)..(75): Xaa can be any naturally occurring amino acid
  misc_feature (84)..(85): Xaa can be any naturally occurring amino acid
WXSSMLSSAAXVTSPXQATMVAPFTGLKSSAXFPXHPAKXTTNITSXASNXRKELTCMKXXPPPXKXKVXNLSYXPDLTEIELXXEVEYPPPRGFPWVPWKGFPGSGKGLGFGKGENFPPFGRPQRGPKGKG

SEQ ID NO: 9997 - protein, 566 aa, Magnaporthe grisea 70-15
MEENKAKVQAQPAAEQSTEQPAEPSKSALKKAAKASAKEASKAVKASKAAPVAVKKTDDIIGITVSKEENFPQWYQEVVLKAEMIEYYTEISGFYILRPAAMFVWSQIRKWFQEKIDVMGVEEASFPMFLSSKSLEKEKDHVEGFAPELAWVTKAGDKDLEVPVAVRPTSEAVMYPYYSKWIRSHRDLPLRLNQWNSVVRWEAKQTTPFLRAREFLWQEGHTAHLTEEDAGKEVLEILEHYAGVYEQLLAVPVVRGKKTENEKFAGGYYTTTVEGYIPSNGRGIQGATSHCLGQNFSKMFDITVEDPKKEKGHLHVWQNSWGLSTRVIGVMVMIHGDDKGLVFPPRIARTQAVLIPVGITAKTTPEERTAHTAKLDELNKTLKDAGVRVESDMRDGYTPAWKFNHWELKGVPLRLEFGPKDAAKDQVAFARRDTGEKGSIAIADLATKVPELLETIQKAMYDKADAAFRSHRIVVAEWEKVVPALDSKNVVLIPHCLDGKCEDHIKDITKGTGMELQADGQKAPSMGMKSLCIPFEQPEGLVEGTKCLSPDCDKLAQKYVMFGRSY

SEQ ID NO: 9998 - protein, 222 aa, Pseudomonas fluorescens PfO-1
MSAHDAVFNRAFGAFLFDMDGTVLNSIAAAERIWSAWAVRHGVNVETFLPTIHGVRAIDTITRLNLPGVDAEAQAAFITEAEIEDVEGIVEIPGAAAFLKSLPADRWAMVTSAPRDLALRRMGAAGIPEPAVMITAEDVTAGKPDPAGYRLAARRLGLEPADCLIFEDATVGIQAAEAAGAPLMIITTTHQHPLETAHATIASYRDIALSIDSDGQLRLQPQ

SEQ ID NO: 9999 - protein, 641 aa, Oryza sativa
MSSKFLAMYLLLALLSHGTYSYSATTASGWEDQDFFRHCPVSRCSDGGPEIRFPHGLQSSNTSSACGASCAKLACSGQDTILHHPFLGPCKVTSIDYKEAIMSIIPLVYSSSPCPLQKLIFDNLQPYDYHRCKLYSWAPAKIVRCSKEFTPNGTSPVDGYAFMNNADYITGPISCPSEASHFSYLVDARLCMYVLPLDCRIVSRGSIPIPGPAYSDIGGPTFKERAEKFINFAETTVSWYSDDEVTINCTECERQKHRCAFSSQRNRTFCMSREHHGSSVKVISATSSAAAFVVLSLIIATVLYISLKSRYDEEVHLKVEMFLRTYGTSKPTRYNFSDVKKIARRFKEQLGQGGFGSVYKGELPNGVPVAVKMIEHTTGNGEEFINEVATIGQIHHINIVRLLGFCSDGTRHILIYEFMPNESLEKYIFLHDPNTSQELLAANKMLDIALGIARGMEYLHQGCNQRILHFDIKPHNILLDYNFNPKISDFGLAKLCARDQSIVTLTKARGTMGYIAPELYSRNFGEISYKSDVYSFGMLVLEMVSGRRNSDPSIQNQNEVYFPEWIYEKVITGQDFVLSREMTEEDRLKVRQMALVALWCIQWNPRNRPSMTKVVNMLTGRLQNIEVPPKPFVSYESHAVP

SEQ ID NO: 10000 - protein, 368 aa, Rhodopirellula baltica SH 1
MTQRIERLVQSIADSDQPMDAILICSEVNVRYLSGFTGDSTWLLVRPDGKATLLSDRRYETQIAEECPALESAIRPPSQTLVALLAEYLADSSLKTIGFEADHVQVSTMHQWKEQIESVEWTQTSGLVETLRSIKDADELATIRRAISIAERSFLSVTNKLTPRMTELQIAHELEATMRSLGASGVAFDVIAGAEPSGALPHYHPRNIALADCRTLLIDWGARVDGYCSDLTRTLHKADVRSATADRFEAAYQAVLESQEAAISAIRDGVEAIEVDRAARQVLQNAGLGDAFKHGLGHSFGLEIHEDPRMGPMSTDVLREGMVLTVEPGVYFEGEFGIRIEDDILVTADGFERLSTLPKGLDDCRLVV

SEQ ID NO: 10001 - protein, 576 aa, Listeria monocytogenes
MKKVKASETLVQTLKNWGIDHVYGLPGDSIDTVVDALRKEQEAIEFIHVRHEEVATLAAAAYTKLTGKIGVALSIGGPGAIHLLNGMYDAKMDHVPMLVLAGQVTTDVLNTGFFQEVNLPAIFEDVAVYNKQIDNAETLADVVDEAIRTAYKEKGVAVLTIPNDIPSQVIKASLEAKPVKFEQENPKLDEAAIQEAVTLIEKAEKPVILAGLGTKHAGPELIAFSEKLKIPIIHSLPAKTIVPDDHPNALGNLGKIGTKPAYEAMQETDLLLMFGNDYPYSDYLPKKTDCIQIDIDPAKISKRFPAIVGLVGDAAEIISDLTAKIAPVEERKFLQACQENMQEWWKWLEEDIAQTSDPIAPEVVMANIQKIADKDAVFSIDVGTATVWSTRYLHLTPENDFIVSAWLGTMGCGLPGAIAAKKAFPDRQAIAIVGDGGFSMVMQDFVTAVGLNMPMIVVVLNNQQLSFIKYEQQSAGELNYAIDLPDINYAKFAESCGGIGFRVEKMADLEAAFENAKLATKPVIIDVSVDSAAAPLPGKIVMDEALGYTKFEIQSVLEDHRFAKMPPLKTILRRFL

SEQ ID NO: 10002 - protein, 146 aa, Pediococcus acidilactici
TIADTIENYSELYVQSQNATFLSIDDPDNMETALKNAADGRDIRLIVVTDAEGILGIGDWGTNGVDISVGKLMVYTAAAGIDPSQVLPVVLDVGTNNEKLLKDPMYLGNRHERIKGDRYFEFVDQFVQTAENLFPNMYLHFEDFGA

SEQ ID NO: 10003 - protein, 450 aa, Lactobacillus plantarum WCFS1
MKVIKFGGSSLASSQQLQKVLAIVEADQKRKYVIVSAPGKRFDGDTKVTDLLIQYARQTIHHQDTQAVTAAIIDRYAEIGHGFNVPEAQLTPIFETIRNLPKQSYADNTYLMAAFKAHGERLNAQLVAAVFQQSGLNARYLDPKDAGMVVTDVPDDAQIIKSSYDQLAKWANSEQILVIPGFFAYNRNGQICTFSRGGSDITGAIIARGVHAERYENFTDVDAIYAVNPSLVAKPAAISEMTFTEMRELSYAGFSVFHDEALIPAIEDNITVNVKNTNHPEAPGTLIQSTREPNPHYPVTGIASSSSFCSLYLRKYLLNKEVGLGRKILTILENHHISYEHMPSGIDDLTIIFDEHQLTPELEKTLVAEISTAINPDEIYFTHDYSILMLVGENMRNRVGIMSRAATALANDNIKLIMVNQGASEISIMFGVHDNDADQAVIALYKEFFD

SEQ ID NO: 10004 - protein, 565 aa, Haemophilus influenzae 86-028NP
MSKQIQIPDIGSDEVTVTEVMVNVGDTISVDQSIINVEGDKASMEVPAPEAGVVKEILVKVGDKVSTGTPMLVLEAAGAAPAADEPTAPVADAPTAPVVATAPTASAIVEVNVPDIGGDEVNVTEIMVAVGDTITEEQSLISVEGDKASMEVPAPFGGVVKEILVKSGDKVSTGSLIMRFEVLGAAPAASASASTSAPQTAAPATTAQAPQAAAPATTAQAPQAAAPDTTAQAAQSNNNVSGLSQEQVEASTGYAHATPVIRRLAREFGVNLDKVKGTGRKGRIVKEDIEAYVKTAVKAYESGATAQATGNGVANGAGLGLLPWPKVDFSKFGEIEEVELSRINKISGANLHRNWVIIPHVTHFDKADITDLEAFRKEQNALAEKQKLGVKITPVVFIMKAVAKALEAYPRFNSSITEDAQRLILKKYINIGVAVDTPNGLVVPVFKNVNKKGIIELSRELMEVSKKAREGKLTASDMQGGCFTISSLGGIGTTHFAPIVNAPEVAILGVSKSSMEPVWNGKEFAPRLILPMSLSFDHRVIDGADGARFISYLGSVLADLRRLVM

SEQ ID NO: 10005 - protein, 122 aa, Glycine max
FFHIMSLSFSHPYGFLLVLLLVVEARDKQRGAPQVVERWGDPESSKCVMAVSMIDRESHPLLAVARKNNQIEVLSPVNGDIQATITDANDLDVQSEVNNIVYCIYLHNIRDLLHEMDRSLKW

SEQ ID NO: 10006 - protein, 521 aa, Bdellovibrio bacteriovorus HD100
MGTSAELKGPNLSKGVDLSELREDKSLLGYVGEEPVILVRHDEEYFAIGATCSHYGGPLADGLVVGETVHCPWHHACFDLRTGEALKAPALNPVSAYNVEVRGSKVFVTSKKESTVRPREWSESQRYVIVGSGAAGTAAAIMLRKQGFIGSITIVSEDKSLPYDRPNLSKDYLAGNIPEDWVPLETEEFYQTHKIHFELSTKAEKVDAHRRSVFLSNGKTLRYDRLLLATGGEPIHPPIPGIKQDHVFYLRTLQDCQRIIGRTSWAQKVVIVGAGFIGLEVAAALRQRNLEVHVVAPEEMPLLKVVGVHVGSVLHKLHEEHGVIFHLGHTIKEIRQRSVLLDDGHSVDCDFVIVGTGIHPNTQLAEQAGCWVENGVLVNEYLETSVPGIFAAGDIARWPDPHSQRSIRVEHWEVAERQGQTAALNMMGDRIKFQDVPFFWTQHYDLSLGYVGHSDRFDRMDVMGDLNSRDFAVAYYEDQKVAAVLTLGRDRESLLVEEAIGQYDEKKIHEIFHQHERDHHP

SEQ ID NO: 10007 - protein, 467 aa, Debaryomyces hansenii CBS767
MSALIAASRSTMAFRAVACTKQYSAGYLQLARLYSSGKFPPHTVINMPALSPTMTQGNIGSWSKSVGDELHAGEAIAEIETDKASMDFEFQEDGYLAKILLGDGTKDVPVGKPIAVYVEESEDVQAFESFTAEDAGDASTEAKAPEPEKESKAEESKPEASEKKSKSESAPAQSKPVAGRIFASPLAKTIALDKGIALKNIKGSGPNGRIVAKDVENFKAPAAAAAAAPSATAAAYEDVPISNMRKTIATRLTQSTQESPSYIVQSQISVSKLLKLRQSLNAAADGRYKLSINDLLIKAIALANLRVPEANSAWLLDQGVIRTYSNVDVSVAVATPTGLITPIIKNAHTKGLSAISNEIKELGKKAKAGKLAPEEYQGGTITISNLGMNHAVNSFTSIINPPQSAIVAIGTVDKKAVPSNVNEQGFVFDDVMTITGTFDHRTVDGALGGEWIKALKTIVENPLEMLV

SEQ ID NO: 10008 - protein, 545 aa, Helicobacter pylori 26695
MLTQLKTYPKLLKHYEEIKEVHMRDWFFKDKERASRYFLQFESLSLDYSKNRLNDTTLKLLFELANDCSLKEKIEAMFKGEKINTTEKRAVLHTALRSLNDTEILLDNMEVLKSIRSVLKRMRAFSDSVRSGKRLGYTNQVITDIVNIGIGGSDLGALMVCTALKRYAHPRLKMHFVSNVDGTQILDVLEKLNPASTLFIVASKTFSTQETLTNALTARKWFVERSGDEKHIAKHFVAVSTNKEAVQQFGIDEHNMFEFWDFVGGRYSLWSAIGLSIMIYLGKKNFNALLKGAYLMDEHFRNAPFESNLPVLMGLIGVWYINFFQSKSHLIAPYDQYLRHFPKFIQQLDMESNGKRISKKGEIIPYDTCPVVWGDMGINAQHAFFQLLHQGTHLIPIDFIASLDKKPNAKGHHEILFSNVLAQAQAFMKGKSYEEALGELLFKGLDKDEAKDLAHHRVFFGNRPSNILLLEKISPSNIGALVALYEHKVFVQGVIWDINSFDQWGVELGKELAVPILQELEGHKSNAYFDSSTKHLIELYKNYNQ

SEQ ID NO: 10009 - protein, 466 aa, Acidobacteria bacterium Ellin345
MSLSTMIPGAIATPRTYVNEVLALVKAKNPAEKEFHQAVQEVLESLIPALERHPEYISHKILERVTEPERLLMFRVPWFDDKGEIQVNRGFRIEMNSAIGPYKGGLRFHPSVNLGILKFLAFEQVFKNSLTTLPMGGGKGGSDFDPKGKSDNEVMRFCQSFMTELQRHIGPDTDVPAGDIGVGGREIGFLFGQYKRLRNEFTGVLTGKGLNWGGSLIRPEATGYGCVYFAEEMLKTVKQTLEGKVCLVSGSGNVSQYTIEKLLDLGAKPIACSDSNGIIHDPAGIDREKLAYILDLKNTKRGRISDYAEKFKTAKYIPVDPKLDHNPLWDIKADCAFPSATQNEINAKDAKNLIKNGCKVVSEGANMPSTLEATNLFLEAGVLYGPAKAANAGGVATSGLEMAQNSARLAWTREEVDHRLHNIMIAIHKNCFETAEKYGKPGNLVVGANIGGFLKIADSMLDQGLV

SEQ ID NO: 10010 - protein, 183 aa, Arabidopsis thaliana
MGYRRSYAITFVALVAALWSVTKAQPSSSCVSTLTTLSPCLSYITGNSTTPSQPCCSRLDSVIKSSPQCICSAVNSPIPNIGLNINRTQALQLPNACNIQTPPLTQCNAATGPTAQPPAPSPTEKTPDVTLTPTSLPGARSGVGGGSKTVPSVGTGSSSRNVDPLPLHFLMFAVLVVCTSSFL

SEQ ID NO: 10011 - protein, 555 aa, Kluyveromyces marxianus
MKLAYSLLLPLAGVSASVINYKRDGDSKAITNTTFSLNRPSVHFTPSHGWMNDPNGLWYDAKEEDWHLYYQYNPAATIWGTPLYWGHAVSKDLTSWTDYGASLGPGSDDAGAFSGSMVIDYNNTSGFFNSSVDPRQRAVAVWTLSKGPSQAQHISYSLDGGYTFQHYSDNAVLDINSSNFRDPKVFWHEGENGEDGRWIMAVAESQVFSVLFYSSPNLKNWTLESNFTITVWTGTQYECPGLVKVPYDSVADSSNSSDSKPDSAWVLFVSINPGGPLGGSVTQYFVGDFNGTHFTPIDDQTRFLDMGKDYYALQTFFNTPNEKDVYGIAWASNWQYAQQAPTDPWRSSMSLVRQFTLKDFSTNPNSADVVLNSQPVLNYDALRKNGTTYSITNYTVTSENGKKIKLDNPSGSLEFHLEYVFNGSPDIKSNVFADLSLYFKGNNDDNEYLRLGYETNGGAFFLDRGHTKIPFVKENLFFNHQLAVTNPVSNYTTNVFDVYGVIDKNIIELYFDNGNVVSTNTFFFSTNNVIGEIDIKSPYDKAYTINSFNVTQFNL

SEQ ID NO: 10012 - protein, 543 aa, Oceanicola granulosus HTCC2516
MQAIHVDTKPIEGQKPGTSGLRKKTRVFMEPHFLENYVQSIFDGIGGITGKTLVVGGDGRYFNDRAIQVILRMMAANGAARAIVGQGGILSTPAASHLIRKRGTDGGLILSASHNPGGPDEDFGLKYNGPNGGPASEGVTDRIFARTREIDGYRIVEAHDVDIGTVGERALGDMAVEVVDPVADYAALMEELFDFDKIKGLLSSGFTLRFDAMHAVTGPYAKAILEDRLGAAEGSVVNAVPSPDFGGGHPDPNPIWAHELMATMTSPEAPDFGAASDGDGDRNMIVGKGAYVTPSDSLAVLVANATLAPAYREGLKGVARSMPTSGAADRVAEALGIDCYETPTGWKFFGNLLDAGRATICGEESAGTGSDHVREKDGLWAVLLWLNILAEKRQPVSQLMAEHWAEYGRNYYSRHDYEAVEADVAAGIMDDLRAALPDLPGREVGGLTVDAADEFSYTDPVDESVARQQGLRIFFEGGGRAVFRLSGTGTEGATIRVYLERLETDSDRLQMGAQEALAPIIAAAEAISGVRARSGRDAPDVIT

SEQ ID NO: 10013 - protein, 523 aa, Ricinus communis
MPAVGGIPPSGGNRKVYPGNLTLYVTVTCVVAAMGGLIFGYDIGISGGVTSMDSFLKKFFPSVYRKKKADESSNQYCQYDSQTLTMFTSSLYLAALIASLVASTITRKFGRKLSMLFGGVLFCAGAIINGAAKAVWMLILGRILLGFGIGFANQSVPLYLSEMAPYKYRGALNIGFQLSITIGILVANVLNYFFAKIKGGWGWRLSLGGAMVPALIITVGSLVLPDTPNSMIERGQHEEARAHLKRVRGVEDVDEEFTDLVHASEDSKKVEHPWRNLLQRKYRPHLSMAIAIPFFQQLTGINVIMFYAPVLFDTIGFGSDAALMSAVITGLVNVFATMVSIYGVDKWGRRFLFLEGGVQMLICQAIVAACIGAKFGVDGAPGDLPQWYAVVVVLFICIYVSGFAWSWGPLGWLVPSEIFPLEIRSAAQSVNVSVNMFFTFVVAQVFLIMLCHLKFGLFIFFSFFVLIMSIFVYYFLPETKGIPIEEMGQVWKQHWYWSRYVVDEDYPNGGLEMGKEGRIPKNV

SEQ ID NO: 10014 - protein, 200 aa, Oryza sativa
MRPGAEYAMVHGGGPAPAAVAAAGPSSSAVVASTASVAARSPWQSPVPYLFGGLAAMLGLIALSLLALACSYWKLAAAGGGGDGEQDGGKEIPPGGGGGGGEKGSGGAAGGLARERRDHVVVIMAGDERPTFLATPASSRAEPAAPDVAAAVCCSCGAASGSSSSSSTEVKTPAAAAAPEFLAGDGEPQAQSPRLIVIDL

SEQ ID NO: 10015 - protein, 120 aa, Vibrio vulnificus CMCP6
MNAFREDAMKLINAIIKPFKLDDVREALADVGIEGMTVSEVKGFGRQKGHTELYRGAEYQVDFLPKVKLEIATQAENVDRVIEAITKAAHTGKIGDGKIFVYDLSHAVRIRTGETDVEAL

SEQ ID NO: 10016 - protein, 216 aa, Carica papaya
LPENVDWRKKGAVTPVRHQGSCGSCWAFSAVATVEGINKIRTGKLVELSEQELVDCERRSHGCKGGYPPYALEYVAKNGIHLRSKYPYKAKQGTCRAKQVGGPIVKTSGVGRVQPNNEGNLLNAIAKQPVSVVVESKGRPFQLYKGGIFEGPCGTKVDHAVTAVGYGKSGGKGYILIKNSWGTAWGEKGYIRIKRAPGNSPGVCGLYKSSYYPTKN

SEQ ID NO: 10017 - protein, 409 aa, Vibrio vulnificus CMCP6
MELTTTVSELRYALDTFFFLISGALVMWMAAGFAMLEAGLVRSKNTTEILTKNFCLYAIACTTYLVVGYNIMYVDNSEGGWLPSIGALIGSQAEGADHSLESDFFFQVVFVATAMSVVSGAVAERMKLWSFLLFSAILTAFIYPVEGYWTWGGGFLSAAGFSDFAGSGIVHMAGAAAALAGVLLLGARKGKYGKNGEVYPIPGSNMPLATLGTFILWFGWFGFNGGSQLMVSDFENATAVGQIFLNTNAAAAAGAITALLVCKTTWGKADLTMILNGALAGLVAITADPLSPSPLYAVAIGAVAGALVVFSIVGLDKLKIDDPVGAISVHGVCGFFGLMVVPISNGDASFLSQLFGAAVIFAWVFGASLAVWAVLKATIGIRVSEDEEMEGMDMHDCGVGAYPEFVTVK

SEQ ID NO: 10018 - protein, 123 aa, Oryza sativa
MGSSAPETETVRGLHILIKHEGSPPKASWKDSGGRVISVTTGAEAPGGLADLRDQILSGGANFGDLAARHSDWSPAGRGGDLGPFGRGQMQNPFENGTFAFKVGEISDPVAPARGGHIIRGPA

SEQ ID NO: 10019 - protein, 315 aa, Eubacterium acidaminophilum
MENVYDLAIIGSGPAGLAAALYGARAKMKTIMIEGQKVGGQIVITHEVANYPGSVREATGPSLIERMEEQANEFGAEKVMDKIVDVDLDGKIKVIKGEKAEYKAKSVILATGAAPRLAGCPGEQELTGKGVSYCATCDADFFEDMEVFVVGGGDTAVEEAMYLAKFARKVTIVHRRDELRAAKSIQEKAFKNPKLDFMWNSAIEEIKGDGIVESAVFKNLVTGETTEYFANEEDGTFGIFVFIGYIPKSDVFKGKITLDDAGYIITDDNMKTNVEGVFAAGDIRVKSLRQVVTACADGAIAATQAEKYVEANFEE

SEQ ID NO: 10020 - protein, 80 aa, Zea mays
MAEESGRPLPKFGEWDVNDPASADGFTVIFNKARDEKKGGNGQDTDSPSKDPRTERVESYAAKPSTKKWFCCVTSSPTQS

SEQ ID NO: 10021 - protein, 350 aa, Azoarcus sp. EbN1
MKICILPGDGIGPEITAEAVRVIEALDLKFEMEEALLGGAAVDATGDPYPEATRKLAREADAVLLGAVGGPKWDTLPREQRPERGLLGIRKDLGLFANLRPAILYPELANASSLKPEVVAGLDILIVRELTGDIYFGQPRGLEVRDGERFGFNTMHYSESEIRRIGRVAFEAARKRNRRLCSVDKMNVLETTQLWRDVMIELAAEYPDVELSHMLVDNAAMQLVRAPKQFDVMVTGNMFGDILSDEASMLTGSIGMLPSASLDANNKGLYEPSHGSAPDIAGQGIANPLATILSVAMMLRYTFNQENGALRIENAVKKVLAQGLRTGDIFEPGTTKVGTKQMGDAVLAAL

SEQ ID NO: 10022 - protein, 325 aa, Sulfolobus solfataricus P2
MPLKTYDTIIVGAGIAGLSAALYSSRQKLSTLVLSKDLGGQLTLTDLIENYPGIESTGGLTLAQKIEKQAKKFGAEFIYGEEVKEIAQESDLFIIKGIKGEYAGRALILAFGKTPREINVPGEQEFKGKGVSYCAICDAAFFKGKPAAVIGEGEPGIEAIELLSNYANPAYYITSSSYLAGEEEIVKNVVNKPTVKILTSSRVLEIRGNSKVEELVIKRGDEILQLKVDGVIIEMGYTLKTEFLKGFVELNEKGEIIVDELGRTSREGVFAAGDVTQTPYKQAVVAAAEGVKAALSAYNYIRSKRGLPPVTVDWKAEKKKVSFRL

SEQ ID NO: 10023 - protein, 456 aa, Colwellia psychrerythraea 34H
MNSVQSTSSLTVAKFGGTSVADYQAMLRCANIIKNDNSNRLVVVSASSGVTNLLVRLSQKNVSVIEQKDIVENIRAIQVNITQHLSSDVEAQLNQEINSLLDELTQHALTQLLQYSTKTADAILAFGEQFSSRIFAQVLQSVDIPGEYFNVQQVMKTNSLYGKAVVDLNQLSEQSTQLLAPKLIDKVIVTQGFIGQDSQGHTTTLGRGGSDYSAALLAEALNGTNLSIWTDVVGIFTTDPRITDQARAIKEISFGEAAEMATFGAKILHPATLIPAMRRNIPVFVGSSKEPEKGGTQIKQKVDSNPTYRSIALRREQTLVTVKSPAMLHASGFLAKVFGVLAKHELSIDLITTSEISVALTFDNPSGSTQSLITNAVVAELEQLCEVSVEHGLSLVAVIGNGLTCAKGIGQSIFETINDVNIRLICHGASANNLCFLVNEDEANYVVEKLHNTLFA

SEQ ID NO: 10024 - protein, 562 aa, Vibrio sp. Ex25
MNNDKRPLYIPYAGPALLATPLLNKGSAFSAEERSSFNLEGLLPESTETIQEQVERAYQQYKSFESDMDKHIYLRNIQDTNETLYYRLVQNHISEMMPIIYTPTVGAACENFSNIYRRGRGLFISYPNRDRIDDLLNNAANHNVKVIVVTDGERILGLGDQGIGGMGIPIGKLSLYTACGGISPAYTLPIVLDVGTNNPQRLADPMYMGWRHPRITGAEYDAFVEEFIQAVQRRWPDALIQFEDFAQKNAMPLLERYKDRVCCFNDDIQGTAAVTVGSLLAACKAAGTQLSKQRITFLGAGSAGCGIAEAIIAQMVSEGISDEQARSQVYMVDRWGLLQEGMPNLLDFQQRLVQKHTNTKEWENEGNGFSLLDVMRNAKPTVLIGVSGAPGLFSQEVIEEMHKHCKRPIVFPLSNPTSRVEATPNDIIRWTNGEALVATGSPFEPVVHEGRTYPIAQCNNSYIFPGIGLGVLAVNAKRVTDEMLMESSRALATCSPLAINGRGALLPPLEEIHSVSKKIAFAVGKKAIEQGVALEITDEALNVAIEQSFWQPVYRRYKRTAF

SEQ ID NO: 10025 - protein, 109 aa, Pseudomonas chlororaphis
MSSDLIKHVSDASFEADVLKAEGAVLVDYWAEWCGPCKMIAPVVDEIAETYKGKLTVAKLNIDENQETPAKHGVRGIPTLMLFKNGNVEATKVGALSKSQLAAFLDANI

SEQ ID NO: 10026 - protein, 343 aa, Candida albicans SC5314
MVKDKKLYDLLGVDPSANDQEIKKAYRKAALKYHPDKPTGDTEKFKEISEAFDILSNADKREIYDNYGLEAARGNAPAGDAGNPFAGAGGAGGPQFNFNTGGPGGFRSSTFSNADAFNIFSQMGGFGMGDDHGFTYSSSGAGGNPFGGAGFGGGMPGGFGGGRARQRPEPDVVSMPLPVSLEDLYKGATKKLKITRKNSNGTKEQKMIEVNIKAGWKSGTKINFANEGDYQPECGARQTIQFVIEEKPNPVFKREGNNLKMNVTLTFKESLCGFDKDVTTLDGRRIPLSRSQPIQPGTTSTYPGLGMPISKSPGQRGDLEIVYKVDYPVSLTPAQKKAIQDNF

SEQ ID NO: 10027 - protein, 487 aa, Oryza sativa (japonica cultivar-group)
MVPSFPQPASAAAATRPIPGSYGPPLLGPLRDRLDYFWFQGPDDFFRRRAADHKSTVFRANIPPTFPFFLGVDPRVVAVVDAAAFTALFDPALVDKRDVLIGPYVPSLAFTRGTRVGVYLDTQDPDHARTKAFSIDLLRRAARNWAAELRAAVDDMLAAVEEDLNRAPDPAAASASYLIPLQKCIFRFLCKALVGADPAADGLVDRFGVYILDVWLALQLVPTQKVGVIPQPLEELLLHSFPLPSFVVKPGYDLLYRFVEKHGAAAVSIAEKEHGISKEEAINNILFVLGFNAFGGFSVFLPFLVMEVGKPGRDDLRRRLREEVRRVLGGGDGGEAGFAAVREMALVRSTVYEVLRMQPPVPLQFGRARRDFVLRSHGGAAYEVGKGELLCGYQPLAMRDPAVFDRPEEFVPERFLGDDGEALLQYVYWSNGPETGEPSPGNKQCAAKEVVVATACMLVAELFRRYDDFECDGTSFTKLDKRELTPS

SEQ ID NO: 10028 - protein, 309 aa, Daucus carota subsp. sativus
MAAGISAASSSTSFSLGRNPFLGPNPIWLFAPSVRKLNPSLRFKQKSLTTVCFVVEPRNDSSGKPENNADRDEVSREEIEAGSCSVRVEERRARKKSERFTYLVAAVMSSLGITSMAVLAVYYRFSWQMEGGEIPYSEMIGTFALSVGAAVGMEFWARWAHEALWHASLWHMHESHHKPREGAFELNDVFAIMNAVPAIALLAYGFFHKGYFPGLCFGAGLGITVFGIAYMFVHDGLVHKRFAVGPIADVPYFRKVAAAHQLHHMEKFKGVPYGLFLGPKEVEDVGGHEALELEINRRIKSSASRASRS

SEQ ID NO: 10029 - protein, 588 aa, Prochlorococcus marinus str. MIT 9211
MVLLVQKFGGTSVGSVERIQSVAQRIALCKDQGFELVIVVSAMGKATDELTQLAQEISHKAPKREMDMLLATGEQVSIALLSIALNEIGIPATSMTGAQVGIVTESSHGRARILEIKTARIENLLSQGQVVVVAGFQGTSLGSGGTAEITTLGRGGSDTSAVALAAALHADACEIYTDVPGVLTTDPRKVPNAQLMNSISCDEMLELASLGAAVLHPRAVEIARNYGIKLVVRSSWDETPGTTITSQGNREIGKEGLELGRPVTGVELVENQAVLGLAHIPDKPGIAADLFETLSKGGVNVDLIIQSTHEGNSNDITFTVAEEELSLAKALCKQFINKFGGELSTQSEMSKLSIRGAGIMGRPGIAAKLFETISKAGINLRLIATSEVKLSCVIDSGMGCKALRAVSEAFEIKKDHIHINPEICNLEEPEVRGVALDTNQAQMSVINVPDIPGTAATLCRALTESGISLDTIVQSERKHKKGGRNISFTLHKEDREKLNKVLLPLLKTWHEAYLQDGKAIARISSVGAGMPATIGTAARMFRALANAEINIEMIATSEIRTTCIVSESYGTKALQAVHEFFQLNESDK

SEQ ID NO: 10030 - protein, 514 aa, Cucumis sativus
MDAASSSLALSNIKLHGSTNTLNSDQRISSLCSLPKSRVTFSCKTSGNLQVRDRSTGLVVSCSSSNGDRDVIQGLHLSGPIEKKSRLGQACCSVGTFTVGEFALESQSQAVDDKVGVLLLNLGGPETLDDVQPFLYNLFADPDIIRLPRLFRFLQEPLAKLISTYRAPKSKEGYASIGGGSPLRKITDEQAQALKMALAEKNMSTNVYVGMRYWYPFTEEAIQQIKRDGITRLVVLPLYPQYSISTTGSSIRVLQKMFREDAYLSSLPVSIIKSWYQREGYIKSMADLMQAELKNFANPQEVMIFFSAHGVPVSYVENAGDPYKDQMEECICLIMQELKARGIGNEHTLAYQSRVGPVQWLKPYTDEVLVELGQKGIKSLLAVPVSFVSEHIETLEEIDMEYKHLALESGIQNWGRVPALNCNSSFISDLADAVIEALPSATALAPHTSSTDADDHDPFLYAIKLLFGSVLAFILLLSPKAFMVFRNNFLLNYTRIYGYRGERSEFFWVRLIFT

SEQ ID NO: 10031 - protein, 115 aa, Anaplasma marginale str. St. Maries
MEGVMSNIAEVGDSDFPEKVCVGSGLVLVDFWAPWCGPCVALSPQLEKLAQKYEGKLKIYKLNIQNNQDTPVSYGVSAIPTLVIFSDGKELSRVVGANLQQIIGAIDSAVGGAAQ

SEQ ID NO: 10032 - protein, 162 aa, Arabidopsis thaliana
  misc_feature (87)..(87): Xaa can be any naturally occurring amino acid
  misc_feature (112)..(112): Xaa can be any naturally occurring amino acid
TPIAAVPDGSIILDQLASHSTAFAVEQFSDDVGYSWIDGLKDHAAQNVNDKMMSNAGHIFPHNTPNTKEAYYYRMIFERFFPQNSAXRLTVPGGATVACSTAKAVDQLASHXWSTNMDPSGRAAIGVPLSAYDGKNVALTIPPLKAIDNMPMMMGQGVVIQS

SEQ ID NO: 10033 - protein, 804 aa, Arabidopsis thaliana
MSGVWVFNNGVIRLVENPNQSGGVSTQSHGRRNVLVYLPTGEAVSSYSSLEQILRSLGWERYFSGDSDLIQYHKRSSIDLISLPRDFSKFNSVYMYDIVVKNPNSFHKQTMPRKGLSNFDDYDDGFDDDDDAFDYDYDVDIDEHEEEAAAEPKEEIAKTQGLWRCAICTYDNVETMFVCDICGVLRHPVAGNQSINKNTAVRVVSLFAIVVLQRRYSDSSFSTYVAPFKFDAPSPDDLVSNGLTSSKTGPKGSGDASMRQKEKQDSVEQKPLKKGGDSSETSSRGRHDKLDDKGGAGGIKSGKSLPKAKADMSNETSSSSKYMETSESLTGTMNKMSLIGETENSSDIKIRGPKSQSKHKPEEWMLLDKESDALSQLNLAIVGHVDSGKSTLSGRLLHLLGRISQKQMHKYEKEAKLQGKGSFAYAWALDESAEERERGITMTVAVAYFNSKRHHVVLLDSPGHKDFVPNMIAGATQADAAILVIDASVGAFEAGFDNLKGQTREHARVLRGFGVEQVIVAINKMDIVGYSKERFDLIKQHVGSFLQSCRFKDSSLTWIPLSAMENQNLVAAPSDNRLSSWYQGPCLLDAVDSVKSPDRDVSKPLLMPICDAVRSTSQGQVSACGKLEAGAVRPGSKVMVMPSGDQGTIRSLERDSQACTIARAGDNVALALQGIDANQVMAGDVLCHPDFPVSVATHLELMVLVLEGATPILLGSQLEFHVHHAKEAATVVKLVAMLDPKTGQPTKKSPRCLTAKQSAMLEVSLQNPVCVETFSESRALGRVFLRSSGRTVAMGKVTRIIQDS

SEQ ID NO: 10034 - protein, 213 aa, Medicago truncatula
MANLSFLLPVLALSLLAVFAVDAATTLQDFCVTNPIGQGNSLCKDPKLVEANDFLFSGLHIAGNTTNPAGSRVTPVFASQLPGLNTLGISMARVDIAPWGVNPPHSHPRATEIFTVLEGTLEVGFITSNPENRHFKKVLQKGDVFVFPIGLIHYQRNIGNCNVVAIAALSSQNPGAITIGNAVFGATPEIASEVLIKAFKLDKNAINYLQSKF

SEQ ID NO: 10035 - protein, 402 aa, Bordetella pertussis Tohama I
MLSPEVRALVKATAPVLKEHGEALTRHFYTRMLGGNPELRQLFNQGHQQSGQQQQALAAAVAAYAEHIDDPSVLLQVVERIAHKHVSLGVRAEHYAIVGKHLLASIREVLGEAATDELIDAWAAAYGQLADLLIGRERALYAAAASRDGGWTGWRAFKVVRKTPESAEITSFYLAPADGGATPDYLPGQYVSVRVYVPELGLMQPRQYSLSEAPGMPGQLRISVKREAGSPAGMVSGTLHNRINEGDVLDVSPPQGDFTLDAEDGRPVVLLSGGVGLTPMVSMLNHLTARDDGRQIRFVHACREAGVHAMKEHINALAAKRPNVRKAVFYERVGADDRRGVDYDYEGRVDLHAIRDEVILPDADYYLCGPLPFMQAQRRALADLGVAEHRIHAEVFGTGGVA

SEQ ID NO: 10036 - protein, 147 aa, Lotus japonicus
MGFTAQQEALVGSSYETFKKNLPTNSVLFYTVILEIAPTAKDMFSFLKESGPKHSPQLQAHAEKVFALTRDAATQLVAKGEVTLADASLGAVHVQKAVTDPHFVVVKEALLQTVKEAVGADEWSDDLSTAWEGAYDGLATAIKKAMG

SEQ ID NO: 10037 - protein, 311 aa, Staphylococcus aureus
MTEIDFDIAIIGAGPAGMTAAVYASRANLKTVMIERGIPGGQMANTEEVENFPGFEMITGPDLSTKMFEHAKKFGAVYQYGDIKSVEDKGEYKVINFGNKELTAKAVIIATGAEYKKIGVPGEQELGGRGVSYCAVCDGAFFKNKRLFVIGGGDSAVEEGTFLTKFADKVTIVHRRDELRAQRILQDRAFKNDKIDFIWSHTLKSINEKDGKVGSVTLTSTKDGSEETHEADGVFIYIGMKPLTAPFKDLGITNDVGYIVTKDDMTTSVPGIFAAGDVRDKGLRQIVTATGDGSIAAQSAAEYIEHLNDQA

SEQ ID NO: 10038 - protein, 283 aa, Glycine max
MATSAMTLAMVAATDASLFHPTFPAQHKLAPASASLPLIFSRAPLLRSTRPRVPLTPLVASSDAAEAGLDWADAEEAEETVTEEEPAVAASGGDAGYAAEPPEEAKVYVGNLPYDVDSERLAQLFDQAGVVEVAEVIYNRESGQSRGFGFVTMSTIEEADKAIETFNRYDISGRLLNVNRAAQRGSRVERPPRQFASSFRAYVGNLPWQAEDSRLVQLFSEHGEVVNATVVYDRETGRSRGFGFVTMASKEDLDSAISALDGQEMDGRPLRVNVAAERPQRGF

SEQ ID NO: 10039 - protein, 172 aa, Triticum aestivum
MAPRTMSSSSSILLAAAVAALLVASASAQSGCTAALVGLFPCLNYISGNDTAPTKSCCSQLSSVVQSQPQCLCSALGGDSSSLGGMTINKTRALELPKACNVQTPPASKCNGGGSAPGAATPTTPEVQAPAGSGSKTTPSAYLQENGGSSLQGPAGLVFALAAAAVYAVSSL

SEQ ID NO: 10040 - protein, 317 aa, Coleochaete scutata
NGFGRIGRNFLRCWYEREDSPIEVVAINDSGGVKNAAHLLKYDSMLGTFKAEVKAIDDKTLSVGGKPITVVSNRDPLKLPWADLGIDIVIEGTGVFIDGPGAGKHIQAGAKKVIITAPAKGADIPTYVVGVNADDYDHDVANIISNASCTTNCLAPFVKIMDAEFGIVKGTMTTTHSYTGDQRLLDASHRDLRRARAAALNIVPTSTGAAKAVALVLPQLKGKLNGIALRVPTPNVSVVDLVVNTVKKGFTAEDVNTAFRNAANGSLKGILGVSDLPLVSIDFRCSDESSTIDSSLTMVMGDDMLKVVAWYDNEWGY

SEQ ID NO: 10041 - protein, 495 aa, Oceanobacillus iheyensis HTE831
MTKFNELGVSAPIMKALEKMGFEEATPIQAETIPHALEGHDVIGQAQTGTGKTAAFGIPLINKINAKLRKVQGLIVAPTRELAIQVAEEINRLAKFKSVRALAIYGGQPMDRQIRALKDGPQIVVATPGRLLDHMRRKTIRIDQVHTAVLDEADEMLNMGFIDDIREILKGIPEERQTLLFSATMPKEIRNIATTLMKEPKEVKVKAKEMTVENIDQYFIEIPEKYKFDTLNNHLDINSPELAIIFARTKKRVDEVAEGLQARGYRSEGIHGDLTQGKRMSVLKKFKQGRVDVLVATDVAARGLDISGVTHVYNFDIPQDPESYVHRIGRTGRAGKMGEAISFITPREMAHLNLIEQTTKSKMKRMAPPTNQDARRGQQQVTIEKLKNAINEKDLKVYEDAAKELLDEYDSITVVSAAISMMTKERRDTPVRISSVAPISVKKAKNQKDNKTKGRSNNKRFYGGRGQGGRNQGGRGQGGRNRKGKGNYQRRNRDN

SEQ ID NO: 10042 - protein, 313 aa, Pseudomonas aeruginosa UCBPP-PA14
MSSREIRIATRQSALALWQAEYVKARLEQAHPGLTVTLLPMTSRGDKLLDAPLAKIGGKGLFVKELETALLEGAADIAVHSMKDVPMDFPEGLGLYTICEREDPRDAFVSNTYASLEQLPAGSVVGTSSLRRQAQLLARRPDLQIRFLRGNVNTRLAKLDAGEYDAIILAAAGLIRLGFESRIRSSISVDDSLPAGGQGAVGIECRTADSDLHALLEPLHHSDTALRVTAERALNKRLNGGCQVPIACYAIREGDQLWLRGLVGQPDGTQLLRAEGRAPLAEAEALGVRVAEDLLEQGAEAILEAVYGEAGHP

SEQ ID NO: 10043 - protein, 219 aa, Methanococcoides burtonii DSM 6242
MSKDILEKGAIVQRDKETFAIAPHITGGIATPDLLRKIADVSEKYGAAAIKVTSAQRLAIVGLKEDDLDNAWDDLGMKPGAAIGLCVRSVKICPGTTFCKRGQQDSVGLGIKLDEKYHGMELPSKFKIGVSGCMNSCAENAIKDVGIMGTPKGFTVMVGGSAGLKPRLADTIAEELDEDEVLSLVDTIISFYKSHAKKQRIGKVIEEIGLDAFKKEVGL

SEQ ID NO: 10044 - protein, 317 aa, Synechococcus sp. WH 7805
MALEHLRIASRRSQLAMVQTNWVKAELESAHPGMAISVEAMATQGDKILDVALAKIGDKGLFTKELEAQMLVGRAEIAVHSLKDLPTNLPEGLMLGCITEREDPADALVVNSKNADHTLETLPEGSVVGTSSLRRLAQLRHHFPHLQFKDVRGNVITRLEKLDAGQYDCLILAAAGLSRLGFGDRIHQIIPGHISLHAVGQGALGIECVCDRPEVLKIIQVLEHAPTAGRCLAERAFLRELEGGCQVPIGVNSRIDGQELILTGMVASLDGLRLIRDERRGSLTDPEAIGRALAADLKSRGAGEILQEIFEAVRPEA

SEQ ID NO: 10045 - protein, 420 aa, Streptococcus agalactiae 2603V/R
MSKEAILNFLQAKGEPTWLQELRLKAFEKIEELELPVIERVKFHRWNLGDGTILENDYTANVPDFTELGNNPKLVQIGTQTVLEQVPMELIEKGVVFTDFYSALEEIPEVIERYFGKARPFEEDRLAAYHTAYFNSGAVLYIPDNVEITQPIEGLFYQDSQSKVPFNKHILLIVGKNAKVSYLERFESIGDGTERTSANISVEVIAQAGSQIKFASIDRLGENVTTFISRRGRHSSDATIDWALGVMNEGNVVADFDSDLIGDGSHANLKVVAASSGRQVQGIDTRVTNYGCNSVGHILQHGVILERGTLTFNGIGHIIKGAKGADAQQESRVLMLSDKARSDANPILLIDENDVTAGHAASIGQVDPEDLYYLMSRGLNQKTAEQLVIRGFLGTVIAEIPVKEVRDEMIAVIDTKLEKR

SEQ ID NO: 10046 - protein, 482 aa, Vibrio vulnificus CMCP6
MAYGPFPKGDRIMIKFGTGGWRAFIGEEFTKDNVRLVAQAVANIINNEQVAERGFVIGYDRRFLSDKAGAWFAEVLAANGIVVSFINKFVPTPIVMFKAKEMGCAYSACITASHNPADYNGVKVFIEGGRDADEVITQKIEAQIAHLTLDQVQSVDFEQAVEDKQIVIINPMNEFVDSIINFIDIEAIKKANLRVLIDPMFGVAKNALQTVLINGRCDVDVINDGKNPDFGGLMPSPSAATLYRLKHLVAAQGYDIGIGTDGDADRLGIIDEKGNFIHPNEVLILLYYYLLKYKGWTGSVVRNIATTHLLDKIAADHGEKCFEVPVGFKHISSQMEADDSLIGGESSGGLTIRGHIKGKDGVFASSLLVEMISVTGKKLSELLEEIYSKYGYAYMAEGDCKFKPAAKQSLYDKIYIEKQLPEFGFEIEKVSYDDGAKVYFKNGGWVIARFSGTEPLLRIFAEMQDKETAELVVHQFKEFLAL

SEQ ID NO: 10047 - protein, 595 aa, Vibrio vulnificus CMCP6
MHKSTHERVVAIRTWLQQHNIDALLVPHEDEYLGEYVPDHNERLHWLTGFTGSAGAAVITQEKAAMFVDGRYTVQVTKQVPADLFEYRHLIEEPALEWLQENLARGASVAIDPRMHSAAWLNMAQAKLAGVLELTILDSNPIDELWHDRPQPVVSDVRLMSTEAVGQSSADKRANIAQLITKQGVDSAVITALDSICWLLNVRGLDVSRLPVLLSHAILHADGQVEFFLDPARLPEGFDVHVGQGVHVFHPETLQARLESLTGKKVLLDAGTSNAWFKLVLQNAGAVVVPGADPCLMPKAAKNAVEISGMKACHLRDGAAMVKFLSWLDAQVAQGILHDEATLADKLEAIRREDPTLKDLSFDTISAAGSNAAMCHYNHQNQPQPGQLSMDTLYLVDSGGQYLDGTTDITRTVAIGQPSAEMIKQFTLALKGHIGVARARFPKGTRGYQIDTLARQHLWAEGYDYDHGTGHGVGHFLSVHEGPASISKRQIDVPLVEGMVLSNEPGYYRADAFGIRIENLELVVEKQTQGDFPILTFESLTRCPIDKRNINVDMLTRPELAWLNDYHQKVWDDISPLVEGDAQVWLREATLPLSH

SEQ ID NO: 10048 - protein, 487 aa, Colwellia psychrerythraea 34H
MSLVRYRNFVDGAYMANDSGETFDVINPATGKVIYQVEVADGKIKQEAITSAQSGFATWSAMSAIQRSRILLKAVALLRERNDELAEIEVLDTGKPWQEASVVDVESGADSIEFFAGLAPGIEGNQQQVDGDFYYTRREALGICAGIGAWNYPLQIACWKAAPALACGNSMIFKPSEETPLGALKLAEIFTEAGIPDGVFNVVQGAGEVGSWLSHHPDIAKVSFTGEVGTGKKVMAGAATTLKDVTMELGGKSPLIIFDDADIDNAVSAAMLGNFYTQGEVCTNGTRVFVQESAYPKFIEKLLQRTRQNIIVGDPMDPETNFGALISKKHFDLVSDYIKVGIKEGATLLHGGTSLQPDNAPNGYFIAPTIFTDCTDGMTICREEIFGPVMSVLIFIDEDEVVARANATDYGLAAAVFTQDINCAHRVIHKMEAGICWINSFGASPAQMPVGGYKQSGIGRENGLVTLNHYTQIKSVYVGLQPLDSPF

SEQ ID NO: 10049 - protein, 233 aa, Saccharomyces cerevisiae
MSSAITALTPNQVNDELNKMQAFIRKEAEEKAKEIQLKADQEYEIEKTNIVRNETNNIDGNFKSKLKKAMLSQQITKSTIANKMRLKVLSAREQSLDGIFEETKEKLSGIANNRDEYKPILQSLIVEALLKLLEPKAIVKALERDVDLIESMKDDIMREYGEKAQRAPLEEIVISNDYLNKDLVSGGVVVSNASDKIEINNTLEERLKLLSEEALPAIRLELYGPSKTRKFFD

SEQ ID NO: 10050 - protein, 616 aa, Zea mays
MASISGAAAPPSSAVCRLRLRRHLLLRPSHLRLRAPHSIADLSRSSNSAPSPARPALGSGPENGSGGVRAVEKDPIKLWERYVEWLYQHKELGIFVDVSRMGFTEEFLRQMEPRMQQAFVDMRELEKGAIANPDEGRMVGHYWLRDPALAPNSFLRNKIETALDKILAFSQDVISGKILSPSGRFTSILSIGIGGSALGPQFVAEALAPDNPPLKIRFIDNTDPAGIDHQIAQLGPELATTLVIVISKSGGTPETRNGLLEVQKAFRDAGLQFSKQGVAITQENSLLDNTARIEGWLARFPMFDWVGGRTSEMSAVGLLPAALQGIDIKEMLVGAALMDEETRNTVVKANPAALLALCWYWASEGIGKKDMVVLPYKDSLLLLSRYLQQLVMESLGKEFDLDGNRVNQGLTVYGNKGSTDQHAYIQQLREGVHNFFVTFIEVLRDRPAGHDWELEPGVTCGDYLFGMLQGTRSALYANDRESISVTVQEVTPRAVGALIALYERAVGIYASLVNINAYHQPGVEAGKKAAGEVLALQKRVLTVLKEAICENPTEPLTLDEIADRCHCPEDIEMIYKIIQHMAANDRALIAEGSCGSPRSVKVYLGECSVDEDMQAA

SEQ ID NO: 10051 - protein, 487 aa, Escherichia coli CFT073
MLPLRINPTFLLPSNKFKEFEMDQKLLTDFRSELLDSRFGAKAISTIAESKRFPLHEMRDDVAFQIINDELYLDGNARQNLATFCQTWDDENVHKLMDLSINKNWIDKEEYPQSAAIDLRCVNMVADLWHAPAPKNGQAVGTNTIGSSEACMLGGMAMKWRWRKRMEAAGKPTDKPNLVCGPVQICWHKFARYWDVELREIPMRPGQLFMDPKRMIEACDENTIGVVPTFGVTYTGNYEFPQPLHDALDKFQADTGIDIDMHIDAASGGFLAPFVAPDIVWDFRLPRVKSISASGHKFGLAPLGCGWVIWRDEEALPQELVFNVDYLGGQIGTFAINFSRPAGQVIAQYYEFLRLGREGYTKVQNASYQVAAYLADEIAKLGPYEFICTGRPDEGIPAVCFKLKDGEDPGYTLYDLSERLRLRGWQVPAFTLGGEATDIVVMRIMCRRGFEMDFAELLLEDYKASLKYLSDHPKLQGIAQQNSFKHT

SEQ ID NO: 10052 - protein, 442 aa, Synechocystis sp. PCC 6803
MKPKNFPLARYVLGAMLAFLFVGVAQAQTETTSIAEVTYAINNLFLLAAAVLVLFMQAGFAMLEAGLSSHKNTVNVLFKNTFDVCVGVLLYFLFGYSLMYGENPVLGGFFGWGGFGITNNLDNVEGLSPQVDWLFQAAFAATAATIVSGAVMGRMYFKAYLIYSAVITGLVYPISGHWKWGGGWLDKLGFHDFAGSLLVHSVGGFAALAAVVVMGPRIGRFEGNKINSLGYQGITSSSLGVFILWVGWYGFNPGSQLAFVGALNTNTTMLIAVNTTLSAAAGGLAALAFDWITENKRKPNLLVTLNGILGGLVGITAGCDTVSNWSAIAIGVVAGILSVLGTKLLDRLRIDDGVGAWPVHGLCGIWGGIAVGIFSTNVEHKLSAQIVGSLVIPFWAFITMFFLFYVMDLWGILRVKPSQEKVGLDIVEHGQTEKGVEIAFED

SEQ ID NO: 10053 - protein, 458 aa, Geobacillus kaustophilus HTA426
MKVAKFGGSSVASAAQFRKVADIVSSDIERRIVVVSAPGKRYKDDVKVTDMLIQLAEQVVAGEPHEETMEAIVKRYADIANELGLEADGFLAELVDDLQSKISAYRSEPPRLFDAIKASGEDHNARLMALYLQDCGLEASYVSPLEAGIIVTDEPGNAQVLPESYDKLKQLRERRGVLVIPGFFGYSRSGHIVTFPRGGSDITGSIVAAGVKADVYENFTDVDSIYCVNPSIVADARKLKEITYREMRELSYSGFSVFHDEALEPVYRAGIPVCVKNTNNPAAPGTWIVAKRNHIDEPVAGIASDTGFCSINISKYLMNREIGFGRRVLQILEDEGISYEHTPSGIDNMSVILRADQLADGKDERILARIREELAVDEVTIEYGLALIMVVGEGMEKTIGMAAKATTALANANINLEMINQGSSEVSMMFGVKEEVVNEAVRALYNAYFQQATVNHLS

SEQ ID NO: 10054 - protein, 484 aa, Hordeum vulgare
MECVRSGALDLGRSGNFLGKSGSTTSCGKVRCSTNLAGSTKCEQNLHGKAKPLLLSASGKARGTSGLVHRSPVLKHQHHLSVRSTSTDVCTTFDEDVKGVSSHAVEEKVGVLLLNLGGPETLNDVQPFLFNLFADPDIIRLPRLFRFLQRPLAKLISTFRAPKSNEGYASIGGGSPLRKITDEQANALKVALKSKNLEADIYVGMRYWYPFTEEAIDQIKKDKITKLVVLPLYPQYSISTSGSSIRVLQNIVKEDPYFAGLPISIIESWYQREGYVKSMADLIEKELSVFSNPEEVMIFFSAHGVPLTYVKDAGDPYRDQMEDCIALIMEELKSRGTLNDHTLAYQSRVGPVQWLKPYTDEVLVELGQKGVKSLLAVPVSFVSEHIETLEEIDMEYRELALESGIENWGRVPALGCTSSFISDLADAVVEALPSASAMATRKVKDTDSDMDMMHYLTKMFLGSVLAFFLLLSPRLVSAFRNTLQ

SEQ ID NO: 10055 - protein, 592 aa, Neocallimastix frontalis
MLAPIQTIARPVSSILPATGALAAKRTFFAPSEVYNKKQVIVTKKTGLDILNDPKLNKGSAFTADEKDRLGIRGLVPPRPQSLEAQYKRCKTNLDKISDPLEKFIYLNHLQNRNETLYYKMILENFVELAPIIYTPVVGEACQKFHKIFTQTRGMYFSTADRGQMSAVAANWPYDDVDVIVVTDGSRILGLGDLGAGGMQIPIGKLTLYVCGGGINPRNVLPIVLDVGTNNKELLNDPLYLGMQHPRLQGEEFHAFVDEWVSAITDRFPKAVIQFEDFMMPNALDLLLKYKDQICMFNDDIQSTGAITLASVLATMRARGGTFADIKKETFLCLGAGSSGVGVCETIVDCIVAEGATREEAYAQFYMFDHKGLLGKGRDDLLPSQQVFMRKEIEGGKTPAELLKKIKPTCLLGLSTCPKLFNKEMLSYVASYCEKPGIFPLSNPTSRSECTAEEAVEFTDGNLIFASGSPFDPVEWKGKTIQTNQCNNSYSFPGIGLGLVSSRATRVPFETFQVCARVIASLGTPEMLATGKIFPDLDNLRAVSLEVGIEVAKMAERMNIATQFPPKGMDWREWLKHNMWQPEYPHIVVKNL

SEQ ID NO: 10056 - protein, 459 aa, Bacteroides fragilis YCH46
MKQTRGYLLLICIVSAMGGLLFGYDWVVIGGAKIFYEPFFGIENSAALRGWAMSSALIGCLAGALLSGIWSDKYGRKKMLVIASFLFALSAWGTGAVDHFSYFIFYRIVGGLGIGIASNISPVYIAEVSPTHVRGKFVSLNQLTIVLGILLAQLANWQIGEYYTQGSDILSETSVQWAWRWMFWAELIPAGIFFLLSFIIPESPRWLATVHQQEKAQKTLTRIGGETYARQTLEELNQLTQSQGNRQNNEWKSVFRPEMRKVLIIGIVLAIFQQWCGINVIFNYAHEIFSSAGYAVSDVLMNIVVTGITNVIFTFVAIYTVDKWGRRTLMLIGSAGLALIYLILGTCYFLDVSGLPMLLLVVLAIACYAMSLAPVVWVVLSEIFPVKIRGMAIAISTFFLWVACFILTYTFPVLNESIGAEGTFWLYGGICLAGFLFIRQNLPETKGKTLEEIEKELIK

SEQ ID NO: 10057 - protein, 803 aa, Magnetococcus sp. MC-1
MGASRFVQAINPTGAIPRQPSMRATHPKPKILIVDDKPANLMALRRLLKNTHAELIEAESGNEALGLMLEHELALMLLDVDMPGMDGFEVSRMASGLDRTSNVPIILITAAYKDYSHRIKGYQAGAIDYIEKPIDDRILNAKVAIFLNLYNAHRESEQLRQDLTLNQERLELALEGANEGLWDWNILSNQVYYSPRWITMLGYATNEVNQDFSTWKTLIHPDDFESALACLERHFTTPEEPYRAEFRMRTKQGGWCWILARGKVVARTADGQPHRMVGAHQDISQRKQLEADLLAAKTEAEQANQAKSRFLANMSHEIRTPMNTILGMGEILLNAPNLTPKQHRYLSISQRAGDTLLGLINDILDLSKIEAGELHLEHTLFALHDELKSLITMLRPMARDKGLSMQCVIDPQLPTHVHGDPQRFRQIVLNLLSNALKFTDQGSITLHAKPIETGRLQFTVSDTGIGMPEQVITKIFRPFVQAEANTTRRFGGTGLGLSICRQLVTMMHGEIYANSQVGEGSQFIFEIELPAANSETVKQERLSPPTKQNIPMRLLLVDDMEDNRLLVKAFLEGTPHQIVEAEDGLDALEKSQQSQFDLILMDGMMPKMDGLEATRRIRARESEHNLTPVTIVALTANAMPQDVADSLAAGSDYHMAKPIRRAKLLQLLASIANERRLFSHEEVKQTTTLTSVETIAADILDALANDVGSGYRQSILRFYSTLPARVAQLTAHIGSEADSVLIEAQGLQQDASYFGAHKLAHLCTQIAQMARTKQPREMIASLCPLLQQALQTIERRLTNEGYF

SEQ ID NO: 10058 - protein, 496 aa, Arabidopsis thaliana
MTDYNYIDNMQGLITITLTASFPQLHPASCNSQDPLSCGGPNKLQIGVLLLGLCFLSVGSGGIRPCSIPFGVDQFDQRTEEGVKGVASFFNWYYMTFTVVLIITQTVVVYIQDQVSWIIGFSIPTGLMALAVVMFFAGMKRYVYVKPEGSIFSGIAQVIVAARKKRKLKLPAEDDGTVTYYDPAIKSSVLSKLHRSNQFRCLDKAAVVIEGDLTPEGPPADKWRLCSVQEVEEVKCLIRIVPIWSAGIISLAAMTTQGTFTVSQALKMDRNLGPKFEIPAGSLSVISLLTIGIFLPFYDRVFVPFMRRITGHKSGITLLQRIGTGIVFTIFSMIVAGIVERMRRIRSINAGDPTGMTPMSVFWLSPQLILMGLCEAFNIIGQIEFFNSQFPEHMRSIANSLFSLSFAGSSYLSSFLVTVVHKFSGGHDRPDWLNKNLNAGKLDYFYYLIAVLGVVNLVYFWYCARGYRYKVGLPIEDFEEDKSSDDVEMTSKKSME

SEQ ID NO: 10059 - protein, 957 aa, Staphylococcus aureus subsp. aureus MSSA476
MNNKKTVTNRKGMIPNRLNKFSIRKYSVGTASILVGTTLIFGLSGHEAKAAEHTNGELNQSKNETTAPSENKTTEKVDSRQLKDNTQTATADQPKVTMSDSATVKETSSNMQSPQNATASQSTTQTSNVTTNDKSSTTYSNETDKSNLTQAKDVSATPKTTTIKPRTLNRMAVNTVAAPQQGTNVNDKVHFSNIDIAIDKGHLNKDTGKTEFWATSSDVLKLKANYTIDDSVKEGDTFTFKYGQYFRPGSVRLPSQTQNLYNAQGNIIAKGIYDSTTNTTTYTFTNYVDQYTNVSGSFEQVAFAKRENATTDKTAYKMEVSLGNDTYSEEIIVDYGNKKAQPLISSTNYINNEDLSRNMTAYVNQPKNTYTKQTFVTNLTGYKFNPNAKNFKIYEVTDQNQFVDSFTPDTSKLKDVTNQFNITYSNDNKTATVDLMNGQTSSNKQYIIQQVAYPDNTSTDNGKIDYTLDTDKTKYSWSNSYSNVNGSSTANGDQKKYNLGDYVWEDTNKDGKQDANEKGIKGVYVILKDSNGKELDRTTTDENGKYQFTGLSNGTYSVEFSTPAGYTPTTANAGTDDAVDSDGLTTTGVIKDADNMTLDSGFYKTPKYSLGDYVWYDSNKDGKQDSTEKGIKGVKVTLQNEKGEVIGTTETDENGKYRFDNLDSGKYKVIFEKPAGLTQTGTNTTEDDKDADGGEVDVTITDHDDFTLDNGYYEEETSDSDSDSDSDSDSDSDSDSDSDSDSDSDSDSDSDSDSDSDSDSDSDSDSDSDSDSDSDSDSDSDSDSDSDSDSDSDSDSDSDSDSDSDSDSDSDSDSDSDSDSDSDSDSDSDSDSDTDSDSDSDSDSDSDSDSDSDSDSDSDSDSDSDSDSDSDSDSDSDSDSDSDSESDADSDTDSDSDAGKHTPAKPMSTVKDQHKTAKALPETGSENNNSNNGTLFGGLFAALGSLLLFGRRKKQNK

SEQ ID NO: 10060 - protein, 543 aa, Brucella melitensis 16M
MPGRAIMARERIYIYDTTLRDGQQTPGVDFSVEDKKSIVTLLEELGVDYVEGGYPGANPTDTAFFKRRQTARAKFVAFGMTKRAGVSVSNDPGLSSLLQASADAVCFVAKSWDYHVRLALGCTNEENLESITASVTAARMAGREALVDCEHFFDGYKANPEYALACAKAAYSAGARWVVLCDTNGGTQPLEVAAIVEAVKAVVPGESLGIHAHNDTEQAVAVSLAAIDAGVRHVQGTLNGIGERCGNANLVSLIPTLVLKPYWAERFELGIKPASLKSITRISRAFDDILNRPATEQAPYTGTSAFATKAGIHASALMKEPQTYEHIPPESVGNSRRVMVSDQGGKSNFIAELERRGIRVAKDDVRLDTLIALVKEREAEGYAYEGADASFELLARGMLNPQPEFFKVESFRCLVERRFDANGMLKTVSEAVVKVEVDGEMHMSVAEGHGPVNALDIALRKDLGRFQAEIEDLELVDFKVRILNGGTAAITRVLIESGDATGARWRTVGVSDNIIDASFQALMDSVNYKLMKNRAMAGLAAAE

SEQ ID NO: 10061 - protein, 152 aa, Capsicum chinense
MSTPARKRLMRDFKRLQQDPPAGISGAPYDNNIMLWNAVIFGPDDTPWDGGTFKLTLQFSEDYPNKPPTVRFISRMFHPNIYADGSICLDILQNQWSPIYDVAAILTSIQSLLCDPNPNSPANSEAARMFSENKREYNRKVREIVEQSWTAD

SEQ ID NO: 10062 - protein, 1622 aa, Magnaporthe grisea 70-15
MGCETGTNEGQGYSLPSAPQLTINHDVAQDLDSSGPEKLLEVWFAPSPSALPLGTKENGLKSVPSDNWVEMLDIVNCKILSVVQSSVVDAYLLSESSMFVFPHKIILKTCGTTTLLLGLAQLLRIAAVDAGFPVHNASSVEDEKAAATPYRVFYSRKNFLFPDRQRGPHRSWKQEVKYLDSMFEGGSAYMVGKMNGDHWYLYMTSPGSTALTPPQTPPAGELMRIPTGLQTAASREDDETLEVLMTDLDPENAKQFYLEQASALACKQATLAQQAREEAHAALDKAASTDEQLVSEALTTEGHALGTVVSDTCGLSDVYPKSKYPDARIDAYMFEPCGFSANGVVPAPPDATGAQGGNEHYFTVHVTPEPNCSYASFETNVPGGQNGRETADIIGHVVGIFKPGRFSVTLFEGKGRRGENGTKADQRLRVDNVPGYRQLDKIVHEFDDYDLVFRFYQREGWVGKEGARPQYPTDIITDRFTRQKHADKIVHRQLHRQQHLQKVTTFAGWGRDCKDTPPTSGPSMGVAADGGFAAGAVDFRHYWLRCQLHRAERARGPAGIVPGAGVFVLCVAATRNLPVDRQRALQHPLQSWATVVARIALVFWILSAIAVPASFVKVDKKTTDLRPGHVDIVVCVFGLISISIVTFVIEYSDAPFTLPRITPEHITCRLSALGAEEAFVSVSRQCSAEMVPEKLKEIKEADHSQHPTAQEQIQKAAFARQKFGKPAAGEQPNRVVSSPLGPRPMPGTIPEGIEPRALIPVTHQPREPITQVILPQEPRPAHVGVQAEGWKTQWRELKSEAGITSEGSTPTITPATSVSTRPYSHARRAPSRDALRRQQNERISLRVPPMPRGQPVRESRYAGQQGRPLYPPLPPSRPPLGCNGTSAVRAHQGALSPGMQRTPPAPTAALNPRPRMPTGAVPPGHYRRVFEQPVRGPRAEDFVSGRDGLDNGMISQSMRQSSNPRVPGSWNEVTIYTCRARKVRCDGRRDVCTNCERLGFGCTYHDAGPGSGSTEGETAMSSALALALPRRRVRLACANCHSRKARCSGSLPKCDRCRARGIECVYQPGKRARPSSVIVGETTGNASSTPDRPGSGNGTDLGSGTRDFGARCIDEAETTVLRELEKPSTLKLQTLVLIIKHRILMRRFPSAFMLHAVASRFAVALRLNHENPRLCFLAQESRRRLMWAVYMIDTGIAAGHPDFGLWENKAPSNIRIQLPCNERNFDFDLPEVTEPLEQPAPGPDGVIPPMTDDIGFLALHIRVCLLRSRILQYTKNMIHGNPTPEQIANLPARFAELESQLGAFAARLPVSFNWSEANVRLRAYSPRLCVFVMTHMWWEQCHIDLYRVAAHSGVSRDALPQNMMARIEASHPGFAGICRRQIFEHARAMADMFSLMLALDGVPVTDMDLPVCLYQCARMLYLSLHTSGVEFGITTESVQEMGNVCLRVLKQTITAPAAMGIRADLERLLATGIPSDLAPSIPESPEIPIGGQGRNQVPALLGQSVLPNNANQIGMNAVQYQSPIASLPNGAQTSSTQTVAGPFQAASTQPTPMAQLDQPTTETDEAPKSPSAASLHPSNAFDGPFDGLDFNMDQFGMDSQSWYSIEWLGGEFSSAAGNGQPT

SEQ ID NO: 10063 - protein, 436 aa, Anaplasma marginale str. St. Maries
MLYHQRFRVPLAKQFMNDTTSVTRLENNFSVVSEKVDGVNSVGISIWVKTGSRHEEKEKIGLAHFLEHMAFKGTDTRSALDIAMAFDCIGGNFNAYTDKEHTVYHVKVMKRDVHIALEVLEDIVLRSAFPEVEIEREKNVVLQEIYQTNDSPGSIIFDKYMEVAYKGQIFGAPILGSEQSVLGLSRADLVQYMSANYYGNNMTLSVAGDIAHEDVVRMSQGFAQIQDRNPQPVAPPVYTGGQYIEARDLDQVNIVIGFPGVSYLDERYYTMQVLDVILGSSMSSRLFQEIREKRGLVYSISSFNSSYSDSGLFSIHAATDEGNLQELLKTIAAEMKKLPETVKEEELLRAKSKLESEVLMSRESTVGKSEALGYCYSHYNKYITKEEMISKIRAVNLGDVINSADLLLQNRGKLTVAAIGKVGPLPSLETISNMLA

SEQ ID NO: 10064 - protein, 447 aa, Acinetobacter sp. ADP1
MKYSKMSDFLDYVKTRDQYQPEFLQAVEEVMISLWPFIEKHPEYADYGLLERLIEPERVIQFRVAWMDDQGHTQVNRAFRVQYNSAIGPYKGGMRFHPSVNLSILKFLGFEQTFKNALTTLPMGGGKGGSDFNPKNKSEAEIMRFCQALMLELHRHLGADTDIPAGDIGVGAREVGYMAGMMKKLSNDTAAVFTGKGVSFGGSLMRPEATGYGTVYFAEEMLKTRGQNFLGKTVSISGSGNVAQYAAEKAMFLGAKVVTLSDSNGTVYLENGFTEVLLAELMELKNKKRGRISEFASKHGFEYFEGQTPWHIPVDIALPCATQNELNGDDAETLIKNGVICVAEGANMPSTLEAVEKFLHAKILYAPGKASNAGGVATSGLEMSQNSIRLNWSHAEVDERLHAIMKDIHANCVKYGTKQDGSINYVDGANIAGFVKVADAMLAQGIY

SEQ ID NO: 10065 - protein, 656 aa, Ustilago maydis 521
MGCFSFFSKNRGGSDAGSIKTESTLVEAAFDSEKARKSDAAAVLPTVKRDLTGPRLSALRKLMEQEELDFYLVPTDDAHATEYTAASEMRRVWISGFTGSAGTAVVGKDSAHLFADGRYHIQAAEQLDDNWTLHKVGVSGVLDWPAWLIEQAEEGTKVGLDPALTSYTQGKSLVASLQQKQASAVFPSRNLVDVAWGSDRPAPVAFPIYEHELKYAGKPATAKIEDVQKDLQVQPASSAYFISALDEVAWLLNLRGASIPCHPVFPAYLLIASDRSTLFIRSELLPAGTTTDKYVRDTLNINVEPYDSVWEYLSRWSSEGSDGQKLISGEKLSYAVANAVGDEKLALLDPWPVALRKSIKNDVELEGFRASHIRDGAAWVRWAAWLEDHVKVKRENINEWEAAVKFQEYRKMLPLYAGDSYDAISATGPNAALPHYETPEKGSRVIDRETPYLNDSGAQYHDGTIDCTRTVHFGRPSAEQKRAYTRVLQGHIRLSEVKFPAGTTGAQLDPIARHALWQDGYQYLHGTGHGIGSFLDVHEGPQGFSTMSGGSKQPVALEENMVLTNEPGFYEEGHFGIRTESLLAVKRVETHREFGDVAWYGFERITQVPIATNLVDFSLLSYSEVRWLKEHNAEVRKKLLPLIKDDKRAVRWLRRQ

SEQ ID NO: 10066 - protein, 553 aa, Magnaporthe grisea 70-15
MASVASASAAAAATAATPVVSTASGESTTPKIPQKSSKQRKKQPSKEDHALPSDPEVIWPPPYVIEDGLRRVEPYHFAYRTWVKERWRGRALVDVFESEFRDRPIEYYRECMEKGSVLVNAKKVGPNHILKNGELIAHICHRHEPPCTADPVQVLHEDDEMIVINKPSGMPVHPAGRYNFNSVVEVMRSERSRDFKAYPCNRLDRLTSGIMFIAKTPQAACKMGEQIMGRTVRKEYLARVIGRFPDGEVICNEPILQISPKLGLNRVRANGRHARTVFKRLAYYPPAEGQGNEAKPGEAANGRPWRNKQGYSIVRCLPVTGRTHQIRVHLQHLGHPIENDPIYANYKVWGLNLGANDGDASLNSDEDIISRLSRMGKEDVAEAVAYYDEMVDEYYKKKAEKMSGELCKECDTPLYTDPGSHELSLWLHSLRYEDSGGAWSYSSPMPKWALPPDGMNGPVEVGDMKELVVAVRDTNPELILEVQMGPRFDDLQIGYSRHGDLLYFWGCGRLAIFGHPPTETWTLGGEDRKLMEERRNTDDKPSAKKELSGAACT

SEQ ID NO: 10067 - protein, 131 aa, Vibrio vulnificus YJ016
MVKMIHTMIRVSDLECSLKFYRDILELEIKDQYIFDGFSLIYLGNSETGFELELTHNHDQSEPYTHGSGYGHLAVNVEDIEAVHRRLTSLDIEVSDIKVFNYQQKHLATFFFVTDPDGYKIEFLQRQGRYL

SEQ ID NO: 10068 - protein, 459 aa, Xanthomonas campestris pv. campestris str. 8004
MTDTPGRSDAATLERFGYAQELKRQLSLKDLLIYGLVFMVPTAPFSIFGGVFDISAGMVPLTYLVGFVAMLFTALSYQQMSQAFPVAGSVYAYVGRGLSGGMGFLAGWAILLDYLLVPTLLYVVGANAMHNVLPQVPQPAWIAFFVVLNTVVNLRGIETTARANRFFLYAQLIVLALFVVLATLAIQRGVNGAQWTLRPFYNPQAFSPQLIFSALSVAVVSFLGFDAISTLSEETRGGNRVVGRATLLALVLVAGLFVLQTWLAALLQPHLQRYPSAQASNDAFFEIGRLIAGPWMQIVIALTVAISAAIANSLVAQAATSRLLFAMARDRQLPAFLRYIHPRTGVPQRAILLVAALSMVLGEVFVGQIALLSSLCNVGALTAFVLLHVAVLWHFRAHGRKVLHGVVPVIGIVILAYVLINADLHAQLGGSAWMVVGLAVLAFLKFSGRSTEFRATDAL

SEQ ID NO: 10069 - protein, 756 aa, Ustilago maydis 521
MADVVRRPSSQADSGSGSRSYSQSPQKKNGLHRSDSLSSPTKKASISNGQPKKSSSVSSLPSSPSKEERKKLAKEILASGGDQLRHTLKQRGMLHALLSEPVKFIKSNQKQGQDYTTLGLTPVNDPDFAAVQKRKQEQKQHALLLHTDSPKINGNTHTSDSDLSVEAQSSPSKSGKARSRDLYPYKLSLRFPGKVRGVATGLSNYGNTCYMNSVMQSLIHTPPLAFALLTQDLDALHGELGGKPNVAFDAVAAMQTFAKGSLMGSKPTNAPRDFNRNLKAFARPLRQGRQEDAHEYLRFLLEALQQGCLSRASKSLKPDDPIRATSFVQKIFGGKLRSRVTCHKCGHNSDTFDPFMDLSLDVRKGINSLTDAFRAFVAKDQLTGSEKYKCDKCKRKVDATKQFTIETAPPALTVHLKRFSPFGGKISRQVAFDEKLNIAPYLSVNHGPVRYKLYAVVHHYGSGPNSGHYVASVRSPFGKWTRMDDSHVSEMGSSGPLGDQSAYILFYLKEKDDALEKAIAAVTPVKSGNKRKAVQESEVGSDSEEDDGAAIATAAVAALPPTKVPRSASNPANEDVSDSETSSSPPNQLNGTSEKLDLMLSSRPTSAASFYGSAASFRVSSNPFTVRSAAASGLDEELGTAVDRDEYESLVGSSTSDVIAASASAARRRTNAEADSESEEDSFAALSKKEKRKHKKAAQVIHAAKHSRGIPASPYASALTSLSSLSAKEQKKKKSKRDRDRQKPMGGFAGRMKPKY

SEQ ID NO: 10070 - protein, 412 aa, Lycopersicon esculentum
MNALAATNRNFKLAARLLGLDSKLELSLLIPFREIKVECTIPKDDGTLASFVGFRVQHDNARGPMKGGIRYHPEVDPDEVNALAQLMTWKTAVANIPYGGAKGGIGCSPSDLSISELERLTRVFTQKIHDLIGIHTDVPAPDMGTNPQTMAWILDEYSKFHGYSPAVVTGKPVDLGGSLGRDAATGRGALFATEALLNEHGKSVAGQRFVIQGFGNVGSWAAKLIHEQGGKVVAVSDITGAIKNEKGIDIESLFKHVKETRGVKGFHDAHPIDANSILVEDCDVLIPAALGGVINKDNHKLKIKAKYIIEAANHPTDPEADEILSKKGVTILPDIYANSGGVTVSYFEWVQNIQGFMWDEKKVNDELKTYMTRGFKDVKDMCKTHNCDLRMGAFTLGVNRVARATVLRGWEA

SEQ ID NO: 10071 - protein, 225 aa, Synechococcus sp. WH 5701
MLSSLFKLASWPRIPAAPPELPECPGSGSLRATMILPDPAAEASPPLGRRERMVLAAIAAALALLLFGLRGGLQPQAPLEQLARRSPELPLALASGRPTIVEFYADWCEACRSMAPAMAALESEHRGELNVVLLNVDNPRWSPEIDRYAVNGIPQLELFDRGGHAIGRSLGARSRPELASIMTALIEETPLPLLAGVGSLSPLTGGEAQGTGQTTPAQAGPRSHS

SEQ ID NO: 10072 - protein, 317 aa, Pyrococcus furiosus DSM 3638
MSRDVFEGIKLVVQQGLKANLLAHSRALISDVDYVLKAGTDWIGIFFCLSNHCLTKRFGITLEQALDRISRAIEYAKDHGLKVRFTPEDTTRTEWKNLVAALNLAKELKVDRVSIADTTGSAHPLKFYMLVKNVTEFGIPVNVHCHNDLGLALANAIMGIEAGATLVDATINGLGERAGIVDLAQIATVLYYHYGIKKYKLEMLYYLSQLLTKITGIRPQQNYPIVGENAFTHKAGLHVSAVIKDPTFYEFLPAETFGRERRIYLDRFAGRDTIRFYLRKAGIENENIVEELLRRVKESREPYTWEKLIEEARRLAT

SEQ ID NO: 10073 - protein, 345 aa, Candida albicans SC5314
MSGETVFVTGATGYIAQHIIKQLLSKGYSVIGSVRSQSKGEQLKELITAHHQDTTGDAKFDYVIVESLIEPGAFDSILQNHKEVGVFIHSASPIPFATDSVEKDILQPAIDGTKNVLTSIKKYGNENIKKLVITSSIAAVEPLGTGQTEPKTISEKDWNPITFEQGLANPAVAYYASKTLAEREVWKFVDENKNQLNFDVAVINPSFVFGPQAFGIKDKSAALRSTGEIINSVLKLKSNDPIPSLVASFIDVRDVARAHIIAFEDDDAIGQRLILDNEIFTKELIAHLIKKNFPSLDIPEGDIVKSEEEIANYPWRVDSTKTEKILGFKYISLDKSVVDTVNQLI

SEQ ID NO: 10074 - protein, 1365 aa, Staphylococcus aureus subsp. aureus MSSA476
MLNRENKTAITRKGMVSNRLNKFSIRKYTVGTASILVGTTLIFGLGNQEAKAAESTNKELNEATTSASDNQSSDKVDMQQLNQEDNTKNDNQKEMVSSQGNETTSNGNKSIEKESVQSTTGNKVEVSTAKSDEQASPKSTNEDLNTKQTISNQEALQPDLQENKSVVNAQPTNEENKKVDAKTESTTLNVKSDAIKSNAETLVDNNSNSNNENNADIILPKSTAPKRLNTRMRIAAVQPSSTEAKNVNDLITSNTTLTVVDADKNNKIVPAQDYLELKSQIKVDDKVKSGDYFTIKYSDTVQVYGLNPEDIKNIGDIKDPNNGETIATAKHDTANNLITYTFTDYVDRFNSVQMGINYSIYMDADTIPVSKNDVEFNVTIGNTTTKTTANIQYPDYVVNEKNSIGSAFTETVSHVGNKENPGYYKQTIYVNPSENSLTNAKLKVQAYHSSYPNNIGQINKEVTDIKIYQVPKGYTLNKGYDVNTKELTDVTNQYLQKITYGDNNSAVIDFGNADSAYVVMVNTKFQYTTSESPTLVQMVTLSSNNSKSASMGNALGFTNNQSGGAGQEVYKIGNYVWEDTNKNGVQELGEKGVGNVTVTVFDNNTNTKVGEAVTKEDGSYLIPNLPNGDYRVEFSNLPKGYEVTPSKQGNNEELDSNGLSSVITVNGKDNLSADLGIYKPKYNLGDYVWEDTNKNGIQDQDEKGISGVTVTLKDENGNVLKTVTTDADGKYKFTDLDNGNYKVEFTTPEGYTPTTVTSGSDIEKDSNGLTTTGVINGADNMTLDSGFYKTPKYNLGNYVWEDTNKDGKQDSTEKGISGVTVTLKNENGEVLQTTKTDKDGKYQFTGLENGTYKVEFETPSGYTPTQVGSGTDEGIDSNGTSTTGVIKDKDNDTIDSGFYKPTYNLGDYVWEDTNKNGVQDKDEKGISGVTVTLKDENDKVLKTVTTDENGKYQFTDLNNGTYKVEFETPSGYTPTSVTSGNDTEKDSNGLTTTGVIKDADNMTLDSGFYKTPKYSLGDYVWYDSNKDGKQDSTEKGIKDVKVTLLNEKGEVIGTTKTDENGKYRFDNLDSGKYKVIFEKPAGLTQTGTNTTEDDKDADGGEVDVTITDHDDFTLDNGYFEEDTSDSDSDSDSDSDSDSDSDSDSDSDSDSDSDSDSDSDSDSDSDSDSDSDSDSDSDSDSDSDSDSDSDSDSDSDSDSDSDSDSDSDSDSDSDSDSDSDSDSDSESDSDSDSDSDSDSDSDSDSDSDSDSDSDSDSDSDSDSDSDSDSDSDSDSDSDSDSDSDSDSDSDSDSDSDSDSDSDSDSDAGKHTPVKPMSTTKDHHNKAKALPETGNENSGSNNATLFGGLFAALGSLLLFGRRKKQNK

SEQ ID NO: 10075 - protein, 453 aa, Staphylococcus epidermidis RP62A
MKYIVVGTSHSGYEVIQTLLKEDENADIQVFESADQPSFLSCGIQSYLEDISSSLDDLHYASVDSYKAQGVNIHTNSTVTDLDTDNKTVVVEHQGQTATYSYDKLFLSPGGKPVTPPVDGIEKYKHVLFMRGRDWANQIKERMKYAKKAVVVGGGYIGIEAAEAFAKAGIDTTIVDVADRILNTYLDKEFTDVLETNAQQHGLHFKGGETVQSLSGNQNGEVTTVVTDKNEYDADTVLFAVGVEPATEWLKDKIDLGKKGIININHQQQTSAKDVYAGGDATLVPFAPVSEDRYIALATNSRRQGVVAAKNMLGKEMTMPRVSGTSGLQLFDYKFGQTGIHGTEIDNYDGNLGQTYVEELIRPQFMQDDTKIHMKIIYDKDTHRILGGQVMSKEDITASINTISVVISAGFTLEQLAVQDFFFQPDYDRPWHYLNVLAQQALGDTFGSDKMLF

SEQ ID NO: 10076 - protein, 451 aa, Arabidopsis thaliana
MKALCDRFVPQQCSSSSKSDTHDKSPLVSDSGPSDNKSKFTLWSNVFTSSSSVSQPYRESSTSGHKQVCTTRNGWTAFVKRVSMASGAIRRFQERVLGPNRTGLPSTTSDVWLLGVCYKISADENSGETDTGTVLAALQLDFSSKILMTYRKGFEPFRDTTYTSDVNWGCMIRSSQMLFAQLPEQEYLETLEPFGDSEPSAFSIHNLIIAGASYGLAAGSWVGPYAICRAWESLACKKRKQTDSKNQTLPMAVHIVSGSEDGERGGAPILCIEDATKSCLEFSKGQSEWTPIILLVPLVLGLDSVNPRYIPSLVATFTFPQSVGILGGKPGASTYIVGVQEDKGFYLDPHEVQQVVTVNKETPDVDTSSYHCNVLRYVPLESLDPSLALGFYCRDKDDFDDFCLRALKLAEESNGAPLFTVTQTHTAINQSNYGFADDDSEDEREDDWQML

SEQ ID NO: 10077 - protein, 1141 aa, Staphylococcus aureus subsp. aureus MSSA476
MINRDNKKAITKKGMISNRLNKFSIRKYTVGTASILVGTTLIFGLGNQEAKAAENTSTENAKQDDATTSDNKEVVSEAENNSTTENDSTNPIKKETNTDSQPEAKEESTKSSTQQQQNNVTATTETKPQNIEKENVKPSTDKTATEDTSVILEEKKAPNNTNNDVTTKPSTSEIQTKPTTPQESTNIENSQPQPTPSKVDNQVTDATNPKEPVNVSKEELKNNPEKLKELVRNDSNTDHSTKPVATAPTSVAPKRVNAKMRFAVAQPAAVASNNVNDLIKVTKQTIKVGDGKDNVAAAHDGKDIEYDTEFTIDNKVKKGDTMTINYDKNVIPSDLTDKNDPIDITDPSGEVIAKGTFDKATKQITYTFTDYVDKYEDIKSRLTLYSYIDKKTVPNETSLNLTFATAGKETSQNVTVDYQDPMVHGDSNIQSIFTKLDEDKQTIEQQIYVNPLKKSATNTKVDIAGSQVDDYGNIKLGNGSTIIDQNTEIKVYKVNSDQQLPQSNRIYDFSQYEDVTSQFDNKKSFSNNVATLDFGDINSAYIIKVVSKYTPTSDGELDIAQGTSMRTTDKYGYYNYAGYSNFIVTSNDSGGGDGTVKPEEKLYKIGDYVWEDVDKDGVQGTDSKEKPMANVLVTLTYPDGTTKSVRTDAKGHYEFGGLKDGETYTVKFETPTGYLPTKVNGTTDGEKDSNGSSVTVKINGKDDMSLDTGFYKEPKYNLGDYVWEDTNKDGIQDANEPGIKDVKVTLKDSTGKVIGTTTTDASGKYKFTDLDNGNYTVEFETPAGYTPTVKNTTAEDKDSNGLTTTGVIKDADNMTLDSGFYKTPKYSLGDYVWYDSNKDGKQDSTEKGIKDVTVTLQNEKGEVIGTTKTDENGKYRFDNLDSGKYKVIFEKPAGLTQTVTNTTEDDKDADGGEVDVTITDHDDFTLDNGYFEEDTSDSDSDSDSDSDSDSDSDSDSDSDSDSDSDSESDSDSDSDSDSDSDSDSDSDSDSDSDSDSDSDSDSDSDSDSDSDSDSDSDSDSDSDSDSDSDSDSDSDSDSDSDSDSDSDSDSDSDSDSDSDSDSDSDSDSDSDSDSDSDSDSDAGKHTPVKPMSTTKDHHNKAKALPETGSENNGSNNATLFGGLFAALGSLLLFGRRKKQNK

SEQ ID NO: 10078 - protein, 496 aa, Trichodesmium erythraeum IMS101
MLRKLMDKNWFSRFRYFCLFLGTIVVLIGCQVALANGGSDDFVKVDNIWLLLAGALVFFMNAGFALLEAGFCRSDNSVNVLAKNLIVFCVAAIAFWMFGFGLMFGDSSYHLPCRGNFEQKNEKVQSYHGHFSPTMEYNEFEQKSQFILPPKNDTPLGYPSKGFSCLQRQFPKRSIASIFFFQLAFAGTAATIVSRAVAEKMKLWVFFCFSFILVGFLYPIVGHWVWSEYGWLKQGLNFIDFAGSTVVHTVGGTAALAVAILLKPRWSWLGYDPWEDLETDEGSEALSPQGQKESYDQRNLTSATLGCLILWLGWLGFNGGSTTELKEVGHIIITTIMSAATGGIIAILLSPLFSQRSSNNSEIGKLDLSSLINGILGGLVGITASAAYVDIPIAIFIGAVSGVVVVLTRKLLKWIKLEDPLGAIPVHLFCGCWGTIAVSFSLRGTIVYEKTYNFLERLEWQFSGWGVVFITTFLVSCIIWIFIGLTLYLFEKILRK

SEQ ID NO: 10079 - protein, 190 aa, Magnaporthe grisea 70-15
MAFLILVIGDLHIPDRALDIPPKFKKLLAPGKIGQTLCLGNLTDRTTYEYLRSVAPDLKIVKGRLDVEATSLPLSQVVTHGSIRIGFLEGFTLVSNEPDLLLAEANKLDVDVLCWGGTHRFECFEYMDKFFINPGSATGAFTTGWGTEEDIVPSFCLMDLRKDENGVENVAVEKVTYTKVVEPPTTASAS

SEQ ID NO: 10080 - protein, 112 aa, Synechococcus sp. WH 5701
MKKVEAIIRPVKLDDVKTALVNAGIIGMTITDCRGFGRQKGQVETYRGAEFTVEFINKVKVEVVVDDDKVDTAIDAIAGPSRTGEIGDGKIFVTAVEKAVRIRTSETGTIAL

SEQ ID NO: 10081 - protein, 91 aa, Glycine max
  misc_feature (30)..(30): Xaa can be any naturally occurring amino acid
IAFLKSRRGFVRIAMEKGKPLVPVFCFGQXPIPFKHPMHVVVGRPIELEKTPEPTPEEVAKIHSQFVEALQDLFERHKARAGYPNLELRIV

SEQ ID NO: 10082 - protein, 534 aa, Trichodesmium erythraeum IMS101
MNKIWIYDTTLRDGAQREGLSLSLEDKLRIVHQLDSLGIPFIEGGWPGANPKDVQFFWHLKEQPLTQAEVVAFCSTRRPGKQAASDPTLQPILSAGTRWVTIFGKSWDLHVTEGLKTTLEENLEMISDTISYLCSQGCQVIYDAEHWFDGYKHNPNYALQTLTAAKNAGAQWLVLCDTNGGTLPHEATQIVADVSRELPNTRLGIHTHNDSGTAVANALSAVIEGVQMVQGTINGYGERCGNANLCTLIPNLQIKLGYDCIQSQKLEKLTQVSRGISEIVNLAPDDHAPFVGLSAFAHKGGIHVSAVERNPLTYEHIQPQEVGNTRRIVISDQAGLSNVLAKAKSFGIELDRQNPACRKILDKLKELENQGYQFEAAEASFELLMRSALERRQHFFEIKGFQVHLDKESAKVSNSLATVKVAVDGRDILEAAEGNGPVSALDTALRKALGNFYPAIANFYLTDYKVRILDSGAGTSAKTRVLIESSNGQQRWTTVGVSTNILDASYLAVIEGLEYGLMLESQSQENAVSVVIVN

SEQ ID NO: 10083 - protein, 459 aa, Bacillus licheniformis ATCC 14580
MKTKVSAVLFLSFFLAASALAAEPTVQSVNDSVNMTWVAIGTLLVFFMHAGFAMVESGFTRAKNTLNILMKNFLTISIGSILYFFAGYAFMFGDSAGGFIGTSGFALAGDQDVGFFVFQAVFAATCATIISGAVAERMKLGSYMILTLFMTGLIYPVVGHWTWGEGWLYDLGFVDFAGSSIVHLTGAAGAVAAVMFLGPRIGKYTNGKVNAIPGHSIPLGALGVFILWFGWFGFNGGSTLAADPAAVPHVITTTLLAASGGVVSSALFTYFRYGRIDPSLTLNGALGGLVGITAGADGVSFTGSILIGFIAGVILVVGVQFIDQVLKLDDPVGALAVHGICGVWGTLAVGLFNTSSGLFYGGGAAQLGIQAVGILSIAAWTLAATYAVAAAMKALAPIRVSKEEEISGLDYAEHGSSAYEYKESYIDQDDVDVSSAFGTDLVSRLNNLKPGPSSKTEQV

SEQ ID NO: 10084 - protein, 367 aa, Gibberella zeae PH-1
MVKETKLYDTLNVKPEASQDEIKKGYKKAALKWHPDKNKNSPDAAEKFKECSQAYEILSDPEKRKIYDSYGLEFLLRGGTAQPESGAGAGGNPFAAGGMPGGFNFEGGMPGGGTRTFHFNTGGGGAGGFGFSNPEDIFAEFMRNGAGGMHGGVDDEDMAGMFGGFGGGPRSRASRTRSGFDGRARETTPEVTTVERPLPLTLEELFNGVTKKMKIKRKTFDDSTQKRVQTDQILEVPIKPGLKKGSKIKFNGVGDQVEGGRQDLHFIVEEKEHPLYKREDNDLVHTVTLDLKEALTGWRRTVTTIDGRQLNLEKGGPTQPNSEERYPGLGMPISKKPGQRGDFVIKYKINFPSSLTADQKQKLREIL

SEQ ID NO: 10085 - protein, 365 aa, Azoarcus sp. EbN1
MARYWPEPAHTHGTPERTGILLVNLGTPAAPTAAAVRPYLKEFLSDPRVVEIPRAIWWPILNGVILNLRPKKSAEKYAAIWSDAGSPLKVHTERQAKLLAGYLGHAGVTSVVVDWAMRYGAPSISDILGRMKAEGCSRILVVPLYPQYAASTTASVIDEVAGCLTRWRNLPEIRYVRNFHDHPGYVGALARSVRDHWAKHGEPDQLVMSFHGIPKRSLDLGDPYHCECHVTARLLAAKLDLPPERWQLTFQSRFGKAEWLKPYTQPTLEALGRKGTGRVDVICPGFASDCLETLEEIALECRTAFLGAGGKAFHYIPCLNERHDWIAALTDIVRSRIGDWLEAPVPAAELLAATAQRARTAGAER

SEQ ID NO: 10086 - protein, 287 aa, Triticum aestivum
TSLYKKAGWYRSGRPEAIVPPTRRGRQGATSHCLGQNFAKMFDITFENEKGERSMVWQNSWAYTTRSIGVMIMTHGDDKGLVLPPKVAPIQVIVIPVPFKDADTTAIKGACESAVYTLNQAGIRADLDARENYSPGWKYSQWEMKGVPLRIEIGPKDLANKQVRIVRRDNGTKVDIPSTDLVEQVRVLLDGIQVNLLETAKAKRDACIEIISTWDEFIAALNNKKLILAPWCDEEEVEKDVKARTKGELGAAKTLCTPFDQPDLPSGTVCFASGKPAQKWSFWGRSY

SEQ ID NO: 10087 - protein, 318 aa, Triticum aestivum
MVILVVATASDPASIGPAAAFLAMPGWSPGPPIPEGMESFTNGNVRLLKHERSIVAEDDLDRRWQEATGEAVSEVIFLSKHTAVSNRPALTVHPIGVPHLREDETPPQGGRPGWAGVPNPRIGPWFRLMQKVAADQGLVPEFEITLEATHHGPLTSTPTMFVEIGSTQEYWGRQDAAQAIALVLWKGLGLEEGNAVGTWLGSGEKVLLGIGGGHYAPRHMDIVIKDGVWVGHLLSGYSLPMEAPPQVNGKSSGEVGGMWKHSIKVSYEATKAGFPGGEVIAHLDQKSFKGWQKNAITSYLQEQNIKIGKPNDFLCKKI

SEQ ID NO: 10088 - protein, 409 aa, Haemophilus influenzae 86-028NP
MTIEILVPDLPESVADATVATWHKKLGDTVKRDEVIVEIETDKVVLEVPALSDGVLAEVVQAEGETVVSKQLLGKISTAQEGDVSSATLKATNEPTPSDRQNAAIENSHNHNADQSPAIRRLLAEHDLQADQIQGSGVGGRLTREDIEREIAKRQAQQVKQEAATEQNTISTVAYSARSEKRVPMTRLRKRIAERLLEAKNSTAMLTTFNEVDMQPIMTLRKTYGEKFEKQYGVRLGFMSFYIKAVVEALKRYPEVNASIDGDDVVYHNYFDISIAVSTPRGLVTPVLRDCDKLSMAEIEKQIKALAEKGRDGKLTVEDLTGGNFTITNGGVFGSLMSTPIINPPQSAILGMHAIKERPIALNGQVVIHPMMYLALSYDHRLIDGRESVGFLVTIKELLEDPTRLLLEI

SEQ ID NO: 10089 - protein, 146 aa, Phaseolus vulgaris
MGAFTEKQEALVNSSWEAFKGNIPQYSVVFYTSILEKAPAAKNLFSFLANGVDPTNPKLTAHAESLFGLVRDSAAQLRANGAVVADAALGSIHSQKALNDSQFLVVKEALLKTLKEAVGDKWTDELSTALELAYDEFAAGIKKAYA

SEQ ID NO: 10090 - protein, 483 aa, Pseudomonas aeruginosa UCBPP-PA14
MQLKDAKLFRQQAYVDGAWVDADNGQTIKVNNPATGEIIGSVPKMGAAETRRAIEAADKALPAWRALTAKERANKLRRWFDLMIENQDDLARLMTIEQGKPLAEAKGEIAYAASFLEWFGEEAKRIYGDTIPGHQPDKRIIVIKQPIGVTAAITPWNFPSAMITRKAGPALAAGCTMVLKPASQTPYSALALAELAERAGIPKGVFSVVTGSAGEVGGELTSNPIVRKLTFTGSTEIGRQLMAECAQDIKKVSLELGGNAPFIVFDDADLDAAVEGALISKYRNNGQTCVCANRLYVQDGVYDAFVDKLKAAVAKLNIGNGLEAGVTTGPLIDAKAVTKVEEHIADAVSKGAKVVSGGKPHALGGTFFEPTILVDVPKNALVSKDETFGPLAPVFRFKDEAEVIAMSNDTEFGLASYFYARDLARVFRVAEQLEYGMVGINTGLISNEVAPFGGIKASGLGREGSKYGIEDYLEIKYLCLGGI

SEQ ID NO: 10091 - protein, 398 aa, Clostridium perfringens str. 13
MKIVVQKFGGTSVSTKERRTMVVEKVKGAINKGYLPVVVVSAMGRKGEPYATDTLLGLVSEEFKKENKLATDLLMGCGEIISTVVMSDELREAEIEAVPLTGGNAGILTDDNYSSADFIDINPKLILEVLKEGKVPVVAGFQGVDRNGFLTTLGRGGSDTTAAVLGVALKAEEIEIYTDVDGIMTADPRIVGDAELINKISYNEVFQLADQGAKVIHPRAVEIAMKGNVTLVIKNTMSTCIGTMIDSLGDVDNNKFITGITHQGNRIQVSIKSDDNKDNINYKTILESLANNKISLDLINIFPKEKVFTIDAGVKELFEDIMRKNNLKYSLVEDLSTIAIVGSRMRGIPGVMAKIVGALDNENIEVLQTADSHMTIWCLVESKNVREAIKALHRVFMK

SEQ ID NO: 10092 - protein, 444 aa, Cytophaga hutchinsonii
MRVLKFGGTSVGKPERMHSVAKLISSPDPKVVVLSAVSGTTNALVDISTKLCKKDIKAAEDAIEKLFTPYHAFVEELYTTEAGKYKGHAIMRTYYELIKSYVTAPSFGDKETRFFLAQGELISTNLFQEYLAEQGYSSALLPALEFMKTDADSEPMLEYIEEKLNEQLAKHPNKQLYITQGYVCLNSDGEVDNLKRGGSDYTATLIGAALRMEEIQIWTDIDGMHNNDPRIVKRTFPIPEISFDEAAELAYFGAKILHPTCIRPAQVRKVPVRLLNTMQPEQKGTVINSKPSDRDITAIAAKDDITAIKIKSSRMLQAHGFLRKVFEIFENYKTSVDMITTSEVAVSLTIDDAKNLEQIVKELKEFSIVEVDTDQTIICIVGNFGKEKTGISKRLFDAMETIPVRMISYGGSASNISILINSTLKNETLNALNERLFFQAETVK

SEQ ID NO: 10093 - protein, 283 aa, Coxiella burnetii RSA 493
MIARILDGRTCAEKVKARVKENIRLLQEKGLPSPGLAVILVGNDPASATYVAHKERACQAVGIRSTVYRMPNTITESELASKIDECNRDSNTHGILLQLPLPAHIDPANLLERIRPDKDVDGFHPYNLGRLVQRRPALRPCTPYGVMTLLTETHENLEGKHAVIVGASNIVGRPMALELLLAKCTVTVCHRFTRDLAEHVKSAELLIVAIGKPGIIQSEWIKPGAIVIDVGFSRLSPNKIAGDIDFETAKERASWITPVPGGVGPMTVATLLENTLQAAQTFL

SEQ ID NO: 10094 - protein, 194 aa, Hordeum vulgare subsp. vulgare
MMLSSAYSTPAADELGGPPPLPPPPGADVSVIVGALTGVLLGLFLFLIYAKHCRQRGRGGARGAAGGLGLGFRASSTCDRCRSGVSLSVVDALPVVRFGDMGGAAAAAQPECAVCLGTFDPAADELLRVLPKCRHAFHADCVDTWLEAHSTCPVCRRRVGKEDAFAVIPELEAADADWYPAREAEMQIVVRRPA

SEQ ID NO: 10095 - protein, 265 aa, Burkholderia xenovorans LB400
MDAKTNNAAVRVERNGRTAWIVLNRPEQINAINDEIREAVPRALLELDADPAVSVIVIRGEGPRGFCAGADIKEKRGPESSLQVRRRMEHSRWIETLDRVAKPVIAALHGFCMGGGMELALACDIRYAAPDTVMALPETGLGLIPGGGGTQRLSRLVGHGMAMDMLLTGERLDSRRAQEIGLVSRIAAAPASLFEEVQALADRIAVRSPMATAYAKQAARTALELDLRRGLDRELDLFALLAPSQDVKEAALAFKEKRVPVFTGE

SEQ ID NO: 10096 - protein, 210 aa, Oryza sativa
  misc_feature (22)..(22): Xaa can be any naturally occurring amino acid
  misc_feature (26)..(27): Xaa can be any naturally occurring amino acid
  misc_feature (39)..(39): Xaa can be any naturally occurring amino acid
  misc_feature (42)..(44): Xaa can be any naturally occurring amino acid
  misc_feature (51)..(52): Xaa can be any naturally occurring amino acid
  misc_feature (54)..(56): Xaa can be any naturally occurring amino acid
  misc_feature (59)..(59): Xaa can be any naturally occurring amino acid
  misc_feature (64)..(64): Xaa can be any naturally occurring amino acid
  misc_feature (70)..(70): Xaa can be any naturally occurring amino acid
  misc_feature (74)..(74): Xaa can be any naturally occurring amino acid
  misc_feature (80)..(82): Xaa can be any naturally occurring amino acid
  misc_feature (89)..(90): Xaa can be any naturally occurring amino acid
  misc_feature (92)..(93): Xaa can be any naturally occurring amino acid
  misc_feature (98)..(98): Xaa can be any naturally occurring amino acid
  misc_feature (102)..(102): Xaa can be any naturally occurring amino acid
  misc_feature (106)..(106): Xaa can be any naturally occurring amino acid
  misc_feature (109)..(109): Xaa can be any naturally occurring amino acid
  misc_feature (118)..(118): Xaa can be any naturally occurring amino acid
  misc_feature (142)..(143): Xaa can be any naturally occurring amino acid
  misc_feature (145)..(145): Xaa can be any naturally occurring amino acid
  misc_feature (148)..(148): Xaa can be any naturally occurring amino acid
  misc_feature (151)..(152): Xaa can be any naturally occurring amino acid
  misc_feature (154)..(155): Xaa can be any naturally occurring amino acid
  misc_feature (158)..(159): Xaa can be any naturally occurring amino acid
  misc_feature (169)..(171): Xaa can be any naturally occurring amino acid
  misc_feature (174)..(174): Xaa can be any naturally occurring amino acid
  misc_feature (176)..(176): Xaa can be any naturally occurring amino acid
  misc_feature (179)..(181): Xaa can be any naturally occurring amino acid
  misc_feature (190)..(192): Xaa can be any naturally occurring amino acid
  misc_feature (194)..(195): Xaa can be any naturally occurring amino acid
  misc_feature (197)..(198): Xaa can be any naturally occurring amino acid
  misc_feature (201)..(202): Xaa can be any naturally occurring amino acid
  misc_feature (205)..(205): Xaa can be any naturally occurring amino acid
  misc_feature (208)..(209): Xaa can be any naturally occurring amino acid
MASGSEAEKSPEVVLEWPKKDXKKLXXAVYRVGDLDRTXKCXXXCFGMKLXXKXXXPEXKYTNXFLGFGXEDTXFALELXXXYGVDKFXXGXXFGHFXIATXDVFXLAXKIKSRCCCXITPEPGPVKGRSTVIAFAQDPDGXXFXLIXKGXXPXXLCXXMLPVGDLDPXXXFFXKXPWXXXPEGKKDFPXXXFXXAXXGLXXIKXKKXXF

SEQ ID NO: 10097 - protein, 112 aa, Desulfovibrio desulfuricans G20
MKKVEIIIRPFKLDEVKESLTELDIKGMTVSEVKGFGRQRGHKEVYRGAEYQVDFMPKAKIEVVVEDDQVQSVVETVMKAARTGKVGDGKIFIIPVDDVVRIRTGETGTGAV

SEQ ID NO: 10098 - protein, 136 aa, Euglena gracilis
MSTTTPPPAKGGKDKKGAKAGVKKGKTGGSGQSKKAGLTFPVGRTGSLLRAGRYAKRVGKGAPVYLAAVLEYLSAELLELAGNASRDNKKKRITPRFLTLAVRNDEELNKLLSGVTIASGGVLPNIQQVLLKKKGK

SEQ ID NO: 10099 - protein, 952 aa, Burkholderia thailandensis E264
MSNARSEFLIQQSKLTIKLQVRRTALMRAVMHAEGLWNRRIEPSPELLSRFDAHQGYAVLHTPQGAPAALALGIPAPGRSASTFAPYLALLETQLLMGDGQSPLPDDRVEGYSFSPDGTYLSLLWSREDQAPEAFIESHSASGVIGDAMRGIRYLRDASTIIPLRADRRTVWLPPHPDPLTGKPMIRVVQPAIDAAGKLFAIYVRSLPLDMFYSNLNDTPAGGTLTIVDRKGRVIIGSWNPPGRDGDVTDSALSIRSLGDGFDGLVERHENGMFVTSDQLPGTDWVLVHAYSWKTIAAALALRFSLMTGFAAGIIVMLWVLAIQFDRKGLIPNYRRAQRLLESEVLNRAILRTAPVGLGLLSAHDGSVLLQNNAMLELSARTSGEPLPNRLWDAYRQTTGRSNDEDGALLLHDLAIEREDSNPIYLQANVVAARYRGANVLLCTLLDISMRKESELKLKEARIASDQANKAKSTFLATMSHEIRTPLNAIIGNLELLRRSQLSNQQSERLQVVESCSNALLHIINDILDLSKVESGQMTLENIPFDIQALLQEIVDAYAPLAESKGLQLLSNLGEGVARYYSGDPARIRQILSNLIGNAIKFTERGHISVDVHQAKAAQGDSAIEIWVNDTGIGIRPDRIATLFDVYTQADTSIHRRFGGSGLGLPLCKRLATIMGGSIEVDSLPDFGTTVTVVLPLREARHATAMSSGPAVRRRDAPAHARPSLHVLVAEDHPANRALLRDQLEALDHRVDVVENGRDALRAFGEHQYDVVLTDLGMPELDGFGFAMFANKMRASIPIVAMTAHATAEDYRRSKKVGIAEIVLKPLSLTTLEKVLQRHAARTLAAEVVVADAGEAHAESRIRTLPPAVAAALRTATLQSIDKIAHALASRRFETIRQELHSIKGGFALTGNRFLIARCSAAEELAEREDLDTLRAAWRNLESSLLEALERL

SEQ ID NO: 10100 - protein, 481 aa, Bacillus clausii KSM-K16
MKLDLRRQQMLLAGEWVDRTETMEVRNPENDQLVAIVPKASKTDMEQAIARAKEGAKASAALPVYKRMAILNRAADFVDAHKERFARTIATEGSKTIREARKETGRCVETLRLCAEEARRVTGETIPFDQSPGGTGRFGYYERHPLGIIGAITPFNDPLNLVAHKIGPAIAAGNAIVLKPATATPLSALLLAEAFMEADLPKGILSVMTGLGSEVGDVLITHPDVRMVSFTGGMEAGLEIAKKAGLKKKSMELGSNSPVIVLEDAQIEDAVKANVSGAFWAAGQNCIGVQRLYVHEEVYDRFKELFVKQSCAYLMGEKLSEKTDMGPLISEKEAKRVAFMVDDALRMGAALLCGGKRRGAFYEPTVLENVPDECMLAKEEIFGPVVLLYKIKSLAEGIERANQSDYGLHAGLFTESMNAVFQAIQELEAGGVMVNDSSDFRIDAMPFGGTKQSGLGREGVKFSILEMTEQKVVCFKLRDNG

SEQ ID NO: 10101 - protein, 392 aa, Ustilago maydis 521
MPSKTKSRTSASAATEKPIVATASSSQIGVSNSNLDSEQVLKAFRALSAHVARRNASSATGSSLPLDGPSGALRDASNTVYLQLTLSTLSPTSHIKPVRINLPHALHTPGEVSTCLLVKDPQREYKDRLVAEKIRCISRVVGVTKLKGKFKPYDARRALVQDHDIFLADSRIVPNLANLCGKVFFDARKNPITVNLTKKSEALKKELESAIQATTFLQNKGSCSTIKIGYMHKHSPEQLTQNLMAAMPAVLSRVKGGWENVNNVDVKTGNSAALPVWNKKLGVKTHVTPSNERLVDETSQPSIPAEHKHDLSAETPVKKSNSLVNKGQHTWPPTSSPSPRKTRGAAAAAAAAAAAKANLTIANDAVATPTKSAKSTPKKPTSSVGRSARKPK

SEQ ID NO: 10102 - protein, 299 aa, Deinococcus radiodurans R1
MQTSSEPAASETAALLGKPLADRVMRGVRADLKAWAQLDPPFEPQLVSVLASDDEASQVYVQSKAKRAKKLGVAFRVVDLGAAATQEALEQTLRELSADPAVHGIVLELPLAAGLDADAALLHIAARKDIEGLSPANLALIAAGREPEALLPPTPRSVRFLLRHALGDDLRGLRVAVIGPGRTVGRPLLFMLNNKGATVTLCNEHTRDLAAVLAAQDAVVVAVGKAGLLRPEQVQPEHVVIDAGINVQESGDMVGDALPELPVRAQTPVPGGVGPLTSALMYQNLVRGVKLQRGEPVDD

SEQ ID NO: 10103 - protein, 357 aa, Oltmannsiellopsis viridis
MANSAMTPSEATQEKEARPVFPFTAIVGQEEMKLALILNVIDPKIGGVMIMGDRGTGKSTTVRALVDLLPEIDVVANDPFNSDPYDPELMSTEVREATQNNSELDVVKAKITMVDLPLGATEDRVCGTIDIEKALTEGVKAFEPGLLAKANRGILYVDEVNLLDDHLVDVLLDSAASGWNTVEREGISISHPARFILVGSGNPEEGELRPQLLDRFGMHAQIGTVKEPDLRVKIVEQRALFDEEPVSFRNNYDQSQQALTDKIVAARNLLKDVQLDYDYRVKISQICSELNVDGLRGDIVTNRAALAICAFEGRTEVTPQDIYRVIPLCLRHRLRKDPLESIDSGDKVRDIFKEVFS

SEQ ID NO: 10104 - protein, 617 aa, Deinococcus radiodurans R1
MAAMVSHSSPVDGAPVSRPRSPVMATELKLPDVGDNIEKGTVVTVLVNPGDSVTEGQPIIEIETDKAVVEVPASAAGTIEAVNVKVGDTIPVGGVIATLGGGAASASDSAPSASAPSPANGGGDQAANVESTPATDSGTAQRVAQAQQDAQKEQAGQPTSGGTADANQAQATPSEGQSSGGQQVTLPDVGDNIEKGTVVTILVNVGDTVSEGQPVIELETDKAVVEVPANASGTVQSVAVKIGDSIPVGGTILTLSGAASTQPTAPAPESAQPASQSQQSTQPEPARPAGAPQAQAAAPQQSGTQNPQTFDGRPVVPAAPSVRRLAREIGIDIHAVHGTGIAGRISEEDVRRTAGTPSVQAQASAASAAAPAPMAAPLPNFEKWGTVRREDMSGIRKATVRSMTTAWTTIPMVTHFDKADVTAMEETRKRFGARVEKEGGKLTMTHILMKVVANALRKFPKFNASLDLGAEQVIYKEFVNIGVAVDTPVGLLVPVVKDADRKGITELVLDLSELAGRARERKLKPDEMQGATFTISNLGGIGGNAFTPIVNSPEVAILGVSRGGFEPVWNKEKGEFEPRNMLPLSLTYDHRLIDGADAARFLRYICESLEDPFLISL

SEQ ID NO: 10105 - protein, 192 aa, Zea mays
  misc_feature (46)..(46): Xaa can be any naturally occurring amino acid
  misc_feature (83)..(83): Xaa can be any naturally occurring amino acid
  misc_feature (118)..(118): Xaa can be any naturally occurring amino acid
MSSSSSFPTYRFPFAAGASARAPGGRGGAGGGGSSVRPWGSSGRPXGTSVSSSGKRIQKELLDLNASDCSAGPKGDNLYRWLXLQGSPYERGIFFLDIVFPPDYPFKPPMVTFKTRIXYHCNIDSTGKVHLDILKDGWSPAFTISKVLLAIKDIINNPDPYTPLVMSISRQYVTDRAKHDETAAEWTMRFAR

SEQ ID NO: 10106 - protein, 287 aa, Bacillus anthracis str. 'Ames Ancestor'
MKKAMLALAATSVIALSACGTSSSDKIVTSKAGDITKDEFYEQMKTQAGKQVLNNMVMEKVLIKNYKVEDKEVDKKYDEMKKQYGDQFDTLLKQQGIKEETLKTGVRAQLAQEKAIEKTITDKELKDNYKPEIKASHILVKDEATAKKVKEELGQGKSFEELAKQYSEDTGSKEKGGDLGFFGAGKMVKEFEDAAYKLKKDEVSEPVKSQFGYHIIKVTDIKEPEKSFEQSKADIKKELVAKKSQDGEFMNDLMMKEIKKADVKVDDKDLKDLFEEKKADAKKEEKK

SEQ ID NO: 10107 - protein, 122 aa, Triticum aestivum
  misc_feature (97)..(97): Xaa can be any naturally occurring amino acid
MAGTGRSMLLSLLLFAVTLSLLEMYRGWFAASELKTIAGGFVSSLLFLLLLTFIGNYQEASGVRTGWGAVVVAQLVALIVAGTVHRVCITTCFLFSXAGILYEVDKLSGMILARSESKARRY

SEQ ID NO: 10108 - protein, 412 aa, Rhodobacter capsulatus
MTDVMVPALGESVAEATVSTWFKKPGDAVAQDEILCELETDKVSVEVPAPAAGVLSEILAPEGASVAAGGRLAILAAGSARLQPPAAAAAAPAPAPAAPAKDVEHAPAAKKAMAEAGLTPDQVTGTGRDGRIMKEDVAAAAAAPAAAPAPAAPAPVATAQVSIAPPPATVPRAPVPAEDAAREERVKMTRLRATIARRLKDAQNTAAMLTTYNEVDMSGVMDLRNVYKDQFEKKHGVKLGFMGFFVKACCHALKEIPEVNAEIDGGDIIYKNYVHMGVAVGTPSGLVVPVVRDADQKGFAHIEREIAELGKRGRDGKLTMQEMQGGSFTISNGGVYGSLMSSPILNPPQSGILGMHKIQDRPVVVNGQIVIRPMMYLALSYDHRIVDGKGAVTFLVRVKEALEDPRRLLMDL

SEQ ID NO: 10109 - protein, 229 aa, Triticum aestivum
MHKYSQPLRLQFAKATQELTQPTRPSPTNQAAPNTKKSTETEISLSPTRRIPGCCCSWAMATDAILETIKPRRSPWLEDLPVTNGGAAKGGKVNLSGMRRRVSSSLSLSLQPLSSSSSAAFRRARSMPSIKALAAAGAVRQWWEWGLGWVMTRKPSFARGLEMSDDEAALLGCHCRGTLRHVFYKARAEVRRLLGRDGRPLGGVAAQDFRYDSVSYAQNFDNGDVDARC

SEQ ID NO: 10110 - protein, 214 aa, Zea mays
  misc_feature (165)..(165): Xaa can be any naturally occurring amino acid
  misc_feature (200)..(200): Xaa can be any naturally occurring amino acid
MGSWEELARQFLLEEEDDEEFFFILLSAILPFLSEEKRSIHTSSLSGAQKVKEILEGHESWCKSEFRMEPEIFRATSEFLRREGLLRDTRGVNVEEQLGMFMYMISHNASNQMLQKAFQHSGETIHRKISEVFDIVPTLTQRFVKLPNSIQTHPKIITDSRFMPXFQNCIGAIDGTHVPITIAEDKAPPYRNRKGSLSQXVMLACDFDLNFIFI

SEQ ID NO: 10111 - protein, 431 aa, Geobacillus kaustophilus HTA426
MIYEFKLPDIGEGLHEAEIIRWLVREGDVVKADQPIAEIQTDKAMVEMTTPVAGKVVALAGPEGATVKVGEPLIVVETEASVAGEATPIEDSVREPVPVLHGETPRPARKRAIAAPSVRKRAREMGVPIDEVEGTGEGGRVTLADLERYVREREAAVAVAELRERSGAAVLPVGGTAIEQKADKAAWTSIASTELVVPEEERIPLRGLRKKIAEKMVKSAYTAPHVTGMDEVDVTKLVEIRKNLASELAKEQIKLTYLPFIIKAVTRALKQYPMFNASLDEETNEIVLKKRYHIGIATATKAGLVVPVIRDADQKSIRELAIEIAELSEKAHRQALRLEELQGSTFTITSTGAGGGWFATPIINYPEVAIFGAHAIKRRPVVVGDEIVIRDMMGMSLTFDHRVIDGEPAGRFMRTVAHYLENPEVLLLDVR

SEQ ID NO: 10112 - protein, 299 aa, Agrobacterium tumefaciens str. C58
MAVVIDGKAKAASVTEAVRKSAEALEAEKGVKPGLAVVIVGNDPASHAYVNSKSKMAKQCGFNSIQHTLPEETTQAALLKLVGELNTDASIHGILVQLPLPKHFNSDEIIQSILPEKDVDGLSVLNAGKLATGDLATGLISCTPAGAMLLVRGIHGDDLSGLNAVVIGRSNLFGKPMGQLLLNANATVTMAHSRTKDLVTVCKTADILVAAVGRAAMVKGDWVKPGATVIDVGINRIAAPEKGEGKSKLVGDVAFDEASAVAAAITPVPGGVGPMTIAMLMANTVIAAHRALGKTAPKF

SEQ ID NO: 10113 - protein, 394 aa, Rickettsia parkeri
MAKAKFERTKPHVNIGTIGHVDHGKTSLTAAITIVLAKTGGAQATAYDQIDAAPEEKERGITISTAHVEYETKNRHYAHVDCPGHADYVKNMITGAAQMDGAILVVSAADGPMPQTREHILLAKQVGVPAMVVFLNKVDMVDDSDLLELVEMEVRELLSKYGFPGDEIPIIKGSALQALEGKPEGEKAINELMDAVDSYIPQPVRATDKPFLMPIEDVFSISGRSTVVTGRVESGIIKVGEEIEIVGLKDTQKTTCTGVEMFRKLLDEGQAGDNVGILLRGTKREEVERGQVLAKPGSIKPHDKFEAEVYVLSKEEGGRHTPFTNDYRPQFYFRTTDVTGTIKLPADKQMVMPGDNATFTVELIKPIAMQEGLKFSIREGGRTVGAGVVTKINN

SEQ ID NO: 10114 - protein, 364 aa, Agrobacterium vitis
MREYKIAAIPADGIGPEVIAAGLQVLEALEKRSGDFSIHTETFDWGSDYYKKNGVMMPADGLEQLKKFDAIFFGAVGAPDVPDHITLWGLRLPICQGFDQYANVRPTKVLPGITPPLRNCGPGDLDWVIVRENSEGEYSGHGGRAHKGLPEEVGTEVAIFTRVGVTRIMRYAFKLAQARPRKLLTVVTKSNAQRHGMVMWDEIAAEVSKEFPDVTWDKMLVDAMTVRMTLKPQSLDTIVATNLHADILSDLAGALAGSLGVAPTANIDPERRFPSMFEPIHGSAFDITGKGIANPVATFWTAAQMLEHLGEKDAATRLMSAVERVTEAGILTPDVGGTADTQQVTDAVCEAIAGSNILNMAAVG

SEQ ID NO: 10115 - protein, 591 aa, Sinorhizobium meliloti 1021
MCGICGEVRFDGGSPSVTAVSIMADVLAPRGPDASGVVVRGNVGLGHRRLRILDLSDKSQQPMVDSDLGLSLVFNGCIYNFRELRLELEEKGYRFFSSGDTEVILKAWHAWGEECVSRFHGMFAFVIHERDSGRVVMARDRFGIKPLYIAEVQGALRFASALPALVKAGGVDTSIDVAALHNYMTFHAVVPPPRTILNGVRKLPPATLRVYERDGSFEDRRYWDPPYRRQAGDAAISREEWQEQLLDALRIAVKRRMVADVPVGVLLSGGVDSSLIVGLLAEAGQRGLMSFSVGFEEANGEKGDEFVYSDLIAGHFGTDHRKIFVPSADLMGALPGTIAAMSEPMVSYDNVGFYLLSKEVSKHVKVVQSGQGADEVFGGYHWYPPLMNSNDVVADYGKAFRDRSHAVLTTQLSDAWIADHDVSGDLLNEHLLREGAATPVDQALRLDSNVMLVDDPVKRVDNMTMAWGLEARVPFLDHELVELAARMPPEEKLRDGGKGILKDVARRVIPSEVIDRKKGYFPVPQLKYIAGPYLDLIRDTLRSQKARERGLFQDAYLDRLFQEPSDHITPLRGSELWQVGLLEMWLEAQGV

SEQ ID NO: 10116 - protein, 656 aa, Bradyrhizobium sp. BTAi1
MCGIAGLFRPGGADDSALAGIVGRMTAALAHRGPDASGSWVSGRQGIALGQRRLAILDLSEAGAQPMHSACGRYTITFNGEIYNHLDLRAELEDAAAAPNWRGHSDTETLLAAIRQWGLVPALQRLIGMFAFALWDAETRQLILARDRFGEKPLFYGWSGADLVFGSELKALAAHPGWAPSLDRAALTDFMRYSYVPAPATIWRDVRKLPPASFVAFVADAGPGTSPTAQSYWSLRDTVVAAQGDRISGESEAIARLEQLLSTAVKRQCLSDVPLGAFLSGGVDSSTIVALMQAQASQPVRTFSIGFAEGGYNEAEDARKVAQHLGTDHTELYVDARTAMEVVPKLPRIYDEPFADSSQIPTHLVAQLARRHVTVALSGDAGDELFGGYNRHVWGSALQARLGRVPMPLRRAIGAALGAIAPEPADTLLNMLQPVLPARLRVRHAGDQVAKLARIVAADGFDGLYRTLCSIDQDPRATVVAGEERASWAASEMKQLRGQISLLDRMTLADSLSYLSDDILQKVDRAAMAVALETRVPFLDRDVVEFSTRVPASMKVRDGRGKWLVRQVLYRHVPADMIDRPKTGFSIPLDAWLRGPLKSWAGDLLSPARLKRQGLFAPTRVTRMFEEHLSRRHNHAYWLWNVLMAEAWYDEWGRAG

SEQ ID NO: 10117 - protein, 358 aa, Agrobacterium vitis
MREYKIAAIPADGIGPEVIAAGLQVLEALEKRSGDFSIHTETFDWGSDYYKKNGVMMPADGLEQLKKFDAIFFGAVGAPDVPDHITLWGLRLPICQGFDQYANVRPTKVLPGITPPLRNCGPGDLDWVIVRENSEGEYSGHGGRAHKGLPEEVGTEVAIFTRVGVTRIMRYAFKLAQARPRKLLTVVTKSNAQRHGMVMWDEIAAEVSKEFPDVTWDKMLVDAMTVRMTLKPQSLDTIVATNLHADILSDLAGALAGSLGVAPTANIDPERRFPSMFEPIHGSAFDITGKGIANPVATFWTAAQMLEHLGEKDAATRLMSAVERVTEAGILTPDVGGTANTQQVTDAVCEAIAGSNIL

SEQ ID NO: 10118 - protein, 532 aa, Schizosaccharomyces pombe
MQTPSSASAESEKDSGNTYVGPWLLGRTLGQGNLAKVKLGKHFQTNEKVALKMVYNDELEDKDTWKRLQREVTILRQLHHPNIITLYQVFRVPKYTVLALEYMDTDLHSMVVKHNRLDECTTRKIFRQIVHAIDYCHLHRVAHRDLKLENILLNKDLVVKLTDFGLSNFMLDGSFLSTSCGTPHYAAPEVIQGRYYDGCDVDVWGCGILLYLMLVGEFPFEDVTISNVLSRVCKGIYTIPSFVSSSASDLIRQMLMVLPTSRIKVAEIMQHPWFIADLPTHSRLPSRTSSFSSKHRSVTFSPPDLAILFDPSITSPSSSVGQIPQPTDHSALSPSKPMSISGTESPNPDPASLCYSSYEDLYSATSWHSDMAESSGFLDPTDIPPIPSNVETLRSSLPQRHASFMNKVYNHPLSRPPAPNRLRSLRWHYGIQTAKNPIEVLRKLCEALLELGARFRPCDEESFLKENKYKVFSCITCHNSPVYLVIELFSIGPSASVIDIRFSSSDDSIKYTSSYSPMPFLEVVKQLILKIA

SEQ ID NO: 10119 - protein, 454 aa, Neurospora intermedia
MSNLPSEPEFEQAYKELAYTLENSSLFQKHPEYRTALTVASIPERVIQFRVVWEDDNGNVQVNRGYRVQFNSALGPYKGGLRLHPSVNLSILKFLGFEQIFKNALTGLSMGGGKGGADFDPKGKSDAEIRRFCCAFMAELHKHIGADTDVPAGDIGVGGREIGYMFGAYRKAANRFEGVLTGKGLSWGGSLIRPEATGYGLVYYVGHMLEYSGAGSYAGKRVALSGSGNVAQYAALKLIELGATVVSLSDSKGALVATGESGITVEDINAVMAIKEARQSLTSFQHAGHLKWIEGARPWLHVGKVDIALPCATQNEVSKEEAEGLLAAGCKFVAEGSNMGCTLEAIEVFENHRKEKKGEAVWYAPGKAANCGGVAVSGLEMAQNSQRLNWTQAEVDEKLKDIMKNAFFNGLNTAKIYVEAAEGELPSLVAGSNIAGFVKVAQAMHDQGDWWSKN

SEQ ID NO: 10120 - protein, 267 aa, Triticum aestivum
  misc_feature (231)..(231): Xaa can be any naturally occurring amino acid
  misc_feature (234)..(234): Xaa can be any naturally occurring amino acid
  misc_feature (247)..(247): Xaa can be any naturally occurring amino acid
LYRTSLYKKAGWYRSGIPGISSTHASADIVVITSHFRDKLGQGGYGTVYKGVLLPGGVHVAVKMLEGNSNCNGEDFISEVSTIGRIHHVNVVRLVGFCSEEMRTALVYEYMPHGSLDQYIFSAEKSFSWDKLNEIALGIARGINYLHQGCDMQILHFDIKPHNILLDSNFVPKVADFGLAKLYPRGDSFVPLSAMRGTVGYIAPEMISRSFGVISSKSDVYSFGMLLLEMXRGXRNADPNMGSSGQXYYPSGVYDQLTQEKRARYPS

SEQ ID NO: 10121 - protein, 454 aa, Neurospora sitophila
MSNLPSEPEFEQAYKELAYTLENSSLFQKHPEYRTALAVASIPERVIQFRVVWEDDNGNVQVNRGYRVQFNSALGPYKGGLRLHPSVNLSILKFLGFEQIFKNALTGLSMGGGKGGADFDPKGKSDAEIRRFCCAFMAELHKHIGADTDVPAGDIGVGGREIGYMFGAYRKAANRFEGVLTGKGLSWGGSLIRPEATGYGLVYYVGHMLEYSGAGSYAGKRVALSGSGNVAQYAALKLIELGATVVSLSDSKGALVATGESGITVEDINAIMAIKEARQSLTTFQHAGHVKWIEGARPWLHVGKVDIALPCATQNEVSKEEAEGLLAAGCKFVAEGSNMGCTLEAIEVFENNRKEKKGEAVWYAPGKAANCGGVAVSGLEMAQNSQRLNWTQAEVDEKLKDIMKNAFFNGLNTAKTYAEAAEGELPSLVAGSNIAGFVKVPQAMHDQGDWWSKN

SEQ ID NO: 10122 - protein, 353 aa, Mesorhizobium loti MAFF303099
MTSAIAVDPKAAKPVGVTAGHAPAGAGKVGVLLVNLGTPDGTEFKPMWRYLREFLSDPRVIELNKAIWYPILYGLVLTTRPKKSGANYARIWNQERNESPLRTYTRAQSEKLAEALGDLPDVTVDWAMRYGNPSTASVAERLVAQGCDRILSFPLYPQYSATTTATANDQLFRALMKLRRAPAIRSVPPYYAEPVYIEALASSIERHLATLDFEPEVVITSYHGIPKPYSDKGDPYQAHCLETTRLLREKLGWDEKKLITTFQSRFGAQEWLQPYTDKTVEKLGKDGVKSIAIVNPGFSVDCIETLDEIGREAAETFHHAGGKNFAHIPCLNDSAEGMTVIEAMVRRELSGWV

SEQ ID NO: 10123 - protein, 716 aa, Kluyveromyces lactis
MESEIFLAPPAKQSKKISILVGMFVAVGGFLFGYDTGLINNISEMPYVNQKFAPNKNHFTTPQISILVSFLSLGTFIGALLAPLISDSYGRKTTMIFSTFVVFMIGNSLQVAAGSMTILVVGRVLSGMSVGLISAAVPLYQSEAAQKSVRGAIISCYQWAITWGLLVASAVSQGTYKRMDASSYQIPIGLQYIWSFLLGVGILFLPESPRYYVFKDRLDKAAKSLSFLRGVPEDDSGLLEELVEIKATYDYEMSFGKISYLDCFRSTRSRTKQRLRMLTGIALQAFQQVSGINFIFYYGVDFFNKSGVSESYLVSFVTYAVNVAFNIPGLFLVEYIGRRKLLLMGGILMTISNFIIAIVGLATDSMVANKVMIAFICLFIASFSATWGGGVWVISAELYPLGVRAKCTAICAASNWLINFICALITPYIMHIDSSVRQTSIGTKIFFVWGSLNAVGVLVVYFTVYETNGLSLEEIDELYKKSSSGINSIEWNKKIKAFPDLFQRTRPNNEGDGEADDNIHTDENYNHTISSYNGTQNNEKYPIQVQMPQFGVRNIEFLNTTGSSPQSDMTEPNFVDLGNGLGITTYQRGPPSVLTDSSEEEEEGQQQETDETEEGKSFKHQYTDARNKNRGERGSFNSNSSTSGTTRSSSHKASVQRMEEINLYMAQLMHRGGTEDLSRNTTDNTHQPISHDIMSQWNSSSQNKGPSTQTDINSNT

SEQ ID NO: 10124 - protein, 714 aa, Glycine max
MADKGGKSCPICTEEMDLTDQQLKPCKCGYEICVWCWHHIMEMAQKDETESRCPACRSPYDKERIVTMAANCQRLVAEMNSQHKKKMQKLNLKPKSVDGRKHLSDVRVIQRNLVYIIGLPLNLADEELLQRREYFGRYGKVMKVSISRTANGIIQHSANSSCCVYITYSKESEAVQCIQSVHCFVLEGRPLRACFGTTKYCHAWLRNVPCSNRDCLYLHDHGSHEDSFTKDELVLAFARSRVQQIIGATNNLHRRSGNVLPPPVDNPKHMSSATKLVSQSPLDKCENQIKGFASGIGAVTSTVLPAVTSWVRCVSGNLPHDTSSSCSGNLANRKIEASNDPQALVSGVASTERSINIRKSGEAENSSDVCSNGAFVPSETNNHNSGGNSKTSFMDNDQDTVAPSVSTGFLELSRQHDFNIDTAVGINSNGDVHGLCSGLSSISINIHLEDSYLTPDSDGLPFTRNSIDSSLGQHLQQDNEYSTEHSSTPAFWEDIIVDDVLNIDSKQQKFSKGINYSSSSGLHSSCLTQNVNHSSHQPFQQDQICHQNHFRKPSTESFNEHLETGHVKYGESKDNGAGVDSMVASDMGENNIISDILSLELDAWEGSLVNLLGESDELYRPFKAPILRKVQDKNQSRFSFARQDDFMNGASNLLQSFAVTGRDPEGNFSSGALMGNKDTLTGKYPHVFPSGNSVPSDKLVGSQSLVPSNFSCEC

SEQ ID NO: 10125 - protein, 638 aa, Triticum aestivum
MSKLLAIALLLLPLINQGIYLATAWDDQDFFKYCPPSQCSQDGPEVRFPFCLESSNTSAAAAASCGCAGRSIRKLACSGRDTILFHPVLGPYNVSAIDYGRSSMKLIPLVDPCFVLQQKPVISRSSSSPRADVINYEMPRLYLWNSILVRCSREFAPGAADGIAGPVSCLSNTTNFFYLVNGYEDMSILPLDCKVVPLSDGVGGGLIPMYMFYNLMSDTLPVSFKESIERILSFAEMTVYWFNGYTCRQCEPSGGRCAFSSQRDRQFCMPGPHGSRIKVIAATSSVAAFVVLLLTVATVLYLTLKTRYNAEIHMKVEMFLKTYGTSKPTRYTFSEVKKMARRFKEKVGQGGFGSVYKGELPNGVPVAVKMLENSTGEGESFINEVATIGLIHHANIVRLLGFCSEGMRRALIYEFMPNESLEKYIFSRDSANFQHLLVPDKLVDIALGIARGMEYLHQGCNQRILHFDIKPHNILLDYNFNPKISDFGLAKLCARDQSIVTLTAARGTMGYIAPELYSRNFGGVSYKSDVYSFGMLVLEMVSGRRNADPRIGSQDDVYLPEWIYEKVINGEELALTLEATQEEKEKVRKLALVALWCIQWNPRNRPSMTKVVNMLTGRLQNLQMPPKPFVSSENEPMP

SEQ ID NO: 10126 - protein, 708 aa, Triticum aestivum
MGNPGAFHHSITLQSFTVFFLLAVFVADYHVQGGDDGCSLFSCGHLRDISYPFRRRGDPHECGVEEYELGCTSSKATIHINTGTYYVTAINYTGSYFWVMDTNFNTSSSCPLPLWNHLPYVGRYFGGYFGRYLGGIDSVSPPGFRYLATRSYDRACFANCSRAVMNKSAYKPVACQSAKNSHVYVWVSNYTYCAVEDLEPYCGYLGEIPFGNDTDEYSSDWGQLQNASYADITQFISKGFTVQFPVDTIYRRPSTSVMLRKNINLCLNNSISYFKEQISGTSIVNCTHAIFWSEVHFLECMIGSSNDDYYYTTKLFLITATLVSAIAIHQFFFVLCRFLLAPLAVWIFLAYKYMKTRIIIDAVEKFLRIQQMIGPARYSYTDIVAVTSHFRDKLGQGGYGSVYKGVLLPGGVHVAVKMLEGNSNCNGEDFISEVSTIGRIHHVNVVRLVGFCSEEMLRALVYEYMPNGSLDKYIFSTEKSFSWEKLNEIALGIARGINYLHQGCDMQILHFDIKPHNILLDSNFVPKVADFGLAKLYPRGDSFVPLSAMRGTVGYIAPEMISRSFGVISSKSDVYSFGMLLLEMAGGRRNADPNMGSSSQAYYPSWVYDRLTQEEAGEISDVAADMHELEKKLCVVGLWCIQMRSRDRPTMSEVIEILEAGVDGLQMPSRPFFCDEGHIHVEDSYQFTSELSAVSEEELSVVSEEDNV

SEQ ID NO: 10127 - protein, 576 aa, Arabidopsis thaliana
MGGGGNLVDGVRRWLFFQRRPSSSSSSNNHDQIQNPPTVSNPNDDEDLKKLTDPSKLRQIKVQQRNHLPMEKKGIPNAEFFTEYGEANRYQIQEVVGKGSYGVVGSAIDTHTGERVAIKKINDVFDHISDATRILREIKLLRLLLHPDVVEIKHIMLPPSRREFRDVYVVFELMESDLHQVIKANDDLTPEHHQFFLYQLLRGLKYVHAANVFHRDLKPKNILANADCKLKICDFGLARVSFNDAPTAIFWTDYVATRWYRAPELCGSFFSKYTPAIDIWSVGCIFAEMLLGKPLFPGKNVVHQLDIMTDFLGTPPPEAISKIRNDKARRYLGNMRKKQPVPFSKKFPKADPSALRLLERLIAFDPKDRPSAEEALADPYFNGLSSKVREPSTQPISKLEFEFERKKLTKDDIRELIYREILEYHPQMLEEYLRGGNQLSFMYPSGVDRFRRQFAHLEENQGPGGRSNALQRQHASLPRERVPASKNETVEERSNDIERRTTAAVASTLDSPKASQQAEGTENGGGGGYSARNLMKSSSISGSKCIGVQSKTNIEDSIVEEQDETVAVKVASLHNS

SEQ ID NO: 10128 - protein, 627 aa, Triticum aestivum
  misc_feature (613)..(613): Xaa can be any naturally occurring amino acid
MSKLLVIALLLLPLINHGNDLAVAWDDKDFFRYCAPSQCSQHGPEIRYPFCLKSSNTSSSCGCRESWTKLACSGQDTILLHPVLGPYSVSAMDYRRSSMKIIPLVDPCQLLQQELMISGSLSSQKVDVANDDPLGPNQLFSWSLSATLVHCSREFTPGAADSIAGPVSCLSNATHFLYLVAGYEDMSLLPLDCKVIPVSDGRSVLIQIPKYDNRQLYEDYKPQFFKESAERILSFTEMTVYWNEYSCIDCELHCGRCAFSSQRSLPFCMPGSHIKVIAATSSVAAFVVLLLTVTTALYLSLKTRYNKEIHLKVEMFLKTYGTSKPTRYTFSEVKKIARRFKEKVGQGGFGSVYKGELPNGVPVAVKMLENATGEGEVFINEVATIGLIHHANIVRLLGFCSEGMRRALIYEFMPNESLEKYIFSRDLNIFQHLLVPDKLLDIALGIARGMEYLHQGCNQRILHFDIKPHNILLDHNFNPKISDFGLAKLCARDQSIVTLTAARGTMGYIAPELYSRNFGGVSYKSDVYSFGMLVLEMVSGRRNADPSIESQNDVYLPEWIYEKVVNGEELALTLETTQEEKEKVRQLAIVALWCIQWNPRNRPSMTKVVNMLXGRFQNLQMPPKPFI

SEQ ID NO: 10129 - protein, 689 aa, Triticum aestivum
MGNPGAIHRSITLQVFTVFSLVAFFVADHVQGGDDGCPPFSCGHLRDILPPFRRRGDPLECGVEAYELGCTSSKATIQINTGTYYVTAINYPGSYFLVIDTNSDTSSSCPLPLWNHVPYSGPYEKSYLYSNGFNNLQTRSLYRACFANCSQAVMDNSSYKPVACLSAKDSHVYVWVSESVCGVEDLKPYCGYVALTPFLVTYSVDLQQLRNASYVDLTKLISKGFTVYFPVEAGDIRSVSRTINICLNRTTSYFKEQISGTSIVNWTHAIFWSEVHFLECVTDTNFGSTYTTESLLLVVTILSAIGISKFLFVLCRFLLAPLAVWIFLGYKYWKTMIIIDAVEKFLRIQQMIGPTRYSYTDIVAITSHFRDKLGQGGYGTVYKGVLLPGDVHVAVKMLEGNSNCNGEDFISEVSTIGRIHHVNVVRLVGFCSEEMRRALVYEYMPHGSLDKYIFSAEKSFSWDKLNEIALGIARGINYLHQGCDMQILHFDIKPHNILLDSNFVPKVADFGLAKLYPRGDSFVPLSAMRGTVGYIAPEMISRSFGVISSKSDVYSFGMLLLEMAGGRRNADPNAGSSSQAYYPSWVYDQLTREEAGEEISPVAADMHELEKKLCVVGLWCIQMRSSDRPTMGEVIEILEAGAGGLQMPSRPFFCDEGHIHVEDSYHFTSELTAVSEEELSAVSEEEDDV

SEQ ID NO: 10130 - protein, 233 aa, Oryza sativa (japonica cultivar-group)
MAAVSEVEVDGVVFPPVARPPGSGHAHFLAGAGVRGVEIAGNFIKFTAIGVYLEEGAAVPALAKKWAGKSADELAADAAFFRDVVTGDFEKFTRVTMILPLTGEQYSDKVTENCVAAWKAAGVYTDAEGAAADKLKEAFKPHSFPPGASILFTHSPPGVLTVAFSKDSSVPEGAVAAAAIENRALCEAVLDSIIGEHGVSPAAKRSIAARVSQLLKAESTGDVAAAEPAPVSA

SEQ ID NO: 10131 - protein, 409 aa, Vibrio parahaemolyticus RIMD 2210633
MFEPMMEMSDDAVIKVVGVGGGGGNAVEHMVRESIEGVEFISVNTDAQALRKTSVGNVIQIGGDITKGLGAGANPQVGREAALEDRDRIKDSLTGADMVFIAAGMGGGTGTGAAPVIAEVAKELGILTVAVVTKPFSFEGKKRLAFAEQGIDELSKHVDSLITIPNEKLLKVLGRGVTLLEAFASANDVLKNAVQGIAELITRPGMINVDFADVRTVMSEMGHAMMGSGIAKGEDRAEEAAEMAISSPLLEDIDLAGARGVLVNITAGLDMRLDEFETVGNTVKAFASDNATVVIGTSLDPDMTDEIRVTVVATGIGNERKPDITLVAGGKAKVASAPQAQPQQVAATQAEEKPAQTLQNQVQEKPQVTPQPTNTVSSSPAAGQSSAAPKQEKESGYLDIPAFLRRQAD

SEQ ID NO: 10132 - protein, 244 aa, Glycine max
  misc_feature (182)..(182): Xaa can be any naturally occurring amino acid
METDRPDGRTPNQLRPLAYSCSILHRAHGSASWAQGETKVLAAVYGPKAGTKKNENPEKASIEVIWKPKTGQIGKMEKEYEMILKRTLESICIRTIYPNTTTSVIVQVVHDDGALLPCAINAACAALVDAGIPLKHLAVAICCSVTDSGCIILDPTKDEEEKMKAFANLVFPNTIVSVLPEXRSLQVGSEPMENGIMTSVTQGAMSVNDYLHCLERGRAACASLSEFVRKNIGTKSTSEPSKAG

SEQ ID NO: 10133 - protein, 231 aa, Hordeum vulgare subsp. vulgare
MAVSELEVDGVVFPPLARPPGSAHAHFLAGAGVRGMEIGGHFIKFTAIGVYLQADAAVSALAAKWAGKPAADLASDAAFFRDVVTGEFEKFTRVTMILPLTGAQYSDKVTENCVAYWKAAGVYTDAEAAAVDKFKEAFGPHSFAPGASILFTHSPAGVLTVAFSKDSSVPESGGVAIENARLCEAVLESIIGEHGVSPAAKLSLANRVAELLKGAAHAGGEPAAEPVPVSV

SEQ ID NO: 10134 - protein, 195 aa, Zea mays
  misc_feature (186)..(186): Xaa can be any naturally occurring amino acid
MFRSSPLLSLALGTLSAVGAQELPAVLTADIIQGLGNNTLFTRWRPTYHFSGPAGWLNDPCGMMYDPTTKTYHLHYQWHPNHVNWGNISWGHATSKDMITWTDVGGWENDQAQSLGTGPNPDSRNSSYYGLGIFSGSGQPYNLHGEQDGTLINFYTSVQHLPTNWAIPYIPGTEKQSIAISKDGGXTWEQYAGNP

SEQ ID NO: 10135 - protein, 404 aa, Burkholderia vietnamiensis G4
MTTRVVVTGLGIVSCLGNSLDAVSAALRAGRSGVTQVPAWRDRGFRSQVAGVASVAAAARFARKHERFMGDTARFAAHAAAAALDDAGLDPAALRSPRAGAIVGSGIGSIADYDDAMAVAQQRGIDRTPPYVVPRAMSSTASACVAQLYGIEGVSYSPSSACTSGALAIGHAMQLIRHGCQDVVLAGGSDALHDNMTLMFDAMGVLSSGFNDTPDSASRPYALNRDGFVIASGAGLLVLESLDHARSRGARIYAEVSGFGQCTDNAGMATPHARGIARAMRDAVEAGGGRRPDYVNTHAPSTQPGDVEELQALRDVFGADVPAFSSTKGMTGHPLGASGAHEAIYTMLMMRDGFVAGTAVAGRPDPAVAGMPLVRDATIGRALSVSFGFGGSCTSVLLDAWKGD

SEQ ID NO: 10136 - protein, 493 aa, Synechococcus sp. WH 7805
MVHGLQLVWFKRDLRLVDHQPLARALARGPVLPLYIVEPELWSQPDCSARQWAFCRESLQDLQEAFAEVGQPLIIRSGDAVDVLERARRQLGISALWSHEETGNAWTFARDRRVAAWARERGIPWHELPQFGVVRRLQTRRGWARRWEERMGEAITPAPTGLTPLSGIAPGDLPTNDALALQADPCPYRQRGGRRLGLQELNDFLAHRVQGYCRSISSPNLAFKGCSRLSAYITWGCLSMREVLQRSREFQGRGVSSFSSRLHWHCHFIQKLEDQPPIEWEDFHPFMRGIRSLDDARFAAWAEGQTGVPFVDACMRALRAHGWINFRMRAMLMSFASYNLWLPWRDTGLHLARQFVDYEPGIHWSQCQMQSGSTSINTIRIYNPIKQGHDHDPDGAFIRRWCPELEDVPAVHLHEPWSLLGAPRSMPIVDCAISAREAKERIFEIRRSAGFDRHADAIQQRHGSRRSGLPSTRRRRSSRLTTDPGIEQLALDL

SEQ ID NO: 10137 - protein, 476 aa, Ralstonia eutropha JMP134
MKTSFINGKFVEGGDARANINPSDTHDVIDQFGEADALMATTAVDAAAESFRTWSQTSIQRRADALDSVGTELLARKEELGRLLSREQGKILPEGIAEVDRAGRIFKFFAGEAVRPAGVHAASVRDGVEIHVTSEPLGVVGIISPWNFPMAIPAWKIAPALAYGNTVVFKPAELVPSSAWALADIISRSGFPPGAFNLVLGAGRVVGNAMLTDPRVTGISFTGSTGVGARVMETAGRRFAKLQLEMGGKNPLVVLDDADLEVALNCSIQGSFYSTGQRCTASSRIICTKGIYPTFRKALAERVAALRVGHALHGDTQIGPVVDKSQLDSNLHYVSVGRAEGATLVCGGELLAKETRGFFMSPALFADVTNDMRIAREEIFGPVSCLIVADDFEHAIQIANDTDFGLSAGICTTSLRYATRFRREVKAGMVMVNVPTAGVDYHVPFGGTKASSYGAREQGSFARHFFTSTKTSYSGW

SEQ ID NO: 10138 - protein, 497 aa, Mesorhizobium sp. BNC1
MNAATAKIDLSAKLDLLHDKSLLRELAYVDGRWVTGHEPVNFEVRDPATGAVLAYVASLNAAQVDSAIDAAARAFLSWKRLLPQERAATLRAWYELIVAAKEDLALLMTLEQGKPLAESRGEIDYAASFVEWYAEEAKRLNVESVTSHLPGAEMMVRREPLGVVGVVTPWNFPSAMLTRKAAAALAAGCTIVAHPSSETPLSALALAELGERAGLPAGVLNVVTGDAATIVGRMCGDSRIRAMSFTGSTEIGRLIAAQCAPTMKRLVMELGGHAPLIVFEDAPLDKAVDIAIGAKFATSGQDCLAANRIYVQRGIYGAFCEAFAARIATLKVSDGLDETGDIGPLMHERAIAKVEEQVTDALGRGARCLIGGERHPAGRLFYQPTLLADVPDAALIMREETFGPVAAAVPFDTEDEVVRRANNTEYGLVAYVVTENGARQLRMGRALDYGMVAINRVKITGAPIPFGGVKQSGIGREGARHGLEAFTDLKYLCLDAA

SEQ ID NO: 10139 - protein, 225 aa, Oryza sativa
MASSSLFLLASLLVLASWQQAIAFDPSPLQDFCVADMASPVRVNGFPCKNPMNVTSDDFFNAAKFDMPRNTMNKVGSNVTNLNVINFPGLNTLGISLARIDYAPMGVNPPHVHPRATELLTVLEGTLYVGFVTSNPNRLFSKVVHKGDVFVFPKAMIHFQMNLDHNKPAVAQSALSSQNPGVITIASAIFGSTPPISDDVLVKAFQVEKKVIDWLKSQFSENNHY

SEQ ID NO: 10140 - protein, 579 aa, Chlamydomonas reinhardtii
MGCNPLQLAQVTALLGGDTATAATICAGTDVAQLGPNGAVTKWTVAELRGAQNALDQVEYGLNVSFVLASAYQVFVMQLGFALFAAGVVRPKNTVSIFIKNFFDTCIAGIAFYLVGYAFAFGAKDGYTNGFIGNWDFALSQTDGSPGSEPPNPWHLFIWNWSFCSASTTILSGSIAERATFASYTIYAAFMPAWVYPVVAHWLWAPDGWLSARNANDRILGIGAIDYAGSGVVHLVGGMAALIGSIAVGPRVGRFDAPGSTGEVSAQLYRATAAPQLYLMGTLLLWFGWYGFNPGSKLAISDYLQATIVSRTAVTTTLAACSGALSNLLLNYGRHRVWDLLSTCIGALAGLVAVTSGCSVIEPWAAIICGAISALFYEAGEQLLEKLKVDDPVSAFPLHAMCGVWGLLFTGLLANEGYITQVYNVPPGGHRMGLFYGGHAQLLLCQVIAIAVIAGWSAFNMCILFFGMKAAGLLRVGADKEATGMDMAACGQYNAAGAVNVHSSKVPTKSDAVLAAMSLNMERRMNGGPGMDYSVRNSSANPSAHNSSLHNTATATTVTTAAATPAAAGGIMLTSAVGG

SEQ ID NO: 10141 - protein, 508 aa, Bacillus anthracis str. 'Ames Ancestor'
MAKEQVQAITKMEEDFAQWYTDIVKKAELVDYSSVKGCMILRPYGYALWENMQKVMDEKLKATGHENVYMPMFIPESLLQKEKDHVEGFAPEVAWVTHGGDEKLAERLCVRPTSETLFCEHFSKIVQSYNDLPKLYNQWCSVVRWEKTTRPFLRTTEFLWQEGHTIHETAEESQAETLNILNLYASFCEDYLAIPVIKGQKTEKEKFAGAKATYTIESLMHDGKALQTGTSHNFGTNFSEAFDIKFLDRNGKWQYVHQTSWGVSTRMIGGLIMVHSDNNGLVMPPKVAPVQVVIVPIAQHKEGVLAKATELQGHIQKVARVKIDASNKTPGWKFNEYEMKGIPIRLEVGPKDIEKNQVVLVRRDTKEKEFISMDQLEERIPALLEEIHNSLFNKAKVFRDENTYSVTNFEEMKKLADEKQGFIKAMWCGELACEEKLKEEVASRCMPFEQEHLAEECVCCVNKWCIGEKRINALLDRKDEKDFGLHNKCNPKSFLVLQFVSCIFKMEG

SEQ ID NO: 10142 - protein, 1349 aa, Candida albicans SC5314
MPHSRQPSISSSIMSQSNHNHPQKIGPWKLGKTLGRGATGRVLLATHQTTGQKAAVKVVSKSELQDEETEKNGDGLPYGIEREIIIMKLLTHPNVLRLYDVWETSKALYLVLEYVEGGELFDLLVERGPLPEVEAIKYFRQIILGTAYCHALGICHRDLKPENLLLDSQLNVKLADFGMAALESNGKLLETSCGSPHYAAPEIVSGLKYHGAASDVWSCGVILFALLTGRLPFDDENIRNLLLKVQAGNFEMPVDEVSREARDLIARMLEVDPMRRISTEKILRHPLLTKYPMSNEDLISEKSLPHPQTGYKSLGSVRNIDKQILSNLTILWNDRPEEEIVDCLLKDGSNPEKTFYALLMRYKHNQEDNTNNNSPKKSTSFNNKVVRSGSKYSLNGTPRRKRASHISVSRPTSFQYKSNPGAGATANRNSVARHSVASSANNSPRKSPYKSPYRSPYRSPYKSPSKRYSYNQSPTKSPYGRRSNSQRQFENEPLKAKPRNIYNEIVDAQSNFSLPPSLPPSLPSKDSRYMIDEPNQPQLQQPALSQVPENPIVDESPDLMQSAKISSGKRNSIIGKNNNNSNSNKRMSKRKSIRASMTTGLKRNSITMKLLSTYAKLSGDDDWEYMDKQTKRTSATFAALCDKIFNQEDYDEEDEQLVDPEEKEAKEYERLMELERKKHEAELKARRELEKKKRRQKRRSILSSKKLSIIVKNDADPNNSEQELVDEGIKQPKRQSKNLTALRALSEGNHASEELTLEDVENLKRRSASQPVPKRRQTPVLTRRPVSRLDPLWQAHENEQLDRAKDALEQEWRDSQKRSSTVSRKKVNRESMISVMDDIVEEDQGRVNRRSTRNTYYERERDYELPEPTVEDSNLTDDYMTEIRKSRLLNSQLNVRDPLNEKRKSEPKTLISNVQIPSVTRKSRNFTTSNKRLSVLSMYSTKESYRDLNSIINSPDENPEQHQNMNKPALRTSIADRLDKAGLAEPEYETETDGEDKVSVIDLDDHLADRRTSYYDGSGKRASRASTTKRYNVHSSSGQRPKSKVPDLPKNDYDDTFVSNSDEVHKRQYKSMVSDESSASDDVFDKIKLPDGKSTKSSIDELANGTSTSGHRKPKIRHSQPGPEMLIPHLNGGIESSQPMSKVRGNNSSGHDDSVPPPPPAHKVNKKPLDDKTNFPPPEVDPKRKGSFFRKLSWGSKKTIENNTNAATNTTTQQQLPSPAESKEEKPKSSFFRWFSSSNTPSAAEIRKFNTILPKHEMSTALFALLNSWSNFGLKDLRNDQVGYYITGAISKHNSFNLKSCKFRIKINQRDFNQKSEIVCVRVKGSKVTTDTLFSEIEKVLLKEGVLDK

SEQ ID NO: 10143 - protein, 411 aa, Chlamydomonas reinhardtii
MQIGFVSAESGQGRAKNVRNILLKNSVNIMLCAICWWAVGYAFAYGNSGGGFIGTSRFFSDGESFGSKPWFFTWTFCLSCVTIASGCLAERTHLFVYPVYTAVVSIAVHPVIAHWVWAPDSWLNSMTGSPCRFLDFAGGAVVHTVGGLTGLIGAMLCGPRLGRFEDGVGKDIPGHDVSSVSLGSLMLWFGWYGFNCGSTYIYMAQGGSEASAAVSRVALNMTLCASVAGMTSLVVSSIQTGTFDLAVCCNGLMAGLSASTSNVGFLTPWAACITGALAGLLYVGISRLLVRMGVDDPLDSSAIHCGSGILGVLVSGFLARPSYVMQMVGCNCGGVVYATNGGMQLGMQLLGLSCSMVWTAMWALLTFGILKKLQLLRVDQQTELAGIDNMEHGGPAYPEFLQRVQSTRPGY

SEQ ID NO: 10144 - protein, 417 aa, Streptomyces coelicolor A3(2)
MTVSVTLPALGESVTEGTVTRWLKQVGDRVEADEPLLEVSTDKVDTEIPSPAAGVLLEILAAEDETVEVGAGLGIIGAPDTAPAAPAAPAAPAPAPAPTPTPTPTPTPTASAPAPTPAPAPAPAPAPAPAEPFVPPAASAVPAPPAPAPAPTTPQAPAPAPAPVRAAPAEDASSLRGRTVAMTRIRRAIGNNLKKALLEQAQLTSTVEADVTRLMRLRNRAKDGFLAREGLKLSPMPFFVKAAAQALKAHPVVNARINEDEGTITYFDSENIGIAVDTEAGLMTPVVKAAGDLTVAGLARAVHDLADRARGGHLTPDDVSGATFTISNTGSRGALFDTVIVPPNQAAILGVGATVRRPGVVRVGDEEVIGVRDLVHLSLSYDHRLVDGADAARYLTAVKALLESAAFEDDLYPDAAA

SEQ ID NO: 10145 - protein, 447 aa, Mycobacterium sp. JLS
MTLPRTRAIAALPPGPRLPPSVQTVLLMRSWSRFVAACRRRYGPVFTLRISSIGTMVYLADPADIKTVFAGDPRVYHAGEANAMLRGLLGDTSVLVIDDDVHRDRRRLMMAPFHREAVARQVEVMTEIAADNVSRWPVGEVFPVAPKMSEITLEVILRTVIGASDPARLAALRAIMPKLLQVTPWTTPALANPGLQRLPLWRSLRERIEEADRLLYAEIAERRADPELRWRTDVLAMLVRSAGEDGRTMTDRELRDQLMTLLVAGHDTTATGLSWALERLTRHPAVLTAAVRAADRSAAGDPSGDEYLDAVVKEALRIRPVVFDVGRVLTEPTEVAGYRLPAGVMVVPGIGLVHDDPAVYPEPDRFDPDRMLGASLTPTTWLPFGGGNRRCLGATFAMVEMRVVLREILRRAELCTTTAPGERRRVKHVIMVPARGARVRVRAMRPT

SEQ ID NO: 10146 - protein, 394 aa, Rickettsia sibirica
MAKAKFERTKPHVNIGTIGHVDHGKTSLTAAITIVLAKTGGAQATAYDQIDAAPEEKERGITISTAHVEYETKNRHYAHVDCPGHADYVKNMITGAAQMDGAILVVSAADGPMPQTREHILLAKQVGVPAMVVFLNKIDMVDDPDLLELVEMEVRELLSKYGFPGDEIPIIKGSALQALEGKPEGEKAINELMDAVDSYIPQPVRATDKPFLMPIEDVFSISGRGTVVTGRVESGIIKVGEEIEIVGLKDTQKTTCTGVEMFRKLLDEGQAGDNVGILLRGTKREEVERGQVLAKPGSIKPHDKFEAEVYVLSKEEGGRHTPFTNDYRPQFYFRTTDVTGTIKLPADKQWVMPGDNATFTVELIKPIAMQEGLKFSIREGGRTVGAGVVTKINN

SEQ ID NO: 10147 - protein, 112 aa, Rhizobium etli
MKIVMAIIKPFKLDEVREALTAIGIQGLTVTEVKGYGRQKGHTEIYRGTVYAVSFLPKLKIEIAVASELVDRAVEAIGASAKTGQIGDGKIFVYSIDHAVRIRTGETDSEAL

SEQ ID NO: 10148 - protein, 485 aa, Synechococcus sp. WH 5701
MTVAPHAPGRRRPRRLQEASLLEAPELLLRSIRGFSNSRTLTWLACVPLALFGLGVFNLSAHAAELPELTPAFLINNVWLLIAAILVIFMNAGFAMVEAGLCRQKNATNILTKNLIVFALAASAYWLIGFSLMYGEPVIPGWLFYGKGGPLGLFFDPTVTAEMVKDASLVPSVDFLFQVAFAGTSATIVSGLVAERIKFSEFVLFSLVLVAFIYPIAGSWQWNGGWLNQLGFIDFAGSTVVHSVGAWAGLVGAMLLGPRIGKFADGKTQAIPGHNLAIATLGCLILWIGWYGFNPGSQLAMDAAVPYIAVTTTLGAAGGGIAGTLVSQLTSGKPDLTMSINGILAGLVGVTAGCDGFSMPAAWVVGFIAGTLVVFSVGFIDSLGIDDPVGAWSVHGTCGIWGTLAVGLFNTDKGLLTGHGFGQFGLQILGVISYGLFALICSWIAWSVIGGISGGIRVSEQEEIKGLDISEHGMEAYPDFASTAN

SEQ ID NO: 10149 - protein, 205 aa, Gibberella zeae PH-1
MSSRKKVLLKVIILGDSGVGKTSLMNQYVNKKFSASYKATIGADFLTREVLVDDRQVTMQLWDTAGQERFQSLGVAFYRGADCCVLVYDVNNAKSFEALDSWRDEFLIQASPRDPPNFPFVVLGNKIDVEESKRVISNKRAMTFCQSKGDIPYFETSAKEAINIDQAFEVIARNALAQEESEEFSGDFDDPINIHIENDRDGCAC

SEQ ID NO: 10150 - protein, 394 aa, Rickettsia rhipicephali
MAKAKFERTKPHVNIGTIGHVDHGKTSLTAAITIVLAKTGGAQATAYDQIDAAPEEKERGITISTAHVEYETKNRHYAHVDCPGHADYVKNMITGAAQMDGAILVVSAADGPMPQTREHILLAKQVGVPAMVVFLNKVDMVDDPDLLELVEMEVRELLSKYGFPGDEIPIIKGSALQALEGKPEGEEAINELMDAVDSYIPQPVELRINPFLMPIEDVFSISGRGTVVTGRVESGIIKVGDEIEIVGLKDTQKTTCTGVEMFRKLLDEGQAGDNVGILLRGTKREEVERGQVLAKPGSIKPHDKFEAEVYVLSKEEGGRHTPFTNDYRPQFYFRTTDVTGTIKLPADKQMVMPGDNATFTVELIKPIAMQEGLKFSIREGGRTVGAGVVTKINN

SEQ ID NO: 10151 - protein, 144 aa, Glycine max
MVAFTEKQDALVSSSFEAFKANIPQYSVVFYTSILEKAPAAKDLFSFLANGVDPTNPKLTGHAEKLFALVRDSAGQLKTNGTVVADAALVSIHAQKAVTDPQFVVVKEALLKTIKEAVGGNWSDELSSAWEVAYDELAAAIKKA

SEQ ID NO: 10152 - protein, 446 aa, Staphylococcus epidermidis RP62A
MKANKYLIFILGALGGLLYGYDNGVISGALLFIHKDIPLNSTTEGIVVSSMLIGAIVGAGSSGPLADKLGRRRLVMLIAIVFIIGALILAASTNLALLIIGRLIIGLAVGGSMSTVPVYLSEMAPTEYRGSLGSLNQLMITIGILAAYLVNYAFADIEGWRWMLGLAVVPSVILLVGIYFMPESPRWLLENRNEEAARQVMKITYDDSEIDKELKEMKEINAISESTWTVIKSPWLGRILIVGCIFAIFQQFIGINAVIFYSSSIFAKAGLGEAASILGSVGIGTINVLVTIVAIFVVDKIDRKKLLVGGNIGMIASLLIMAILIWTIGIASSAWIIIVCLSLFIVFFGISWGPVLWVMLPELFPMRARGAATGISALVLNIGTLIVSLFFPILSDALSTEWVFLIFAFIGVLAMIFVIKFLPETRGRSLEEIEYELRERTGARTE

SEQ ID NO: 10153 - protein, 355 aa, Fusarium oxysporum f. sp. lycopersici
MSRSNPPNAAGSRKISFNVSEQYDIQDVVGEGAYGVVCSAIHKPSGQKVAIKKITPFDHSMFCLRTLREMKLLRYFNHENIISILDIQKPRNYESFNEVYLIQELMETDMHRVIRTQDLSDDHCQYFIYQTLRALKAMHSANVLHRDLKPSNLLLNANCDLKVCDFGLARSAASQEDNSGFMTEYVATRWYRAPEIMLTFKEYTKAIDVWSVGCILAEMLSGKPLFPGKDYHHQLTLILDVLGTPTMEDYYGIKSRRAREYIRSLPFKKKVPFRTLFPKTSDLALDLLEKLLAFNPVKRITVEEALKHPYLEPYHDPEDEPTAPPIPEEFFDFDKHKDNLSKEQLKQLIYQEIMR

SEQ ID NO: 10154 - protein, 165 aa, Leptospira interrogans serovar Copenhageni str. Fiocruz L1-130
MRFDMNDTLYDLTATLNNGKEQKLENYKGKVLLIVNTASECAFTPQYAGLQNLYSKYKTEGLEILGFPCDQFKHQEPGSDETIKNFCQKNYGVEFPIFKKIEVNGDNAHPVFRFLRNKASGFFGNSIKWNFTKFLVDKQGNVIKRYSPITTPENIEKEIQNLLKR

SEQ ID NO: 10155 - protein, 397 aa, Mycoplasma hominis
MAKLDFDRSKPHVNIGTIGHVDHGKTTLTAAIATVLAKKGLAEARDYASIDNAPEEKARGITINTSHIEYQTEKRHYAHVDCPGHADYVKNMITGAAQMDGAILVVAATDGPMPQTREHILLARQVGVPKIVVFLNKIDMFKDDEREEMVGLVEMDVRSLLSEYGFDGDNAPIIAGSALKALQGDPEYEKGILELMDAVDTYIEEPKRETDKPFLMAVEDVFTITGRGTVATGRVERGVLQLNEEVEIVGLKPTKKTVVTGIEMFRKNLKEAQAGDNAGLLLRGIDRSEVERGQVLAKPKTIVPHTQFEATVYVLKKEEGGRHTPFFHNYKPQFYFRTTDVAGGIEFKPGREMVVPGDNVELTVTLIAPIAIEEGTKFSIREGGRTVGAGSVTKILK

SEQ ID NO: 10156 - protein, 332 aa, Sulfolobus solfataricus
MDEYDIVVIGGGPVGLFGTFYAGLRDMKTLLIDAQDELGGQLVSLYPEKIVYDVGGLAGIQAYELAQRLIEQAKMFGPDIKVNELADMIEKTNDNMWIVKTDKATYKTKTIFIAAGIGKIVPSRLGAKGEIEYENRGVYYTVRRKKDFEGKRVLIVGGGDSAVDWALTLAPVAKSVTLIHRRDQLRAHERSVKELFRVANVYVWHELKEVKGDGNKVTQAIIFDNRTKEEKVLDVDSVIISIGYKGDLGNIPKWGVTMKGRDIVVNGRMETNLPGVYAGGDIVQMEGSPKLALIAVGFAHAAIAISVAKKYVEPNASLFAGHSSEMDKFKPK

SEQ ID NO: 10157 - protein, 167 aa, Zea mays
MESPAAATAKPARGAGGRKGGDRKKSVTKSVKAGLQFPVGRISRYLKKGRYAVRYGAGAPVYLAAVLEYLAAEVLELAGNAARDNKKNRINPRHLCLAIRNDEELGKLLHGVTISSGGVLPNINPVLLPKRAAGSEKAEKPEKAAKSPRRLENIDSRRRTFLVFFFF

SEQ ID NO: 10158 - protein, 537 aa, Arabidopsis thaliana
MEISTALMILSAITAYFLWLTFISRCLKGPRVWPILGSLPGLIENCERMHDWISDNLRACSGTYQTCICAIPFLAKKQGLVTVTCDPRNLEHILKNRFDNYPKGPTWQAVFHDLLGQGIFNSDGDTWLFQRKTAALEFTTRTLRQAMARWVNRAIKLRFLPILENARLGSEPIDLQDLLLRLTFDNICGLTFGKDPRTCAPGLPVNTFAVAFDRATEASLQRFILPEILWKFKRWLRLGLEVSLTRSLVQVDNYLSEIITTRKEEMMTQHNNGKHHDDLLSRFIKKKESYSDETLQRVALNFILAGRDTSSVALSWFFWLITQHPAIEDKILREICTVLVETRGDDVALWTDEPLSCEELDRLVFLKAALSETLRLYPSVPEDSKRAVKDDVLPDGTFVPAGSSITYSIYSAGRMKSTWGEDCLEFKPERWISQSDGGRFINHDPFKFVAFNAGPRICLGKDLAYLQMKSIASAVLLRHRLTVVTGHKVEQKMSLTLFMKYGLLVNVHERDLTAIAADLRECKSNVVNDGVGNGVSS

SEQ ID NO: 10159 - protein, 247 aa, Brassica napus
  misc_feature (210)..(210): Xaa can be any naturally occurring amino acid
RQHNWFQAHLPRYLAVPPPDTVQQAKEIDEEILQEVINMGFDRNLLIESLRNRTQNDGTVTYYLILDNRFRVSAGYLGAEFQETMEGTPRMHPAESVASPVSHRLPGLMELQGVGLRSQYPVERKWALGLQSRAHPREIMTEVLKALQDLTVCWKKIGPSNMKCRWVPTTADGMLSNSMHDTNYFGDDSSIVENDPPVKSPNVVKFEIQXLYKTRDAKFLLDLQRVHGPQFLFLDLCAAFLAQLRVL

SEQ ID NO: 10160 - protein, 500 aa, Thermobifida fusca YX
MSVTHVSHWIDGKPWQGPAERRGDIYNPATGRVSGTVDFAGPAEVDAAVAAAKRAFPAWRDTSLSRRTEILFAFRELVRAHRDELARIISAEHGKVVSDALGEVSRGLEVVEFACGIPHLLKGGYSENVSTRVDAYSILQPLGVVTGITPFNFPAMVPMWMFPIAIACGNTFVLKPSEKDPSAPMRLAELWAEAGLPDGVFNVVHGGKEAVDALLTHEDVKAVSFVGSTPIARYVYATAAAHGKRVQALGGAKNHMVVLPDADLDLAADAAVSAGFGSAGERCMAISAVVAVGGIADDLVARIKQRVAQLRVGPGDDERSEMGPLVTREHRDRVASYLESGVREGATLVVDGRIHPVIGGERDGFWLGPSVLDHVTPDMACYRDEIFGPVLSILRVDTYEEAIDLINANPYGNGTAIFTNDGGAARRFQNEVEVGMVGINVPIPVPMAYYSFGGWKNSLFGDSHAHGTEGVHFYTRTKAVTVRWQDPSHGGVNLGFPTTK

SEQ ID NO: 10161 - protein, 103 aa, Pseudomonas aeruginosa
MQVNISGHQLDVTDALRDYVGEKLSRLERHFDKITNVQVIMEVEKLKQKIIEATLRIAGGEIVANAEHEDMYAAIDLLIDKLDRQLIKHKEKYLERQQGVGAR

SEQ ID NO: 10162 - protein, 1230 aa, Cryptococcus neoformans var. neoformans
MSSFTPAFRLHHTHSSSVSPTASNDVAPSSPTPNQPHQLAARSPLYATSPNCASKITKGSSLSSSTAHHGLKYVRPSTSPLLRSPKGESFSAYLGNWGSQELITFLNIHKCGQYLAIFQKNDINGKILLDLDMTALKSMGIGKISERVRLIGGIKDLRRCVADESIRAPFTQRSYPSERTLLPSLPSHSNVLLDKWDCSSSASRLGKRQITLRPPPLDLQGHMPPRLLSHASLGIATIDTHDIHTTNSKIEVYIQQNPPGQPQSMPTKRSDSLTLCAAPSRNVGRRSPSSRHFEGCKSQTDGLTTLNLTLDRQVPSSTMNNVTLREDCHLQREERLPLSHQVPHSRNAFASPHKTSLSGRCPLARGDTTSHQPSGPAIAEQDSPVNYRISNTVTNTKEISQGDLKQPFVMKSLESQSHLLAGVSDMSHDPVTDGFKPKGKASVPLTVMSSSDISAVNANPAALSLADLRRQLVKFINTEDDTIRTVNVMHVTSGVEILERALKKFGKFGTGIHGSPDVYGDEDGDGTLEIDGWEVYTESTPDESSKPLSEFNLLKTCTFHREGTAIQDKGLFLRKKQRMQKRKNIQDFFGETPPPSMSPTSPTLITGPHLSLVQGKSQPTSGSAFSSSSRLSTLTHKGRNRASMISVMSGLGVPIINTLPSPQGNGLRLTGSVHSHEKKSMYNFFGHRPPSELISNHLTDYFPSAKKSDVEKARHSLLRLSGGTVAYKKSGIYEGDSTPDHWSKPGDNQPPSLPPFEPSQDTLSDSLQAFASSTPVHLSRPKHTVALRRRRDSDSSSRSHTSMLMQTRRNRDHSDTTSLLTVDEITAEVENRRVSTIQRGDYIEETEDSSSIEGDTLPQDDESKGVLRAICSDSNKLVDSGKSYQGDSDIDQQHELEDEEEDKLDDDEEEEEEEEEEDNEQGKAFTSTGSKRIIKWIKGALIGAGSFGSVYLGMDAQSGLLMAVKQVELSAGSAKNEDRKRSMLSALEREIELLKELQHENIVQYLDSSVDANHLNIFLEYVPGGSVAALLNNYGAFEEALVRNFVRQILTGLNYLHMRGIVHRDIKGANILVDNKGGIKISDFGISKKVENSLITGLRTNRPSLQGSVFWMAPEVVKQTSYSPKADIWSVGCLVVEMLTGTHPWADLTQMQAIFRIGSLARPAPPSDISVQADEFLRKTFEIEHAKRPTAAQLLKHPFIGSPRVRTAASNFINGAIASETMEVQVVEES

SEQ ID NO: 10163 - protein, 411 aa, Zea mays
MNALAATSRNFKQAAKLLGLDSKLEKSLLIPFREIKVECTIPKDDGTLASYVGFRVQHDNARGPMKGGIRYHHEVDPDEVNALAQLMTWKTAVANIPYGGAKGGIGCSPGDLSISELERLTRVFTQKIHDLIGIHTDVPAPDMGTNSQTMAWILDEYSKFHGYSPAVVTGKPVDLGGSLGRDAATGRGVLFATEALLAEHGKGISGQRFVIQGFGNVGSWAAQLINEAGGKVIAISDVTGAVKNVNGLDIAQLVKHSAENRGIKGFNGGDAIDPNSLLTEECDVLIPAALGGVINKDNANDIKAKYIIEAANHPSDPEADEILSKKGVIILPDILANSGGVTVSYFEWVQNIQGFMWDEEKVNAELRTYMTRAFGDVKEMCRSHNCDLRMGAFTLGVNRVARATVLRGWEA

SEQ ID NO: 10164 - protein, 215 aa, Nicotiana tabacum
MGYWQAKVVPKFKQIFDKNGPKKAAAAEACKTFDEAKEQYSKEFEEKKTELQPKVVEIYEAAAVEIKTLVKGPKVSGLKKHSTQVQKFLDELVKIEFPGSKAVSEASSNFGPSYVSGPVLFVFEKVSTFIVTEDKKEEEAAASEAEATTAAPVEVKEKEIVAEAEAKKEEEPAPAPAATPAAEVAPAEVAPAADVAPAKVEEAPAAVAAPEPPKA

SEQ ID NO: 10165 - protein, 391 aa, Synechococcus sp. WH 7805
MSRVGVVLLNLGGPERIQDVGPFLFNLFADPEIIRLPIPALQKPLAWLISTLRSGKSQEAYRSIGGGSPLRRITEQQARELQSLLRQRGIDATSYVAMRYWHPFTESAVADIKADGMDQVVVLPLYPHFSISTSGSSFRELQRLRQGDASFEKLPIRCIRSWFDHPGYVRAMAELIAEEVRKSDDPTQAHVFFSAHGVPKSYVEEAGDPYQQEIESCTDLIMKALGELMGHENPFTLAYQSRVGPVEWLKPYTEEALEELGQAKINDLVVVPISFVSEHIETLEEIDIEYRELATEAGVVNFRRVRALDTYPPFIEGLADLVATSLDGPEVSLDAAAELPTKVKLYPQEKWEWGWNNSSEVWNGRLAMLGFSAFLFELISGHGPLHALGLL

SEQ ID NO: 10166 - protein, 597 aa, Synechococcus sp. WH 7805
MTGANALMDALRRHGVDTIFGYPGGAILPIYDALHVAESEGWLRHVLVRHEQGGTHAADAYARATGRVGVCFGTSGPGATNLVTGIATAQMDSVPMVVITGQVPRTAIGTDAFQETDIFGITLPIVKHSWVVRDPADLASVVAQAFHIAASGRPGPVLIDIPKDVGQEEFDYEPVEPGTVIPAGFSATPPPDLTAIADALALIKTANRPLLYVGGGAVAASAHDSLMVLAERYQLPVTTTLMGKGAFDENHPLALGMLGMHGTAYANFAVTDCDLLIAVGARFDDRVTGKLDTFAPRARVIHFEIDPAEIGKNRRADVAVLGDVGASLAALVELSLQQGHEPRTAAWLERIKDWKQRYPLTIPPAEGSIYPQEVLLAVRDLASDAIVTTDVGQHQMWAAQYLRNGPRGWISSAGLGTMGFGMPAALGAQVACPDRRVVCIAGDASILMNIQELGTLAQYDLPVKVVIVNNHWQGMVRQWQESFYDERYSASDMLRGMPDFEMLARSFGVEGLKIVERAELKSGLAAALASPHPTIVDVHVRRGENCYPMVPPGCSNAQMVGLPSHPELAMDTQRNCPACGAVTSSDHRFCPSCGSAL

SEQ ID NO: 10167 - protein, 427 aa, Arabidopsis thaliana
MRETKKEEEEVEEEEAMNALAATNRNFKLAARLLGLDSKLEKSLLIPFREIKVECTIPKDDGTLASFVGFRVQHDNARGPMKGGIRYHPEVDPDEVNALAQLMTWKTAVAKIPYGGAKGGIGCDPSKLSISELERLTRVFTQKIHDLIGIHTDVPAPDMGTGPQTMAWILDEYSKFHGYSPAVVTGKPIDLGGSLGRDAATGRGVMFGTEALLNEHGKTISGQRFVIQGFGNVGSWAAKLISEKGGKIVAVSDITGAIKNKDGIDIPALLKHTKEHRGVKGFDGADPIDPNSILVEDCDILVPAALGGVINRENANEIKAKFIIEAANHPTDPDADEILSKKGVVILPDIYANSGGVTVSYFEWVQNIQGFMWEEEKVNDELKTYMTRSFKDLKEMCKTHSCDLRMGAFTLGVNRVAQATILRGWGA

SEQ ID NO: 10168 - protein, 181 aa, Zea mays
  misc_feature (40)..(40): Xaa can be any naturally occurring amino acid
MASSMLSNAAVATTVVNRNAGAQASMVGLKSVAAFPLTKXKSTNDLSSLPTNGGRVQCMKVWPTQNMKRYETLSYLPPLTTDQLARQVDYLLNNKWVPCLEFETEHGFVYREHHNSPGYYDGRYWTMWKLPMFGCTDPAQVLNELEECKKEYPNAFIRIIGFDSNRQVQCVSFIAYKPEGY

SEQ ID NO: 10169 - protein, 291 aa, Synechocystis sp. PCC 6803
MLDFYSQRYLHSERQAWQERIEQGQIEVDGKTVDPTYPLQAGQTLTYWRSPWVEPEVPLQLSVLHRDEDLWAIDKPSGLPVLPGGDFVYHTVLEQLKIQYPQESLFPLHRLGTGTSGLLLLGRSTLGRRELSRQFREHICRKIYRTVIGPCDLPEKFECHQAIGKIPYPQLGYIYAASSHGKPAQSYGRILARSPEKTWLEVEIRTGRPHQIRIHLASLGYPLLGDRLYGPGGVPINCRTARPSDGGYTLHSYQLGFLHLHTQQAIKLTAPLPPELITPEVKTIALETEKH

SEQ ID NO: 10170 - protein, 617 aa, Prochlorococcus marinus str. MIT 9211
MTLTSSPVNLGDSENQENSQILGADALMDSLRLHGVSTIFGYPGGAILPIYDSVYKAEKQGWLKHILVRHEQGAAHAADGYARSTGSVGVCFGTSGPGATNLVTGIATAQMDSVPIVVITGQVPRPAIGTDAFQETDIFGITLPIVKHSWVVRDPSEIASVVAQAFFIAASGRPGPVLIDIPKDVGQELFNYQPVQPGSLIPPGFQLPKEPDSLSIAKALKLIEDSQRPLVYAGGGVISAGAHNSLSELAKRHHLPVTTTLMGKGAFDERDSLSVGMLGMHGTAYANFAVTECDLLIAIGARFDDRVTGKLDTFAPRAKIIHFEVDPAEVNKNRTADVALIGDLGISLKQLLELSLRKKVQPNTSQWLGLIDKWKKQYPLVVPPAEGMIYPQEVLLAVRDIVPEAYITTDVGQHQMWAAQYLRNGPRQWISSAGLGTMGFGVPAAVGVQTALPNEKVVCIAGDASILMNIQELGTISQYKLNTKIIIINNHWQGMVRQWQQSFYEERYSATNMLNGEPDFVGLANAFGIKGILIKNRNEFVDQLKEALLEPGPILIDVNVRRDENCYPMVPPGKSNAQMVGLPAHPELAINPNRKCPSCGFTSSSKNKFCPECGSSI

SEQ ID NO: 10171 - protein, 509 aa, Geobacillus kaustophilus HTA426
MLLDADIKAQLAQYLQLLENDIVLTVSAGDDNVSRDMLALIDELTAMSSKIKVEKAKLERTPSFSVNRVGENTGITFAGVPLGHEFTSLVLALLQVSGRPPKVSQDVVDRIQQIRGKHHFETYVSLTCHNCPDVVQALNIMSVLNPDISHTMIDGAAFKEEAEQKGIMAVPTVFLNGKLFASGRMSLEDILAKLGSAPDASSFADKEPFDVLVIGGGPAGATAAIYAARKGIRTGIVAERFGGQILDTLGIENFISVKYTEGPKLAASIEEHVKQYNVDIMNSQRAKRLEKKDLIEVELENGAVLKSKTVVIATGARWRNLGVPGEEEFKNKGVAYCPHCDGPLFEGKHVAVIGGGNSGVEAAIDLAGIASHVTLLEFAPELKADAVLQDRLYSLPNVTVIKNAQTTEITGTDKVNGLTYIDRETGEEHHIELQGVFVQIGLVPNTEWLEGTVERNRFGEIIVDKRGATNIEGVFAAGDCTDSAYKQIIISMGSGATAALSAFDYLIRH

SEQ ID NO: 10172 - protein, 688 aa, Oryza sativa (japonica cultivar-group)
MLPVAIALEPTSIEDEGAGVKRPIILISDPKGVAAGVDNRRPPASPSAIFVVVSVAIILVALAASVIATQTTWSESNVPVMSGEAIEPGSVDIDLRVSKGVSEGVSYERTTAVLDVQAHTAGNDFAWTNIMLTWQRTTYHFQPAQNWMNDPNGPLYYKGWYHLFYQWNPDTAVWGNKISWGHAVSKDLLHWHHLPIAMVPDNWYDLNGVWSGSATDLPDGKLMMLYTGSTVDQSVQDQNLADPVNITDPLLRDWVKTDVNPVLYPPPGIGAKDFRDPTTAFKENEVDDKRWRAIIGSKEKEKVGLSVVYKTDNFSHFRPVPVIMHRVPGTGMWECVDFYPVSTVADVATDEGSDSTEYSVPGIGVKHVLKSRLDDDKDDYKALGTYFAATGTFAADDADLDVGIGLRLDYGKCYAARTFYNQNKQRRILWGWIGETELEAVDLMKGWASLQAIPRTMVFDEKTGTNVLQRPEEEVESWSLFSTNTQGVVFEPGSVVPSHVTGALQLDITASFDVDETLLEITSESHDAGCDCSNSGGAGTRGSLGPFGLLVVAEEKLSELTPVYLYVAKGGEGRAKAHLCICQTRSSMASGVDKEVYGSAVPVLDGENYSARILVDHSIVESFAQAGRTCVRSRDYPTKDTYGAARWFFFNNATEASVRASLKAWQMKSFIRPYPVIPDQTGFRSNWR

SEQ ID NO: 10173 - protein, 391 aa, Prochlorococcus marinus str. MIT 9211
MTRVGILLMNLGGPERIKDVGPFLYNLFSDPEIIRIPIPFFQKPLAWLISTLRSSRSQQAYQSIGGGSPLRRITEQQARELQSELRQRGVNATSYVAMRYWHPFTESAVSDIKADGINQVVVLPLYPQFSISTSGSSFRELRRLREADPQFRKLPIRCIRSWFNNEGYIASMAKLIEDEILLCNDPENAHIFFTAHGVPKSYVEEAGDPYKDEIEDCSILIIDQLEKALGYINPYTLSYQSRVGPEEWLQPYTEDVLAELGESGTKELVVVPISFVSEHIETLQEIDIEYKEIAKEHGIDNFRRVRALDTYPMFIKGLADLVTSCLEGPEISLDEASKLPDRVKLYPQEKWQWGWNNSAEVWNGRVAMFVFIICLLELVIGNGPLHYLGLL

SEQ ID NO: 10174 - protein, 810 aa, Polaromonas sp. JS666
MKKSKLVMVGNGMAGVRTIEELLKIAPELYDITVFGAEPHPNYNRILLSPVLAGEQTLDEIVLNSWDWYKDNHITLHAGKKVVEVDRVRRVVRAEDGTEEEYDRLLMCTGSNPFILPVPGKDLQGVIAYRDIADTNAMIEAAQKYKKAVVIGGGLLGLEAANGLMLRGMEVTVVHVMPWLMERQLDDVAGKLLQKSLEDRGLKFLIGAQTQELTGGADGRVKSIKFKDGSELDTDLVVMAVGIRPNTELAEKMRLHCNRGIVVNDTMQTVTDARIYSVGECAAHRGIAYGLVAPLFEQAKVAANHLAQFGIGRYTGSLTSTKLKVTGIDLFSAGEFMGGEGTEEIVMSDPFGGVYKKLVIKGDKLIGACLYGDTVDGSYYFKLLRDGRSVSDIRDKLMFGESNIGDTGHEGHSKAAAMPDDAEVCGCNGVTKGTICKAIKEKGLFTLDEVRKHTKASASCGSCTGLVEQLLMFTAGGDYSATPKKKAVCGCTDHSHQEVRDTIKSLHLLTIADVYKTMEWRTPNGCASCRPAINYYLISTWPKEAKDDPQSRYINERSHANIQRDGTYSVIPRMWGGHTTPNDLRRIADVADKYQIPTVKVTGGQRIDLLGVKKEDLQSVWQDLGMPSGLAYAKATRTVKTCVGSEWCRFGTQDSTQMGKDLEHALWAMYAPHKVKLAVSGCPRNCAESGIKDVGVIGVDSGWEIYVGGNGGIKTEVAEFLVKVKTSSEVMEYAGAFLQLYREEGWYLERTVHYLHRVGLDYVKKKILDDAEGRKALWERLQFSLDGAPDPWLETSKAAVDTRQFEKLPA

SEQ ID NO: 10175 - protein, 394 aa, Rickettsia montanensis
MAKAKFERTKPHVNIGTIGHVDHGKTSLTAAITMVLAKTGGAQATAYDQIDAAPEEKERGITISTAHVEYETKNRHYAHVDCPGHADYVKNMITGAAQMDGAILVVSAADGPMPQTREHILLAKQVGVPAMVVFLNKVDMVDDSDLLELVEMEVRELLSKYGFPGDEIPIIKGSALQALEGKPEGEKAINELMDAVDSYIPQPVRATDKPFLMPIEDVFSISGRSTVVTGRVESGIIKVGEEIEIVGLKDTQKTTCTGVEMFRKLLDEGQAGDNVGILLRGTKREEVERGQVLAKPGSIKPHDKFEAEVYVLSKEEGGRHTPFTNDYRPQFYFRTTDVTGTIKLPADKQMVMPGDNATFTVELIKPIAMQEGLKFSIREGGRTVGAGVVTKINN

SEQ ID NO: 10176 - protein, 115 aa, Methanothermobacter thermautotrophicus str. Delta H
MKTMRKITAIIRREKLEDVKDALELMGIHGMTVSDVKGRGQQMGIRESYRGMDYCVDLLPKVQLEIVVDSEDLERTVEAISENARTGDVGDGKIFVTDVIDVVRIRTGEHGRDAI

SEQ ID NO: 10177 - protein, 115 aa, Methanothermobacter thermautotrophicus str. Delta H
MIFMKEIVAIIRPEKLEEVKNALEAAGCHGMTVTEVRGRGRQLGITESYRGRDYRIDLLPKTKIEIVVNDEDVDTVVETIVKSAQTGDIGDGKIFISGVDEVVRIRTGESGKKAV

SEQ ID NO: 10178 - protein, 498 aa, Bacillus clausii KSM-K16
MSQVPTGENSLKTRLVSFLNGGSKKLLINGEWVDAVSGQTFETMNPATGDTLAIVAEAGQEDIDSAVKAARKAFDEGPWSKMSAAERSRLIYKLADLIEEHKEELAQLETLDNGKPIRETANADVPLAIEHFRYFAGWATKIVGQTIPVQGNYFNYTRHEAIGVVGQIIPWNFPLLMAAWKLGAALATGCTVVLKPAEQTPLSALYLGELINEAGFPKGVVNIVPGFGHSAGTAIVNHPAVDKVAFTGSTNVGKLIMKQASESLKRVTLELGGKSPNIILPDADLSKAVPGSLMGIMFNQGQVCCAGSRLYVQKKQYDHVVADLVSLTKKINQGDGLLEHTTMGPLISTQQQKRVKNYIDRGVEEGAELLAGGTIPYDQGYFVSPTIFADVDHSMTIAKEEIFGPVVAAMPFESVDDLIGKANDSDYGLAAGVWTQDIKKAHYIAHRIKAGTIWVNCYNVFDAASPFGGYKQSGIGREMGSYALDNYTEVKSVWVNMD

SEQ ID NO: 10179 - protein, 394 aa, Rickettsia helvetica
MAKAKFERTKPHVNIGTIGHVDHGKTSLTAAITIVLAKTGGAKATAYDQIDAAPEEKERGITISTAHVEYETKNRHYAHVDCPGHADYVKNMITGAAQMDGAILVVSAADGPMPQTREHILLAKQVGVPAMVVFLNKVDMVDDPDLLELVEMEVRELLSKYGFPGDEIPVIKGSALQALEGKPEGEKAINELMDAVDSYIPQPVRATDKPFLMPIEDVFSISGRGTVVTGRVESGIIKVGEEIEIVGLKDTQKTTCTGVEMFRKLLDEGQSGDNVGILLRGTKREEVERGQVLAKPGSIKPHDKFEAEVYVLSKEEGGRHTPFTNDYRPQFYFRTTDVTGTIKLPFDKQMVMPGDNATFTVELIKPIAMQEGLKFSIREGGRTVGAGVVTKINN

SEQ ID NO: 10180 - protein, 303 aa, Daucus carota subsp. sativus
MAARLSVGLFRVGKYEIQVPKQMTVVKTIRELSAPFIGLRLGNKRKLSLCFAVEENESPVAAAEAEESSREVEKQIIESFTVAGGSRAEERMARKKTERFTYLVAAVMSSFGITSMAVFAVYSRFAWQMEGGEVPHSEMLATFSLAFGAAVGMEYWARWAHKALWHDSLWHMHESHHKPREGAFELNDVFAIINAVPAIALLAYGFFHKGLFPGLCFGAGLGITVFGMAYMFVHDGLVHKRFPVGPVANVPYLRKVAAAHQLHHMEKFNGVPYGLFLGPQELEQVGGNEELEKEINRRIKSSN

SEQ ID NO: 10181 - protein, 778 aa, Arabidopsis thaliana
MAMTPVASSSPVSTCRLFRCNLLPDLLPKPLFLSLPKRNRIASCRFTVRASANATVESPNGVPASTSDTDTETDTTSYGRQFFPLAAVVGQEGIKTALLLGAVDREIGGIAISGRRGTAKTVMARGLHEILPPIEVVVGSISNADPACPDEWEDDLDERIEYNADNTIKTEIVKSPFIQIPLGVTEDRLIGSVDVEESVKRGTTVFQPGLLAEAHRGVLYVDEINLLDEGISNLLLNVLTDGVNIVEREGISFRHPCKPLLIATYNPEEGAVREHLLDRVAINLSADLPMSFEDRVAAVGIATQFQERCNEVFRMVNEETETAKTQIILAREYLKDVKISREQLKYLVLEAVRGGVQGHRAELYAARVAKCLAAIEGREKVTIDDLRKAVELVILPRSSLDETPPEQQNQPPPPPPPPQNSESGEEENEEEQEEEEEVSGCSTHYSLVEHTFKDESNEENENEQQQDQIPEEFIFDAEGGLVDEKLLFFAQQAQKRRGKAGRAKNVIFSEDRGRYIKPMLPKGPVKRLAVDATLRAAAPYQKLRREKDISGTRKVFVEKTDMRAKRMARKAGALVIFVVDASGSMALNRMQNAKGAALKLLAESYTSRDQVKVSIIPFRGDAAEVLLPPSRSIAMARNRLERLPCGGGSPLAHGLTTAVRVGLNAEKSGDVGRIMIVAITDGRANITLKRSTDPESIAPDAPRPTSKELKDEILEVAGKIYKAGMSLLVIDTENKFVSTGFAKEIARVAQGKYYYLPNASDAVISATTRDALSDLKNS

SEQ ID NO: 10182 - protein, 97 aa, Moraxella sp.
KDRLTTPLLRMKDGKYHKEGEFTPVSWDVALDTMAAKWKHSIATKGPTSVGMFGSGQWTIWEGYAASKLHKAGFLTNNIDPNARHCMASAVVGFMRT

SEQ ID NO: 10183 - protein, 315 aa, Musa acuminata
MDCSFPVINMEKLQGGEREKAMELLRDACENWGFFELLNHGISPELMDEVERLTKEHYRKCREQKFKEFASKALENGSEVTDVDWESTFFLADLPVSNMSELVDMGADYRKVMKEFAAKLEMLADGLLDLLCENLGLEKGYLKKAFCGSKGPSFGTKVSAYPPCPRPELIKGLRAHTDAGGIILLFQDDRVSGLQLLKDGQWVDGPPMRHSIVVNLGDQLEVITNGKYKSVLHRVVALTDGNRMSIASFYNPGSDAVVFPAPTLVQKEAEKDDAAAVYPRFVFEDYMKLYVIQKFQAKEPRFEAMKATALPIPTS

SEQ ID NO: 10184 - protein, 156 aa, Methanocaldococcus jannaschii
MIMMGKLKYKIQVNPEKTARAMGRNIPISRKHAREICKSINGMKLDEAIKFLEDVIAMRRPVLFRRHCKKVGHRKGKLGWPAGRYPVKAAKAILKILQHAKANAEYKGLNTEKLRIKHISTNKGITIKRYMPRAFGRATPKFQETVHIQVILEEYH

SEQ ID NO: 10185 - protein, 318 aa, Wolbachia sp.
LCDKKIQLGINLTKGLGAGALPDVGKGAAEESIDEIMEHIKDSHMLFITAGMGGGTGTGAAPVIAKAAREARAIVKDKGAKEKKILTVGVVTKPFGFEGVRRMRIAELGLEELQKYVDTLIVIPNQNLFRIANEKTTFADAFQLADNVLHIGIRGVTDLMIMPGLINLDFADIETVMSEMGKAMIGTGEAEGEDRAISAAEAAISNPLLDNVSMKGAQGILINITGGGDMTLFEVDAAANRVREEVDENANIIFGATFDQAMEGRVRVSVLATGIDSCNDKPEASSVNQNKIPAEEKNFKWPYNQIPISETKEYASTE

SEQ ID NO: 10186 - protein, 355 aa, Selenomonas ruminantium
MAYKITVIPGDGIGQEITDSAVEVLKAADKKFNLGLEFDYHDAGGTAYDKFGTPLPQETIDACKAADGVLFGAVGGDKWDKVDPAKRPEKAILGLRKALGLYANLRPVKVADALVEYSPLKPELVKGVDLVIVRELIGGIYFGEKCESEQHNGAERAWDLENYSVPEVERIANLAFETAKLRRGKVTSVDKSNVLATSRLWRRTVAKVAENYPEVECNNLYVDNCAMQIAVNPTQFDVIVTGNLFGDILSDEAAVVGGSIGMLPSASIGECTSLYEPIHGSAPDIAGQGIANPIGTILSAAMLLRYSLHEEAAADAIEAAVDKALGEGYRTPDLWKEGFTKVNTSEITKIISERV

SEQ ID NO: 10187 - protein, 554 aa, Selenomonas ruminantium
MNGAQAVVACLREQGVDTVFGYPGGMILPLYDALYDSKEIKQVLVTHEQNAAHAADGYARASGKVGVCIATSGPGATNLVTGLATAFMDSIPVVAITGQVDTTLLGRDAFQETDILDVTMPITKHNYKIKDARHLLSTIREAFTLAKKGRPGPVLVDVPRDLFFQEVAWEEVPACTKKVGKPDADFLICAAEAAREIVKAQRPVVIVGGGVVSAGATAEVTAFVEKYNLPVAHTLMGLGAIPREHPQSLGFAGMHGEKAANHAIAAADLIIAIGSRFGDRQTGNVKKYTQDTKFIHIDIDPAEIDKNIGNSLGLAGDMKVILGLLMKQEAVGNIDEWWQQIQSWKETYDYDYHVNRLTVPWALHQVAQNTKGKPYAFATDVGQHQMWAALHLRIEEPRTWLTSGGLGTMGFGLAAAMGAQMYYGDSRRVIHVAGDGGIKMTGNEFYTIARLNLPVISLIVNNTSLGMIRQLQKVMYKERYIACEFDYQMDYAAYAGSFGIKAETVSTQEEFAEALNRALADQDHPRVIVLNVWRSFVEPMIKGGARIDEFVEFK

SEQ ID NO: 10188 - protein, 197 aa, Nicotiana tabacum
MSYWKDKVLPKIKKVFEKNGPKKAAAAEACEAFDVAKEQYSKEFDEKKTELQPKVVEIYEAAAAEIKTLVKEPKVAGLKKHSAGVQKFLDELVNIEFPGSKAVSEASSKFGPSYVSGPIIFVLEKVSTFVVTEDKKEEEAATAAAVETTGTVAEEVKEKDIVVEAGDEKKEEAEPATETTKVEEVPAAVATEPPKAA

SEQ ID NO: 10189 - protein, 371 aa, Ipomoea nil
MVSTITATVPSRVERLASSGIERIPKEYIRPEEERRSIGDIFEEEKIAGGPQVPTVDLKGINSEDLEVREKCREELRKAAVDWGVMHLVNHGISEELTGRVKAAGEGFFGQPIEEKEKYANDQAAGNVQGYGSKLANNASGQLEWEDYFFHCIFPEDKTDLSIWPKTPSDYIDATKEYAKQLRALATKVLAVLSLGLGLEEGRLEKEVGGMEELLLQMKINYYPKCPQPELALGVEAHTDVSALTFILHNMVPGLQLFYGGKWVTAKCVPNSIIMHVGDTVEILSNGKYKSILHRGVVNREKVRVSWAVFCEPPKDKILLQPLPETVSEAEPPRFPPRTFAQHIKHKLFRQSDQEAADTPKPDNDDHHQSN

SEQ ID NO: 10190 - protein, 1281 aa, Coccidioides immitis RS
METAIRWAPASTPDDQRFLYVDIKGQEFKHCKVTSRPDKFTLTYDVLSAFSHGSEFRSFDWCPTEENLVAVGHASGDVVVAHLDTGALIPLALPSKVQRACHGLAWNSSGLLAAGLDKFRGDYCLNIWDPHQRPVRMASRGGSERQVPDPLRRYANGEPVASVRFFNDQPSLLIAGMKGHSVRLYDLRESHGNPSLQFSTRCVHELTVNRLDENYFASCAPFDNASICIWDRRSGSRYSTAAGTSSGTIDAGHVLEIRPGIASGSTIRSLRFSQTQRGRLGMLTDRGIFRAYHIAKDHSPDELRAALEKTVGRGSSKHYPEQLYTKTVRDFQTSFPPKTRSEDSSQRVSAFDFMTTDSFDGLEAITILNDRNVAVYSLPLVCGRVSLSPQGALVRGGFAHGQDFRVFAPAQGSKAAQTTQEIQDRASRKMESSMEGKEANGKAGEDDGKDSGGTGIISSRQRREKLLLPEKLANVQDALTLMTIPRLRLREGYTLNPERNQNIVSDDTALQDLWAWIERAHTRASDGSMIIHGVDMNYLGVQSIWSGNLGLSLENRLASSDLDDDVDVPKLIEQLAKKLDLQETKMCDTDFMPQRQLCLYICGAIASVDDLEGVVTQLVEERQHTQAAAFALFHDETELAYKALRNNRPTQAHKLLAMAIAGAPRGDPNFDWEEACAEIAKELTDPFAKAILALVSKGSWESVLRETTLPLRYRVEVAVRWLPDDQLTTYIRDTSMEAVQQGDIEGAVLTGLDHAAMDLFQSYINKFNDIQTAVLVMNYAVPRLVSDAFNANRFHAWRETYRQQMNSWKMHLHRAKFDVDSRNLAVSWDGRKLTRSQPQQVSLVCNYCTRPLSQQEERPDHQLAGAESTHHTPNNPLGNDTLVSVVNSGSEGATSCPPKLLFHLHHTSSSTGSTAPPPRTERSDWALPRHPIRTALQRLLKASRGALRMARTAGRGERKEPSRAVAVSKALSYVLRHAAEREVTFPDIIEAVSSSDKQRFGLLYVPSTSSSHSHDSLTQDAALQSAEENASKDPGANEDATAQALAASADDTDPSHYLIRARQGHSIKSIEASSLLKMLSLEDDNLPATVVHGTYHTAWPKILETGGLKCMGRNQMHFATGPALSEVLPNGDGGDVIIPSKLKGRSAGGGGGGDGSVISGMRSDSQILIYIDLKKALAAGCPFWISENGVILSEGLETGDSHGKVVGTEFFDVAVELRRGLGVLWEKGSLVQRTPDWMLQAKGPPGKGDKRHRGPKAAQKRALPRVHVGNDADGADVADQP

SEQ ID NO: 10191 - protein, 313 aa, Selenomonas ruminantium subsp. ruminantium
MKKDTIVIGTRSSKLALWQAEYVKGRLEEEYPGLKVELKLMTTKGDKILDAPLAKIGGKGLFTKELEMDMLSGGIDLAVHSLKDMPTELPEGLTLAAITKRFDPGDAVVSPKFKTFAALPCGAKVGTSSLRRKAQLLHARPDLNICDLRGNVNTRLAKLESENFDAIILAVAGLKRLGFGERITEVLPRDMVLPAVGQGALAIETREDDADMREMLAFLNDEATVHCAKAERAFLGRVEGGCQVPVGVYAVPAANDEIQVEAVIASLDGQRLYRDKLSGKASEAEKLGVTLAEKLLAAGGQKILQELGLLQNK

SEQ ID NO: 10192 - protein, 423 aa, Thermobifida fusca YX
MALIVQKYGGSSVADADAIKRVAERIVAQKKAGYDVVVVVSAMGDTTDELLDLAKQVSPLPPGRELDMLLTAGERISMALVAMAIGNLGYEARSFTGSQAGVITTSLHGNAKIIDVTPGRIRDALAEGAICIVAGFQGVSQDSKDITTLGRGGSDTTAVALAAALNADLCEIYTDVDGVFTADPRIVPSARRIPQISYEEMLEMAASGAKILHLRCVEYARRYNIPLHVRSSFSQKPGTWVVSEVEETEGMEQPIISGVAHDRSEAKITVVGVPDRVGEAAAIFKALADAEINVDMIVQNVSAASTSRTDISFTLPADSGQNALAALKKIQDKVGFESLLYNDRIGKVSLIGAGMRSYPGVTARFFDAVAREGINIEMISTSEIRISIVVAQDDVDAAVAAAHREFQLDADQVEAVVYGGTGR

SEQ ID NO: 10193 - protein, 371 aa, Ipomoea nil
MVSTITATVPSRVERLASSGIERIPKEYIRPEEERRSIGDIFEEEKIAGGPQVPTVDLKGINSEDLEVREKCREELRKAAVDWGVMHLVNHGISEELTGRVKAAGEGFFGQPIEEKEKYANDQAAGNVQGYGSKLANNASGQLEWEDYFFHCIFPEDKTDLSIWPKTPSDYIDATKEYAKQLRALATKVLAVLSLGLGLEEGRLEKEVGGMEELLLQMKINYYPKCPQPELALGVEAHTDVSALTFILHNMVAGLQLFYGGKWVTAKCVPNSIIMHVGDTVEILSNGKYKSILHRGVVNREKVRVSWAVFCEPPKDKILLQPLPETVSEAEPPRFPPRTFAQHIKHKLFRQSDQEAADTPKPDNDDHHQSN

SEQ ID NO: 10194 - protein, 594 aa, Cytophaga hutchinsonii
MNQAILYRGPDHSDFVSFQFKQQQIFIGNNRLKIIDRNTLSNQPYNSIDKRYSLTFNGAIYNYKELKQQLPAMEWQTESDTEVLLNWMIVHGLSGLPELNGMFAFAFYDRQQHALIIARDPSGIKPLYYYNDDDYFIASSEIKGILASGLVKKEFNSNQVSHYLQFKYVPKPFTFYKNIFELNEATFIKIDEYDFKIKRFESPSVIKPNTLTNQQLIETCDQLIENAVKHHLVADVPVGLYLSGGIDSTLLLSKIRKLGHLNFPTFTIANSSREQAFGTRDFEFARLASKLYNSDHHEVSVHAEMLQDLPAFVSMIDQPIGDSALFLTHILSKEAGQHVRVALNGAGADELFAGYNRHSAYKSYLNNLLHKNLAITLIKSTYNILPDGGNHSLKKVFRLWNKFTGMMDVDPIKTCHNFSSSEYFIEKNTSIEVDDKSYEDLSYYLYYCLRNDRTKYLISDILALTDKMTMRSSIEARVPYLDQELRRFVESLDPSVLLKNGRKWILKEVLLRNGGETFLNRPKEGFGMPFGYWLKLPVNKNFVEKLTNKNHPIYEWVPYQTIKNLVDWHLGSKRDCSSELWSVLLLMHWYEKEF

SEQ ID NO: 10195 - protein, 436 aa, Clostridium tetani E88
MEEFMYKLYSLNNGLRVALEKIDYVQSVSIGLWVKNGSRNENEHNNGISHFIEHMMFKGTNNRNAKEIVKTIEDLGGHINAFTGKEATCYYIKLLYTHLDVALDILSDMIFNSKFNEEDIELEKGVILEEISMNEDSPEDVLVELHSKAAWGDDPISLPILGSAKGVRSFTRNHIIEYLKSHYTPENCVISIAGNFDENIYKLIEDYFGHWKASNEKPLLYSTPDVLNNHLFRKKEIEQLHMNLGMQGVEIGNEDMYTILLLNNIFGGSTSSILFQKIREEKGRCYSIYSYVNSYNNTGIVNIYTGLNSKYSIEVLKLIVEEVHKFSKYCICQEQIIQGKEGLKGSYILGLESTSSRMFSNARSVLFLNRINKPEDIIKKIDKIDMESIHRVKENTFEKGIINSAFVGENIDIETVNNMMDKSINPFKNNSNSTFI

SEQ ID NO: 10196 - protein, 401 aa, Clostridium tetani E88
MKIIVQKFGGTSVSTKERRQRVVEKIIKAKNAGYSPVVVVSAMGRKGEPYATDTLLSLVSNELKKNNLAIDLLMSCGEIISTVVMADELLSKNIDAVPLTGGQAGILTDDNYSNASILKLECDKILDVVEENKIPIVAGFQGISENGFITTLGRGGSDVTAVLLGGALKAEKVEIYTDVDGIMTADPRIVSDATLIKEISYNETFQFSHEGAKVIHPRAVEIAMNENIPIVIKNTLTNCDGTLINNISDLNLNNIITGITHTNDRTQIKIELEQNKENESYFRILDILAENSISIDLINVFPRESIFTIDGKDFEKFSSIMNKINLKYSHIDSCSKIAIIGNRMRGIPGVMAKIIYVLMNENIEVLQTADSHATIWCLVKDIHTEKAIKALHNAFNLSNNK

SEQ ID NO: 10197 - protein, 113 aa, Arabidopsis thaliana
  misc_feature (92)..(92): Xaa can be any naturally occurring amino acid
  misc_feature (111)..(111): Xaa can be any naturally occurring amino acid
MAFALRFFTCFVLTVFIVASVDAAITCGTVASSLSPCLGYLSKGGVVPPPCCAGVKKLNGMAQTTPDRQQACRCLQSAAKGVNPSLASGPSXGKCGVSIPYPISTSTNCAXIK

SEQ ID NO: 10198 - protein, 326 aa, Coxiella burnetii RSA 493
MTEIKKLIVLTSGGDAPGMNAAIRAVVRTALHYQFEVYGATAGFAGLVNGQVVPLNSRAVANCIQRGGTILKTGRFENFRFKAVRDKAREFLKKLQIDAMIVLGGNGSFAGASKLYQEGGPQMIGIPCTIDNDIQGTDYCIGFDTACNTALQAIDKIRDTAFSHERNFLIEVMGRSSGFIAVNVGIAGGAEIIALPEFHVDIDTLTQKIKKQHGKKSASIIVAAEANQPGHSFEVAKQIKEKTGIEYRVCVLGHTQRGGTPTVKDRVLASLMGAQAIEALKKGLTEKMIAYQNGKIAVAPLPDPDNGTRYFADEALLRVNNIICAM

SEQ ID NO: 10199 - protein, 193 aa, Wolbachia endosymbiont of Dirofilaria immitis
MRIAELGLEELQKYVDTLIVIPNQNLFRIANEKTTFADAFKLADNVLHIGIRGVTDLMIMPGLINLDFADIGTVMSEMGKAMIGTGEAGGENRAINAAEAAMSNPLLDNVSMKGAQGILINITGSGDMTLFEVDAAANRVREEVDENANIIFGATFDQAMEGKVRVSILATGIDSSAIRDDRVETSSVSQLGL

SEQ ID NO: 10200 - protein, 700 aa, Desulfovibrio desulfuricans G20
MFLNEHMSKVLFAEAGIDTPAGDLLTPGQLAEYTPAVSAPWFLKAQVLTGGRGKAGGIRRAATLKELRETAQDMFTMEIKGHRVPFLRIESATDIRRECYLSFVLSRERRDLLLTTSRAGGIHVESSTGQQKPLVQRVPLDSGLREHHLRAAFFEMGVEKEHWAGFKAMAEKLYRAVREYGLLLAEINPLVLTCDGRWVALDGKVELDDSVVDLQPDLERFYTPEHHSREENLAREAGLSYVELKGWVGILVNGAGLAMATMDLLNFSGLSAANFMDLGGAADASRMRRALDLLFENRNVRAVFINLFGGIVSCADVARALVDALEGGDAPKPIVVRMAGHESAEGRALLHDFAHPSVTIAQEMHEALDALRSMKPADVPRIEFPLPQEPDPVPQHNGQEAAACVPVYNGMGLDSSSGVLVQGLTGRVAQRHAALMMEYGTRVVAGVTPFKGGQEVMGIPVYDSVHEACRHHRIDASIIFVPAAFAPDAVLEAAAEEIPWVVCITEGIPQAAMLSALKNIQPSPTCVVGPNTPGIVVPHQLKIGIMPGYVFSPGPVAVFSRSGTLTYEAASRLSAAGIGQSVCVGVGGDSFVGTGFVDLCERVRHDAATRAVLVLGEVGGRAEEELAEYVRRTGFSKPVVSFVAARTAPPGRRLGHAGAILDETTGGVEAKLQAMREAGFTICPDLASLPRIMRAVLDRA

SEQ ID NO: 10201 - protein, 519 aa, Saccharomyces cerevisiae
MFSRSTLCLKTSASSIGRLQLRYFSHLPMTVPIKLPNGLEYEQPTGLFINNKFVPSKQNKTFEVINPSTEEEICHIYEGREDDVEEAVQAADRAFSNGSWNGIDPIDRGKALYRLAELIEQDKDVIASIETLDNGKAISSSRGDVDLVINYLKSSAGFADKIDGRMIDTGRTHFSYTKRQPLGVCGQIIPWNFPLLMWAWKIAPALVTGNTVVLKTAESTPLSALYVSKYIPQAGIPPGVINIVSGFGKIVGEAITNHPKIKKVAFTGSTATGRHIYQSAAAGLKKVTLELGGKSPNIVFADAELKKAVQNIILGIYYNSGEVCCAGSRVYVEESIYDKFIEEFKAASESIKVGDPFDESTFQGAQTSQMQLNKILKYVDIGKNEGATLITGGERLGSKGYFIKPTVFGDVKEDMRIVKEEIFGPVVTVTKFKSADEVINMANDSEYGLAAGIHTSNINTALKVADRVNAGTVWINTYNDFHHAVPFGGFNASGLGREMSVDALQNYLQVKAVRAKLDE

SEQ ID NO: 10202 - protein, 630 aa, Hordeum vulgare subsp. vulgare
  misc_feature (602)..(602): Xaa can be any naturally occurring amino acid
  misc_feature (614)..(614): Xaa can be any naturally occurring amino acid
MSKFLAIGLLLLHLINHGIYLVKAWDDKDFFKYCPPSQCSQHGPEIRFPFCLESSNKSSSSSSSSSCGCDGRSIRKLACSGQDTILVHPFLGPYSVSAIDYRHSSMKVIPLVDPCLMLNQNLIISRNSSSLQIDVINVYKTKFDRDFFWPSYAAVVRCSREFSPGADDRIVGPVSCLSNATHFFYFVASYADMSILPLDCKAAPLSHGVSGSLIPMYWSCSPYNLGSFKEGAETFLSSAETTVCWLGSECRKCEIIGGRCAFSSERNLAFCMPGGSRIKVIAATSSVAAFVVLLLTVAIVLYLSLKTRYNAEIHLKVEMFLKTYGTSKPTRYTFFEVKKMARRFKEKVGQGGFGSVYKGELPNGVPVAVKMLENSRGEGEVFINEVATIGLIHHANIVRLLGFCSEGMRRALIYEFMPNESLEKYIFSDDPNIFQNLLVPDKLVDIALGIARGMEYLHQGCNQRILHFDIKPHNILLDYNFNPKISDFGLAKLCARDQSIVTLTAARGTMGYIAPELYSRNFGGVSYKSDVYSFGMLVLEMVSGRRDSDPSIESQSDVYLPEWIYEKVINGEELALTLGATQGEKEKVTQLAMVALWCIQWXPRNRPSMTKVLXMLTGRLQTCRCHQSRS

SEQ ID NO: 10203 - protein, 454 aa, Saccharomyces cerevisiae
MSEPEFQQAYEEVVSSLEDSTLFEQHPEYRKVLPIVSVPERIIQFRVTWENDKGEQEVAQGYRVQYNSAKGPYKGGLRFHPSVNLSILKFLGFEQIFKNSLTGLDMGGGKGGLCVDLKGRSNNEIRRICYAFMRELSRHIGQDTDVPAGDIGVGGREIGYLFGAYRSYKNSWEGVLTGKGLNWGGSLIRPEATGYGLVYYTQAMIDYATNGKESFEGKRVTISGSGNVAQYAALKVIELGGTVVSLSDSKGCIISETGITSEQVADISSAKVNFKSLEQIVNEYSTFSENKVQYIAGARPWTHVQKVDIALPCATQNEVSGEEAKALVAQGVKFIAEGSNMGSTPEAIAVFETARSTATGPSEAVWYGPPKAANLGGVAVSGLEMAQNSQRITWTSERVDQELKRIMINCFNECIDYAKKYTKDGKVLPSLVKGANIASFIKVSDAMFDQGDVF

SEQ ID NO: 10204 - protein, 409 aa, Coxiella burnetii RSA 493
MNGFVVSAVLIGAFLGALFSGHLADYIGRKRLLIIDALIFIVGTAISSMTVSISWLVIGRIIVGIAIGIASYSAPLYISEISPPHRRGALVSLNQLAVTIGIFLSYVVDYYFARHDAWRSMFAAGVIPAALLLLGMIVLPYSPRWIFSRGHEEKALWILRKLRGHGPHAEQELEHIRASLQQQKGDWRTLFSKIIRPTLFIAIGLAVFQQVTGINTVLYYAPTILKMTGFQASQTAILATMGIGAVLVIITIISLPLIDSLGRRPLLFIGVGAMTVSLLVLSWSFKVHGHMDYMRWIAFGSLLVFISGFSISLGPIMWLMFSEIFPLRVRGLGASIGACTNWASNWLVTITFLTLIEYLGPSGTFFIYFIISVITLIFIYTSVPETKGVTLEQIEENLYAGKDMRYLGK

SEQ ID NO: 10205 - protein, 675 aa, Hordeum vulgare subsp. vulgare
  misc_feature (177)..(177): Xaa can be any naturally occurring amino acid
  misc_feature (646)..(646): Xaa can be any naturally occurring amino acid
MGNPGAFHHSITLQSLTVFSLVAVLAADHVQGRDDGCAPFSCGHLQDIRAPFRRQGDPLECGVEAYELGCNSSKANIHISTGTYYVTAINYTGSYFWVIDTNFDTISSCPLPLWNHVPYGRYLGGINSVSPPGFLYLVSQSYDIACFANCSQAVTDSSSYKPVSCLSANNSHVYVWXSHYSCVVEDFEPYCGYLAKIPFGKDYTPYWHNASYADITQFIGKGFTVQFPVDIMGPSASVKLRKNINICLNNSISYFKEQASGASIVNWAHAFFWSEVHFLECVTQSSEDHYCTTQFLLAVVTIFLAIAIPKFFFVLCRLLLAPLAVWIFLAYKYMKTRIIIDAVEKFLRIQQMIGPTRYSYTDIVAVTSHFRDKLGQGGYGTVYKGILLPGGVHVAVKMLEGNSNCNGEDFISEVSTIGRIHHVNVVRLVGFCSEEMRRALVYEYMPHGSLDKYIFSAEKSFSWDKLNEIALGIARGINYLHQGCDMQILHFDIKPHNILLDSNFVPKVADFGLAKLYPRGDSFVPLSAMRGTVGYIAPEMISRSFGVISSKSDVYSFGMLLLEMAGGRRNADPNMGSSSQAYYPSWVYDRLTQEEAGETSAVAADMHELEKKLCVVGLWCIQMRSRDRPTMGEVIEILESGVDGLXMPSRPFFCDEGHIHVEDSYHFTSELTAVS

SEQ ID NO: 10206 - protein, 320 aa, Photobacterium profundum SS9
MSNVRHCNLLILGSGPAGYTAAVYAARANLNPVMITGMQQGGQLTTTTEVENWPGDAEGLTGPALMDRMKEHAEKFETEIIFDHINETDFSQSPFRLKGDNAEYTCDALIISTGASAKYLGLESEEAFKGRGVSACATCDGFFYRNQKVAVVGGGNTAVEEALYLSNIASEVHIIHRRDTFRSEKILIKRLMDKVENGNIVLHTDRTLEEVLGDEMGVTGVRIKDTQSNATEDLEVMGAFIAIGHQPNTAIFEGQLEMANGYISVQSGTQGNATQTSVEGVFAAGDVMDHTYRQAITSAGTGCMAALDAERYLDALEQQK

SEQ ID NO: 10207 - protein, 501 aa, Ralstonia eutropha JMP134
MSRLIEHFIAGASYVDPNTRTGPVFNPSTGEEAARCAYGSFATVDHAVTVAAEAGRRWGRLSHAARQAVIFKMRELVIANMDVLADAIGREHGKTISDAKGELGRAVEGIEFACNAPHVTKGEYAFNVGGDIDVFSVRRPIGVVGCITPFNFPIMVPAVMMTMAISVGNAIVWKPSEKVPTAALEFARLWKEAGLPDGVLNIVQGDKEVVDAILEHPEVAGVSFVGSTAVGEYVYQKGTSHNKRVASFTGGKNHMVVLPDADLDAAATAFVSAGYGSASQRCMAISLLLPVGQETADRLRDLIIPKIEALKVGAYDDASADFGAVVSKESKQFVEQSISRCLEEGGELVLDGRKLQVAGHPHGYYLGPTLFDRVTTDMHLYKEEVFGPVRAIMRPTTFDEAIEITNKHEYGNGSVLFTRDGKSAHRFMLEIESGMVGINVPVPLPSAYFNFGGLRRSKFGESHLYGPDAARFYTKLKTVSQRWPEPDERALPVSLAFNPSA

SEQ ID NO: 10208 - protein, 669 aa, Hordeum vulgare subsp. vulgare
  misc_feature (668)..(668): Xaa can be any naturally occurring amino acid
MGNPGAFHHSITLQSLTIFSLVAVLAADHVQGRDDGCTPFSCGHLQDIRPPFRRRGDPLECGVEAYELGCTSSKATIHINTGTYYVTAINYTGSYFWVINTNFDTSSSCPLPPRNQFLLVGIDSVSPPGFRYLDTAMYYTACFANCSRAVRDNSSYKPVSCLSASNSHVYVWVSPYGCMVVDLEPYCGYLAEIPFDYEYSEEYWQNASYADIIQVISKGFIVRFPVDTMTEPSDSVKLRKNMNLCLNNSISYFKEQSSGASIVNWTHAFFWSEVHFLECVTQLFPEDADYKYNDHYFTTPFVLVVVTIVSAIVIPKFLFVLCRFLLAPLAVWIFLAYKYWKTRIIIDAVEKFLRVQQLIGPTRYAYTDIIAITRHFRDNLGQGGYGSVYKGVLLPGGVHVAVKMLEGNSNCNGEDFISEVSTIGRIHHVNIVRLVGFCSEEMRMALVYEYMPNGSLDKYIFSAEKSFSWDKLNEIALGVARGINYLHQGCDMQILHFDIKPHNILLDSNFVPKVADFGLAKLYPRGDSFVPLSAMRGTVGYIAPEMISRSFGVISSKSDVYSFGMLLLEMAGGRRNADPNAGSSSQAYYPSWVYDQLTREEVGEISPVAADMHELEKNLCVVGLWCIQMRSRDRPTMSEVIEILEAGVDGLQMPSRPFFCDEGHIHVXG

SEQ ID NO: 10209 - protein, 579 aa, Arabidopsis thaliana
MDSLSSMGFQTASFFLILLFLFYHLPCVPSQQERSRLCKPFQCGDITVGFPFWGENRQSDCGHFSLKLNCNKPSNTTSLTISGHNYSVLHIDNKSNILSLSRQDFSGPFCSASFSSTPLRSDLFQNLQPYRNLTVFYMCDPRRHFFGNFTCPVKGLGSVVQNSTYRKLCDKSFSVTVPTSYVPEEEALNLTHLESVLRKGLEVKLKISEMSGQECVTTDGNSGFTRFCCTNVSGPEISCLTSITTMNNGTYSDNRPFLVTIGTAFYLNERRIAKAARIQHLEALGTLRGGRLRDGRKVAVKVLKDSKGNCEDFINEVASMSQTSHVNIVTLLGFCYEGSKRAIIYEFLENGSLDQSLNLDVSTLYGIALGVARGLEYLHYGCKTRIVHFDIKPQNVLLDENLRPKVADFGLAKLCEKQESILSLLDTRGTIGYIAPELFSRMYGSVSHKSDVYSYGMLVLEMIGARNKERVQNADPNNSSAYFPDWIYKDLENFDNTRLLGDGLTREEEKNAKKMILVGLWCIQFRPSDRPSMNKVVEMMEGSLDSLDPPPKPLLHMPMQNNNAESSQLSVESSIYSEV

SEQ ID NO: 10210 - protein, 311 aa, Bacillus anthracis str. 'Ames Ancestor'
MKKKIGLLVMAYGTPYKEEDIERYYTHIRRGRKPSPEMLEDLTERYRAIGGISPLATITLEQAKKLEKRLNEVQDEVEYHMYLGLKHIEPFIEDAVKEMHNDGIQDAIALVLAPHYSTFSVKSYVGRAQEEAEKLGNLTIHGIDSWYKEPKFIQYWVDAVKSIYSGMSDAEREKAVLIVSAHSLPEKIIAMGDPYPDQLNETADYIARGAEVANYAVGWQSAGNTPDPWIGPDVQDLTRELNEKYGYTSFVYAPVGFVAEHLEVLYDNDFECKVVTDEIGAKYYRPEMPNASDAFIDCLTDVVVKKKESVM

SEQ ID NO: 10211 - protein, 394 aa, Rickettsia typhi
MAKAKFERTKPHVNIGTIGHVDHGKTSLTAAITIILAKTGGAKATAYDQIDAAPEEKERGITISTAHVEYETNNRHYAHVDCPGHADYVKNMITGAAQMDGAILVVSAADGPMPQTREHILLAKQVGVPAMVVFLNKVDMVDDPDLLELVEMEVRELLSKYGFPGNEIPIIKGSALQALEGKPEGEKAINELMNAVDSYIPQPIRATDKPFLMPIEDVFSISGRSTVVTGRVESGIIKVGEEIEIVGLKNTQKTTCTGVEMFRKLLDERQSGDNVGILLRGTKREEVERGQVLAKPGSIKPHDKFEAEVYVLSKEEGGRHTPFTNDYRPQFYFRTTDVTGTIKLPFDKQMVMPGDNATFSVELIKPIAMQEGLKFSIREGGRTVGAGVVTRINN

SEQ ID NO: 10212 - protein, 298 aa, Candida albicans SC5314
MVVGESRAELLNWLNSTLGLNYTKIEQCGSGAAFCQLMDTIVGDVPLSKVKFNAKTEYEFRHNYKILQHVFVKNSITKTIDVEKLIRCKLQDNLELLQWIKRYASSNNVPMKTTVARQPPKQTTKPTTSSPGSSPINAGPSAAPLISKPRERKSNTPIGSRKTSSNGPINLTPTAVRSTNIAASKNNNRSGNGTIVNNGHVGAVSASEPEAVDAAAVGAAAAAAAPIDSGATSSIPEDFAIYSQHVESERDFYFNKLRAIEILVQHAKEMEGLSGDVLQFANEIEKIMYEEYVEDDEF

SEQ ID NO: 10213 - protein, 211 aa, Zea mays
MFADAGFSFSAYSSSPPGPAYSYSYSYSSSPTVLSHPHPDHSSFSSPPSSAAPAQPPPPPLPLPLPLLHQQHQHQHQHQAAAAVATASNDDDDDAMYHHLGDMGQPSLISEYDLGAEGDLFKAPEPIIEEPLLALDPVAAAISMMSGGDNAMDDSIKVSDMRLSEVLYECEKELMEKSAIEETISELLDVKIPMLQVEERPGELRASSSST

SEQ ID NO: 10214 - protein, 248 aa, Oryza sativa
MAVFYHRQRHRRKRSTRLRIRCEEKPSPLHMAGEGRGRVVSRLSCGARMASPPPGDDEAARALALEQCERDFNAVIDRMLNLNLDGDDAAASSAASPEPPAPQAAPAPEVAAAAAVDGAARGDRGYWVETMMRELWAAASMDDARERGARVLDAFGAAVGAGTAARLDAASRQIGFLKRAVLFHHRLRTAQEKAQRELRWQLDDYREQVRRLEASNYALSLHLRQADLRRGGGGGGAMPHGPGNPEIF

SEQ ID NO: 10215 - protein, 395 aa, Rickettsia bellii
MAKAKFERTKPHVNIGTIGHVDHNETSLTAAITMVLGKDNKDIKVKKYDEIDAAPEEKERGITISTAHVEYETMSRHYAHVDCPGHADYVKNMITGAAQMDGAMLVVSAADGPMPQTREHILLAKQVGVPKMVVFLNKVDMVDDPDLLELVEMEVRELLSKYDFPGDEIPIIRGSALQALEGKPEGEKAIHELMDAVDSYIPQPIRETEKPFLMPIEDVFSISGRGTVVTGRIEAGKVKVGEAVEIVGIKATQTSTCTGVEMFRKLLDSGEAGDNVGILLRGIDREAVQRGQVLAKPGSITPHDEFEAEVYVLSKDEGGRHTPFTNNYRPQFYFRTTDVTGTIELPADKQMVMPGDNATFKVKLISPIAMQQGLKFSIREGGRTVGAGVVSKVIN

SEQ ID NO: 10216 - protein, 320 aa, Wolbachia sp.
LCDKKIQLGINLTKGLGAGALPDVGKGAAEESIDEIMEHIKDSHMLFITAGMGGGTGTGAAPVIAKAAREARAAVKDRAPKEKKILTVGVVTKPFGFEGVRRMRIAELGLEELQKYVDTLIVIPNQNLFRIANEKTTFSDAFKLADNVLHIGIRGVTDLMVMPGLINLDFADIETVMSEMGKAMIGTGEAEGEDRAISAAEAAISNPLLDNVSMKGAQGILINITGGGDMTLFEVDAAANRVREEVDENANIIFGATFDQAMEGRVRVSVLATGIDSRDNKSETSPISRQSEDSEKEKFKWPYSQSESMQDKTLETKPAE

SEQ ID NO: 10217 - protein, 654 aa, Zea mays
MGGCAIPRGRPGPGWMEITYSNSQPASRLERAVFPYKTAPTRPVPGRSNPIQTVPCPSLPRNAAMGTRPRGVVLAPWAVVLVLVLALRLAGASHVIHRSLEAEAAPSVPASIVSPLLRTGYHFQPPMNWINDPNAPLYYKGWYHLFYQYNPKGAVWGNIVWAHSVSRDLINWVALEPAIYPSIPSDKYGCWSGSATILEDGTPAILYTGIDRADINYQVQVLALPKDASDPLLREWEKPEEYNPVATPAAGGINATQFRDPTTAWRHAGHWRMLVGSVRGARGMALVYRSRDFRKWTKAKHPLHSAALTGMWECPDFFPVSGPGLQAGLDTSAPGTKYVLKSSLDLTRYDYYTIGSYDGGKDRYYPDDPAGDYHHRRRYDYGNYYASKTFYDPVERRRVLLGWANESDSVPDDKAKGWAGIHAIPRKIWLDPTGKQLLQWPIHEVEKLRGKAVSVDAKLVKPGDHFEVTGIATYQADVEVSFELELEAGTSLLEKAEAFDPAYDDDAQKLCGVKGADARGGVGPFGLWVLASADLQERTAVFFRVFRDGHGKPKVLMCTDPTKSSLSPDLYKPTFAGFVDADISSGKITLRSLIDRSVVESFGAGGKTCILSRVYPSIAVGKDAHLYVFNNGEVDVTVSGLTAWEMKKPLMNGA

SEQ ID NO: 10218 - protein, 497 aa, Triticum aestivum
MASPKFKPVEECSSEGRSGQTVAADFDGTLLRSSNAFPYYLLVALEAGSVLRAVALLLSVPFVYVTYIFFSESLAISTLVYISVAGLKVRSIEMAARSVLPKFYAQDVHPESWRVFRSFGKRYIITASPRVMVEPFAREFLGADRVVGTELEVGKSGKATGFMVKPGVLVGEHKKQAVVKELGDAVPDVGMGNRATDFNFMSICKEAYLVTSRKYSPVPKNQLLTPLILHDGRLVQRPTPLVALVTFLWMPFGFALALLRVYINLPLPERIVFYIYHMMGIRLIVKGTPPPPPKKGSPGVLFVCNHRTVLDPIEVAVALGRKVSCVTYSISKFSELISPIKAVALTRERDKDAENIRRLLEEGDLVICPEGTTCREPYLLRFSALFAELTDRIVPVAINTREHMFHGSTVRGFKLMDPYFFFMNPRPVYEVTFLNMLPKELTCGGGKSPIEVANYIQKTLSDQLGFECTTITRKEKYGILAGTDGRVPSKNKDKEKN

SEQ ID NO: 10219 - protein, 355 aa, Comamonas testosteroni
MSSEATTTASRYHPLRVRAVIDETHDTKSIVFEVPEALAEQFSYRPGQFLTLRLPIEGRYVPRCYSMSSAPMLDDALRVTVKRVDKGRGSNWVCDRVQVGDSIELMPPSGLFSPRNLSQNFLLLAGGSGITPVFSILRTVLKQHQGNVVLFYANRDERSVIFKKDLQQLAAEYPDRLQVIHWLDSVQGAPSQKQLAAWATPWVADAGQAFICGPGPFMDAAQTAMIEAGMPAEQVHVERFVSLPDEETLLLMQEATAPVEAAVDQALVQLRLDGEEYEFNCSGTETILEAGLRAGINVPFSCQAGMCASCMCQVQDGSVHLRHNEVLDAKDLSKKWTLACQSVPTSEKLRVKFPE

SEQ ID NO: 10220 - protein, 382 aa, Medicago truncatula
MLTQKMADAEDIQPLVCDNGTGMVKAGFAGDDAPRAVFPSIVGRPRHTGVMVGMGQKDAYVGDEAQSKRGILTLKYPIEHGIVSNWDDMEKIWHHTFYNELRVAPEEHPVLLTEAPLNPKANREKMTQIMFETFNVPAMYVAIQAVLSLYASGRTTGIVLDSGDGVSHTVPIYEGYALPHAILRLDLAGRDLTDSLMKILTERGYMFTTSAEREIVRDIKEKLAYVALDYEQELETAKSSSSIEKNYELPDGQVITIGAERFRCPEVLFQPSMIGMEAAGIHETTYNSIMKCDVDIRKDLYGNIVLSGGSTMFPGIADRMSKEITALAPSSMKIKVVAPPERKYSVWIGGSILASLSTFQQMWISKGEYDESGPSIVHRKCF

SEQ ID NO: 10221 - protein, 247 aa, Glycine max
MAATEHRLSLEPEKKNLLRHHTEKHFTAGEIVRDIIIGVSDGLTVPFALAAGLSGANATSSIVLTAGIAEVAAGAISMGLGGYLAAKSETDHYARELKREQEEIIAVPDTEAAEVAETLAQYGIEAHEYAPVVNALRKNPQAWLDFMMKFELGLEKPDPRRALHSAMTIAIAYILGGVVPLVPYMFIQKAAEAVVFSVVVTLVALLIFGYAKGHFTGNKPFRSALETALIGAIASAAAFGLAKAFNP

SEQ ID NO: 10222 - protein, 120 aa, Wolbachia endosymbiont of Brugia malayi
MPIAELGLEELQKYVDTLIVIPNQNLFRVANEKTTFSDAFKLGDNVLHIGIRGVTDLMVMPGLINLDFADIETVMSEMGKAMIGTGEAEGEDRAISAAEAAISNPLLDNVSMKGAQRNID

SEQ ID NO: 10223 - protein, 299 aa, Anaplasma marginale str. St. Maries
MREIIDGKLVARGLLDRLRVSVDRLKAEHGIVPHLVVVIVGDDPASKLYVGNKQRKAEELGLQSRTIALEHDTSQEELLRIIDELNRDAAVHGILVQLPLPRHIDKELVINAISPEKDVDGFHNANAGKLATGQLDCMIPCTPQGCIHLIKTVKQDLAGSNAVVVGRSNIVGKPVALLLLYENCTVTVLHSASRNLEEHCLRADIIVAAVGKARFIRASWIKPGAIVVDVGINLVEESGKKRFVGDVEFEGLQDVPCSVTPVPGGVGPMTIAFLLVNTVLGSCKQCGVSYEDIKSSLLQ

SEQ ID NO: 10224 - protein, 170 aa, Triticum aestivum
  misc_feature (114)..(114): Xaa can be any naturally occurring amino acid
  misc_feature (130)..(130): Xaa can be any naturally occurring amino acid
  misc_feature (137)..(137): Xaa can be any naturally occurring amino acid
MAPTVMASSATSVAPFQGLKSTAGLPVSRRSNGASLGSVSNGGRIRCMQVWPIEGIKKFETLSYLPPLSTEALLKQVDYLIRSKWVPCLEFSKVGFIFREHNASPGYYDCRYWXTMWKLPMFGCTDATQXINEVEEXKKEYLTRTSHIGFTTSQVQCSTQCLKHGLQDPG

SEQ ID NO: 10225 - protein, 160 aa, Vibrio parahaemolyticus RIMD 2210633
MRDITPDICDQFEDQVTLLNLPLQNFGQRTAFHGEIVTVRCYHDNSKVREVLEQDGTGKVLIVDGHGSCQKALLGDQLAILGIENGWEGIIVYGAVRDVAQMSQMDIGVQALGTCPFKTEKRGVGEVNVTLTMLNQIVQPKHHVYADWNGVLISKEALDF

SEQ ID NO: 10226 - protein, 918 aa, Bifidobacterium adolescentis
MTTENEQITPADAAIVSSGTGTKGPEERDLPASLKEEMDLCLQILREVLGEFDENLLAKFDEVREHALKASDERFSGILTDTNPDQDDLQKVVDIIDKTDVHEAQLLARAFTTYFHLANLCEENYRVSVLHSRENAVDDTQAVDPVNEMTCAYHQLINEMGPARAKELLDQLEFHPVFTAHPTEARRKAVEGKIRRISQLLEAHKLLGGSDKKENSRRLFNEIDALFRTSPIALKKPTPVEEADTILDIFDNTLFYTIPQVYRRFDDWVLGDKAGLVPPVCPAFFHPGSWIGSDRDGNPNVTAKVSRQVARKFSDHVLGALEIETRRVGKNLTMEAETTPPSAELKSLWNHQKEMSERLTDKAALISTKELHRAVMLVMADRLKATIDRDADLMYHSCEDYIADLKTVQRSLAEANAKRSAYGPLQDLIWQAETFGFHMVEMEFRQHSVVHSRALEDIREHGLHGERGELQPMTHEVLDTFRALGSIQKRNGIKAARRYIISFTKSAQNIKDVYELNRLAFSHPEDVPTIDVIPLFEQLEDLQNSVDVLEEMIKIPEVQARLKATGGKMEVMLGYSDSSKDAGPTSATLALHSAQERIAKWAESHDIDLTLFHGRGGAVGRGGGPANRAVLAQPVGSVKCRFKLTEQGEVIFARYGNPVLAIRHVESVAAATLLQSAPSVEKRNTDMTKKYADMASKLDEAAHNRFLDLLNTDGFAPWFSTVTPLTEIGLLPIGSRPAKRGLGAKSLDDLRTIPWIFSWAQARINLAAWYGLGTACEQFGDLNTLRQAYEEWPLFSTFIDNIEMSLAKTDERIAKMYLALGDREDLNKKVLDEMELTRKWVLKIVGDEWPLQHRHVLGQAIRIRSPYVDALSVTQVLALGSLRKRVDKEELTHGQKENYTYLILCTVSGVAAGLQNTG

SEQ ID NO: 10227 - protein, 333 aa, Desulfovibrio desulfuricans G20
MAVTLGINGFGRIGRYLVRLLANDPELNTAVVNARADNESLARLFKYDSCHGTYPAEVKANSDGFTVNGKQIVVTRYGHNEWKWADYGVDIAVESTGTVKDRAGLALHMERGAKKTVISAPCADADLTVVMGVNDHLYDPAQHDVISNASCTTNCLAPVVKVLNDTFGVRHGLMTTVHSYTMSQRLLDGTHKDPRRGRAAAMSMIPTSTGAAKAVGLVIPELAGKLNGMAIRVPTPNVSLVDLTCELGKSATAEEINAALREAAATTLKGNMGYTEEPLVSCDYMGSTFGGVVDGPCTSVMEGNMAKLIIWYDNEAGFTNQLVRLLRKVGNSL

SEQ ID NO: 10228 - protein, 518 aa, Coxiella burnetii RSA 493
MMKRSVGAPALLFAAIGGIVGSGWLFGPYFASRLVGPSAILAWAVGGGLMMLIALTFAELGSSFPFTGGSVRYLQLSHGPLVGFTMAWIAWISSIAVAPVETLALLHYASNYLPWLMHNVDGQSVLTLPGLITAGFLLAFLCVINSIGVRYLTKTNAIIVGAKLAVPIFTAIVLLFFDFHATNFSSHGFATQGIKGILTALPAAGVIFSFIGYSPVIQLAGEAKNPQRSIPIAIIGALIICIVLYILLQVAFIGALNPASLQHGWQALSFKGDAGPFAGIAMTLGMVWFAKLLYLDAAISPFGTALIYTASTARLGFAMSEGGYLPSSLRKLNRLGVPHRMILLNFVIGLFLFLPFPTWQHMMSFLVSLLVFAYAVGPLSLVVLRKTLPDHARPFRLPMAKTISFLAFYICNLIVYWSGWDVVFKMIIAILVGYVLLGSYLLFKHDKSFNWQWRRFWWMVCYIAGLALISHYGSFGGNHLIPFGWDFIVIASFSASIFGLALYCGVEVRKGEISAAVV

SEQ ID NO: 10229 - protein, 490 aa, Corynebacterium glutamicum ATCC 13032
MTINVSELLAKVPTGLLIGDSWVEASDGGTFDVENPATGETIATLASATSEDALAALDAACAVQAEWARMPARERSNILRRGFELVAERAEEFATLMTLEMGKPLAEARGEVTYGNEFLRWFSEEAVRLYGRYGTTPEGNLRMLTALKPVGPCLLITPWNFPLAMATRKVAPAIAAGCVMVLKPARLTPLTSQYFAQTMLDAGLPAGVLNVVSGASASAISNPIMEDDRLRKVSFTGSTPVGQQLLKKAADKVLRTSMELGGNAPFIVFEDADLDLAIEGAMGAKMRNIGEACTAANRFLVHESVADEFGRRFAARLEEQVLGNGLDEGVTVGPLVEEKARDSVASLVDAAVAEGATVLTGGKAGTGAGYFYEPTVLTGVSTDAAILNEEIFGPVAPIVTFQTEEEALRLANSTEYGLASYVFTQDTSRIFRVSDGLEFGLVGVNSGVISNAAAPFGGVKQSGMGREGGLEGIEEYTSVQYIGIRDPYAG

SEQ ID NO: 10230 - protein, 122 aa, Zea mays
  misc_feature (28)..(28): Xaa can be any naturally occurring amino acid
  misc_feature (65)..(65): Xaa can be any naturally occurring amino acid
MARTQSDGAVAAVAAALLLAAAATTSEXVITCGQVSSAIAPCLSYARGTWTGPSATCCTGERNLXKSAASTGTNRPTDCNCLKNASRGVRSLNACNAVSIPSKRVVNIPYTMSTCTDCCNVN

SEQ ID NO: 10231 - protein, 565 aa, Saccharomyces cerevisiae
MKRTVISSSNAYASKRSRLDIEHDFEQYHSLNKKYYPRPITRTGANQFNNKSRAKPMEIVEKLQKKQKTSFENVSTVMHWFRNDLRLYDNVGLYKSVALFQQLRQKNAKAKLYAVYVINEDDWRAHMDSGWKLMFIMGALKNLQQSLAELHIPLLLWEFHTPKSTLSNSKEFVEFFKEKCMNVSSGTGTIITANIEYQTDELYRDIRLLENEDHRLQLKYYHDSCIVAPGLITTDRGTNYSVFTPWYKKWVLYVNNYKKSTSEICHLHIIEPLKYNETFELKPFQYSLPDEFLQYIPKSKWCLPDVSEEAALSRLKDFLGTKSSKYNNEKDMLYLGGTSGLSVYITTGRISTRLIVNQAFQSCNGQIMSKALKDNSSTQNFIKEVAWRDFYRHCMCNWPYTSMGMPYRLDTLDIKWENNPVAFEKWCTGNTGIPIVDAIMRKLLYTGYINNRSRMITASFLSKNLLIDWRWGERWFMKHLIDGDSSSNVGGWGFCSSTGIDAQPYFRVFNMDIQAKKYDPQMIFVKQWVPELISSENKRPENYPKPLVDLKHSRERALKVYKDAM

SEQ ID NO: 10232 - protein, 519 aa, Buchnera aphidicola
MKSKVVIFDTTLRDGEQALQASLSVKEKLQIALSLEKCGIDILEIGFPVSSPGDFKSVQTISKNIKNSRICSLARCIEKDIDAAGEAMSSSDSFRIHIFLATSTLHMESKLKKNFNEIIDMAVFSVKKALRYTDDIEFSCEDATRTTMDNLCRIVETLIKSGVKTINIPDTVGYTVPNELSCIIKNLLERVPNIHKSIISVHCHDDLGMAVGNSISAIQAGARQIEGTINGIGERAGNTALEEIIMAIKVREDILSVSTNINYKEIYRTSKIVSQICNMPIPSNKAIVGSNAFAHSSGIHQDGVLKNRKNYEIMEPSSIGLKEVKLNLTSRSGRAAVKHYMDEMGYNNSDYNIDELYIAFLKLADKKGQVFDYDLEALAFINKQQDEWEYFSLKFFSVQSISNSLSTASVKLLCGKKTYTESSTTSNGPVDAIYQALNRIACFPIILQKFQLVAKGKGKDALGQVDILVEHKKRKFHGVGLATDIIEASAQAMINVLNNIWKAKQVNKKLKILKDFKKK

SEQ ID NO: 10233 - protein, 363 aa, Buchnera aphidicola
MKKNYRIAVLSGDGIGPEVMQEACKILNVLKKYFFLSLEIQKFNIGGIAIEREGVALPKTTLLGCENSDSILLGSVGGKKWDNLPVEQRPERAALLPLRKYFNLFSNLRPAKLYPELKCLSPLRSDIVKNGFDILCVRELTGGIYFGEPKGFVNKNNTKYAFDTEIYHEYEIIRIAHLAFKLARSKKKKVCSIDKSNVLRSSILWGKVVESVSKKYPDVHLSHLYIDNAAMQIIKDPNQFDVLLCSNLFGDIISDECATITGSIGMLPSASFNEKNFGLYEPAGGSAPDIEGKNIANPIAQILSLSMLVRYGMNLNQIADKIDKAVNNVLKKGYRTSDISHDNNFLKTDEMGDLIVDSLINGK

SEQ ID NO: 10234 - protein, 490 aa, Pseudomonas aeruginosa UCBPP-PA14
MARFEEQKLYIGGRYVEASSGATFETINPANGEVLAKVQRASREDVERAVQSAVEGQKVWAAMTAMQRSRILRRAVDILRERNDELAALETLDTGKPLAETRSVDIVTGADVLEYYAGLVPAIEGEQIPLRETSFVYTRREPLGVVAGIGAWNYPVQIALWKSAPALAAGNAMIFKPSEVTPLTTLKLAEIYTEAGVPDGVFNVLTGSGREVGQWLTEHPLIEKISFTGGTSTGKKVMASASSSSLKEVTMELGGKSPLIIFPDADLDRAADIAVMANFFSSGQVCTNGTRVFIHRSQQARFEAKVLERVQRIRLGDPQDENTNFGPLVSFPHMESVLGYIESGKAQKARLLCGGERVTDGAFGNGAYVAPTVFTDCSDDMTIVREEIFGPVMSILVYDDEDEAIRRANDTEYGLAAGVVTQDLARAHRAIHRLEAGICWINTWGESPAEMPVGGYKQSGVGRENGLTTLAHYTRIKSVQVELGDYASVF

SEQ ID NO: 10235 - protein, 472 aa, Streptomyces coelicolor A3(2)
MASTSQAPSPGAGTAHPDHLGHVIFIAAAAAMGGFLFGYDSSVINGAVEAIRDRYDVGSAVLAQVIAVALIGCAIGAATAGRIADRIGRIRCMQIAAVLFTVSAVGSALPFALWDLAMWRIIGGFAIGMASVIGPAYIAEVSPPAYRGRLGSFQQAAIVIGIAVSQLVNWGLLNAAGGDQRGELMGLEAWQVMLGVMVIPAVLYGLLSFAIPESPRFLISVGKRERAKKILEEVEGKDVDFDARVTEIEHAMHREEKSSFKDLLGGSFFFKPIVWIGIGLSVFQQFVGINVAFYYSSTLWQSVGVDPADSFFYSFTTSIINIVGTVIAMIFVDRVGRKPLALIGSVGMVIGLALEAWAFSFDLVDGKLPATQGWVALIAAHVFVLFFALSWGVVVWVFLGEMFPNRIRAAALGVAASAQWIANWAITASFPSLADWNLSGTYVIYTIFAALSIPFVLKFVKETKGKALEEMG

SEQ ID NO: 10236 - protein, 92 aa, Methanocaldococcus jannaschii
MFSHTKKVGPTGRFGPRYGLKIRVRVRDVEIKAKKKYKCPVCGFPKLKRASTSIWVCGKCGAKIAGGAYTPETGAGKAVMKAIRRIVERKEE

SEQ ID NO: 10237 - protein, 89 aa, Methanothermobacter thermautotrophicus str. Delta H
MARTKKVGITGRFGPRYGRKAKRAVKKIEEEMKRKHVCPSCDRPGVKRESRGIWKCRKCGAVFTGGAYLPVTPMGKTAARNIKRIVGGK

SEQ ID NO: 10238 - protein, 754 aa, Lycopersicon esculentum
MGSLLRMNRLLSSIVESCNCIIDPQLPADDLLMKYQYISDFFIALAYFSIPVELIYFVKKSAVFPYRWVLVQFGAFIVLCGATHLINLWTFNMHTRNVAIVMTTPKALTALVSCITALMLVHIIPDLLSVKTRELFLKKKAAQLDREMGIIRTQEETGRHVRMLTHEIRSTLDRHTILKTTLVELGRTLALEECALWMPTRTGLELQLSYTLRHQNPVGLTVPIQLPVINQVFGTNHVVKISPNSPVARLRPAGKYMPGEVVAVRVPLLHLSNFQINDWPELSTKRYALMVLMLPSDSARQWHVHELELVEVVADQVAVALSHAAILEESMRARDLLMEQNVALDLARREAEMAVRARNDFLAVMNHEMRTPMHAIIALSSLLQETDLTPEQRLMVETILKSSNLLATLINDVLDLSRLEDGSLQLDIGTFNLHALFREVHSLIKPIASVKKLFVTLSLSSDLPEYVIGDEKRLMQILLNVVGNAVKFSKEGNVSISAFVAKSDSLRDPRAPEFFAVPSENHFYLRVQIKDTGIGITPQDIPNLFSKFTQSQALATTNSGGTGLGLAICKRFVNLMEGHIWIESEGLGKGSTAIFIIKLGIPGRANESKLPFVTKLPANHTQMSFQGLKVLVMDENGVSRMVTKGLLTHLGCDVTTVGSRDECLRVVTHEHKVVIMDVSMQGIDCYEVAVVIHERFGKRHGRPLIVALTGNTDRVTKENCMRVGMDGVILKPVSVYKMRSVLSELLEHGVVLES

SEQ ID NO: 10239 - protein, 618 aa, Desulfovibrio desulfuricans G20
MCGIFGIISQLVPPSKRELETSCELLAHRGPDGYGYFIKGPVGFAHRRLSIIDIAQGSQPMSTQEGELTITYNGEIYNFRHIKASLVAKGYSFQTNSDTEVILAAYKEWGTECVQHLRGMFAFAIADHIRQTVFLARDPFGIKPLVYRESSLGFAFSSELPALVRLKKWPSVTVSPKAVSLFFRHQYIPAPYTIYNETQKLPPAHAMLVDFNGCIQQKWRYWTPAFHPSVTYSLQDAIKDAHNSVTESIDAHTLSDVPIGVFLSGGIDSTLVAARLAQRHSRSIPAFTIGYKESDFSELPYAQHAADKLGLKLYAQTLDEKALKFAPEILSHYGEPFGDSSVIPTWHVCKLASEHVPVCLSGDGADELFGGYQKYQIWSESTPWRQLQLAGSAIAKRKLRTAWWMLRRASRSFCDDKAFWLDHVQYYPPQGIRQLTHPDMHPYANAFAPAFDEPFLNIDKLGRFEYAQRMDLLSYLPDCLLAKVDLASMAHGLEVRPALLDKYVFQLAATLPTDVKLHPQKGGKVVLKELLLRQGFSEEFVYRPKQGFALPLRHWFISGQPANNMLCELVSSYKRELSEHLTVSDIERMLTAHSPACDYSGPLWLAFAFTCWVANTSK

SEQ ID NO: 10240 - protein, 560 aa, Arabidopsis thaliana
MASSTALICDTEAWKDLKGHVEDIKKTHLRDLMSDANRCQSMMMEFDGLLLDYSRQRATVETMDKLLNLAKAAQLTEKISRMFNGEHINSTENRAVLHVALRAPKDAVIKADGKNVVPEVWNVLDKIKEFSDKIRSGSWVGATGKPLKDVIAIGIGGSFLGPLFVHTALQTDPEALESAKGRQLRFLANIDPVDVARNISGLNPETTLVVVVSKTFTTAETMLNARTLREWITAALGASAVAKHMVAVSTNLALVEKFGIDPNNAFAFWDWVGGRYSVCSAVGVLPLSLQYGFSMVEKFLKGASSIDQHFQSTPFEKNIPVLLGLLSVWNVSFLGYPARAILPYSQALEKFAPHIQQVSMESNGKGVSIDGLPLPFETGEIDFGEPGTNGQHSFYQLIHQGRVIPCDFIGIVKSQQPVYLKGEVVSNHDELMSNFFAQPDALAYGKTPEQLQKENVSENLIPHKTFSGNRPSLSLLLPELTAYNVGQLLAIYEHRVAVQGFVWGINSFDQWGVELGKVLATQVRKQLHSSRTQGTAPEGFNYSTTTLLKRYLETSSEPQM

SEQ ID NO: 10241 - protein, 93 aa, Magnetospirillum magnetotacticum MS-1
MLQSRRSPVVVDFWAEWCGPCRQIGPALEEISVDLQGKVKIAKVNVDENPGIASTYGIRSIPTLMIFKDGKLASQKVGAAPKGDLSRWIQASA

SEQ ID NO: 10242 - protein, 560 aa, Arabidopsis thaliana
MAPSPALICDTEAWKDLKGHVEDIKKTHLRDLMSDVNRCQSMMMEFDGLLLDYSRQRATVETMDKLLNLAKASQLTEKISRMFNGEHINSTENRSVLHIALRAPKDAVIKADGMNVVPEVWNVLDKIKEFSDKIRSGSWVGATGKPLKDVIAIGIGGSFLGPLFVHTALQTDPEALESAKGRQLRFLANIDPVDVARSISGLNPETTLVVVVSKTFTTAETMLNARTLREWITAALGASAVAKHMVAVSTNLALVEKFGIDPNNAFAFWDWVGGRYSVCSAVGVLPLSLQYGFSMVEKFLKGASSIDQHFQSTPFEKNIPVLLGLLSVWNVSFLGYPARAILPYSQALEKFAPHIQQVSMESNGKGVSIDGLPLPFETGEIDFGEPGTNGQHSFYQLIHQGRVIPCDFIGIVKSQQPVYLKGEVVSNHDELMSNFFAQPDALAYGKTPEQLQKENVSENLIPHKTFSGNRPSLSLLLPELTAYNVGQLLAIYEHRVAVQGFVWGINSFDQWGVELGKVLATQVRKQLHSSRTQGTAPEGFNYSTTTLLKRYLETSSEPQM

SEQ ID NO: 10243 - protein, 742 aa, Thermobifida fusca YX
MIEPLQPGDPGRIGPYRLVSRLGAGGMGQVFLARSPGGRPVVVKVILPEYANDDEYRIRFAREVEAARRVGGFHTAQVIDADPTADPPWMATAYIPGPSLRKAVTERGPLYGNNLRTLAAGLVEGLAAIHACGLVHRDFKPSNIVLAADGPRVIDFGVARPLDSSVMTQSGAVIGTLAYMSPEQTDGSQVGPASDVFSLGTVLAFAATGRSPFMADSIGEIIARISGPPPELPELPDDLRELVYACWEQNPDLRPTTAELLAQLSTDHTGDDWPPPHLSDLIGSMLPLGATTSPNPSLAIEPPPPSHGPPRPSEPLPDPGDDADEPSAEKPSRTLPEPEPPELEEKPIQVIHEPERPAPTPPRPREPARGAIKPKNPRPAAPQPPWSPPRVQPPRWKQLITKKPVAGILTAVATAGLVVSFLVWQWTLPETPLRPDSSTAPSESADPHELNEPRILTTDREAVAVAFSPGGSLLAGGSGDKLIHVWDVASGDELHTLEGHTDWVRAVAFSPDGALLASGSDDATVRLWDVAAAEERAVFEGHTHYVLDIAFSPDGSMVASGSRDGTARLWNVATGTEHAVLKGHTDYVYAVAFSPDGSMVASGSRDGTIRLWDVATGKERDVLQAPAENVVSLAFSPDGSMLVHGSDSTVHLWDVASGEALHTFEGHTDWVRAVAFSPDGALLASGSDDRTIRLWDVAAQEEHTTLEGHTEPVHSVAFHPEGTTLASASEDGTIRIWPIATE

SEQ ID NO: 10244 - protein, 490 aa, Bradyrhizobium sp. BTAi1
MFDFDDLSQAIARQTVLCVGDLMLDEFVYGEVSRISPEAPAPVIAVQRSEINIGGAGNVARNIAALGARCIFVGLVGDDAAAAQLEAELAREPGIETVLVRDASRPTTRKVRFVSEHFSAHMLRADWERAAPASGEIEQRLIDAIVPRLARADIVLLSDYAKGVLTARVLRNVIDAARRAGKRVIVDPKSANLAIYRGASVLTPNRKEFSEATRSRAETEQEIAAAAQDAIYLADCEAILVTQSERGMTLVPRQGDAIHVPAYPVKVRDVSGAGDTVVAVLAATLAAGAGWEEALRMASAAAAVAVSKQGTASVTSAELRRKILPHAYRAAEEKIIAGDGEILARVEGWRSEGLRVGFTNGCFDILHPGHVKVLTAARAACDRLVVGLNSDASVKRLKGESRPVQDERARAEVLAALEAVDLVAIFTEDTPLRLIELVRPSVLVKGGDYTREQVVGHEVVEAGGGEVILIDILKGHSTTALVDRARSDGR

SEQ ID NO: 10245 - protein, 635 aa, Coccidioides immitis RS
MPMLKDPSKKYKKFKPIQLPNRTWPNKTLDKPPRWLATDLRDGNQSLVDPMDGDQKHKYFKMLVDIGYKEIEISFPSASETDFDFTRRLIETPNEVPDDVWLQVLCPCREDFIRRTVDSLKGAKKAILHLYLATSECFRRIVFGMTKQQSVELAVKCTKYARSITKDDPSTAGTEWRFEFSPETFSDTDPEFVIEICEAVKAAWEPTVEEQIIFNLPATVEMSTPNVYADQIEYFCTHISEREKVCVSLHPHNDRGCAVAAAELAQMAGADRVEGTLFGNGERTGNVDLVTLALNLYTQGIHPNVDFSDINSVIKVVEESNKIPVNERWPYGGQLVVCAFSGSHQDAIKKGFKEREAGKPDDRWQMPYLPLDPEDIGRNYEAIIRVNSQSGKGGVAWIILRMLELDLPRGLQIAFSKVVQKDADRLGRELKPTEIVALFEEAYHLKKNPRFSLIDYNITTDRSQTPTPPEPGKAVSTEHLKRKFTGIVEIDGTQHGIVGVGNGAISSLTNALKSLGIDLDVVEYKEHAMGSDRDTKAATFIECVAAGSNQRVWGVGIHHDVVRASLTALLSAASSFLSSRAPTPFHPVRKSLTQAEIQALEQLNGTIPNTLTGVVNTAKQQKVDIDALEAAANKI

SEQ ID NO: 10246 - protein, 550 aa, Zea mays
  misc_feature (144)..(144): Xaa can be any naturally occurring amino acid
MGMSAASHLCASSSLRALTVLFVLAALVSDVEGRHHRHVCPPYFSCGGLSNISYPFRRQGDPSGCGVQSYELVCTDTDATIRIGSGTYKVLSINSTYSYFWVVDADLDIQSSCPLPRWDYHARRTKTHIVRGLSSAMIPLFLLXMDYSGWAIFVNCSQPIENGVYRPVSCLSNSSFIYLVTGYWYEYDGYVFALGLEPSCGYLAMTPLGGPGMPVPMNTSYPDVVKFMRSGFALRFPLSYGDNIRECLAENTRAFHEEPRNSTGIREQILDILTFETLWFVLMPLAVFVFLAYKYWKTRITIDAVEKFLRMQHMLVPMRYAYTNVIAITGHFRDKLGQGGYGTVYKGVLQPGEVHVAVKMLGNSNCNGEEFISEVATIGKIHHVNVVRLIGFCSEENIRALIYEFMPRGSLDKYIFSSEKTFSWDKLNEIALGIARGLNYLHHGCDMQIVHFDIKPHNILLDSNFVPKVADFGLAKLFPKDDNFVPLSAMRGTIGYIAPEMVSRSFGVISSKSDVYSFGMLLLEMTGGRRNADPHAGSSSQAYYPSLVYK

SEQ ID NO: 10247 - protein, 421 aa, Clostridium tetani E88
MNVEELNPFKNVQKIMKKICEDLNLNESVYELIKEPSRIVEVNIPVKMDNGSIKVFKGYRSQHNNSIGATKGGVRFHQGVNLDEVKALSIWMTLKCAIANLPFGGGKGGIIVDPKTLSKGELERLSRGYVEKLYEVLGEDLDIPAPDVNTNGEIIAWMADEYNKLSRQNAWGTFTGKPVELNGSKGRTEATGLGVAIVAREALKKLNRNIENSSVAVQGFGNVGSHAALCIENLGGKIVSVSEWDREKGFYAIYDEKGLNIKELISYFNENGTLLDFPRTSKISEEEFWSLSVDVLVPAALENSINTNNANLINAKLVCEGANGPVTPAADEILEKKGIEVTPDILTNAGGVIVSYFEWVQNLDNYYWNEKDVKTREEEFLVEGFNNVWFMKDKFNCTMRNAAYMYAINKLAKSMKARGWY

SEQ ID NO: 10248 - protein, 138 aa, Hordeum vulgare
MSACVMASLALKPSSSPLLQRSKLGGVRPSARPSLVIVAKKAKKVQTAQPYGPGGGVAFKEGVDASGRVAKGKGVYQFADKYGANVDGYSPIYTPEEWSPSGDVYVGGKTGLFLWAVTLAGILLGGALLVYSTSALAS

SEQ ID NO: 10249 - protein, 400 aa, Anaplasma phagocytophilum
MSLHVYLPDQSVIRPRITVLGVGGAGGNAVNNMIQSCLQGVNFVVANTDAQALDCSLSEKKIQLGMNLTKGLGAGSLPEIGRGAAEESIEEIIAEISDSNMLFITAGMGGGTGTGAAPVIAKAAKDSKILTVGVVTRPFHFEGAHRMKTAEYGLEELQKHVDTLIVIPNQNLFRIANENTTFADAFKLADTVLHTGVRGITDLMVMPGLINLDFADVKVVMSEMGKAMMGTGEAEGEHRAVAAAEAAISNPLLDNISMKGARGILINITGGMDMTLFEVDAAANRIREEVDEEANIIFGSTFDENSAGRIRVSVLATGIDSTHTSNPKGRMTRGSESDLGVSDVGGDSARVGVSGYARAGQESSGAPAEADLFSRGSGNRNSSLNWNSKSFDVPAFLRKK

SEQ ID NO: 10250 - protein, 385 aa, Brassica napus
MVAHKETVCVTGASGFIGSWLVMRLLERGYFVRATVRDPGNLKKVQHLLDLPNAKTQLTLWKADLSDEGSYDDAINGCDGVFHIATPMDFESKDPENEVIKPTVNGVLGIMKACDKAKTVRRIVFTSSAGTVNVEEHQKNVYDENDWSDLDFIMSKKMTGWMYFMSKTLAEKAAWDYAKEKGIDFISIIPTLVIGPFITTSMPPSLITALSPITRNEAHYSIIRQGQYVHLDDLCNAHIFLYVDPRVRGRVGCSSHDATILTISEFLRQKYPEYNVPSTFEGVDENLKSIMFSSKKLIDMGFNFKYSLEDMLVESIETCRQKGFLPVTLPEHLKSEDKVPGSDDNKEIKNGSAGLTDGMVACKKTEPGMAGEKADSHMSAQQICA

SEQ ID NO: 10251 - protein, 452 aa, Rickettsia rickettsii
MVLNIKAPENIVLKPTITVFGVGGAGSNAVNNMISANLQGANFVVANTDAQSLEHSLCTNKIQLGVSTTRGLGAGASPEVGALAAQESESEIRNYLENSNMVFITAGMGGGTGTGSAPVIARIAKELGILTVGVVTKPFHFEGGHRMKTADKGLIELQQFVDTLIVIPNQNLFRIANEQTTFADAFKMADDVLHAGVRGVTDLMIMPGLINLDFADIKAVMSEMGKAMMGTGEASGEDRAIKAAESAISNPLLDHSSMCGARGVLINITGGSDMTLFEVDNAANRIREEVDNLDANIIFGSTFNPELKGMIRVSVVATGIDADKVPTYKPAIAETTNIVPEETYNKAIAQPTQIEEMPDFNSYSTKNIEITDSPINQNLIGNEKELGLHANTFNKSEDDSPKPSFLGKIWGSLRASNNQTLERKNVVVSTLDQDNKESDIHDIPAFLRKQRD

SEQ ID NO: 10252 - protein, 333 aa, Nitrosospira sp. KAN8
MTIKVGINGFGRIGRMVFRAAVQNFPDIEVVAINDLLEPDYLAYVLQHDSVHGRFKGDVSIEDSTLIVNGKRIRLTAIKDPAELKWGEVGAEVVVESTGLFLTKESCQKHIAAGARKVIMSAPSKDDTPMFVYGVNNDTYDGEAIISNASCTTNCLAPVAKVLNDTFGVKRGLMTTVHAATATQKTVDGPSNKDWRGGRGILENIIPSSTGAAKAVGKVIPELNTKLTGMAFRVPTSDVSVVDLTVELEKEASYDEICDAMKKASEGSMKGVLAYTDQKVVSTDFRGESATSIFDAEAGMALDGNFVKVVSWYDNEWGYSSKILEMVRVVAGK

SEQ ID NO: 10253 - protein, 267 aa, Arabidopsis thaliana
MASGAIRRFQDRVLGPSRTGISSSTSEIWLLGVCYKISEGESSEEADAGRVLAAFRQDFSSLILMTYRRGFEPIGDTTYTSDVNWGCMLRSGQMLFAQALLFQRLGRSWRKKDSEPADEKYLEILELFGDTEASAFSIHNLILAGESYGLAAGSWVGPYAVCRSWESLARKNKEETDDKHKSFSMAVHIVSGSEDGERGGAPILCIEDVTKTCLEFSEGETEWPPILLLVPLVLGLDRVNPRFVTLSKRFLDDKCYRRQEFSFSFSS

SEQ ID NO: 10254 - protein, 922 aa, Cytophaga hutchinsonii
MSALTVTQDKLGKTYHNLEFLLNCFKEVLIENGEEELARYIPWINKKGKASPDTITEKHIQVYSIAFQLLNMAEENGAVKLRRKHESEKSLSSVNGLWGKSLLMLKQKKITPEQIAEELCNVRIEPVLTAHPTEAKRTIVLEHHRQLYLLFLRWEDSTYTELEKSEIRREIKLTLDRLWRTGEIYLEKPDLSSERSNVLHYLTTVFPEVVSILDRRLGMAWEQMGFDPELIITYTKLPKISFGNWVGGDRDGHPLVTSEVTRETLELFRLNAFILMHRHLEKLEKNLSFTCLFKETIKPLQKRINELVEETGTQELLEKESNNREIFRFYIELLIMKLPLEENKGDGLRLNEKTYSYNESQKLIEDLVILRDALLAFGARAIAYNDVRDMVRLVQTFGFHLAHLDIRQNSKFHDNAISQLMNAASMDGDRFLTLNEEERCKFINKELLSLRPFSYPNTTLGPEAEAVTSCLRVVAEHVEKYGTKALGSLIVSMTRSTSDLLLVYLLAREAGLLIKTEKGIVCKLPVVPLFETIEDLQGSPHILSKFLEHPITKNSLEYHRTCTGEKEKVQQVMIGYSDSNKDGGILASQSNLSNTQLKLVDVGKKYGARIRFFHGKGGSISRGAGPTQWFIKTLPHNTIQGDMRLTEQGETISQKYANKINAAFNLELLEAGTAGYTILHKYTKHKKNRFDKHLDYLAEKSKEFYTNLITDKNFITFFGQATPIDVIEQSKIGSRPARRSGKRTLADLRAIPWVFSWAQSRFNITSWYGVGNALETFYKEQPEEFEYLKKMASSDTIIRYIFTNVDTSLAATDEKIFRSYATLVEDEEVRAEILDMIVKEYNKTKKMLALLFDNPFEVRRSFHHYSNVLRAEALNDLHYDQIELLRKWRKMNTQPQSEKANKILTELLLTVNAIAGALRNTG

SEQ ID NO: 10255 - protein, 335 aa, Nitrosomonas sp. CNS332
MAIRVGINGFGRIGRMVFRASIEEFDDIEVVAINDLLEPDYLAYMLLHDSVHGRFKGDVSVDGNNLIVNGKKIRLTATKDPEELNWGEVKVDVVVESTGLFLTKELCEKHIKAGAPKVVMTAPSKDDTPMYVYGVNDKTYQGEAIISNASYTTNCLAPIAKVLNDTWGIKRGLMTTVHAATATQKTVDGPSNKDWRGGRGILENTIPSSTGAAKAVGVVIPELNKKLTGMAFRVPTSDVSVVDLTVELEKDASYDEIRKAMKTASEGSMKGVLGYTDQKVVSTDFRGETHTSVFDAEAGIQLDKNFVKVVAWYDNEWGYSCKVLEMVRVIAGRNN

SEQ ID NO: 10256 - protein, 383 aa, Geobacter sulfurreducens PCA
MFEFDESIDQCAKIKVVGVGGSGGNAVNTMIDSQVGGVDFLVANTDVQALRISKAPTKIQIGRQLTKGLGAGADPSKGREAALEDREQVAELLKGADMIFVAAGMGGGTGTGAAPVIAEVAKEVGALTVGVVTKPFSREGKQRLSKADEGIRELKKHVDSLIVIPNDRLIGLAGKSMSIIDAFKPADDVLRQAVQGISDLITTSGFINVDFADVKAIMSERGMAMMGIGIASGENRAVEAALRAISSPLLEEVDISGAKGVLVNIAGSSSMTMDEFEAVNRSIHEKVHEDANIIIGVSIDETLGDQLKVTAIATGFGDRFDMEKARQELKNVTPFGKAEVNRDIPTFVRNQQTRESSLSRQKAFFIDDEDQYDIPTFLRKSVD

SEQ ID NO: 10257 - protein, 111 aa, Pseudomonas putida
MQVNISGQHVEVTQPLRDYVLEKLARVESHFDKITNVQVIMKVEKLQQTVEATLQIPGGEVVANAEHEDMYAAIDALADKLRPPTEKTQGKTAKPAARCSCPLIPLIHDPT

SEQ ID NO: 10258 - protein, 122 aa, Brassica napus
KLVDSYLAEAAIDGGLTLPELISLAEALPSHARTTEDGLYRAIDTYLKAHPQVMKQERKELCRLIDSRKLSPEAALHAAQNDRLPVRSIIRVLFTEQTKLSRHTDWSPSGSHYSEPGSGPQC

SEQ ID NO: 10259 - protein, 335 aa, Nitrosomonas sp. OZK11
MTIRVGINGFGRIGRMVFRASIEEFDDIEVVAINDLLEPDYLAYMLVHDSVHGRFRGDVSVSGNNLVVNGKPIRLTAVKDPAELKWDEVNVDVVVESTGLFLTKQDCEKHIKAGARKVVMSAPSKDDTPMYVYGVNDKTYQGEAIISNASCTTNCLAPIAKVLNDTWGIKRGLMTTVHAATATQKTVVAPSNKDWRGGRGILENIIPSSTGAAKAVGVVIPELNKKLTGMAFRVPTSDVSVVDLTVELEKDASYEDICNAMKAASGGSMKGVLGYTNQKVVSTDFRGETCTSVFDAEAGIQLDKNFVKVVAWYDNEWGYSCKVLEMVRVIAGHGR

SEQ ID NO: 10260 - protein, 1060 aa, Ralstonia eutropha JMP134
MGMTCAAIALILLLSAHVLETLHSQERARVKAERQAALHAVTRMIGMLREDGETRLRTIIENPYQIDLARRIAAAPGDQALRAEYEAWITPVFRSRGFEGYSLISPQRVIVAASSRAYVGKPVSTAVVIEALARAQHADYAATRPNRSPMPILTAEGEQPPGTLFQQVCARIGTPEAPIAFLCLRTDPQDRLFEILRVGWSGKSGKAYVIDAAGRLLSPGLPGDRALQPSAKPRVSAPFGLWAQVPTRPRGGGPSVPADGNGQLTELAAALIDARDGETRVFDHYLDYRGRRVIGVAHWFPDTAMGVIVELDTDEAYRSFHLARQAIIALTALAICLILALTALHWRSRREMRQNAERWQAFRKNVPAGLAYMSPGGRVDMANDIYCEFAGLPLHDLLGRNAWTALPDRRVAGICERGHADVLRTGQTHVDEHTLNVRAHGQRVYRVARFPVRSRHDAVIMGVGTVVTDISEQERTRQALENLASTLEWKVAERTRELMEARESAEAAARAKSQFLANMSHEIRTPLNGISGMTHLAIGEPDSGRQGQYLARIEESCQHLQRIVNDILDFSKMEAGMLAVDAASFPLARLLDHVLSLFREQVRKKGLVLQMEVDPALPLHVIGDSQRIGQILINLLGNALKFTDAGEIRLRVRACNADDDTVAVRFEVSDTGIGIAEDALLVLFSPFHQADSSAARRFEGTGLGLAISKRLAELMGGRITVQSQAGVGSLFTLEIGLGVSKPPAWQGRAARLPAVTPKQDAVQSSAEHVHDDLPGAARTATPHALRGRTVLLVEDNPINQEVAQALLTQAGMQVTQANNGQHALGLLAQGRFDLVLMDVQMPMLDGLETTQRIRRDPRHASMPVVALTASALEDDRQRCLAAGMDDYVSKPIEPRKLYQVMARLVGGDAQSLQSAAAIMSTPAQAVAKVPCIVSLRAIPALDVGPALERLQGRREIYVGLVQRILAERMDFHRQLHQAVSEARYRDASLLAHNMHAILATLGAVELAPMLRTLERQLLDDRPDEALLSAFMDQFESLLSSLSTALKFVDAPTPTQSCAAE

SEQ ID NO: 10261 - protein, 398 aa, Aspergillus fumigatus
MIWANGANSDRLEFSTSKEVTVAPTFEDMHLKESLLRGIYAYGYESPSAVQSRAIVQICKGRDTIAQAQSGTGKTATFSIGILQVIDTVVRETQALVLSPTRELATQIQSVIMALGDYMNVQCHACIGGTNIGEDIRKLDYGQHVVSGTPGRVADMIRRRHLRTRHIKMLVLDEADELLNRGFREQIYDVYRYLPPATQVVVVSATLPYDVLDMTTKFMTDPVRVLVKRDELTLEGIKQYFIAVEKEEWKFDTLCDLYDTLTITQAVIFCNTRRKVDWLTDKMREANFTVSSMHGEMPQKERDSIMQDFRQGNSRVLISTDVWARGIDVQQVSLVINYDLPTNRENYIHRIGRSGRFGRKGVAINFVTSDDVRILRDIELYYSTQIDEMPMNVADLLS

SEQ ID NO: 10262 - protein, 410 aa, Ralstonia sp. JS705
MATHVAIIGNGVAGVTTAQALRAEGFEGRISLIGSEPHLPYDRPSLSKAVLDGSLERPPVLAEADWYGEANIDMLTGPQVTAINAETRTISLDDGTTLSADAIVIATGSRARTLALPGSQLGGVVTLRTYDDVQSLRDSWTPATRLLIAGGGLIGCEVATTARKLGLPVTILEAGDELLVRVLGRRIGAWLRGRLTELGVQVELGAGVAGFSGEGRLEQVLASDGRFFAADSALICIGAEPADQLARQAGLACDRGVIVDHCGATLAEGVFAVGDAASWPLRAGGRRSLETYMNAQRQAAAVAAAILGKAVSAPQLPVSWTEIAGHRMQMAGDIEGPGEFLLRGTLGSGAALLFRLQEGKLQAVVAVDAPRDFALATRLVEAHAAVEPARLADISNSMRDLVRAHSGDTA

SEQ ID NO: 10263 - protein, 378 aa, Schizosaccharomyces pombe
MSPTLVVDQENSEEFNTSSFEGPEKLLELWFSAPIKTNLSAGEKANLGLKAVSRNDWDDMLAQAQCKVLSVVNSEEIDAYLLSESSMFVFAHKIILKTCGTTTLLASLPRLLEIASSVGFDRPLRIFYSRKNFLYPERQLAPHTSWEEEVRYLQLFFPSGCSYVVGPTNKNHWHLFSDLADDYSLLEDSLDPEDETLEVLMTDMSPERSLQFYAPSLDVVRSARGDDYVREKNNLSGGHILGSYVADESGVRDLCSTSDKKAVLDAFQFEPIGFSSNMIYKDRYATIHVTPQEHCSYASFETNVSQFQFGRSISETIEKTVKTFGANKFCLTLFQAKGASQEKHFSAKLKSFSSYKREEFIVYDFPGYDLIFASFTAV

SEQ ID NO: 10264 - protein, 466 aa, Cyanophora paradoxa
MESAFAVGAVRPAVPNGGVAAVNSQSLVSPQQGCKAEARAQFSYSKKAANSAKLQATRRGQFVARSAGIPAFDRFQTRSKKSAATVSTQAGSHDFLSLEPSAEPVSDAMSMLSGDSPFAEKVKIKVLGVGGGGSNAVNRMIACEIQGVDFWAINTDAQALLSSAASNRLQIGSKLTRGLGTGGDPTLGAKSAEESREELSQAIEGSDLIFITAGMGGGTGSGAAPVIARLAREMGKLTVGIVTVPFSFEGRRRQRQALEAMEELRTHVDAVIVISNDKLMRTVQDNTPVQEAFYVADDVLRQGVQGISDIITVPGLVNVDFADVRSILENSGHALLGVGTSSGKSRAQDAAETAISSPLLEFPLSRASGIVVNVSGGSDLTLHEVQRAAEKIYEMADSEANIIFGAVIDESLKGKMRVTVVAAGFQPDRVGASGGNYNVGIATGPSQPIVSPQGGPGNILFPTVKW

SEQ ID NO: 10265 - protein, 186 aa, Triticum aestivum
  misc_feature (160)..(160): Xaa can be any naturally occurring amino acid
MERKQADYSNLDERYTIQGERYQGQQYSHIYYTRLHHMRTLLHALVPSRKPHLPVTTVLGLEEGKDCVLVGTLYKHMKLKPSILDEYSKERSAIPLVKPHNFMHSDDNLILEDESGRVALAGAIPPAAYVTGGGVASSWGRKQVLATFLVEDSMEAGLPXLTWVAHINEDKFVVLGSDIVFGPDIH

SEQ ID NO: 10266 - protein, 216 aa, Brassica rapa subsp. chinensis
MNTFPASTEMVGSENESPVTTVAGGDYYPMLAASCPKKPAGRKKFQETRHPIYRGVRLRKSGKWVCEVREPNKKSRIWLGTFKTAEMAARAHDVAALALRGRGACLNYADSAWRLRIPETTCHKDIQKAAAEAALAFEAEKSDVTMQNGQNMEETIVEAIFTEENNDVFYMDEESMLEMPALLASMAEGMLLPPPSVHFGHNYDFDGDADVSLWSY

SEQ ID NO: 10267 - protein, 113 aa, Arabidopsis thaliana
MRSLLLAVCLVLALHCGEAAVSCNTVIADLYPCLSYVTQGGPVPTLCCNGLTTLKSQAQTSVDRQGVCRCIKSAIGGLTLSPRTIQNALELPSKCGVDLPYKFSPSTDCDSIQ

SEQ ID NO: 10268 - protein, 332 aa, Sulfolobus solfataricus P2
MDEYDIVVIGGGPVGLFGTFYAGLRDMKTLLIDAQDELGGQLVSLYPEKIVYDVGGLAGIQAYELAQRLIEQAKMFGPDIKVNELADMIEKTNDNMWIVKTDKATYKTKTIFIAAGIGKIVPSRLGAKGEIEYENRGVYYTVRRKKDFEGKRVLIVGGGDSAVDWALTLAPVAKSVTLIHRRDQFRAHERSVKELFRVANVYVWHELKEVKGDGNKVTQAIIFDNRTKEEKVLDVDSVIISIGYKGDLGNIPKWGVTMKGRDIVVNGRMETNLPGVYAGGDIVQMEGSPKLALIAVGFAHAAIAISVAKKYVEPNASLFAGHSSEMDKFKPK

SEQ ID NO: 10269 - protein, 559 aa, Arabidopsis thaliana
MASSTALICDTEAWKDLKGHVEDIKKTHLRDLMSDANRCQSMMMEFDGLLLDYSRQRATVETMDKLLNLAKASQLTEKISRMFNGEHINSTENRSVLHVALRAPKDAVIKADGMNVVPEVWNVLDKIKEFSDKIRSGSWVGATGKPLKDVIAIGIGGSFLGPLFVHTALQTDPEALESAKGRQLRFLANIDPVDVARNISGLNPETTLVVVVSKTFTTAETMLNARTLREWITAALGASAVAKHMVAVSTNLALVEKFGIDPNNAFAFWDWVGGRYSVCSAVGVLPLSLQYGFSTVEKFLKGASSIDQHFQSTPFEKNIPVLLGLLSVWNVSFLGYPARAILPYSQALEKFAPHIQQVSMESNGKGVSIDGLPLPFETGEIDFGEPGTNGQHSFYQLIHQGRVIPCDFIGIVKSQQPVYLKGEVSNHDELMSNFFAQPDALAYGKTPEQLQKENVSENLIPHKTFSGNRPSLSLLLPELTAYNVGQLLAIYEHRVAVQGFVWGINSFDQWGVELGKVLATQVRKQLHSSRTQGTAPEGFNYSTTTLLKRYLETSSEPQM

SEQ ID NO: 10270 - protein, 316 aa, Prochlorococcus marinus str. MIT 9211
MVLDQLRIATRRSKLAMVQTHWVKEQLEKAHPGINISIEAMATQGDKILDVALAKIGDKGLFTKELEAQMLIGRADIAVHSLKDLPTNLPEGLMLGCVTEREDPADALVVNKSLKDKQLHELPPGTILGTSSLRRLAQLRHHYPHLIFKDVRGNLITRLEKLDAGAYDCLILAAAGLTRLGFGDRVHQLIPCEISLHAVGQGALGIECVENKPEVLEIIKSLEHEETSQRCLSERSFLRELEGGCQVPIGVNSQISGQDLILTGMVASLDGKKLIKDSKRGDKSNPELIGKELANELKSQGAMEILQEIFDSVRKD

SEQ ID NO: 10271 - protein, 560 aa, Arabidopsis thaliana
MASSPALICDTEAWKDLKGHVEDIKKTHLRDLMSDANRCQSMMMEFDGLLLDYSRQRATVETMDKLLNLAKASQLTEKISRMFNGEHINSTENRSVLHVALRAPKDAVIKADGMNVVPEVWNVLDKIKEFSDKIRSGSWVGATGKPLKDVIAIGIGGSFLGPLFVHTALQTDPEALESAKGRQLRFLANIDPVDVARNISGLNPETTLVVVVSKTFTTAETMLNARTLREWITAALGASAVAKHMVAVSTNLALVEKFGIDPNNAFAFWDWVGGRYSVCSAVGVLPLSLQYGFSMVEKFLKGASSIDQHFQSTPFEKNIPVLLGLLSVWNVSFLGYPARAILPYSQALEKFAPHIQQVSMESNGKGVSIDGLPLPFETGEIDFGEPGTNGQHSFYQLIHQGRVIPCDFIGIVKSQQPVYLKGEVVSNHDELMSNFFAQPDALAYGKTPEQLQKENVSENLIPHKTFSGNRPSLSLLLPELTAYNVGQLLAIYEHRVAVQGFVWGINSFDQWGVELGKVLATQVRKQLHSSRTQGTAPEGFNYSTTTLLKRYLETSSEPQM

SEQ ID NO: 10272 - protein, 132 aa, Brassica napus
HTLTTSSTITGKKMASRDQVKASHILIKHQGSRRKASWKDPEGKIIMATTREAAVEQLRSIREDIVCGKANFEDVATRVSDCSSAKRGGDLGPFGRGQMQKPFEEATYALRVGDISDIVDTDSGVHIIKRTA

SEQ ID NO: 10273 - protein, 146 aa, Methanocaldococcus jannaschii
MNRLLRLRFKLKMKKPDFIRQEAHRHKRLGEKWRRPKGRHSKMRLKWKEKPPVVEIGYRSPKAVRGLHPSGLEDVLVYNVKDLEKLNPETQGARIASTVGKRKKIEIIIRARELGIRILNISEEKQEELLKLAEKQEAQEVNETNE

SEQ ID NO: 10274 - protein, 173 aa, Brucella melitensis 16M
MSEPIGSPCVFKQRAHGQQNSATKEKTMRYLHTMVRIRDIDESLDFYVNKLGLEEIRRIENEKGRFTLIFLAAPSDTDRARAERAPELELTYNWDPETYTGGRNFGHLAYMVDDIYATCEKLKSAGVTINRPPRDGHMAFIKSPDGISIELIQKGERLAPQEPWASAENIGTW

SEQ ID NO: 10275 - protein, 496 aa, Bacteroides fragilis NCTC 9343
MKANNLLSQFGDHRQRVQSAITAVCEGRGILLVDDENRENEGDLIFSAQSMTEADMAIMIRHCSGIVCLCITEEKARQLNLPLMVEQNTSKYGTAFTISIEAAEGVTTGVSAADRIQTIRTAIAPNATPESLHHPGHIFPLIARSGGIKERSGHTEGSIDLMKLAGLAPCAVLCELTNDDGTMARLPEIIKFGLEHKYPVVTINDLKEYQTAPDFLPKLVGSFSCPAAENPTTAIMEAAFRHHYMHYRYINCEVGPENLAAAIQGAKAMGWRGFNCSLPNKVEIIRYLDELGESAKIIGAVNTVVIGDDQRATGENTDGKGFVKAISEIITIQDKKIALLGAGGAARAIAVEMALAGVKEITILNRNRDKGQALADLLNSQTVATARFVLWDHPYRFSTDIDIVINATSVGLYSNVDQRLNIDTDTLLPHMVVADCIPNPVYTQLLRDAVRRGCCHVLPGMKMLVYQAVIAIKYWSGVDVDPDIMLEKLKEVVKPA

SEQ ID NO: 10276 - protein, 803 aa, Yersinia pestis
MMTANYLSAQNFSPNIKTVAVAGEEPLMMAFAIRPDLPELKTIIDKVIESIPPEEFDNLTSEWSTFKPKPISFDESSLDNELLMIALKISSGLLLVFGLYLCYLVFNKRRQAKLLHARLLQQESIINALPFAVFIRTASGELAVYNSHFADVHSDKLYDMLNQTHEPAHWPMTSPLDREIDKYCRSVLLNRKPQLVDLSVEIKGDIRDIFLWIIPLNNAEQGVLGGWLDISQRKTVERQLEAARVEAESANRTKSTFLATISHELRTPMYAIMGLLELEIRSNRPVEKDTLVTVSKSAQSLMLLLDDIIDSAKIEAGQLSIHPTAVDFHQEMERMFTLYQPIANERGLRFSGWLDDHIPPLLMADMLRVRQVMGNLLGNALKFTEQGSVSVDITWEPSDEQHGVMNIDITDTGIGISPAAQATLFQPFSQANEGKSPRFGGSGLGLWICHQLIHKMGGKIALESQLGKGTSLLITLPLNIATADDLAQDAAITHVDDERLNQLRNLRILVVDDLPANRQLLQQQLAFIGIEQVVTAENGAKACQILQHNNFDVVITDCSMPVMDGYELAAHIRQDPALKDLIVIGCTADAREESAARCIDAGMNACMIKPVAIDTLQATLLRKDIVSQISNTNHSQSTEDNDRGGNQSNLSEKNTAQQENAPAIHSTTITSSVNRLAAAQNKLRTLSGGNPAVELQLLQSLLESNLQDAVTLTQLYRQLCVEDEDVVETVDTAETVDTADTVEDGETRGPGSTVGRHSTAGSDHIPHADIYKQMASLVHRIKGSVQLIDAQELVASCVKFESQ

SEQ ID NO: 10277 - protein, 145 aa, Vigna unguiculata
MVAFSDKQEALVNGAYEAFKANIPKYSVVFYTTILEKAPAAKNLFSFLANGVDATNPKLTGHAEKLFGLVRDSAAQLRASGGVVADAALGAVHSQKAVNDAQFVVVKEALVKTLKEAVGDKWSDELGTAVELAYDELAAAIKKAY

SEQ ID NO: 10278 - protein, 333 aa, Nitrosospira sp. GS832
MTIKVGINGFGRIGRMVFRAAVQNFPDIEVVAINDLPEPDYLAYMLQHDSVHGRFKGDVSIDGDTLVVNGKRIRLTAIKDPSELRWGEVGAEVVIESTGLFLTEETCQKHIAAGAGKVIMSAPSKDDTPMFVYGVNDNTYDGQSIISNASCTTNCLAPIAKVLNDTWGIKRGLMTTVHAATATQKTVDGPSNKDWRGGRGILENIIPSSTGAAKAVGKVIPELNTKLTGMAFRVPTSDVSVVDLTVELEKEASYEEICDAMKKASEGSMKGVLAYTDQKVVSTDFRGESATSIFDAEAGMALDGNFVKVVSWYDNEWGYSSKILEMVRVVASK

SEQ ID NO: 10279 - protein, 375 aa, Torenia fournieri
MVSPASPSPARVELLSNSGIKAIPKEYVRTEEELRSITDIFSKEDGAKNIDSPDLPIIDLSKIDSSDEETRKKGHEELKEAAIEWGVMHLINHGISDELINRVKKAGGEFFDLPVEEKEKYANDQSSGNVQGYGSKLANNAGGILEWEDYFFHCVYPEEKRDMAIWPKDPQDYIPATTEYAKEIRSLTTKILSVLSLGLGLDQDRLEKEVGGKDDLTLQMKINYYPKCPQPELALGVEAHTDVSALTFILHNMVPGLQVLYKGEWVTASCVPDSIILHVGDTIEILSNGMYKSVLHRGLVNRERVRVSWAVFCEPPKEKIVLKPLPETVGEDRPALFPPRTFAQHMKHKLFKKSDDEVHDEEGVVVVEHDDKSVE

SEQ ID NO: 10280 - protein, 333 aa, Nitrosospira sp. NRS527
MTIKVGINGFGRIGRMVFRAAVQNFPDIEVVAINDLLEPVYLAYMLQHDSVHGRFKGDVAIDGDTLVVNGKRIRLTAIKDPAELKWGEVGAEVVIESTGLFLTKETWQKHIAAGAGKVIMSAPSKDDTPMFVYGVNDNTYDGQSIISNASCTTNCLAPIAKVLNDTWGIKRGLMTTVHAATATQKTVDGPSNKDWRGGRGILENIIPSSTGAAKAVGKVIPELNTKLTGMAFRVPTSDVSVVDLTVELDKDATYEEICAAMKQASEGAMKGVLGYTDEKVVSTDFRGESCTSIFDAEAGMALDGSFIKVVSWYDNEWGYSSKILEMTRVVAGK

SEQ ID NO: 10281 - protein, 389 aa, Methanococcoides burtonii DSM 6242
MANTDYSKNELMNFIDQSPLDIEICDVTLRDGEQTPGVAFTRDEKIDLALELDSIGVEVIEAGFPVVSTSEKDIVKEISNLGLDASICCLARSVIDDVDAAIDCDVDIVSIFIAMSDLHLKFKYHKSCADVFSCAMGAIEHAKDHGLKVRFAAEDATRTNIETLKRAFLAAEDYHVDYVSIADTIGILSPATTHYLVSEIKKVVHTPICIHCHNDLGMATANTLVAAEAGAKQLHTTINGIGERAGNASLEELLVALRVQHGIETYDTTKLNSISRKLEEYSGLPTAVNKAVVGKYAFTHESGIHVMAILEEPRTYELFTPEMVGGKRNLVVGKHTGKKALKGIVNDLGYELDNDELCELINKVKNCTEVKKGISRERLEEMIRNVQSH

SEQ ID NO: 10282 - protein, 333 aa, Nitrosospira sp. TYM9
MTIKVGINGFGRIGRMVFRAAVQNFPDIEVVAINDLLEPDYLAYMLQHDSVHGRFKGDVSIDGDTLVVNGKRIRLTAIKDPAELRWGEVGAEVVIESTGLFLTKETCQKHITAGAGKVIMSAPSKDDTPMFVYGVNDNTYDGQSIISNASCTTNCLAPIAKVLNDTWGIKRGLMTTVHAATATQKIVDGPSNKDWRGGRGILENIIPSSTGAAKAVGKVIPELNTKLTGMAFRVPTSDVSVVDLTVELDKDATYEEICAAMKQASEGAMKGVLGYTDEKVVSTDFRGESCTSIFDAEAGMALDGSFIKVVSWYDSEWGYSSKILEMARVVAGK

SEQ ID NO: 10283 - protein, 485 aa, Mesorhizobium sp. BNC1
MLKKTSHFLREANFIAGEWVNADSGATIEVINPATRQTIGTVPKCGRAETRRAIEAAQEAFQSWKKTSANDRAKLLRKLHDAIMDNQDALAELLVMEQGKPLAEAKGEVGTSAAYILWFAEEGRRIYGDIVPAPWTDRRILVTKEPVGVIGAITPWNFPSSMLARKLGPALAAGCTTVAKPASQTPYSGLAWGVLAEEAGFPKGVVNIVTGSASEIGDELTENPLVRKITFTGSTEIGKLLMEKAAGTVKKVSMELGGNAPFLVFDDADLDRAVKGAMIAKYRNAGQTCVCTNRFFVQDGIYDRFLEKFVEASRKLKVGSGLDEGVEQGPLIDGGAVEKVEELIADAVSKGGKVVTGGKRHALGGSYFEPTVIAEATPQMRFMEEEIFGPVAPVFRFKDEADGIRMANDTSFGLACYFYTSDLGRAFRVMEGLKYGLVGVNEGLITTVEAPFGGLKESGLGKEGGRQGIEDYLDTKYVCIGGLGL

SEQ ID NO: 10284 - protein, 333 aa, Nitrosovibrio sp. FJI82
MAIRVGINGFGRIGRMVFRASIEEFDDIEVVAINDLLEPDYLAYMLLHDSVHGRFKGDVSVDGNNLIVNGKKIRLTATKDPEELNWGEVKVDVVVESTGLFLTKELCEKHIKAGAPKVVMTAPSKDDTPMYVYGVNDKTYQGEAIISNASCTTNCLAPIAKVLNDTWGIKRGLMTTVHAATATQKTVDGPSNKDWRGGRGILENIIPSSTGAAKAVGKVIPELNTKLTGMAFRVPTSDVSVVDLTVELEKEASYDEICDAMKKASEGSMKGVLAYTDQKVVPTDFRGESATSIFDAEAGMALDGNFVKVVSWYDNEWGYSSKILEMVRVVAGK

SEQ ID NO: 10285 - protein, 106 aa, Ureaplasma parvum serovar 3 str. ATCC 700970
MLIKLESNQNLNELLKENHSKPILIDFYADWCPPCRMLIPVLDSIEKKHGDEFTIIKINVDHFPELSTQYQVKSIPALFYLKNGDIKATSLGFIDENSLVNKLRSI

SEQ ID NO: 10286 - protein, 333 aa, Nitrosovibrio sp. RY3C
MAIRVGINGFGRIGRMVFRASIEEFNDIEVVAINDLLEPDYLAYMLLHDSVHGRFKGDVSVDGNNLIVNGKKIRLTATKDPEELNWGEVKVDVVVESTGLFLTKELCEKHIKAGAPKVVMTAPSKDDTPMYVYGVNDKTYQGEAIISIVSCTTNCLAPIAKVLNDTWGIKRGLMTTVHAATATQKTVDGPSNKDWRGGRGILENIIPSSTGAAKAVGKVIPELNTKLTGMAFRVPTSDVSVVDLTVELEKEASYDEICDAMKKASEGSMKGVLAYTDQKVVSTDFRGESATSIFDAEAGMALDGNFVKVVSWYDNEWGYSSKILEMVRVVAGK

SEQ ID NO: 10287 - protein, 422 aa, Mesorhizobium sp. BNC1
MKTTDSFGRPLVAVTGMGVVTSLGQGKKDNWRALTGGQSGIHPITRFPTDHLATTISGMVDFLPESSRGASALTFALADSAAEEAIGEAGFSTSDFGGPLFLAAPPVELDWHNRLRLYAQSDRANGWRSLIEAARKASERALFDESQFAAIADRLAEKYGTRGLPITLSTACASGATAIQLGTEAIRRGECERALAIGADGSATAEALIRFSLLSALSTQNERPEKASKPFSKDRDGFVLAEGSGALVLESLENALARGAEILGIIRGCGEKADDFHRTRSKPDGSPAIAAVRAALSDAGMSEDEIGYVNAHGTSTPENDKMEHLSLSTVFGERMRTIPISSNKSMIGHTLSAAGAVEAVFSILTMRENTIPPTINYENPDPAIELDVVPNVKREAEVASVLSNSFGFGGQNTCLVMAREAG

SEQ ID NO: 10288 - protein, 241 aa, Zea mays
  misc_feature (24)..(24): Xaa can be any naturally occurring amino acid
WTPAGTGPEFPGRPTRPRRALHFXFKVGNRFQTVHFFRDVLGMQVLRHEEFEEGCKAACNGPYDGKWSKTMVGFGPEDDHFVAELTYNYGIGDYKLGNDFMGITLASSQAVSNARKLEWPLSKVAEGIFETEAPGGYKFYLQDRSPSQSDPVLKVTLAVSDLQKSLNYWSNLLGMKIYEQDEEKQRALLGYADNQCKLELQGIQGAVDHAAAFGRIAFSCPQKELPDLEDLMKKGDHSILT

SEQ ID NO: 10289 - protein, 216 aa, Chorispora bungeana
MNSFSAFSEMFGSDYESPVSSGGDYSPKLATSCPKKPAGRKKFRETRHPIYRGVRQRNSGKWVCELREPNKKTRIWLGTFQTAEMAARAHDVAAIALRDRSACLNFADSAWRLRIPESTCAKEIQKAAAEAALNFQDEMCHMTTDAHGLDMEETLVEAIYTPEQSQDAFYMDEEAMLGMSSLLDNMAEGMLLPSPSVQWNYNFDVKGDDDMSLWSY

SEQ ID NO: 10290 - protein, 554 aa, Thiobacillus denitrificans ATCC 25259
MRTGDTRTSGLSTRPVHRLLQAHHSRMADVHMRELFDTDPQRFERFSLQVGDLLLDYSKNRITDETMDLLVRMAEESDVAGWRERMFRGDKINTTENRAVLHVALRNRSNRPVNVDGEDVMPKVNAVIERMGAFAEQVRGGVWRGYSGALITDVVNIGIGGSDLGPQMVVQALKPYRHPRLKLHFISNVDGAHVKETLEALDPETTLFIVSSKTFTTQETMTNAHYARDWFLARAGDVAHVARHFVAVSTNRDAVTAFGIDAANMFEFWDWVGGRYSLWSAIGLSIVLAVGAERFLELLEGAHEMDEHFRHAPLRQNMPVILALLGIWYNNFFGAESHAILPYDHYLRSLPAYLEQADMESNGKSVDRDGRVVDYPTGQIIWGATGINGQHAFYQLLHQGTKMIPADFIVSITPHTELQEHHDILIANFLAQTEALMRGRTREETLEEMGRSPGDPSVQHRVFEGNHPSNAILLKKLTPHTLGMLIALYEHKIFVEGVIWNLNSYDQWGVELGKQLAGRILPELHADAPVAGHDASTNALINHYRRMTQPHPGL

SEQ ID NO: 10291 - protein, 107 aa, Prochlorococcus marinus str. MIT 9211
MSSAAAVTDSSFEQEVLQSDVPVLVDFWAPWCGPCRMVAPIVDEISKDFEGKIKVCKLNTDENPNVASQYGIRSIPTLMIFKGGQKVDTVVGAVPKATLSGTISKHI

SEQ ID NO: 10292 - protein, 166 aa, Haemophilus somnus 129PT
MYIDTAELCDIYLDQIDVVEPIFSSFGGKSTFFGKITTIKCFENNGLISEILEENGEGRVLLIDGGGAVRRALIDANLAQLAADNGWEGIIVYGAIRQLQQLENINIGIQALAPIPVGSDEQSIGETDVPVNFGGVTFFPDDYVYADLTGIILSQEPLDLEEFDSL

SEQ ID NO: 10293 - protein, 591 aa, Mesorhizobium sp. BNC1
MCGICGEVRFDGRTPSVSAISGMMEALAPRGPDGAGIVSHGNAGFGHRRLRIIDLSEKAQQPMVDSALGLTIAFNGCIYNYPELREALEAKGYSFFSHGDTEVILKAWHAWGETCVERFHGMFAFVIQERDTGRIVMARDRFGIKPLYLAEKSGVLRFASSLPALVKAGDVDTSIDRVALHHYMTFHAVVPPPRTILNGVRKLPPATIRVIEADGRSTERRYWDPPYRRDPADAGVSAEEWRDRVHEALRLAVKRRMVADVPVGVLLSGGVDSSLIVGLLAEAGQTGLMSFSVGFEEANGEKGDEFVYSDLIAKEFGTDHHKIFVPSDRLMDALPGTFAAMSEPMVSYDNVGFYLLSQEVSKHIKVVQSGQGADEVFGGYHWYPPLARSNDVVADYAKVFFDRSHETLKRQLGANWINGEDYSRGLVAAELMRPGADSPVDRALRLDANVMLVDDPVKRVDNMTMAWGLEARVPFLDHELVELAARIPPEEKLKDGGKGVLKDVARLVVPHEVIDRPKGYFPVPQLKYVAGPYLEMVRDALGSQRARERGLFRQDYLDRLFAQPADHITPLRGSELWQAGLLELWLQTHGI

SEQ ID NO: 10294 - protein, 470 aa, Colwellia psychrerythraea 34H
MLLWLRNDLRTHDNPALHYFLSRNALSQHDSAVPAKAIFFICEQQWQQHDWSPIKIDFIKRHAHALVKELALLNIELELIELDNFTQQKTYLHSYCQLHNITEVVANSEVEFNEQQRDKALYLELKASGIPLTLLEADVIVPKGKVLNQSGIMYKVFTPFKRAWLTYIQQGGFEYLGKVSVKSSAVNKADNQEEDQGSISSTWPLATVFEQQILPKFYQQKISTYKLNRDIPSIKGTSGISPYLAAGVISPRFVLRLLLNKHPDLLVASDSEEFSWLNEIIWREFYRHLLFHEQRLCKHQCYKENYQEMLWHNDAALFDAWCQGRTGYPLVDAAMRQLNQTGWMHNRLRMVVASFLTKHLLIDWRLGEKYFMQHLIDGDLASNNGGWQWAASTGCDAQPYFRIFNPIRQSERFDPKGVFIRKYIPELNNISDKAIHFPHQYIKDNELNIYWPAIVEHKEARLKALAFYKV

SEQ ID NO: 10295 - protein, 540 aa, Burkholderia sp. 383
MTLNSLPAWTALQSHFEQIRHARLRDWFAPENDHTPTRAERFTIPGGGIAADFSKNRINDDTLRLLVQLARDAGVEARRDAMFAGEIVNPTEGRAALHTALRATDPQAPFHAQISAERAKMATFARAVRSGTWTGYTGKRIRHVINIGIGGSDLGPKMVVHALHHVATPEITTHFVSNVDGADLARVLEQVDPEETLAIIVSKTFTTLETMTNARSLRDWFVARGCPEDALAKHFVGVSANPAEVVKFGIAADNVFEMWDWVGGRYSLWSAVGLSIMIAIGPEQFDELLAGANDMDRHFREAPLERNLPVLLGLIGIWYRNFFGSQSYLVAPYSEALHYLPSYLQQLEMESNGKSARLDGTFVDYPTSAVTWGEPGTNGQHAFFQMLHQGPTIVPIDFIAVLTPEHPLASHHPKLLANCFAQSEALMLGRTLDEARKVAGPGKEALAPHLTFPGNRPTTTLLVDALTPRTLGALIALYEHKVLVQATVWDINPFDQWGVELGKILGKVVEADLSAESIDPAKHDSSTTALIERARAALKR

SEQ ID NO: 10296 - protein, 132 aa, Zea mays
  misc_feature (31)..(31): Xaa can be any naturally occurring amino acid
VQKTQGEKVVVAEKKNWAGLVMGSKPPVLVXFWAPWCGPSRIFAPVIHELAKDYAGKIRCCKVNRDDSPKGGSPWGIRSIPPVFFFKGGEKKERVLGPVPKSPLPPLIEKYMGGLWACQAGRHRGLNTYGYL

SEQ ID NO: 10297 - protein, 565 aa, Desulfotalea psychrophila LSv54
MPKGESMKSIQLQKYKPYPAVGLSDRVWPTKTIEKAPAWCSVDLRDGNQALIQPMNLEQKVRMFKLLVDIGFKEIEVGFPSASEVEYQFCRKLIDDNLIPEDVTIQVLTQAREHLIVKTFEALRGAKKAIIHLYNSTSTLQRKVVFAKSRGEIVDLAIEGARLVQAEALKYPATEFRYEYSPESFTGTELDYALEICEAVLAVWQPTSGNKVIINLPATVEMSTPNVYADQIEWFCRNVSCRDAVLISLHAHNDRGCAVAATELGLMAGGDRVEGTLFGNGERTGNVDLVTLGLNLFTQGVDPKIDFSDINGLIEVYQEVTNLEVHPRHPYAGELVYTAFSGSHQDAINKGINMYREAGADLWQVPYLPIDPTDVGRSYESIIRINSQSGKGGVAYIMDQEYGYKLPKAMRPEFGNVVQAVTEKEGRELRYPEIFSAFEEEYLSRQAAYRLKDFQVVKRHVDEDAEKSSAEVVATLLVNGEEQMIWANGNGPVDAFCAAVNKLLPEEFHLHSYHEHALKGGSSAQAAAYVEIEMNSSNTRRWGVGVDTDIIIASIKAVLSCLNRL

SEQ ID NO: 10298 - protein, 257 aa, Symbiobacterium thermophilum IAM 14863
MAYENILVFREGAVGRVQLNRPQALNALNFRLMTELVEAFREMERDPGIGCLLLHGNEKAFAAGADIKEMAELGAIDMYTRDYIELWDEVARIKKPIVAAVSGYCLGGGLELAMICDIIVASETAKFGQPEINIGVLPGAGGTQRLTRAVGKSLAMEMVLTGRMLTAQEALAAGLVSRVVPVEVYLSEAQKLAGEIASKSPVALRLAKEAVLQAFEGSLSSGLAYERRLFAMAFASEDQKEGMRAFTEKRKPEWKGR

SEQ ID NO: 10299 - protein, 757 aa, Arabidopsis thaliana
MAMTPVASSSPVSTCRLFRCNLLPDLLPKPLFLSLPKRNRIASCRFTVRASANATVESPNGVPASTSDTETETDTTSYGRQFFPLAAVVGQEGIKTALLLGAVDREIGGIAISGRRGTAKTVMARGLHEILPPIEVVVGSISNADPACPNEWEDDLDERIEYNADNTIKTEIVKSPFIQIPLGVTEDRLIGSVDVEESVKRGTTVFQPGLLAEAHRGVLYVDEINLLDEGISNLLLNVLTDGVNIVEREGISFRHPCKPLLIATYNPEESAVREHLLDRVAINLDLPMSFEDRVAAVGIATQFQERCNEVFSMVNEETETAKTQIILAREYLKDVKISREQLKYLVLEAVRGGVQGHRAELYAARVAKCLAAIEGRKKVTIDDLRKAVELVILPRSSLDETPPEQQNQPPPPPPPPQNSESGEDENEEEQEEEEDESNEENENEQQQDQIPEEFIFDAEGGLVDEKLLFFAQQAQKRRGKAGRAKNVIFSEDRGRYIKPMLPKGPVKRLAVDATLRAAAPYQKLRREKDISGTRKVFVEKTDMRAKRMARKAGALVIFVVDASGSMALNRMQNAKGAALKLLAESYTSRDQVSIIPFRGDAAEVLLPPSRSIAMARNRLERLPCGGGSPLAHGLTTAVRVGLNAEKSGDVGRIMIVAITDGRANITLKRSTDPESIAPDAPRPTSKELKDEILEVAGKIYKAGMSLLVIDTENKFVSTGFAKEIARVAQGKYYYLPNASDAVISATTRDALSDLKNS

SEQ ID NO: 10300 - protein, 536 aa, Prochlorococcus marinus str. MIT 9211
MAKDPGRVLIFDTTLRDGEQSPGASLNLEEKLAIAQQLARLGVDIIEAGFPYASQGDFTAVQRIAEQVGGEEGPIICGLARASKADIKACGEAIAPAPKKRIHTFIATSDIHLEHKLRKTREEVIQIVPEMVHYAKSFSEDVEFSCEDAARSDPDFLYELIELAISAGAGTINIPDTVGYITPSEFGELIQGIDANVPNIDEAILSVHGHNDLGLAVANFLEAIKRGARQLECTINGIGERAGNAALEELVMALHVRRSFYNPFFGRDPESPTPLTAIRTEEITKTSRLVSNLTGMVVQPNKAIVGANAFAHESGIHQDGVLKNRLTYEIVDAKTVGLTDNRISLGKLSGRSAVRARLEELGYDLTRDDLNEAFAKFKDLADRKREITDRDLEAIVSEQVMQPDARFQLQLVQVSCGTTLKPTATVTLADQDGTEQTAVALGTGPVDAVCKALDSLAGESNELIEFSVKSVTEGIDALGEVTIRLRREGKIFSGHSADTDVVVAAAQAYVNALNRLIYFEKKNPIHPQHDLIKANL

SEQ ID NO: 10301 - protein, 560 aa, Arabidopsis thaliana
MASSPALICDTEAWKDLKGHVEDIKKTHLRDLMSDANRCQSMMMEFDGLLLDYSRQRATVETMDKLLNLAKASQLTEKISRMFNGEHINSTENRSVLHVALRAPEDAVIKADGMNVVPEVWNVLDKIKEFSDKIRSGSWVGATGKPLKDVIAIGIGGSFLGPLFVHTALQTDPEALESAKGRQLRFLANIDPVDVARNISGLNPETTLVVVVSKTFTTAETMLNARTLREWITAALGASAVAKHMVAVSTNLALVEKFGIDPNNAFAFWDWVGGRYSVCSAVGVLPLSLQYGFSMVEKFLKGASSIDQHFQSTPFEKNIPVLLGLLSVWNVSFLGYPARAILPYSQALEKFAPHIQQVSMESNGKGVSIDGLPLPFETGEIDFGEPGTNGQHSFYQLIHQGRVIPCDFIGIVKSQQPVYLKGEVVSNHDELMSNFFAQPDALAYGKTPEQLQKENVSENLIPHKTFSGNRPSLSLLLPELTAYNVGQLLAIYEHRVAVQGFVWGINSFDQWGVELGKVLATQVRKQLHSSRTQGTAPEGFNYSTTTLLKRYLETSSEPQM

SEQ ID NO: 10302 - protein, 568 aa, Gibberella zeae PH-1
MATLDVEALLDATAKDTAEQKTKSPVEDRTRDEPERRERDRGGRDRDGSRHRDRDHGRRRDRRDSQNRSRKGTPDVGTPRSDAGSHKSRRRSRSRDSDRRHTRRNRDGDYYRGGRRSRSRSRSPYRHYRPRDDREPRERRDRGDRRNRDFGRGRDDDRRETKREEGNPQLTEDERDRRTVFVQQLAARLRTRELKEFFERVGPVNEAQIVKDRISQRSKGVGYVEFKNEESVTQALQLTGQKLLGIPVIVQVTEAEKNRQARNPEASGPHPNSIPFHRLYVGNIHFNVTEQDLQAVFEPFGELEFVQLQKDENGRSRGYGFVQFRDAGQAREALEKMNGFDLAGRPIRVGLGNDKFTPESTANMLQRFSGQNQQNPNFQGSAFSGSGGRGPQNSTFDRAGGRDNEKTGGASALDDTDVAGVNFNNYSRDALMRKLARTDDSAPTNGHEERQVLKPKMETKPLPVNVNMASRCVVLHNMFDPEEEEGTDWVKELEDDVRQEAESKYGHVVHISVDPNSKGDIYLKFDKVQGGENAIKGLNGRYFGGRMIDASPVVDAVYSSLFSRTRAI

SEQ ID NO: 10303 - protein, 233 aa, Oryza sativa
MAAVSEVEVDGVVFPPVARPPGSGHAHFLAGAGVRGVEIAGNFIKFTAIGVYLEEGAAVPALAKKWAGKSADELAADAAFFRDVVTGDFEKFTRVTMILPLTGEQYSDKVTENCVAAWKAAGVYTDAEGAAADKFKEAFKPHSFPPGASILFTHSPPGVLTVAFSKDSSVPEGAVAAAAIENRALCEAVLDSIIGEHGVSPAAKRSIAARVSQLLKAESTGDVAAAEPAPVSA

SEQ ID NO: 10304 - protein, 135 aa, Sulfolobus solfataricus P2
MNDELNDPELQKILSKKTTQILNNLKEKVKEPVKHLNSKNFDEFITKNKIVVVDFWAEWCAPCLILAPVIEELANDYPQVAFGKLNTEESQDIAMRYGIMSLPTIMFFKNGELVDQILGAVPREEIEVRLKSLLE

SEQ ID NO: 10305 - protein, 112 aa, Trichodesmium erythraeum IMS101
MKKVEAIIRPFKLDQVKIALVNAGIVGMTVSEVRGFGRQKGQTERYRGSEYTVEFLQKLKLEVVVEDDQVQTVIDKIINASRTGEIGDGKIFVSPVDKIVRIRTGEDNTDAI

SEQ ID NO: 10306 - protein, 238 aa, Sulfolobus solfataricus P2
MDIKLVYSTLDPVGVTIKKLGYRFEEINEDVTDFHYENGEAIVIFSRHESKAGIPSLTVHYPGNPSEEIMGGEPKKLGIAYPRLLTSILREIKKIDLNIEKTMEATHHGPTYQNVPVIFVEVGSNETYWTNDTIVKALVDSTIRSIDKVDEIDCEYYISGFGGPHYSRLFTKLADESCIGHVISKHYIDKLDDKVIIQTITNSVNTINKVVIDSLNSKQKERIIASLKKLNNINIEFR

SEQ ID NO: 10307 - protein, 503 aa, Arabidopsis thaliana
MASLLLTSSSMITTSCPSMVLRSGLPIGSSFPSLRLTRPYDKATLFVSCCSAESKKVATSATDLKPIVERRPEYIPNKLPHKNYVRVLDTTLRDGEQSPGAALTPPQKLEIARQLAKLRVDIMEVGFPVSSEEEFEAIKTIAKTVGNEVDEETGYVPVICGIARCKKRDIEATWEALKYAKRPRVMLFTSTSEIHMKYKLKKTKEEVIEMAVNSVKYAKSLGFKDIQFGCEDGGRTEKDFLCKILGESIKAGATTVGFADTVGINMPQEFGELVAYVIENTPGADDIVFAIHCHNDLGVATANTISGICAGARQVEVTINGIGERSGNAPLEEVVMALKCRGESLMDGVYTKIDSRQIMATSKMVQEHTGMYVQPHKPIVGDNCFVHESGIHQDGILKNRSTYEILSPEDVGIVKSENSGIVLGKLSGRHAVKDRLKELGYEISDEKFNDIFSRYRELTKDKKRITDADLKALVVNGAEISSEKLNSKGINDLMSSPQISAVV

SEQ ID NO: 10308 - protein, 560 aa, Arabidopsis thaliana
MASSTALICDTEAWKDLKGHVEDIKKTHLRDLMSDANRCQSMMMEFDGLLLDYSRQRATVETMDKLLNLAKAAQLTEKISRMFNGEHINSTENRAVLHVALRAPKDAVIKADGKNVVPEVWNVLDKIKEFSDKIRSGSWVGATGKPLKDVIAIGIGGSFLGPLFVHTALQTDPEALESAKGRQLRFLANIDPVDVARNISGLNPETTLVVVVSKTFTTAETMLNARTLREWITAALGASAVAKHMVAVSTNLALVEKFGIDPNNAFAFWDWVGGRYSVCSAVGVLPLSLQYGFSMVEKFLKGASSIDQHFQSTPFEKNIPVLLGLLSVWNVSFLGYPARAILPYSQALEKFAPHIQQVSMESNGKGVSIDGLPLPFETGEIDFGEPGTNGQHSFYQLIHQGRVIPCDFIGIVKSQQPVYLKGEVVSNHDELISNFFAQPDALAYGKTPEQLQKENVSENLIPHKTFSGNRPSLSLLLPELTAYNVGQLLAIYEHRVAVQGFVWGINSFDQWGVELGKVLATQVRKQLHSSRTQGTAPEGFNYSTTTLLKRYLETSSEPQM

SEQ ID NO: 10309 - protein, 457 aa, Porphyromonas gingivalis W83
MEDELLNFNYTDSGLPVIIKVIGVGGGGGNAVKNMYHGKVRDVSFLLCNTDVQALDRSEVPDRLVLGREVTNGLGAGSRPEVARRAAEASEADIRKILDDGHTRMVFVTAGMGGGTGTGAAPVIGRIARELNILTVGIVTIPFVFEGKRKILQALEGVEEMRKNVDALLVVNNERLRIIYKDLKLDNAFAKADETLTNAANGIAEMIMKEGTINLDFADVHTTLKDGGIAIISTGYGEGPDRMEQAINEALTSPLLNNNDIFKARRVLFNIYQGTEDPLGTDELSAINELTAKIETGFDTIWGYTTDPELGKKVKITILASGFDLDTTRESIRIGDNLGNVINDPISSREIETQNERDNDLINRYYRPDELEKVKVVDFKPIILNLDELDNDELIMALEEKPAYSRTGVLLSRIDNIRMRIAESAGRLKKDVVRSEESERPAFESERSSSPTTISFN

SEQ ID NO: 10310 - protein, 358 aa, Leifsonia xyli subsp. xyli str. CTCB07
MVTTSHTPSDIKRWRRYLANERAEAAVYRDLAGRREGKEREILLALAEAEGRHEQHWLDLLGDQAGRALRGDIRTRALSVLARRFGSVFVLALAQRAEARSPYATDADATAQMVADEQVHEEVVRALAARGRQRLSGTFRAAVFGANDGLVSNLAFVLGVSASGVATEIVLLTGVSGLLAGALSMGAGEYVSVRSQRELLEASTPNPATRSALPDLDVDANELTLVYRARGMSPEEATAHAHQVLSTLGAHSSPLPGPGVRDEEHEEIGTGWNAALSSFCFFASGALIPILPYLFGLTGTTAVIVASALVGLVLLGTGAIVGLLSGGSPWKGALRQLGIGFGAAAATYFLGLLFGATG

SEQ ID NO: 10311 - protein, 479 aa, Streptococcus agalactiae NEM316
MNLPTEIRYRPYDEWTEEDKENIVKNVSKSPWRATYHLEAKTGLLNDPNGFSYFNGKFHLFYQNWPFGAAHGLKQWVHTESDDLVHFKETGIKLKPDHVNDSHGAYSGSALAIDDKLFLFYTGNVRDMKWNRDPRQIGAWMTSDGKITKFDKVLISQPNDVTEHFRDPQIFNYDNQFYAVIGAQNSKKCGFIKLYKALNNDIHHWEFVGDLDFGGTGSEYMIECPNIIFVKGKPVLLYSPQGLDKNELDYQNIYPNTYKIGQYFDANSSKIVEPSPIYNLDYGFEAYATQGFNTSDGRAFIVSWIGLPDIDYPSDQFDYQGAMSLVKELSIKNGNLYQYPVPAMKNLRQHQAEFKTQLQTNNTYELELLVPRNDLSSFVLFANPKGQGLSITIDTAKGKVIVDRSQAGQQYATEFGTSRQCNIPKDATSVNVFIDKSIFEIFINKGEKVFTGRVFPDAEQSGIQLKEGHVHGKYFELKY

SEQ ID NO: 10312 - protein, 406 aa, Brucella melitensis 16M
MCWRLSGSRTKRTTAMAKSKFERTKPHVNIGTIGHVDHGKTSLTAAITKFFGEFKAYDQIDAAPEERARGITISTAHVEYETANRHYAHVDCPGHADYVKNMITGAAQMDGAILVVSAADGPMPQTREHILLARQVGVPAIVVFLNKCDQVDDAELLELVELEVRELLSKYEFPGDEIPIIKGSALAALEDSSKELGEDAIRNLMDAVDSYIPTPERPIDQPFLMPIEDVFSISGRGTVVTGRVERGIVKVGEEVEIVGIKATTKTTVTGVEMFRKLLDQGQAGDNIGALIRGVGREDVERGQVLCKPGSVKPHTKFKAEAYILTKDEGGRHTPFFTNYRPQFYFRTTDVTGVVTLPAGTEMVMPGDNVAMDVTLIVPIAMEEKLRFAIREGGRTVGAGIVSSIIE

SEQ ID NO: 10313 - protein, 1017 aa, Synechococcus elongatus PCC 7942
MNYCQNARTAMSAALQSSDDAFRTVSSPLATDLDLSSPLEFFLRHRLTVVEELWEVVLRQECGQELVDILTQLRDLTSPEGQAPEVGGEALVQVIETLELSDAIRAARAFALYFQLINIVEQHYEQTQYQLAYERSRLEPLPGPDESPEGLHTIEIPQHQLDPFAAVIPLNQDPATFQTLFPRLRQLNVPPQMIQELTDRLDIRLVFTAHPTEIVRHTIRDKQRRIAYLLRQLDELETGKNRGFRELEAQNIRQQLTEEIRLWWRTDELHQFKPTVLDEVDYALHYFQEVLFEAIPLLYQRFRLALQGTFPDLQPPRYNFCQFGSWVGSDRDGNPSVTSAVTWQTACYQRSLVLDRYITAVEHLRNVLSLSMHWSEVLPELLSSLEQESMLFPETYEQLAVRYRQEPYRLKLSYILERLHNTRDRNTRLQQQQEKDPTTPLPEYRDGTLYQAGTAFLEDLKLIQHNLKQTGLSCYELEKLICQVEIFGFNLVHLDIRQESSRHSDAINEICEYLQILPQPYNELSEAERTAWLVQELKTRRPLVPARMPFSESTREIIETLRMVKQLQEEFGEAACQTYIISMSRELSDLLEVLLLAKEVGLYDPVTGKSSLQVIPLFETVEDLQNAPRVMTALFELPFYTQLNPTQSEPLQEVMLGYSDSNKDSGFLSSNWEIHKAQKALGTVARDHRVKLRIFHGRGGSVGRGGGPAYEAILAQPGRTTDGRIKITEQGEVLASKYALPELALYNLETITTAVIQSSLLGSGFDDIEPWNQIMEELAARSRRHYRALVYEQPDLVDFFNQVTPIEEISKLQISSRPARRKTGKRDLGSLRAIPWVFSWTQSRFLLPSWYGVGTALQEFLQERPEQNLNLLRYFYEKWPFFRMVISKVEMTLAKVDLQIAHHYVHELANPEDQERFERVFSQIAAEFQLTCHLVLTITNHGRLLDGDPELQRSVQLRNGTIVPLGFLQVALLKRLRQYRQQTETTGLMRSRYSKGELLRGALLTINGIAAGMRNTG

SEQ ID NO: 10314 - protein, 333 aa, Nitrosovibrio sp. RY6A
MAIRVGINGFGRIGRMVFRASIEEFDDIEVVAINDLLEPDYLAYMLLHDSVHGRFKGDVSVDGNNLIVNGKKIHLTATKDPEVLNWGEVKVDVVVESTGLFLTKELCEKHIKAGAPKVVMTAPSKDDTPMYVYGVNDKTYQGEAIISNASCTTNCLAPIAKVLNDIWGIKRGLMTTVHAATATQKTVDGPSNKDWRGGRGILENIIPSSTGAAKAVGKVIPELNTKLTGMAFRVPTSDVSVVDLTVELEKEASYDEICDAMKKASEGSMKGVLAYTDQKVVSTDFRGESATSIFDAEAGMALDGNFVKVVSWYDNEWGYSSKILEMVRVVAGK

SEQ ID NO: 10315 - protein, 542 aa, Medicago sativa
MGCLLSKDKDSEQEHNNGGYRYAESSGMHNHRNNHEQVNTSRTAPTSSYQPQIPTKPSSISAPSPKPLIKQDTNTILGKGLEDVKQFYTLGKELGRGQFGVTFLCTENSTGLLYACKSISKRKLVSKSDREDIKREIQIMQHLSGQPNIVEFKGAYEDRNSVHVVMELCAGGELFDRIIAKGHYSEKAAASICRQIVNVVNICHFMGVMHRDLKPENFLLASKDENALLKATDFGLSVFIEEGRVYRDIVGSAYYVAPEVLRPRCGKEIDIWSAGVILYILLSGVPPFWAETEKGIFDAILEGHIDFESEPWPKISDSAKDLVRKMLIQEPKKRITAAQVLEHPWIKGGNASDKPIDSAVLSRMKQFRAMNKLKKLALKVIAENMSEEEIRGLKAMFTNMDTDNSGTITYEELKAGLQRLGSKLSEAEVKQLMEAADVDGNGTIDCIEFITATMHRHKLERDDHLYKAFQYFDKDSSGFITRDELETAMKEYGMGDDATIKEIISEVDTIISEVDTDHDGRINYEEFCAMMRSGNQQQVKLF

SEQ ID NO: 10316 - protein, 492 aa, Pediococcus acidilactici
IWNRKTRYTPYEQWPATKLPQLVAQARQSKLRMQHHIQPTSGLLNDPCGFSYFDGQWHLFYQVFPFGPVHGLKSWQHVTSKNLVDWHDEGLAIRPDTPYDSHGAYTGTALPIDDQLFIMYTGNVRTADWQRESYQLGAWMDTDNHIKKLSRPLIAHAPAGYTSSFRDPDLIRTDHGYYALIGAQTTTEIGAILVYFSKDLTTWTCQGELNVPANARGYMIECPNLVWIDQQPVLLFCPQGLSQATIPYQNIYPNIYLVADQLDLAQAQFTEPHALTQLDDGFDVYATQAINAPDGRALAVSWIGLPEISYPTDRENWAHCLSLVKELTLKDGHLYQNPVAAVDDLRTTAHDLVFEQQRATVAALNGSFELLLTVPADKTVTVNIADQQESGQLQVTVDANHGQVMIDRRHTGNSFAEDYGQTRQVELTAHKTIKIRLIIDVSVFECYIDNGYSVMTGRFFLNATPSRLNVQGDTTAVTGKVWEWRQSEHTGV

SEQ ID NO: 10317 - protein, 124 aa, Pinus resinosa
MAVSKKMVEAVFLVGLVVTMMNVWGGVSVEGAISCNQVVSAMTPCATYLLGNAATPAAACCPSIRGLDSQVKATPDRQAVCNCFKTQARSYGVKLGKAANLPGLCKVTDLNVPISPNVDCSKVH

SEQ ID NO: 10318 - protein, 492 aa, Lactobacillus plantarum
IWNRKTRYTPYEQWPATKLPQLVAQARQSKWRMQHHIQPTSGLLNDPNGFSYFDGQWHLFYQVFPFGPVHGLKSWQHVTSKNLVDWHDEGLAIRPDTPYDSHGAYTGTALPIDDQLFIMYTGNVRTADWQRESYQLGAWMDTDNHIKKLSRPLIAHAPAGYTSSFRDPDLIRTDPGYYALIGAQTTTEIGAILVYFSKDLTTWTCQGELNVPANARGYMIECPNLVWIDQQPVLLFCPQGLSQTTTPYQNIYPNMYLVADQLDLAQAQFTEPHALTQLDDGFDVYATQAINAPDGRALAVSWIGLPEISYPTDCENWAHCLSLVKELTLKDGHLYQNPVAAVDDLRTTAHDLVFEQQRATVAALNGSFELLLTVPADKTVTVNIADQQESGQLQVTVDANHGQVMIDRRHTGNSFAEDYGQTRQVELPAHKTIKIRLIIDVSVFECYIDNGYSVMTGRFFLNATPSRLNVQGDTTAVTGKVWEWRQSEHTGV

SEQ ID NO: 10319 - protein, 352 aa, Propionibacterium freudenreichii subsp. shermanii
MTSFDALLVAGFGGPESMAEVPDFLQRVSGGHIPPDRLAEVEHHYARFGGVSPVNAQHRALAAALGEALVARGIDVPIANANRHSMPYMDQALADLQSRGIRRVLTLVPTPYASYSGCRAYREELLAGTRIDDEGRPALQVVKLDPYADLPALVTAQVQLLRAALADHPDAHLVFTTHSIPTAMAETSGPHGNAYIPQHLALIDAVMAELAALGLRPSWELAYQSRSGSPRTPWLEPDINDVITRLAGEGVRDVICSPIGFLTDHMEVVWDLDTEAAATAAEHSMAFTRVATVGTLPVFIEGLADLIVAALSTKPGTGPDAPAARHWCTPDCCPNARIAGRPTIPGFAAGPR

SEQ ID NO: 10320 - protein, 492 aa, Lactobacillus plantarum
IWNRKTRYTPYEQWPATKLPQLVAQARQSKWRMQHHIQPTSGLLNDPNGFSYFDGQWHLFYQVFPFGPVHGLKSWQHVTSKNLVDWHDEGLAIRPDTPYDSHGAYTGTALPIDDQLFIMYTGNVRTADWQRESYQLGAWMDTDNHIKKLSRPLIAHAPAGYTSSFRDPDLIRTDHGYYALIGAQTTTEIGAILVYFSKDLTTWTCQGELNVPANARGYMIECPNLVWIDQQPVLLFCPQGLSQTTTPYQNIYPNMYLVADQLDLAQAQFTEPHALTQLDDGFDVYATQAINAPDGRALAVSWIGLPEISYPTDCENWAHCLSLVKELTLKDGHLYQNPVAAVDDLRTTAHDLVFEQQRATVAALNGSFELLLTVPADKTVTVNIADQQESGQLQVTVDANHGQVMIDRRHTGNSFAEDYGQTRQVELPAHKTIKIRLIIDVSVFECYIDNGYSVMTGRFFLNATPSRLNVQGDTTAVTGKVWEWRQSEHTGV

SEQ ID NO: 10321 - protein, 183 aa, Cytophaga hutchinsonii
MITEKEQIRISKFLSLVLRHQPELIGLQLNEQGWAHIETLLEKSAAYGVSFDKQTLKYLVATNSKKRFAFSPDAEYVRASQGHSVDIELGYKNQKPPEILYHGTAEKFMQSILETGLEKCRRQHVHLSSTIETAIHVGQRHGKPVVFTVLAQQMYANDFSFYLSDNGVWLTDHVPVIYLTINP

SEQ ID NO: 10322 - protein, 256 aa, Zea mays
  misc_feature (37)..(37): Xaa can be any naturally occurring amino acid
TKQGRSPQLRLLRYVRTSGSPPRRAKKWLCRRWWWTXVVFPPVARPPGSAGSHFLGGAGVRGLEIGGNFVKFTAIGVYLEDAAVPALARKWGGKTAGELASDAAFFRDVVTGGFEKFTRVTMILPLTGEQYAGKVTDNCVAFWKAAGLYTDAEGVAVEKFKQVFKPHTFPPGASIHFTHSPAGVLTVAFSRDSSVPGAGGVAIDNKLLCEAVLESIIGEHGVSPAAKLSLAARVSELLTKGTAAAALRAEPVSVTA

SEQ ID NO: 10323 - protein, 319 aa, Wolbachia sp.
LCDKKIQLGINLTKGLGAGALPDVGKGAAEESIDEIMEHIKDSHMLFITAGMGGGTGTGAAPVIAKAAREARAAVKDRAPKEKKILTVGVVTKPFGFEGVRRIRIAELGLEELQKYVDTLIVIPNQNLFRIANEKTTFSDAFKLADNVLHIGIRGVTDLMVMPGLINLDFADIETVMSEMGKAMIGTGEAEGEDRAISAAEAAISNPLLDNVSMKGAQGILINITGGGDMTLFEVDAAANRVREEVDENANIIFGATFDQAMEGRVRVSVLATGIDGRNNKSETSPISQSEDSEKEKFKWPYSQSESTQDKTLETKPAE

SEQ ID NO: 10324 - protein, 482 aa, Pseudomonas fluorescens
MLDVPLLIGGQSCPARDGRTFERRNPVTGELVSRVAAATLEDADAAVAAAQQAFPAWAALAPNERRSRLLKAAEQLQARSGEFIEAAGETGAMANWYGFNVRLAANMLREAASMTTQVNGEVIPSDVPGSFAMALRQPCGVVLGIAPWNAPVILATRAIAMPLACGNTVVLKASELSPAVHRLIGQVLQDAGLGDGVVNVISNAPADAAQIVERLIANPAVRRVNFTGSTHVGRIVGELSARHLKPALLELGGKAPLLVLDDADLEAAVQAAAFGAYFNQGQICMSTERLIVDAKVADAFVAQLAAKVETLRAGDPADPESVLGSLVDASAGTRIKALIDDAVAKGARLVIGGQLEGSILQPTLLDGVDASMRLYREESFGPVAVVLRGEGEEALLQLANDSEFGLSAAIFSRDTGRALALAQRVESGICHINGPTVHDEAQMPFGGVKSSGYGSFGGKASIEHFTQLRWVTLQNGPRHYPI

SEQ ID NO: 10325 - protein, 252 aa, Symbiobacterium thermophilum IAM 14863
MRCALDGEGVFRITLNRPERLNAFNQAQHEGLIAALQQAERDPAVRCVVITGEGRAFCAGQDLQSIGDMPIGDLVRRYYNRWIAQIRSLEKPVLAAVNGVAAGAGVSLALACDLIVMAESAAFIQAFARIGLVPDSGASYFLPRLVGYHKAMELALFGDRVSAAEALSLGLCNRVVPDDQFEPAVAEWAGWLARGPRAVGWIKRQLNRGLERSLDEVLALEAYHQEIAAATEDAREGIRAFVERREPRFTGR

SEQ ID NO: 10326 - protein, 319 aa, Wolbachia sp.
LCDKKIQLGINLTKGLGAGALPDVGKGAAEESMDEIMEHIKDSHMLFITAGMGGGTGTGAAPVIAKAARVARAAVKDRAPKEKKILTVGVVTKPFGFEGVRRMRIAELGLEELQKYVDTLIVIPNQNLFRIANEKTTFSDAFKLADNVLHIGIRGVTDLMVMPGLINLDFADIETVMSEMGKAMIGTGEAEGEDRAISAAEAAISNPLLDNVSMKGAQGILINITGGGDMTLFEVDAAANRVREEVDENANIIFGATFDQAMEGRVRVSVLATGIDGRNNKSETSPISQSEDSEKEKFKWPYSQSESTQDKTPETKPDE

SEQ ID NO: 10327 - protein, 492 aa, Lactobacillus plantarum
IWNRKTRYTPYEQWPATKLPQLVAQARQSKWRMQHHIQPTSGLLNDPNGFSYFDGQWHLFYQVFPFGPVHGLKSWQHVTSKNLVDWHDEGLAIRPDTPYDSHGAYTGTALPIDDQLFIMYTGNVRTADWQRESYQLGAWMDTDNHIKKLSRPLIAHAPAGYTSSFRDPDLIRTDHGYYALIGAQTTTEIGAILVYFSKDLTTWTCQGELNVPANARGYMIECPNLVWIDQQPVLLFCPQGLSQTTTPYQNIYPNMYLVADQLDLAQAQFTEPHALTQLDDGFDVYATQAINAPDGRALAVSWIGLPEISYPTDRENWAHCLSLVKELTLKDGHLYQNPVAAVDDLRTTAHDLVFEQQRATVAALNGSFELLLTVPADKTVTVNIADQQESGQLQVTVDANHGQVMIDRRHTGNSFAEDYGQTRQVELTAHKTIKIRLIIDVSVFECYIDNGYSVMTGRFFLNATPSRLNVQGDTTAVTGKVWEWRQSEHTGV

SEQ ID NO: 10328 - protein, 98 aa, Arabidopsis thaliana
ITSNAALSCGSINSSLVACIGYVFQGGVILQACCSGIHNLMSRANKRPNRQHACHCMQRAATALCSGLNAGRSAGNPNACAVNSPYITSLAPYCKTVW

SEQ ID NO: 10329 - protein, 134 aa, Mycobacterium leprae
MQMVPAPAQGAIAVECRAGDSRLVAVLAALDDADTRAAVTAERVLLAELEAGCSAPVGAIAQVVESIDGEGRVFEELSLRGCVAALDGSDVIRASGISTSGRASELGLAVAVELFELGARELMWGARSDRARGS

SEQ ID NO: 10330 - protein, 263 aa, Burkholderia vietnamiensis G4
MIELDYVDDGAIACATLKRPPANAFTADGLRQLQDTVAELNANPRVRALVITGDGPKFFSAGADLNTFADGDAAVARAMAARFGAAFEALHDARVVTIAAINGYAMGGGLECALACDMRIAETHAQMALPEASVGLLPCGLGTQTLPWLVGEGWAKKIILAGARVDAATALRIGLVEDVVESGAARDAALALARNVVRQSPHALAYSKELIGLARRGVPRSAALAVERERFVDLFDTADPREGVAAFLGKRAPQWHTDGDTQR

SEQ ID NO: 10331 - protein, 302 aa, Prochlorococcus marinus str. MIT 9211
MAHKLDGKQLAGEIEQRLSHEITLCLKKGVRPPGLAVIRVGDDPASQVYVSNKEKACRRAGIKSFGCHLDANSSFREIEEQIIKLNSNQEVDGILLQLPLPIGLDAGRLLKVIDPRKDADGLHTLNLGRLLKDEIGPRSCTPAGVMALLAANQIEIKGKNTVVIGRSILVGKPMALMLQAANATVTLVHSHTRDLIGFTKQAEILVVAAGKPQLIGLEHVKEKSVVVDVGIHRVFKDQNLGDAGGYKLCGDVRREEVDDFVSAITPVPGGVGPMTVAMLLVNTVNSWQQHCDLSLSLDDLLP

SEQ ID NO: 10332 - protein, 179 aa, Zea mays
  misc_feature (115)..(115): Xaa can be any naturally occurring amino acid
MAENADLVEWPKKDKRRFLHVVYRVGDLDRTIQFYTECFGMKVLRKRDVPEEKYSNAFLGFGPETSNFVVELTYNYGVSSYDIGTGFGHFAISTQDVSKMVEAVRAKGGNVPREXSGPVKGGEQGPLPLAKDPDGYTFWSLTTERSTPLEPSLQRKVSGGGNFAPAIQFFEKAPWKGTS

SEQ ID NO: 10333 - protein, 486 aa, Mycobacterium sp. KMS
MINANLIINGREETSDRTIDVVSPADIRVLLGSVPDAAPGQVDEAVAAAAMAFPEWSSRPLEERQGALLAAAGTIHDMIEEYAPILSRENGKILEESHVDLEFASGICGYTAGISAEILADQQIRDTGGTTLIRRRPIGPVAAITPWNFPVVLAFMKLAPALVAGNTVVLKPAANSPLVLAEIIRALQQHFPPGVLNMVTGGDAVGEALVAHPRIRKIGFTGGIDTGRKVMAAAARDIKRVTLELGGNDPAILLDDVDLSPETMRQIVKGAFGTTGQVCFGLKRIYVPTRIHDRFVEAFSAAVDEIVVGPGDDPRVTMGPLNNAQQKNLVEKIVDDARSSGATVTTLGQRLDSAAWDHGHFMMPSVVTEADPRLAIVEEEQFGPVVPVLKYDELDDVIRLVNQSQYGLAASIWTSDEERAFLLGRRFDTGSVFINSHTFTSLDPRAPFGGAKASGLGREFSPASLDSYTELQTISRRIGPPGPPLS

SEQ ID NO: 10334 - protein, 509 aa, Burkholderia vietnamiensis G4
MNANATPQPGQDVPTVKLLIDGAFVESATSEWRDIVNPATQQVLARVPFATAAEVDAAVQAAHAAYATWKNTPISARMRIMLKFQALVRANQQRIAKTLTAEQGKTLPDAEGDIFRGLEVVEHACSIGTLQLGEFAENVAGGVDTYTLRQPLGVCAGITPFNFPAMIPLWMFPMAIVCGNTFVLKPSEQDPLSTMELVELAIEAGVPQGVLNVVHGGKEVVDAICTHPLVKAISFVGSTAVGTRVYNLGSQHGKRVQSMMGAKNHAILLPDANREQAINALVGAGFGAAGQRCMATSVAVLVGSAREWLPDIVAKAKTLKVNAGSEAGTDVGPVVSRGAKARILSLIDAGVKEGAKLELDGRDVKVPGFEDGNFIGPTIFSAVTTDMTIYTHEIFGPVLVVMEVDTLDEAIALVNANPMGNGVGLFTQSGAAARKFQSEIDVGQVGINIPIPVPVPFFSFTGSRGSKLGDLGPYGKQVVQFYTQTKTVTARWFDDDTTAGPVNTTIRLH

SEQ ID NO: 10335 - protein, 109 aa, Glycine max
  misc_feature (46)..(46): Xaa can be any naturally occurring amino acid
VPKSIRLNDMSFSVFNEGLTESEMSSHMNSLASKNKCFKSYIGMGXYNTHVPPVILRNIMENPAWYTQYTPYQAEISQGRLESLMNFQTMISDLTALPMSNASLLDEGT

SEQ ID NO: 10336 - protein, 108 aa, Pseudoalteromonas tunicata D2
MSDKIIQLTDDSFETDVLKADKPVLVDFWAEWCGPCKMIAPILDDVASEYADRVVVGKLNIDQNSATPPKFGIRGIPTLLLFKDGQVAATKVGALSKTQLIEFLENNI

SEQ ID NO: 10337 - protein, 560 aa, Arabidopsis thaliana
MASSPALICDTEAWKDLKGHVEDIKKTHLRDLMSDANRCQSMMMEFDGLLLDYSRQRATVETMDKLLNLAKASQLTEKISRMFNGEHINSTENRSVLHIALRAPKDAVIKADGMNVVPEVWNVLDKIKEFSDKIRSGSWVGATGKPLKDVIAIGIGGSFLGPLFVHTALQTDPEALESAKGRQLRFLANIDPVDVARNISGLNPETTLVVVVSKTFTTAETMLNARTLREWITAALGASAVAKHMVAVSTNLALVEKFGIDPNNAFAFWDWVGGRYSVCSAVGVLPLSLQYGFSMVEKFLKGASSIDQHFQSTPFEKNIPVLLGLLSVWNVSFLGYPARAILPYSQALEKFAPHIQQVSMESNGKGVSIDGLPLPFETGEIDFGEPGTNGQHSFYQLIHQGRVIPCDFIGIVKSQQPVYLKGEVVSNHDELMSNFFAQPDALAYGKTPEQLQKENVSENLIPHKTFSGNRPSLSLLLPELTAYNVGQLLAIYEHRVAVQGFVWGINSFDQWGVELGKVLATQVRKQLHSSRTQGTAPEGFNYSTTTLLKRYLETSSEPQM

SEQ ID NO: 10338 - protein, 303 aa, Methanothermobacter thermautotrophicus str. Delta H
MMTDYDMIVIGAGPAGLTAGIYGGRQGSSVLMLDKGPAGGLGLEVPMMENYPGFEMIAGMSLVTKMKKQATAVAELREMEEVKEIEKGDVFTVKTSRDTYTASAIIFATGSKHRQLGVPGENDLLGRGVCYCATCDGPLYKGRKVLMVGGGNSAAQEAVFLKNIGCDVSIVHRRDELRADKYLQDKLREMEIPVIWNSVVKEIGGDERVEEVIIHNRVTGRDETLKVDGVFIAIGEEPLNQLAVDLGVEVDKGGYIITDKFQRTNVPLVYAAGDITGGLNQWVTACAEGAIAATYAYREIQSY

SEQ ID NO: 10339 - protein, 560 aa, Arabidopsis thaliana
MASSTALICDTEAWKDLKGHVEDIKKTHLRDLMSDANRCQSMMMEFDGLLLDYSRQRATVETMDKLLNLAKASQLTEKISRMFNGEHINSTENRSVLHVALRAPKDAVIKADGMNVVPDVWNVLDKIKEFSDKIRSGSWVGATGKPLKDVIAIGIGGSFLGPLFVHTALQTDPEALESAKGRQLRFLANIDPVDVARNISGLNPETTLVVVVSKTFTTAETMLNARTLREWITAALGASAVAKHMVAVSTNLALVEKFGIDPNNAFAFWDWVGGRYSVCSAVGVLPLSLQYGFSMVEKFLKGASSIDQHFQSTPFEKNIPVLLGLLSVWNVSFLGYPARAILPYSQALEKFAPHIQQVSMESNGKGVSIDGLPLPFETGEIDFGEPGTNGQHSFYQLIHQGRVIPCDFIGIVKSQQPVYLKGEVVSNHDELMSNFFAQPDALAYGKTPEQLQKENVSENLIPHKTFSGNRPSLSLLLPELTAYNVGQLLAIYEHRVAVQGFVWGINSFDQWGVELGKVLATQVRKQLHSSRTQGTAPEGFNYSTTTLLKRYLETSSEPQM

SEQ ID NO: 10340 - protein, 560 aa, Arabidopsis thaliana
MASSTALICDTEAWKDLKGHVEDIKKTHLRDLMSDANRCQSMMMEFDGLLLDYSRQRATVETMDKLLNLAKASQLTEKISRMFNGEHINSTENRSVLHVALRAPKDAVIKADGMNVVPEVWNVLDKIKEFSDKIRSGSWVGATGKPLKDVIAIGIGGSFLGPLFVHTALQTDPEALESAKGRQLRFLANIDPVDVARNISGLNPETTLVVVVSKTFTTAETMLNARTLREWITAALGASAVAKHMVAVSTNLALVEKFGIDPNNAFAFWDWVGGRYSVCSAVGVLPLSLQYGFSMVEKFLKGASSIDQHFQSTPFEKNIPVLLGLLSVWNVSFLGYPARAILPYSQALEKFAPHIQQVSMESNGKGVSIDGLPLPFETGEIDFGEPGTNGQHSFYQLIHQGRVIPCDFIGIVKSQQPVYLKGEVVSNHDELMSNFFAQPDALAYGKTPEQLQKENVSENLIPHKTFSGNRPSLSLLLPELTAYNVGQLLAIYEHRVAVQGFVWGINSFDQWGVELGKVLATQVRKQLQSSRTQGTAPEGFNYSTTTLLKRYLETSSEPQM

SEQ ID NO: 10341 - protein, 313 aa, Zea mays
PRVRFSEVRKMTRRFSSRLGQGGFGSVYKGELPNGGVPVPVAVKMLEDSTGEEEFISEVATIGTIHHANVVRLLGFCSERSRRALVYEFMPNASLEKYIRCSSQEQSLITTASKMLEIATGIARGIEYLHQGCDQRILHFDIKPSNILLDYNLNPKISDFGLAKLCARDQSVVALTAARGTMGYIAPELYSRNFGTVSCKSDVYSFGMVVLEMVVVSAKRRKCSPAETEDQNDDVCVPEWIYEEIVTGQEPREMARGERDMVRKLAIVALWCIQWNPPNRPSMTTVVNMLTDSLQSLKIPPKPFVSSFVGQQP

SEQ ID NO: 10342 - protein, 459 aa, Streptococcus agalactiae NEM316
MIELKGVNFKYKNTKNSCLDNIDLEIKKGEFVLISGASGSGKTSITRVINKLIPYYYEGELEGTVKINNDLVSSYQMFELSEIVGSVFQNPRTQFFNVDTNSEIVFGLENQGVSRDILKKRLKETCETLDINKLQNRNIFHLSGGEKQKIAFASVYAMNPDIYLLDEPSSNLDIPTIEVLKRHLSVLKNSGKTVIISEHRIYYLMDLVDKVIYMKNGQIQKSYSKEDFLNLSEDEIKAMALRCRKKTKLNIEMSNNEKHPYLQVNDFSIYRKDNCIINNMNFSANKGDIVAVIGSNGVGKTTFLRTLCGLHDNYKGDVLLNSKKTDAKKRRQKNYMVMQDVNYQLFAESVFAECKLGIENVSDDLIEEILNEFDLSDYKNNHPNTLSGGQKQRLAIAVGLICKKEIFVLDEPTSGLDYTNMVKTVELLKRYSKDKIIFIATHDTEFANLICNRVLDLEK

SEQ ID NO: 10343 - protein, 560 aa, Arabidopsis thaliana
MASSTALICDTEAWKDLKGHVEDIKKTHLRDLMSDANRCQSMMMEFDGLLLDYSRQRATVETMDKLLNLAKASQLTEKISRMFNGEHINSTENRSVLHVALRAPKDAVIKADGMNVVPEVWNVLDKIKEFSDKIRSGSWVGATGKPLKDVIAIGIGGSFLGPLFVHTALQTDPEALESAKGRQLRFLANIDPVDVARNISGLNPETTLVVVVSKTFTTAETMLNARTLREWITAALGASAVAKHMVAVSTNLALVEKFGIDPNNAFAFWDWVGGRYSVCSAVGVLPLSLQYGFSMVEKFLKGASSIDQHFQSTPFEKNIPVLLGLLSVWNVSFLGYPARAILPYSQALEKFAPHIQQVSMESNGKGVSIDGLPLPFETGEIDFGEPGTNGQHSFYQLIHQGRVIPCDFIGIVKSQQPVYLKGEVVSNHDEFMSNFFAQPDALAYGKTPEQLQKENVSENLIPHKTFSGNRPSLSLLLPELTAYNVGQLLAIYEHRVAVQGFVWGINSFDQWGVELGKVLATQVRKQLHSSRTQGTAPEGFNYSTTTLLKRYLETSSEPQM

SEQ ID NO: 10344 - protein, 566 aa, Bacillus cereus ATCC 14579
MFGKTASEALVDLLIDWGVEHIYGMPGDSINSIIEALRKKQDKIKFIQVRHEEAGALAAAAYAKLTGKLGVCMAIAGPGAIHLLNGLYDAKLDKAPVLAISGQVETDLLGTDFFQEVNLERMFDDVAVYNQRIMSAEQLPAVVNQAIRMAYTKKGVSVLTIPDDVPKFEVKSGARVTNTSFTLPDLFPQEEDLDAAKLAITEAKKPVILAGKGTKHARESLLALAEHIGAPIVLTLPAKGIIPDEHPLCIGGLGLIGTKPSYEAMKHADTLIMVGTSYPFTGFLPEKAKTIHIDTDPAQIGKRYATDIGLAGDADKTLRWLIENVEEHTDHSFLEHHQEMMKKWEEKLHDQEEDSSIPIKPQRVMHALQQVAHDDAILSVDVGNVTVWTARHFRMTNQQFVISSWLATLGCGLPGALAGKIAFPDKQVFAVCGDGGFGMTMNDFVTAVKYKLPIVVVVLNNNKIAMIKFEQEVMGNIEFETDLTNPDFAKYAEACGGIGYRVENLDELLPAFQNAVKQNKPCIIDVVVDANEAPMPAKITFGQAAGYTKHMIKELFEEGKIDLPPL

SEQ ID NO: 10345 - protein, 1666 aa, Magnetospirillum magnetotacticum MS-1
MGLVVLANVVLIGRVISPQLDMQARVQSGIAGQQLMGLGLEAASRISAERGPSNGALGSELPLPPERTEALKAARTATDAALRQVVESLDKSPSLRHGAAVRNSLFAAGSQLETARRQIDALIARPRPERADQEVAAAVGGMVKVLPLMAPGLNVIETNLAQADPALINYVTISRLSTEMRDFAGQIGSIFTAPYVARRPLTVDELAQVERSLGTIAALDTQLRLAIDKTGSPPDLLAALATIDAEFFGGGLPLIRRIRDVGRSSGEYGMNAAEFAKIYVPQMNSILGLRAAALAAIADRMIHLEHETDATLRFNLLLTVIVVMSVLACFLLIRLRMSRPLSQVHRALGQLARGEDHMDLPVARRHDEIGEVVEALTQLAAVVRDRAHESYVSGLVARITADLQAAEDFESLARGLFSNMAPVIDLGFAVYFRCDGETGELVECGGYARHGDAPARSPSDGLVAECAAERREILISNPPEGYLKIRTGLLSAAPGAILLLPVVGGDECLGVIEMATMKPIEGRDRDVLDAVLPVLAMRMEILARSERTRQLLLATQRQAGELTAQQERIQALLSEQDAIFDNAPMGIMYTASGRIQRANPAMAELLGYTVESMKGLEASRLFATADSYREFGGLVAPKLGAGEGIHQEWDLIRGDGQLFSAMISAKGVRLEGLERASIWIVEDITERKRLEREMRESGERLRRILENSPAGVSINTEDGHSLFSNQRMAEMLATTPEELSHRSATEFWFDPTDRQEFIATLRRDGYVRDYQSRFVRADGTPITVLLASALTEFADGRYLVSWAYDITERQKAEDAVRFAGAEQQAIFEAATVGIAFLKNRVIVRGNPQLDRLFGYEPGELVGQSTRIWFPDDESFADVGDAYEALSRGEVHQREQCYVRKDGTRFWCRISGSAIDPSDLSRGAVWMLEDVTDARAAAEALAKARDVAEDAAKTKSDFLANMSHEIRTPMNAIIGMSHLALKTELNPRQRDYVKKIQQSGQHLLGIINDILDFSKIEAGKLEVEVTEVHLDKVLENVGNLISDKASAKGLELLFDLGAGVPLDLMGDSLRLGQVLINYANNAVKFTEEGEIVVAVRLLEDLGAEVMLRFEVRDTGIGLTEEQKARLFQSFQQADTSTTRKFGGTGLGLAISKKLAELMGGEVGVDSVPGEGSTFWFTARMGKGKPRAPLLPEPELVGRRMLVVDDNENARAVLVDMLSSMSFEVDSVEGGAAAIDAIREAMLDQPYEVVFLDWQMPGMDGLEVAERIHDIRLPFPPHLIMVTAYGREEIIKGAQAADIGEVLVKPVNPAALFDSIMRVFASDDRRSEEDEGTEGGTVDVSGLKGVRVLLVEDNELNQEVASEILGDAGLVVDIAANGQIAVDKAKTGHYDLILMDMQMPVMDGVTATREIRAMGFQDLPIIAMTANAMQADREKCLEAGMNDHIAKPIDPDSMFATMMKWLGRQPVAVAAPAASPDEAVAVIARLRALLADSDPEAEELVEAHGDLLRGLLGKKADRFAALVSGYDFDKALKLLPAEAKEDGRRNLPEIDPDIFDFEVMGSIYKWDLERLRPILAGFLDDAAAKVAKIEAAQPEDTALREIAHGLKGAANTAGAIRLGRLAADMESSAKADNTAALAMLAPLMAPTLDELKGALAPFLSSVTEKASS

SEQ ID NO: 10346 - protein, 444 aa, Frankia sp. EAN1pec
MSFATIETAIAEIAAGRPVVVVDDADRENEGDLIFAAEAATPELLAFMVRHTAGVVCVPLDPAEVDRLDLDQMVPQNTDRMGTAFTISVDARSGVTTGISAADRARTIRLLADPATQPGDLTRPGHIFPLRAKEGGVLRRPGHTEAAVDLARLAGLRPAGAICEIVNEDGSMARLPELTAFAREHGLALISIADLIAYRRRTEKQVVRVAEARIPTRYGSFRAVGYRGTLDGVEHIALIRGEVGDGENVLVRVHSECLTGDVFGSQRCDCGNQLDAALRAVAAEGRGVVLYVRGHEGRGIGLMHKLQAYQLQDAGHDTVDANLALGLPADARDYGTGAQILVDLGVRGLRLLSNNPTKRAGLEGYGLRIVEQVGLPVTHTPENLRYLTTKRDRMGHDLPGLPGLPDLPKVVGGDETAGAHEAHRWPVTAAPVADRADRACEEAR

SEQ ID NO: 10347 - protein, 363 aa, Pseudomonas syringae pv. phaseolicola 1448A
MALNTIEELVEDIRQGKMVILMDDEDRENEGDLIMAAECVQPEHINFMARFARGLICMPMTRERCETLKLPLMAPRNGSGFGTKFTVSIEAAEGVTTGISAADRARTVQAAAAKEAKAEDIVSPGHIFPLMAQAGGTLARAGHTEAACDLARMAGFEPTGLICEVMNDDGTMSRRAELEEFARQHDIKIGTIADLIHYRMIHERTVQRIAEQPMDSELGSFNLVTYRDSVEGDVHLALTLGKICAEEPTLVRVHNMDPLRDLLMVKQPGRWSLRAAMRAVSEAGSGVVLLLGHPLDGDVLLAHIRETAGQQPIKTPTTYSTVGAGSQILRDLGVRKMRLMSSPMKFNAISGFDLEVVEYVPSE

SEQ ID NO: 10348 - protein, 138 aa, Citrus sinensis
ARWAHKALWHASLWHMHESHHRPREGPFELNDVFAIINAVPAIALLSFGFFHKGLVPGLCFGAGLGITVFGMAYMFVHDGLVHKRFPVGPIADVPYFRRVAAAHQLHHSDKFHGVPYGLFLGPKELEEVGGLEELEKE

SEQ ID NO: 10349 - protein, 423 aa, Pisum sativum
MATLLPSTISNPNKLTSYSSLFHNASLSTSPSSLTTTSVSIYPKTQRFGRRFGSVRCSLAYVDNAKIKVVGIGGGGNNAVNRMIGSGLQGVDFYAINTDAQALLHSAAENPIKIGELLTRGLGTGGNPLLGEQAAEESKEAIANALKGSDLVFITAGMGGGTGSGAAPVVAQISKEAGYLTVGVVTYPFSFEGRKRSLQALEAIEKLQKNVDTLIVIPNDRLLDIADEQMPLQDAFRLADDVLRQGVQGISDIITIPGLVNVDFADVKAVMKDSGTAMLGVGVSSGKNRAEEAAEQATLAPLIGSSIQSATGVVYNITGGKDITLQEVNRVSQVVTSLADPSANIIFGAVVDDRYTGEIHVTIIATGFSQSFQKKLLTDPRAAKLLDKVAEGKESKTVPPPLKSSNFSSKVESRPPPPRKLFF

SEQ ID NO: 10350 - protein, 492 aa, Pediococcus acidilactici
IWNRKTRYTPYEQWPATKLPQLAAQARQSKWRMQHHIQPTSGLLNDPCGFSYFDGQWHLFYQVFPFGPVHGLKSWQHVTSKNLVDWHDEGLAIRPDTPYDSHGAYTGTALPIDDQLFIMYTGNVRTADWQRESYQLGAWMDTDNHIKKLSRPLIAHAPAGYTSSFRDPDLIRNDHGYYALIGAQTTTEIGAILVYFSKDLTTWTCQGELNVPANARGYMIECPNLVWIDQQPVLLFCPQGLSQATIPYQNIYPNMYLVADQLNLAQAQFTEPHALTQLDDGFDVYATQAINAPDGRALAVSWIGLPEISYPTDRENWAHCLSLVKELTLKDGHLYQNPVAAVDDLRTTAHDLVFEQQRATVAALNGSFELLLTVPADKTVTVNIADQQESGQLQVTVDANHGQVMIDRRHTGNSFAEDYGQTRQVELTAHKTIKIRLIIDVSVFECYIDNGYSVMTGRFFLNATPSRLNVQGDTTAVTGKVWEWRQSEHTGV

SEQ ID NO: 10351 - protein, 319 aa, Wolbachia sp.
LCDKKIQLGINLTKGLGAGALPDVGKGAAEESIDEIMEHIKDSHMLFITAGMGGGTGTGAAPVIAKAAREARAAVKDRAPKEKKILTVGVVTKPFGFEGVRRMRIAELGLEELQKYVDTLIVIPNQNLFRIANEKTTFSDAFKLADNVLHIGIRGVTDLMVMPGLINLDFADIETVMSEMGKAMIGTGEAEGEDRAISAAEAAISNPLLDNVSMKGAQGILINITGGGDMTLFEVDAAANRVREEVDENANIIFGATFDQAMEGRVRVSVLATGIDGRNNKSETSPISQSEDSEKEKFKWPYSQSESTQDKTPETKPAE

SEQ ID NO: 10352 - protein, 407 aa, Sphingomonas sp. KA1
MITYDVVIVGAGHGGAQAAIALRQRHFEGSIAVIGEEPDLPYERPPLSKDYLSGKKAFERILIRPATFWEERGVRMLTGRRVAAVNPAAHTVSTDDGESFGYGRLIWAAGGRPRRLTCTGHDLAGVHQVRTRADVDQMIVELPETARVAVIGGGYIGLEAAAVLAEMGKHVTVLEAQDRVLARVAGEALSRFFEAEHRAHGVDVRLGAAVDCIEGRDGRAVGVRLADGTLVAADMVIVGIGIVPAVEPLLAAGALGMNGVQVDEHGRTSLPDIFAIGDCALHINAFADNLPIRLESVQNANDLATTVARTLTGDPEPYVSVPWFWSNQYDLRLQTVGLSAGHDAAITRGNPVDRSFSIVYLNQGRVIALDCVNAVKDYVQGKALVATRVAASPEALSDPALPLKAFV

SEQ ID NO: 10353 - protein, 321 aa, Aquifex aeolicus VF5
MRIGILTAGGDAPGMNAVIRAVVRSAEREGHEVIGIKRGYKGLIEGDFIKLTSRDVGGILDRGGTILLSSRDPRYKKLEYREKAYKNLNEQGIEALIILGGEGTLAGAKLTAEETGIPVIGVPCTIDNDVGGTEYCIGYDTALRNAVDAIDKIRDTASSHERIFIVEVMGRNRGFIAVEAGLATGAELILIPEERFPREQIPEEIEKAKKLGKLHFIIVLAEGYCRAKELEDFLLEKIGDKYGEIRSTVLGHIQRGGIPTHFDRIMGTKFGVVAYESLIAGERSGFVAYEKGKFYIEDFEKAQEYKPIDREAYKLNTRLAI

SEQ ID NO: 10354 - protein, 521 aa, Oryza sativa
MAARPCQAAARPGTASTRIREASRATTRAKEVRGRAVANGGGHGAACDKGKWFGGELTNEINGVGGADGVAARWTRRRGGAAPRVHGRGRREGEVAMGSLELLVTRPRTHWLLRCSVADGEGESGASNNNGAAVMEVKREKDSMGGARVFIAKARSGHRSMGSSSGSDRLRDLQAFDDTKAGVKGLVDAGVTTIPAIFHHHPLLLDDAEEDADVIPVIDLQADVDRGHLVGQVRAAAQCVGFFQVVNHGIPGELLEEMLAAVRRFNEQPAEGKKAWYSRDSGRRVKFNSNFDLFQSPAANWRDTLLLELTPRPGPAAEEIPPACRGVVGEYVEAVQRLGGALLELLSEALGLPPEYLGGLGGGLATMAAHYYPPCPEPHLTLGTTRHSDPSFLTVLLQESKGLQVLMRQRQRWVDVPPVAGALVVNIGDLLQLVSNDLFRSVEHRVLATTAAAEPRLSVACFFRPDYACTRVYAPVTTTPPPPLYRSTTMPEFLSHYRAKGLDGRSALHHFRIPPPSSPPH

SEQ ID NO: 10355 - protein, 415 aa, Aquifex aeolicus VF5
MKRRVVITGIGAVTPLGTGVKKFWENLVKGVSGVDYIKSFNPDEYGIPVKIAAEVKDFNPEDFMDKKEARKASRFVQFAIAAVKEALEDSGLLESEYDPYRVGVIIGTGIGGLKDIEDQTLILKEKGARRVSPFFIPYGISNMASGLVAIKWGFKGPNYCVTSACATGNHAIGDAFRLIQKGDIDIAIAGGTEAAITPLGVAGFASMKALSTRNDEPQKASRPFDRDRDGFVMGEGAGILILEEYERAKARGAKIYAELVGYGATDDAYHITSPHECGEGAYECMRLALEDAGIKPEEVDYINAHGTSTPLNDKTETMAIKQLFGEHAYKLKISSNKSMIGHLLGAAAAVEAVATIKTIETGVIPPTINLENPDPECDLDYVPNKAVEYPVRVALSNAFGFGGTNATLVFRKIEE

SEQ ID NO: 10356 - protein, 676 aa, Ralstonia eutropha JMP134
MCGFAGFLGGIPGSLEDRAILLTRMGQRILHRGPDHGDLWCEPGAPFGFTHRRLAIVDLSPAGRQPMISASGRYVIVFNGEIYNHPEIRAELESAGAAPRWRGHSDTETLLAGIDAWGADATVRRTIGMFAFAVWDRQTHSLTLARDRLGEKPLYYGWQGSGQARAFLFGSELKALRPHPAFDGSIDRNALTLYMRYNNVGGGHSIYQGIAKLPPAHLLTVSMLAREPVLRAYWSGSAAALQGKQDPFTGGPQEAVDSLDALLRDAVARQMMADVPLGAFLSGGIDSSTVVALMQSQSTQPIRTFSIGFHDAGYNEAAHAKAVARHLGTSHTELYVSPEHAMAVIPRLPEIYDEPFSDSSQIPTLLVSGLARQHVTVSLSGDAGDELFGGYNRYQITAELWGRLARIPGPVRAAAAWGLTRLSPHQINRVAALLPMASRWSHVGEKVHKGAGVMAAHTVDELYRGMVSQWQCPDAIVMGGAEPATLPEPVARALAMLGDVERMMAADLLTYLPDDILTKVDRAAMARSLETRIPFLDHRVVEFAWRLPLAYKIRQEDAGHTTKWVLRRVLDRYVPRELIERPKMGFGVPIDAWLRGPLRDWADDLLSEERLRREGFLNPQPIRQRWTEHLSGRRNWQHPLWCVLMFQAWLGHETTERTAPPLTDIPTSDRRLACAF

SEQ ID NO: 10357 - protein, 349 aa, Arabidopsis thaliana
MAVSATGFEGFEKRLEISFFETTDFLDPQGKSLRSLTKSQLDEILTPAECTIVSSLTNSFVDSYVLSESSLFVYPYKIIIKTCGTTKLLLSIPHILRLADSLCLTVKSVRYTRGSFIFPGAQSYPHRSFSEEVALLDDYFGKLNAGSKAFVMGGSDNNPQRWHVYSASSTEESAVCDKPVYTLEMCMTGLDNIKASVFFKTNSVSASEMTISSGIRNILPGSEICDFNFEPCGYSMNSIEGDAVSTIHVTPEDGFSYASFETVGYDLKALNFKELVDRVLVCFGPEEFSVAVHANLGTEVLASDCVADVNGYFSQERELEELGLGGSVLYQRFVKTVECCSPKSTLGFC

SEQ ID NO: 10358 - protein, 319 aa, Wolbachia sp. group A
LCDKKIQLGINLTKGLGAGALPDVGKGAAEESIDEIMEHIKDSHMLFITAGMGGGTGTGAAPVIAKAAREARAAVKDRAPKEKKILTVGVVTKPFGFEGVRRMRIAELGLEELQKYVDTLIVIPNQNLFRIANEKTTFSDAFKLADNVLHIGIRGVTDLMVMPGLINLDFADIETVMSEMGKAMIGTGEAEGEDRAISAAEAAISNPLLDNVSMKGAQGILINITGGGDMTLFEVDAAANRVREEVDENANIIFGATFDQAMEGRVRVSVLATGIDSRNNKSETSPISQSEDSEKEKFKWPYSQSESTQDKTLETKPAE

SEQ ID NO: 10359 - protein, 524 aa, Prochlorococcus marinus str. NATL2A
MNNNDKWARYCDLLYSDDSLGFWLDISRMDVAINDFEDFNEIYSKAFDALESLENGSIANIDEGRQVGHYWLRNPKVAPSPEISDSITKEIQDISKFGSSILNGEITNSDGEKYTDVFWIGIGGSGLGPLLIKESFKRESIGLDLHFLDNVDPEGISHKLNSILPNLNSTLFVVVSKSGGTPEPLIGMEQAMKFVRDNNQNWSSRAIAITSKGSKLDLLAHNENWLDIFDLPDWVGGRTSITGAVGLLPAALIGADINKFLNGASQMDALTRVKDIKNNPAALLSLAWFKSGNGKGLRDMVVLPYRDRLEVFSRYLQQLVMESLGKKFDRDENQVNQGIAVYGNKGSTDQHAYVQQLRDGIDNFFVNFIEILHDPLEIVEVKNKRPGDYLSGFLQGTRSALTEGGRQNLTITFKSFDESSLGALIALFERAVSLYAELINVNAYNQPGVEAGKKAATKIIKLQKEIEELLDDGKQRTLNEINDALSSDSTESIYLILRKLSENSDHYSMIGNQSNPDKLIISKT

SEQ ID NO: 10360 - protein, 365 aa, Oryza sativa
  misc_feature (319)..(319): Xaa can be any naturally occurring amino acid
MASSAAAATATDRAALVKAFDETRTGVRGLVESGVSAVPDIFRHPDPYASVPLAPPGVSIPVVDLSLPAPLAAEAAAGAAREWGFFYLVNHHDLVPPGFTDGLLAATRAFHELPAAERAAHYGRSVDGGVDYFSNFDLYRSGAASWRDTIKVTFGPSRPDTGRIPAACRAEVVGWDAHATAVARAVMALLCEGLGLAADALEEASCLEGRVMVCHYYPVCPEPERTMGVVPHTDPVVLTILAQDDVGGLQVKHTNEDGERYWVDAKPVPGALMINVGDLLQIMSNDKYKSVEHRVVMNSHEEARVSSAIFYNPGKRGDXVFYGPLPELVSSENPPKYRNFTMPEFLGTFFKRELASNALIEHFKI

SEQ ID NO: 10361 - protein, 433 aa, Listeria monocytogenes str. 4b H7858
MAENMTIKDDFIHAFSSNANEPDWFLDIRRNAFKAYGELDLSFVDKTKITRWNFTKFETFIPFKEGVTNETLPEKVANLVDLDNKEANFYVQMDERPARLQLQQELVDQGVIFTDIISAVKNHPELVKKYFMKDAVQVNEHKLTAFHAALVNGGIFLYVPKNVEVKAPIQAVFVQDKAESPLVNHVLLVADDNSAVTYVENYVTVDNAPKGIVSIVEEVIAEKNARITFGGVDNLASDVTTYVNRRGHIGTDSQIEWALGLMNDGDTINENVTNLMGDGSSADVKTVTVGRGKQTQNVTTRVTHYGKASNGTILSHGVMKERATTIFNGIGHIKHGASKSDAQQESRVLMLSPEARGDANPILLIDENDVVAGHAASVGRVDPLQLFYLMSRGISQKEAERLVIHGFLDPVVRQLPIESVKTMLREVIEGKVR

SEQ ID NO: 10362 - protein, 624 aa, Ralstonia eutropha JMP134
MAMARQDEERQRQMRALIALGRERGYLTHADINDHLPDNFTQTAAMETIVSTFSDMGVTVYEQAPDADTLLLSDTAPAGASDDQADEEAEAALSTVDSEFGRTTDPVRLYMREMGASELLTRAGEIEIAKRIEGGLQGMIQAIAACPSVVSTMLADVDRIVAGELRIDELVYGISDDVNDSEIALASDDVHVEADASDDDPVGDDVEPDAGDSEKANAARLEQLTLDSLAIFARVRALFEQLPDAPVTGKARSAAVEQLRSKIQSELAPIRFTAKTIDRLCASVHEQLTEVRAIERSILEIAVDRCGMPRKVFVESFPGNETDLKWTSKMAATSRQFGAALKRHLPAIQAGQQKLIDIEAKVTLPLQQFKQINRQMSAAELKMRQAKRELIEANLRLVISIAKKYVNRGMHFLDLIQEGNIGLMKAVDKFEYRRGWKFSTYATWWVRQAVTRALADQARTIRVPVHMVEMINKLNRISRDFRQQTGREAHPAVLAERMEMSEEKVRSILRSARQPVSLETPVGDDADATLGDMIEDVSASSPAEAAIHADMRAAIDEALDGLSPREAKVLRMRFGLDTTSDRTLEEVSKQFDVTRERIRQIESQAMRKLLHPSRADKLRPFLER

SEQ ID NO: 10363 - protein, 319 aa, Wolbachia sp.
LCDKKIQLGINLTKGLGAGALPDVGKGAAEESIDEIMEHIKDSHMLFITAGMGGGTGTGAAPVIAKAAREARAAVKDRAPKEKKILTVGVVTKPFGFEGVRRMPIAELGLEELQKYVDTLIVIPNQNLFRIANEKTTFSDAFKLADNVLHIGIRGVTDLMVMPGLINLDFADIETVMSEMGKAMIGTGEAEGEDRAISAAEAAISNPLLDNVSMKGAQGILINITGGGDMTLFEVDAAANRVREEVDENANIIFGATFDQAMEGRVRVSVLATGIDGRNNKSETSPISQSEDSEKEKFKWPYSQSESTQDKTLETKPAE

SEQ ID NO: 10364 - protein, 151 aa, Brassica napus
STHASGHCYPPCPEPDLTLGATQHTDRSFITILLQDHIGGLQVLHDGYWIDVPPNPNALILNVGDLLQLITNDKFVSVEHRVLANGGKEPRTSVASFFVHPPSISPRVYGPIKELLSEENPPKYRETTPEASNHYVARKGDGNNSLSHLRI

SEQ ID NO: 10365 - protein, 556 aa, Polaromonas sp. JS666
MAVVDIQVPDIGDFDEVTVIELLVKPGDTVKAEQSLITVESDKASMEIPSSQAGVVKELKVKLGDKVKQGSIVLTVEAAGAAVPATASAAAASAAPAASTAAAPAPAPAPAPVPASAPAAAAGPVEVRVPDIGDFKDVSVIEVLVKPGDTIKLEQSLVTVESDKASMEIPSSAAGVLKELKVKLGDIVNIGDLLAILEGSVAATGTSPAPAPAAPAAAPAPVSAAAAAPAAAVMPAHEPATAQQGSLPHASPSVRKFARELGVPLAEVKGTGPKGRITQDDVQAFTKSVMAGDTRTQAQAAKAPASSGGTGVGLDLLPWPKVDFTKFGPVERKDMSRIKKISGANLLRNYVMIPHVTNHDDADITELEAFRVSTNKENEKAGLKVTMLAFLIKASVAALKKFPEFNASLDGDQLVYKQYYHIGFAADTPNGLVVPVLKDADKKGVLQISQEMGELAKKARDGKLTPAEMQGASFTISSLGGIGGRYFTPIINAPEVAILGVSKSQMEPVWDGKAFQPRLMLPMSLAWDHRVIDGAGAARFNAYLGQILADFRRVLL

SEQ ID NO: 10366 - protein, 108 aa, Coccidioides posadasii
RGDKLRASKTMATRLLNHPKVEVKFNTVAVEVQGEPQPRGLMAHLKIKNVVTGNEEVVPANGLFYAVGHEPATGLIKGQVETDSDGYIATKPGTSYTSVEGVFAAGDV

SEQ ID NO: 10367 - protein, 381 aa, Dianthus caryophyllus
MMVPTLGNSNYNTVSPMNGDDNNTMALSAIGFEGFEKRLEISFFEPGIFVDPEGKGLRALSKAQLDEILGPAECTIVDSLANESVDSYVLSESSLFVYSYKIIIKTCGTTKLLHSILPILTLADGLCLDVKSVRYTRGSFIFPGAQSYPHRSFSEEVAVLDKYFGNLGTGSKAFVMGSPAKPQKWHVYSATAEPSYDDPVYTLEMCMTGLDKGKASVFFKSESASAAVMTETSGIRKILPDSAICDFDFEPCGYSMNAIEGPAVSTIHITPEDGFSYASFEAVGYDLKIVDVNQLVERVLNCFQPREFSIAVSVDTADKVLEQYCAVNVAGYCREEGGVEGLGVGGSVLYQKFGKVATVSGLNKSPKCCRKEEENDEKREC

SEQ ID NO: 10368 - protein, 382 aa, Pseudomonas fluorescens Pf-5
MSAPVVIVGTGLAGYNLAREFRKLDSETPLLLITADDGRSYSKPMLSTGFGKNKDADGLSMAEPGAMAEQLKAEVRTHTRISGIDPGHKRLWIGEEAVAYRDLILAWGAETVRVPVQGDASELIFPINDLEDYARFRSAAAGKRRVLLLGAGLIGCEFANDLILGGYSVDLVAPCEQVMPTLLHPAAAAAVQAGLESLGARFHLGPVLNRLQRSADGLEAHLSDGQVIACDLVVSAIGLRPRIDLAAAAGLVVNRGVVVDRELKTSHANIYALGDCAEVDGLNLLYVMPLMSCARALAQTLAGKPTAVSYGPMPITVKTPVCPLVVSPPPRGAEGVWTAEGQGADIKVLCRNADGQLLGYALTGAAVMEKLALNKELPALLA

SEQ ID NO: 10369 - protein, 419 aa, Symbiobacterium thermophilum IAM 14863
MNLDGWTVGIDSAWTMVAASLVFFMQAGFAMVEAGFTRSKNAVNIVLKNLMDFVVASIAFWAVGFGLMFGADAGGLVGLGGFGSPESRFLHLGLAIPFFVFLWFQTTFAGTAATIVSGAMAERTKFSAYLLFSAAITLLVYPVGGHWIWGGGWLAQLGFVDFAGSTVVHSVGAWAALAGLLLLGPRIDRYDKQGRPRKIVGHNLVLAALGVFILWFGWFGFNPGSTLSATDPNIGRIAVTTNLGAAAGALAALLSAYLRTRTWEAEAALNGALAGLVGITAGCAFVSPAASILIGAVAGMLLAPGTALLERFRIDDAVGAIPVHGFAGLWGTLAVGLFHETQGLLVGGGPQLLAIQALGAAAVFAYAFAVCLLIFATIKATVGLRVSQEEELSGLDTEHGARAYPDFQPAAAHGYTGDD

SEQ ID NO: 10370 - protein, 377 aa, Dianthus caryophyllus
MTIPMMGNTTDDNNNMTISAIGFEGFEKRLEISFFEPGIFVDPEGKGLRALSKAHLDEILGPAECTIVDSLANESVDSYVLSESSLFVYSYKIIIKTCGTTKLLNSIPPILRLAETLFLDVKSVRYTRGSFIFPGAQSFPHRSFSEEVAVLDNYFAKLGAGSKAIVMGSPGKPQKWHVYSATAETNYDDPVYTLEMCMTGLDKEKASVFFKSQSASAAVMTESSGIRKILPDSVICDFDFEPCGYSMNAIEGPAVSTIHITPEDGFSYASFEAVGYDLQVVDLNLLVERVLACFEPKEFSIAVHADTDTADKVLARNCSVNVIGYSREEGGIEELGLGGSVFYQKFCKGTAPVCPPAPKKTLKCCWKEEEIDEEMEF

SEQ ID NO: 10371 - protein, 238 aa, Pasteurella multocida subsp. multocida str. Pm70
MQVFNLTTCLPVRSMMKPYLIAPSILSADLARLGEDVEQVLTCGADVIHFDVMDNHYVPNLTFGPAICQALRHYGITAPIDVHLMVKPVDRLIPDFAKAGANYITFHPEATEHIDRSLQLIRDCGCKSGLVFNPATPLSYLDYVMDKVDVILLMSVNPGFGGQSFIPSTLDKLREARQRIDESGFDIRLEVDGGVKVSNIADIARAGADMFVAGSAIFDQPDYQKVIDEMRQQLATVE

SEQ ID NO: 10372 - protein, 281 aa, Polaromonas sp. JS666
MTAQLIDGNALSRQLRAEVARRAAALRARGITPGLAVVLVGENPASQVYVRNKVKACQDNGLHSVLEHYPAALSEAELLARVHALNNDPAIHGILVQLPLPAHIDAHKVIEAIAPGKDVDGFHVASAGALMVGQPGFWPCTPYGCMKMLESIGYDLRGKHAVVIGRSNIVGKPMAMMLLQKNATVTICHSATKDLKAMTLQADVIVAAVGKRNVLTADMVKPGAVVIDVGMNRNDEGKLCGDVDFEGVKEVAGYITPVPGGVGPMTITMLLVNTLESAERL

SEQ ID NO: 10373 - protein, 207 aa, Fusarium culmorum
VAVKKIMKPFSTPVLAKRTYRELKLLKHLKHENVISLSDIFISPLEDIYFVTELLGTDLHRLLTSRPLEKQFIQYFLYQIMRGLKYVHSAGVVHRDLKPSNILVNENCDLKICDFGLARIQDPQMTGYVSTRYYRAPEIMLTWQKYDVEVDIWSAGCIFAEMLEGKPLFPGKDHVNQFSIITELLGTPPDDVINTIASENTLRFVKS

SEQ ID NO: 10374 - protein, 414 aa, Desulfotalea psychrophila LSv54
MKRRVVVTGVGLVTPLGTGVEKTWENLCAGKSGIDTITRFDTSDFAVKIAAEVKDFQAEDFFDKKSAKHMDLFAQYGVAAAVMALKDSGFEITEENCERVGVITGCGMGSLPMIEKYHQVFMEKGPRKISPFFIPMAIPNMPSGHISMRIGAKGPNLALTTACAAGTHAVGEAFNAVSSGKCLAIVAGGTESVICPTGIGGFTALKALSTRNDDPAASSRPFDKDRDGFVMAEGAGMLILEDYEHAIARGARIYAEMAGYGLSSDAYHITAPPEDGEGGARAMKMAIEDAGFQPEDIDYINAHGTSTPLNDRCETRAIKSVFGEHAYKLAISSTKSMLGHMLGATGGVEAVLTALSLDKQFVLPTINLQEPSPECDLDYTPNVGRSMKMRAAISNSFGFGGTNAVVAMKQYIGE

SEQ ID NO: 10375 - protein, 614 aa, Symbiobacterium thermophilum IAM 14863
MCGIAGWADWKRDLSREGPVLETMIAPLADRGPDAGGIWCSGHCAFGHRRLAVVDLVGGAQPMVRSRGDRTYVLVYNGQLYNTQELKEELTARGHAFSTQSDTEVLLVAYMEWGPECTRRLNGIYAFAVWDEAGQQLFLARDRFGVKPLFYKTMGSAILFGSELKALLAHPLVQPEVDAEGLAEVLYLGPSRTPGHGVFRGVREVLPGHWLLFDRAGVRTQPYWQLESRPHTDGPAETAERVRELLREAVRRQLVADVPVATLLSGGLDSSAITAFAAEAFRAQGRGPLHTWSIDYAENDRHFRAHAFQPDPDSAYAGTMAESLGTVHHEVVIDTPQLVDALEKAALIRDLPGMADVDAALFLFCREIKKGATVVLSGECADEVFGGYPWFHRPGPETGRTFPWIRSLEARTALLQPGVTGPIRAEDYVAQRYSNTVARVPRLPGEEPEEARIRELFYLNLAWFMATLLDRNDRMSMAVGLEARVPFCDHLLVEYVWNIPWRLKTYGGREKGILREALRGVLPEAVRTRRKSPFPKTHHPEYFRAVRDRVLALLDDPACRLHKIVRADRVRALARQDHEATDLPWFGQLMSGPQYFAWLIQLEAWLRHYKVVLV

SEQ ID NO: 10376 - protein, 384 aa, Arabidopsis thaliana
  misc_feature (269)..(269): Xaa can be any naturally occurring amino acid
MTLPELPKDLVEEILSFVPATSLKRLRSTCKGWNRLFKDDKRFTRIHTEKAAKQFQPLTLTKNYRICPINVNLHGTTPSLEVKNEVSLLDPHSKNSAAQFNIDRVFHCDGLLLCTSQKDSRFVVWNPLTGVTKWIELGDRYNEGMAFILGYDNKSCNKSYKAMSFNYLDKDSEIYEFSSDSWRVIDDIIKPPHYMDYFRECFSLKGNTYWLGIDRRRRPPDLRITLIKFDFGTEKFGYVSLPPPCQVHGFEASNLSVVGDEKLSVLVQXGSTSKTEVWVTSKIGEANVVSWSKVLSLYPKPDVGFWHGLSFLLDEEKKVVLCCKSKGWMEEEDEENVYSVGEDTKFILLNFGVQTIGGYSPIIVNYVPSLGQIELAGSKRKRDY

SEQ ID NO: 10377 - protein, 177 aa, Zea mays
  misc_feature (35)..(35): Xaa can be any naturally occurring amino acid
AWSRPRYFQSDEVNAAIVTCGGLCPGLNTVIRELXGGYKGFYSKNTVALTPKSVNDIHKRGGTVLGTSRGGHDTAKIVDCLQDRGINQVYIIGGDGTQKGASVIYEEVRRRGLKCSVVGVPKTIDNDIAVIDKSFGFDTAVEEAQRAINAAHVEAESAENGIGVVKLMGRNSGFIAM

SEQ ID NO: 10378 - protein, 606 aa, Desulfovibrio desulfuricans G20
MPRGMACPCIHEEQRLLKNKASGLSGEFRPASCPVAYVWCRTLLSDFKQKAETHMASRQEMTESGAIAACGEGADSRSLEAEILRLRQREKELLHERQMLKDILKAIPDMLTVHDRDGNVMFSNCKPNEDCWQHHGGTKHGLRCYQCHFHGDRNCEDCYIPDVFDSGEQRVVEMYNPDMKSFRSITVFPVRDGQGDVTMVAEYVRDVTATRNLERELRVAKEAAEAADRAKSEFLASMSHEIRTPMNGVLGMLDLAMTTSLDEEQREYLEAVQNSAEALLSLINDILDFSKIEAGMVELDQQVFRLSKRLSSLHTMFVHRAAERNLEFAINISPDVPDGLSGDPLRLRQIVVNLLDNAFKFTDQGQVVLSVEVLERGAENVLLQFSVQDTGPGILERHQERIFDSFAQADASFTRRHQGSGLGLAICKRLTGLMGGDIKVRSTPGEGSTFVFSARFGVAVLDEEPVRVRSRTAEPAPVRGRILVAEDHPMNLMFIEKFLKKQGYESVSVTDGSEVVPALTRSRFDLVLMDIAMPAMDGMEATRAVRAATGMKTPSDVPIIAMTAHAMKGDREQFLEAGMDDYIGKPINSDNLRSMIIRHLQARRKS

SEQ ID NO: 10379 - protein, 388 aa, Wolbachia endosymbiont of Drosophila melanogaster
MDKIIIKKFGGTSLTDLNRVANLIKNDIEKGCNVIVVVSAVAGFTDQMVFQARQISNLSYRQELSEYDVMLSAGEQISCGLLAITLQSIGVNAKSWLAWQLPIVTDDFYSESKIKTIKIERVKRSFAEGYTAAIIAGFQGINDDRITTFGRGGSDISAVAFAVAFGVRTCEIFTDIDGIYTADPRIVPKARKLKFISYDEMLEMSSSGAKILHNRSVQLAMKHNIKVQVLSTFKEVEGTTVLHKRDVLERYLITGITYSTNEALVTFTNLANNLRTLRDIAGANVKIDMIHGSSFVISKFDIDLMEKLLNKNENYAINDNVAKISIIGIGVMSNTEVMHRTLKVLSEKKIEILAITTSEIKISIIVQKECAVALVKDLHTEYELDMQH

SEQ ID NO: 10380 - protein, 492 aa, Mycobacterium tuberculosis CDC1551
MATIHPPAYLLDQAKRRFTPSFNNFPGMSLVEHMLLNTKFPEKKLAEPPPGSGLKPVVGDAGLPILGHMIEMLRGGPDYLMFLYKTKGPVVFGDSAVLPGVAALGPDAAQVIYSNRNKDYSQQGWVPVIGPFFHRGLMLLDFEEHMFHRRIMQEAFVRSRLAGYLEQMDRVVSRVVADDWVVNDARFLVYPAMKALTLDIASMVFMGHEPGTDHELVTKVNKAFTITTRAGNAVIRTSVPPFTWWRGLRARELLENYFTARVKERREASGNDLLTVLCQTEDDDGNRFSDADIVNHMIFLMMAAHDTSTSTATTMAYQLAAHPEWQQRCRDESDRHGDGPLDIESLEQLESLDLVMNESIRLVTPVQWAMRQTVRDTELLGYYLPKGTNVIAYPGMNHRLPEIWTDPLTFDPERFTEPRNEHKRHRYAFTPFGGGVHKCIGMVFDQLEIKTILHRLLRRYRLELSRPDYQPRWDYSAMPIPMDGMPIVLRPR

SEQ ID NO: 10381 - protein, 122 aa, Allium cepa
GYLKKGRYAQRVGTGAPVYLAAVLEYLAAEVLELAGNAAKDNKKNRIIPRHVLLAIRNDEELGKLLGGVTIAHGGVLPNINPVLLPKKIAAKGIRDSKSPKKTAAKSPKKVAAENTQKSVAA

SEQ ID NO: 10382 - protein, 461 aa, Penicillium chrysogenum
MMQNLPFEPEFEQAYKELASTLENSTLFQKKPEYRKALQVVSVPERVIQFRVVWEDDKGQVQINRGYRVQFNSALGPYKGGLRFHPTVNLSILKFLGFEQIFKNALTGLNMGGGKGGSDFDPKGKTDNEIRRFCVSFMTELCKHIGADTDVPAGDIGVTGREVGFMFGQYKKIRNQWEGVLTGKGGSWGGSLIRPEATGYGVVYYVEHMIQHASGGKESFAGKRVAISGSGNVAQYAALKVIELGGSVISLSDSQGALVLNGEEGSFTAEEINTIAEIKVQRKQIAELATQDAFSSKFKYIPGARPWTNIAGRIDVALPSATQNEVSGDEAKALIAAGCKFIAEGSNMGSTQEAIDVFEAHRDANPGAAAIWYAPGKAANAGGVAVSGLEMAQNSARVNWSREEVDSRLKKIMEDCFNNGLSTAKEYVTPAEGVLPSLVAGSNIAGFTKVAEAMKEHGDWW

SEQ ID NO: 10383 - protein, 595 aa, Campylobacter coli RM2228
MNIRKIRVEKIRQFMIKEKLDAYLILSSDPHLNEYLPSFYQSRAFVSGFKGSAGSLIITSQDAFLWTDGRYWIQAQKELEGSGILLQKQDANNTFLKWLKENLNEEQNLGIDFSVLSLSLQKEIQKNCKAELKNIDLISLIWEDRPALPKNKVYEHKLEYCSYSRKEKLLLVREKMNKLQAKNHLISSLDDIAWITNLRGNDVCYNPIFLSHLLILEGKALLFIDREKIDFELEKKLNLDGICLKEYNKIQDELKKLQNTNLLIEPSKTTALLIEILDKSVEILEEINPSTHLKAIKTDKEIAHIQNAMIEDGVALCKFFTWLEENIKNNTQISELDIDTKITEFRSQSPYYISNSFSTIAGFNANAALPHYKAEKESFSYIQKNGLLLIDSGGQYKNGTTDITRVVAIGELNGEQIHDYTLVLKAHIAIASTIFPKDIAMPLLDAITRAPLWQEQLDYTHGTGHGVGYFLNVHEGPQTLSYFSPVLEKTKAKEGMLTSIEPGIYRTGKWGIRLENLVVNAKIENPKNKDFGEFLYFKPLTLCPFEISCIDKTLLDAKEKAWINTYHKEVYEKLSPKLHDNLKALKWLKERTKAV

SEQ ID NO: 10384 - protein, 375 aa, Penicillium chrysogenum
MEEEVAALVIDNGSGMCKAGFAGDDAPRAVFPSIVGRPRHHGIMIGMGQKDSYVGDEAQSKRGILTLRYPIEHGVVTNWDDMEKIWHHTFYNELRVAPEEHPILLTEAPINPKFNREKMTQIVFETFNAPAFYVSIQAVLSLYASGRTTGIVLDSGDGVTHVVPIYEGFSLPHAISRVDMAGRDLTDYLMKILAERGYTFSTTAEREIVRDIKEKLCYVALDFEQEIQTASQSSSLEKSYELPDGQVITIGNERFRAPEALFQPNVLGLESGGIHVTTFNSIMKCDVDVRKDLYGNIVMSGGTTMYPGISDRMQKEITALAPSSMKVKIIAPPERKYSVWIGGSILASLSTFQQMWISKQEYDESGPSIVHRKCF

SEQ ID NO: 10385 - protein, 355 aa, Streptococcus agalactiae NEM316
MGFEQRLTRCQTAISQLSCDALLITNLTNIFYLTGFSGTNATVLISPKHRIFVTDSRYALIAKNTVREFDIIISREPLAAILKIIRDDALMAIGFETDISYHMYKHMVEVFEDYRLIEAPSVVEKLRMIKDATELAIIRQACRISDQAFLDVLDFIKPDRTTELQVANFLDFRMRELGATGPSFDFIVASGYRSAMPHGVASQKTIQSGEALTLDFGCYYQHYVSDMTRTIHIGHVTDQEREIYDIVLKSNQAIIDNVKSGMKRCDYDYLARQVIENSGYGNHFTHGIGHGMGLDVHEIPYFGKSEGVIASGMVVTDEPGIYLDNKYGVRIEDDLLITETGCEVLTSAPKELIVL

SEQ ID NO: 10386 - protein, 560 aa, Arabidopsis thaliana
MASSTALICDTEAWKDLKGHVEDIKKTHLRDLMSDANRCQSMMMEFDGLLLDYSRQRATVETMDKLLNLAKASQLTEKISRMFNGEHINSTENRSVLHVALRAPKDAVIKADGMNVVPEVWNVLDKIKEFSDKIRSGSWVGATGKPLKDVIAIGIGGSFLGPLFVHTALQTDPEALESAKGRQLRFLANIDPVDVARNISGLNPETTLVVVVSKTFTTAETMLNARTLREWITAALGASAVAKHMVAVSTNLALVEKFGIDPNNAFAFWDWVGGRYSVCSAVGVLPLSLQYGFSMVEKFLKGASSIDQHFQSTPFEKNIPVLLGLLSVWNVSFLGYPARAILPYSQALEKFAPHTQQVSMESNGKGVSIDGLPLPFETGEIDFGEPGTNGQHSFYQLIHQGRVIPCDFIGIVKSQQPVYLKGEVVSNHDELMSNFFAQPDALAYGKTPEQLQKENVSENLIPHKTFSGNRPSLSLLLPELTAYNVGQLLAIYEHRVAVQGFVWGINSFDQWGVELGKVLATQVRKQLHSSRTQGTAPEGFNYSTTTLLKRYLETSSEPQM

SEQ ID NO: 10387 - protein, 552 aa, Arabidopsis halleri subsp. gemmifera
MASSTALFCDTEAWKDLKGHVEDIKKTHLRDLMSDANRCQSMMMEFDGLLLDYSRQRAPVETMDKLLNLAKAAQLTEKISRMFNGEHINSTENRSVLHVALRAPKDAVIKADGKNVVPEVWNVLDKIKEFSEKIRSGSWVGATGKPLKDVIAIGIGGSFLGPLFVHTALQTDPEALESAKGRQLRFLANIDPVDVARNIKGLNPETTLVVVVSKTFTTAETMLNARTLREWITAALGASAVAKHMVAVSTNLALVEKFGIDPNNAFAFWDWVGGRYSVCSAVGVLPLSLQYGFSVVEKFLKGASSIDQHFQSTPFEKNIPVLLGLLSVWNVSFLGYPARAILPYSQALEKFAPHIQQVSMESNGKGVSIDGLPLPFETGEVDFGEPGTNGQHSFYQLIHQGRVIPCDFIGIVKREVVSNHDELMSNFFAQPDALAYGKTPEQLQKENVSENLIPHKTFSGNRPSLSLLLPELTAYNVGQLLAIYEHRVAVQGFVWGINSFDQWGVELGKVLATQVRKQLHSSRTQGTALEGFNYSTTTLLKRYLETSSEPQM

SEQ ID NO: 10388 - protein, 421 aa, Haemophilus influenzae 86-028NP
MLYPEYPEYDNFNESGALIKVVGVGGGGGNAVNHMVMNMVKQEMGGTFVGESSLTSEEHGRIVFYAVNTDAQALRKSQVQQTVQIGGETTKGLGAGANPNIGRKAAEDDQDEIRKMLEGADMVFIAAGMGGGTGTGAAPVVAKIAKELGILTVAVVTKPFAFEGKKRMQFAELGIKDLSQYVDSMIIIPNQQIQKVLPKNAKLIDAFAAANDVLRNSVMGISDMITSPGLINVDFADVRTVMSVQGQAMIGFGSAVGEPGAGRAEEAARLAVRNDLLEKIDLSNAQGILVNITAGMDLVFDEFNIIGETIGSFASEEATVVVGTSLVPEMSDEIRVTIVATGLGEIAGNEPIQVVRQGLSTQNIEGEGRVNIVPELHRRESVEVSRSASEEYQRPLDKPITDRLEAFKKNNFFNPAQREEN

SEQ ID NO: 10389 - protein, 485 aa, Staphylococcus epidermidis ATCC 12228
MVEFMKKFNIKHSFMLTGFAFMVTTSLFSHQAHAEGNHPIDINFSKDQIDRNTAKSNIINRVNDTSRTGISMNSDNDLDTDIVSNSDSENDTYLDSDSDSDSDSDSDSDSDSDSDSDSDSDSDSDSDSDSDSDSDSDSDSDSDSDSDSDSDSDSDSDSDSDSDSDSDSDSDSDSDSDSDSDSDSDSDSDSDSDSDSDSDSDSDSDSDSGTSSGKGSHTGKKPGNPKGNTNRPSQRHTNQPQRPKYNQTNQNNINNINHNINHTRTSGDGAPFKRQQNIINSNSGHRNQNNINQFIWNKNGFFKSQNNTEHRMNSSDNTNSLISRFRQLATGAYKYNPFLINQVKNLNQLDGKVTDSDIYSLFRKQSFRGNEYLNSLQKGTSYFRFQYFNPLNSSKYYENLDDQVLALITGEIGSMPELKKPTDKEDKNHSAFKNHSADEITTNNDGHSKDYDKKKKIHRSLLSLSIAIIGIFLGVTGLYIFRRKK

SEQ ID NO: 10390 - protein, 270 aa, Oryza sativa (japonica cultivar-group)
GIAFQSPEEGFAKSNSLTMLDMLATGTSKPKVSAPPGFSAPARVPPGFSSGFSSHEGLNPPPGFSSHNGPNPPPGFSSQGGSNQIYGSAYSETRPFDYLLGINTSHYQPQLARQTSDIEFVDPAILAVGKGRMPGISDSGLEMKTSHTFPSQLQTSNDPRFQLLMQQNVPSHQNVGFAEHVQDAFNPMNDNYLASRLIPQNHGSLSSYTQMSLQQPRSSHLTNGHWDGWGDLRQGNNVSMPDMSRMLYPTEANNFHMLGSNDLYNRAFGL

SEQ ID NO: 10391 - protein, 455 aa, Sphingomonas sp. KA1
MGIELRMPALSPTMEEGTLAKWLVKEGDEVKSGDILAEIETDKATMEFEAVDEGIVGKILVAEGTEGVKVGTVIAVIGEDGEVTPSSAPVLTEVQAAPPAIAIERPVAAPRAADPAVPASTNMKMSTVREALRDAMAEEMRRDGRVFVMGEEVADYQGAYKVTQGLLEEFGPKRVIDTPITEYGFAGIGAGAAMGGLRPVVEFMTFNFAMQAIDHIINSAAKTNYMSGGQMRCPVVFRGPNGAASRVGAQHSQNYGPWYANVPGLVVIAPYDASDSKGLLKAAIRSDDPVVFLENELVYGRSFELPELDDHVLPIGKARIMREGSDVTIVSYSIGVGLALAAADALAAEGIEAEVIDLRTLRPLDKETILASLAKTNRLVVAEEGWPQCSIASEITAICMEDGFDHLDAPVLRVCNEDVPLPYAANLEKAAVIDAARIVVAVKRVCHRLAQNEIF

SEQ ID NO: 10392 - protein, 142 aa, Zea mays
  misc_feature (126)..(126): Xaa can be any naturally occurring amino acid
  misc_feature (137)..(137): Xaa can be any naturally occurring amino acid
MVVLVVATASDPASIGPAAAFLAMPGWSPGPPIPEGMESFTNGNVRLLKHERSIVAEDDLDRRWQEATGEAVSEVIFLSKHTAVSNRPALTVHPIGVPHLREDETPPQGGRPGWAAVPNPRIGPWXRLMQKCAADQXLVPEF

SEQ ID NO: 10393 - protein, 420 aa, Sphingomonas sp. KA1
MADIVIVGAGHGGAQCAIALRQAGFEGTVTIVGRECEPPYERPPLSKEYFAREKTFDRLYIRPPQFWEEKGVRLMLGIEVTAIDPASKQLTLSDGSSFGYGKLVWATGGDPRKLPVPGGSLSGVHGVRTREDCDTLMGEIDGGVKNICVIGGGYIGLEAAAVLTKMGCKVTLLEALPRVLARVAGPELSAFYEKEHRDHGVDLRTGATVEALEGEGRVTGVRLGDGSVLPADAVIVGIGIVPAVAPLIAAGAAGGNGVDVDEYCRTSLPDIYAIGDCAAFACDFADGKVMRIESVQNANDQATCVAKAICGDEKPYHAFPWFWSNQYDLRLQTAGLSVGYDQTVVRGSPDARAFSVVYLKGGKVIALDCVNMVKDYVQGRKLVEAGVSPNQQRLGDVSVALKELLPIQGDTHLRNGGAAV

SEQ ID NO: 10394 - protein, 216 aa, Oryza sativa
MNALAATSRNFRQAARLLGLDSKLEKSLLIPFREIKVECTIPKDDGTLASFIGFRVQHDNARGPMKGGIRYHPEVDPDEVNALAQLMTWKTAVAAIPYGGAKGGIGCAPGELSTSELERLTRVFTQKIHDLIGAHTDVPAPDMGTNSQTMAWILDEYSKFHGHSPAVVTGKPIDLGGSLGRDAATGRGVMYATEALLAEHGKSISGSTFVIQVSHN

SEQ ID NO: 10395 - protein, 677 aa, Synechococcus elongatus PCC 7942 [sequence omitted]

SEQ ID NO: 10396 - protein, 139 aa, Arabidopsis thaliana
MSRWSSCQEFLKHVESRNPGQPEFMQAVTEVIESLWPFIEKNPKYADASLLERIVEPERVVMFRVCWMDDKGVVQVNKGYRIQHSMAIGPYKGGLRFHPSVNLSILKFLAFEQTFKNALTTLPMGGGKGGSDFDPKGKS

SEQ ID NO: 10397 - protein, 360 aa, Azotobacter vinelandii
MSKQILVLPGDGIGPEIMAEAVKVLQLANEKYQLGFVLGYDELGGAAVDKYGVPLADETLERARRRCHPARRRRRSEMGRHRPGHPPGARPAENPFATGPVRQPAPGVLYPQLAEASTLRPEVVAGLDILIVRELTGGIYFGAPRESRLLANGERMAYDTLPYSESEIRRIAKVGFDMARVRGKKLCSVDKANVLASSQLWRAVVEEVAKDYPDVVLSHMYVDNAAMQLVRAPKQFDVIVTDNMFGDILSDEASMLTGSIGMLPSASLDADNKGMYEPCHGSRRPDIAGKGIANPLATILSVSMMLRYSFGQVEAANAIEQAVSKVLDQGLRTGDIWSEGCRKVGTAEMGDAVVAALATL

SEQ ID NO: 10398 - protein, 524 aa, Oryza sativa
  misc_feature (504)..(504): Xaa can be any naturally occurring amino acid
MASISGAAAPPSSSAACRLRLRRQLLLRPSHLRLRAPHSIADLSRSSSSSSEQQPSSTPAAPLASRPGQNGSTRGAVEKDPIKLWERYVEWLYQHKELGLFVDVSRMGFTEEFLRRMEPRMQRAFAAMRELEKGAIANPDEGRMVGHYWLRDPGLAPNSFLRTKIETTLDRILAFSQDVVSGKIKPPSSPAGRFTQILSIGIGGSALGPQFVSEALAPDNPPLKIRFIDNTDPAGIDHQIAQLGPELASTLVIVISKSGGTPETRNGLLEVQKAFRDAGLDFSKQGVAVTQENSLLDNTARIEGWLARFPMFDWVGGRTSEMSAVGLLPAALQDMVVLPYKDSLLLLSRYLQQLVMESLGKEFDLDGNRVNQGLTVYGNKGSTDQHAYIQQLREGVHNFFVTFIEVLRDRPPGHDWELEPGVTCGDYLFGMLQGTRSALYSNDRESISVTVQEVTPRAVGALVALYERAVGIYASLVNINAYHQPGVEAGKKAAGEVLALQKRXCKDPAEPLTLDQIAERCHCP

SEQ ID NO: 10399 - protein, 442 aa, Bacillus anthracis str. Sterne
MEIFNLVMVAILIAFTGFFVAAEFAIVKVRSSRIDQLVAEGKRGALAAKKVTTNLDEYLSACQLGITVTAMGLGWLGEPTIEKLLHPLFEKWNLNPSISSVLTFGLAFMLMTYLHVVVGELAPKTMAIQKAEKVTLLFAAPLMMFYKVMYPFIWVLNGSARVITGLFGLKPASEHEVAHTEEELRLILSDSYESGEINQAEYKYVNNIFEFDNRIAKEIMVPRTEIVGFYLEDSVEEHMKVIQNERYTRYPIFGEDKDDIIGMVNVKDFFIRYMTEDQKDLSSIRSYMRPIIEVMETTPIHDLLLQMQKKRIPMAVLYDEYGGTAGIVTFEDILEEIVGEIRDEYDEDEAPPIQHVNEQHIIVDGKVLISEVKDLFGLHIEEDDVDTIGGWIMMQNHEIEEGQHVEAEGYEFKVLEKDAYQIKRVEIRKMEEEQEEEKAATV

SEQ ID NO: 10400 - protein, 487 aa, Mesorhizobium sp. BNC1
METMMDVLGLTIDGEERAASDGRVFERYNPVTGDVATRAAAVNVDDAIAAVDAAAAAFPAWSQTSPGERRAILTAAADRLQAMSDDIVAAMAAEIGATAGWALFNVGLAADMLREAAGLTTQIKGEIIPSNRPGSLAMAIRQPAGVVLSIAPWNAPIILGVRSLAAPLACGNTVVMKTSEICPRTHSLIVQALNEAGLPKGVLNAVSNAPEDAAEIVETLIAQPAVRRVNFTGSTRVGRIIAELSGRYLKPALMELGGKAPLVVLDDADLDAAVAAAAFGSFMNQGQICMSTDRIVVDEKVADEFVGALAAKAKTLKASDPREGNTPLGCVVDAGAASRISQLISDAVAKGAVLSAGGGVDGTIIQATVLDKVTPSMRIYSEESFGPVVAVLRVGSVEEAVRVANDTEYGLSAAVFGRDVNRAMSVARRIQSGICHINGPTVHDEAQMPFGGVKASGWGRFGGSAGIHEFTELRWVTIQDGPLHYPF

SEQ ID NO: 10401 - protein, 483 aa, Bacillus cereus ATCC 10987
MDKKATFVNVEKKAMYINGEWITLQEQIEVNNPATKEIFATVPKGGVTEAKQAVDAAHEAFKSWSKLTAADRAVKLKKWFTLIDENKEEIAAIMTREQGKPFAEALGEVNYANSFVEWYAEEGKRVYGEMIPASHPNKRILVMKQPVGVMAAITPWNFPAAMITRKVAPALAAGCTAVVKPASQTPLTALKLAELAHEADIPKGVINIVTGSAKAIADTWMEDGRVRKVSFTGSTEIGKELMASAAQTMKKVSLELGGHAPFIVMNDADLDKVVEAVIGSKFRNAGQTCICTNRVFVQEEVYEVFAEKFQKSVGQLKVGDGFGDGTTVGPLIDENAVSKVQEHIADAIQKGGTVLYGGQKVAELDGHFMQPTVIGLANDTMLCMNEETFGPVAPVAKFKTVEEVIERANNTPYGLAAYIFTKDISQAFQISEALEYGIIGLNDGLPSVAQAPFGGFKESGIGREGGHFGIEEYLEIKYISLGL

SEQ ID NO: 10402 - protein, 373 aa, Triticum aestivum
MPSTESAAGVAWDRRRELQAFDDTKAGVKGLVDAGVTALPPIFRHSPESLEGITSSNHVAGAIPTVDLAAPRREDAVALVRHAAGTVGFFQVVNHGVPAELMAGMLEGVRRFNEGPAEAKQAIYSRDQARKVRFASNFDLFSSAAANWRDTLFFHLAPDPAPSEELPEAVRDVVTEYGHAVTKVGLSVLELLSESLGLSSDHLRDMDCAENLNAVCQYYPPCPEPYLTWGTKRHTDPGFLTVLLQDGMGGLQVLVDGKTWVDVPPVPGAFIINIGDLLQLVSNDQFRSVEHRVLANKSKDTARVSVASFFNTNIERSTRLYGPITDGRNPPIYRSVTAREFIATFNRIGLDGRSLDQYRLDRDTPTPAVEGCE

SEQ ID NO: 10403 - protein, 93 aa, Oryza sativa
  misc_feature (11)..(11): Xaa can be any naturally occurring amino acid
  misc_feature (55)..(55): Xaa can be any naturally occurring amino acid
WRAATMALSPXLRRAAAGGAPWRGVVGAGRAAPEVEPTKEETTTSSTPTPTPSPXGGGAKAKSAASTGLWDVLAFSGPAPEPINRRLAMVGFV

SEQ ID NO: 10404 - protein, 319 aa, Wolbachia sp. group A
LCDKKIQLGINLTKGLGAGALPDVGKGAAEESIDEIMEHIKDSHMLFITAGMGGGTGTGAAPVIAKAAREARAAVKDRAPKEKKILTVGVVTKPFGFEGVRRMRIAELGLEELQKYVDTLIVIPNQNLFRIANEKTTFSDAFKLADNVLHIGIRGVTDLMVMPGLINLDFADIETVMSEMGKAMIGTGEAEGEDRAISAAEAAISNPLLDNVSMKGAQGILINITGGGDMTLFEVDAAANRVREEVDENANIIFGATFDQAMEGRVRVSVLATGIDGRNNKSETSPISQSEDSEKEKFKWPYSQSESTQDKTLETKPDE

SEQ ID NO: 10405 - protein, 549 aa, Pasteurella multocida subsp. multocida str. Pm70
MNGARLVTESLKTHGVTTVFGYPGGAIMPVYDALYDAGIEHLLCRNEQGAAMAAIGYARSSGKVGVCIATSGPGAANLITGLGDALMDSIPVVAITGQVASPLIGTDAFQEADVLGLSLACTKHSFLVQSIEELPDVIAKAFEIAASGRPGPVLIDIPKDIQIAPTDVTPFTYSVAKPTALSQAHLTDALTLLKQAKRPVLYVGGGVGMAQAVPALREFLAVTQMPSVSTLKGLGSVHPDNPYYMGMIGMHGTKAANYAVQECDLLLAFGARFDDRVTGKLDTFAPHAKVIHADIDMAEIGKLRRPDVALCGDIVQAFNALSIPLNIAEWQAHIKQLKQTHDFCYSTNQGDTFINPLWLLNSLSKKKPQSAVITTDVGQHQMWSAQHMQHYAPENYITSAGYGTMGFGLPAAIGAKKARPDDEVILISGDGSIMMNIQELGTFKRGKTPVKIVLLDNQRLGMVRQWQELFFNARFSNTILDDNPDFVMLAAAFGIQGERITKGEEVEGALDRLLASKEAYFLHVCISSNENVWPLVPPNACNLDMVEQM

SEQ ID NO: 10406 - protein, 368 aa, Arabidopsis thaliana
MVKKGGTKRKIAIETIQKRDSLRVTCTKRREGLYSKASQLCLLSDAQIAILATPPSSESNVSFYSFGHSSVDAVVSAFLSGQRPVPKDNKETREDVGICLTRNNLGLGFWWNDESLARSENPQEISEAIDSMRTLLRNLKELRADEALACNQAFVNDREDLKNNDKCDFVSDHETHDQTLILQSASPICCIPENLNEITQEPNQTLNIQSSTSAICCVPDNSPENFNEITEEQDQIRSICETFCVMDNNAALPEMNLDYDQDIGFDTPFESALNDWFSDNTTHQEISAISSPNSCDENMTKATKPLEPQKDEKQLVPEEALIVLAGPLTRSKSKKFNQAINGLLKELKKNQEDVTQSSFIVITAQEAR

SEQ ID NO: 10407 - protein, 416 aa, Candidatus Kuenenia stuttgartiensis
MTVDIIMPQMGESVAEGTILKWLVNEGDYVEKEQPLVEISTDKIDTEIPSPSAGIIKKILYKEGAVLAVQTVIAQIEEGEIKAQAGTVKKEQEEKERIEISETAAIAGEREMHEKRYSPLVKKLAKEYNVSLTEIKGSGEFGRVTKKDIMEYISSKREITASKEKIVKEAERETLIPLHPKRKITAERMALSRQTAALVTTVFEVDMTPVTKYRELNREAMKREGIHLTYLPFIAFAVVQALKEHVALNSSWTDNGILQKNYINLGIAVALEDGLVVPVIKDADKKDMFQLAREIQEIAVNARSKKLKPDDVRGGTFTITNYGVNGSLFGTPLILQPQSAILGVGAVVKRPVILGDADAIAVRSMVYLSLSFDHRVMDGAHADAFLHKVKDILETWGESLYEQKKPNPPGGYGGVW

SEQ ID NO: 10408 - protein, 197 aa, Raphanus sativus
MPRSRSRVLILLLPLAFVFYLYRYLPSPAIVDQSSYSSIYHISVKDIDGNDVSLSKFTGKVLLIVNVASKCGLTQGNYKELNILYAKYKTKGLEILAFPCNQFGSQEPGSNKEIKDNICTTFKGEFPIFDKIEVNGENASPLYKFLKEQKGGLFGDSIKWNFAKFLVDKQGNVVDRFAPTTSPLEIEKDIEKLLAST

SEQ ID NO: 10409 - protein, 370 aa, Bradyrhizobium japonicum USDA 110
MATHKLLLLPGDGIGPEVMGEVKRLIDWLNSAGIAKFETDTGLVGGSAYDAHKVSISEGDMAKALAADAIIFGAVGGPKWDAVPYEVRPEAGLLRLRKDLGLFANLRPAVCYPALADASSLKREAVEGLDIMIVRELTGGVYFGEPKTITDLGNGQKRAIDTQVYDTYEIERIARVAFDLAKKRKNKVTSMEKRNVMKSGVLWNEVVTQVHKREYPDVTLEHQLADSGGMMLVKWPKQFDVIVTDNLFGDMLSDIAAMLTGSLGMLPSASLGEVDVKSKKRKALYEPVHGSAPDIAGKGLANPIAMISSFGMALRYSFDMGALADKVDAAIAAVLASGLRTADIKSEGTTAASTTQMGEAILKELQKLHA

SEQ ID NO: 10410 - protein, 959 aa, Arabidopsis thaliana
MSESEEKTCNDDPKQPTLVRDLVISILDRLRFSDFHRARCISSEWYYASKSCIRVTTPWIIMFPYNTDWKENSSCKAVLWVDEETRDYLVVWNYDGFFAYHKKGDDKNNWKVIQPLMNQRCVDMVCKESKLYVLTDTHVTVLDFSHADASPIQCASFKSPNYGNDSFCGKNLAVTLSGQVLIVIHSGGVYKMDPKSLEWSRTNSLGDEAFIFDLGITVAAKDGVMKNCIYFYADPPYRPRRRFVRNAESGISVYHIKTKKVVQVYQPALTASSPISFSSARWQNHKSHLNFEESLPTRISQKLESCTPLELSPAPILHLVDSVEEKISIFVGFSGKNSDGFALNRLENQTGVDSAKLVDMNSLVRRKQVDSVHLIKNDGPHQLAKKLSAVDLVAIGVGTTIGAGVYILVGTVAREHTGPALAVSFFIAGVAAALSACCYAELASRCPSAGSAYHYAYICLGEGIAWLVGWALVLDYTIGGSAIARGITPNLASFFGGLDNLPVFLARQTIPGVGIVVDPCAALLIMIVTILLCFGIKESSTVQAIVTSVNVCTLVFIIVVGGYLACKTGWVGYDLPSGYFPFGLNGILAGSAVVFFSYIGFDTVTSTAEEVKNPQRDLPLGIGIALLICCILYMLLSVVIVGLVPYYSLNPDTPISSAFGDSGMQWAAYILTTGAITALCASLLGSLLAQPRIFMAMARDGLLPAFFSEISPRTQVPVKSTIAIGVLAAALAFFMDVAQLSEMVSVGTLMAFTAVAVCVLVLRYVPPDGVPLSSSSQTLSDTDESRAETENFLVDAIESSDSPLLGNETARDEKYFGKRRKIAAWSIALVCIGVLGLASAASAERLPSFPRFTICGVSAVILLGSLITLGYIDEDEERHNFGHKGGFLCPFVPYLPVLCILINTYLIINIGAGTWIRVLIWLLIGSMIYIFYGRSHSLLNNAVYVPTMTCTRKTTDHLA

SEQ ID NO: 10411 - protein, 124 aa, Zea mays
MSSAAGGVEETVRASHILIKHEGSRRKASWKDPDGRIISATTRGDAAARLLDLRNQILSGQANFADLAARHSDCSSARRGGDLGTFGRRQMQKPFEDATYALKVGELSDIVDTDSGVHIILRTA

SEQ ID NO: 10412 - protein, 497 aa, Pseudomonas syringae pv. phaseolicola 1448A
MNGPMSNTLERAHHALKDSLAQVIHDYRPGYHLAPPAGWMNDPNGVVYFRGEYHVFYQHHPFDAKWGPMYWGHAKSADLVHWQHLPIALAPGDDFDQDGCFSGSAVVCGDTLALIYTGHTWLGEVGDELLIRQVQCLATSLDGINFVKHGAVIDSPPQDTIIHFRDPKVWQQDDHWYLIAGARLGDRPLLPLYRSVDLHAWEFVSYVSSGNEGDGYMWECPDLFRLDGRDVLLYSPQGMPAQGYERLNKFHTGYRVGQIDSQRQFNGGPFIELDNGHDFYAAQTLVAADGRRLVWAWLDMWESPTPTATHLWRGMLGLPRELELRDDRLCVHPARELTALRNASLPGTPWWSEAGTQWLTDVHGDLLEIHVHLDLLDCTEGHLGVALRCSSDGKEQTLLYYDASLKRLILDRDQSGTHVSGQRSVAIDPQQERLELRVFLDRSSIEVFDQNGSFSFSSRLYPQTDSLGVKLIANGTGGRVCIANAWELSSGCLQVNH

SEQ ID NO: 10413 - protein, 92 aa, Glycine max
ILGYGPEEKNTVLELTYNYGVTDYDKGDAYAQITIGTDDVYKTAEAIKLAGGKITREPGPVPGIKTKITLCVDPDGWKTVFVDNVDFRRELE

SEQ ID NO: 10414 - protein, 284 aa, Arabidopsis thaliana
  misc_feature (260)..(260): Xaa can be any naturally occurring amino acid
MERARRLAYRGIVKRLVNETKRHRNGESSLLPTTTVTPSRYVSSVSSFLHRRRDVSGSAFTTSGRNQHQTRSISVDALKPSDTFPRRHNSATPDEQAQMANYCGFDNLNTLIDSTVPKSIRLDSMKFSGIFDEGLTESQMIEHMSDLASKNKVFKSFIGMGYYNTHVPPVILRNIMENPAWYTQYTPYQAEISQRRLESLLNSPSVTTALTVLVSSYSPLPFRASAPAQAVAVRYYLLVRLKLTFVFACICPPLSVDVRXTRAVGVVLNVVAAQLLLVDYSSGD

SEQ ID NO: 10415 - protein, 537 aa, Neurospora crassa
MTLLALKEDRPTPKAVYNWRVYTCAAIASFASCMIGYDSAFIGTTLALPSFTKEFDFASYTPGALALLQSNIVSVYQAGAFFGCLFAYATSYFLGRRKSLIAFSVVFIIGAAIMLAADGQGRGIDPIIAGRVLAGIGVGGASNMVPIYISELAPPAVRGRLVGIYELGWQIGGLVGFWINYGVNTTMAPTRSQWLIPFAVQLIPAGLLFLGSFWIPESPRWLYANGKREEAMKVLCWIRNLEPTDRYIVQEVSFIDADLERYTRQVGNGFWKPFLSLKQRKVQWRFFLGGMLFFWQNGSGINAINYYSPTVFRSIGITGTDTGFLTTGIFGVVKMVLTIIWLLWLVDLVGRRRILFIGAAGGSLCMWFIGAYIKIADPGSNKAEDAKLTSGGIAAIFFFYLWTAFYTPSWNGTPWVINSEMFDQNTRSLGQASAAANNWFWNFIISRFTPQMFIKMEYGVYFFFASLMLLSIVFIYFFLPVTKSIPLEAMDRLFEIKPVQNANKNLMAELNFDRNPEREESSSLDDKDRVTQTENAV

SEQ ID NO: 10416 - protein, 411 aa, Tropheryma whipplei str. Twist
MSRQVVVTGLGVCCPLGIGTELAWQALLDGESGVRTLPDRCTKGFDLPVTFAGLVPDGVEDLLARTEVNRLDRAGQISLIAARQAVEDAGDIKQNPERTAVSWGTGIGCINTVLSAWDRLAEKGPGRVLPMTVPMLMPNAPAVAVGMKMQARAGIHTSVSACAASTESIAVGFDMIRSNKADVVIAGGSESAINPLTISAFASLSALSTYSGNPEHASRPFSKNRDGFVVSEGAAVLILEEKTRARARGAKIYAEISGALFNSDAHHITAPEPDGKMATTAMRNTLKMSGLSPEDITYVNAHATATILGDISEYKALLALFEDHLANVYVSATKASTGHLLGGAGALEAVFTVKAVSESIIPPTINCDEQDPDIQLRIQRHPKKLSRPFAATSNSFGFGGHNAVVAFTPTD

SEQ ID NO: 10417 - protein, 515 aa, Yarrowia lipolytica CLIB122
MPYIRCLGDCIGPINQLLNMSISISLPNGNKYEQPTGIFINNEWSEASDKGTIPVYNPSTGDEVVQVAAATAEDVDRAVVAARKAFQSWRDVPGEERAKLLDNFINLVSKNLDTVAAIEALDSGKPLQLNARGDIAGGLAVYKYYAGWADKVFGKTIVNTTKKLAYTLHEPHGVCGQIIPWNYPFLMAAWKIAPAIAAGNVVVMKLAENTPLSMLYLCNLFKEAGFPPGVINIFTGHGAKAGSRLAEHPDVDKIAFTGSTATGRIIMKLAATNLKAITLECGGKSPMIVLGDADLDQATKWAHAGIMTNQGQICCGVSRVLVHESIYDQFVDKYVEVVKQRSRVGDMFQDKILQGPQVSKVQQEKVLGYIEKGKEEGAKLVYSGAVAAEALEKGYFVPPTVFADVRDDMVISREEIFGPVVAIAKFSDVEDAINRANDSEYGLAASVYTKDLTEAHRISRRLESGQVFINMAHMGDYRMPFGGYKQSGIGRELGEYGLDTYTQCKAVHINMGMKL

SEQ ID NO: 10418 - protein, 282 aa, Campylobacter lari RM2100
MTLLDGKKLSDEIKNNLKQEVLELKTQSIEPCLAVILVGEDPASATYVGSKAKACEQCGIKSLVYRLDVNTTQNELLALINTLNHDDSVDGILVQLPLPAHINKDIILESINFNKDVDGFHPFNVGNLNLNLKGGFLPCTPLGVMKILEHYGIKLEGADVVVIGASNIVGRPMATLLLNANASVSICHIYTKDLKAYTKNADIIIVAAGCPNLLKEDMVKDGVVVIDVGINRVDGKIVGDVDFENVSKKASYITPVPGGVGPMTIAMLLENTIKSAKNRIKK

SEQ ID NO: 10419 - protein, 328 aa, Nostoc sp. PCC 7120
MVEDLVIIGSGPAGYTAAIYAGRAQLKPVVFEGFSAGGIPGGQLMTTTEVENYPGFAEGVQGPKLMQQMRQQALRWGARLITDDVIAVDFTQYPFLIASADLLEVKARAVIICTGATAKRLHLPGEEKFWNNGISACAICDGANPLFANADIAVVGGGDSAVEEALYLTKYASKVHLLVRSDRLRASKTMQERIFNHSQFHIHWHSLPISVDGDEVLRSVQIRDTQTGGVADLTVSGLFYAIGHTPNTQLFQDQLELDEAGYIKTQGKSTATNIPGIWAAGDVQDHVYRQAITAAGTGCMAALEAERWLSERQLSPADGTPTLVSFAA

SEQ ID NO: 10420 - protein, 484 aa, Agrobacterium tumefaciens
MIKLKNAALLRDACLVNGRWLKAADGKTIAVENPANSMIIGHVPSLSADEVKAAVESAGKAFSEWSRRSAKDRAAILRRWFDLMVANADDLGALMTAEQGKPFAEAKGEALYAASFVEWFAEEAKRVYGDTIPSPTTDKRITILKQPIGVCAAITPWNFPAAMITRKAAPALAAGCAMIVKPAEQTPLTALALGVLAEEAGVPAGVFQVVTGAARDIGKVFTESDTVRKISFTGSTEVGRLLMAQSAPTIKKLSLELGGNAPFIVFDDADLDAAVEGAIVSKYRNAGQTCVCSNRIYVQDGVYDAFAEKLVKRVESLSVGEGTEPVVLIGPLIDQEAVPKVEDHVADALGKGAKIVIGGKRHALGGTFYEPTVLTGATQAMKVAREETFGPVAPLFRFGTEDEAVAMANDTEFGLAAYFYTENVRRTWRVAEALEYGMVGHNTGLISNEVAPFGGVKQSDLGREGSHYGIDEYLEIKYLCSAIG

SEQ ID NO: 10421 - protein, 955 aa, Vibrio fischeri ES114
MSQLLQQLGTDNEFIRRHNGPASSEHQHMLNTIGAETLQQLIEETVPSSIRLPQPMQLPHGLSENAMLAELKQIAQQNTLNTSYIGQGYYNTHTPNVILRNVLENPGWYTAYTPYQPEISQGRLEALLNYQQMVMDLTGLEIANASLLDEATAAAEAMTLCKRGGKSKSNLFFVADDVHPQTLAVIKTRAKFIGFDVVVDHESNLDSHDVFGALLQYPGTTGEVKDLTDLIAQAHTKKTLVIVATDLLASVLLKPVGEMGADIAIGSAQRFGVPMGYGGPHAAFMATREKLKRSMPGRVIGVSIDSKGNQALRMAMQTREQHIRREKATSNICTAQALLANMASFYAVYHGPEGLKTIARRVHHFTAIVAKALQTAGFELEHQHFFDTLTVKTEQQTDILYTKALASSINLRKFDTKLGISFDETTTVSDLVTLLAVFGIDNAECETLSAEVGKDEFAAIPKHCQRTSSFLTHPVFNTYHSETQMLRYLKKLENKDFSLTHGMIPLGSCTMKLNAVAEMLPVTWPEFGGIHPFAPLNQAAGYTTLATSLKSMLCEITGYDEFSLQPNSGASGEYAGLIAIQRYHESRGDAHRNVCLIPSSAHGTNPATASMVSMKVVVVKCDENGNIDMIDLAEKIEKHQENLSSIMITYPSTHGVYEEQVREVCDMVHAAGGQVYLDGANMNAQVGLTSPGFIGSDVSHLNLHKTFCIPHGGGGPGMGPIGVKSHLAPFLPGHTENGVQGMDYAVSAADLGSASILPISWAYIAMMGEMGLTEATKVAILNANYVMERLRPHYPVLYRGTNGRIAHECIIDIRPLKETTGISEEDIAKRLMDFGFHAPTMSFPVAGTLMVEPTESEDLAELDRFCDAMIAIREEMNKVEQGEWPLDNNPLVNAPHTQVDLMSDSWEHPYTREVACFPSSQSKDSKYWPTVNRVDNVYGDRNLICSCPSIENYEE

SEQ ID NO: 10422 - protein, 113 aa, Nostoc sp. PCC 7120
MQKTFTIDQTFFTGKEAFDWLMQESDQLIIVKFVAPYCPSCETLKPVLHQIAEENTGKLHLVELDMSEEPELAINFGVRSAPTVVLLKHQQTLAQIAGLKPKKQYTEMIQSAL

SEQ ID NO: 10423 - protein, 473 aa, Legionella pneumophila str. Paris
MAWIVAIIGSIAGFLFGYDEGIIAGSLGLVKNHFNLNATHIGVMASALPFGALFGSLLIGAFMASKSVKRFGRRSLLSFAGFLFFVGALGAGFAETISMLILSRLILGLAIGMASVLTPLYLAETAAMRSRGAVVAIYQLALTVGIVCSYSVNYLLIEQQAWRAMFASSAIPALLLTLGILFMPESPRWLCSVGRHDAAANSLRKLRGKQPVEQELKDIEATLANEPKQGNWLLLFQKPLLPVLMLGTILFCLQQLSGINVVIYFAPEIFKNLGLGSTTGQILATMGIGLVNLLVTIIAILYVDKLGRRKLLLLGFAGTSLSLFALSLFSLNHVAWLSYLSVICLMVYIFSFAISVGPIPHIAMAEIFPLHVRGAGMGMSSMSNWSFNTIVIFSFPVLHQMFGIEVTFVLYAVICFLGFIYAYIYMPETRNISLEQIETYIMSGKPLRFLGREDEEVNAVSTKSESSLLASTN

SEQ ID NO: 10424 - protein, 531 aa, Haemophilus influenzae Rd KW20
MILEELLVRTFSKDIVMTDRVIIFDTTLRDGEQALKASLTVKEKLQIALALERLGVDVMEVGFPVSSQGDFESVQTIARHIKNARVAALSRAVDKDIDAAYEALKVAEAFRIHTFIASSALHVEAKLKRSFDDVVGMAVAAVKRARNYTDDVEFSCEDAGRTGIDNICRIVEAAINAGATTVNIPDTVGFCLPNEYGNIIAQVRNCVPNIDKAVISVHCHNDLGMATANSLTAVQNGARQIECTINGIGERAGNTSLEEVVMAMKVRQDFMGVDTHINTQEIHRVSQMVSQLCNMPIQPNKAIVGSNAFAHSSGIHQDGMLKNKNTYEILSPETIGLKKEKLNLTARSGRAAVKGHMADMGYNEQDYDLDKLYDEFLKLADKKGQVFDYDLEALAFIDMQQGDEDRLVLDKLSAHSTKEYPATAFVQLKLDGEKLSTSSIGGNGPVDAVYNAILNLTGLEIKMSHYNLTAKGEGAEALGQVDIVVEHKGRKFHGVGLATDIVESSALALVHAINAIYRAHKVADIKNHKHH

SEQ ID NO: 10425 - protein, 358 aa, Haemophilus influenzae Rd KW20
MQSYNIAVLAGDGIGPEVMAEAIKVLNRVQEKFGFKLNFNEFFVGGAAIEHCGYPLPAETLKGCDQADAILFGSVGGPKWTNLPPDQQPERGALLPLRKHFKLFCNLRPATLYKGLEKFCPLRADIAAKGFDMVVVRELTGGIYFGQPKGREGDGVQTKAFDTEVYYKYEIERIARAAFEAAMKRNKKVTSVDKANVLQSSILWRETVTEMAKDYPEVTLEHIYIDNATMQLIKSPESFDVLLCSNIFGDIISDEAAMITGSMGMLPSASLNEEGFGLYEPAGGSAPDIAGKGIANPIAQILSAAMMLRYSFNLNEAADAIESAVQKVLASGHRTADLADDSTPVSTAEMGTLITQAI

SEQ ID NO: 10426 - protein, 82 aa, Triticum aestivum
ICISVLRYVPLESLYPSLALGFYCRDKDDFDDFCLRALKLAEESNGAPLFTVTQTHTAINQSNYGFADDDSEDEREDDWQML

SEQ ID NO: 10427 - protein, 331 aa, Legionella pneumophila str. Paris
MRRGLLLLNLGTPDNADIRAVKLYLREFLTDKRVIDLPTIPRYILVYCLILPFRSPKSAQAYQSIWTEKGSPLLYHSQNLVTKLQSSLKDEYKIALGMRYGTPSITTALAELKDCHSLTILPLFPQYSSAATGSAIEKTLSYLANQEIIPSIKIIRDFYQRPEYIQAQAKIMKPYIKDNFHVLFSYHGIPERHIHKSGCDTLCPQTCTPIYDKNQACYRAQCYQTSLLLAKELQLGTHQYTTAFQSRLGKTPWIKPYTDEIFAELISKGIKNIVVSCPSFVADCLETLEEIGIRAKEQWEKLGGEQFILTPCMNDHPEWIKAIHSIVNEQI

SEQ ID NO: 10428 - protein, 1068 aa, Crocosphaera watsonii WH 8501
MNNPKSEIEKDKIIEKLQAEITRLKAVQEATLIMQENLRESEERWQLVLKGTNEGIWDWNLKTDEMFFSPRWKEMLGYSEQELPNHIDTWKQLLHPQDRERVMKILGDHFAKKTDHYSAEFRLKCQDGNYKWILSRGQALWDEAGNPVRMAGSHTDISDRKNEQILLTSLIDCIPDLVFYKDSKGVYKMCNNAFETFAGRDRKYIIGRNDFDLFLTEEALAFREQDRFMMLQKQSRRNEEWITYPNGNRRLVDTLKTPFCCPEGKLMGTIGISRDITDRKQKEEAIKKQAERDALLSNIARQLIDQDLNTAVNFVLESIGKFTQCDRSYIIRYFPQEKVWSMVHEWCDEYSPSTIHDSQNISLEVFPWFSQQLIEGKSICINKLDDFPSEATPEREAYKTSLSPNLLVVPMMTRCQTVGYLGIDTNVYKHWTKDDINLLKLVGELMAIAEARAIAEEAQSESQARFAGILDNANEAIISIDENQKITLFNHAAEQTFGYTSNEVLGQPFNLLIPSRFTNNHYQYINSFKNTQETARQMGGRRPVFGQRKDGTEFLAEVSISKIKPRGKTIFTAIIRDITERKQAEEALKKAKEKADAANCAKSEFLASMSHELRTPLNAILGFTQVMQRDQELNPDHKQNLEIIGRSGEHLLELINDILEMTKIEAGRTTFNRTQFDLYRLLDNLESMLHLKAEEKNLQLLFEKIENLPQYIETDESKLRQVLINLLGNAIKFTQEGGVILRIKTNEMIGDNQEIILTFEVEDTGPGIAPEEVDQLFEAFGQTETGRNSNEGTGLGLPISQKFVQLMGGEISVSSVLGRGSLFTFTIKATIVDANAIKINKSPRRIIGLVPGQPNYRILAVDDRLESRILLVKLLSSMGFNVRQASNGKEALEIWKSWQPHLIWMDMRMPIMDGYTATQHIKANPKGQETVIIALTASAFEEERNLVLGAGCDDFMRKPFREEVLWEKIAQHLGVNYVYDDLDKQKFSSQPNQQAKPQTTLTLQLFLEKMPSQWINALHQAALECSDDSILELVEQIPPDSQPLAISLREWSENFLFEPVIELTQTMI

SEQ ID NO: 10429 - protein, 459 aa, Arabidopsis thaliana
MFIAMADFKLLLLILILLSLFELDLLHFHHDFFSPFPVKIGLLLISIFFYAYSTTRSKPVYLVDFSCHQPTDSCKISSETFFNMAKGAQLYTEETIQFMTRILNRSGLGDDTYSPRCMLTSPPTPSMYEARHESELVIFGALNSLFKKTGIEPREVGIFIVNCSLFNPNPSLSSMIVNRYKLKTDVKTYNLSGISVDLATNLLKANPNTYAVIVSTENMTLSMYRGNDRSMLVPNCLFRVGGAAVMLSNRSQDRVRSKYELTHIVRTHKGSSDKHYTCAEQKEDSKGIVGVALSKELTVVAGDTLKTNLTALGPLVLPLSEKLRFILFLVKSKLFRLKVSPYVPDFKLCFKHFCIHAGGRALLDAVEKGLGLSEFDLEPSRMTLHRFGNTSSSSLWYELAYVEAKCRVKRGDRVWQLAFGSGFKCNSIVWRALRTIPANESLVGNPWGDSVHKYPVHVT

SEQ ID NO: 10430 - protein, 279 aa, Pseudomonas fluorescens Pf-5
MSEDRSSNGQKSWLGKLTQAFAHEPKNRQELLELLREAHQNKLLDSEALAIVEGAIQVADLQVRDIMVPRSQMISIKATQTPREFLPAVIDSAHSRYPVIGESHDDVMGVLLAKDLLPLILKENGDSFNIKDLLRPATFVPESKRLNVLLREFRANHNHMAIVIDEYGGVAGLVTIEDVLEQIVGDIEDEHDVEEDSYIKPLPSGDFLIKALTPIENFNEFFDSDFSDDEFDTVGGLVMSAFGHLPKRNEITEIGAYRFRVLNADSRRIHLLRLTPISR

SEQ ID NO: 10431 - protein, 477 aa, Enterococcus faecalis V583
MKRVIWFRRDLRLQDNKALAHALQNSAADELILLFQMNPQQFIQESANHNAFFASLASFKERIDQEAHLQIMVGEPLDLFSRLKRKLPDWQAIYFNEDTCGFGAKRDQQAMRFFEENNIQSFSFQDAYLHGSEEIKKNDGSKYQVFTPYYNKWKEAPKETPIPVSYTAEKIFSACLFPEEEAAYREQIARIPLTHYSVGEETARRRLNTFIDQKLQSYENKRDFPYQDQTSHLSTFLRTGELSIRTIWQELASVPSSLSKETFKKELAWRDFYNMIYSAFPQQKEEAIQEKFRYIQWTNDPEMFVKWQKGETGYPIIDAAMRQLNQTGWMHNRLRMITASFLVKNLHIDWRWGEKYFQKMLIDYDAANNIGGWQWAASTGTDAVPYFRIFNPIIQSKKFDNDGQFIKKYVPELKQVPQKYIHQPNLMNEALQTQYHVHLGENYPKPIVDYASSKKQTLFLYEASKEIHQEMNNPRFQ

SEQ ID NO: 10432 - protein, 618 aa, Oryza sativa
  misc_feature (224)..(224): Xaa can be any naturally occurring amino acid
MHRFLVTALLFSLLNYGAVMATESDEADFFRNCPPSRCSSDGPDIKFPFRLESSSSSCGAPGMQLSCSGQDTLLLHHVLGLSKVTGIDYIYGVINIVPLAESWSQCALQKIISANYSTSVYKQYGFQYASLVSCSEEFIWDSTDSIFGPISCLSNASQSLYLVAPYAFVSILPLYCKVVSTEIMIPYTSNQGRKDYNASASTEFNESAKRITTFSEITFTWSAXLISLMFASDCERQQRLCGFSSQRRTAFCKPHGSKSPAKVIIVAVSVPTIVVLTLVVASALYLSLKTKNDDEIQLKVEMFLKTYGTSKPTRYTFSEVKRITRRFKHKLGTGGFGSVYKGELSKGVPVAVKMLENSKGEGEEFINEVATIGRIHHVNVVRLLGFCSEGTRHALIYEFMPNNSLEKYIFSRDYISSQEVLVPDKMLKIALGIAQGIEYLHQGCSQRILHFDIKPHNILLDHSFSPKISDFGLAKLCARDQSIVTLTAARGTMGYIAPELYSRNFGAVSYKSDVFSFGMLVLEMLSGKRNSDPSINSQNEVFVPEWIYETIVSAQESEFAKDMTQEEKEKLRKLAIVALWCVQWNPANRPSMRKVVNMLTGSLQNLKNPPRPFVSSLS

SEQ ID NO: 10433 - protein, 315 aa, Wolbachia sp.
LCDKKIQLGINLTKGLGAGALPDVGKGAAEESIDEIMEHIKDSHMLFITAGMGGGTGTGAAPVIAKAAREARAVVKDKGAKEKKILTVGVVTKPFGFEGVRRMRIAELGLEELQKYVDTLIVIPNQNLFRIANEKTTFADAFQLADNVLHIGIRGVTDLMVMPGLINLDFADIETVMSEMGKAMIGTGEAEGEDRAISAAEAAISNPLLDNVSMKGAQGILINITGGGDMTLFEVDAAANRVREEVDENANIIFGATFDQAMEGRVRVSVLATGIDSCNNNSSVNQNKIPAEEKNFKWPYNQIPVSETKEYAPTE

SEQ ID NO: 10434 - protein, 506 aa, Candida tropicalis
MIEQVLHYWYYVLPAFIIHWIVSAIHTNSLRRKLGAKPFTHTQLDGFYGFKFGRDFLKAKRIGRQVDLINSRFPDDIDTFSSYTFGNHVIFTRDPENIKALLATQFNDFSLGGRIKFFKPLLGYGIFTLDGEGWKHSRAMLRPQFAREQLPMSPSLEPHFNVKAYPQEQRWVFDIQELFFRFTVDSATEFLFGESVNSLKSASIGCDEETELEERKKFAEAFNKAQEYISTRVALQQLYWFVNNSEFKECNEIVHKFTNYYVQKALDATPEELEKQSGYVFLYELVKQTRDPNVLRDHHSISLLAGRDTTAGLLSFAVFELARNPHIWAKLREDVESQFGLGEESRIEEITFESLKRCEYLKAVMNETLRLHPSVPRNARFALKDTTLPRGGGPDGKDPILVRKMSCSIFISGTQIDPKHYGKDAKLFRPERWFESSTRNLGWAYLPFNGGPRICLGQQFALTEAGYILVRLAQSFDTLELKPDTEYLTKISHLTMCLFGAFVKMD

SEQ ID NO: 10435 - protein, 486 aa, Enterococcus faecalis V583
MNQWTDELRYAPYSSWTSAHLENLTSIIAQSSWRFKYHIQPQTGLLNDPNGFSYFNNQWHLFYQAFPFGSVHGLKSWAHLTSSDLIHWDYEGIALYPDSEYDSHGVYSGSALTIDNQLCLFYTGNVRDQTWQRFAYQNIAWLNSLGAITKESTPFLPIDPNYSSHFRDPMVFPYQEGLVLLIGASDLNGQGKIVVYFSKDRNVHNFHQLGELTFTNQELGYMVECPNLVFIDGQPVLLFCPQGLSPSVKSYQNIYPNMYTLAETFDLENLSLVQAGPFENLDEGFDVYATQAFNAPDGRALAVSWIGLPEITYPSDVEGWANGLSLVKELTIHNGKLFQYPVSETEMLRQSATTLSNGCHFLSTASFELEVDIPKNEIAFIRLLANETGSKGLLITIDTIHGKITLDRTFAGQSFAEKYGTIRETKIRKNKSVQLTIFVDCSVAEIYVNKGEKTMTGRFFPDKAQQYLHLSKTAKACFYELENTNN

SEQ ID NO: 10436 - protein, 114 aa, Symbiobacterium thermophilum IAM 14863
MAQYTVPITDATFEAEVLQSELPVLVDFWAPWCGPCRMIGPVLEEYARDNGHRIKIAKLNVDEEQEWAGRFGVMSIPTMILFHKGKPVGQLVGFRPKHEMYQILDSALDQLESA

SEQ ID NO: 10437 - protein, 429 aa, Saccharomyces cerevisiae
MSENNEEQHQQQQQQQPVAVETPSAVEAPASADPSSEQSVAVEGNSEQAEDNQGENDPSVVPANAITGGRETSDRVLYVGNLDKAITEDILKQYFQVGGPIANIKIMIDKNNKNVNYAFVEYHQSHDANIALQTLNGKQIENNIVKINWAFQSQQSSSDDTFNLFVGDLNVNVDDETLRNAFKDFPSYLSGHVMWDMQTGSSRGYGFVSFTSQDDAQNAMDSMQGQDLNGRPLRINWAAKRDNNNNNNYQQRRNYGNNNRGGFRQYNSNNNNNMNMGMNMNMNMNMNNSRGMPPSSMGMPIGAMPLPSQGQPQQSQTIGLPPQVNPQAVDHIIRSAPPRVTTAYIGNIPHFATEADLIPLFQNFGFILDFKHYPEKGCCFIKYDTHEQAAVCIVALANFPFQGRNLRTGWGKERSNFMPQQQQQGGQHL

SEQ ID NO: 10438 - protein, 407 aa, Methanosarcina barkeri str. fusaro
MQTDEVNLKKRAESAVEKKAAYGEDLELERFEEGSKISRPIEDLQTLDEESKKTLLQVGVVPSEEGRSGSLIVLDNAVSHSSLKEKNVELMSTQKALEKYEWLKDYSWKLVSVDTDKYTAKTYLENADGYFIRVPAGKKSSLPVQTCLLLGKDKVFQTVHNIVIVEEGASLDIITGCTAKKGVEEGLHLGISEMYVKKGATLNFTMIHNWAEQIGVRPRTVIKVEEGGTYVSNYICLKPVHSVQTYPTVKLEGEGAVTRLNTIAIAHSGSELDLGSRAIFNAPGTKAELISRTITIGGRVIARGEMIGNEKGAKGHLECKGLVLSDKGSQLAIPILEANVDDVELTHEAAVGKIAKDQVEYLMARGLTEDEAVGMIVRGFLDVGIRGIPEELKKEIENTITQTAFGM

SEQ ID NO: 10439 - protein, 414 aa, Burkholderia sp. 383
MSEETAQEQAAPGTVVVIGGGQAAGWVLKTLRAEGFAGRLVMIADEPHLPYERPPLSKAVLAGDADIETVRVVRPDEFDALNVEAWQPERAASIDRARRVVTTESGREIEYDRLVIATGGTSRRLPDALVKTQNLHYLRTLDEAAALGEKLRASQRVLVIGGGWIGLEVAATARKLGVDAVVVEGAPRLCGRSVPRIVSDFLLDLHRANGVDVRLGAALASLDAQPDDASKVRATLADGTTIDADFAVAGIGLALNASLASDAGLAIDDGIVVDEFGATSDPAIFACGDVANHHNGWLKRRVRLESWANAQNQAIAAGKAVLGVRAPYAEIPWFWSDQYDVNLQILGDLPADAQLVVRGDLAARRATLFFVGEGHVRGVIAVNNARELKLARKWMNQGRAVDTEALADTTKTLA

SEQ ID NO: 10440 - protein, 278 aa, Arabidopsis thaliana
MTREFELENNYQLCDEIGRGRFGTITRCFSPATKEFYACKTIDKRVLTDALDRECIETEPRIMAMLPPHPNIIRIFDLYETEDSLAIVMELVDPPMTIYDRLISAGGRLSESESASYAKQILRALAHCHRCDVVHRDVKPDNVLVDLVSGGVKLCDFGSAVWLGGETAEGVVGTPYYVAPEVVMGRKYDEKVDIWSAGVVIYTMLAGEPPFNGETAEDIFESILRGNLRFPPKKFGSVSSEAKDLLRKMICRDVSRRFSAEDALRHSWMMNVGNLQSN

SEQ ID NO: 10441 - protein, 338 aa, Wolbachia endosymbiont of Drosophila melanogaster
MKTDIVIIGAGPVGIFTAFQAGMLDMRCHIIDVLDQAGGQCTALYPEKPIYDIPGYPVITAQKLIEQLMEQSSPFKPVYHLSQKVEKISNNEGESFTVITNIGTEVKCKAVIVAAGNGMFKPNRPPLSGILEYENKSVFYSVNKISDFQDKTIVIAGGGDSAADWTVELSKVAKKIYVIHRRKEFRCTPETRNKLESLEIDGKIELVVPYQLHELAGGNGQLSAVIVKNIASKEEKEISADFLLPFFGLSMNLGPINNWGIQLEHSRIVVDPATLKTSRDRIYAIGDIAIYSGKLKLILNGFAESAMACYDIYKVIHNSPVNFQYSTSKGIHGKEKLP

SEQ ID NO: 10442 - protein, 312 aa, Pseudoalteromonas tunicata D2
MTFSSPTLRIATRKSALALWQAEFVKAQLEIHHPGIQVELVPMSTQGDKILDTPLAKIGGKGLFVKELEQAMLEGRADIAVHSMKDVPVEFPEGLELNTICEREDPRDAFVSNRFKTIEELPQGAVVGTSSLRRQCQIRALRPDLEIRDLRGNVNTRLAKLDEGQYDAIILAAAGLIRLEMPQRIASFIEPEQSLPANGQGAVGIECRSDDITTKQLLAALEHTETRIRVLAERAMNRRLEGGCQVPIGAFAQVSGEHITIRGLVGAIDGSEILRDQVQGLCADAEQLGVELANKLLAQGADKILQAVYKDA

SEQ ID NO: 10443 - protein, 480 aa, Bacteroides fragilis NCTC 9343
MEDLNFRKGDAKTEAFGSNRMLQPSPVEKIPDGPTTPEIAYQMVKDETFAQTQPRLNLATFVTTYMDDYATKLMNEAININYIDETEYPRIAVMNGKCINIVANLWNSPEKDTWKTGALAIGSSEACMLGGVAAWLRWRKKRQAQGKPFDKPNFVISTGFQVVWEKFAQLWQIEMRQVPLTLDKTTLDPEEALKMCDENTICVVPIQGVTWTGLNDDVEALDKALDAYNAKTGYDIPIHVDAASGGFILPFLYPDTKWDFRLKWVLSISVSGHKFGLVYPGLGWVVWKGKEYLPEEMAFSVNYLGANITQVGLNFSRPAAQILGQYYQFIRLGFQGYKEVQYNSLQIAKYIHSQIAKMTPFVNYSEDVVNPLFIWYMKPEYAKNAKWTLYDLQDKLAQHGWMVPAYTLPAKLQDYVVMRVVVRQGFSRDMADMLLGDIKNAIAELEKLEYPTSTRIAQEKNLPVEAKVFNHTGKPQAAKK

SEQ ID NO: 10444 - protein, 412 aa, Nocardia farcinica IFM 10152
MTPPHNYLAVIKVVGIGGGGVNAVNRMIEQGLKGVEFIAVNTDAQALLMSDADVKLDVGRELTRGLGAGADPEVGRKAAEDHKDEIEEVLKGADMVFVTAGEGGGTGTGGAPVVASIARKLGALTIGVVTRPFSFEGKRRGNQAEVGINMLRESCDTLIVIPNDRLLQLGDAAVSLMDAFRSADEVLLNGVQGITDLITTPGLINVDFADVKSVMSGAGSALMGIGSARGEGRSVKAAEAAINSPLLEASMDGAHGVLLSIAGGSDLGLFEINEAASLVQEAAHIEANIIFGTVIDDSLGDEVRVTVIAAGFDGGGPARRTFDTPSHTRGGTIGAGRAGEISNRGSELPPSRATESASSASASTGSTRGAVPNYRDSERARLAEPTVAHNSRSHIQDPDPDDDVDVPDFMRR

SEQ ID NO: 10445 - protein, 239 aa, Triticum aestivum
SARGDEVASAGRAVEVAASRGAVQGVSEKSTASALLGGGAYDWTNAMLAWQRTAFHFQPQKNWMNDPNGPLYYKGWYHLFYQWNPDGAVWGNITWGHAVSRDLVHWLHLPLAMVPDHWYDINGVWTGSATQLPDGRIVMLYTGSTEDGVQVQLLAEPADPSDPLLRRWAKSEANPVLVPPPGIGLTDFRDPTTAWLNPADKAWRITIGSKNQEHAGLALVYRTEDFLHYDLLPTLLHVV

SEQ ID NO: 10446 - protein, 406 aa, Burkholderia sp. 383
MSADPFVIVGAGHAARRTAEALRERDAAARIVMIGAERELPYDRPALSKDALLSDGGEQRAFVRDAAWYDAQRIELRLGTRVDAIERDAQRVRLDDGTTLPYASLVLATGSRVRTFDGAIDEGVKPHYVRTVDDARTLRAQLLPGRRVAVLGGGFIGLEVAAAARQLGCEVTVIDPAPRLLQRALPEVVGAYAHQLHDARGVVFQMATLPRAIRRAPGGGAIVETDRGDVPADLVVVGIGVVPNVELAQAAGLDIDNGIRVDAGCRTVDPAIFAAGEVTMHFNPLLGRHVRIESWQVAENQPAVAAANVLGADDTYAELPWLWSDQYDCNLQMLGLFGSERTIVVRGDPANGPFTVFGLGDDGKIVAVAAANLGRDIGASRRLIAAGAVPDPVKLADPAVNLKAFM

SEQ ID NO: 10447 - protein, 194 aa, Zea mays
MKLNIANPTTGCQKKVEIDDDMKLRNLYDKRISQEVVGDLLGEEFEGYIFKIMGGCDKQGFPMKQGVLTPGRVRLLLHRGTSCFRGHGRRVGERRRKSVRGCIVSQDLSVINLVIVKKGKNDLPGLTDTEKPRMRGPKRASKIKKLFNLGKDDDVRQYVNTYRRSFTNKKGKTVSKAPKIQRLVTPLTLQRKRA

SEQ ID NO: 10448 - protein, 553 aa, Candidatus Protochlamydia amoebophila UWE25
MIMSIEVAMISFSPLQIHRLKYQPQLPLLLQDLSVIAANFEKSICLSDSALQEQFPQTFQQPIITFRRGNKKEATPLKVGVVLSGGQAPGGHNVIAGLFDALKQIHPESILLGFLDGPLGILKNTSIELTKMVIDSYRNQGGFDMIGSGRTKIETPAQLEAAMLTVQTLALDGLVIIGGDDSNTNAAILAEYFKQVGVKTSVIGVPKTIDGDLKNEFIDISFGFDTASKIYAECIGNILKDALSAKKYYHFIKLMGRSASHLALECALLTHPNLVFISEEVAEKKQTLQEIVGQITTMICKRAEKNLHYGVILIPEGLIESISEIGALIQKLNELLFSHSEKIEGLLITEEKDNYIISQLTSNEAKTFLALPKEVRDQLLLERDSHGNVQVSKIETERLLIKLVEKELKRLKQEGIYKGTFSPQPQFCGYEGRSGLPSNFDCQYCYALGFVATLLVQSGVTGYMSCLKKLSEPIERWSPMGVPIYRMLQIEKRQGKQKSVIRKFLVDLQGPFFKQYASVRDQWQITDDYRSPGPIQFEGPKNLTEVKPLSLLL

SEQ ID NO: 10449 - protein, 376 aa, Kluyveromyces lactis NRRL Y-1140
MATKTKKSKVSTKATKATKGSKEEEVIPVNRVNNAVIKLQEYLKENGSNDNQLIDDSELEAQLQLILVNTESFTGSLKNFKPKLITVPHSIFKPWKEASTTMVKDFKTLLILKDSDINSVTSEDLIDLLPEHITIDAIISGKDLKTKYKAFEKRRAFVQDFSFILADDSIVTALPKLLGGKAYSKLNTTPIAINTRSDNKFNKTTLVNSIKRIYDTKIPVKLPRGNTMNVHLGSLEWFTPEQLTENIISVAKQFIEKYNIRTILLKSNESPVLPLYVNLEVLDKLVGSRHDAKTSVQNVIEIDGVELQLSQFEKSLLEIANPDELDSLFATQIKQAKRNLEEVEAEEEQEEQKKEQTKEQKSSAKRQKTKNKNVKN

SEQ ID NO: 10450 - protein, 460 aa, Sinorhizobium meliloti
MPVEILMPALSPTMEEGTLSKWLKNEGDKVSSGDVIAEIETDKATMEVEAVDKGTIGKLLIAAGTEGVKVNTPIAVLLQDGEAASDIDSMKTEAPKAETPKPAAAEAPAASAAPVAAQPKADVPSDPAIPAGTEMATMTVREALRDAMAEEMRANEDVFVMGEEVAEYQGAYKVTQGLLQEFGARRVVDTPITEHGFAGVGVGAAMTGLRPIVEFMTFNFAMQAIDQIINSAAKTLYMSGGQMGAPIVFRGPSGAAARVAAQHSQCYAAWYSHIPGLKVVMPYTAADAKGLLKAAIRDPNPVIFLENEILYGQSFEVPKLDDFVLPIGKARIHRTGKDATLVSFGIGMTYAIKAAAELEAQGIDVEIIDLRTIRPMDLPTVIESVKKTGRLVTVEEGYPQSSVGTEIATRVMQQAFDYLDAPILTIAGKDVPMPYAANLEKLALPNVAEVVDAVKAVCYK

SEQ ID NO: 10451 - protein, 545 aa, Ustilago maydis 521
MTPAIDLEAAANRLDSYTPAAFHMQQHHHLHKDTADLLMEAKEAQRIKTLEIMDARAELLRSKLNDDASSITTAVDSNSGSPEKVIDDFHDPCGPFEGPEKLLELWFAEEPADVSACRWSDPDARPNHFGLRSVPRAIWETMLDIVKCKVLSVIQGSHVDAYLLSESSMFVFPHKLILKTCGTTTLLLGLEKLLTIAAKALAGLNTASSFAKLSSPDIDDQDHDDEASTAMSDSSFVQERQLGAIVKHAFYSRKSFMFPERQKGPHRDWMLEVAVLDRFFDHGSAYTVGKMNGDHWLLWMGCEGAREAEPFSIAAADTIERPLTLPAPCVEDQTLEILMTHLSPASCARFVFDEQLPHPTVAECYPRNHLSATEASAPASSLDKGHALGLALSNKLGLTELFPETELDAFAFEPCGYSANAVMPRGGKNDNAGYWTIHVTPEQDSSYASFETNVALCSNSPSSTIRDEQTTLELPTNLPTLVRRVVDIFEPGKMSVTLFVSTSEHAEEVEGDKAVLTNEDILHALTIKGSHTNSRGTISSLCLLK

SEQ ID NO: 10452 - protein, 318 aa, Wolbachia sp. group B
LCDKKIQLGINLTKGLGAGALPDVGKGAAEESIDEIMEHIKDSHMLFITAGMGGGTGTGAAPVIAKAAREARAVVKDKGAKEKKILTVGVVTKPFGFEGVRRMRIAELGLEELQKYVDTLIVIPNQNLFRIANEKTTFADAFQLADNVLHIGIRGVTDLMIMPGLINLDFADIETVMSEMGKAMIGTGEAEGEDRAISAAEAAISNPLLDNVSMKGAQGILINITGGGDMTLFEVDAAANRVREEVDENANIIFGATFDQAMEGRVRVSVLATGIDSYNDKPEASSINQNKIPAEEKNFKWPYNQIPISETKEYAPTE

SEQ ID NO: 10453 - protein, 375 aa, Colletotrichum gloeosporioides f. sp. malvae
MEEEVAALVIDNGSGMCKAGFAGDDAPRAVFPSIVGRPRHHGIMIGMGQKDSYVGDEAQSKRGILTLRYPIEHGVVTNWDDMEKIWHHTFYNELRVAPEEHPVLLTEAPINPKSNREKMTQIVFETFNAPAFYVSIQAVLSLYASGRTTGIVLDSGDGVTHVVPIYEGFALPQAIARVDMAGRDLTDYLMKILAERGYSFSTTAEREIVRDIKEKLCYVALDFEQELQTASQSSSLEKSYELPDGQVITIGNERFRAPEALFAPSVLGLESGGIHVTVFNSIMKSDVDVRKDLYGNIVMSGGTTMYLGLSDRMQKEITSLAPSSMKVKIIAPPERKYSVWIGGSIFASLSTFQQMWISKQEYDESGPSIVHRKCF

SEQ ID NO: 10454 - protein, 398 aa, Lactobacillus acidophilus NCFM
MLAAIVCALAGMCYAEFASAIPVAGSAYSYGNIVYGEFTGWIIGWALILEYMLSVATVAAGWSSYFSSFISPFGLKIPNAVSGPMNLSKGVYFDLVSVLVILIISILLSRGMKNSIKINIIAVFIKIAIILIFIFVGVQFIKPANYHPFLPYHFSGVIKGATTVFFAFLGFDVVSSSAAEVKNPKKNMPLGIIGTLAIAALLYFGVSIVLTGMVNYKQLNVSNPVAFALQYVHQDWVAELLSFGAMLGMATMMLTMIYSSSRLIYAMARDGLLPSTFSKLDKKHNSPQNALIAVTIIISLGAAFFSVDQLANLVNFGTLFAFTLVSFGILKLRKRTDITNDGFKVPGYPFLPIISGLICIFMICHLSSEVYLMAFIWLVLGAIIYFAYGYHHSQLDHE

SEQ ID NO: 10455 - protein, 505 aa, Candida tropicalis
MYQLFCFLAGIIVVYKAAQYYKRRTLVTKFHCKPARISPNKSWLEYLGIASVVHADEMIRKGGLYSEIDGRFKSLDVSTFKSITLGKTTYVTKDIENIRHILSATEMNSWNLGARPIALRPFIGDGIFASEGQSWKHSRIMLRPVFAKEHVKQITSMEPYVQLLIKIIKNHEGEPLEFQTLAHLFTIDYSTDFLLGESCDSLKDFLGEESNSTLDTSLRLAFASQFNKTQQQMTIRFMLGKLAFLMYPKSFQYSIQMQKDFVDVYIDRVVGMSEEELNNHPKSYVLLYQLARQTKNRDILQDELMSILLAGRDTTASLLTFLFFELSHHPEVFNKLKEEIERHFPDVESVTFGTIQRCDYLQWCINETMRLHPSVPFNFRTAANDTVIPRGGGKSCTDPILVHKGEQVLFSFYSVNREEKYFGTNTDKFAPERWSESLRRTEFIPFSAGPRACLGQQLPRVEASYVTIRLLQTFHGLHNASKQYPPNRVVAATMRLTDGCNVCFI

SEQ ID NO: 10456 - protein, 445 aa, Agrobacterium tumefaciens str. C58
MRKDWGDGPGGLGTAMQDKILLIEDSVALSMLLRTRLSDETEAEVVHCASMAEADALMQANNFTLALTGLNLPDAPKGEILTLLSERKVPAIVFTATVDEEARKRYAEKKIIDYIVKDGHRTVDAVVKTVDRIMTNKRFSVLVVDDARTARSGLVEILERQNFKVSEAHSGNRALEILSQDPSIQLVITDYHMPDMDGYELTRRIRDSRSSEDLRVIGISSSTDRLLSASFLKAGASDFVYRPFVPEELQCRIDNNIETLKQLKRLRELAERDHLTGLPNRRSFFERTRALMDVINDNDESGAVAILDIDHFKKINDTLGHDAGDRALKKLAELLQGMCDEQRHIPARLGGEEFAVFLRGLDARAAYAFCEELREQVEKNGRQLSGSSLALTISLGVVEIEKGEPFDNQLNAADQLLYLAKANGRNRVYSDIMIQEGLQKIGLNG

SEQ ID NO: 10457 - protein, 114 aa, Arabidopsis thaliana
MFRAMSTRKIHGGYEKLGDEEARLKRVSSVPASVYGHSRNPVQEVKKTPTAKPTGGSVHPLFSFFDVHFQRKKKNTAKKKSLATAKPEFARYMEYVREGGVWDPSSNAPVIHYR

SEQ ID NO: 10458 - protein, 315 aa, Wolbachia sp. group B
LCDKKIQLGINLTKGLGAGALPDVGKGAAEESIDEIMVHIKDSHMLFITAGMGGGTGTGAAPVIAKAAREARAVVKDKGAKEKKILTVGVVTKPFGFEGVRRMRIAELGLEELQKYVDTLIVIPNQNLFRIANEKTTFADAFQLADNVLHIGIRGVTDLMVMPGLINLDFADIETVMSEMGKAMIGTGEAEGEDRAISAAEAAISNPLLDNVSMKGAQGILINITGGGDMTLFEVDSAANRVREEVDENANIIFGATFDQAMEGRVRVSVLATGIDSCNNNSSVNQNKIPAEEKNFKWPYNQIPISETKEYASTE

SEQ ID NO: 10459 - protein, 342 aa, Sporidiobolus salmonicolor
AKIDNAVLPEGSLVLVTGANGFVASHVVEQLLEHGYKVRGTARSASKLANLQKRWDAKYPGRFETAVVEDMLKQGAYDEVIKGAAGVAHIASVVSFSNKYDEVVTPAIGGTLNALRAAAATPSVKRFVLTSSTVSALIPKPNVEGIYLDEKSWNLESIDKAKTLPESDPQKSLWVYAASKTEAELAAWKFMDENKPHFTLNAVLPNYTIGTIFDPETQSGSTSGWMMSLFNGEVSPALALMPPQYYVSAVDIGLLHLGCLVLPQIERRRVYGTAGTFDWNTVLATFRKLYPSKTFPADFPDQGQDLSKFDTAPSLEILKSLGRPGWRSIEESIKDLVGSETA

SEQ ID NO: 10460 - protein, 316 aa, Aquifex aeolicus VF5
MKISEVLEFKVEGEEERLDKFLARAYPDFSRSYIKKLVKEGLVYVNGEEVRKPSRKLREGERVILHVPEPEPLDVKPENIPINIIYEDEDIAVVEKPCGLVVHPSPGYTSGTLVNALLYHIKDLSSIGGVERPGIVHRLDKETAGVMVIAKNNTAHRNLVRQFQERKTEKFYKVLVKGLVKKDYGAIDTPIARHPVDRKRFWVRKEGKEALTEYWVLKRYEKYEITLLKVKIHTGRTHQIRVHFASIGHPVLGDRTYGFKSSSVPKELLSLMGECNMLIAYHLGFYHPTKGEWMVFEIEEPETFKSVYSWLEEHSP

SEQ ID NO: 10461 - protein, 315 aa, Wolbachia sp.
LCDKKIQLGINLTKGLGAGALPDVGKGAAEESIDEIMEHIKDSHMLFITAGMGGGTGTGAAPVIAKAAREARAVVKDKGAKEKKILTVGVVTKPFGFEGVRRMRIAELGLEELQKYVDTLIVIPNQNLFRIANEKTTFADAFQLADNVLHIGIRGVTDLMVMPGLINLDFADIETVMSEMGKAMIGTGEAEGEDRAISAAEAAISNPLLDNVSMKGAQGILINITGGGDMTLFEVDSAANRVREEVDENANIIFGATFDQAMEGRVRVSVLATGIDSCNNNSSVNQNKIPAEEKNFKWPYNQIPISETKEYASTE

SEQ ID NO: 10462 - protein, 776 aa, Pseudomonas mucidolens
MHNTEDTGLIAYWSFDEESGKTAVDVIGKMNDSIDYVFNHARFKASSDPQRRKGISGNALLFDGYSTWIKRSADQIGKPENALTLEAWVAPRSYEWGDEQRLSAIVNQHDREKKEGFILGMYRHGTWSLQLGLDHEWIEVWSEDHPLPKNEWSYVVATYDKKTSMLKLACPSMLKLYLNGVEVASKQTTAHSTITPSRQDLLIGKNNQAVVLAGVFSLNMFNGLIDEIKIYNRALSSDEIASSFHRYLVPYGGKIPSIPYDHLKLDRSLLADDRHRPQYHVSPPAHWMNEPHAPIYFNGQYHLFYQHNPQGPYWHQIHWGHWVSDDLVHWRDLPVALSPEKNAVDPDGDWSGSATYDEHGLPVLFFTAGDDSAKPNQRVGLARSTFAQDGDNDLVHWVKHPTPVVVQQQGVGKFGDFRDPFVWKDGDTWYMLVGSGTDGEGGTALAYTSKNLTEWEYRGPFYISDHKNYPYLGKVWELPVLLPLGKDKKGHDKHVFLISPVGAGADVEVFYWIGTFDKEQFRFIPDQNEPQLIDVGDSHFTGPSGMVDPNTGRKILFTIAQGERTPALDYSAGWAHNGGLPVSLSLREDGRLGVEPIEELKSLRGKKLVSFTKKSAEEANDLLTNVKGDMLEIILELEPGTAKQFGIKVRRSPGGEEETLLYYNTEASTLNVNRMKTTLDNFERSKGIQGGKLELNGENLKLHIYLDRSMIEAYANGLKSLTTRAYPSRPDSLGLQIWGDGSVSVKSMEVWEMNSAFGPTVSAYIPEQHADGVQTK

SEQ ID NO: 10463 - protein, 527 aa, Arabidopsis thaliana
MEFDEYEYLEKTVEEGAGSNKKKEESGNERSERSYRKREGGERQGEEGGEEERVSSRSKKSRGDGEENGGGKRDRERERHRSSRDKDRERDKVREGSRDKESDRERSSKERDRSDRDKPRDRERREREKRSSSRSRREEKEPEVVERGSRRHRDKKDEPEADPERDQRTVFAYQMPLKATERDVYEFFSKAGKVRDVRLIMDRNSRRSKGVGYIEFYDVMSVPMAIALSGQLFLGQPVMVKPSEAEKNLAQSNSTTVGGTGPADRKLYVGNLHFNMSELQLRQIFEAFGPVELVQLPLDPETGQCKGFGFIQFVQLEHSKAAQIALNGKLEIAGRTIKVSSVSDHIGTQDSAPKSADFDDDDGGGLALNAQSRAMLMQKLDRSGIATSIVGSLGVPGLNGAAFNQPGMNPSFPTSVLPTTAIPSFVNEHVGLPSECLLLKNMFDPATETEPNFDLEIRDDVADECSKYGPVNHIYVDKNSAGFVYLRFQSVEAAAAAQRAMHMRWFAQKMISATFMPPHEYEAKAKA

SEQ ID NO: 10464 - protein, 645 aa, Burkholderia vietnamiensis G4
MCGRRGGARPAREGRRGRARARSRAAFRGGRARAEGSAPYRRHPQLRARGRPDDRGAAGRAGTASVRDRDALLGEGFLRALRRRHDPARAAVHRREARDRQPRQRAVRRAERSRLSERRVIATTAVTDVTATNESTKEPSMKHDSNVTSTLGHLIDGKRVDGGSRMQPVFDPATGESHKSVALADQLTVGAAIASAQAAFPAWRNTPPLKRARVMSRFKTLLEEHADELCALITAEHGKVLADAMGELQRGIENVEYASYVPELLKGEHSKNVGPAIDSWSEFQALGVVAGITPFNFPVMVPLWMWPMAVACGNTFVLKPSERTPSSTLRMAELALEAGLPPGVLNVVNGDKEAVDTILTDARVKAVSFVGSTPIAEYIYSTGCANGKRVQALGGAKNFAVVMPDADIDNAVNALMGAAYGSCGERCMAIPLVVAIGDETGDRIVAGLKAEIEKMKVGPGNGAGVDMGPLVTKQHFDKVTGFVDAGVAAGATLVVDGRGVKVDGHDGGYYLGPCLFDHVKPGMPIYQHEIFGPVLGVIRLNSLDEAMALIDAHEYGNGTCLFTRDGEAARYFSDNIQIGMVGINVPLPVPVAYHSFGGWKRSLFGDLHAYGPDAVRFYTKRKTITQRWPSAGVREGTVFSFPSNR

SEQ ID NO: 10465 - protein, 315 aa, Wolbachia sp.
LCDKKIQLGINLTKGLGAGALPDIGKGAAEESIDEIMEHIRDTHMLFITAGMGGGTGTGAAPVIAKAAREARAVVKDKGAKEKKILTVGVVTKPFGFEGVRRMRTAELGLEELQKYVDTLIVIPNQNLFRIANEKTTFADAFQLADNVLHIGIRGVTDLMIMPGLINLDFADIETVMSEMGKAMIGTGEAEGEDRAISAAEAAISNPLLDNVSMKGAQGILINITGGGDMTLFEVDAAANRVREEVDENANIIFGATFDQAMEGRVRVSVLATGIDSCNDNSSVNKNKIPAEEKNFKWPYNQIPTLETKEYASTE

SEQ ID NO: 10466 - protein, 434 aa, Thermoplasma volcanium GSS1
MRRQWSSFPLRLFRQTLLSTTHQYRINYEIKALSLQISKPDRCQQMYKYLNDVVRHMGDITDLLSKVSIDDISDDFWDDNPTPSIPEDEEIANIYKTLNVKIKVVGCGGGGSNTVSRLYEEGLKGADLIALNTDASHLKTIKVAKKLLIGYRTTRGLGTGADPKVGEEAAAEEIVSIKKMVQNTDIVFVTAGLGGGTGTGSAPVVAKAAKEAGAIVISVVTLPFDSEGPMRMDNAVIGLENLAQFSDTLIAIPNQRLLSEVPNAEMKTAFAYADRVLADTIRAIVEIITKTGVINIDYSDIKTVMKSGGVAMIGMGQSKKGGDRIMTALEEALKPRLIDVDISTAKDCIFKIIAPPDITVSEVGKAMSEIKKRITAKSRIIWGLTVDKNLDQDVKVLIFMTGVNSAYLVRDLESARRLANAFTGSTSTGIDIVS

SEQ ID NO: 10467 - protein, 506 aa, Symbiobacterium thermophilum IAM 14863
MSGIAGILGKPDKARIVRMLEQQAHRGPDGRGIWTATAGFGLGHVRLATVDVAGGGQPLSNEDGSLWLAMTGAIYNHGALRRELEGRHAFRTQSDAEVVVHLFEEYGPACVERLDGMFAIAIWGEEVGLFLARDPLGIQPLYWGEDEEGNVLFASEIKALVGETRFVREFPPGHRWRAGEPLEPYERLPAHTGELADPDQIVLALDRLLHAAVRKQLAADVPVGCLLSGGLDSSLVTAIARQHAEGELHTFAVGLEGSADLEQARMVAGELGTIHHERVLTEKEVTAVLPRVVDALESCDPALVRSAVATYYVAELAAGHVKVVLSGEGADELFAGYDYLAEFERDAGALGAELYEITAAMHNCNLQRVDRMTQVHGVEARMPFADQAVVDFAFRIHPRLKRRDGESKWILRRVAEQYLPPAIVWREKQKFAIGSGIAPLLEHYAAKAVPDAAFRRARSPKGVPFASKEEFLYWSLFRERYGREDVLALMGRSRSLNQGQRWVGAL

SEQ ID NO: 10468 - protein, 132 aa, Arabidopsis thaliana
NSIEGDAISPIHVTPEDGFSYASFKAVGYDFNPLALSQLVTRVLSCFEPKQFSVAVHSSVGANSSKPEIPVDLEDYGCRERTFESLGQESGPVMSHTFEKLGKYCGSPRSPLKCEWTSTNSCSSEHEKPEGI

SEQ ID NO: 10469 - protein, 305 aa, Triticum aestivum
  misc_feature (99)..(99): Xaa can be any naturally occurring amino acid
  misc_feature (113)..(113): Xaa can be any naturally occurring amino acid
  misc_feature (128)..(128): Xaa can be any naturally occurring amino acid
  misc_feature (143)..(143): Xaa can be any naturally occurring amino acid
MDGGGGMGPVGGGVGGMVGPVGVGGGGGGSDVELVSKTLQFEHKLFYFDLKENPRGRYLKISEKTSTTRSTIIVPIAGVAWFLDLFDYYIRTDERDVFXSKELRLDTKVFYFXDIGENKRGRYLKVSXEASVNRNRCTIIVPXAGSSGEEGWEAFRNALLEINDEASRPYVLPNHPSQQHLEPPERLPGLSDDVGAGFIAGHGSQSASVPEVDVDGPPIEEFSGMGLSKVIRADQKRFFFDLGSNNRGHYLRISEVAGADRSSIILPLSGLKQFHEMVGHFVDIMKDRLEGMTGANVRTVEPSQR

SEQ ID NO: 10470 - protein, 509 aa, Vicia faba
MDGSAGPGGGNVNAFLRNYKMGKTLGIGSFGKVKIAEHVLTGHKVAIKILNRRKIKNMEMEEKVRREIKILRLFMHHHIIRLYEVVETPTDIYVVMEYVKSGELFDYIVEKGRLQEDEARSFFQQIISGVEYCHRNMVVHRDLKPENLLLDSKWSVKIADFGLSNIMRDGHFLKTSCGSPNYAAPEVISGKLYAGPEVDVWSCGVILYALLCGTLPFDDENIPNLFKKIKGGIYTLPSHLSPGARDLIPRLLVVDPMKRITIPEIRQHQWFQLRLPRYLAVPPPDTLQQAKKIDEEILQEVVNRGFDRDQLVESLSNRVQNEGTVTYYLLLDNRYRVSTGYLGAEFQETMDPGLNRINSGEVVSPAGGHHFLAYQGVGMRQQFPAERKWALGLQSRAQPREIMVEVLKALQGLNVCWKKIGHYNMKCRWVVGIPGHQGGMVNNSVLNNNFLGNVGIIENEAVPKSSVVKFELQLYKTQEKYLLDLQRVEGPQFLFLDLCAAFLAQLRVL

SEQ ID NO: 10471 - protein, 206 aa, Triticum aestivum
WEVRHEAVRPTAEEVEEVGEYVEPPEEAKVYVGNLPYDVDSERLAQLFEQAGVVEVSEVIYNRETDQSRGFGFVTMSTIEEAEKAVEMFHRYDVNGRLLTVNKAAPRGARVERPPRDSGSSFRIYVGNLPWQVDDSRLVELFSEHGKVVDARVVYDRDTGRSRGFGFVTMASQEELDDAIAALDGQSLEGRALRVNVAEERPPRRF

SEQ ID NO: 10472 - protein, 168 aa, Plantago major
MATSTQPQSIHDFTVKDAKGDDVDLSIYKGKVLLIVNVASQCGLTNSNYTELTTLYQKYKDQGLEILAFPCNQFGSQEPGSNEEIQNFVCTRFKAEYPIFDKVDVNGATAAPIYKFLKSAKGGLFGDGIKWNFSKFLVDKEGKVVDRYAPTTSPLSIEKDVKKLLEKA

SEQ ID NO: 10473 - protein, 509 aa, Pisum sativum
MDGSAGPGGGNVNAFLRNYKMGKTLGIGSFGKVKIAEHVLTGHKVAIKILNRRKIKNMEMEEKVRREIQILRLFMHHHIIRLYEVVETPTDIYVVMEYVKSGELFDYIVEKGRLQEDEARSFFQQIISGVEYCHRNMVVHRDLKPENVLLDSKWSVKIADFGLSNIMRDGHFLKTSCGSPNYAAPEVISGKLYAGPEVDVWSCGVILYALLCGTLPFDDENIPNLFKKIKGGIYTLPSHLSPGARDLIPRLLVVDPMKRITIPEIRQHQWFQLRLPRYLAVPPPDTLQQAKKIDEEILQEVVNRGFDRDQLVESLSNRVQNEGTVTYYLLLDNRYRVSTGYLGAEFQETMDPGLNRINSGEVVSPAGGHHFLGYQGVGMRQQFPAERKWALGLQSRAQPREIMVEVLKALQGLNVCWKKIGHYNMKCRWVVGIPGHQGGMVNNSVLNNNFLGNVGIIESEAVPKSSVVKFELQLYKTQEKYLLDLQRVEGPQFLFLDLCAAFLAQLRVL

SEQ ID NO: 10474 - protein, 429 aa, Bradyrhizobium japonicum USDA 110
MSVEISKLASGLTVVTDKMPHLETAALGVWAGVGGRDEKPNEHGISHLLEHMAFKGTTKRSSREIVEEIEAVGGDLNAGTSTETTSYYARVLKADVPLALDVLADILANPAFEPDELEREKNVIVQEIGAAQDTPDDVVFEHLNELCYPDQPMGRSLLGTAKTLRAFNRDMLRGYLSTHYRGPDMVVAAAGAVDHSQVVAEAEKRFASFEGTPGPKPQAAQFGKGGAKVVHRELEQAHLTLALEGVPQNDLSLFSLQVFTNILGGGMSSRLFQEVREKRGLCYSIYSFHAPYTDTGFFGLYTGTDPADAPEMMEVVVDVMNDSVETLTEAEIARAKAQMKAGLLMALESCSSRAEQLARHVLAYGRPQTVQELVARIDAVSVESTRDAARALLSRSRPAVVALGSGRGLDTAVSFAEGLTRARAKARLH

SEQ ID NO: 10475 - protein, 431 aa, Methanopyrus kandleri AV19
MAAESIAKAVHDVLATWGAQGPGAIFFLVWAAVLVVGMQLGFMFLEAGQVRTKNVVSVLMKNLLDLSLGGIVFIFFGFALAFPDYAQSIGKWIATMFTANPWSADPMKAADPYNLAYCFFQFAFCATAATIVSGAVAERINFKACLVMTVLITGLLYPIFVLWTWGGGWMGGDTGLFAKVFGQPYHDFAGSTVVHAIGGFLAMAAAYLLGPRIGRFKNGKPVPIPGHNIPQAFLGALFLAITWYGFNVGSSAVLYDPTNESWISSLVATLAMCGGAAAAAFTTRFDPLWAANGLIAGLVAICAGCDIMSPFGALLTGIVAGLIIKPAFRLLEKLEIDDVVAACPVHGFAGVWGAIAAGIFGAEALGGAGGVSLAAQIVGALVCIAWALGSGFATFYVIDKVIGLRATEEEEKGLDETEFGVSAYPYMETRD

SEQ ID NO: 10476 - protein, 117 aa, Methanopyrus kandleri AV19
MYMIEAVIRPEKLDDVKEALDEAGYPGMTVIHVKGRGRQRGIVHRYRDEEYRTDLLDKILLKVAVPTEDDVEKVIDVICEHAKTGRPGDGMIFVIPLEDAVRARTGERGDDALSTEE

SEQ ID NO: 10477 - protein, 386 aa, Zea mays
MLTWPANLPDSARIRPPTGRPQPSVAHVLPPVLTVAPSSPTCPAPRSRRFASLLASQAFLQLHRASGRLRPCLLTVSSSSARALLLHLHASASASASASSLEVSALPLPPRCGGAAFAHARAVAVGRHVYLVGRGATLRVDPLTGAARACAATLFPRSKFAAAAVGARIYVSGGSARTAAVEEYDPAADAWRVVAEAPRRRYGCAGAGAGGVFYVAGGVAVSGGGAAGTAALEAHACAGSVDALHVGSGARAWARPRAVPGGGCVVGACGAGDGHLYVVASHAVDLSFWRWHGGGGRGGGGWVALEAPPVPRGAVGLGVAVRVAMAGVGADRVASVVNVAAVRGHAAAGGAVEGLVLVYDIGGGRWSRAPDLPPGFRRAACAAVEC

SEQ ID NO: 10478 - protein, 230 aa, Glycine max
LVLLSFFVGLGKDLLELMTCGHRNILQFCGICVDDNHGLCVVTKFMEGGSVHDLMMKNKKLQTKDVVRIAVDVAEGIKFMNDHGVAYRDLNTRGILLDKHGNACLGDMGIVTACKSVGEAMEYETDGYRWLAPEIIAGDPENVTETWMSNVYSFGMVIWEMVTGEAAYSSFSPVQAAVGIAACGLRPEIPKDCQQTLKHIMTKCWNNTPSKRPHFSEILAILLRPNNNNR

SEQ ID NO: 10479 - protein, 321 aa, Xanthomonas campestris pv. campestris str. ATCC 33913
MVAMNTTSDTALLVVNLGTPESPTVPAVRRYLAEFLSDRRVVAIPPLFWKPLLYGVILPIRGPKSAEKYAKVWLPDGSPLAVYTRRLTEGLQQVMPDWHVTWAMRYGAPALRKALDGLRARGIKRIVVLPLYPQYSTTTTASIQDVVDAWRPSAPEIAVEVIQDYCEDAGWVAAIADSIRTHWQVHGRSEKLMFSFHGLPQRVANAGDPYPQQCERSAQAIVTALGLGPDAWQMGYQSRFGAERWLQPYAEPTLWALAEGGVRSFDLVCPGFATDCLETLEEVALGFAETLAERGATLSYIPCLNDSTTHAQALAAVARRA

SEQ ID NO: 10480 - protein, 585 aa, Nostoc sp. PCC 7120
MTITANSQLPNRFPQNLESMNHKADGLLANLGAELVYVQDGVGRYLSFYWQKSELLGFNPEQIVCDGNGQEIFVPLDKVSYMKRLHCIMANLAPEKFPCWFSCHQNLFELELAITPIIPPLGTGATTVLVMGRLLQVKVNNQEVNVAITTPTQTDLASRSQQHQRLVNKITRNIRRTLDLDLIWQQTVDSLGKALRLERCIICPYQPSSSKVRVIAEYHQPDRPSMLGLEIDVTSEPAFAQALTTLEPIIMEVPGYELCPQQKILVVATCYQDQANGLIAINLRHECYPLTNAELELAKEVADQLGTAIAHATLYKELEAARQKAEEASRLKSEFLANVSHEIRTPLNGMIGFLKLILEGMADDVEEKNQFLSEAHQLSLHLLNIINDILDIAKIEAGKMELVCAPIKLEELFSDVDNFMRPQAEVKNLSFRMQLPPTSDEIVVQGNYQRLLQVMLNIVGNAIKFTHEGGITVTADVVLKKGKLQEQNFPGMVRVRIADTGIGVSLDQQDKLFQLFSQVDGSRTRQYGGTGLGLAISQKLVETMGGEVHFYSLGEGLGSTVTFTVPLYQQPVMLSSNDTDAECIG

SEQ ID NO: 10481 - protein, 487 aa, Oryza sativa (japonica cultivar-group)
MVPSFPQPASAAAATRPIPGSYGPPLLGPLRDRLDYFWFQGPDDFFRRRAADHKSTVFRANIPPTFPFFLGVDPRVVAVVDAAAFTALFDPALVDKRDVLIGPYVPSLAFTRGTRVGVYLDTQDPDHARTKAFSIDLLRRAARNWAAELRAAVDDMLAAVEEDLNRAPDPAAASASYLIPLQKCIFRFLCKALVGADPAADGLVDRFGVYILDVWLALQLVPTQKVGVIPQPLEELLLHSFPLPSFVVKPGYDLLYRFVEKHGAAAVSIAEKEHGISKEEAINNILFVLGFNAFGGFSVFLPFLVMEVGKPGREDLRRRLREEVRRVLGGGDGGEAGFAAVREMALVRSTVYEVLRMQPPVPLQFGRARRDFVLRSHGGAAYEVGKGELLCGYQPLAMRDPAVFDRPEEFAPERFLGDDGEALLQYVYWSNGPETGEPSPGNKQCAAKEVVVATACMLVAELFRRYDDFECDGTSFTKLDKRELTPS

SEQ ID NO: 10482 - protein, 508 aa, Escherichia coli O157:H7 EDL933
  misc_feature (266)..(266): Xaa can be any naturally occurring amino acid
MWLWRKLWGIGGTMSRNTEATDDVKTWTGGPLNYKEGFFTQLATDELAKGINEEVVRAISAKRNEPEWMLEFRLNAYRAWLEMEEPHWLKAHYDKLNYQDYSYYSAPSCGNCDDTCASEPGAVQQTGANAFLSKEVEAAFEQLGVPVREGKEVAVDAIFDSVSVATTYREKLAEQGIIFCSFGEAIHDHPELVRKYLGTVVPGNDNFFAALNAAVVSDGTFIYVPKGVRCPMELSTYFRINAEKTGQFERTILVADEDSYVSYIEXCSAPVRDSYQLHAAVVEVIIHKNAEVKYSTVQNWFPGDNNTGGILNFVTKRALCEGENSKMSWTQSETGSAITWKYPSCILRGDNSIGEFYSVALTSGHQQADTGTKMIHIGKNTKSTIISKGISAGHSQNSYRGLVKIMPTATNARNFTQCDSMLIGANCGAHTFPYVECRNNSAQLEHEATTSRIGEDQLFYCLQRGISEEDAISMIVNGFCKDVFSELPLEFAVEAQKLLAISLEHSVG

SEQ ID NO: 10483 - protein, 412 aa, Candidatus Protochlamydia amoebophila UWE25
MKTYRLEDALLALKEGKFVIVVDDENRENEGDLILAAEKAHPSSLGFMIRHTTGIICLAMKGQRLDELKLPPMVTDNTDRKQTAFTVSVDYLHQGVTTGVSAEDRTKTILSLIHPHTKPEDLGRPGHIFPLRYKEGGVLKRAGHTEAAVDLTNLAKLYPAGILAELINEDGSMMRLPELEKFSDLHQIPIITIAELIRFRRRHEKLVSCFSQSPIPTPFGDFNAYVYESQLDGIQHIALVKGEIKNQKNILVRMHSECLTGDVFGSKRCDCGSQLKLAMEKIEQEGRGVIIYLRGHEGRGIGIGHKLKAYNLQDQGKDTLEANLELGFPIDSREYGIGAQILVDLGLSTIRLMTNNLAKYNGLAGYDLEITERVPLPVCVTKENKHYLQTKKDKLGHLIDLSEDKLEIHHST

SEQ ID NO: 10484 - protein, 648 aa, Lolium perenne
MESRSIPGAYAYEPLPHSSDDAHGHDDRRSAGGVRWRACAAVLAASALVVFVVASTLAGSRVDRVAVDVAAMPALSETARSRGKDAGVSEKTSGAADEMGFLGAGSGADADGFPWSNAMLQWQRTGFHFQPEMNWMNDPNGPVYYRGWYHLFYQYNPEGAVWGNIAWGHAVSRDLVHWRHLPLAMVPDQWYDINGVWTGSATVFPDGTLNMLYTGSTNASVQVQCLAVPEDPNDSLLRNWTKHEANPVLLPPPGIGDKDFRDPTTAWFDESDQTWRTVIGSKDNNGHAGIAMVYKTKDFLNYELIPGYLHRVDGTGMWECIDFYPVGGKNGSEELYVIKESSDDDRHDWYTLGKYDAAANTFTAADPENDLGIGLRYDWGKFYATKTFYDPAKNRRVLWGWIGETDSERADVAKGWASLMSIPRTVELDEKTRTNLIQWPVEELETLRIKSTDLGGVTIDHGSVYPLPLHRATQLDIEASFRIDTATVAALNEADVGYNCSTSGGSANRGALGPFGLLVLADGKAEQTAVYFYVAKGLDGTLQTHFCHDESRSTLARDVVKRVVGYTVPVLDGEAFSVRVLVDHSIVESFAMGGRSTATSRVYPTEAIYGAAGAYLFNNATGGSVTVEKLVVHEMDSSYNQIFMADDL

SEQ ID NO: 10485 - protein, 947 aa, Wolinella succinogenes
MGPSILKMLTHAKSHKEALMAFSRREFLKSAAAASAASAVGMSVPSQLLAQAQEGEKGWRWDKSVCRFCGTGCGIMVATKNDQIVAVKGDPAAPVNRGLNCIKGYFNAKIMYGADRLTDPLLRVNEKGEFDKQGKFKPVSWKKAFDVMEAQFKRAYNELGPTGIGVFGSGQYTIQEGYMAAKLIKGGFRSNNLDPNARHCMASAVAAFMETFGIDEPAGCYDDIELTDTIITWGANMAEMHPILWARVTDKKLSNPDKVKVINLSTYTNRTSDLADIEIIFTPQTDLAIWNYIAREIVYNHPESIDMEFVKNHCIFTTGFTDIGYGMRTDIKHAKYDPKELDIAAKERSKVLSEAEGVTLRYLGMKAGDVMEMKHNATAGNHWEITFEDFKKALEPYTLDFVAKLAKGNSEESLESFKEKLQKLANLYIEKERKVVSFWTMGMNQHTRGTWVNEQSYMVHFLLGKQAKPGSGAFSLTGQPSACGTAREVGTFSHRLPADMVVANPKHRAVSEKIWKLPEGTLNPKMGAHYMNIMRDLEDGKIKFAWIQVNNPWQNTANANHWIKAAREMDNFIVCSDAYPGISAKVADLILPTAMIYEKWGAYGNAERRTQHWRQQVVPVGNAMPDVWQMAEFSKRFKLKEVWGAKKIDDKLTLPDVLEKAKAMGYSPEDTLFEVLFANSEAKSFKAKDPIGEGFENTEVFGDRRNVAGSDGEVFKGYGFFIHKYLWEEYRRFGNGHGHDLADFDTYHKVRGLKWPVVDGKETQWRFNAKYDPYARKAGSGEFAFYGDAMKELPRGDLLSPKTEEKFKLTNKAKIFFRPYMDPPEMPSSEYPLWLCTGRVLEHWHSGTMTMRVPELYRAVPEALCYMHPEDAKKLGVKQNEAVWVESRRGKVKARVDTRGRNRTPLGLVYVPWFDEKVYINKVCLDATCPISKQTDFKKCAVKVYKA

SEQ ID NO: 10486 - protein, 125 aa, Glycine max
MASSLLVMKVTSCMVAVLMVSFGHIIPLAEAEIPCGRVQITVAPCIGYLRGPGGGVPAACCNGVRSINKEAKTTPDRQGVCRCLKTTALSLPGLNLATLAALPSKCGVNLPYKISPTIDCNTVKH

SEQ ID NO: 10487 - protein, 315 aa, Wolbachia sp.
LCDKKIQLGINLTKGLGAGALPDIGKGAAEESIDEIMEHIRDSHMLFITAGMGGGTGTGAAPVIAKAAREARAVVKDKGAKEKKILTVGVVTKPFGFEGVRRMRIAELGLEELQKYVDTLIVIPNQNLFRIANEKTTFADAFQLADNVLHIGIRGVTDLMIMPGLINLDFADIETVMSEMGKAMIGTGEAEGEDRAISAAEAAISNPLLDNVSMKGAQGILINITGGGDMTLFEVDAAANRVREEVDENANIIFGATFDQAMEGRVRVSVLATGIDSCNDNSSVNKNKIPAEEKNFKWPYNQIPTLETKEYASTE

SEQ ID NO: 10488 - protein, 311 aa, Solibacter usitatus Ellin6076
MLTNSSQIVLITGGTGGIGQAIAVRMAKLGATTIVVGRDQARGEAAKAEIRTQSGNRSVELMLADLSSQGDIRRLAGEFMARYGRLDVLVNNVGGLYGKRWETVDGIECTLALNHLCPFLLTHLLLPVLRAGAPSRIVNINSEGHRAAKSVNFGDFDAARWKRGFLIYSQSKLANLLFTFEMARRLSPSEITVNAVHPGIVDTQLFRRFIEERFTLIGGVLSKAAAFVARKVAYRISHFDTVETAAECPVYLASSSEVAGITGKYFGLNKKIVETSAASLDADLSREVWRMSAEMVGLSGNEASQVQRRFA

SEQ ID NO: 10489 - protein, 356 aa, Clostridium acetobutylicum ATCC 824
MSIKIKNKEKLIIDKTLLEDKGSELNLKKDRAGMENFLALLNKIGVDFFEVDRDNFNYIYNSKKLIYRVKDQKDAAVINDYNFGYIIVDFDKAKDFDNYFINLMNRSKIILEVDGKEIDEIFRTDSYEIFNNFNVACIRINNVERCNLNGWGEIIRRIKNTFCSLVDFCASNKYFMATAISMEALNDGADFITVAFNGERYGISSFEEVILALKVMKKVKVTEKLDLLNDLSKIYEKLFRKAISPMKPIIGEDIFKYESGIHVDGIEKNPLTYEPYEPSIIGADRQMFIGKHSGRKAVEIKLRELNIETMLCNMDKFLSRIREKSIQVHRNISDKEFKEIYYNCIESRDYHGSKIS

SEQ ID NO: 10490 - protein, 1152 aa, Ustilago maydis 521
MSSKAIREFDAKLLVNYWLPRSPLAHADLKVNADFVAPAPKVAQIAWDPVTNSITDASQLPAWVQSSKLVAKPDQLIKRRGKAGLLKLNCDWADAKTWIQERAGKAQKVETVTGTLNNFIVEPFCPHPADTEFYVCINSAREGDWILFTHEGGVDVGDVDAKALKLLIPADPAAPFPKREEWTSTLLGGVPAAKREVLTDFLIRLYSVYVDLHFAYLEINPLVATDDGQIAYLDMAAKLDQTADFICGPKWAIARDPSIYLGASAGASGNKGEDRGPPMYWPAPFGRDLTKEEAYIAKLDAGTGASLKLTVLNPTGRIWTMVAGGGASVVYSDAIAAHGYAHELANYGEYSGAPSEGQTFEYAKTLLDLMTRGEVNPQGKLLIIGGGIANFTNVASTFKGIIRALKEYKLSLAKHGVRIFVRRGGPNYQEGLKAMRLLGEDLGVEIQVFGPETHITDIVPLALGVKTFEEVTLASQQQNTLPSGAATPAHGAANGTKAENKAIGTVDHNTGERVQPQDQIVHFGAGSTTGERPAYRPFDANTRSLVFGLQPRAIQGMLDFDFSCGRKTPSVAAMIYPFGGHHIQKFYWGTKETLLPVYTSIKEAVAKHPDADVVVNFASSRSVYSSTLEVLDCPQIRALALIAEGVPERHAREILHRAEKAGVLIIGPATVGGIKPGCFRIGNSGGMMDNILASKLYRPGSVGYVSKSGGMSNELNNILSITTNGTYEGIAIGGDRYPGTTFIDHLLRYEQDPECKMLVLLGEVGGIEEYRVIEAVKKGTIKKPIIAWAIGTCAKMFTTEVQFGHAGSMANSDMETASAKNAAMKAAGFIVPDTFEDLPAVIREVYNKLVASGTIQPKPERPAPAIPVDYKWAQELGMVRKPAAFISTISDERGSELMYSGVKISEVFESGMGIGGVISLLWFKRRLPDYCTKFIEMALMLTADHGPAVSGAMNTIITSRAGKDLISSLVSGLLTIGDRFGGALDDAATEFSSAYDRGMTAREFVDSMRKANKLIPGIGHKIKSVSNPDYRVQVVKEFVLTNFPSHKMLDYALAVEKVTTAKKDTLILNVDGCLAVCFVDLLRDSGAFTIEEARDYLSYGFLNGIFTLGRSIGFIGHHIDQKRLKAGLYRHPADDFHIEMATPARVMGTLKK

SEQ ID NO: 10491 - protein, 648 aa, Aspergillus nidulans FGSC A4
MELESSAFPKTLAEQDNTMVPRNEQSSLKRSRVTADHESQDQKKPRRSERISSQQQSQTPVIQSYLPTPLTHHDSTATDLRNEMTATPPSQALPRSPSDLGSPPGDTQALSQFVYPPRAFADDVEDEAAEGVWGYLIPLDDKVRDALVLRKRDGCDAKPTKERSSKERKSRESSTKHAANRRPGGYLIGRHPECDLSLNIPTVSNRHFLVFPENRRGDTVAILEDLSSNGTFINDAIVGRNKHRELEDGDEVTVLDEVRFVFRAPRTKNISGFRQQYRVLQQLGKGHFATVYLCVERTTGAKFAVKVFEKRADSKSQNDALMQEIGLLMSVSHPNLLCLKDTFDESDGVYLVLELAPEGELFNMIIRKQKFTEKETRHIFRQLFEGLKYLHDRGIVHRDIKPENILVADNKLTVKLGDFGLAKIIGEDSFTTTLCGTPSYVAPEILQESRRRKYTKAVDIWSLGVVLYICLCGFPPFSDELYTPENPYTLAQQIKLGRFDYPSPYWDSVGDPALDLIDRMLTVDVDKRITVDECLQHPWLTGELPSVTDSTDGLTGALGNLDFSKRKIARERTLLSGINDVRSSQQKTGDGASVKVYHKNIAGQRMHNQRATRQHEFPNKNSGPKDFVNLGECGDPVLFEEEPTSRHN

SEQ ID NO: 10492 - protein, 315 aa, Wolbachia sp.
LCDKKIQLGINLTKGLGAGALPDIGKGAAEESIDEIMEHIRDSHMLFITAGMGGGTGTGAAPVIAKAAREARAVVKDKGAKEKKILTVGVVTKPFGFEGVRRMRTAELGLEELQKYVDTLIVIPNQNLFRIANEKTTFADAFQLADNVLHIGIRGVTDLMIMPGLINLDFADIETVMSEMGKAMIGTGEAEGEDRAISAAEAAISNPLLDNVSMKGAQGILINITGGGDMTLFEVDAAANRVREEVDENANIIFGATFDQVMEGRVRVSVLATGIDSCNDNSSVNKNKIPEEEKNFKWPYNQIPTLETKEYASTE

SEQ ID NO: 10493 - protein, 265 aa, Clostridium acetobutylicum ATCC 824
MEVKLVDTTLRDGEQKAGIALGVKEKTEIAKLLDDMGIFQIEAGVAAMGGQEKKSIEEIVRLGLKSKISSFNRMKISDIQHSIDCKVDIIHISVPASNMQIKYNLKTSKEIVISNMKKCIYYALGKGYEVTIGLEDASRADIEFLVELCKEAYKEGIRRVRYADTVGILYPRKTFYNINRIIEEVPVEVEIHTHNDFGMAEVNSLSAAKAGANYIDTTIAGIGERAGNCDFVKFINIIGKTNLRIDDLKLKEKMIKNIMKLNILN

SEQ ID NO: 10494 - protein, 315 aa, Wolbachia sp.
LCDKKIQLGINLTKGLGAGALPDVGKGAAEESIDEIMEHIRDSHMLFITAGMGGGTGTGAAPVIAKAAREARAVVKDKGAKEKKILTVGVVTKPFGFEGVRRMRIAELGLEELQKYVDTLIVIPNQNLFRIANEKTTFADAFQLADNVLHIGIRGVTDLMVMPGLINLDFADIETVMSEMGKAMIGTGEAEGEDRAISAAEAAISNPLLDNVSMKGAQGILINITGGGDMTLFEVDAAANRVREEVDENANIIFGATFDQAMEGRVRVSVLATGIDSCNDNSSVNQNKIPAEEKNFKWPYNQIPTLETKEYASTE

SEQ ID NO: 10495 - protein, 350 aa, Aspergillus oryzae
MIKFRPRLSLFTALRAAPPTRRFATEARLTSDHVRIVEVGARDGLQNEKKSIPLETKLQLIEKLSKTGVTTIEAGSFVPAKWVPQMASTAEICEKLLTSPPQSQNAIAYNYLVPNIKGLENLVKIMDIAGAPAENTKSSTSTEISLFAAATEAFSKANTNCTIAESLERIRPIVELAKTKNIRVRGYVSVALGCPYEGPDVPPSKVADITATLLEMGADEVSVADTTGMGTAPRTMELLQALKAAGIANNDLALHFHDTYGQALVNTVVGLEHGIRIFDSSVGRLGGCPYSKGATGNISTEDLVHTLHSLGMHTGINLEEMAKIGGWISGELDRFNESRAGKATLARIQE

SEQ ID NO: 10496 - protein, 260 aa, Methylobacterium extorquens
MSILIDEKTPILVQGITGDKGTFHAKEMIAYGSNVVGGVTPGKGGKTHCGVPVFNTVKEAVEATGATTSITFVAPPFAADAIMEAADAGLKLVCSITDGIPAQDMMRVKRYLRRYPKEKRTMVVGPNCAGIISPGKSMLGIMPGHIYLPGKVGVISRSGTLGYEAAAQMKELGIGISTSVGIGGDPINGSSFLDHLALFEQDPETEAVLMIGEIGGPQEAEASAWIKENFSKPVIGFVAGLTAPKGRRMGHAHHGFGSGG

SEQ ID NO: 10497 - protein, 91 aa, Arabidopsis thaliana
  misc_feature (37)..(37): Xaa can be any naturally occurring amino acid
  misc_feature (51)..(51): Xaa can be any naturally occurring amino acid
  misc_feature (54)..(54): Xaa can be any naturally occurring amino acid
  misc_feature (59)..(59): Xaa can be any naturally occurring amino acid
MASSMLSSAAVVTSPAQATMVAPFTGLKSSASFPVTXKANNDITSITSNGXSVXSCMKXWPPNRKESFRLYLNLPPLEFLREVGLTFFNKG

SEQ ID NO: 10498 - protein, 315 aa, Wolbachia sp. group B
LCDKKIQLGINLTKGLGAGALPDVGKGAAEESIDEIMEHIKDSHMLFITAGMGGGTGTGAAPVIAKAAREARAVVKDKGAKEKKILTVGVVTKPFGFEGVRRMRIAELGLEELQKYVDTLIVIPNQNLFRIANEKTTFADAFQLADNVLHIGIRGVTDLMIMPGLINLDFADIETVMSEMGKAMIGTGEAEGEDRAISAAEAAISNPLLDNVSMKGAQGILINITGGGDMTLFEVDAAANRVREEVDENANIIFGATFDQAMEGRVRVSVLATGIDSCNNNSSVNQNKIPAEEKNFKWPYNQIPISETKEYASTE

SEQ ID NO: 10499 - protein, 435 aa, Dehalococcoides sp. BAV1
MKADYLIVGCSAGGIGAAEAIREVDRDGSIVIVGEEPYLAYSRPMIAKYLSGQKTVEKILFRRPEFYANNNITCLTDTKVEAVNTATHEVSLSNGEKISYGKLLLAPGGKPIVPPIDGSNKAGVFNFINMKDAVLIDGYVKAENVKKAVIIGGGLIGMSAADALTKLGIEVDIIELKGHILNTILDEAAGKIAAQTVTSYGVKLNTGRTVSKVLGLHKVAGVELDNGHQIESQMLVIAIGVIPRTELFKAAGLEVNRGVVVNDNMRTSNPDVYACGDACESFDFIYNSRRVTPIWPNAYIGGRIAGYNMAGMDTTYHGGTVMNSLNYFGMDIATAGMSVLPPDASGLEVLSTLTANGYKKLVLNAEGKIVGMLTLGETDTAGIIFGLMRDQSDVRPIKDNILNENFGLAYLSADSREEHLHGNTSGRVAPADFKH

SEQ ID NO: 10500 - protein, 318 aa, Arachis hypogaea
VMHRDLKPESFLFANKKENSPLKAIDFGLSVFFKPGEKFSEIVGSPYYMAPEVLKRNYGPEIDIWSAGVILYILLCGVPPFWAESEQGGAQAILRGLIDFKREPWPSISESAKSLVKQMLEPDPKLRLTAKQVLEHPWIQMLRRAPNIPLGDAVKSRLKQFSMMNRFQKKALRVIADFLSNEEVEDIKDIFQKMDTDNDGIVSIEELKAEFQNFGSQLAESEIQMLLEAVNTNGKGTLDYGEFVAVSLHLKRMANDEHLRKAFSYFDKDGNGYIEPDELRNALMEDGTDDCADVANDIFQEVDTDKDGRISYEEFVAM

SEQ ID NO: 10501 - protein, 105 aa, Dehalococcoides sp. BAV1
MELTDQSFAAEVLKSDKPVLVDFWAPWCGPCRMVAPIIDKLSTKYAGKFKFCKLNVDENKTTATQYRVMSIPTLLFFKGGQVADMVVGAVPESALSQKIDQLIQK

SEQ ID NO: 10502 - protein, 458 aa, Staphylococcus epidermidis ATCC 12228
MKVAKFGGSSVSTAEQIKKVLTIVNEDPERKIIIVSAPGKRHNDDIKTTDLLIRLYEKVLNKLNYESKKQEIIQRYADIVEELGIGNDILITINDTLEEYIKHLSDKPNRLYDALLSCGENFNAQLIAQYNNSQGIPTRYISPKEAGLTVTDLPQQAQILDSAYNEIYKLRDYDEKLIIPGFFGVSKQNYIVTFPRGGSDITGAIIARGVRASLYENFTDVSGIYKANPNIINNPELIEEITYREMRELSYAGFGVFHDEALQPLYKDRIPVVIKNTNRPNDKGTYILHDREIDSKNVISGISCDKGFTVINIKKYLMNRLVGFTRKILGVLEEFNISFDHMPSGIDNISIIMRTNQIQGKESQVLNAIRKRCEVDELSIDHDLAVLMIVGEGMNQVVGTASKITHALSESNINLIMINQGASEISMMFGIHEADAEKAVLSTYEFCYNGVCLKNLCK

SEQ ID NO: 10503 - protein, 199 aa, Brassica oleracea
MAEETKNVHEHEAPKVATEESSTATGEVTDRGLFDFLGKKKDETKPEETIDSEFEQKVHISEPVPEVKHEEEKEEKKHSLLEKLHRSDSSSSSSSEEEGEDGVKRKKKKDKKKVTATEGEVKTEEEKKGFMDKLKEKLPGHGKKPEEKPEDASPAPVVAPPVEEAHPAEKKGILEKIKEKLPGYHSKTVEEEKKDKDDH

SEQ ID NO: 10504 - protein, 196 aa, Arabidopsis thaliana
  misc_feature (74)..(74): Xaa can be any naturally occurring amino acid
  misc_feature (119)..(119): Xaa can be any naturally occurring amino acid
  misc_feature (132)..(132): Xaa can be any naturally occurring amino acid
  misc_feature (167)..(167): Xaa can be any naturally occurring amino acid
EREREREFSIPPPPPEIEEEEEILVSYMISSDAELTSPAQDTMLAPFTVLKTSASFQVSRKANNDITSITTNVXTVSCMNERPPLGKKKFETISYLPDLTDSELLKEVDYLLRNQRIPXVQFDLYQGFEYRXEHRNTLVYYYGLYWNMWKIPLLRCSDSAQVLKEIXLCKKEYPVAFIMIIVFENNRQVQCISLIV

SEQ ID NO: 10505 - protein, 126 aa, Oryza sativa (indica cultivar-group)
MITSPLVAPARAKGLPSISRRGSSFAIVCSGGKKIKTDKPYGIGGGMSVDIDASGRKSTGKGVYQFVDKYGANVDGYSPIYSPEEWSPTGDTYVGGTTGLLIWAVTLAGLLGGGALLVYNTSALAG

SEQ ID NO: 10506 - protein, 187 aa, Capsicum annuum
MASSVMSTATVATGANAAQASMIASFNGLKSAASFPVTRKQDLDITSIASNGGRVECMLVWPPINKKKYETLSYLPDLSDEQLLKEIEYLLQKGWVPCLEFETEHGFVYREHHRSPGYYDGRYWTMWKLPMFGCTDATQVLNEVQEAKKAYPQAWIRIIGFDNVRQVQCISFIAYKPEATKFSMFNV

SEQ ID NO: 10507 - protein, 345 aa, Bradyrhizobium japonicum USDA 110
MSTAAPNETTQPTVQSGQKRVGVLLVNLGTPDTADAPGVRVYLKEFLSDARVIEDQGLVWKVVLNGIILRSRPRTKALDYQKIWNNEKNESPLKTITRSQSDKLAAALSDRDHVVVDWAMRYGNPSIKSGIDALIAEGCDRILAVPLYPQYSASTSATVCDEVFRVLARLRAQPTLRVTPPYYEDEAYIEALAVSIETHLATLPFKPELIVASFHGMPKSYVDKGDPYQEHCIATTEALRRRLGVDASKLLLTFQSRFGNDEWLQPYTDKTMERLAKEGVRRIAVVTPGFAADCLETLEEIAQENAEIFKHNGGEQFSAIPCLNDSEPGMDVIRTLVLRELQGWI

SEQ ID NO: 10508 - protein, 240 aa, Nocardia farcinica IFM 10152
MADSDERISHHEPHSRGLSTRLNWLRAAVLGANDGIVSTAGLVVGVAAATTTQSAIFTAGIAGVSAGAISMAVGEYVSVSTQRDSEEALLAKERRELREDPADELRELAAIYEAKGLSPATARTVAEELTAHDAFTAHAEAELGLDPGALTNPWQAAASSAVSFTLGALLPLLAILLPPVTARIPVTFAAVLVALALTGSISARLGGSNRLRAVVRVVVGGALAMTITYCIGQIADVAGI

SEQ ID NO: 10509 - protein, 300 aa, Alkaliphilus metalliredigenes QYMF
MSVLIDENTKVIVQGITGFTGLFHTKQAMEYGTNIVAGVTPTKGGTTVEGIPVFNTVKEAVKATGGNTSVIYVPPIFAADAILEATEAELELVICITEGIPVMDMIKVKAFMKGKKTRLIGPNCPGVITPEVCKIGIMPGYIHKKGHVGVVSRSGTLTYEAVHQLSTRGIGQSTAVGIGGDPVNGTSFIDMLKAFNEDEETYAVMMIGEIGGTAEEEAAEWIQSNMTKPVVAFIGGKTAPPSKRMGHAGAVISGGKGKASSKIKTLEACGIKVASTPDVMGETLIAVLKENHLLEKCMID

SEQ ID NO: 10510 - protein, 362 aa, Nostoc sp. PCC 7120
MTQNYRITLLPGDGIGPEIMAVAVDVLKVVGQQFDIQFDFQEALIGGAAIDATGEPLPSATLDTCRHSDAVLLAAIGGYKWDSLPPHQRPEGGLLGLRAGLELFANLRPAQILPQLIDASTLKREVVEGVDIMVVRELTGGIYFGKPRGIFTTETGEKRGVNTMVYTESEIDRIGRIAFETARKRRGKLCSVDKANVLDVSQLWRDRITNLSQEYPDVELSHLYVDNAAMQLVRAPKQFDTIVTGNLFGDILSDAAAMLTGSIGMLPSASLGASGPGVFEPVHGSAPDIAGQDKANPLAQVLSAAMMLRYALDQPQAADKIEQAVLQVLEQGDRTGDIISVGMNLLGCRGMGDSLIKALAKS

SEQ ID NO: 10511 - protein, 401 aa, Streptomyces avermitilis MA-4680
MSSENSSTDDAQQVWDVVVVGAGPAGASAAYAAAVAGRSVLLLEKAELPRYKTCGGGIIGPSRDALPPGFELPFQDRVHAVTFSNNGRFTRTRRSKQMLFGLINRPEFDQQLVEHAQKAGAELRTGVTVSRVEQHGSAVPDRRTVAVVLQGGDSLLARAVVGADGSASRIGAHVGVKLDQVDLGLEVEIPVPETVAEDWQGRVLIDWGPMPGSYGWVFPKGDTLTVGVISARGEGAATKRYLEDFIARLGLAGFEPSISSGHLTRCRADDSPLSRGRVLVCGDAAGLLEPWTREGISFALRSGRLAGEWAVRIAEAHDAVDTRRQALNYAFAIKAGLGVEMSVGKRMLTAFERRPGMFHAALTGFRPAWKAFAQITRGATSLGELVRSHPMAGRVLTSLDR

SEQ ID NO: 10512 - protein, 509 aa, Solanum tuberosum
MALTLSFSLPLPSLHQQFPSKYSTFRPIIVSLSEKPTIVVTQPTKLPTRTIPGDYGLPGIGPWKDRLDYFYNQGKDEFFESRVVKYKSTIFRTNMPPGPFISSNPKVIVLLDGKSFPVLFDVSKVEKKDLFTGTYMPSTELTGGYRVLSYLDPSEPNHEKLKKLMFFLLSSRRDHVIPKFHETYTEFFETLDKEMAEKGTAGLNSGNDQAAFNFLARSLFGVNPVETKLGTDGPTLIGKWVLLQLHPVLTLGLPKFLDDLILHTFRLPPFLVKKDYQRLYDFFYTNSASLFAEAEKLGISKEEACHNLLFATCFNSFGGMKIFFPNMLKSIAKAGVEVHTRLANEIRSEVKSAGGKITMSAMEKMPLMKSVVYEALRVDPPVASQYGRAKQDLKIESHDAVFEVKKGEMLFGYQPFATKDPKIFDRPEEFVADRFVGEGEKLLKYVLWSNGPETESPTVGNKQCAGKDFVVMVSRLFVTEFFLRYDTFNVDVGKSALGASITITSLKKA

SEQ ID NO: 10513 - protein, 555 aa, Wolbachia endosymbiont of Drosophila melanogaster
MSKIKEFRSFMHEINVDAFVLHTKDEYLNEYSEELTKLCGFTGTNGLLIVTKNNKCQFFTDGRYITQAHNQLDQGNFQVYNIQEEDPREWIKANLTSTASLGYYLQYFTMEDIRKYENICKLIPCLAGKKSDYRKQAVVLHSIKYAGESSKDKCEKVAKSIDKEAEAVLLTDPNSISWLLNLRNENAKYTPCILGRAILYKSGNVDLFIQDKEHSTIEANLGNHINIFDISELENSLHKLNSIVIDPNTTPMSIMAVIKDKQVAEREDPCLIYKAVKNQTEIAGAINAHIRDGVAVTNFLHWLESNVGTELEAEERILEYRKEQNLFKQLSFPTISAFNENGAIIHYRASSKTNKVIQKDGLYLIDSGGQYLDGTTDVTRTVVVGNPTNEQITHYTIVLKAHIAIASVVFPPGTTGGELDILARTHLWKFGMDYMHGTGHGVGSYLSVHEGPQAISKSNKVKLTPGMILSNEPGYYIPGEYGIRIENLMYVNRQENGFLNFKQLTSIPYDRRLINVQMLTKDEIEWINGYHQFIYKNLENSVKDKEWLKKVCDPL

SEQ ID NO: 10514 - protein, 223 aa, Oryza sativa
MDAGDAWGRSSSSSSSAAAAARRLQARYDLYMGFDDADAAGVEEVEARGGGEAYNCPFCGEDFDFVAFCCHVDDEHAVEAKSGVCPICATRVGVDLIGHLTMQHGIRKISSGSHSLLSLLRKDLRDGSLQSFLGGSSYVSNPPAAAPDPFLSSLICSLPVAEPSKDLHSDSSDNNFLLNKFPDDKTAERAEPSLSEKDQKERAQRSKFVRGLVLSTIFEDDNL

SEQ ID NO: 10515 - protein, 476 aa, Pseudomonas syringae pv. phaseolicola 1448A
MYPDVQLYIDGQWRASRDGRSIPVIDPATGQSLGSVAHAGITDLDEALAAAERGFATWRATSAYDRYKLMQKAANLIRERADNIARILTQEQGKPLAEARMETLSAADVIDWLAEEGRRSYGRIVPSRGVAIEQKVVKEPVGPVAAFTPWNFPINQVVRKLSSALAAGCSIIVKAPEETPASPAELIRAFADAGVPAGVIGLVYGDPAEISGYLIPHPVIRKVTFTGSTPVGKQLAALAGKHMKRATMELGGHAPALVFDDADIDLAARVLATAKFRNAGQVCVSPTRILVQRKVLDAFTERFVGLTREIKVGNGLEAGTTMGPVANERRIPALVDLIEDAVRGGATLSAGGKAVEGAGYFFEPTVLSGLTPQMRIMNEEPFGPVALLVPFDTVEEAIAESNRVPFGLASYAFTTSMKTAQALSTYIEAGMLSINHQGIGLPEVPFGGIKDSGYGSEGGTEAIEAYLNTKLVTQYN

SEQ ID NO: 10516 - protein, 924 aa, Campylobacter lari RM2100
MNRRDFIKNTAIASACGVAGLSVPSSVLANTENKWRWDKAVCRFCGTGCGILVARQDGKIVAVKGDPAAPVNRGLNCIKGYFNAKIMYGEDRLVTPLLRVNAKGEFDKNGKFQQVSWQRAFDEMEKHFKKAYKEKGVEGIGIFASGQYTIQEGYAAAKLVKAGFRSNNIDPNARHCMASAVVGFMQTFGVDEPSGCYDDIELTDTIITWGANMAEMHPILWSRVSDRKLSNLDKVKIVNLSTFSNRTSHIADTEIIFKPNTDLAIWNYIAREIVYNHPEAMDKEFVEKHCIFTTGYADIGYGMRNNPNHPKFKASEKDTVAKQNSIILDDEEAVSLAYLGVKAGDKFEMKHQSAPDAHWEISFEDFKKALEPYTLDYVAKVAKGNEDESIEEFKKKLQELANLYIEKNRKVVSFWTMGFNQHTRGSWVNEQAYMVHFLLGKQAKPGSGAFSLTGQPSACGTAREVGTFSHRLPADMVVANPKHREISEKIWKVPAKTINPKPGAPYLKIMRDLEDGNIKFAWVQVNNPWQNTANANHWIAAAREMDNFIVVSDCYPGISAKVADLILPSAMIYEKWGAYGNAERRTQHWKQQVLPVGEAMSDTWQILEFAKRFKLKEVWGETKVDDKLTLPSILEEAKAMGYNEDDTLYDVLFANKEAKSFKANDPIAKGFDNSDVNGDERKIIGSDGKEFDGYGFFVQKYLWEEYRKFGLGHGHDLADFDTYHKVRGLRWPVVNGKETQWRFNTKFDYYAKKAAPNSDFAFYGAFAKELPKGDLIAPQTQEKYSLKNKAKIFFRPFMKAPERPSEEYPFWLCTGRVLEHWHSGTMTMRVPELFRAVPEALCYMNEDDAKKMQIAQGDIVWVESRRGKVKARVDFRGRNKPSKGLVYVPWFDENVYINKVTLDATCPLSNQTDFKKCAVKITKA

SEQ ID NO: 10517 - protein, 320 aa, Lactobacillus acidophilus NCFM
MKRIGILTSGGDAPGMNAAIRAVTKTAIHHGLEVFGIRYGFAGLVAGDFIPLTTENVDHKISEGGTFLYSARFPEFAQEEVQQKGVEQLKKHGIDAVIVIGGDGSYHGALALTRHGVNSVGLPGTIDNDIPYTDYTIGFDSACRTAMDAIDKIRDTASSHHRVFVVNVMGRECGDIAMRVGVASGADAIVIPERPYDVKEIAETIKRGFADGKDHGIIVLAEGVMDAEEFKDELLKYGDFDARANVLAHMQRGGSPTVEDRVNATKMGNYAVNLLLDGKGGLAVGMENGKLNTHDILDLFDSKHQGDFSLLDVNEEMTKD

SEQ ID NO: 10518 - protein, 698 aa, Campylobacter lari RM2100
MVFPQSAVLEKAVDFCIQKHEGQFRKSGEPYAVHPILVASFVAFLSPVQSMIIAALLHDVLEDTNCNEEELSLNFGEEVTKLVQGLTKIVSIREDHLTRSNSNEKLAKSALTFRNMLLAGVEDVSVLVIKLCDRLHNMLTLNFLREDKQKRISEETLVVYAPIAHRLGISSIKNLLEDLSFKFLLPDEYAQIDNYINAKDQQIQLGFNEFISKIEMLFLENGFRQGSFVIHKRIKHNYSIYLKMQRKGVGLDEVLDLLGVRILVEKVYDCYLALGILHTHFNPLISRFKDYIALPKQNGYQTLHTTLFDAKNIIEAQIRTFDMHKTAEFGVAAHWKYKEGNITTPNLDWLADISMHGKEDGNAVQDCDAIELYEYAKDSLYIEDIAVYSPKGEIFTLPRGATALDFAYEVHTKVGLHAKTAFVNRVRVPLLTVLKNGDIVSIETSEEEFFRCSWIDSVKTGKARASIRDFCKQKKKELNNKIAINLLSTVFNKDSKLIEEWLEKENFNKKLRQIALDFNYFKDVIIALRKYMGQNQAAKFEQNEQKFESIVIGSNYKITTINFDYCCRPKRGDEIIAFRQSTGATIHHKLCEQAMKMIEDNKEMVFVFWNDSSIKSYKIIVSIENKKGSLADFLTTLAKMQINVLSINSADSEPVVANYFEVQVELPSNIDLENAKERLKSRYKILDFTSLNDAYNNH

SEQ ID NO: 10519 - protein, 368 aa, Oryza sativa (japonica cultivar-group)
LLQRECHVKKPLRVVPLFEKLADLEAAPAALARLFSVDWYRNRIDGKQEVMIGYSDSGKDAGRFSAAWELYKAQEELIKVAKQFGVKLTMFHGRGGTVGRGGGPTHLAILSQPPDTIHGSLRVTVQGEVIEQSFGEEHLCFRTLQRFTCATLEHGMHPPISPKPEWRALMDEMAAVATKEYRSIVFQEARFVEYFRLATPELEYGRMNIGSRPSKRKPSGGIESLRAIPWIFAWTQTRFHLPVWLGFGAAFKHVLQKDIRNLQILQEMYNEWPFFRVTIDLVEMVFAKGDPGIAALYDKLLVSEDLWPFGARLRANYEETKQLLLQVAGHKDLLEGDPYLRQRLRIRDSYITALNVCQACTAKAYQGP

SEQ ID NO: 10520 - protein, 363 aa, Magnaporthe grisea 70-15
MTSHPEWDQQTTGTEVVKAFADAIKGKNGMAAKNATNNPEVTCAAKRGIGSATALAVASQAPNHLILASRTASKLEEVIADINQKYPGVKAVPVRLDLGSIDSIRDAASKIESLLVGEEINVLINNAGVTDKTRAPITTPDGTRLDKQFFVNHIGTFLLTNLLTPLLQKAAAGSPSGATRVVNVSSHGHRISPIRFSDYALDKYGSDEAIPEAERTHPETPAFLLKGMDDEGFPGFVAYGQSKTANILHATELSRRLKKSGVVAFSIHPGFIETDLDRSLDKEFSDALKAMAANGFKTLDGGAATTLVAAFDPALGQVDVGVEVTGYLSDCQLSEQLVRDHAKDPAIARRLWEETERMLQISK

SEQ ID NO: 10521 - protein, 530 aa, Lactobacillus acidophilus NCFM
MEKIKRHKIGLFSAVMLALNSLIGSGWLFGSGSAAKIAGPAAIISWILGAVIIIAIALTYVELGSMFPESGGMSRYAQYSHGPLLGFIAAWANWISLVTLVPMEAVAAVQYMSSWPWSWANWTKQFIKNGDITFEGIGVVFIFMIIFTMINFWSVKIMTHFTNLISIFKILLPTLTIVVLICSGFHAQNFGSNIHEFMPYGTRSIFEATSVSGIIMSYDAFQTVINMGGELKNPRKNIVRGVLISMLITAAIYIMLQVTFIGAIEPSILAKVGWHGINFTSPFADIAIILGINWLVILLYLDAFVSPFGTGVAFVATASRALAAMTHTRHLPKWLGRLNQKYLIPRYAMVVDLILAAILVSLFRNWNLLATVITAATLIAYLTGPVTVMTLRKISPNIDRPFKPRYMPWLAPIAFVLTSLAIYWSMWPTTIQVILVIAVGLPVYIYYEIHYQHSNLKEQLKHCWWMIGYLIFISIMSYIGSTGFGGQDWIKYPFDFGIIIIASLVFYYWGIKTGMQRLDPYAEKIARNKK

SEQ ID NO: 10522 - protein, 265 aa, Oryza sativa (japonica cultivar-group)
ISPKPEWRALMDEMAAVATKEYRSIVFQEARFVEYFRLATPELEYGRMNIGSRPSKRKPSGGIESLRAIPWIFAWTQTRFHLPVWLGFGAAFKHVLQKDIRNLQILQEMYNEWPFFRVTIDLVEMVFAKGDPGIAALYDKLLVSEDLWPFGARLRANYEETKQLLLQVAGHKDLLEGDPYLRQRLRIRDSYITALNVCQACTAKAYQGPGFHVSPRAHLSKDIMDSGKPAAELVKLNTTSEYGPGLEDTLILTMKGIAAGMQNTG

SEQ ID NO: 10523 - protein, 558 aa, Rhodobacter sphaeroides
MPLGPWERVEAALTLLAIDPAGLKGLWLRARASALRDRITGALGALPLPVRRIHPTIGDDALFGGLDLAATLSAGTPVVQKGILDEPAVLVLAMAERTLPGLAARLGTALDAPRHCLIALDEGAERDELLPLGLVDRLALFLDLDGLPWGETREIALDPERLAAARARLAAVATPPEAAATLARVAAQLGIASLRAPTLALAAARAQAAWEGHAAVTDEDIRRAADLVFAHRAMPASEEAPPEPEPEPPEDQPDDSPPPPEQQQGEEMFPEEMLVEAVRAALPADLLEQLAAGRAARMARGATGTGSAKAGNRRGRPLPSRMGRLGTGARIDLVGTLRAAAPWQPLRRRQQKTDAVLLVRPSDIRIKRFRETSDRVLIFAVDASGSSAMARLSEAKGAVELLLGQAYARRDHVSLLAFRGRDAELILPPTRSLVQTKRRLAGLPGGGGTPLAHGLRLALAVGLQARARGMTPTVALLTDGRGNIALDGSANRAQAEEDALKLAASLRGSGLPAVVIDTANRPQPSLAALARALDAPYIALPRADAHKLSNVLGAAMGD

SEQ ID NO: 10524 - protein, 377 aa, Xylella fastidiosa Temecula1
MNSFAAVPVLIEEIRAGRMVVIVDDEDRENEGDLIMAAELVAPKDINFMVTHARGLVCLSLTRERCAQIGLSPMVQRNTTRFQTNFTVSIEAAEGLTTGISAYDRAHTIRTAVRPNAKPSDLHQPGHIFPLIAQPGGVLTRAGHTEAASDLPMLAGLEPAGVLVEIMNADGTMARRPQLEVFAQQHGLKIGSIADLIAYRLANEHTVERVDERVIETEYGSFLLVTYRDRIAHDLHFALVRGTLDASIPTLVRVQVENPLADMLHWRREDFGVAASDALRMIAAAERGVMVMLAAPRDSDVLLARLRSEPEVVSNVKDVGQWRRNGAGGQILADLGLAKLRVLGTPRRQIALAGFGLEVLEYVECRGGVPVPSQGVD

SEQ ID NO: 10525 - protein, 334 aa, Rhodobacter sphaeroides
MKKPFPFSAIVGQEQMKQAMVLTAIDPGIGGVLVFGARGTGKSTAVRALAALLPLIKAVEGCPVNSARPEDCPEWAHVSSTTMIERPTPVVDLPLGVTEDRVVGALDIQRALTRGEKAFEPGLLARANRGYLYIDEVNLLEDHIVDLLLDVAQSGENVVEREGLSIRHAARFVLVGSGNPEEGELRPQLLDRFGLSVEVRSPRDVETRVEVITRRDAYDADHDAFMEKWGAEDMQLRGRILGARAALPQLKTPNTVLHDCAALCIALGSDGLRGELTLLRAARAQAAFEGAEAVGRSHLRSVATMALSHRLRRDPLDEAGSVSRVERCVAEVLP

SEQ ID NO: 10526 - protein, 311 aa, Bacillus thuringiensis serovar konkukian str. 97-27
MKKKIGLLVMAYGTPYKEEDIERYYTHIRRGRKPSPEMLEDLTERYRAIGGISPLATITLEQAKKLEKRLNEVQDEVEYHMYLGLKHIEPFIEDAVKEMHNDGIQDAIALVLAPHYSTFSVKSYVGRAQEEAEKLGNLTIHGIDSWYKEPKFIQYWVDAVKGIYSGMSDAEREKAVLIVSAHSLPEKIIAMGDPYPDQLNETADYIARGAEVANYAVGWQSAGNTPDPWIGPDVQDLTRELNEKYGYTSFVYAPVGFVAEHLEVLYDNDFECKVVTDEIGAKYYRPEMPNASDAFIDCLTDVVVKKKESVM

SEQ ID NO: 10527 - protein, 315 aa, Wolbachia sp. group B
LCDKKIQLGINLTKGLGAGALPDVGKGAAEESIDEIMEHIKDSHMLFITAGMGGGTGTGAAPVIAKAAREARAVVKDKGAKEKKILTVGVVTKPFGFEGVRRMRIAELGLEELQKYVDTLIVIPNQNLFRIANEKTTFADAFQLADNVLHIGIRGVTDLMIMPGLINLDFADIETVMSEMGKAMIGTGEAEGEDRAISAAEAAISNPLLDNVSMKGAQGILINITGGGDMTLFEVDAAANRVREEVDENANIIFGATFDQAMEGRVRVSVLATGIDSCNNNSSVNQNKIPAEEKNFKWPYNQIPTLETKKYASTE

SEQ ID NO: 10528 - protein, 447 aa, Shigella flexneri 2a str. 301
MLNSILVILCLIAVSAFFSMSEISLAASRKIKLKLLADEGNINAQRVLNMQENPGMFFTVVQIGLNAVAILGGIVGDAAFSPAFHSLFSRYMSAELSEQLSFILSFSLVTGMFILFADLTPKRIGMIAPEAVALRIINPMRFCLYVCTPLVWFFNGLANMIFRIFKLPMVRKDDITSDDIYAVVEAGALAGVLRKQEHELIENVFELESRTVPSSMTPRENVIWFDLHEDEQSLKNKVAEHPHSKFLVCNEDIDHIIGYVDSKDLLNRVLANQSLALNSGVQIRNTLIVPDTLTLSEALESFKTAGEDFAVIMNEYALVVGIITLNDVMTTLMGDLVGQGLEEQIVARDENSWLIDGGTPIDDVMRVLDIDEFPQSGNYETIGGFMMFMLRKIPKRTDSVKFAGYKFEVVDIDNYRIDQLLVTRIDSKATALSPKLPDAKDKEESVA

SEQ ID NO: 10529 - protein, 900 aa, Rhodopirellula baltica SH 1
MDTVRRATNMVLNVDSEASLSLSQISGVEGGSFQDDWLILCAVIVLLMQAGFMCLESGLVREKNSINVAVKNLADLMISVASFWTIGFSVMFGATIFGLFGVGQLMPDFGVSDSLAAFFVFQAVFCGTATTIVSGAVAERMRFHGYLVSCVCVSALIYPVVGHWVWASGANGMSIGWLEGLGFRDFAGSTVVHSVGGWAALAGCIVLGPRLGRFRKDGRVRDIQPSNLTLAYLGAFILFFGWFGFNCGSTFKATGEIALIAINTLLGGCFGGLSSILVSSLRTGIPDPRSIANGLLGGLVGITASGSMIDPRAAALVGAIAGVVAVYSDEWLVRLRIDDAVGAISVHGFCGAWGTIAFALFIRTDELAPGMSRWEFLAVQVFGVVVTFGFVFGGVFVLLRGLGRFIQLRVDPETERLGLNVAEHNASSRLLDLAVSMDAAARMRKLEPSCKVRSEYGTAIGDLIDSYNQMIDHICEDQTALAEATKRAEALTAILDDSPNEIAIVHADTGQVLSLNRGARVNLQRDEDEFSELTFDCLFNTEFGELQKFRLSAFDDEAGFTQQLATAVRKDGTTYPASISVQHAEFLGYQVLVVLTVDMTSQVELKERLHAAEKMEAVGQLAAGIAHEINTPLQCMSGNVEFLQSVQQNLQDTLRLVAEGVSDEQALHEITEKLSSDRWSRLLGESDAAIEDTQKSIGRVVQIIGAMRVLSHPGPAGKTNTSINGILRDSAAISRGRWKYAAQMDFDLCDSEPTVACRANELSQVFCNLFVNAADSIEEKNEKVPEAGLGNIFVSSSIEQDGVLIKVRDSGVGMSESVRRRCFEQFYTTKPVGKGTGQGLSIAYQIIVGRHGGNIEITSEEGVGTEFQIWIPMHASDDACDGATKTNAGQTNDATSLAAV

SEQ ID NO: 10530 - protein, 315 aa, Wolbachia sp. group B
LCDKKIQLGINLTKGLGAGALPDVGKGAAEESIDEIMEHIKDSHMLFITAGMGGGTGTGAAPVIAKAAREARAVVKDKGAKEKKILTVGVVTKPFGFEGVRRMRIAELGLEELQKYVDTLIVIPNQNLFRIANEKTTFADAFQLADNVLHIGIRGVTDLMIMPGLINLDFADIETVMSEMGKAMIGTGEAEGEDRAISAAEAAISNPLLDNVSMKGAQGILINITGGGDMTLFEVDAAANRVREEVDENANIIFGATFDQAMEGRVRVSVLATGIDSCNNNSSVNQNKIPAEEKNFKWPYNQIPILETKEYASTE

SEQ ID NO: 10531 - protein, 474 aa, Aspergillus nidulans FGSC A4
MWSPFLEVAKALREGHVVEFITQKYNEYGWTFEQNVLGRSGISTIEPENLKALLATQFNDFCLGTREREFGPLLGQGIFTLDGAGWSHSRALLRPQFTRDQVADLDLMESHISRLIELVPKDGSAFDIQRLFFLMTLDSSTHFLFGESVHCMDEGNVLARSTVNNAQGFANAFNTALDYLNWRSVAGNFYWMITSKEFRDANKRVHEVVDYYVHQAIEAKRHPEKKEPGRYIFAEALAADNDNPKVLRDNMLNILLAGRDTTASLLSSAFFYLSRHPAVWEKLRRVIIEEFGDVQNPKGEITHAKLKDLPYLRYVLNEVLRLQPPVPLNLRVAVKDTSLPVGGGPDGKSPVFVEKDQPVLYSVYAMHRRKDLWGPDADSFRPERWEENAKHGWEYLPFNGGPRICLGQQYALTEASYTMVRLMQRFSKVENGEPGLDEPLIRATLTMSHENGVKVRFKLQHVRRKPSPLQTCTR

SEQ ID NO: 10532 - protein, 277 aa, Arabidopsis thaliana
MKGTLRYLAGIAGPNGFGSRSTAEQVTQHSFFPCSHLTAIITGGTSGIGAETARVLAKRGVRVVMAVRDMKKAEMVKERIIRENPEADIILFEIDLSSLSSVARFCSQFLSQDLPLNILINNAGVFSPNLEFSEEKIELTFATNFLGHYLLTEMLIEKMIDTAEKSGIEGRIINLSSVIHNWVKPDCFSFPKLLHPISRYNGTRAYAQSKLATILHAKALSKQLKDRNANVTINAVHPGIVKTGIIRAHKGLFTDSLFLIASKLLKSISQLQHVMWH

SEQ ID NO: 10533 - protein, 797 aa, Arabidopsis thaliana
MASFIDLFAGDITTQLLKLLALVANTVYSCKGIAERLITMIRDVQPTIREIQYSGAELSNHHQTQLGVFYEILEKARKLCEKVLRCNRWNLKHVYHANKMKDLEKKISRFLNSQILLFVLAEVCHLRVNGDRIERNMDRLLTERNDSLSFPETMMEIETVSDPEIQTVLELGKKKVKEMMFKFTDTHLFGISGMSGSGKTTLAIELSKDDDVRGLFKNKVLFLTVSRSPNFENLESCIREFLYDGVHQRKLVILDDVWTRESLDRLMSKIRGSTTLVVSRSKLADPRTTYNVELLKKDEAMSLLCLCAFEQKSPPSPFNKYLVKQVVDECKGLPLSLKVLGASLKNKPERYWEGVVKRLLRGEAADETHESRVFAHMEESLENLDPKIRDCFLDMGAFPEDKKIPLDLLTSVWVERHDVDEETAFSFVLRLADKNLLTIVNNPRFGDVHIGYYDVFVTQHDVLRDLALHMSNRVDVNRRERLLMPKTEPMLPREWEKNKDEPFDAKIVSLHTGKTSLTLNEFGEMDEMNWFDMDLPKAEVLILNFSSDNYVLPPFIGKMSRLRVLVIINNGMSPARLHGFSIFANLAKLRSLWLKRVHVPELTSCTIPLKNLHKMHLIFCKVKNSFVQTSFDISKIFPSLSDLTIDHCDDLLELKSIFGITSLNSLSITNCPRILELPKNLSNVQSLERLRLYACPELISLPVEVCELPCLKYVDISQCVSLVSLPEKFGKLGSLEKIDMRECSLLGLPSSVAALVSLRHVICDEETSSMWEMVKKVVPELCIEVAKKCFTVDWLDD

SEQ ID NO: 10534 - protein, 831 aa, Ralstonia eutropha JMP134
MKVSRRDFIKQTAIAATASVAGIPLGTEAANFVTDSEVTKLKWSKAPCRFCGTGCGVTVAVRDNKVVATQGDPQCEVNKGLNCVKGYFLSKIMYGQDRLTKPLLRMKNGKYDKNGEFAPVTWDQAFDEMERQFKRVLKEKGPTAVGMFGSGQWTVWEGYAASKLYKAGFRSNNIDPNARHCMASAVQGFMRTFGMDEPMGCYDDFEAADAFVLWGSNMAEMHPILWTRITDRRLSHPKTRVAVLSTFTHRSFDLADIPIIFTPQTDLAMLNYIANYIIQNNKVNKDFVNKHTVFKEGVTEIGYGLRPDHPLQKAAKNAANPGDSKPITFDDFAKFVSKYDADYVSKLSGVPKDKLRQLAELYADPNVKVMSLWTMGFNQHTRGSWVNNMVYNVHLLTGKIATPGNSPFSLTGQPSACGTAREVGTFSHRLPADMVVTNPKHREEAERIWKLPPGTIVEKPGYHAVLQNRMLRDGKLNAYWVQVNNNMQAAANIMEEALPGYRNPANFIVVSDAYPTVTALSADLILPSAMWVEKEGAYGNAERRTQFWHQLVDAPGDARSDLWQLMEFSKRFKVEEVWPAELVAKKPEYKGKTLFDVLYRNGQVDKFPIKEVSTEYHNAEAQAFGFYVQKGLFEEYASFGRGHGHDLAPFDRYHEERGLRWPVVNGKETRWRYREGSDPYVKAGTGFQFYGNPDGKAVIFALPYEPPPESPDKEYPFWLATGRVLEHWHSGSMTRRVPELYRAFPNAVVFMHPEDAKAMGLRRGVEVEVVSRRGRMRSRVETRGRDAPPRGLVFVPWFDASQLINKVTLDATCPISLQTDYKKCAVKIVKV

SEQ ID NO: 10535 - protein, 501 aa, Leptospira interrogans
MDLKDYVRIFDTTLRDGEQCPGAAMTENEKLEIASQLATMKVDIIEAGFPVSSPVQFQAVERIARETEGPMIAALARAMKADIEAASKALQPAKKRRIHTFIASSPIHMKYKLGKEPKEVLKMAVEAVTLCRQFVDDVEFSPEDATRSEPEFLRELCEAVIAAGATTINIPDTVGYTTPAEYGGLFKFLLSNVRGAEKIIFSAHCHNDLGLATANSLAAVQNGARQIECTINGIGERAGNTAMEEVVMAMRTRKDTFGIQTQIKTEEIARASYLVKTITGMLVQPNKAIVGANAFAHESGIHQDGVIKHRETYEIMKPETVGLSSNRMVLGRHSGRAGFKDRIVKLGFSPQVEELEAAYQRFLEIADRKKEIYDEDIRALFSEEARKSTGDRFQLEGFTVSTGTKSTPTAGVRILIDGHVREESATGDGPVDAIYKAIQKTTGMDPEVSRLVISPVTEGQDAMAEASVTLEYKGDRVVGKGSSTDIIEACSRAYISALNRL

SEQ ID NO: 10536 - protein, 157 aa, Triticum aestivum
  misc_feature (40)..(40): Xaa can be any naturally occurring amino acid
  misc_feature (123)..(123): Xaa can be any naturally occurring amino acid
  misc_feature (130)..(130): Xaa can be any naturally occurring amino acid
  misc_feature (135)..(135): Xaa can be any naturally occurring amino acid
  misc_feature (139)..(139): Xaa can be any naturally occurring amino acid
  misc_feature (142)..(142): Xaa can be any naturally occurring amino acid
  misc_feature (144)..(144): Xaa can be any naturally occurring amino acid
  misc_feature (151)..(151): Xaa can be any naturally occurring amino acid
MAPTVMASSATSVAPFQGLKSTAGLPVSRRSNGASSAASXNGGRIRCMQVWPIEGIKKFETLSYLPPLSTEALLKQVDYLIRSKWVPCLEFSKVGFIFREHNASPGYYDGRYLTMWKLPMFRXTDAKKVXNEVEXVKKXYPXAXVRIIRFXKWARMR

SEQ ID NO: 10537 - protein, 287 aa, Bacillus thuringiensis serovar konkukian str. 97-27
MKKAMLALAATSVIALSACGTSSSDKIVTSKAGDITKDEFYEQMKTQAGKQVLNNMVMEKVLIKNYKVEDKEVDKKYDEMKKQYGDQFDTLLKQQGIKEETLKTGVRAQLAQEKAIEKTITDKELKDNYKPEIKASHILVKDEATAKKVKEELGQGKSFEELAKQYSEDTGSKEKGGDLGFFGAGKMVKEFEDAAYKLKKDEVSEPVKSQFGYHIIKVTDIKEPEKSFEQSKADIKKELVAKKAQDGEFMNDLMMKEIKKADVKVDDKDLKDLFEEKKTDAKKEEKK

SEQ ID NO: 10538 - protein, 615 aa, Botryotinia fuckeliana
MSDFPTKEVVNHEDVSSSHYDTQAKMSEEDVSDVGNEKGAAQARPSHIGRKVSEWEALQIAAAGDMETIDNEVQDLEAEVTSRGKSRSDIFQLSFKDPRHYTWLLVAFASMGGLLSGIDQSLISGANLYMPSSLGLNTKQVSLVSSGVPLGAVGGALMLGPLNEAVGRKQAIVWSLFLYTVGAALEAGAVNFGMMMAGRVILGLGVGLEGGTVPVYVAESVAPKYRGNLVSLYQFMIALGEVLGYVVAAIFVGVKSGGWRYMLGSSLVFSTIMLVGILFMPESPRFLMHKGRTADAWGVWKRIRGTDEAARKEFFVMKHSVDSEREMEGARKRFAWLDFITVPRARRAIVYANVMIFLGQFTGINAIQYYMATLMQQVGFNDKEAVFMSLVGGGALLIGTIPAILYMEKFGRRFWAIAMLPGFFIGLVIIGCSYLIPLTNKAGSQGTYITGLILYEGFFGSYACLTWVIPSEVYPTYLRSYGMETSDTMLFLCSFLVTYFFAEMQKAMSNIGLTLGFYGGIAVVGWFYQVLFMPETKNKTLEEIDVIFSQPTGQLVKENLRSSMVTASDFIHGRWGKVFSPVSESDIFRKENGHKSDEGGMGDAKHEELMQPESM

SEQ ID NO: 10539 - protein, 642 aa, Streptomyces coelicolor A3(2)
MRKRDRTPKTYTRLTHPLVRDSREAPLRRATWEEALDRTARGLTAARGAFGMFSCARATNEMNYVAQKFARVVMGTHNVDSCNRTCHAPSVAGLSAAFGSGGGTSSYEEIEHTDVIVMWGSNARFAHPIFFQHVLKGIRGGARMYVVDPRRTSTAEWAESWLGPNVGTDIPLAHAVGREIIHAGLANEAFIERATTGYDDYKALVEPWTLSLAEKVTGVPAAAIRELAHAYARAERAQLCWTLGITEHHNGTDNVRALINLSLLTGHVGRYGSGLQPLRGQNNVQGGGDMGAIPNRLPGFQDVLDPEVRRKFETAWDTVVEPHHGLTLTEMFEAMDEGTLRAVYCIGENPAQSEADAEQAVRRLRALDFLVVQDIFLTKTAELADVVLPATAGWAETEGTTTNSERRVQRVRRAVSPPGEAREDIDILCDLAARLGHDWKYADAEAVWNELRSLSPDHHGMTYARLEEHQGIQWPCPSTQELEPTYLHGRLWAQDPASRGRLAPFGIVRHDPPVDLTDEQYPIRLTTGRRLDSYNTGVQSGGYASPLRRGESVELCPEDAERYGVVVGEEVRVTSRRGSLLAPVWVDTALRPGLAFMSFHFPDEVDTNQLTIEANCPIAGTAEFKASAIRIEKVSASGPALR

SEQ ID NO: 10540 - protein, 183 aa, Oryza sativa (indica cultivar-group)
MVMMSKRSTRRDLKFSGGLIESKQNEPPHTNGHTLIFSPNPKKKRKSEKEEEEETFPGIRARRIGLAAIHVGVLVEFQLQMKFVPRFQDCWRPQSNASPPMGNGPGLRPAEQGVEEEAGRPLPKFGEWDVNDPASADGFTVIFNKARDEKKGGNGQDTDSPCKETRTERVESYAPKTNSPSVL

SEQ ID NO: 10541 - protein, 251 aa, Zea mays
MKFNIANPTTGCQKKLEIDDDQKLRVFFDKRISQEVSGDALGEEFKGYVFKIMGGCDKQGFPMKQGVLTPGRVRLLLHRGTPCFRGYGRRNGERRRKSVRGCIVSQDLSVINLVIVKKGENDLPGLTDTEKPRMRGPKRASKIRKLFNLSKDDDVRKYVNTYRRTFTTKSGKKVSKAPKIQRLVTPQVLQRKRARIAEKKKRIAKKQAEAAEYQKLLAQRLKEQRERRSESLAKRRSKLSAAAKASAATSA

SEQ ID NO: 10542 - protein, 479 aa, Bacillus cereus ATCC 10987
MTTSNTYKFYLNGEWRESSSGETIEIPSPYLHEVIGQVQAITRGEVDEAIASAKEAQKSWAEASLQDRAKYLYKWADELVNMQDEIADIIMKEVGKGYKDAKKEVVRTADFIRYTIEEALHMHGESMMGDSFPGGTKSKLAIIQRAPLGVVLAIAPFNYPVNLSAAKLAPALIMGNAVIFKPATQGAISGIKMVEALHKAGLPKGLVNVATGRGSVIGDYLVEHEGINMVSFTGGTNTGKHLAKKAAMIPLVLELGGKDPGIVREDADLQDAANHIVSGAFSYSGQRCTAIKRVLVHENVADELVGLLQEQVAKLSVGSPEQDSTIVPLIDDKSADFVQGLVDDAVEKGATIVIGNKRERNLIYPTLIDHVTEDMKVAWEEPFGPILPIIRVSSDEQAIEIANKSEFGLQASVFTKDINKAFAIANKIETGSVQINGRTERGPDHFPFIGVKGSGMGAQGIRKSLESMTREKVTVLNLV

SEQ ID NO: 10543 - protein, 494 aa, Candidatus Kuenenia stuttgartiensis
MKGKNYINGAFVDSASSEVFESRNPAYCDEVLGTFPLSSADDVNNAVLAAKTAYDTWRKISRIRRGEYLDELAQLLKKDREAISQLVSKECGKGIAEGRADVTEGIHMVQYIFGTTRMPHGDIIDSEIVEKDSFMRRRPKGVVAAITPWNFPFAIPLWLICPSVVEGNTVVLKPSRETPCVANKIAEYVHAAGFPPGVINVIHGGCGDALVRHSDTQVILFTGSCEVGEGIKKIAAESYNKMCACEMGGKNAIIVLDGANMEIAVNASILSAFKTSGQRCTSAGRLILHVNMLEEFEKRFVELAKRIKIGNPLDEEVFMGPVINQAATEKILRYNDFAKNEGAEVLLDGSRLTGGGYDKGYFMSPFVYRMKNNPKSRVLHEEVFGPHVAIIPVESIDEAINVYNDTEYGLSCAVITEDFRKARRIRDDCEYGLGYVNLPTIGAEVHLPFGGLKKSGTGLPSASTLIDAVTHRTAWTVNHDLEIKMAQGLSAKLS

SEQ ID NO: 10544 - protein, 217 aa, Plantago major
SEAYVMGGADEHENWHIYSAHVKPTDNLGNVYTLEMCMTNLDQRKASVFFKTHSSSAAVMTAASGITKILPESEICDFDFDPCGYSMNALEGGAVSTIHVTPEDGFSYASFEAVGYDFNKVVDLGYLVERVLACFGPAKFSVALHSSVAGKELGSVFNVGVKGYSCGELCRESFGDGSSVIYSSFIRTCGCGSPTSILHSWSGSESEDEEVCKKFSL

SEQ ID NO: 10545 - protein, 159 aa, Pseudoalteromonas tunicata D2
MASIFDFTAPLTNGEHCDLAQFKGKPLLIVNTASKCELTPQYFALEQLYQKYKDQGFTVLAFPCNQFENKEPAENDEIKHFCELQFGVSFPIFAKVAVNGPDALPLFNFLKTNSRGLMQARAIKWNFTKFLINRTGQVVARYAPRTKPDAISSVIESIL

SEQ ID NO: 10546 - protein, 396 aa, Nitrosomonas europaea ATCC 19718
MAKSKFERVKPHVNVGTIGHVDHGKTTLTAAITTILTKKFGGEAKSYDQIDSAPEERARGITINTSHVEYETDKRHYAHVDCPGHADYVKNMITGAAQMDGAILVVSAADGPMPQTREHILLARQVGVPYIIVFMNKADMVDDAELLELVEMEIRELLSNYDFPGDDTPIIIGSALKALEGDKSDIGEAAILKLAEALDSYIPEPERAIDGAFIMPVEDVFSISGRGTVVTGRVERGIVKVGDEIEIVGLKPTIKTVCTGVEMFRKLLDQGQAGDNVGILLRGTKREEVERGQVLAKPGSILPHTKFTAEIYVLSKEEGGRHTPFFAGYRPQFYFRTTDVTGSIELPAGVEMVMPGDNISVTVNLIAPIAMDEGLRFAIREGGRTVGAGVVAKVIE

SEQ ID NO: 10547 - protein, 145 aa, Erythrobacter sp. NAP1
MVKYLHSMIRVTDPQATVDFFKLIGLEEVRRFDVEAGRFTLIFLAAPGQEGVAEVELTYNWPPEDGSEPEDYDGGRNFGHLAYRVENIYDTCQRLADAGHTIHRPPRDGHMAFVKSPDGISVELLQEGNLEPQEPWASMENTGSW

SEQ ID NO: 10548 - protein, 489 aa, Bacillus cereus G9241
MPQDRKEEVQNDTYEEKEIMPDNPQYLPRRVQMELPPEFSINPLFARKGESVVPRFNMPDEGMLPETAYQIVHDEITLDGNARLNLAMFVSTWMEPTAERLYAKSFDKNMIDKDEYPQTAEIEERCVRILANLWHSPSPLTTMGVSTTGSSEACMLGGLALKRRWQNARKREGKSVDRPNIVFSSAVQVVWEKFANYWEVEPRYVKVSPEHSLLDPQGVIAAVDENTIGVVPILGETYTGRYEPVAAIAKALDDLQERTGLDIPMHVDAASGGFIAPFLQPDLVWDFQLPRVKSINVSGHKYGLVYPGLGWIIWREADDLPEDLIFRVSYLGGNMPTFALNFSRPGAQVLLQYYNYLRLGKRGYYDVQRASQKVALFLSKAIQKMEPFELLSNGSDIPVFAWRLKNGHTSNWNLYDLSRQLRVFGWQVPAYPLPPDLEAVTIMRVVVRNGFSVDLAHLFLRNLKQAVAFLDSLDGPMPHDTKCDNGFHH

SEQ ID NO: 10549 - protein, 423 aa, Brucella suis 1330
MARIVMKFGGTSVADLERIYNVARHVKREVEAGNQVAVVVSAMSGKTNELVDWVQNMPKVCGASSPFYDAREYDTIVASGEQVTSGLLAIALQSIGVDARSWQGWQIPIQTDNAHGAARIQEIDGSQIIRRMEMGQVAVVAGFQGIGPDNRVATLGRGGSDTSAVAVAAAVKADRCDIYTDVDGVYTTDPRIEPKARRLPKISFEEMLEMASLGAKVFQVRSVELAMVHKVRTFVRSSFTDPDAPGMGDPINPPGTLICDEEEIVEQQVVTGIAFAKDEAQISLRRVADRPGVSAAIFGPLAEEHINVDMIVQNVSEDGSKTDMTFTIPTGDIDKALKVLDKAKSEISFDNIQSETGLAKISVIGIGMRSHAGVAATAFKALAEKGINIRAITTSEIKISILIDGPYAELAVRTLHAVYGLDK

SEQ ID NO: 10550 - protein, 569 aa, Sinorhizobium meliloti
MILKSHSIKTGMPEAAVKYQPYPQIVLPDRTWPSKAITEAPIWCSVDLRDGNQALVDPMGHDRKARMFHLLLDMGFKEIEIGFPSASQTDYDFARWCVEEGNVSEDVSLQVLVQCRPELIARTFEALEGAHRPIVHFYNSTSELQRRVVFGKDVAGIKQIATDAAKMITDMAAKAGGGYRFEYSPESFTGTELEVALEICNAVIEIVRPTADNKLIINLPSTVEMATPNIYADQIEWMCRNLDNRENLIVSLHPHNDRGTGIAATELGLMAGADRVEGTLFGNGERTGNVDVVTLALNMFTQGVDPKLDCSDIERIKEVYEYSNQMVIPERHPYVGELVYTAFSGSHQDAINKGMKAIKQANKPTWEVPYLPIDPRDVGRSYEAIIRINSQSGKGGIAYILQEDYGINLPRNLQIEFREEVQRITDEEGKELPSKRIHQRFIESYVEQPGARIKFVDHHTYPAGEHKGLRVVAAEITDGGETRQIEGKGTGPIDGFINALSIYLGIELSVADYSEHSLQHGSNAAAIAYVEVEYPGGKLFGVGINTNIVAASLEAIVSAANRVLDVVGK

SEQ ID NO: 10551 - protein, 475 aa, Oryza sativa
  misc_feature (166)..(166): Xaa can be any naturally occurring amino acid
LRLLSLQDPPDWHEILAYFHGSELQNYFKRMVEDNLKPIMKPQVEIMHKNRNSFQVSVGQLLDRKDERGMKDQLCNGLQLNEVIDRKVAKLSGGELQRVGIAAAALQSADVYMFDEPSSYLDVKQRLNAARVIKSLLRTNSYVIVVEHDLSVLDYMSDYICCLYGXPGAYGVVTLPFSVREGINIFLAGFIPTENLRFRDESLTFNIADAQEDAEIKTYQRYKYPTMSKTIGNFKLTVMEGEFTDSQIFVMLGENGTGKTTFIKMLAGVEKPDTVDGIDIEVPEFCVSYKPQKLASTYQGTVRQFLHEKIRDSYTHPQFVSDVMKPLKMQQLMDQEVQHLSCGQLQRVALCICLGKPADIYLIDEPSASLDSEQRLVASKVIKRFIMHAKKTAFIVEHDFIMATYLADRVIVYEGQPAVDCTANAPQSLLSGMNKFLSHLEITFRRDPTNFRPRINKLDSAKDREQKSAGSYYYL

SEQ ID NO: 10552 - protein, 198 aa, Cucumis sativus
AIPWIFAWTQTRFHLPVWLGFGAAFKYAIEKDVKNLHMLQEMYSQWPFFRVTIDLVEMVFAKGDPGIAALYDKLLVSEDLWSFGEQLRANYEETKNLLLQVAKHKDLLEGDPYLRQRLRLRDSYITTLNVCQAYTLKRIRDPNYNVKVRPHLSKEYLESSKSAAELVKLNPQSEYAPGLEDTLILTMKGIAAGMQNTG

SEQ ID NO: 10553 - protein, 215 aa, Campylobacter lari RM2100
MYVAPSLLSANFLNLENEIKDVCEAGADLLHIDVMDGHFVPNLTFGPCVIENISKITSVPLDVHLMVHNVSSFVDLFIPIKPKFISFHIEAENHPIRVCEYIRKNGIHPAIVLNPHTPVSSIEHILEFVDMVLLMSVNPGFGGQNFLPLVYDKIRQLREMIDRKNLKVFIEVDGGVNGLNAPDLDEAGADILVAGSYIFSSQDKKTAINSLKLEF

SEQ ID NO: 10554 - protein, 495 aa, Lactobacillus acidophilus NCFM
MKFSELGLNEALLKAIKRSGFEEATPIQEQTIPLALEGKDVIGQAQTGTGKTAAFGLPILQIIDKKEKAIQAIIIEPTRELAIQTQEELFRLGRDERAHVQVVYGGADIGRQIRSLKHHVPSILVGTPGRLLDHLKRGTIDLDKVKTVVLDEADEMLDMGFIQDIESILKYAKNRNQTLLFSATMPKPILRIGEKFMNNPEIVQIKAKELTADLIDQYFVRAKESEKFDIMCRLIDVQGPDLAVVFGRTKRRVDELTRGLQARGYNAAGIHGDLSQARRMAVLKRFREGKLDILVATDVAARGLDISGVTHVYNYDIPQDPDSYVHRIGRTGRAGQNGISVTFVTPNEIGYMRTIEQLTKKKMSPLRPPTDDQALRGQLKQAKAQIEDLINSDLGKYTQDASELLDNYSAVDLVAAFLKNLSKDSTDIKVKITPEKPLPYKGDGRRNRRGHGRGRNNNRNHGNYRRRNNNYRHNGNRGKRGRGNGHEFVIKSKEK

SEQ ID NO: 10555 - protein, 417 aa, Campylobacter lari RM2100
MINYKKITLENKLEIYTLPVNKKSGVISVDIFYKVGSRNEKMGKSGIAHMLEHLNFKSTKNLKAGEFDEIVKGFGGVDNASTGFDYTHYFIKCSSENLDKSLWLFAELMCNLNLKDDEFQPERNVVLEERRWRTDNNPLGYLYFRLYNHAFLHHPYHWTPIGFFKDIQNWKIEDIQDFHQTFYQPKNAILLVSGDINEDEVFALAKKHFQDIKNTKEIPIVHEKEPEQDGAKRVILHKESDTQLLALAYKIPAFNHEDMPKLCALSELLGNGKSSLISEILIDKLELINEFYAYASENIDENLFIFICVCNEGIKAEDVEKELLKILEDVKNAKFDDTIMEKIKNTVKSDFIFSLSNASSVANIYGSYLAKGDLKPLLDYEKNIENLSKDDLIHCARKYFNENKSTTIILKRGENGQ

SEQ ID NO: 10556 - protein, 320 aa, Staphylococcus aureus subsp. aureus MSSA476
MKMINKLIVPVTASALLLGACGASATDSKENTLISSKAGDVTVADTMKKIGKDQIANASFTEMLNKILADKYKNKVNDKKIDEQIEKMQKQYGGKDKFEKALQQQGLTADKYKENLRTAAYHKELLSDKIKISDSEIKEDSKKASHILIKVKSKKSDKEGLDDKEAKQKAEEIQKEVSKDPSKFGEIAKKESMDTGSAKKDGELGYVLKGQTDKDFEKALFKLKDGEVSEVVKSSFGYHIIKADKPTDFNSEKQSLKEKLVDQKVQKNPKLLTDAYKDLLKEYDVDFKDRDIKSVVEDKILNPEKLKQGGAQGGQSGMSQ

SEQ ID NO: 10557 - protein, 360 aa, Glycine max
MLGVIRHKSIRHAFSAIRHLSSAAKEITVREALNSALDEEMSADPKVFLMGEEVGEYQGAYKISKGLLEKFGPERVLDTPITEAGFAGIGVGAAYYGLRPVVEFMTFNFSMQAIDHIINSAAKSNYMSAGQISVPIVFRGPNGAAAGVGAQHSQCYASWYGSCPGLKVLSPYSSEDARGLLKAAIRDPDPVVFLENELLYGESFPVSAEVLDSSFCLPIGKAKIEREGKDVTITAYSKMVGYALKAAETLAKEGISAEVINLRSIRPLDRSTINTSVRKTNRLVTVEEGFPQHGVGAEICTSVIEESFGYLDAPVERIAGADVPMPYAANLERMAVPQVEDIVRAAKRTCYRSVPLAASA

SEQ ID NO: 10558 - protein, 475 aa, Mesorhizobium sp. BNC1
MFKNYIAGEWVEAEGTENINPSDTSDVVGVYSRATRENVLDAISAAKAAFASWSRSGPLQRHSVLRKAADEIMARKDELGSLLAREEGKTLPEAIGEVVRASQIFDFFAGESLRLSGEIIPSVRPGIGVEITREPVGVIGIITPWNFPIAIPAWKIAPAICYGNAIVFKPADLVPASSWAIVDILQRAGLPAGVLNLVMGKGSVVGQAILESPDVAAVTFTGSTQTGKHVAAASIEHNRRFQLEMGGKNPMVVLDDADLSIAVEAATNSAFFSTGQRCTASSRLIVTEGIHDRFVEAMTQRLSSLVVDNALKPGTHIGPVVDESQLQQDLDYIEVGQKEGARLHFGGRRLERETNGFYLEPALFTEASNDMRIAREEIFGPVAAVIRVKDYEEALAVSNDTPYGLSAGIATQSLKFATHFKQNAEAGMVMVNLPTAGVDFHVPFGGRKRSSYGPREQGRYAAEFFTTVKTSYSLA

SEQ ID NO: 10559 - protein, 377 aa, Kluyveromyces lactis NRRL Y-1140
MVVLEEEMSIYFQNGLRKIAPYYNARSSFVKGRWFGKSLTQIFIDEFAHTHEEAQLKITEGFIKLLREGKQLEGDPIIKNKDILLTYQHNHEPPVKNWGEPICDEKHIMGIPIVHQDEQLLVINKPNGIPVHPTAYFYKNTLTELLKDSLGYPVHPCYRLDKITSGLLILAKNPIDANRVQSKIRDRDMKKYYLARVKGKFPETAVDKSPIYTCDLKIKSEPLSPLKDAHTEFELMEYDAVTDQSIVLCKPFTGRTHQIRIHLARQGHPITNDPFYNLDNSTYPLRSRFIIETPDWTQLTNERIEKLRKRFEVELDDVWDQLNENQERCPECDEEMPKDPTPESLELYLHAWRYKGLDLEFETDYPYWAKFENEKQA

SEQ ID NO: 10560 - protein, 388 aa, Aspergillus nidulans FGSC A4
MVQFAFVSLWCLLLSYLSTKLPWLKTSIPALKNNIRPPSRDVIMTALPLAIFQLAGHILSSMATSQIPVSLVHTIKGLSPLFTVLAYRFLFRIRYAKATYLSLVPLTLGVMLACSTGFSTNFFGILCALVAALVFVSQNIFSKKLFNEAERAESDIQSAGRRKLDKLNLLYYCSGLAFILTLPIWLVTEGYPLFSDLMQDGAISLTNKAGSLDHGALFLEFVFNGVSHFAQNILAFVLLSMVSPVSYSVASLIKRVFVIVVAIVWFGNSTTPVQGFGIALTFLGLYLYDRNSHDDVADQKANADHFHFKNPILPLNTRGASKLRGSNGYAIPQGRPVDQHVLDRSFPISSNSKKDDGVGHARPRASSNTKAWLPPGTKQETTWQSSDS

SEQ ID NO: 10561 - protein, 370 aa, Scherffelia dubia
MFGKAVTARPACAPCAPAPSPCAPGKFDEELIKTAKHIASPGKGILAMDESNATCGKRLDSIGVGNTEENRRTYRELLLTAPGLGNYISGAILFEETLYQKASNGKSFVDVMRSTGIAPGIKVDKGLVPCGTATTSWCTGLDGLAGAAEYYKQGARFAKWRSTVAVGAGPSIIHARHAYGLARYAAICQDNGLVPIVKPEILLDGDHTIDETLDVAKATWAETFKYMADNKVMFEGILLKPSMVTPGAECKVRADPQTVASYTLGLSQPRAPPVPGIMFLSGGQSELEASLNLNAMNQSPNPWHVSFSYARALQNTVLKTWKGEPGNVKAAQEALIVRAAANSAAQMGKYDPAKEAESAKAGMFEKGYVY

SEQ ID NO: 10562 - protein, 390 aa, Chlamydomonas reinhardtii
MTVNENGVLHMPIFEGSEKRIEVDFRLGPNVPANGLRSIPRETLDELMTLARCCIVSSRSNDKLDAYVLSESSLFVYPTKWILKTCGTTRLLNSVPRLLEVARSIGLEPRRCKYTRASFLFPENQPFPYTAFEHEVGFLDEHFGAMCANGGTAFMLGEPYQGLQWHVYLADDMLPLGPEFKPTYNFEVTMTDLGTEAAAQFFRDNNPKFVSAERTTKDTGIAELKPKAIIDDYVFEPCGYSMNGIDNTGLITIHVTPEAHQSYASVEFSGFGEDLMAPVQELLNKVVKIFAPGKVSVTMSVDKVDMDATGCWGNLTMCPAGFGLQGASSQVSPCGGKVAYYTLIEKLAAPGSPITPLHHAASFLSIVTSSDSEADNGSEPEREIVTTATA

SEQ ID NO: 10563 - protein, 181 aa, Zea mays
MASSMLSSAAVVTSPAQATMVAPFTGLKSSASFPVTRKANNDITSITSNGGRVSCMKVWPPIGKKKFETLSYLPDLTDVELAKEVDYLLRNKWIPCVEFELEHGFVYREHGNTPGYYDGRYWTMWKLPLFGCTDSAQVLKEVEECKKEYPGAFIRIIGFDNTRQVQCISFIAYKPPSFTDA

SEQ ID NO: 10564 - protein, 274 aa, Glycine max
TREYQVLEELGRGRFGTVFRCFHRTSNKFYAAKLIEKRRLLNEDRRCIEMEAKAMSFLSPHPNILQIMDAFEDADSCSIVLELCQPHTLLDRIAAQGPLTEPHAASLLKQLLEAVAHCHAQGLAHRDIKPENILFDEGNKLKLSDFGSAEWLGEGSSMSGVVGTPYYVAPEVIMGREYDEKVDVWSSGVILYAMLAGFPPFYGESAPEIFESVLRANLRFPSLIFSSVSAPAKDLLRKMISRDPSNRISAHQALRHPWILTGALTTATISNFLT

SEQ ID NO: 10565 - protein, 1625 aa, Aspergillus nidulans FGSC A4
MAASLCLRGSRQLALRSQLRSIHPSITRSRLLPTYRAVHSSSQQSHSARRPIYTSSVADHGVPHPRDVFQPVDTFPRRHIGPSPEAAEEMLAVLDPPVKSLDEFVKQVLPADILSKKDLAVTAPSADNGLPRSSVHGGLGETDMLKLLDKYREQIDVSGKTYIGAGYYPTIVPPVILRNILENPAWYTSYTPYQPEISQGRLESLLNFQTLTADLTGLPFANASVLDEATAAAEAMTMSLATQPLAKQKKAGKTYVVSHLCHPQTVAVMRSRAEGFGINLVIGDILADDFKIVKDQGDNLIGVLAQYPDTEGGIYDFQGLSDAIHTAGGTFSVATDLLALTVLKAPGEFGADIAFGNAQRFGVPMGYGGPHAAFFACADKYKRKVPGRVVGVSKDRLGNRALRLALQTREQHIRREKATSNICTAQALLANMSAMYAVYHGPSGLKTIAQRIMSMTAALRERLAALGYNVPAKSNVSDGAAVFDTITIEFSNSEEADAIIAAARQNSIFLRRVSATKVGISLDETAGREELKAILQVFSAHAKAEAALDQELGLASIPASLERTSAYLTHPVFNTHHSETEMLRYIRHLESKDLSLAHSMIPLGSCTMKLNATTEMIPVSWPEFSQMHPFLPADVAKGYTQMIDDLEQQLADITGMAEVTVQPNSGAQGEFAGLRVIKKYQEATGSSKRNICLIPVSAHGTNPASAAMAGMKVVTIKCDTKTGNLDLDDLKAKCEKHKDELAAIMITYPSTFGVYEPGVKKACDLVHQYGGQVYMDGANMNAQIGLCSPGEIGADVCHLNLHKTFCIPHGGGGPGVGPIGVAEHLRPYLPSHPNSEYLQSKRTEKSSPPISAAPWGSASILPITFNYINMMGSKGLTHATKITLLNANYILSRLKDHYPILYTNDNGRCAHEFILDVRKFKDTCGIEAIDIAKRLQDYGFHAPTMSWPVANTLMIEPTESENKAELDRFCDALISIRKEIAAVESGEQPRDGNVLRMAPHTQRDLLATEWDRPYTREQAAYPLPYLLEKKFWPSVTRVDDDAIGGSRRLPGTSRSQCGVRHPRCSTLSDIKASTFSGSLESHRSAARSRLGPSPDLCQDMESKITLFYGTFVDLPRTRSGEKHELAIRHGAIWVSSATGRIQGFDWSIANEAELQSLLRKKGWTGVPIIRALEQENEFFFPGFIGLFGSSTLLDWLETYTFPLESSMSNLDKARTAYNAVISRTLANGTTCASYYATIHVPATNLLASLCHTRGQRALIGRVCMDNPAFCPDYYRDESAEASIELTKETIAHIHSLPDSDKESERLVKPIITPRFAPTCSTSALTSLGQLAASHTPPLHIQTHISENPNEVSLVQSLFPEHPSYAAVYDACSLLTHRTILAHAVHLTQPEKELIASRNAKISHCPASNSALGSGLAPVRDLIDNGITVGLGTDVSGGYSPSILEAVRQACLVSRLLRHSTASTSSSGNSTQNETEGREVLSVEEALYLATRGGAAVIDMPNELGGFEVGMFWDVQLIRLGATVQETPQTGSHSDSRSVVDIFGWESWAEKVHKWVWTGNDRNVRRVWVGGAVVHDLDDGSCVGEETMLGSWFGKSLQRDWTRWAVASVGVAILGFAIGRRSLGSR

SEQ ID NO: 10566 - protein, 336 aa, Legionella pneumophila str. Paris
MSYEELSNTMEQMLHEGKGILAADESNSTIGKRFASINTENTEENRRDYRLLLATTPDLEQYINGVILFEETFTQTDEHGTPIPELFANKGIIPGIKVDKGLVDLANTEHEKVTQGLDGLTERLLHFKKLGAKFAKWRNVYSISEYTPSLTAIKTGAENLGRYAAACQSVGIVPIVEPEVLMDGNHSIEHCAEVCEMVLHELFHTLFIHQVELEHIILKPSMVTCGKEVTPFSDPEEVADYTISVFRNNVPASVPTINFLSGGQTPQQATANLNAINQIGHQPWLLSFSFGRALQEDCLKEWCGNKANITKAQEALIKRARLNSMACLGEYQNDME

SEQ ID NO: 10567 - protein, 180 aa, Triticum aestivum
  misc_feature (21)..(21): Xaa can be any naturally occurring amino acid
GRAIWRRTMVFLTQPQLSPPXDGIDYNDFLARRSESLLRYIRSGAGIGKREYADFPLPIALAENSGRCKTNENGAKILPDGTPWIPNLMKEITIVVSNGSQSIHVDQKLIDGPNPNNRWKKYIPLILAVQYFFVVKGIRRAIHSDISNGKLDDWEQRYRDLVGSGNPVDQKVLSSRNPKA

SEQ ID NO: 10568 - protein, 154 aa, Magnaporthe grisea 70-15
MALKRINKELTDLGRYVINEHIARVLLRCIGGATRPVFHWQATIMGPSDSPYAGGVFFLAIHFPTDYPFKPPKVNFTTRIYHPNINSNGSICLDILRDQWSPALTISKVLLSICSMLTDPNPDDPLVPEIAHVYKTARAQYESTAREWTRKYAI

SEQ ID NO: 10569 - protein, 480 aa, Solibacter usitatus Ellin6076
MAESPITARSQDFAAWYQDVVLQGDMAEPAEIVKGCMVIKANGYAVWEVLQRELDDRFKATNHQNVYFPLLIPQSFLKKEAEHVEGFAPELAVVTVAGGKELEEPYVIRPTSETIIGHFFSKWIHSYRDLPLLYNQWANVIRWELRTRMFLRTTEFLWQEGHTAHSNHEEAVEEVLRILDLYAQVAEDIMAMPVIKGVKTHAEKFAGALKSYSIEAMMQNGLALQAGTSHDLGQNFGKAFDVQFQSKEGQLEYVWQTSWGVSTRLIGGLIMTHSDDKGLVLPPKLAPVKSVIVPIYRKEEERAAVLEAAHRIAKEIGAKVDDREGQSPGAKFFHWERRGVPVVLELGPRDLASGKIVLKRRDTGTKEPIDQSEVGAKVAAALEDMQKGLYTRAKDRMKANTVLANSIEEVEAILKDATAEKGGGKFVMAHIKDEPACDARLKEFKATVRNIPLVDEYDGPGKCIVSGETIEKRAVIAKAY

SEQ ID NO: 10570 - protein, 542 aa, Oryza sativa (japonica cultivar-group)
MEAATVVAAPIPAADAAAKALEKKLLDLELPPFPAPAKKAAAKVVAAAPKKKLAGGAGGYVLEDVPHLTDYLPNLPSFPNPLQNHPAYSVVKQYFVNADDTVAKKIVVHKGSARGTHFRRAGPRQRVFFQPDEVSAAIVTCGGLCPGLNTVIRELVCGLHDMYGVTSVVGIEGGYRGFYARNTVELTPRSVNGIHKRGGTVLGTSRGGQDTGKIVDSIQDRGINQVYIIGGDGTQKGAATIHAEVQRRGLKCAVVGVPKTIDNDIAVIDRSFGFDTAVEEAQRAINAAHVEAESAENGVGVVKLMGRNSGFIAMYATLASRDVDLCLIPESPFYLEGKGGLLEFAEKRLRENGHMVIVVAEGAGQDVIARSMRLADAHDASGNKVLLDVGLWLCAKIKDHFKKKANFPITLKYIDPTYMIRAVPSNASDNVYCSLLAHSAIHGAMAGYTGFTVAPVNGRHAYIPFYRITEKQNKVVITDRMWARVLCSTNQPCFLSTEDVEKAGQDDEEPIVPLVEGENSLVKAPPLLANAGDRAALCNGAA

SEQ ID NO: 10571 - protein, 181 aa, Mangifera indica
KMIIKTCGTTKLLLSIPAILKLADSLSLKVQSVRYTRGSFIFPGAQPFPHRSFSEEVAVLDGYFSKFGLDSTAYVVGKPDPDNTKKWHVYSASAELGKRLDPVYTLEMCMTSLDKKRASVFYKTEASSAAQMTVESGIRKILPKSEICDFEFDPCGYSMNSIEGDAISTIHVTPEDGFSYA

SEQ ID NO: 10572 - protein, 220 aa, Dehalococcoides sp. BAV1
MKDVKVVPAILTDDPAAFESMIKQSEGFAPVAQIDIMDGQFVPSLSIPPEVLGRYKPCFASEIHLMTLNPEEYLTYCKQHGARRVIFHFEATPRPEYVISRIKEMGFKVGLAVNPETSVAEFAYLVPQVDMVLFMSVIPGFYGAPFIPEVLLKVKEFKRRFPETEIGLDGGAKQANIPEIVAAGVNDICVGSAIFRQSDPQSSYLYLDKLAKNSAKEAGL

SEQ ID NO: 10573 - protein, 320 aa, Arabidopsis thaliana
MWFFGSKGASGFSSRSTAEEVTHGVDGTGLTAIVTGASSGIGVETARVLSLRGVHVVMAVRNTDSGAKVKEDIVKQVPGAKLDVMELDLSSMQSVRKFASEYKSTGLPLNLLINNAGIMACPFMLSKDNIELQFATNHLGHFLLTKLLLDTMKSTSRESKREGRIVNLSSEAHRFSYPEGVRFDKINDKSSSMRAYGQSKLCNVLHANELTKQLKEDGVNITANSLHPGAIMTNLGRYFNPYLAVAVGAVAKYILKSVPQGAATTCYVALNPQVAGVSGEYFQDSNIAKPLPLVKDTELAKKVWDFSTKLTDSQSGESSS

SEQ ID NO: 10574 - protein, 820 aa, Burkholderia thailandensis E264
MTQAAPAAPEAPPSVAPFHDGELAAQRRAGVADAAAESGGRGIRAFMPDQHRAFFAQLPFFVVGGVDGDGQPWATLRVGAPGFISSPQPRTLDIAGGALRDDPLAGSWRVGSLLGGLGIELHTRRRNRINGVVASLEGDAMSVTVGQSFGNCAKYIQSRTPTPAPPQRAYAAPPQRRAARLDADDRALLARADTFFIATANTSDAAGGARGVDVSHRGGPPGFVRVDDDRTLTTPDYSGNNFFNTIGNLLRDPRAGLLFVDFARGDLLYVAADAEIVWDGPALAAFDGAQRLVRLRIREVRRSAAVLPFRWSAPRFAPQFAAWGGAGVFSSSSSSGMGAAGVAGLARVESAELPESSMLSKVLKASEASEASEASEASEASETRDGPKAPEAPHTTQATNEAEMPQASAAISARSPDARWRTLVVAAVRDETPDVRSFELEAADAGPLAPFEPGQHLTIRLPAAGQSGPLIRSYTLSDAFDGRRYRISVKRDGRASSWLHDHARPGVRIDATAPRGAFTFDAASPRPAVFVSAGIGITPMIAMLNAVLARRAAGAPADAHAKRIYFVHGARRGDERPFAAHLAAAARAHPALSVHLFDSRADGASAGASPGRVSIDALQRVLPFGSYDFYLCGPASFMKSLYDGLRALDVPDGRIRLEAFGPASVRRTALRGGAAAIVAADEKPIVKHGGNGDGNDGEKSGEKSGEKSGKKSGGGDDAKAGGQAGAHAATVVFSRSRRTVEWTPRDGTLLELAEAHGVPADSNCRSGACGTCTTRVLGGRVRYGGTVDAEVAPGMALVCMATPDCAGDAESGPPCVTLDL

SEQ ID NO: 10575 - protein, 268 aa, Glycine max
TRLTRRCVGFSNIEAEPISLYEGTVWHQRRHPVNHSFQYRVRYALIDLDRAPREPHEHLSPDKARQITDTNGPILLLTIPPSVGYEQNPLSVYYCYAVEGSTKWLKKCIAEVTNTPWGERVSFLFNPHSDLVAKALHVSPFMDMLGSWNIKANDPGENLTISISVHHPEHGNYFAASLKARKLCSSPESDHAVFFGLMPHKVAVWIYWQAIKLWWKNVRFVQHPRYNIPSYKDEALMRDNKLQCCGCLAEASPQNRWFRWRDAKWPWS

SEQ ID NO: 10576 - protein, 376 aa, Thermus thermophilus HB27
MREWKIIDSTLREGEQFEKANFSTQDKVEIAKALDEFGIEYIEVTTPVASPQSRKDAEVLASLGLKAKVVTHIQCRLDAAKVAVETGVQGIDLLFGTSKYLRAPHGRDIPRIIEEAKEVIAYIREAAPHVEVRFSAEDTFRSEEQDLLAVYEAVAPYVDRVGLADTVGVATPRQVYALVREVRRVVGPRVDIEFHGHNDTGCAIANAYEAIEAGATHVDTTILGIGERNGITPLGGFLARMYTLQPEYVRRKYKLEMLPELDRMVARMVGVEIPFNNYITGETAFSHKAGMHLKAIYINPEAYEPYPPEVFGVKRKLIIASRLTGRHAIKARAEELGLHYGEEELHRVTQHIKALADRGQLTLEELDRILREWITA

SEQ ID NO: 10577 - protein, 294 aa, Bradyrhizobium japonicum USDA 110
MTAKIIDGKVIAADLRARVADEVARVKREHNLVPGLAVVLVGNDPASEVYVRSKGTQTQAAGMASFEHKLPADVSQADLLAVVAKLNRDPAVHGILVQLPLPKGLNTEAVINAIDPAKDVDGLHPNNAGRLAGGFEALSPCTPLGSIILTKSVHPSLEGLNAIVIGRSNLVGRPLVQLLLNENATVTIAHSRSRDLPGLVKRADLVYAAVGKPEMVRGDWLKPGATVIDIGISRIPKEDGKTRLVGDVAYQEALGVAGAITPVPGGVGQMTVACLLVNTLRAACAIAGLPKPAV

SEQ ID NO: 10578 - protein, 376 aa, Dehalococcoides sp. BAV1
MSKKVYVPSGAKIKVIGCGGAGSNAVTRMVRDNIQGVEFIAVNTDAQHLAITEAATRIQIGERCTRGLGAGGNHTMGKAAAEESLSELKENIIGADMVFVTAGMGGGTGTGSAPVVAKIAKESGALTIAVCTKPFCFEGAHRMQTAEEGINNIVDSVDTLIIIPNDRLLDMVDQKTGVDGAFKLADEVLCNGVKAIAEVITVPGIINLDFADVKAVMKDAGPAWMSIGKGAGQNRAADAARAALASPLLDIAVDGAMGVIYNVCGGDDLSLMEVNSAADVIRQAVDPQANIIFGVSTDPRMGKEVQITLIATGFATKESMLSNNHEKEMTRMMKGLRSKTQEELEVPSFMRYRSAQPSIRKPAPAAHQAPPRFLSR

SEQ ID NO: 10579 - protein, 583 aa, Alnus glutinosa
MEESKKSCFISDRVDYKGDPADRNTTGGWVPAALIVGIEVSERLSTMGIIVNLVTYLKGTMHQSSTTSSNSTSNVAGTSFLLCLLGGILADSFLGRYWTIAIFSVIHALGTCMLAISAALPELRPSECNLHHDFPLKCEEPSSFQMGILYTALYSMALGVGGIKSSVSGFGTEQFDQNDEKEMSEMAHFFNRFYLIISFGTLLAVTVLVYVQDQVGRSWGYGICSASMFLSIVAFLVGTKRYRYRECTGSPIIQILQVIVAAIRKRKAELPTDLSFLYDKASDKESTISHTDKYSCLDKGAIITGMDRGADGLTISNPWGLCTVTEVEEVKMLIRILPIMASTIIFWTIRAQLLSFSVQQAATMERTIENFPIPPASFNGFFVGSTIITLIMYDRLLPFLRQSSNGVQGFTNLQKIGIAIFLSILGMAAASFAEMKRLEVVRANRGSTSTSSTLPITAFYLLPQFVLVGIGDGFMYTGQLDFFITESPKGMKAISTGLFLTTNALGFFGSSILVTIITKVTGEEVGHGWLLSRINDSRLDFFYALLAVLGFINLVFYLVLASWYKPSPVEDAHQKINGKEEKV

SEQ ID NO: 10580 - protein, 350 aa, Schizosaccharomyces pombe
MDESLAKDAVFVASSKPSDLTTEVVGPDFNKYDERKKAGGPGITVEELVESYGKIGFQATNLHDAVTIINEMRNWRDPNPPEEKSDRATIFLGYTSNLISSGVREVLRYLVQHKCVDVIVTTAGGVEEDIIKCLGPTYVGDFHLDGKNLRAKGLNRIGNLIVPNDNYCRFEEWIFPILNKMVEEQETLGTHWTPSSFIRRLGKEINDESSVLYWAYKNNIPIYSPALTDGSIGDMLYFHTYKATPRPLVLDIVADIRNMNTHAVRANKSGIIILGGGVVKHHICNANLMRNGAEWSVYINSANEFDGSDAGARPDEAVSWGKIRGDAKKVKVYGEVSLLFPLIVAATFAK

SEQ ID NO: 10581 - protein, 175 aa, Oryza sativa
  misc_feature (56)..(56): Xaa can be any naturally occurring amino acid
  misc_feature (165)..(165): Xaa can be any naturally occurring amino acid
SVENSPLLLLLHRRRRRRTPHSAEATPTPHSNANRLRARPAASGEEGKPFVEEMRXAVAMRLHTKDQAKEGEKEPQAPPVARWEPSVDGYLRFLVDSKLVFETLETIVDRAAVPWYAEFRNTGLERSEQLKKDLEWFKEQGHTIPEPSAPGTTYASYLEELAEKXDSQAFICHFY

SEQ ID NO: 10582 - protein, 337 aa, Tropheryma whipplei str. Twist
MTVKIAINGFGRIGRGFFRALSSPSCIDGPEIDVVAINDLTSPEVLAHLLRRDTIFGRFPESVCHDGTKLLVGKREVAVFSEKDPSSIPWNGVDIVIESTGLFTDANLASGHITAGSKRVIISAPAKNEDATFVVGVNHTDYDPNKHSIVSNASCTTNCLAPLAKVFDDTFGIERGLMTTVHAYTADQRLQDAPHSDLRRARAAAMNLVPTSTGAASAIGLVLPNLKGKLDGFAIRVPVITGSITDLSLVSKTDVSAPEVNEAYRRAALGPLKGILCYSEDPLVSSDIVADGHSCIYDANLLRISGNMVKLSAWYDNEWAYSRRLVDLAKYMASVGL

SEQ ID NO: 10583 - protein, 505 aa, Burkholderia sp. 383
MKHDSNVTSTVGHLIDGKRVDGGSRVQPVFDPATGESHKSVALADKLTVEAAIASAQAAFPAWRNTPPLKRARVMSRFKTLLEEHADELCALITAEHGKVLADAMGELQRGIENVEYATYVPELLKGEHSKNVGPAIDSWSEFQALGVAAGITPFNFPVMVPLWMWPMAVACGNTFVLKPSERTPSSTLRMAELALEAGLPPGVLNVVNGDKEAVDTLLTDPRVKAVSFVGSTPIAEYIYSTGCAHGKRVQALGGAKNFAVVMPDADIGNAVNALMGAAYGSCGERCMAIPLVVAIGDETGDQVVAGLKAEIEKMKVGPGNGAGVDMGPLVTQQHFEKVTGFVEAGVEAGATLVVDGRSVKVDGHDGGYYLGPCLFDNVKPGMPIYQHEIFGPVLGVIRLKSLDEAMALIDAHEYGNGTCLFTRDGEAARYFGDNIQIGMVGINVPLPVPVAYHSFGGWKRSLFGDLHAYGPDAVRFYTKRKTITQRWPSAGVREGTVFSFPSNR

SEQ ID NO: 10584 - protein, 273 aa, Staphylococcus aureus subsp. aureus MSSA476
MKFKIPENFNDLSLRDIFQQLKVPKKDLHHLNMSKDITINDKPARLMDKVHTGDDVFVPTIDEKSNYVPSYRYAQIKYEDDDMAIVMKPKGVKTHPNDLKESNTLMNHVIYTIDSDYVEPIHRLDQETVGLLIVAKNPLMKKILDRMLEDNDITRIYKANVKALLPLKPQTIDMPIGKDKFHSNKRRVSPTGQRAITHILTSKMIKEAVCQLEIKLDTGRTHQIRVHLAEIGHPVIGDPLYGDSTLRQLELESYKIEFVHPLTKEVISVSLDD

SEQ ID NO: 10585 - protein, 276 aa, Lycopersicon esculentum
TLKNDFQICEEIGRGRFGTVYRCFSPATGESYACKSIDKNLLIDSTDRECLDKEPKILQLLSGNPNILHLYKVYEDDDFLHMVTDFCPNSDLYERVSSGSLSESAAAAILTQLVSAISYCHHMGVAHRDIKPDNVLFDSENRLKLADFGSAEWFAGCEGRLMSGVVGTPYYVAPEVLMGKEYNEKVDVWSAGVILYIMLSGVPPFYGETPTETFQAVLRGNLRFPTRNFRSVSPEAKDLLRKMICKDVSRRFSAEQVLRHPWVINGGETRSMADLN

SEQ ID NO: 10586 - protein, 220 aa, Streptococcus agalactiae NEM316
MSTNKIAPSILAADYANFANELKRIEETTAEYVHIDIMDGQFVPNISFGADVVSSMRKHSKLVFDCHLMVVDPERYIEDFAQAGADIMTIHVEATKHIHGALQKIKEAGMKAGVVINPGTPVESLIPILDLVDQILIMTVNPGFGGQAFIPEMMSKVKTVAAWRKEYGHHYDIEVDGGIDNTTIKAAAEAGANVFVAGSYLFKASDLPAQVETLRVALDD

SEQ ID NO: 10587 - protein, 385 aa, Azotobacter vinelandii
MASVIIDDTTLRDGEQSAGVAFNADEKIAIARALAELGVPELEIGIPSMGEEEREVMHAIAGLGLSSRLLAWCRLCDVDLAAARSTGVTMVDLSLPVSDLMLHHKLNRDRDWALREVARLVGEARMAGLEVCLGCEDASRADLEFVVQVGEVAQAAGARPLRFADTVGVMEPFGMLDRFRFLSRRLDMELEVHAHDDFGLATANTLAAVMGGATHINTTVNGLGERAGNAALEECVLALKNLHGIDTGIDTRGIPAISALVERASGRQVAWQKSVVGAGVFTHEAGIHVDGLLKHRRNYEGLNPDELGRSHSLVLGKHSGAHMVRNTYRDLGIELADWQSQALLGRIRAFSTRTKRRSPQPAELQDFYRQLCEQGNPELAAGGMA

SEQ ID NO: 10588 - protein, 417 aa, Sinorhizobium meliloti
MATEIRVPTLGESVSEATVGTWFKKVGDAIKADEPILELETDKVTIEVPAPAAGTLSEIVAQAGETVGLGALLGQIAEGAGAAAAAPAAAEKKPEPAAATAAPAAAAQPAAAAATQTSTSMPPAPAAAKLIAENNLSADQIDGSGKRGQVLKGDVLAAVAKGISAPAAAEPAKVQARAPAPAEDAAREERVKMTRLRQTIARRLKDAQNTAAMLTTYNEVDMSAVMSLRSKYKDIFEKKHGVKLGFMGFFTKAVTHALKELPAVNAEVDGTEIIYKNFCHVGVAVGTDKGLVVPVVRDADQMSIAEIEKEIGRLGKAARDGTLSMADMQGGTFTISNGGVYGSLMSSPILNAPQSGILGMHKIQDRPVAIGGQVVIRPMMYLALSYDHRIVDGKEAVTFLVRVKESLEDPERLVLDL

SEQ ID NO: 10589 - protein, 257 aa, Pseudomonas putida
MAFETILLDIHGKVGLITLNRPQALNALNAQIVGEINQALDQLERDPSIGCVVLTGSAKAFAAGADIKEMADLQYPQIYVDDLFSDADRIANRRKPIIAAVSGFALGGGCELAMMCDFILAADNAKFGQPEINLGVLPGMGGTQRLTRAVGKAKAMELCLTGRLMGAEEAERAGLVARIVPQAELVEEALKVAATIASKSIPVSMMVKESVNRAFEVTLSEGVRFERRVFHAAFSTEDQKEGMAAFIAKREAQFKNR

SEQ ID NO: 10590 - protein, 115 aa, Triticum aestivum
  misc_feature (57)..(57): Xaa can be any naturally occurring amino acid
MARGAATQLVLVAMVAAMLLVACDAAISCGQVTSALSPCISYARGNVANPPAACCSXVRSLAGAARSTADKQAACKCIKSAAGGLNAGKAAGIPSKCGVSVPYAISSSVDCSKIR

SEQ ID NO: 10591 - protein, 145 aa, Brassica napus
FACKTIDKTSLTDALDRACIDTEPKLMALLSYHPNIIQIHDLVETDSTLSIYMELVDPSVSIYDRLVSSGTFSESQTASFAKQILLGLSHCHRYGVVHRDIKPENILVDLRNDTVKICDFGSGVWLGEGETTEGVVGTPYYVAPE

SEQ ID NO: 10592 - protein, 300 aa, Sinorhizobium meliloti
MSILINKDTKVLVQGLTGKTGTFHTEQALAYNGTKMVGGIHPKKGGETWTGAKGEQLPIFATVAEGRDATGANASVIYVPPAGAAAAIIEAIDAEIPLIVCITEGIPVADMVKVKARLEKSSSRLIGPNCPGVLTPDECKIGIMPGNIFRKGSVGVLSRSGTLTYEAVFQTTNEGLGQTTAVGIGGDPVKGTEFIDVLEMFLADDETKSIIMIGEIGGSAEEEAAQFLKDEAKRGRKKPMVGFIAGRTAPPGRTMGHAGAVISGGKGGAEDKIAAMESAGIRVSPSPARLGKTLVEVLKG

SEQ ID NO: 10593 - protein, 173 aa, Musa acuminata
CEEIGRGRFGVVRRCRSVATGEEFAVKSVDKRLLADSVDRECAAREAKVHGLAAARNPYAAQIYDAYEDDHWVHLVVELLDGPDLCDRIAARGGTPFPEPEAAAVVEALAEALAGCHRRGVAHRDVKPDNVLFDALGHLKLADFGSAECFLAADGGRAPMRGLVGTPYYVAPE

SEQ ID NO: 10594 - protein, 483 aa, Arabidopsis thaliana
MIARRIWRSHRFLRPFSSSSVCSPPFRVPEYLSQSSSSPASRPFFVHPPTLMKWGGGSRSWFSNEAMATDSNSGLIDVPLAQTGEGIAECELLKWFVKEGDSVEEFQPLCEVQSDKATIEITSRFKGKVALISHSPGDIIKVGETLVRLAVEDSQDSLLTTDSSEIVTLGGSKQGTENLLGALSTPAVRNLAKDLGIDINVITGTGKDGRVLKEDVLRFSDQKGFVTDSVSSEHAVIGGDSVSTKASSNFEDKTVPLRGFSRAMVKTMTMATSVPHFHFVEEINCDSLVELKQFFKENNTDSTIKHTFLPTLIKSLSMALTKYPFVNSCFNAESLEIILKGSHNIGVAMATEHGLVVPNIKNVQSLSLLEITKELSRLQHLAANNKLNPEDVTGGTITLSNIGAIGGKFGSPLLNLPEVAIIALGRIEKVPKFSKEGTVYPASIMMVNIAADHRVLDGATVARFCCQWKEYVEKPELLMLQMR

SEQ ID NO: 10595 - protein, 315 aa, Pennisetum ciliare
MACSTASLAANAPGVRPDVPGVPRREAAHRARAGAGHHHEVPQGRAPVGPHRRQLHLVRQLLRAAAGRHHRLRLVALRGPSGGGGTTGAVGRHLVQYGAQVLRQLQRARFPALHVGSHCPRTRPTPSASASRTGNLLKLAASGSPSHAINVVLTADDVAVDGFCMSRCGTHGASRRSRSGRFAYVWVGNPATQCPGQCAWPFHQPVYGPQAAPLTPPNGDVGADGMVISLASMIVGTVTNPFGNGFYQEGSADAPLEAATACAGVYGKGAYPGYAGSLLVDQASGASFNANGAHGRKYLVPALVDPDTSSCATLG

SEQ ID NO: 10596 - protein, 432 aa, Enterococcus faecalis V583
MATKEIKMPHLGESVTEAAIVQWLVKPGDSVKRYDPLMEVVSDKVTTEVPSDFDGVVKEFLISLDTDVPIGTAVMTLETEETTEETEVATLAPVKEASAEQAQEHETAETTSTATSHQKNNGRYSPAVLKIAQEKKIDLTQVTGTGRDGRITRKDVTNFTPTQARTPEKTVSPGTSPSISEEPVASQNESAATASPTETSTDKIVSADPVRKAIAKKMVQSVNEIPHAWLMVEADVTNLVQLRNSLKDEFKQQEGLSLSFFPFFAKAVIQALKKNPKINTSWDDGSIIYHKDVNLSIAVTTDEHLYVPVIQQADNYSIAGLAKEINRLAQEVRQGTLASKEMQGGTFTLNNTGTLGSVQSMGIINHPQAAILQVESINKRLVPTADGGFKVADMVNLCLSIDHRILDGQQAGKFLRDVKDNLAKYNADTDIY

SEQ ID NO: 10597 - protein, 362 aa, Nostoc punctiforme PCC 73102
MTQNYRITLLPGDGIGPEIMAVAVDVLKVVGKQFDLKFEFQEALIGGAAIDATGEPLPSATLETCRNSDAVLLAAIGGYKWDSLPSNLRPEAGLLGLRAGLGLFANLRPAKILPQLIDASTLKREVVEGVDIMVVRELTGGIYFGKPKGIFATETGEKRGVNTMVYTESEIERIGRVAFEAARKRGGKLCSVDKANVLEVSQLWRDRITQLSQEYPDIELSHLYVDNAAMQLVRAPKQFDTIVTGNLFGDILSDAAAMLTGSIGMLPSASLGASGPGVFEPVHGSAPDIAGQDKANPLAQVLSAAMMLRYALDQPKAADRIEQAVFQVLEQGDRTGDIISPGKNLLGCRAMGDSLIKALEQK

SEQ ID NO: 10598 - protein, 152 aa, Zea mays
MESSPAAAAKPARGAGGRKGGDRKKSVSKSVKAGLQFPVGRISRYLKKGRYAIRYGAGAPVYLAAVLEYLAAEVLELAGNAARDNKKNRINPRHLCLAIRNDEELGKLLHGVTIASGGVLPNINPVLLPKRSASQTEKPEKAAKAAISPKKA

SEQ ID NO: 10599 - protein, 641 aa, Oryza sativa (japonica cultivar-group)
MDELNLLRQHQHQHQHHLVVRGLGEEIDLEIGPGDDPSFPGAALVGVTPGAHDPADDHKSLLIPCSQPVAEGQPQPTPPQVEEHDGLLRLPGQTKKKKKVVKKWREEWADTYKWAYVAVHDNTSRIFCTVCKEYGRKHRRNPYGNEGSRNMQMSALEEHNNSLLHKEALRLQTASKENAQPPEIERPVYVKALSKTAASILESILKKDPHEAEFIQSIQEVVHSLEPVLVKNSQHVQILERLLEPERCFIFRVPWVDDRGEAHVNRGFRVQFSQALGPCRGGLRFHPSMTLSVAKFLAFEQTLKNALSQYKLGGAAGGSDFDPKGKSESEIMRFCQSFMDELYRYLGPDQDFPAEDVGVGPREMGYLFGQYRRLSGHFQQGNFTGPKIFWSGSSFRTEATGYGLVFFARVVLADMNKELKGLRCVISGSGKIAMHVLEKLLSCEAIPVTVSDSKGYLLDTEGFDYMKYSVLRNIKAQQRSLKEYLKSYPNAKYIDDAKPWSEKCDVAFPCASQNEIDQAEALAIINSGCRVLIECSNMPCTAQAVDILRTAKVVVAPAKATAAGGVAVGELELNPEFSLMQWSVEDFENKIQDAVKQTYDRSIKAAQDYGIMKENPESLVHGANICAFLNIAQAMTDQGCV

SEQ ID NO: 10600 - protein, 166 aa, Bordetella pertussis Tohama I
MNTMYDFSAPTITGAERALADFRGQVALVVNVASRCGFTPQYSGLEELYRSYRNEGFVVLGFPCNQFGRQEPGDEAAIAQFCETQYAISFPLFAKIDVNGAHAHPLYRWLKARKPGLLGTRAIKWNFTKFLVGRDGLPLRRYAPAHTPESLRHDIARACAAPGPTP

SEQ ID NO: 10601 - protein, 800 aa, Burkholderia thailandensis E264
MAKTTGGKKAAGKATESTMKVAPARSAASAKTSSARAAHPARKRAAAGTAKAAPAPTASASRVVVRSEAKTAKPALKRASAKSARGAAAAPDETAATRASTVQPAVVQQPRVDLAGTANSMTKKLNEVSVDDDANQSDEQPTAASGKGEKAKARDRRAKEKALLKEAFATSTPGTAEELEERRTKLRALIKLGKERGFLTYAEINDHLPDNFTETEALEGIIGTFNDMGVAVYEQAPDAETLLLNDNAPAASSDDEVEEEAEVALSTVDSEFGRTTDPVRMYMREMGTVELLTREGEIEIAKRIEDGLRHMVMAISACPTTIADILAMAERVANEEIRVDELVDGLIDPNAADTDGFSEKDAEEIENEDEEAEEDDEEEEEDDDGAAQATANAAQLEALKRASLEKFALISEWFDKMRRAFEKEGYKSKSYLKAQETIQNELMSIRFTARTVERLCDTLRAQVDEVRQVERQILHIVVDKCGMPRSEFIARFPGSETDLDWAEKVAAEGHSYGAILSRNIPAIREQQQRLLDLQARVVLPLKDLKETNRQMAAGELKARQAKREMTEANLRLVISIAKKYTNRGLQFLDLIQEGNIGLMKAVDKFEYRRGYKFSTYATWWIRQAITRSIADQARTIRIPVHMIETINKMNRISRQILQETGLEPDPATLAEKMEMPEDKIRKIMKIAKEPISMETPIGDDDDSHLGDFIEDTNTVAPADAALHASMRDVVKDVLDSLTPREAKVLRMRFGIEMSTDHTLEEVGKQFDVTRERIRQIEAKALRKLRHPSRSDKLKSFLEGN

SEQ ID NO: 10602 - protein, 314 aa, Brucella suis 1330
MQTASFKNGTLKIGTRGSKLALAQAYLTRRLLQEAHGLPEDAIEILPMSTAGDRIQDRPLSEVGGKGLFTEEIEQALKDGRIDIAVHSTKDMPTVLPEGLHLSVFLEREDPRDAFIGRSARRFMDLPQGATVGSSSLRRQALIRRLRPDIEVVMYRGNVDTRLRKLDAGEVDGTFLACAGLRRLGLADVITDLLDPSVFPPAPGQGAIGIESRIGDERIDVLLAPLAHRETQIALACERAFLGALDGSCRTPIAGLATVEGDRLSFRGMILTPDGRQAHEVTAEGVVSDAAALGTDAANRVRAMAGPHFFDGWQ

SEQ ID NO: 10603 - protein, 308 aa, Aspergillus nidulans FGSC A4
MPPYTAAQKQQITQFVSFTQANNTTAAKFLRQSRWNTEEAIDAFKNRIAPASMGLIFRPCATAGVREAVLRISIFQKLIPGLPAGNDALADWVLYLYGFTFLLKEFRDSPEENPDTIGIEGAMRYLGDIEVELDEVTCLAIAELLQSPSMGEFTREGFLNGWRSVQCDSIAKMAAHAANLRTRIPSEPDLFRRVYRYTFPLCLVQGQRNLQFEIAVEQWNLFFTTPKGGIAWNTTTTPWLDWWVEFLEERGKKPVNKDLWQQVEVFMRKTHEDEAFGWWSEDGAWPGTLDDFVAWVRKKRGDEGAMEE

SEQ ID NO: 10604 - protein, 568 aa, Bacillus cereus ATCC 14579
MSKFTVASNGALETTLRGAEVLSTPLLNKGVAFTQNEREELGLKGLLPPAVLTLEEQARRAYEQFSSQPDDLLKNVYLTALHDRNEVLFYRILTDHLREMLPIVYTPTVGVAIQRYSHEYRKPRGVYLSINDSSGIEEAFTNIGATAENIDLVVVTDGEGILGIGDWGVGGINIAIGKLAVYTAAVGIDPSRVLPVILDVGTNREELLNNPFYIGNRHPRITGEAYDEFIDTFVQAVNKQFPKALLHWEDFSSRNARKILDKYRHDVCTFNDDIQGTGAVSLAAVLSAVKASGVPLSEHRVVVFGAGTAGIGIADQVRDAMVRVGVSEEESYKRFWCIDRNGLVTDNMEDLLDFQIPYARKEAEVSEWKENDVIGLAEVVKHVKPTILIGTSTVAGAFKEEIIKEMASHVERPIILPMSNPTPLAEAKPADLIEWTEGRALVATGSPFEPVTYNGVTYVIGQSNNALIFPGLGLGTIVVRASVMTDGMFAAAAEAVASMVDTSQPGAPILPEVEELRNISEMVAIEVAKVAVAESVARVNLSDNDIKMAVQEAMWKPRVSPNKSGRKG

SEQ ID NO: 10605 - protein, 457 aa, Propionibacterium acnes KPA171202
MSTEVTLPALGESVTEGTVSRWLKAVGDTVEADEPLLEVSTDKVDTEVPSPASGTLLEIKVPEDEDAEVGAVLAIIGDPSESGSAPAKPTAEPAEKAKPEPVKSEAEEAPAPAAPKPAEAPKPAGTNEVAPRATNPSSDVYVTPLVRKLARENNVDLSTITGTGVGGRIRKQDVLAAAGKSGEAPSAPQAPAAAPAPAAPKPAGSARKASQEVSPEAAALRGTTEKMSRLRKVIASRMVESLQISAQLTATVEVDMTAISRIRNAEKAAFKAREGVGLSYLPFITKAVVEALKANPTFNANIDTEAGTITYGSSENIGIAVDTPRGLLVPVIKNAGDLNIAGLAHQIGDLAARTRDNKVTPDELSGGTFTITNYGSAGALFDTPIVNQPEVAILGTGALVKRPVVVTNEFGEDTIAVRDMMYLSLSYDHRLIDGAVAARFLSGIKARLEEGDFAGEF

SEQ ID NO: 10606 - protein, 575 aa, Glycine max
MAVSPILLLLAIFSLIYGNGILPIEATHHVYRNLQTLSSDSSDQPYRTAYHFQPPKNWINDPNGPMRYKGLYHLFYQYNPKGAVWGNIVWAHSVSKDLVNWTPLDHAIYPSQPSDINGCWSGSATILPGGKPAILYTGIDPNNHQVQNLALPKNMSDPLLREWVKSPKNPLMAPTSANMINSSSFRDPTTAWLGKDGYWRVLIGSKIHTRGMAILYKSKNFVNWVQAKQPLHSAEGTGMWECPDFYPVLNNKPSSTIGLDTSVNGDNVRHVLKVSLDDKKHDHYLIGTYDIAKDIFTPDNGFEDSQTVLRYDYGKYYASKTIFEDGKNRRVLLGWVNESSSVSDDIKKGWAGIHTIPRAIWLHKSGKQLVQWPVVELESLRVNPVHWPTKVVKGGEMLQVTGVTAAQADVEISFDVNEFGKGEVLDQWVDPQILCSRKGAAVKGGLGPFGLLVFASRGLQEYTAVFFRIFRYQNKNLVLMCSDQSRSSLNKDNDMTTYGTFVDMDPLHEKLSLRTLIDHSVVESFGGEGRACITARVYPTIAINEKAQLYAFNNGTAAVKITRLSAWSMEKAKIN

SEQ ID NO: 10607 - protein, 383 aa, Pyrobaculum aerophilum str. IM2
MEFKFPDLGEGLVEGEVIKWHVKEGDFVKEGDPLVDVMTEKATVTLPAPTTGRVVKILVREGEVVKVGQTLCVIEPAEGPAAGPQTEAPARPREVAAMPAARRLAKELGIDLSKVKGTGPGGVITVEDVKRYAEETAKATAPAPAPKAVEKAEEAEVVPVRGIRRAVAEKMSKAKRLIPHAYHLEEVDFTELIKLRERVKAEAEKRGIRLTLLPFIAKAVAMALREYPMLNSEYDEEKNAIVVKKEVNLGIGVDTEQGLVVVVVKNADKKGLLEMAKEINELAQKAREGKLELQDVRGSTFTISNIGAVGGLGGLSILNYPEAGILAVGQARKKPWAVGDRIEIRDIALLAVSFDHRVVDGAYVARFMNRVKELLENPWLLLL

SEQ ID NO: 10608 - protein, 279 aa, Frankia sp. EAN1pec
MPFRPRLLSVAGLGAGAAGRRSAARTSRGAVARTGADAPGLHLPATLLAAAPHQHGRGRTGPALVLDPADRRGAQRRGREGNLVLFVVDASGSMAARTRLRRVSTAVLSLLVDAYQRRDRIGMITFRGVGAQVVLAPTSSVEVGAARLVGLRTGGRTPIAAGLECAGVVLRAEARRDPDRRPLLVLVTDGRATAGGDPGAAARGLLRAAGGVAGQGGGARGGAGAAGRVRRGGLASVVVDCETGPVRLGLAGRLAAVLGADLVGLDALPQAGGVPGRVA

SEQ ID NO: 10609 - protein, 244 aa, Coccidioides immitis RS
MPVSKRAKIVHESKVTKKSHKEQTRRLYANVQEAVSNYDHLFVFSVDNMRNTYLKDVRTEFSEDGRLFFGKTKVMAVALGTNPETAFAPNLDKLSPYLNGAVGLLFTSRSPKSVLDYFSSFHPMDFARAGNVSPRAFTIPSGIVYAHAGEIPEEHDQPISHTIEPTLRKLGVPTRLVRGKVTLDMEGGYQVCKAGETLDSRQTTLLKMFGVAVAEFRVEMRAHWTKETGEVEVLQKDEGMEVDH

SEQ ID NO: 10610 - protein, 523 aa, Haemophilus ducreyi 35000HP
MSKQINVPDIGGDEVTVTEVMVNVGDTITIDQSIINVEGDKASMEVPAPEAGVVKQVLVKVGDKVTTGSAMLVLETADAVPQASAPVAASVASAIVEVNVPDIGGDEVNVTEIMVKVGDAVEVDQSIINVEGDKASMEVPAPFAGVVKEILVRSGDKVSTGSLIMKFEVAGAAPAPASATVAPTAVVAPTTNHTQSAKEQGQSSLSQAQVEASSVFAHATPVIRRLAREFGVNLDKVKGSGRKGRIIKEDLQAYVKTAVQVFEQQGGTTVSASGAGLGLLPWPKVDFSKFGEVEEVELSRINKISGANLHRNWVMIPHVTHFDRTDITALEEFRKEQNKLAEKQKLDVKITPVVFIMKAVAKALEAFPRFNSSLSEDAQRLTLKKYINIGVAVDTPNGLVVPVFKNVNKKGIIELSRELMEVSKKARDGKLTASDMQGGCFTISSLGGIGTTHFTPIVNAPEVAILGVSKSETLPVWNGKEFTPRLMLPLSLSFDHRVIDGADGARFLSYINGVLADIRRLVM

SEQ ID NO: 10611 - protein, 409 aa, Bacillus cereus ATCC 14579
METIVQKFGGTSVGSVERIQHVANLIIEEYERGHSIVSVVSAMGKSTDELVALANAITENPSKREMDMLLSTGEQVTISLLTMALQAKGYHAISLTGWQAGITTESVHSSARITDIHTDRIQSYLAEGTIVIVAGFQGVSEDFEITTLGRGGSDTTAVALAAALKAKKCDIYTDVTGVYTTDPRVVKDAYKLDEISYDEMLELANLGAGVLHPRAVEFAKNHNVVLEVRSSMEQENGTIVKGECNMEQQSIVKGIAFEDNITRVTIKGLEQGSLSTVFSTLAAAHINVDIIIQSITNEGTVHLSFSIHSNDLRETLEVLEQNQEALHYEAVEYENHLAKVSIVGSGMVSNPGVAANMFTTLKEEDIHIKMVSTSEIKVSVVIDRLHLVTGVEALHQSFMAKIEPFVQMS

SEQ ID NO: 10612 - protein, 286 aa, Vibrio sp. Ex25
MTAQNIDGTLISQTVRSEVAARVKARVEAGLRAPGLAVVLVGEDPASQVYVGSKRRACEEVGFVSKSFDLPASSSEEELLALIDELNNDDEIDGILVQLPLPAGIDTTHVLERIHPEKDVDGFHPYNVGRLAQRIPKLRSCTPKGIITLLDRYNIELRGKHAVVVGASNIVGRPMTLELLLAGCTTTTCHRFTKDLESHVRQADVVVVAVGKPNFIPGEWIKKGAVVIDVGINRLDSGKLVGDVEYDKARESASFITPVPGGVGPMTVASLIENTMLACEQFHTDK

SEQ ID NO: 10613 - protein, 246 aa, Oryza sativa
MDSEHWISSLAAAKRFYAAQLGHVDDMAGIGMEEVEMEMEDDGEGMELELEMQLEEATWPDVACPYCYEDHDIASLCAHLEEDHPYEPHTSPCPICFEKITRDMLNHITMQHGYLFKSGRRMRRFDIPESQALSLLSRDLRDAQLQALLGGGHRQRRSNTTATNISADPLLSSFGLGFSTLDSEERSKAPVPIPDDTSIHKDTPAQPWESRIDSSLTSEEREQKRKQATDRATFVQGLVLSTLFED

SEQ ID NO: 10614 - protein, 495 aa, Kluyveromyces lactis NRRL Y-1140
MNEYDAVDRHTFKVFNQDFTVDKRFQLIKEIGHGSYGIVCSARFTEAADETTVAIKKVTNVFSKTLLCKRSLRELKLLRHFRGHKNITCLYDMDIVFQPDGMFNGLYLYEELMECDMHQIVKSGQPLTDAHYQSFIYQILCGLKYIHSADVLHRDLKPGNLLVNADCQLKICDFGLARGYSENPVENNQFLTEYVATRWYRAPEIMLSYQGYTKAIDVWSCGCILAELLGGKPIFKGKDYVDQLNRILQVLGTPPEETLKRIGSKNVQDYIHQLGYIPKIPFSTLYPNANPDALNLLEGMLSFDPQLRITVDDALQHPYLSIWHDPADEPICTEKFDFSFESVNEIEQLKQMVIDEVTDFRQYVRLPLLHEQQQQQGKTDGGFDDQIREDQRTFQAQLEEQVNNGRTASNVPSFDEPFSSQMMGSASQQDPLVGIHSDNLPSHELDFPPRPSENVLDSPMGLSHQQTHNGSPECQDINDLLGLERELEFGLDRQF

SEQ ID NO: 10615 - protein, 406 aa, Dechloromonas aromatica RCB
MALIVQKYGGTSVGNPERIKNVAKRVAKFQAQGHQVVVVVSAMSGETNKLIALAKEVQANPDPRELDAIMSTGEQVTTGLLSMALMDIGCKAKSYTGGQVKVLTDSTHTKARILSIDEANMRRDLDAGYVIVVAGFQGVDANGNITTLGRGGSDTSGVALAAALKADECQIYTDVDGVYTTDPRVVPEAKKLDTITFEEMLEMASLGSKVLQIRSVEFAGKYKVKLRVLSSFQDEGEGTLITVEEDKNMEQPIISGIAFNRDEAKLTMLGVPDTPGIAYQILGAIADANIDVDMIIQNVGHDGTTDFSFTVNRGEFAKAKEILEGVKAKLGAREITGDNKICKVSAVGVGMRSHPGVASQMFKALADEGINIQMISTSEIKISVVLDEKYLELAVRVLHRTFGLDQ

SEQ ID NO: 10616 - protein, 129 aa, Brassica napus
MATIAATSLNTGTQLAVITSEARPVRLAGPVRLNNPWNIGSRTTNRMVTVRPVKATPEGVISDKVEKSIKDAEETCAGDPVSGECVAAWDEVEELSAAASHARDKKKDSDPLEEYCKDNPETSECRTYD

SEQ ID NO: 10617 - protein, 92 aa, Magnaporthe grisea 70-15
MAKRTTKVGITGKYGTRYGASLRKQVKRMEISQHARYTCTFCGKNTVKRHSVGIWNCGACKKTISGGAYVVSTPAAAAARSTLRRLREIADV

SEQ ID NO: 10618 - protein, 554 aa, Pseudomonas fluorescens PfO-1; identical to SEQ ID NO: 658

SEQ ID NO: 10619 - protein, 367 aa, Methanocaldococcus jannaschii
  misc_feature (1)..(1): Xaa can be any naturally occurring amino acid
  misc_feature (6)..(6): Xaa can be any naturally occurring amino acid
  misc_feature (34)..(34): Xaa can be any naturally occurring amino acid
  misc_feature (159)..(159): Xaa can be any naturally occurring amino acid
  misc_feature (162)..(162): Xaa can be any naturally occurring amino acid
  misc_feature (188)..(188): Xaa can be any naturally occurring amino acid
  misc_feature (200)..(200): Xaa can be any naturally occurring amino acid
  misc_feature (257)..(257): Xaa can be any naturally occurring amino acid
  misc_feature (298)..(298): Xaa can be any naturally occurring amino acid
  misc_feature (323)..(323): Xaa can be any naturally occurring amino acid
  misc_feature (357)..(357): Xaa can be any naturally occurring amino acid
XEVEYXNFNELNLSDNILNAIRNKGFEKPTDIQXKVIPLFLNDEYNIVAQARTGSGKTASFAIPLIELVNENNGIEAIILTPTRELAIQVADEIESLKGNKNLKIAKIYGGKAIYPQIKALKNANIVVGTPGRILDHINRGTLNLKNVKYFILDEADEXLNXGFIKDVEKILNACNKDKRILLFSATXPREILNLAKKYXGDYSFIKAKINANIEQSYVEVNENERFEALCRLLKNKEFYGLVFCKTKRDTKELASXLRDIGFKAGAIHGDLSQSQREKVIRLFKQKKIRILIATDVXSRGIDVNDLNCVINYHLPQNPESYXHRIGRTGRAGKKGKAISIINRREYKKLRYIERAXKLKIKKLKFG

SEQ ID NO: 10620 - protein, 369 aa, Yersinia pestis biovar Medievalis str. 91001
MLQTYICCSHASITIVVFIATVVFLGIYPPCSYGYYTDSVHRSVIGWAVKYKTVTSMLDKIIRIATRQSPLALWQAHYVQHLLQANHPGLQIELVPMVTRGDIILDTPLAKVGGKGLFVKELELALLDGRADIAVHSMKDVPIAFPEGLGLVTICEREDPRDAFVSSHYAHLDDLPAGSVVGTSSLRRQCQLRERRPDLIIRDLRGNVGTRLAKLDNGDYQAIILAVAGLKRLGLENRIRYAMSAEESLPAVGQGAVGIECRLDDDHTRQLLAPLNHRHTELRVCAERAMNIRLEGGCQVPIGSYAELEGDTLWLRALVGAPDGSQMIRGERRGPAAEAEQMGIELADELLSRGAREILAAVYLDNPAR

SEQ ID NO: 10621 - protein, 351 aa, Chlamydia trachomatis D/UW-3/CX
MNVVCGKSRVGYSSFFCKSREPFSCVFKALLSKFILGVPMTHAKLVIIGSGPAGYTAAIYASRALLTPVLFEGFFSGIAGGQLMTTTEVENFPGFPEGVLGHQLMDLMKTQAQRFGTQVLSKDITAVDFSVRPFVLKSGKETFTCDACIIATGASAKRLSIPGAGDNEFWQKGVTACAVCDGASPIFRDKDLFVVGGGDSALEEAMFLTRYGKRVFVVHRRDTLRASKVMVNKAQANEKIFFLWNSEIVKISGDTLVRSIDIYNNVDETTTTMEAAGVFFAIGHQPNTAFLGGQVALDENGYIITEKGSSRTSVPGVFAAGDVQDKYYRQAITSAGSGCMAALDAERFLEN

SEQ ID NO: 10622 - protein, 656 aa, Zea mays
MAREHPQPPPVAAAAASAASSKGQAWFCTTGLPSDVVIEVGDMTFHLHKFPLMSRSKKLHDLITNKESREASRRGRGAEQEEDVGEIREEEADLVLEEDEEAEVHRIRLLEFPGGEEAFELTAKFYYGVKLDLTPATAAPLRCAVERLGMSDDHSDDNLVSRADRFISQTVLRNPRDAIRALKSCEGLLPLADDLGLVSRCVDAVAAKAVASTPTTLFGWPIADDDRAGERQRRQERRRRRRGHLERGVGPEVIEGALIAYAKRSIPGLSRTGRHVGGGGGTAAAPPSSDVEEQKALLETVIANLPEETIKSTAHTGTAVGATTARVLFGLLRTASILHASEASRDMLERRIAARLPDAAVDDLLIPSYSYLVETLYDVDGVERIVRYFLEGRDVADEGNEEEGSEAETPGREASRRAMLSVGRLVDAYLGEIATDANLKPDKFCDLAWALPDGARVYDDGLYRAVDIYLKAREQRAHPGLSEEEKEKVSGVVDGRKLTLEACTHAAQNERLPLRTVVQVLFFEQLQLRRAIAQTIMANEGGAAGSGEEGGESDGGGTWRVAARGNQMLRLDMDSMRNRVQELERECTSMRKAIDKMDRRGGAPVDRGAPSVPPADGRWGAIVTKRFGCKFPAQVCQSQQRTVVARTRRPRIEQSP

SEQ ID NO: 10623 - protein, 322 aa, Ralstonia eutropha JMP134
MSNTDTLQVRVKSISWEADGILAFELRPEPPLRALPAFAAGAHIDLHLPNGLIRSYSLLNAQCEPHRYVIGVNRDAQSRGGSRYLHETLRPGDVLTISPPRNNFPLDDSASLAVLVAGGIGITPILGMIHRLRELGRPWRLHYAARTRKQAAFVETLEAMGMEPGGEVRLTFDREAGADRLDVTAIAASLPEGAHIYCCGPVPMLEAFEQATASLPPGRVHREYFAARESAATDGGFTVELARSGRSIEIQPGRTILECLIAEGVEPMYSCQEGVCGTCEVRVLDGEPDHRDLVLNAEERAANNRMMVCCSGAKTRKLVLDL

SEQ ID NO: 10624 - protein, 256 aa, Thermoplasma volcanium GSS1
MKVLIASKSDPASMQMLSYLEDNYDIKENSGRRFVKDFEIFVIEDRHIFHDMNLGNNYEYAVVLSRHSSAADIKSLTAHPTGNFGPKADLGGRPKTINVSCPKYMSGTLRQMLESYSGTKFQVTFEATHHGPIFDLPNYYVEIGTTENEWTDDDAKKTAVDAVINPDAKDFPNFVAVGGGHYAPKILEYFRRNEINIGHIISKHDHDDLEEWQIKDAVEKTPSCKGFLVDRKGTRSRVRDMVKSISDDLGLELIMI

SEQ ID NO: 10625 - protein, 330 aa, Yarrowia lipolytica CLIB122
MSLENPNTLPFNDPETSPKTALVTGASSGIGWYTTLHLYMHGWDVFLGVRNVLKGQKAIDDIKAEAQKRQLDGSIPATAKFGQLAIVEMDLLDIKSLDKVEAQLQNTEKLDLLIHNAGIMAVPRENSKDGWEVQMQTNYVAPFVLTDRLLDLLQKAPKPRIVYLSSIGHHFAMKPAPLDKRQDGFPGLYYGFVRYGYSKTAGMQLINQLAKDYPHILSMSVHPGFVMETELYRHWNSLPLVGPLFNLGFRSFGVVFGVSKEEGCYSTLVAALSPNLTAPTDSGEFLWTKGSEGNPSSLVKDEKYALKNWNWTVDQMEQKNVRIRHFQHKR

SEQ ID NO: 10626 - protein, 191 aa, Arabidopsis thaliana
  misc_feature (107)..(107): Xaa can be any naturally occurring amino acid
MAPSNHFSTGEDTSPGEATMVAPCTGLKSSASFPVTRKANNDITFITSNGGRVSCMKVWPPIGKKKFETLSYLPDLSDVELAKEVDYLLRNKWIPCVEFELEHGFVXAREHGNTPGYYDGRYWTMWKLPLFGCTDSAQVLKEVEECKKEYPGAFIRIIGFDNTRQVQCISFIAYKPPSFTEAESPFWNIQR

SEQ ID NO: 10627 - protein, 629 aa, Oryza sativa
MHTKLLLLPILASLQLLPGAANGATVDPSCPPATCGNLTITYPFWLGSQNQSSCGPPSFQLTCNDRASGPFLRNSYIKVLGFDYGRRSLVAVHALLAADAACTVMFNVSSAFAITDRFSISQSNRELYVLSRCRERLPPPDAVPVTNCRANSSGMYAYLGGSYGTGQTPVNNGGCELSVFLVLGSSNAADMTAANYRQLIAGGFLLEWEPVGDCNACTASGGRCRYDASTSAFACLCSDGGMRPSICDGKNRGKLALIVSLSAAAGLVFAFLAWLMYRQRQKFRSAICGVYSGNTKNEEEMLKKCESLALKRYKYSELKKITKSFEDNLGEGGYGVVFKGRLQNGRMVAVKILTVSKGNGEDFLNEVMSISRTSHVNIVTLLGFCLEGPKRALVYEYMPNGSLKNYIHSESSNLATGWEMLLKIVIGIARGLEYLHQGCNTRIIHFDIKPRNILLDHEFCPKIADFGLAKLCHLNESILSMAEARGTIGFIAPEVFSRGFGVVSTKSDVYSYGMLLLEIVKVRKNIKGIADNFSETFFPHWVYDSLVSEMQCCETAYGTEEIARKMTIVGLWCIQMTPETRPSMSRVIEMLERSISELEMPPKPFLCSPIHSTNVSSYKSVNFTMSASS

SEQ ID NO: 10628 - protein, 487 aa, Synechococcus sp. PCC 7002
MTTSFQTIGLSDARVDLLENIGFEKPTEIQSKAIPAILEGRDVVGLSQTGTGKTAAYSLPFLEKIDLEQKTVQGLILTPTRELAVQVTQSLKEFAVDRRLWVLTVCGGQSMERQIRSLQKGVHIVVGTPGRVIDLLERGKLSFEELRWAVLDEADEMLSMGFIDDVKKILRQSPKTRQTVCFSATMPPAIRDLVENFLNDPINITIKQPQVTPDRIAQEVYMIPRGWSKTKALLPILEMANPESAIIFVRTKRTASELTNELVEAGQSADEYHGDLNQNQREKLVRRFKDGKIKMIVATDIAARGLDVENLSHVINFDLPDNTESYIHRIGRTGRAGKTGTAIALVEPSDRRLLRQIERRVKQSLKVSTIPSRTEVEAQRVTRLETQVREALAGERMASFLPIVKRLGDEYDPQAIAAAVLQMMYDNNSPEWLNEDWEVPEVNTKTGLPKPTKKGGRSGRRSNYKGSGGGYKGDRSRGRRSYSSNHS

SEQ ID NO: 10629 - protein, 243 aa, Ipomoea batatas
MSAPPCVAEVKVESYVFPATAKPPGTAKTLILGGAGARGLNIDGKFVKFTAIGVYLEADAVPSLAVKWNGKSAEELTDSVQFFRDIVTGPFEKLTRITMILPLSGKQYSEKVSENCVAFWKAAGMYGDAESKAIEKFNDVFSDQMFPPGASIFFTQSPHGSLTISFSKEGSMPEIASAVIENKPLSEAVLESIIGSKGVSPEAKQSLAVRLSELFKNGVNGGDAITGKVGCENDAIPQTVVSK

SEQ ID NO: 10630 - protein, 284 aa, Neisseria gonorrhoeae FA 1090
MSAQLINGKEVSQKHLQAIAEAVAQRQQDNLHTPCLAVVLVGGDPAGAVYVRNKKTACQKCGIKSLSYELPESTSQEELLALVDRLNADSEVDGILVQLPLPKHLDSQAILERISPDKDVDGFHPYNVGRLAVKMPLMRPCTPKGVMTLLEAYGIDPKGKKAVVVGASNIVGRPQALELLLARATVTVCHSATENLADEVAAADILVVGVGIPNFVKGGWIKPGAVVIDVGINRLDDGSLCGDVEFETAKERAAMITPVPGGVGPMTIATLMENTLHAASLHDA

SEQ ID NO: 10631 - protein, 513 aa, Yarrowia lipolytica CLIB122
MILLYVLAFLVSYLIFTRLRYRYQSYKLAQKWKCSPVRDVSSFPMAFPEFLFFFKSGKNNVLLDEFVNFFTKRQPNLTVGLVLAGNDVTVTLEPENLKALLATQFKDFCLGVRHNQLAPILGDGIFTLDGQGWQHSRAMLRPQFARDQVSDVDMIERHVQNLVRKIPQGDSFDIQGLFFNLTLDTATEFLFGQSVSCQTVDNPAEDDSTVTDMPIPMRKSFQSDFNLAQHHGGYRVRLQMFYWLWRPQELFTASKSVRKFVDHYVKKALVESEKEKQADDKYVFLTELAREVKSPQVLSDQALNILLAGRDTTASLLSWCIYLLARHPETWNKLRDEILSTFGSGSDLSLITFESLKRCEYLRFVINETLRLYPSVPVNVRYATRDTTLPRGGGPDESQPILIRKNSVLVYSVFATHRLKKFWGEDADEFRPERWGEGISRGWEYLPFNGGPRICLGQQYALTETSYVLTRIVQLFGTLENADASPEPPMKLHALTMCHLTGVHVKMSTNNLP

SEQ ID NO: 10632 - protein, 270 aa, Xanthomonas axonopodis pv. citri str. 306
MARPLRSAIYTGWVRHRRFMPKALHFRYRLFLMYLDLSELDQVFARRWLWSVGRANLAQFRRSDYLGDASIPLDQAVRDCVHTHTGERPEGAIRLLTHLRYFGHVFNPVSFYYCFDRHDSLRWIVAEITNTPWQQRHTYVLPVAQARTHRDVHAWRFDKRFHVSPFMGMQQRYDWRFSVPDAQLRVHMDVLDAVGDDAGGAIDNSSTRRFDATLVLQRQPLTARNLACTLLAYPLMTVWVVIAIHWQALRLWLRGNPVHDHPHPPVREPR

SEQ ID NO: 10633 - protein, 599 aa, Methanopyrus kandleri AV19
MVSIGRRVAVVDRERCKGGSKCDYVCQRFCPGVRTGRETITIDEDTNKPVISEELCSGCGICAQKCPFDAIKVVRLPEELEEECVHKYEEGGFRLYRLPVPKPGKVTGVIGRNAIGKTTAAKILTGELKPNLGDPEADPDWDEVIRAFSGTELQEHFRRIADGDLRPVMKPQYVEALPKVVKGRVKDVLEDVDELGVVDELIERLGLTEVTDRRISDLSGGELQRVAIAAALSRDADFLVFDEPCSYLDVEQRLSLARSLREIVEDRGIPMLVIEHDLATLDYVADVVHVLYGKRGAYGVVSKPMGVGKGINAYLKGYLEAENVRFRDEEVVLPEKPAEAEAGERDTLVEYGELVKEYDGDFRLEVEPGEIRVGEIIGALGPNAIGKTTFVKLLAGVLEPTGGGVDVDVKVSYKPQYLEVDSDEPVEQVLRRTAGSEWGSSWYRSNIVEPLDLEYLFDRPLCELSGGELQRVAVAAALSREADLYLLDEPSAYLDVEERINTARVIRRVIEARDAAAIVVDHDLLLLDYISDRMMVFEGEPGKHGRANPPESKREAMNRFLSNLGVTFRRDPETRRPRANKPGSHRDREQKRRGEYFYA

SEQ ID NO: 10634 - protein, 183 aa, Methanopyrus kandleri AV19
MITVLVLGDAHIPERAQEVPHTLKRKIEELAPVDVVISPGDYTTEDTIEWIASLGEKALMVVGNCDFGLPLPPRVTEDIGEVKVTVDHGSGVHPRGDPDQLAAIAEEEGADVIFTGHTHRPEFKEHRGVLIVNPGSLTGVPSGGGPSPGPSFMYGTIDGKEVWMKLYMLKGDRLETEEFETEL

SEQ ID NO: 10635 - protein, 157 aa, Schizosaccharomyces pombe
MAEEEHVDFEGGEAGASLTFPMQCSALRKNGHVVIKGRPCKIVDMSTSKTGKHGHAKVHIVALDIFNGRKYEDMSPSTHNMDVPVVKRDEYQLVNIDDGYLNLMTTDGTTKDDVRLPEGELGNEIEEGFEEGKDLIITVVSAMGEEIALACRDAPSA

SEQ ID NO: 10636 - protein, 439 aa, Kluyveromyces lactis NRRL Y-1140
MEANIISNQSNWNARQMPNVSRATKKLKKLLDPYVDHMKQSYELDQNNHIYVDPILTKRSIYSPANFSVPGRYEILQVLGKGSYGTVVSAVDKGNPTHEVQLAIKKVTSIFTREILLKRAIRELKFMSYFKGHRNIVSLIDLEIVNEEPYSGLYCYQELVDYDLARVIHSNVLFSEFHIKHFLYQILCGMKYIHSADVIHRDLKPGNILCSITGEIKICDFGLARGISPSFTVAGGISNHITNYVATRWYRAPELILSHKRYSKSVDMWAVGCILAEFYGRKPVFMGNDSLHQVMEIQKILGTPKQIVIRTYGSSRCYDIFSTSKPQYKKTPWCEIFPYASSEAVDLMERLIDWNPEARLTVEEALDHPFLQQVRNPEAEPICPHGPFDFTYEKHLYSMERLRECLCDEVSKFHNDRQTKDFVSPPLMTPHFIAESNSY

SEQ ID NO: 10637 - protein, 802 aa, Frankia sp. EAN1pec
MGGRGGSRVAGGGRRGGGTGRGSQGAPCRLSDVPCWAPDGRGGSRCESGAVPPLLPGSPPQRKVTAALRAVGRPRVDGDPAARILPPSVLASRARTPRGGHRHAHDCARPRGDGRVAFDGPCGGGGPVVTFPFSALVGQDDLRLALLLNAVSPTVGGVLVRGEKGTAKSTAVRALAGLLPPVAVVPGCRFSCDPAAPVVHCPDGPHPTSLADGHGAGGVGVSRPARLVELPVGASEDRVTGALDLDRALAEGVTALRPGLLAAAHRGVLYVDEVNLLADHLVDLLLDAAALGVAQVERDGVSVSHPARFWLVGTMNPEEGELRPQLLDRFGLTVQVAASRDPRIRAQVVRRRLTFEADPVGFAALWAGAEAELAGRIAAAQARLGRVELSDAALDAVAAVCAACDVDGMRADVVLAKTAMARAAWEGRAEVSPDDIRVSARFVLPHRRRRGPFDAPGGDGRALDDTVEEVLADRVRPGDGPDGDGDGDGDGSDDSPGGGSPGGGQRWRDDTGGAGGWDGSGGDGSGVDVPAGGTGDLTPASARAGGESADLSGPAAGGPEGVGPAGPPPPGAALSSAAPAAGGGPGSGGGRPGGHGPSSPDSADACGRRRGARRWAGAGGWGSRYAVPAAAAVRRRAGRGGGRASFGGTHLPWGGRPDRRGRTWVAPAGDAAGRCPPPARPGPHRPGAGARPRRPARRAAARPGGEPGAVRRRRQRVDGRPHPAAPGQHRGAVSACRRLPAPRPHRHDHVPGGGCAGGACADVQCGGGGGAAGRVADRGADPDRGRVGMRRGGAARRGAPRP

SEQ ID NO: 10638 - protein, 493 aa, Pseudomonas syringae pv. phaseolicola 1448A
MSLTRFQMCIDGQWVDALSGKTFDSLNPALAEPWAQLPDADEADVERAVQSAQKAFEGPAWRGLTATARGKLLRKLGDLIAENKENLAQLESRDNGKLIRETRGQVSYLPEFFHYTAGLADKLEGGTLPLDKPDLFAYTVHEPMGVVAGIIPWNSPLYLTAIKLAPALAAGNTIVLKPSEHASATVLELARLALEAGIPPGVVNVITGYGPTTGAALTRHPLVRKIAFTGGAATARQVVCSSAENFAKLSLELGGKSPNIIFADADLDSAINGAVAGIYAASGQSCVSGSRLLVQDEIYDEFIERLAERASRIRIGNPQDETTEMGPMATAQQLAVVEGLVADALAEGARLRLGGKRPRLDSKGWFYEPTLFECDRNSMKIMQEEVFGPVASVIRFKDEAEALAIANDSQFGLAAGIWTRDLGRAHRLARDIRSGIIWVNTYRAVSAMAPIGGFKNSGYGRESGIDSVLAYTELKTVWINLSQAPMPDPFVMR

SEQ ID NO: 10639 - protein, 551 aa, Archaeoglobus fulgidus DSM 4304
MNVVVIGGGAAGLKAASRIRRKDGDASITVVEAGKYVSLGRCGLPYYVGGLVHEVDNLRETTYGAVRDEAYFKKLKNIDVLTETVATEIDRSRKTVKIVRNGSEDELNYDYLVIATGARPAKPPIEGIEAEGVVTLTSAEEAEKIIEMWEEGAEKAVVIGAGFIGLESAEALKNLDMEVTVIEMMDRVAPAMLDREMAVLVENHLREKGVNVVTSTRVEKIVSQDDKVRAVIANGKEYPADVVVVATGIKPNSELAEKAGLKIGETGAIWVDEYMRTSDESIYAGGDCVETTCLVTGKKIIAPFGDVANKQGRVIGENITGGRAVFPGVIRTAIFKVFDFTAASAGVNEQMAKEAGLDYFTVIAPSPDRAHYYPQANYIRLKLIVEKGSWRVIGAQGVGMGEVAKRIDVLSTAIQAGMTIDQLANLDLAYAPPYSPALDPVITIANVAMNKRDGLFEGINVFELKEKLEKEDIVILDVRSEEEFKTRRIESEKVIHIPILELRERLDEIPRDKEIVVVCAIGLRSFEASRILKHAGFEKVKILEGGMAFWF

SEQ ID NO: 10640 - protein, 587 aa, Streptomyces avermitilis MA-4680
MHPCSPRLVGVPAPDRFGVLMGTQWNAVDGRIRTTARGHAVLNSPRLNRGTAFTRQERQELGLVGLVPPQVLTQDQQAARAYTQFRSQPNDLAKNVYLTALRDRNEVLFHRLLGDHLAEMLPIVYTPTVGTAIERYSYEYRRPRGVYLSVDAPEDIERTLRASGLGADDVDLIVATDGEAILGIGDWGVGGIDIAVGKLAVYTAAAGVDPARTLAVMLDVGTNRQELLDDPLYLGNRHPRVDRESYDAFIDAYVTAATELFPDALLHWEDFGPANARRILDRYREKVRTFNDDIQGTGAVNLAAVLSGVRAGGVPLRDHRVVLFGAGTAGIGIADQLRDALIADGLTPQEATDRIWAVDRHGLLAEDQQGLHDFQLRYVRRGAEIAGWRRDDALGGVPLAEVVDRVRPSVLIGASGQGGAFTEDIVRAMAAHTDRPIILPMSNPTRLAEAVPADLLTWTDGQALIATGSPFDPVEVDGVTHHIGQANNALVFPGLGLGAVVARAERITDGMLVASARAVAEQTDATAPGVPVLPLIDRLRDTSAAVAVAVARAAVEDGVARETVDDAVEERVRAAMWQPEYPPIEAV

SEQ ID NO: 10641 - protein, 357 aa, Coccidioides immitis RS
MGHEAYLCNNSKGKSEEITSPDRYVIPLGSWILVTGSNGYIGSQVVDTLLKLGYNVRGTVRMERPWLHEFFKSKHGPGRFESVVIPRLEDDDSLNTCMQDISGIVHVASDMTMASDPNKVIPPVVSATLNVMKAAQQAGTVKRVVLTSSMCAVGFPKFNGEVVTFDTEKWNDEAVKAAWDENSPAELMPMIVYGASKAEGERAAWNWVKENKPNFSFNSVLPNVNFGRILHPEIGGTMMKITRDLLDGNTLVMNIPPQWRIDVEDDARLHAAALLDPDVVSERIFGVASPFNWTDVIGILQKLRPNNKKIPDPPENEPRDLTNMAPAKRAEELLQSFFGKGWTGIEESLAAGIAGHE

SEQ ID NO: 10642 - protein, 542 aa, Coccidioides immitis RS
MAEEDTSGQFLCPPKDKEEYPPVYRQHSAYNPLYTFRLPSGKTRHYQQQYADIYFLRLARLKPAVAEIAAAEWEEFTGELCWVVGTVYMDLPLKPNILDDISKEHWTAAPPSRKTYLDPSNQGGTQTMLEDGSGRLRLTGTLLQSALLVTGAVVAVLGTENANGDFEVVDVKVPDLAPQPARWESQYADSASGKRKRSPSETPVDGPRKKIALLSGLGITGTSGDTVALTLLTDYLLGYGEGYGNVGTGSSPIRSAQISRLIIAGNSLGSSVPPSLEEQDEDAAVKKRRQAKKYGYDASAYNASPITHLDNFLAEILPSIPVTIMPGENDPANFALPQQEIHRAMLPRSRNYCSAPRLGIDEPPSEPGWLDTVTNPWQGDVEGWRLWGCSGQNVDDVLRYMYLDDDQTGNGQDIEGDTRLRLMEAMLRWRCAVPTAPDTIWCYPFQDNDPFVLQACPHVFFTGNQPAFRTTVIEKSVSASSMDIEGDQPSKVRLLALPKFRETGELVLLDAETLEVEVVKFGTWQSVKEVESLDAPVNDSQA

SEQ ID NO: 10643 - protein, 462 aa, Mesorhizobium sp. BNC1
MATPTDLVAASFRPPAPSPRQTPPSTLQMMRIVYRNPLELWGEPSYNEPWVQLTGGIGGPLLIANDPGLIRHVLVDNARNYKMARVRQKILRPILRDGLLTAEGEVWRRSRKAMAPVFTPRHISGFAGPMLQKAEAFAERYEQAIGGTVDVSRDMTMLTFDILSETLFSGEVAGDPGGFAHQVDRLFETMGRVDPLDLLGAPDWLPRITRILGRNSLAFFRNIVARTMEMRKEKLAGGDAEVPEDFLTLLLRAEGPQGLSRGEIEDNIITFIGAGHETTARALGWTLYCLANLPEERERIEAEIDSVLSSEPDPVKWLDAMPLTRAAFEEAMRLYPPAPSINREAIENDSYSDLKIAAGTQVLVMPWTVHRHRKLWDDPDAYRPSRFHPENREKINRFQYLPFGAGPRVCIGATFAMQEAVIALAVLMSRYRFDLLPETKPWPVQKLTTQPQGGLPMGVSRR

SEQ ID NO: 10644 - protein, 307 aa, Nanoarchaeum equitans Kin4-M
MKPVRDLNVNKNTTIEELIKQFSSIGGFQAQELYRGYEILKEMFDNAEYKILSFPADIIATGIRGIIKELIKRKMFDLVITTCGTLDHDLARLEKDYYLGYFEADDIELREKNIFRLGNIFIPEENYGLAIENILKKALPYIYNKKKELSTYEFVWLLGEYLENHPKKEESIIYWAYKNRIPIIIPGITDGAVGTQILLFRQEHRDFNVNVWLDEEFLLNQFFGDKNIGALMLGGGISKHHTIWWAQFSNGLKYAVYVTSAVELDGSLSGARTREAISWGKIDKKAKHVTIWGDVTIILPLLVGPFL

SEQ ID NO: 10645 - protein, 115 aa, Hordeum vulgare subsp. vulgare
MARAAATQLVLVAMVAAMLLVATDAAISCGQVSSALSPCISYARGNGAKPPVACCSGVKRLAGAAQSTADKQAACKCIKSAAGGLNAGKAAGIPSMCGVSVPYAISASVDCSKIR

SEQ ID NO: 10646 - protein, 429 aa, Raphanus sativus
DNSCTLSFLLVFFVLILFRSAFSINTLWSTESLTISNSRTLVSPGNVFELGFFRTTSSSRWYLGIWYKKVSERTYVWVANRDSPLSDSNGTLKITGNNLVILGHSNKSVWSTNLTRINERSPVVAELLANGNFVMRYFNKIGASGFLWQSFDFPTDTLLPEMKLGYDLKKGLNRFLTSWKNSDDPSSGEISYKLDTQRGMPEFYILKDGLRSHRSGPWNGIRFSGIPEDQKSSYMVYSFTENSEEVAYTFRMTNSSIYSRLKISSEGFLERWTTTLESIPWNLFWSAPVDLKCDVYKTCGPYSYCDLNTSPLCNCIQGFMPSNVQQRDLRDPSGGCIRRARLSCSGDGFTRMRNMKLPETTMAIVDRSIGVKECEKRCLSDCNCTAFANADIRNGGTGCVIWTGELEDIRTYLADGQDLYVRLAAADLV

SEQ ID NO: 10647 - protein, 323 aa, Xylella fastidiosa Temecula1
MTFQKHVAHTQPAKLATTPSPPGTATTPSLMSEDDDHRTITESQEKRRSWLERLSAAFSGDPHTLDDLMVILRSAEHHGIIATDTLRMMEGAIAIADLTVGDVMVPRSQMVSLPVESDLQTITKQMVESGHSRFPVHGENKDEVLGILLAKDLLRGVSANHTITNVHELLRPVGMIPESKKLNVLLKEFRLSHNHMAIVVDEYGGVAGLVTIEDILEQIVGDIDDEHDETEDQTNMIAIQADGCYIVDALTPIEDFNERFNAEFPDDDYDTIGGLVTEAIGHLPETGDELTIGRFAFRVAKANARRIHILHVTVLPPNEQNTA

SEQ ID NO: 10648 - protein, 426 aa, Raphanus sativus
NNSYTLSFLLAFFVFILFRLAFSINTLSSTESLTISSNRTLVSPGDVFELGFFRTNSRWYLGIWYKKLSERTYVWVANRDNPLSNSIGTLKISGNKLVILGHSNKSVWWTNITRGNESSPVVAELLANGNFVMRDSNNNSASGFLWQSFDYPTDTLLPEMKLGYDLRKGLNRFLASWRSSDDPSSGDFLYKLETGRIPEFYLSSGIFRLHRSGLWNGIRFSGIPEDQKLSYVVYNFTENREEVAYTFRMTNNNIYSRLTLSYSGYIERQTWNPSLGIWNVVWSFPLDSQCDVYRMCGPYSYCDVNTSPICNCIQGFNPSNVEQWDLKSWSGGCIRRTPLSCSRDGFNRMKNVKLPETTMAIVDRSIGVKECEKRCLSDCNCTAFANADIRNGGTGCVIWTGALEDIRTYFAEGQDLYVRLAAADLV

SEQ ID NO: 10649 - protein, 183 aa, Triticum aestivum
  misc_feature (147)..(147): Xaa can be any naturally occurring amino acid
MAVSELEVDGVVFPPLARPPGSEHAHFLAGAGVRGMEIGGNFIKFTAIGVYLQADAAVSALAAKWAGKPAADLASDAAFFRDVVTGEFEKFTRVTMILPLTGAQYSDKVTENCVAYWKATGVYTDAEAAAVHKFKEAFGPHSFAPGXASILFNHSPGGASSRSPSSKELVRGRESRAGLGHST

SEQ ID NO: 10650 - protein, 323 aa, Haemophilus influenzae Rd KW20
MTKPAKIGVLLANLGTPDSPTPKSISRYLWQFLTDPRVVDLPRCKWYPLLKAIILPLRSKRIAKNYQAIWTEQGSPLLAISRQQKDALQAYLDNQNIDTQVEIAMTYGNPSMQSAVKNLLKNQVERIIVLPLYPQYSSSTTGAVFDAFANALKEERGLLPFDFIHSYHIDENYINALADSIKVRLKSDEFLLFSYHGIPLRYEKMGDYYREHCKQTTIAVVNKLGLTENQWRMTFQSRFGREEWLQPYTDKFLESAAAQNIQKIAVICPGFSVDCLETIEEIDEENRENFLNNGGQSYQYIPALNVEHAHIEMMGKLILEKLT

SEQ ID NO: 10651 - protein, 427 aa, Raphanus sativus
DNSYTLSFLFVFYVLILLRPAFSINTLSSTESLTISSNRTLVSPGNVFELGFFRTTSSSRWYLGIWYKKLSERTYVWVANRDNPLSNSIGTLKISGNNLVLLGHSNKSVWSTNLTRGSERSTVVAELLANGNFVMRDSNNNDASEFLWQSFDFPTDTLLPEMKLGYDLKTGLNRFLTSWRSSDDPSSGDYSYKLDTQRGLPEFYLLQGDAREHRSGPWNGIGFNGIPEDQKWSYMYNFTENSEEVAYTFLMTNNSFYSRLTLSPSGYFQRLTLNPSTVDWNVFWSSPNHQCDMYRMCGPYSYCDVNTSPSCNCIQGFNPENVQQWALRISISGCIRRTRLSCSGDGFTRMKNMKLPETAMAVVDRSIGVKECKKRCLSNCNCTAFANADIRNGGTGCVIWTGRLDDMRNYVTDGQDLYVRLAAADLV

SEQ ID NO: 10652 - protein, 303 aa, Zea mays
MASSVAVSLRALAAAPLPKSSPATSCPFFVLLAPALPRRLLRLRSARRLPLAPLAASDSAFESSVGVNYAEPDDSEKDKEVELFGSGDDEGAGELVDDHSVEVSAAVEDEVEEEVGEYVEPPEEAKVYVGNLPYDVDSERLAQLFDQAGVVEVAEVIYNRETDQSRGFGFVTMSTVEEAEKAVEMFHRYDVNGRLLTVNKAAPRGSRVDRPPRQSGPSLRIYVGNLPWQVDDSRLVGLFSEHGKVVDARVVYDGETGGSRGFGFVTMASQDELDDAIAALDGQSWDGRAWRVNVAEEGPGGGF

SEQ ID NO: 10653 - protein, 589 aa, Saccharomyces cerevisiae
MLKDPSSKYKPFNAPKLSNRKWPDNRITRAPRWLSTDLRDGNQSLPDPMSVEQKKEYFHKLVNIGFKEIEVSFPSASQTDFDFTRYAVENAPDDVSIQCLVQSREHLIKRTVEALTGAKKATIHTYLATSDMFREIVFNMSREEAISKAVEATKLVRKLTKDDPSQQATRWSYEFSPECFSDTPGEFAVEICEAVKKAWEPTEENPIIFNLPATVEVASPNVYADQIEYFATHITEREKVCISTHCHNDRGCGVAATELGMLAGADRVEGCLFGNGERTGNVDLVTVAMNMYTQGVSPNLDFSDLTSVLDVVERCNKIPVSQRAPYGGDLVVCAFSGSHQDAIKKGFNLQNKKRAQGETQWRIPYLPLDPKDIGRDYEAVIRVNSQSGKGGAAWVILRSLGLDLPRNMQIEFSSAVQDHADSLGRELKSDEISKLFKEAYNYNDEQYQAISLVNYNVEKFGTERRVFTGQVKVGDQIVDIEGTGNGPISSLVDALSNLLNVRFAVANYTEHSLGSGSSTQAASYIHLSYRRNADNEKAYKWGVGVSEDVGDSSVRAIFATINNIIHSGDVSIPSLAEVEGKNAAASGSA

SEQ ID NO: 10654 - protein, 387 aa, Arabidopsis thaliana
MILKKVWGSVWNRSNSGKDLVNHQRAIDVPPLLLSSSSSLGAFDQLPMDILVQILMMMEPKDAVKLGLTCKAWKCVASGNRLWIFYLQCSQEPWDSIFFAETSLRSGYPLRMISSQSGELSFMHIYSQRAQVPGSIIIDGGSGYCKFGWSKYASPSGRSATFLEFGNIESPIYARLQQFFATIFTRMQVKPSMQPIVVSLPLCHFDDTESAKASRRQLKTAIFNVLFDMNVPAVCAVNQAVLALYAARRTSGIVVNIGFQVITILPILHGKVMRQVGVEVIGFGALKLTGFLKEKMQENNISFQSLYTVRTLKEKLCYVALDYKAELSKDTQASVEVSGEGWFTLSKERFQTGEILFQPRLAGIIVHKLVYEFHGFPYAYQGWAIFL

SEQ ID NO: 10655 - protein, 431 aa, Raphanus sativus
DNSYTSSFLLVFFVLVLVHPAISMYINTLSATESLTISSNRTLVSPGDVFELGFFRTTSSSRWYLGMWYKKFSERIYVWVANRDNPLSNSIGTLKISGNNLVLLDHSNKSVWSTNFTRGNERFPVVAELLANGNFVMRDSNNNDASGFLWQSFDYPTDTLLPEMKLGYDLKKGRNRLLTSWRNSDDPSSGDYSYKLEPRRLPEFYLLQGDVRAHRSGPWNGIEFSGIPEDQKLSYMVYNFTENSEEVAYTFRMTNSSFYSRLTISSEGYLERLTWAPSSAVWNVFWSSPNHQCDTYRICGPYSYCYVNTSPSCNCIQGFNPENVQQWALRISISGCKRRTRLSCSGDGDGFTRMKNMKLPETTMAIVDRSIGVKECKKRCLSNCNCTAFANADIRNGGTGCVIWTGQLDDMRNYVADGQDLYVRLAAADLV

SEQ ID NO: 10656 - protein, 309 aa, Aquifex aeolicus VF5
MKKGVILINLGGPDSLEAVEPFLYNLFSDPDIFSLPFQKVLAKIIAKLRAKKTRHYYELMGGKSPQYEQTLEQAKALQERLGEDYKVVVGMRYWKPYIKDALSELLKEGINEVILLPLYPQYSKTTTGSAFNEFERSKKALKADHIKVKKIEHFYDHPLYIKAWAEQIKQSVEKPEEYHFLFSAHSLPKKLIEEGDPYQEQTEKTVKLIMENFPEVEYTLAYQSKVGFGKWLEPSTDEVIRNLIKKEVKKLLVIPISFVSEHSETLYELDKQYRELAQELGYEEFVRVPTLRTNPYFISALEDLVKNEV

SEQ ID NO: 10657 - protein, 428 aa, Raphanus sativus
NNSYTLSFLLAFFVLILFRLAFSINILSSTESLTISSNRTLVSPGNVFQLGFFRTNSSSRWYLGIWYKKLSERTYVWVANRDNSLPNSIGTLKISNMNLVLLDYSNKPVWSTNLTRGNERSPVVAELLANGNFVMRHSNNNDASEFLWQSFDYPTDTLLPEMKLGYDLKTGLNRFLTSWRSSDDPSSGNFSYKLETRGLPEFYLSSENFPRHRSGPWNGIRFSGIPEDQKLSYMVYNFTENSEEVAYTFRMTNTSIYSRLTVTYLGEFQRLTWNPLIGIWNRFWSSPVDPQCDTYIMCGPYSYCDVNTSPICNCIQGFNPSNVQQWDLRVWAGGCIRRTQLSCSGDGFTRMKNMKLPETTMATVDRSIGVKECEKRCLSNCNCTAFANADIRNGGTGCVIWTGALEDIRTYFAEGQDLYVRLAAADLV

SEQ ID NO: 10658 - protein, 494 aa, Bacillus cereus G9241
MSQLAVNLHEKVEKFLQGTKKLYVNGFFIESASGKTFNTPNPATGETLAVVSEAGREDIHKAVVAARMAFDEGPWSRMSTAERSRLMYKLADLMEEHKEELAQLETLDNGKPIRETMAADIPLAIEHMRYYAGWATKIVGQTIPVSGDYFNYTRHEAVGVVGQIIPWNFPLLMAMWKMGAALATGCTIVLKPAEQTPLSALYLAELIEEAGFPKGVINIVPGFGESAGQALVNHPLVDKIAFTGSTPVGKQIMRQASETLKRVTLELGGKSPNIILPDADLSRAIPGALSGVMFNQGQVCSAGSRLFVPKKMYDNVMADLVLYSKKLNQGAGLSPETTIGPLVSEEQQKRVMGYIEKGIEEGAEVLCGGSNPFDQGYFVSPTVFADVNDEMTIAKEEIFGPVISAIPFNDIDEVIERANKSQFGLAAGVWTENVKTAHYVASKVRAGTVWVNCYNVFDAASPFGGFKQSGLGREMGSYALNNYTEVKSVWLNLN

SEQ ID NO: 10659 - protein, 252 aa, Brassica napus
  misc_feature (30)..(30): Xaa can be any naturally occurring amino acid
  misc_feature (68)..(68): Xaa can be any naturally occurring amino acid
  misc_feature (112)..(112): Xaa can be any naturally occurring amino acid
  misc_feature (128)..(128): Xaa can be any naturally occurring amino acid
MKFTVANPTTGCQKKLEIDDDQKLRAFYDXRRLLLQEVSGDALGEEFKGYVFKIMGGCDKQGFPMKLXVLTPGRVRLLLHRGTPCFRGHGRRTGERRRKSVRGCIVSQDLSXLNLVIVKKGEKDLPGXFTDTEKPRMRGPKRASKIRKLFNLGKDDDVRKYVNTYRRKFTNKKGKEVSKAPKIQRLVTPLTLQRKRARIADKKKRIAKANADAADYQKLLASRLKEQRDRRSESLAKKRSRLSSAAAKPVAA

SEQ ID NO: 10660 - protein, 1167 aa, Pyrobaculum aerophilum str. IM2
MTAVTRRGFLKLAALATSALSIGAEAQVPFKATKATWEIGEIGGKLDLPKATVTPVICPYCSVGCSIDLYVSGGRIVWSRGSADSPINWGALCPKGKAAFQLVENDLRVTKPLIRTGPKPPPEEILAAKSWDELIAVVRKYPPMWREATWDEALQLVANRLARILNEWRASTGSPKQKDGYYYVGRNVPIQIIGSSILVNEEAYLSKKLATYLGTSNMDSQYRKCHSSTVSSLAVTYGWGAETASIEDVALADVVLFWSSPAEAHPLSFAYFLKGKRERGTIFITFDPRYSRTAAASDLWVPFRPGTDTAILLYILHYAFFERNPPIDQLDEFQRLRSRWNITDDDLADLKELLKEYDADTVSNISGVPKDLLRTVASIYVENSGVVTNHEKHGIIQWAMGFTQHTNATINIIRAAAIVQLLLGNVGYPGGGTHPFRGHSNVQGANDVQGGGVDGLPGYHGFPASVFEIRLYQDWKLQGMPDAWNWSVPEWARASFSTTAPDAGKADLSKVLQVFKFYGWRRFELAWRMFCGTIPEDDPQNGVVVCDFPLGTGTTEVVFPRRALAGEIKAAFVFGENPAVTNPNAKIIMAGLAALDLLVVSDIFETETAWFADVLLPAASFAEKEGSRTNGNRVIQWSYRAVPPKGDSRPDYWIITKLYQYLRREGAVVLPSEVAGVKKEEVKFRKGGKLVFVYERPLRPDNSWDYSGGTGKSAPISPIEAEVNPRIIYKEINFTTLIYQGIYDPIRDEIITMKRIAQLRRPGQIDGTFSSKFEVYKDWGWSWPMNVRFLYNYDSLKAVLGVTDKVYAAGREWEVAGETGEWIDEYTGEYKPAFIPGHNFWVPRSFKRRLSGVADVYGGMDIMHFIKTGEVRILGKFIVEEGGEVKTLTYEEYVARTGMKYLWVNDSLYWDADTTSFKAALKRPFFSGGDWRSFKPVYQKMRDLLGQYYSQFGNLKDAVLKVISDMGGWYKGYSFQWPIHTEPVESPLPELAVRYPSLAWLNPYNLQVLQDQPDIVKGKNVGVALTPDDLKDIPGELVVITSNRLTEHFHGGSMSRNVPYLAELAPEPFVYLPRALAERLGVKSGDYVDVITLRGGLRMKAYVTDGEAYLTVNGKELPVVNVIWAFSFEGYVTGPQGNFLNPDVGDVVTTIQESKAWIGKIRKASLA

SEQ ID NO: 10661 - protein, 317 aa, Wolbachia endosymbiont of Dirofilaria immitis
  misc_feature (84)..(84): Xaa can be any naturally occurring amino acid
LCDKKIQLGIDLTKGLGAGALPDIGKGAAEESIKEIMEHIKDSHMLFITAGMGGGTGTGAAPVIAKAAREARTAVKDKMLREKXILTVGVVTKPFGFEGVRRMRIAELGLEELQKYVDTLIVIPNQNLFRIANEKTTFADAFKLADNVLHIGIRGVTDLMIMPGLINLDFADIGTVMSEMGKAMIGTGEAGGENRAINAAEAAMSNPLLDNVSMKGAQGILINITGSGDMTLFEVDAAANRVREEVDENANIIFGATFDQAMEGKVRVSILATGIDSSAIRDDRVETSSVSQTRALKEEKFKWPYSQTSVPETKTTE

SEQ ID NO: 10662 - protein, 514 aa, Yarrowia lipolytica CLIB122
MTIDSQYYKSRDKNDTAPKIAGIRYAPLSTPLLNRCETFSLVWHIFSIPTFLTIFMLCCAIPLLWPFVIAYVVYAVKDDSPSNGGVVKRYSPISRNFFIWKLFGRYFPITLHKTVDLEPTHTYYPLDVQEYHLIAERYWPQNKYLRAIISTIEYFLPAFMKRSLSINEQEQPAERDPLLSPVSPSSPGSQPDKWINHDSRYSRGESSGSNGHASGSELNGNGNNGTTNRRPLSSASAGSTASDSTLLNGSLNSYANQIIGENDPQLSPTKLKPTGRKYIFGYHPHGIIGMGAFGGIATEGAGWSKLFPGIPVSLMTLTNNFRVPLYREYLMSLGVASVSKKSCKALLKRNQSICIVVGGAQESLLARPGVMDLVLLKRKGFVRLGMEVGNVALVPIMAFGENDLYDQVSNDKSSKLYRFQQFVKNFLGFTLPLMHARGVFNYDVGLVPYRRPVNIVVGSPIDLPYLPHPTDEEVSEYHDRYIAELQRIYNEHKDEYFIDWTEEGKGAPEFRMIE

SEQ ID NO: 10663 - protein, 255 aa, Klebsiella sp. PAMU-1.2
MSELLIARHARVLQLTLNRPQARNALNNALLTQIADVLDAAALDPTVGVCVISGNQRFFAAGADLNEMAEKDLPATLDDIRPRLWARIDAFTKPLIASVNGYALGAGCELALLCDLIVAGDNARFGLPEITLGIMPGAGGTQRLIRSVGKALASRMILSGESIDARQALRAGLVSEVYPPALTDEYALALAATVARHSPLALRAAKQALRLSQEVSLQAGIQQERQLFTLLSATEDRREGIDAFLHKRTAEFKGR

SEQ ID NO: 10664 - protein, 336 aa, Clostridium thermocellum ATCC 27405
MAVKIGINGFGRIGRLVFRASLNNPNVEVVGINDPFIDLEYMQYMLKYDTVHGQFKGEISQDNGKLVVNGRKISVYGFTDPAEIPWSECGAEYIVESTGVFTTTEKASAHFKGGAKKVVISAPSADAPMFVMGVNHDKYTKDMNVVSNASCTTNCLAPLAKVIHENFGIVEGLMTTVHATTATQKTVDGPSKKDWRGGRAAAGNIIPSSTGAAKAVGKVIPELNGKLTGMAFRVPTLDVSVVDLTCRLEKPATYDEIKAAVKKASENELKGILGYTEDAVVSSDFIGDPRTSIFDAEAGISLNSNFVKLVAWYDNEWGYSNKVVDLIVHMASVDAK

SEQ ID NO: 10665 - protein, 520 aa, Methanopyrus kandleri AV19
MCGIACAVGDDDIAAMVTAMEHRGPDGRGFASVSDDGVEFSEEPPSEGEVVLGHVRLWVRGEASAVQPIVEEDRAVAVNGEIYNYRRFVEDAPSDSWAVFEVVRSVRDAAAALRVLRGEYAFVAAFRDGTVVAARDPIGVRPLYYCVEAGLAVASERKALWAAGFRDVRRVPPGALLVLRDGRVELRNVVDVPRSRPGRSSWKDLLEVLQRSVRERVEETERVGVVLSGGVDSSTVAKLASEYVDVKCYAAGFEGSDDVEVAERLCDEMGWPFVSVSLEDEFERYVVATVYAVETWNPMKVEVGIPILACAGAMSDDGIRVMLSGQGADELLGGYHRHLRHYGDWDRFSWELWKDVAAIHAVNLERDDKAGMHHSVELRVPYLDLDVVRTGLGIDPRENVSGPEDNLRKRALRRVAAELGLPDFVVERRKRATQYGSLTSKMLDKLVRELGIKRAVAKRLGYRSHKELFLRLVGKYLGFPWEAPSVEEVERECARLGVEPEISEFLEERVLTFDSDLRAG

SEQ ID NO: 10666 - protein, 1000 aa, Magnaporthe grisea 70-15
MASIGGEDSVATSNGVEGHSPTQNGVKSSPEATIKGSTDPATEADADIDKLSSNHAQNSDAFSSNKLITTEPTITTTDETEMKAEEQDDKSKSEAEDSKVPAANGTSAKSGDDDVKDESKSAKEEDEVKPAAQSATNENPKPDESIEDAEESKDAEMSEAPPSALDAKTEASGAASPKSDTKPASPKATKESEESSATKTNEVNGAEDKVDSESKPTSTDSSLNPPSMSNLAIDASQDASVAENQDTSMAEAPSQTNKVAREREDDTSEEPAAKRAKTESRSTELDAETTTTKKVSDTKPKTDSPKSSAVATDDKSETEAAEVDAAPFAPEPMDVDPEGWEESAQKLVPKPIRALPGSIMHPTSYDKPISEFANREIRRALGSVKKTKAGGNFKDSVAKLWPVLAESYNSKVKKPMDIGLMERNLRTGVYKTIGEFKADLDLLVLNSYYFNGAMHDVTKSAISLLESVLYKLVDTPLDELNKPSSSQSKSASSTRHAEPRAATQPKPKPAPAPAKPPPPPAPIEKVVQSPIHAAPAARRDSKDDDRPKRPIHPPKKELGYDGKGSKKKKLSPDLKYCDDILKDLAKPKSHGIAWIFAKPVDETRDGAPGYYSIIKKPMDLGTMTVKLQEGKYRSAADFKADFDLMLNNCFTFNPAGTDVHALARNLEAYFQDKWAGIDAYVAKHASRAPARRTSASSPSAGIKDESEDEGPASEPEPEVPAAHLDQIRELKKKIDAVDASITKHKEQYTEEVANSADPSDTSKLDILMSIIQMLNKDLGDKKKKLAELEASTPASKPKPAAKAKKAAAAGNALPNKKAAGGNKKASGAGGKKSSKRVMSTIEKEAIANGINELDGTYLEQAVAVIKKDTNQEENGDGELELEIEQLSIDALNKLYDLMCSGIKGFRSNVESMVRSAQATAPPPAQAPPAIAGRGQKPKKNKPMGKGEQERKLEHLEKLKAQYTANKGRQGSGSQEPPGANELASQEPADEEDSDVSSEEE

SEQ ID NO: 10667 - protein, 296 aa, delta proteobacterium MLMS-1
MADNVYDCIIIGAGPGGLQAAIHLARYNRRVILIDRGGGRTRHALHIENYLGLARISGKELVETGIRQIQSFGVAFRREQVVSLEVAPGFTVVTEQARYRAPYVIVSAGATERPPPIKRMNRFFGRTIFTCVDCDGYHTTGRKLAILGDSLAAVRLALAMRQMFTPEITLVLPPDLLPPDHAELLSEDGIAFLAGLPAEFLGDPELTGVKLQDGREVACEVVMLSYDFQLNDTFLAGLGLERESDGGKLSSNHFCETSVRNFFVLGALKGGKAQAIIAAGQGAMVGIEINNRLLEL

SEQ ID NO: 10668 - protein, 387 aa, Glycine max
  misc_feature (65)..(65): Xaa can be any naturally occurring amino acid
  misc_feature (103)..(103): Xaa can be any naturally occurring amino acid
MNALAATNRNFKLASRLLGLDSKLEKSLLIPFREIKVECTIPKDDGTLQSYVGFRVQHDNARGPXMKGGIRYHPEVDPDEVNALAQLMTWKTAVANIPYGGAXGGIGCDPAELSISELERLTRVFTQKIHDLIGTHTDVPAPDMGTGPQDLGGSLGRDAATGRGVLFATEALLNEYGKSVSGQRFVIQGFGNVGSWAAQLISNKGGKVVAVSDITGAIKNSNGLDIPSLLEHSKVHRGVKGFNGSDPIDPNSILVEDCDVLVPAALGGVINRENANEIKAKFIVEAANHPTDPEADEILKKKGVVILPDIFANSGGVTVSYFEWVQNIQGFMWDEEKVNNELKTYMTKGFIDVKEMCKTHECDLRMGAFTLAVNRVARATVLRGWEA

SEQ ID NO: 10669 - protein, 469 aa, Bacillus cereus G9241
MYINGEWITLQEQIEVNNPATKEIFATVPKGGVTEAKQAVDAAHEAFKSWSKLTAADRAVKLKKWFTLIDENKEEIAAIMTREQGKPFAEALGEVNYANSFVEWYAEEGKRVYGEMIPASHPNKRILVMKQPVGVMAAITPWNFPAAMITRKVAPALAAGCTAVVKPASQTPLTALKLAELAHEADIPKGVINIVTGSAKAIADKWMEDGRVRKVSFTGSTEIGKELMASAAQTMKKVSLELGGHAPFIVMNDADLDKAVEAVIGSKFRNAGQTCICTNRVFVQEEVYEAFVEKFQKAVGQLKVGDGFGDGTTVGPLIDENAVSKVQEHIEDAIQKGGTVLYGGQKVAELDGHFIQPTVIGLANDTMLCMNEETFGPVAPVAKFKTVDEVIERANHTPYGLAAYIFTKDISQAFQISEALEYGIIGLNDGLPSVAQAPFGGFKESGIGREGGHFGIEEYLEIKYISLGL

SEQ ID NO: 10670 - protein, 94 aa, Brassica napus
MSSSRRSRQASSSSRISDDQITDLISKLRQSIPEIRQNRRSSTVSASKVLQETCNYIRNLNKEADDLSDRLSQLLETIDPNSPQAAIIRSLINE

SEQ ID NO: 10671 - protein, 304 aa, Xanthomonas campestris pv. campestris str. ATCC 33913
MTTLRIATRKSPLALWQSEHVATALRQHHPGLEVVLVPMSTRGDEVLDRSLAAIGGKGLFLKELELAMLRGEADCAVHSLKDVPMELDAPFVLPAILERGDPADALVSNLYATLQALPLGARVGTSSLRRQAQLRAARPDLELIDLRGNVNTRLAKLDNGGYDAIVLACAGLQRLGLEARITARLDAPEWLPAPAQGAVAVECRGDDARIHDLLAVLDAGRTRACVEAERAMNRALHGSCHVPVAAFARWEGEDLFLQGMVGSASDGRLIHAEAHGSPDATEDLGRLVADGLFEKGAAQLLAEL

SEQ ID NO: 10672 - protein, 292 aa, Campylobacter lari RM2100
MGGVNKLDECEVFLKNMFNDPYILGIKNVFLRKFVAFMIRKSRLKTMKQNYEKMGGKSPLTQITQSLCDKLNSKTREYSFDFISLYVPPFANEVFSKYDFQKNDEIILFPLYPHHSKTTVTSSLEVVQNELRNIQNQANVKIIDVFYKDELYNEMIIKHILEKKKECDYKILIFSAHSLPLSVIKKGDLYEKHVQEHVGVLKEKLKNEFEQIILSYQSKLGPVKWLEPNTSDILKNLDQKALIYPISFCIDCSETIFELGVEYRHLAKSDYELITCPNDSDEFIEFILNCLV

SEQ ID NO: 10673 - protein, 425 aa, Kluyveromyces lactis NRRL Y-1140
MKNRNYDMQFYKMYQYRLNVLRNRVESCCQSKWNSEFRLQGRKVVKKSKVLDIQAGEPCWCIGTVYCEMQYKPNILQEIVDDTYGAPDLIKSYTDPEGTDEIMLDDESGRVILVGELVRKTPFVSGTVVGILGMEADAGTFQVLDICYPQALPQKSLPPLPGKKIALISGINATPRSPILSLRMQLLQDALTGELSTNSGLNEVSRCIILGNSLNPGENRQDLPGSLREFTPFLSNILKSLPVDLLPGENDPSDRSLPQQPLHKALFDDALSPYFDLENADIFHSVSNPYWFDIEGLQLLATSGQQINDITKYVIPFYEETKSLKGDTIDHRLDLAEATLKWQNIAPTAPDTLWCYPYSDNDPFILKEWPHVYIIGNQPEFGYRKTQLEGAVEVLIVSVPEFSTTGQYLVLDLDSLVPEVHTIAV

SEQ ID NO: 10674 - protein, 428 aa, Raphanus sativus
DNSYTLSFSLVFFVFILFRPAFSINTLSSTESLTISSNRTLVSPGDVFELGFFTPGSSSRWYLGIWYKKLSDRTYVWVANRDNPLPNSIGTLKISNMNFVLLGDSNKSVWSTNLIRGNERSPVVAELLANGNFVMRDTNNNDASGFLWQSFDFPTDTLLPEMKLGYDLKTGLNRFLTSWRSSDDPSSGEFSYKLELLKIPEFYLSSGYFPVHRVGPWNGIRFSGIPEDQKLSYMVYNFTENSEEVAYTFLMTNNSIYSRLTISSSGYFERLTWTPSSGMWNVFWSSPVDLQCDVYKICGPYSYCDVNTSPVCNCIQGFDPWNVQQWDLRAWSGGCIRRTRLSCSRDGFTRIKNMKLPETTMATVNRSIGVKECEKRCLSDCNCTAFANADIRNGGTGCVIWTGRLNDMRNYAADGQDLYVRLAAADLV

SEQ ID NO: 10675 - protein, 793 aa, Geobacter sulfurreducens PCA
MATCVTVLILAFAGFVVRDLTMEPPELLRRLEIIAGVVGDKSMTSIVFNDVRAASEMLDVLKTDPHIIVGRIYLKDGSIFAHYRRKGSLASPAANSSADDATTWIEYRQQMVEKMGDSLPSHHWHGDHLDMFRPIILDGEVIGTVYLRGDYREIYSRLRWYAVSGGVLLLMLSAFAYVLSSKLQRRVSAPIAELLEVTRRVAEEHNYSVRAAGGGVDEIGELVSGFNRMLQIIEESDANLKRNREDLGEEVARRTEDLSRTNEELERAVADLSKAKEAADSASQSKSRFLANVSHEIRTPMNGVLGMVSLLLETDLQAKQREYAEIIRSSGELLMQVINDLLDFSRIESGKLKMEQLPFAARRVIEEMATIYGERARQKGVFLEYSMAGEVPDRLLGDRHRLRQVLGNLLDNAVKFTLKGTITLTVRGSVEGGVCRLSCIVSDTGIGIPQDMLPRLFHPFTQADDSNTRRFGGTGLGLAIVRHLVELMGGTVSCDSEPGCGSVFRFTVALSVVPDTGEPEPEPSHEAAGSFPSRLLLAEDNAVNRMVLQEMLRSLGADVMVVSDGAEAVAAVSAERFDMVFMDCQMTGMNGIVATAEIRRMERTGQLTGRTHIIALTGRVEVGDREACLAAGMDDYLIKPVMRHDLVMVLRRWLSPHDETMPSAAYDKAPGGVSEEAECLLDRDILDGIRALEAGGSEGLLDRVIDIFISDSPRHLRDMREALARENLPAARRAAHTLKSGCLNLGAVALAALCGEMERLGEGEDVLPLRLLSRMESEFIRVCAALERERTGV

SEQ ID NO: 10676 - protein, 95 aa, Triticum aestivum
  misc_feature (66)..(66): Xaa can be any naturally occurring amino acid
  misc_feature (81)..(81): Xaa can be any naturally occurring amino acid
  misc_feature (88)..(88): Xaa can be any naturally occurring amino acid
MTKRTKKAGIVGKYGTRYGASLRKQIKKMEVSQHSKYFCEFCGKFAVKRKAVGIWGCKDCGKVKAXGGAYTMNTASAVTVXRSTIRRXLREQTEA

SEQ ID NO: 10677 - protein, 240 aa, Burkholderia mallei ATCC 23344
MSFPLPSKSAPADAFSDFPLLDAEPVPPRIAAALAALREGRAVVLQDDHDRENEADLIVAAERLTDETMALLIRECSGIVCLCLTDEKVRALELPPMAQLNESKNGTAFTVSIEARAGVTTGVSAADRVTTIRAAIADNASPHDIVRPGHVFPLRAAPGGVLARRGHTEGTVDLAILAGLKPAGVLCELMNPDGTMARGADVERFAAQHGLPMLTIAELVAFRERLASLRARDACCADLA

SEQ ID NO: 10678 - protein, 429 aa, Raphanus sativus
DKSYTLSFLLVFFVLILFGPAHSINTLSSTESLTISSNRTLLSPGNVFELGFFKPGSSSRWYLGIWYKKLPDRTYVWVANRDDPLSNSIGTLKISNMNLVLLDHSNKSVWSTNLTRGNERSPVVAELLANGNFVTRYSNNNDASEFLWQSFDFPTDTLLPEMKLGYDLKKGLNRFLTSWKNSDDPSSGEISYQLDIQRGIPEFFLLKDGFRGYRNGPWNGVRFNGIPEDQNLSYMVYNFTDNSEEVAYTFLITDKNIYSRLIISNDEYLARLTLTPASWDWNLFWTSPEEPECDVYMTCGPYAYCDVNTSPVCNCIQGFKPLNVQQWDLRDGSGGCIRRTELSCSGDGFIRMKNMKLPDTTMATVDRSIGVKECEKRCLSDCNCTAFANADVRNGGTGCVIWTGKLDDIRNYFEDGQDLYVRLAAADLV

SEQ ID NO: 10679 - protein, 602 aa, Zea mays
  misc_feature (177)..(177): Xaa can be any naturally occurring amino acid
MASISGAAAPPSSAVCRLRLRRHLLLRPSHLRLRAPHSIADLSRSSNSAPSPARPALGSGPENGSGGVRAVEKDPIKLWERYVEWLYQHKELGIFVDVSRMGFTEEFLRQMEPRMQQAFVDMRELEKGAIANPDEGRMVGHYWLRDPALAPNSFLRNKIETALDRILAFSQDVVSGXGIGGSALGPQFVAEALAPDNPPLKIRFIDNTDPAGIDHQIAQLGPELATTLVIVISKSGGTPETRNGLLEVQKAFRDAGLQFSKQGVAITQENSLLDNTARIEGWLARFPMFDWVGGRTSEMSAVGLLPAALQGIDIKEMLVGAALMDEETRNTVVKANPAALLALCWYWASEGIGKKDMVVLPYKDSLLLLSRYLQQLVMESLGKEFDLDGNRVNQGLTVYGNKGSTDQHAYIQQLREGVQNFFVTFIEVLRDRPAGHDWELEPGVTCGDYLFGMLQGTRSALYANDRESISVTVQEVTPRAVGALIALYERAVGIYASLVNINAYHQPGVEAGKKAAGEVLALQKRVLTVLKEAICENPTEPLTLDEIADRCHCPEDIEMIYKIIQHMAANDRALIAEGSCGSPRSVKVYLGECSVDEDMQAA

SEQ ID NO: 10680 - protein, 518 aa, Zea mays
MAARFLLVVAVALLLRPGDASVHEYRGLSFANKGNAFILHAGSEGLYAASHANTTAEDDEDTAAVAEAFIRFDKITFRRSEDTNNSVKETSSAKVQVLVFEVEDREMIGGSAYGGQKAICCSSDLAKLGACTEGSVIYRPSQVNPGWPKLFVASFEGSDLIATLPSRTIQITKTGMYNMYFIHCDPSLASLEIEGKTIWKNPTGYLPGRMAPLKNFFGLMSFAFVVLGIYWFYQYMKSWKEVLPLQNCITLVITLGMLEMALWYFEYAEFNETGVRPKGITFWAVTFGTVKRTAAEVIVLIVSMGYGVVAPTLGGLTSKVVMLGGTFFLATEILELVENLGAVNDLSGKARLFLVYPVAILDAAFVVWIFISLAKTIGKLQARRLMAKLDIYRKFATALIVSVLVSVGWIGYEIYSKSTDVFNERWQHAWIIPAFWHVLSFLLLCVICYLWAPSQNSMRFSYDASEFFDRKDNISLIRPAPSASKNGWNLSSTPEPKATKDVNTVADFEGDDEENKRE

SEQ ID NO: 10681 - protein, 436 aa, Raphanus sativus
MTCLRKTYVNSYTLSFLLVFFVLILFRPAFSINTLSSTESLTISSNRTLVSRGDVFELGFFRTNSSSSWYLGIWYKKLPDRTYVWVANRDNPLSSSIGTLKISNMNLVLLDHSNKSVWSTNVTRGNERSPVVAELLANGNFVMRNSNNNEACQFLWQSFDYPTDTLLPEMKLGYDLKTGLNRFLTSWRSSDDPASGDYSYELELRKFPEFYIFDTDTQVHRSGPWNGIKFSGIPEDQKLSYMVYNFTQNSEEVAYTFLMTNNSFYSRLRMSTSGYFQRLTWTPSSVVWNLFWSSPVNLQCDVYRVCGPNAYCDVNTSPVCNCIQGFMPFNVHQWDLGDGLGGCIRRTRLSCSGDGFTRMKNMKLPETTMATVDPSIGVKECEKRCLSDCNCTAFANADIRNGGTGCVIWTGRLDDMRNYVADGQDLYVRLAAADLV

SEQ ID NO: 10682 - protein, 140 aa, Zea mays
RSIPFHPIFLLAYGFFHRGIVPGLCFGAGLGITLFGMAYMFVHDGLVHRRFPVGPIADVPYFRRVAASHKIHHMDKFGGVPYGLFLGPKELEEVGGLDELVSSPVSEATDTEDAGEEKTRPVVCVVRTSVFMGQSVPNEF

SEQ ID NO: 10683 - protein, 414 aa, Thermus thermophilus HB27
MRLDTRFLSGFPEALSRHGPLLEEARRRLLAKRGEPGSMLGWMDLPEDTETLREVRRYREANPWVEDFVLIGIGGSALGPKALEAAFNESGVRFHYLDHVEPEPTLRLLRTLDPRKTLVNAVSKSGSTAETLAGLAVFLKWLKAHLGEDWRRHLVVTTDPKEGPLRAFAEREGLKAFAIPKEVGGRFSALSPVGLLPLAFAGADLDALLMGARKANETALAPLEESLPLKTALLLHLHRHLPVHVFMVYSERLSHLPSWFVQLHDESLGKVDRQGQRVGTTAVPALGPKDQHAQVQLFREGPLDKLLALVIPEAPLEDVEIPEVGGLEAASYLFGKTLFQLLKAEAEATYEALAEAGQRVYALFLPEVSPYAVGWLMQHLMWQTAFLGELWEVNAFDQPGVELGKVLTRKRLAG

SEQ ID NO: 10684 - protein, 417 aa, Orychophragmus violaceus
YHHSFTFFLLVIFVLFRHVISINTLSPNEALTISSNQTIASPNDVFELGFFKTTSSRDGTDRWYLGIWYKTTSKRTYLWIANRDNPLYNPNGTLKFSHANLVLLTYFDIPVWSTNLTTTFKSPVVAELLDNGNFVLKDSKTKDSNRFLWQSFDFPVDTLLPEMKIGRNLKTGNDRYLTSWKSPTDPSSGDHSFKLETKGLPEFYLWQEDFIKYRSGPWNGIQFNGIPAMQNWSHIINSLIENREEVVYTFQDLNQNIHSRFRISSGGSLQVITWTSTVPQRNMFWSLVEDECDIYNRCGPYAYCDMNTRPTCNCISGFLPKNATAWASGDMSYGCVRKTLLSCGKGDRFLKLRQMKLPETSGAIVDKRIGLKECEERCVRDCNCTGFANTDVWNGGSGCVIWTGEAGELIDMRNNVV

SEQ ID NO: 10685 - protein, 386 aa, Ralstonia eutropha JMP134
MEMMRDAVQFEPADSRVTRPSFWSSLPERWTSDVEETLVCCHVRQETHDVKSFFFHSPDGRAFVFEPGQFITLELEIEGETINRCYTISSSPARPHTLSITVKRVPGGKVSNWLHDNVRPGTPIRVLGPAGEFTCARHPARKYLFLSAGSGITPLMSMSRAHHDLGEDRDIVFVHSARTPDDIIFSRELDLIASNHANFRTSFVCESVGARTSWPGVTGFLSLPLLKLIAPDFMEREIFTCGPAPYMKAVRDLLDEGGFDRRRYHEESFSFETLTADGPADAPAPDTGVASAPHGIADMAAFSVSFAKSRREIVCSSGQHVLEAARQSGVRLPASCTQGMCGTCKVKLVSGQVEMKHNGGIRQREIDQGMVLLCCSKPLSDLVIDK

SEQ ID NO: 10686 - protein, 610 aa, Pasteurella multocida subsp. multocida str. Pm70
MTETTMTFNDLGLPEFLLNAVSDLGFETPSPIQQSCIPNLLNGHDVLGMAQTGSGKTAAFSLPLLAQIDLDKKYPQMLVMAPTRELAIQVADACEHFCKYAKNTNIVTLYGGQRYDIQLRALRQGAQVVVGTPGRILDHIRRGTLDLSNLRFMVLDEADEMLRMGFIDDVETVMAELPEQHQTALFSATMPDPIRRITKRFMKDPKEIKIKSTQTTNPDITQSCWYVHGFRKNDALLRFLEVEKFDAAIIFTRTKTGTLDVTELLEKHGFRAAALNGDMTQQLREQTLDRLRNGSLDILVATDVAARGLDVERISLVVNYDIPLDAESYVHRIGRTGRAGRTGRALLFVEPRERRLLRNIEQLTKKPITEVEVPNHEVLQACRREKFKAKITVQLEHHDLGLYRSLLEDMFTADQDQEDIAAAMLMLLQGKQKLILPADPIIDRKTSRGDRGERRERGGRENPRSAERRGYGTPQAMDLYRIEVGRLDGAEVRHIVGAIANEGDINSRYIGHIKLYDDYTTIELPQGMPKELLGVFAKTRVMNKQMQMSFVGASNAGSSRDRDDFADRRGGKRKGRGDEPRFGREDRKFKEKSQRTFNDRPRRERRERQK

SEQ ID NO: 10687 - protein, 257 aa, Thermococcus kodakarensis KOD1
MKKIFVKPRELVVPGTLLAQGPFKNGRGTFREGNAIYSTVIGLVEIRGNVIRVIPLEGPYIPEVGDNVLGKIVDVKFSSWTVDIGAPYQASLRVQDAVEERIDLLKTDLRKIFDIGDIIYAKVKAFNEVNQIDLTTKGMPFKGGPLRGGQLVTITPSKVPRLIGKGGSMINMIKTLTGTRIIVGQNGWVWVSGKNDELERLAIEAILKVDRESHTQGLTDRVKEFLLSRLRELKEQGVIEEIPEVNGEEGGEDDGQA

SEQ ID NO: 10688 - protein, 410 aa, Erysimum cheiri
YYHSFTFFFFFVVLVLFPHVFSINTLSSTETLTISSNQTIVSPGNVFELGFFKITGDRWYLGIWYKAISERTYVWVANRDSPLPSSSGTLKISYANLVLLDHSDTPVWSTNVTKPVKSPVVAELLDNGNFVLRDSESNDRNRFLWQSFDFPADTLLPEMKIGRNLKTGHESFLRSWRSPYDPSSGDFSFKLQIHGLPEFYLYEKDFILYRTGPWNGVGFSGIPTMQNWSYFHFVNNFIENREEVAYSFKVTNKTLPSRFTMSSEGSLQMLAMSTTSEWNLFGVLPIEECDLYQICGSYSYCDMKTSPVCNCIKGFYPKNVTAWALGETFDGCVRKSRLSCRGDGFLLMKRMKLPDTSTSIVDKRIGLNECKERCSKDCNCTGFANKDIRNGGSGCVIWTGELRDMRNYVT

SEQ ID NO: 10689 - protein, 423 aa, Arabidopsis thaliana
MERLTSPPRLMIVSDLDETMVDHHKDPENLALLRFNSLWEDAYRHDSLLVFSTGRAQTMYKKLRKEKPLLTPDVIITSVGTEIAYGNSMVPDDNWVEILNKKWDRGIVQEETSKFPELTLQGETEQRPHKLSFNIDKSKVKAVTKELSPRLEKRGVDVKFIFSGGNAFDVLAKGGGKGQALAYLLKKLKTEGKLPINTLACGDSGNDTELFTIPNVYGVMVSNAQEELLEWYAENAKDNANIIHASERCAGGITQAIGHFKLGPNLSPRDVSDFLECKADNVNPGHEVVKFFLFYERWRRGEVENCTTYTSSLKASCHPSGVFVHPSGAEKSLRDTIDELGKYYGDKKGKKFRVWTDQVLATDTTPGTWIVKLDKWEQTGDERKCCTTTVKFTSKEGEGFVWEHVQQIWSEETEIKDDSNWII

SEQ ID NO: 10690 - protein, 226 aa, Arabidopsis thaliana
MNNLVEASEYDFGEESDLFKAPEPIIEEPMLAVDPLSQELVELGDLGSLQSDQQLIDKAFYDCEQDLLVKSAMESPLSEVLDIKNISLVAKMDNDVKSTSVVVSDVPIPKSVSSGNLSSMDMVEHKDAVIQGFPDFPPVDYGMRRAFSESDIQTLGTGNTGLVQSQLDRIIISCTSEDRREKLSRYRNKKSKRNFGRKIKYACRKALADSQPRIRGRFAKTEEMQK

SEQ ID NO: 10691 - protein, 129 aa, Triticum aestivum
  misc_feature (69)..(69): Xaa can be any naturally occurring amino acid
LRYIPELPHATDERGQVANLLDVHDYVPESLDSVAEFEAPPSPEHSYDLQYPGDEEFAKEPPTLPPQLXMSVLGDTDNTDNQASKPQHVVLNHLFIEKGWGSQSLLALGVTHRFESKYVSFVLYKPLKR

SEQ ID NO: 10692 - protein, 435 aa, Thermotoga maritima MSB8
MRKRVFSLLLVLAFLSVGFAQDGVTDVGWSLDMVWILISAALVFFMQAGFAMVESGFTRAKNTVNVLMKNLMDFAIGSVVFFIFGYWIMFGKHPLTFDPSTKEGLWDFAMWMFQMAFAGTAATIVSGAMAERTKFPAYLAYTGFITGIIYSVVGRWIWGGGWLAQKGFIDFAGSTVVHSVGGWAAMIGASLLGPRFGKYDSQGNPKPIPGHNIPLAALGTFILWFGWFGFNGGSTLAGTNGAIGMIILNTNLAAATGALAAMVTVWAKYGKPDASMTMNGALAGLVAITAPCAVVSPVSSLIIGAIGGVIVVFAVEFFDKVLKIDDPVGAISVHGVNGAWGTLAVGLFAESKYALASGMGDVNGLFFGGGVHQLGVQFLGVVSVFAWTVVTSFLVFWFIKKTIGLRVDRDIELKGLDIEEHGMEGYADFEIFTTR

SEQ ID NO: 10693 - protein, 113 aa, Thermotoga maritima MSB8
MKLIIAVIQPHKLPDVKKALFDAQVYKMTVMNVLGCGQQKGYTETYRGEVEEVNLLKKVMLLIAVNEEFVEPTIEAIQKGARTGNIGDGKIFVLDLLDCIRIRTGERGREAIG

SEQ ID NO: 10694 - protein, 540 aa, Frankia sp. EAN1pec
MGVARGEAGWDFFISYTAVDTAWAEWIAWQLEDAGYRVLIQAWDSVPGSNWAVRIQQGTTESDRTIAVLSASYLRSVYGQNEWHAAHAADPGGFARTLLPIRVEDCPRPGLLGQIVSIDLFGHPADVARQHLLDAISTARAGRAKPTAAPAFPPRPALPPQQPSARTAPPFPGPDPTASLDQPALRTHARSDRLLHGPQRRVSLAVVLLVITGTVFLASSARDRNPSATSAHSAAPPTSAPTPSLSGSPLRDHTDSVRSVAFSRDGRTLASASQDGTARLWDIAERTSQPLTGRIAVWSVAFSPDKHTLASANGDSTVQLWDVAEGTLPHPVASLPGHSDAVGSVAFSPDGRTLASASDDHTVRLWDVATGTTTHTLTDHTGPVNSVAFSRDGRTLASASDDHTVRLWDVAEGTLLRTLPGHTEPVMSVAFSPDRRTLASASQDNTVRLWDVAARTAPRLVGSLSDHTHWVMSVAFSPDGRILASASQDRTVRLWDVAARTTTHTLTGHTGPVFSVAFSLDGRTLASASDDNTVRLWDMS

SEQ ID NO: 10695 - protein, 471 aa, Escherichia coli
TTHLVWFRQDLRLHDNLALAAACRNSSARVLALYIATPRQWATHNMSPRQAELINAQLNGLQIALAEKGIPLLFREVDDFVASVEIVKQVCAENSVTHLFYNYQYEVNERARDVEVERALRNVVCEGFDDSVILPPGAVMTGNHEMYKVFTPFKNAWLKRLREGMPECVAAPKVRSSGSIEPSPSITLNYPRQSFDTAHFPVEEKAAIAQLRQFCQNGAGEYEQQRDFPAVEGTSRLSASLATGGLSPRQCLHRLLAEQPQALDGGAGSVWLNELIWREFYRHLITYHPSLCKHRPFIAWTDRVQWQSNPAHLQAWQEGKTGYPIVDAAMRQLNSTGWMHNRLRMITASFLVKDLLIDWREGERYFMSQLIDGDLAANNGGWQWAASTGTDAAPYFRIFNPTTQGEKFDHEGEFIRQWLPELRDVPGKVVHEPWKWAQKAGVTLDYPQPIVEHKEARVQTLAAYEAARKGK

SEQ ID NO: 10696 - protein, 395 aa, Yarrowia lipolytica CLIB122
MADGLTDIDSSQITTNYDEVVTSFDDLGLKDELLRGIYGYGFENPSSIQQRAILPVIKGNDVLAQAQSGTGKTATFSISALQNIDEKIKKPQALIIAPTRELAHQIQKVVLAFGEYMKIECHACIGGTSVAEDIRVIQEGVHVIVGTPGRIHDMIERRILKTDLIKMFILDEADEMLSREFKDPIYDIFTTLPETTQTVLLSATMPAEVLDITGKFMRDPVRILVKKDELTLEGIKQFYIDVEQESYKFEVLCDLYETINVSQAVIFCNTRRKVDYLTQALTEADFTVSSMHGETEQSQRDVIMKAFRTGSSRILITTDLLARGIDVQQVSLVINFDLPSNRENYIHRIGRGGRFGRKGVAINFVTSEDHGMLKELERFYSTEIVEMPTNIADLI

SEQ ID NO: 10697 - protein, 917 aa, Neisseria gonorrhoeae FA 1090
MRHLRYIYSIYGNERKIMQLHILNNPKDAALAADAEFLKQSLFNLLHEEASPLVVETVKLLSTSDDSAALIEKVLPQLDERQTYDLTLACGLFAQILNIAEDVHHERRRQIHEDAGHNAAEGSLTETVRRLKAGKADGKSVQRQLDNTSVTAVLTAHPTEVQRQTVLNFNRRIRALLPQRERCTNADALARLRREIDTVLLGLWQTSETRRHKLSVNDEINNGVSIFPMSFFEALPKLYRKMEHDFQTAYPDVRVPNILKIGGWIGGDRDGNPFVSGETLRFAFRRHADAVFRFYRSELDKLYRELPLSIRRVKVNDDVMALAALSPDEEIARTEEPYRRAIAYIMARAMGKARSLGLGMGCKFGFLEPYASAQKFLDDLKKLQRSLIDNGSRLLAEGRLADLIRSVSVFGFHMMPLDLRQHAGKHADVVAELFQHAGLEDYNSLNEEQKQAALLRELGHQRPLYSPFITYSDHTRRELAIFNEARKIKDEFGEDAVTQSIISNCEQPGDLLALALLLKESGLLAVENGKPHSRINIVPLFETIEALENACPVMETMFRLDWYDALLESRGNIQEIMLGYSDSNKDGGYVTSSWCLHQAELGLVELFKKYDVRMRLFHGRGGSVGRGGGPSYQAILAQPAGSVAGQIRITEQGEVITAKYADPGNAQRNLETLVAATLEASILPDKKDPDAKLMQALSDVSFKYYRELITHPDFIDYFLQTSPIQEIATLNLGSRPASRKTLARIQDLRAIPWVFSWMQNRLMLPAWYGFGSAVETLCEGSPETLAALRGHAQNNPFFQAMLSNMEQVMAKTDITLAENYAGLSESPEKAKVIFGMIKEEYRRSRKALLDLLQTEELLRDNRSLARSLALRIPYLNALNGLQVAMLKRLRKEPDNPHALLMVHLTINGVAQGLRNTG

SEQ ID NO: 10698 - protein, 403 aa, Xanthomonas axonopodis pv. citri str. 306
MAPNAVIKVVGVGGGGGNAVAHMVNTNVDGVEFITANTDSQAIKNCGAKLQLQLGTNVTKGLGAGANPEVGRQAALEDRERIMDALQGADMVFITAGMGGGTGTGAAPVVAQLAKEMGILTVAVVTKPFPFEGRRRMQVALKGIEELSQHCDSLITIPNEKLITVLGRNATMIQAFRAANDVLQGAVQGIADLIVRPGLINVDFADVRTVMSEMGLAMMGTGSARGDDRAQAAAEAAIQNPLLDDVNLAGANGILVNITAGPDFTMSEFDEIGRTIEAFASEDATVVVGTVLDPDMQDEVRVTVVATGLNRAVARQTQRPDQRAPIKLVRNATTGQPEFGDFDTTSGDAVSKAVGGSMGLGLRRPSSDSVGSGSHNSGGSSTPAADLPNDYLDIPAFLRRQAD

SEQ ID NO: 10699 - protein, 384 aa, Brassica napus
FWKTIPPTEPYRVILGDVRDKLYHTRERSRQLLSNGISDIPEEATFTNVEQFLEPLELCYRSLCSCGDRPIADGTLLDFLRQVSTFGLSLVRLDIRQESERHTDVLDAITKHLDGSSYRDWSEERRQEWLLSELSGKRPLFGPDLPKTEEIADVLDTFKVISELPSDCFGAYIISMATSPSDVLAVELLQRECHVKTPLRVVPLFEKLADLEAAPAAVSRLFSLDWYKNRINGKQEVMIGYSDSGKDAGRLSAAWELYKAQEELVKVAKKYGVKLTMFHGRGGTVGRGGGPTHLAILSQPPDTVNGSLRVTVQGEVIEQSFGEEHLCFRTLQRFTAATLEHGMNPPVSPKPEWRALLDAMAVVATEEYRSVVFQEPRFVEYFRL

SEQ ID NO: 10700 - protein, 550 aa, Vibrio vulnificus
MLKTINPTQTQAWNALTAHFESAQDMDLKDLFAQDAARFDKFSARFGSDILVDYSKNLINEETLKHLFALAKETELSAAIKAMFSGEAINQTEGRAVLHTALRNRSNQPVLVDGEDVMPAVNAVLEKMKSFTDRVIGGEWKGYTGKAITDIVNIGIGGSDLGPYMVTEALAPYKNHLNLHFVSNVDGTHIVETLKKVDPETTLFLIASKTFTTQETMTNAHTARDWFLATAGDQAHVAKHFAALSTNAPAVSEFGIDTDNMFEFWDWVGGRYSLWSAIGLSIALAVGYDNFVELLEGAHEMDNHFVSTELESNIPVILALIGIWYNNFHGAESEAILPYDQYMHRFAAYFQQGNMESNGKYVDRNGNPVTYQTGPIIWGEPGTNGQHAFYQLIHQGTKLIPCDFIAPAVSHNPAGDHHQKLMSNFFAQTEALAFGKNEETVKAELVKVGKNAEEVAAIAPFKVFEGNRPTNSILVKQITPRTLGNLIAMYEHKIFVQGVIWNIFSFDQWGVELGKQLANQILPELADGSEISSHDSSTNGLINAFKAFKA

SEQ ID NO: 10701 - protein, 903 aa, Oryza sativa (indica cultivar-group)
QIRKAKLISLGRGNRFAAVRDDEQTADALSRRYRDYNFLDYHEKVIDGFYDIFGPSMESSKQGKMPSLADLQTGIGDLGFEVIVINRAIDTTLQEMEQVAQCILLDFPVANIAALVQRIAELVTDHMGGPVKDANDMLTRWLEKSTELRTSLHTSLLPIGCIKIGLSRHRALLFKILADSVGIPCKLVKGSNYTGDDDDAINIIKMNEREFLVDLMAAPGTLIPSDVLSWKGNSLNSNARLTQNPLAGSSSTTDSNLSANALPPGHKGGQLPLFSSGDWILASQSGYEKDGATTSSQASSSGTTSVAAGSAFDSSWTLVSHGQSDDPSTSAGMSAQQKVILPGGEHPWNENINARNENIKLVSDLQGNSESINLFADLNPFGGREPKRTSVPLNGPDNRNNELQRRRENVVPSTRRPQQRLVMKNWSPYNDVSNNKQYNYVEDSFARRNIGDNAASSSQVARPSAKNTNLNVGVRTDTPYMAAHNYDNSMAGSSAMKMTSTAGIGKVPDKVLYGDLDKGLTNSRLGDQPPIERHKWGNSVEGRIPTGTVHNQAKEHKENFDGKQDNKKLHPDPKKSPLDRFMDTSMPSRNPESVSPSFARSHKLDTMFDDVSECEIHWEDLVIGERIGLGSYGEVYRADWNGTEVAVKKFLDQDFYGDALDEFRSEVRIMRRLRHPNIVLFMGAVTRPPNLSIVSEYLPRGSLYKILHRPNCQIDEKRRIKMALDVAKGMNCLHISVPTIVHRDLKSPNLLVDNNWNVKVCDFGLSRLKHSTFLSSKSTAGTPEWMAPEVLRNEQSNEKCDVYSFGVILWELATLRMPWSGMNPMQVVGAVGFQDKRLDIPKEIDPLVARIIWECWQKDPNLRPSFAQLTSALKTVQRLVTPSHQESQSPPVPQEIWVNSSTP

SEQ ID NO: 10702 - protein, 315 aa, Mycobacterium avium subsp. paratuberculosis
MIRIGTRGSLLATTQAGGVRDALIARGHPAELVTITTAGDRSSGPIESLGVGVFTTALREAIEEGRVDAAVHSHKDLPTADDPRFAVAAIPARNDPRDAVVARDGLVLAELPPGSLVGTSSPRRAAQLRALGLGLEIRPLRGNLDTRLNRVSSGDLDAIVVARAGLARLGRLGDVTETLEPVQMLPAPAQGALAVECRAGDSRLAAVLAELDDADTRASVTAERALLAELEAGCSAPVGAIAEVVESIDEDGRIFEELSLRGCVAALDGSDVIRASGIGTPGRARELGLSVAAELFELGARELMSGARHDPARGN

SEQ ID NO: 10703 - protein, 487 aa, Saccharomyces cerevisiae
MDALLTKFNEDRSLQDENLSQPRTRVRIVDDNLYNKSNPFQLCYKKRDYGSQYYHIYQYRLKTFRERVLKECDKRWDAGFTLNGQLVLKKDKVLDIQGNQPCWCVGSIYCEMKYKPNVLDEVINDTYGAPDLTKSYTDKEGGSDEIMLEDESGRVHLVGDFIRSTPFITGVVVGILGMEAEAGTFQVLDICYPTPLPQNPFPAPIATCPTRGKIALVSGLNLNNTSPDRLLRLEILREFLMGRINNKIDDISLIGRLLICGNSVDFDIKSVNKDELMISLTEFSKFLHNILPSISVDIMPGTNDPSDKSLPQQPFHKSLFDKSLESYFNGSNKEILNLVTNPYEFSYNGVDVLAVSGKNINDICKYVIPSNDNGESENKVEEGESNDFKDDIEHRLDLMECTMKWQNIAPTAPDTLWCYPYTDKDPFVLDKWPHVYIVANQPYFGTRVVEIGGKNIKIISVPEFNSTGMIILLDLETLEAETVKIDI

SEQ ID NO: 10704 - protein, 530 aa, Coccidioides immitis RS
MLTGNIYFIAAVAVIGGGLFGFDISSMSAILGTEQYRCYFDQYPKEPGRDCGGPKPDVQGGITASMAGGSWLGALVSGFLSDWMGRKRAIMAGAVIWVVGSIIVCASQNIAMLIVGRIINGFSVGICSAQVPVYISELAPPSKRGRLVGCQQWAITWGIMIMFYISYGCSFVKGTAAFRIPWGLQAIPAVLLFLGMLFLPESPRWLARKDRWDECRAVLAQVHGKGDASSPFVEREFQEIRDMCEFEKRNADVTYWELLKPNMINRTHVGVFTQIWSQLTGMNVMMYYITYVFAMAGLTGNTLLLSSSIQYVINVGMTVPALLWVDRWGRRPTLLVGAFLMMTWLFVNAAVLATRGSPAPPGGLGGVEAQSWQIYGPPSKVIIACSYLFVASFAPTWGPVSWIYPPELFPLRVRGKAVALCTSANWAFNFALGYFVPPSFVNIQWRTYVLFGVFCATMFIHVFFMFPETAGKTLEEVENIFTKGDVPYVGTPAWRTRVDYRKAAHLEQTGVRDEEDKQAAEHISTTRKGD

SEQ ID NO: 10705 - protein, 957 aa, Hordeum vulgare subsp. vulgare
  misc_feature (467)..(467): Xaa can be any naturally occurring amino acid
MKIPFVTKWSHRSSEPAGPSNSAAAQQQQPPPLSPSAPSRSPPVASTEAAGDEFILQEEEYQMQLALALSASASGAEGAGDPDGEQIRKAKLMSLGKGDPVTNSDLGGGYTAESLSRRYRDYNFLDYNEKVIDGFYDIFGPSAESSGHGKIPSLAELHMSIGDLGYEVIVVDYKFDNALQEMKEVAECCLLGCPDITVLVRRIAEVVADHMGGPVIDANEMITRWLSKSIEQRTSHQTSLLHIGSIEIGLSRHRALLFKILADMVGIPCKLVKGSHYTGVVDDAINIIKMDNKREFLVDVMAAPGTLIPADVFNSKGTPFNFSQTLGQNQVVESASNIEDDPVALQSEHEHYQGHMFANNDRVSDNLSSYENTMTAGSSASEPGTLGKASTLAGAPSKQKKNLQLIPDSHEIDESRNLFAEFDPFNATESGKSSLAFKGLNNRNSDFRRRRENVVPPSARSQQPLVXKNWSACNDISNNKQYNVADGSVPRRNATDNASSSQLALSTAKHYNPNVRELNDRMYAAPARNYDNRIIGTSAMAKASTGDCLDRSQVPPGLYYDKMLGTSSMNTASSSGIGKVAEKDLQNDLEKGPIYSRFDGELSKNAQGFTPERDEHKENCGSYDHRMLHPDPRKSPLDRFMDRPRQNIECVSPSQVGSSKVDLVLDEVSECEILWEDLVIDERIGIGSYGEVYHADWNGTEVAVKKFLDQEFYGDALEEFRCEVRIMRRLRHPNIVLFMGAVTRPPHLSIVSEYLPRGSLYKIIHRPNCQIDEKRRIKMALDVARGMNCLHTSVPTIVHRDLKSPNLLVDDNWTVKVCDFGLSRLKHSTFLSSKSTAGTPEWMAPEVLRNEQSNEKCDIYSFGVILWELATLRKPWHGMNQMQVVGAVGFQDRRLDIPKEVDPIVASIIRDCWQKDPNLRPSFIQLTSYLKTLQRLVIPSHQETASNHVPYEISLYR

SEQ ID NO: 10706 - protein, 264 aa, Medicago truncatula
MSAAVCGSKRSFFEEQLPPSPPLSKRLRCSSSTSPIRFPTIPSLFDQLRNLFPHMDQLVLERALQECDNDLDAAIKSLNELYLGAAGGNSGTAEESEIDVNVDAGKLENDGNASASENQSTLNSLPADGAEWIDFFVREMMVATSVDDARARAARMLEVLEKSISERARAEATDALQKENLMLKEQIEVLIKEKNSFKNAFRIQHERLSDYDNKNQELQHLKQLASQYQEQIRTLEMNNYALAMHLKQAQQSNGFQGHFPPDIF

SEQ ID NO: 10707 - protein, 510 aa, Burkholderia mallei ATCC 23344
MCGIGAIFSTQRASVDGIERSLSALMSKIAHRGDASRFNENLIRERFGLATNRLAIVERDHARQPVSDHERDLHVVLNGQIYNYKELRDELAARGHRFSHAGDAEVLLRAYLEYGPSFATKLDGMFSFVLFDNLNGKFLIGRDHVGIKPLYYAQRDGVWYVASELKALTHVNARIETLAPGTLFDGKETIRYVSYDASRPVSRDSFDEAKARVRTPLEESVRRRVDTDLPICVMFSGGIDSAIVLRLAHRYHPDVTAISFGLPGSNDIEIAHRYCAEHGIRHVIYTFTKQDLLENIDDAVYYGEFFEKIDAIDSAIAHFGYYIANKLGLKVALCGEGSDEIFGGYDLFKTHAQPGALSLYRLNNLHRTDLQRVDRASMRNTVEARVPFMDAELIDYVLSLDFSYKLHGGVEKHILREAFRDVLPGYIIDRPKIRMPDGSGVKNVIIDHIDSLGDAPPDDAARRLGEIGLSDRSALFFARKYLECNFPFPTQRFKQAGKDFSESGYFDFIS

SEQ ID NO: 10708 - protein, 227 aa, Haemophilus ducreyi 35000HP
MELVFIRHGFSEWNAKNLFTGWRDVNLTERGVEEAKAAGQKLLAAGYEFDIAFTSVLTRAIKTCNIVLEESNQLWIPQVKHWRLNERHYGELQGLDKKATAEKYGDEQVHIWRRSYDTLPPLLAPSDPNSAHNDRRYAHLPKEVVPNGENLKVTLERVLPFWEDQIAPALLSGKRVLVTAHGNSLRALAKHIIGISDAEIMDFEIPTGQPLVLKLDSKLNFIEKFYL

SEQ ID NO: 10709 - protein, 355 aa, Triticum aestivum
  misc_feature (88)..(88): Xaa can be any naturally occurring amino acid
  misc_feature (97)..(97): Xaa can be any naturally occurring amino acid
MDGNKGPVVVTGASGFVGSWLVMKLLQAGYTVRATVRDPANVEKNKPLLELPGAKERLSIWKADLSDQGSFDDAIAGCTGVFHVATPXGLRLPRPRXNEVIKPTVEGMLSIMRACKEAGTVKRIVFTSSAGSVNIEERQRPAYDQDNWSDIDFCRRVKMTGWMYFVSKALAEKAAMEYASENGLDFISIIPTLVVGTFLSAGMPPSLVTALALITGNEAHYSILKQVQLVHLDDLCDAMTFLFEHPEANGRYICSSHDATIHGLATMLRDRFPEYRIPHKFPGVDDDLQPIHFSSRKLLDHGFSFRYTAEDMFDAAIRTCREKGLIPLGDAPPPAAAGKLGALAAGEGQAIGAET

SEQ ID NO: 10710 - protein, 339 aa, Schizosaccharomyces pombe
MSYSFQGLLNRVNESAIVNTLKEYTGLNTPKWTFNDIPDLTGKVALVTGSSGGIGYVTALELARKGAKVYLAGRNEEKYQKVMKQIHDEVRHSKIRFLRLDLLDFESVYQAAESFIAKEEKLHILVNNAGIMNPPFELTKDGYELQIQTNYLSHYLFTELLLPTLRRTAEECRPGDVRIVHVASIAYLQAPYSGIYFPDLNLPHVLLGTFARYGQSKYAQILYSIALAKRLEKYGIYSVSLHPGVIRTELTRYSPTFALKLLEKSVFQYLLLDPIRGAMTSLYAATSPEISKEHLNGAYFTAIAQRGILHRAHDDAFVEELYRYTHKIFEDLKYLAPSP

SEQ ID NO: 10711 - protein, 245 aa, Oryza sativa (japonica cultivar-group)
MAAATSSSALSKLAPLEAILFDIDGTLCDSDPIHFCAFRELLQQVGFNNGVPISEEFYSANISGGHNDDLARALFPDLDHDKAMKFMDDKEALYRRLAPEQLVAVEGLHDLCRWIKDHKLKRAAVTNAPRSNAELMLSLLGLTEFFPVLVIGSECDRAKPFPDPYLKALELIGASPDHTFIFEDSASGIRAGVAANVPVVGLTTRNPEKVLQDAGASLLIKDFQDPKLLSILEEIEPTVAAVEQV

SEQ ID NO: 10712 - protein, 419 aa, Raphanus sativus
FYHSCTIFFFVSLQFHHVFSTNTLSSNETLTISSNRTLVSPGDVFELGFFKTTTRNSQDGADRWYLGIWYKTTSDQRTYVWVANRDNPLHNSTGTLKISHSSNLVLLDQSDTPVWSTNFTGVAHLPVTAELLANGNFVLRDSKTKDLNRFVWQSFDFPVDTLLPEMKLGRNLIGPEKEKILTSWKSPTDPSSGDYSFILETEGFLHEFYLLNNEFKVYRTGPWNGARFNGIPKMQNWGYIVNNFIDEEEEVGYSFQVNNNHNIHSRFRMSYTGYLQVITWTNTVPQRNMFWSFPEDTCDLYIVCGPYAYCDMHTTPTCNCIKGFVPKNARAWELRDASSGCVRSKRLSCGEGDGFLRMSQMKLPETSEAVVDEVIELKECREKCVRDCNCTGYANMDNMNGSGCVMWTGELLDMRKYDA

SEQ ID NO: 10713 - protein, 259 aa, Arabidopsis thaliana
MSAASDGNHVAPPELMGQSPPHSPRATQSPLMFAPQVPVLPLQRPDEIHIPNPSWMQSPSSLYEEASNEQGIPTMITWCHGGKEIAVEGSWDNWKTRSRLQRSGKDFTIMKVLPSGVYEYRFIVDGQWRHAPELPLARDDAGNTFNILDLQDYVPEDIQSISGFDPPQSPENSYSNLLLGAEDYSKEPPVVPPHLQMTLLNLPAANPDIPSPLPRPQHVILNHLYMQKGKSGPSVVALGSTHRFLAKYVTVVLYKSLQR

SEQ ID NO: 10714 - protein, 105 aa, Rhodopirellula baltica SH 1
MPDAIMKQVVTVVSPHLAENVLAALRRAPLEGLSVMEVKGYGRQKSYLDQYQDTEYSEAFVPKVEITLWVDDLRLEEVLDKIVAVTRTGRIGDGKILVMPVASFI

SEQ ID NO: 10715 - protein, 148 aa, Flavobacteria bacterium BBFL7
MEILFWTTIFLATFCIMEFNAWWMHKYVMHGFLWNLHEDHHHKKHDSWFEKNDFFFVFYAAISIGLKVAHSEFDLWWALPMSAGIFAYGVAYFIVHDIFIHQRFKWLRKANNVYARGVRRAHKIHHKHIGKEKGENFGMLIVPLKYFK

SEQ ID NO: 10716 - protein, 395 aa, Magnaporthe grisea 70-15
MAIAQEQELVLITGATGHVGSTTLAHLIRAGYNVRAVVRSEAKSAQLLARPSIQRAIKHSRRWSNRYRNQLTTTTSTGQLSFVVVPDITAPGAYDDAVVGATLVVHIASPLVTADTVPLSKHEEYFLRPAVRGTLGLLEAARAAGTVRRVVITSSIVSLVPVDRMEGNLSPEEARSLPPVQPTDRVRDADGPYTSEFAAYHGSKVASLAHAEEWVARECPGFDVVYLHPSFVLGHNDAATTPAQALKGTNAVVLAMLLGQRFGPYAGATVHVEDVARAHVAALAVDRVPGNQSYILSGPRPTTWNDAKEIVERRFPEAIKSRMLVTRGSVDTTYLPFDVSLTEETFGFEFTSFEEQVVSTVGQFIELRMQQKAALSRKNAAVRARDTLPSVRANA

SEQ ID NO: 10717 - protein, 569 aa, Bradyrhizobium japonicum
MAINNVADLFVATLEQAGVKRIYGIVGDSLNAFTEALRRRGTIEWIHVRHEEVAAFAAAGEAQMTGSLAVCAGSCGPGNLHLINGLFDAHRSRVPVLAIAAQIPSAEIGGGYFQETHPQNLFRECSHYCELVSDASQLPFVIENAIRAAVGLRGVAVIAMPGDVAFRDPPRRALSTARGLALSAPKVVPEANELKALADLLNGAERITLFCGRGCAGAHAPLMQLAEALKSPIVHALGGKEHVEYENPYDVGMTGFIGFSSGYAAMHACDALVMLGTDFPYKQFFPTGCQIAQIDIRPENLGRRQADHRGRSAAAEDQDPAQAYSTMPSRITRRRARGWTRSPGAPPGSKPIHPQYLAKVVSDHASEDAVFTADVGTPTVWAARYLEMNGRRRLIGSFVHGSMANAMPQAIGAQASQPGRQVISLSGDGGFTMLMGDLITLTQMKLPVKVVVFNNGVLGFVALEMKAAGFVDTNVDLQNPDFAAMARAMGIFAKRVEDPGELPGAVKEMLAHNGRALLDVVTAKQELSMPPTITTEQIKGFSLWVLRAVMNGRGGRGARCLAKTNLLPR

SEQ ID NO: 10718 - protein, 290 aa, Geobacter metallireducens GS-15
MKLLDGKKCAESLVADIARKVAGYEESGLRKPHMTVILVGEHAPSESYVKSKIKSCGNAGFEGTLLRFPDTITEAELLEKIRGINADPTTDGLIVQLPLPRHINQQHIINAIAPEKDIDGFHPTNFGRMTLGQKAFRPATAYGICKLLQFYEIPVWGKHCVVIGRSNIVGKPISIMLSNDFDIGNATVTLTHIETPRELLLDETRRADIVIVAVGIPGFVTEDMVKEGVVVIDVGINRLEDGKIVGDVDFENVKKKCSWITPVPGGVGRMTVAALMINTLMAYQNNFDLV

SEQ ID NO: 10719 - protein, 222 aa, Aquifex aeolicus VF5
MKLLAPSILAGDWWCIGEQIQATIRGGADILHYDVMDGHFVPNITAGYEILSHIRKRASLPIDAHLMIENPDKYIPKFVEAGANWISVHIENNYHIHRTLQLIKELGAKAGVVVNPGTSLSAIEEALYYADYVLLMSVNPGFSGQKFIERSIERLRILKEMRDRINPSCLIEIDGGIKENNIAEVVRAGADVVVVGSGIFGAKDIEAQTRKLKSLMLSAVSV

SEQ ID NO: 10720 - protein, 497 aa, Pseudomonas syringae pv. tomato str. DC3000
MSSIQHLIHGKFVADDGRTADVFNPSTGQVIHQVALASRETVQKAIESAKSAFPAWRNTPPAKRAQVMFRFKQLLEQNEARIAQLISEEHGKTLEDAAGELKRGIENVEYACAAPEILKGEYSRNVGPNIDAWSDFQPLGIVAGITPFNFPAMVPLWMYPLAIACGNCFILKPSERDPSSTLLIAELLHEAGLPKGVLNVVHGDKVAVDALIEAPEVKALSFVGSTPIAEYIYKEGAARGKRVQALGGANNHAVLMPDADLDNAVSALMGAAYGSCGERCMAISVAVCVGDQIADALVAKLVPHIQSLKIGAGTTCGLDMGPLVTGQHRDKVSGYIADGVASGATLVVDGRDLQVAGHEQGFFMGGCLFDRVTPQMRIYKEEIFGPVLCIVRVDSLEQAMQLINDHEYGNGTCIFTRDGEAARLFCDEIEVGMVGVNVPLPVPVAYHSFGGWKRSLFGDLHAYGPDGVRFYTRRKAITQRWPQRASHEASQFAFPSL

SEQ ID NO: 10721 - protein, 523 aa, Zea mays
MAVTRVAVAAALSAAPLSSRRHRVALPSACRLLPASATCCNSRAPMSLQAAAAAPAAGAVDEETPASSPPSDASKGVENLVIIGSGPAGYTAAIYAARANLKPVVFEGCQMGGVPGGQLMTTTEVENFPGFPDGITGPDLMDRMRKQAERWGAELYQEDVEFVNVKSSPFVIRSSDREVKCHSLIIATGATAKRLRLPREDEFWSRGISACAICDGASPLFKGQVLAVVGGGDVATEEAVYLTKYARHVHLLVRKDQLRASKAMQDRVLNNPNITVHFNTEAMDVVSNDKGQMSGVHLKRRDTGEESVLTVKGLFYGIGHTPNSQLLQGQIELDSAGYILVKEGSAKTSVDGVFAAGDVQDHEWRQAITAAGSGCIAALSVERYLVANDLLVEFHQPVQEETKKDITDKDVQMGFDISHRKHKGQYALRKLYHESPRLICVLYTSPTCGPCRTLKPILSKVIDEYGEFVHLVEIDIEEDPEIAEAAGIMGTPCVQFFKNKEMLRTVSGVKRKKEYREFIEANK

SEQ ID NO: 10722 - protein, 484 aa, Erwinia carotovora subsp. atroseptica SCRI1043
MSGNHLQDHELFKTGYFVAGKWQQGAATFEVVNPATGESIARVAKAGKKETQAAIDAAHAAFPAWKRKTAKERSEILYRWYELILENKRYLAELMTAEQGKPVQEAEGEVVYAANFIQWFAEQGKRVNGEIIPPAKPGSKIYATREPVGVVVAITPWNFPLAMLTRKLGPALAAGCTGVIKPANNTPLSAFALLALAQQAGVPDGVLNGVAGDTQAISDTVMASDKVRKISFTGSTAVGKTLVRNAADTMKKVSMELGGNAPYIVFDDADIQAAVKGAIANRFRNAGQVCVSANRFYIQDGVYDEFVSLLAEEVKKLKVGNGMDDGVVLGPLIDEAAVEKVEKHVNDAVEKGGKALVGGKRHKLGHSFFEPTVIVDANEAMLLAQEETFGPVAPCFRFKTEEEVIQRANNTPFGLAAYFYSQNLQRVFRVAEALESGMIGINECAVSTELAPFGGVKESGLGREGSVLGLDEFLEVKTWHVGGL

SEQ ID NO: 10723 - protein, 371 aa, Oryza sativa (japonica cultivar-group)
MPARAAAAAAAVALLLAVCAQAAALPRFAEAPEYRNGEGCPAAATAAAGVCDAGLVHISMTLDAHYLRGSMAAVYSLLKHASCPESLFFHFLAEEEEVGGGGDLRRAVAASFPSLRFEIYAFRAEAVAGLISASVRAALESPLNYARNHLADLLPRCVPRAIYLDSDVLAVDDVRRLWETRLPAAAVVAAPEYCHANFSRYFTPAFWSDPGLGRRVFAGRRRPPCYFNTGVMVIDLRRWRAGNYRHRIERWMEIQKEKRIYELGSLPPFLLVFAGEVEAVDHRWNQHGLGGDNVRGSCRPLHDGPVSLMHWSGKGKPWDRLDAGNPCPLDHTWKSYDLYVAGDDGAAASSPASGPALSSTSTTWPALVFSW

SEQ ID NO: 10724 - protein, 126 aa, Nostoc punctiforme PCC 73102
MYEIMFQNHPEVKEQFSMAAQADGSQPARLATAVYSYANQIDNLPALKSMVEKIAHRHVQTHVTPEQYPIVGESLLQAMKDVLGEAATEEVMAAWTEAYQALSEVFIHREHDIYVGEDKKAQLLHS

SEQ ID NO: 10725 - protein, 580 aa, Oceanicola granulosus HTCC2516
MTGAKMVVQALKDQGVDVVFGYPGGAVLPIYDELFQQNDIRHILVRHEQGAVHAAEGYARSTGKVGVALVTSGPGATNAVTGLTDALMDSIPIIVLTGQVPTFMIGSDAFQEADTVGITRACTKHNWLVKDTDRLAETIHEAFHVSRAGRPGPVLVDIPKDVQFATGDYTEPTKGPRSHYAPRLKGDIETITALVEAMETAERPIFYTGGGVINSGAAASQLLRELVEATGFPITSTLMGLGAYPASGDKWLGMLGMHGLYEANMAMHDCDLMINIGARFDDRITGRIDAFSPDSVKAHIDIDPSSINKVIHVDLPIVGDVAHVLEDMLKVWKSRGRKSDKAALGRWWSKIAEWQKVSCLSYRQEGKVIRPQYALERLEALTKGHDRYICTEVGQHQMWAAQYLGFEAPNRWMTSGGLGTMGYGFPASIGTQVAHPDALVINVAGEASWLMNMQEMGTAVQYRLPVKQFILNNERLGMVRQWQELLHGERYSQSWSEALPDFVKLAEAFGAKGIQCADPDSLDDAIMEMLDHDGPVIFDCLVEKHENCFPMIPSGKAHNEMLLGEAETQGVIDAKGSVLV

SEQ ID NO: 10726 - protein, 408 aa, Brucella suis 1330
MATEIRVPTLGESVTEATIGKWFKKAGEAIAVDEPLVELETDKVTVEVPAPAAGVLAEITAKEGDTVEVGALLGQISSDGAAVAAAPAQKKEEAKPAAAAPAAAPVASASSGPAMQPAPAAAKLLAESGLSADQVEGSGKRGQVLKGDVLDAITKGVSAAPAAPVAARPASSADDASREERVKMTRLRQTIARRLKDAQNTAAMLTTFNEVDMSAVMELRNKYKDVFEKKHGVKLGFMGFFTKAVTHALKEIPAVNAEIDGTDIVYKNFCHVGMAVGTDKGLVVPVIRDADQMSIAEVEKELARLARAARDGSLSMADMQGGTFTITNGGVYGSLMSTPILNAPQSGILGMHKIQERPMVVGGQIVVRPMMYLALSYDHRIVDGKEAVTFLVRVKESLEDPERLVLDL

SEQ ID NO: 10727 - protein, 386 aa, Yarrowia lipolytica CLIB122
MADFIRTQIFGTCFEITSRYVDLNPVGMGAFGLVCSAKDQLTDQNVAIKKIMKPFGTPVLSKRTYRELKLLKHLRHENLICLSDIFISPLEDIYFVTELLGTDLHRLLMTRPLEKQFIQYFLYQILRGLKYVHSAGVVHRDLKPSNILVNENCDLKICDFGLARIQDTQMTGYVSTRYYRAPEIMLTWQKYDVEVDIWSTGCIFAEMLEGKPLFPGKDHVHQFSIITELLGSPPEDVIHTICSENTLRFVRTLPRRERIPLASKFRNADPEAIDLMEKMLVFDPKKRITAAEALAHPYLAPYHDPSDEPVAEERFDWSFNDADLPVDTWKVMMYSEILDFHNVDIDVNGQPPQGQFEQVHAQAQAAVAQNEAARAREQEQQQQEQQ

SEQ ID NO: 10728 - protein, 300 aa, Brucella suis 1330
MSILVNKDTKVLVQGLTGKTGTFHTEQALAYYGTQMVGGIHPKKGGETWEGSKGEKLPIFATVAEGKERTGADASVIYVPPAGAADAIIEAIEAEIGFIVCITEGIPVMDMVRVKERLERSKSRLLGPNCPGILTPEECKIGIMPGNIFKKGSVGVVSRSGTLTYEAVFQTSNEGLGQTTAVGIGGDPVKGTEFIDVLEMFLADDETKSIVMIGEIGGSAEEDAAQFLKDEAKRGRKKPMVGFIAGRTAPAGRTMGHAGAVISGGKGGAEDKIAAMESAGIRVSPSPAQLGKTLVEVLKG

SEQ ID NO: 10729 - protein, 389 aa, Leifsonia xyli subsp. xyli str. CTCB07
MLGATPAAAGVAEHVTEPVAYDAILLAGFGGPEGQDDVIPFLRNVTRGRGILDERLEEVAQHYRHFGGVSPINDQNRALKAALEAELASRGIDLPVLWGNRNWDPYLADALTEADQRGFTKLIAVATSAYSSYSSCRQYREDFARALRETGLEGRIQIDKVRQFFDHPGFVEPFIEGVKNAVEELRERAPEIHPATGVRILFSTHSIPSTDAGKSGPSGRPDSGEPWGEGGAYAAQHLAVAEIVSHEATGGTIGWDLVYQSRSGPPSMPWLEPDINDRIAELPELGVKAIIIVPLGFVSDHMEVLWDLDTEAMESSEENGLLAVRVPTPGTHAKYVKGLVDLVLERRDGLPVAQRPSLTTLGPWYDVCRPGCCENVRLGFKPAVAGLTP

SEQ ID NO: 10730 - protein, 521 aa, Aspergillus nidulans FGSC A4
MVTLSRVSQESSSHRQRREIRDISVQTTEYAGVYGTKYAAEELPLYVMNDNGMPPDVAEQMIRDELSLDGNPLLNMASFVTTYMEPQVETLMAAAMRKNFIDFEQYPQSARMQTRCVNMIADLFNAPTNQESKEGTEHGESEGAEGAMGTSTVGSSEAIMLALLAMKKTWHKKRSDAGKDTSHPNIIMNSAVQVCWEKAARYFDVEERYCYCTDDRYVIDPVQAVELVDENTIGICAIMGTTYTGHYEDVKAINDLLVQRNIDCPIHVDAASGGFVAPFICPELVWDFRLEKVVSINVSGHKYGLVYPGVGWIFWRSPEYLPRELVFNINYLGSEQATFTLNFSKGASHIIGQYYQLIRLGRNGYKAIMQNLVQVSQNLARGLSDLGLLILSDNTGNGSGGVPLVAFRLPDDESRLFDEFAVSAVLRRRGWVVPAYTMAPRSNNLKLMRIVVREDFTAHRCGILIQDIKMAIEWLEEMDETTIQRYTTYLAQHGTRLPNAHSFYKDEHSLHGKTGKTHAVC

SEQ ID NO: 10731 - protein, 567 aa, Oryza sativa (japonica cultivar-group)
MAAAAVAANGGGDGAQASNAPAPTRLASVYSEVQTSRLKHALPLPSVLRSPFALADGPASSAAGNPGEIAKLFPNLFGQPSVSLVPSPEPASTRPLKVGVVLSGGQAPGGHNVICGIFDYLQEYAKGSVMYGFKGGPAGVMKCKYVELTADYVYPYRNQGGFDMICSGRDKIETPEQFKQAEDTVNKLDLDGLVVIGGDDSNTNACLLAEYFRGKNMKTRVIGCPKTIDGDLKCKEVPTSFGFDTACKIYSEMIGNVMTDARSTGKYYHFVRLMGRAASHITLECALQTHPNVALIGEEVAAKKETLKSVTDYITDIVCKRAELGYNYGVILIPEGLIDFIPEVQKLIAELNEILAHDVVDEAGAWKSKLQPESRQLFDFLPKTIQEQLLLERDPHGNVQVAKIETEKMLIAMVETELEKRKAEGKYPAHFRGQSHFFGYEGRCGLPTIFDSNYCYALGYGSGALLQCGKTGLITSVGNLAAPVEEWTVGGTALTSLMDVERRHGKYKPVIKKAMVELDGAPFKKFASLRDEWSLKNHYISPGPIQFSGPGSNDANHTLMLELGAEA

SEQ ID NO: 10732 - protein, 326 aa, Eremothecium gossypii
MGEETLRIAGRRSKLAVIQSESVKEIVQREFPNYTCTVLAKQTLGDQVQSKPLYAFGGKALWTKELEDLLYEEDLDQRIDMIVHSLKDMPTQLPEGFELGAITKRVDPSDCLVMAAGSPYKTLGDLPNGSVVGTSSIRRSAQLRRRYPHLVFASVRGNIQTRLKKLDDPENECKCIILATAGLVRLGLESRITQRFDSTIMLHAVGQGALGIETRTGDERLQAILAKVADRNSTICCLAERSLMRTLEGGCSVPIGVYSTFDEETSMLTLDGLVVSVDGADAAEATVSYKIKSDKEDAIACGQLLAAKLLEAGAKKILDAIHLPEA

SEQ ID NO: 10733 - protein, 329 aa, Leifsonia xyli subsp. xyli str. CTCB07
MIVSDGPAERRQGALRVGTRGSPLAVAQTQAVSAAVARATGFDIELVTVTTHGDTSRESLSELGGTGVFATALRDALRNGECDLVVHSLKDLPTAPAPGLVLGAVPKRADARDTLCARDGLRFGELPEGASVGTGSPRRAAQLRAQRPGLDIVDIRGNVDTRLSRVSAGDLDAVVLAAAGLGRLGRLDAATDFFSLSTMPTAPGQGALALEVREGDERGRGPIARALAAVDHATTCAATTAERAVLAGLEAGCAAPVGATAMIDDGLLFLTATVYRPDGAAQLTASHAATPDSFGAAHLDEAARDVGERVVAELLASGAADLAPLKGLR

SEQ ID NO: 10734 - protein, 259 aa, Bacillus halodurans C-125
MNYEFLQIEIKNKVALVTINRPPVNPLNSQVFQELANSMTLLEANKDIRVIILTGSGEKAFVAGADLHEMIDLNVAGMLEMNKASRSAFSLIEQLSKPVIAAINGVALGGGLELALCCDLRICSEKARFAFPEIGLGIIPGGGGTQRIQKIVGQGVAKELLYFGEMIGAERALALHLVNKVVPAEELLQAAKDWAEKLAAKPTIAMRTLKSVVNTGANVDLESGLSMEAAGFAVTFQTDDRKEGMNAFVEKRKPVYKGT

SEQ ID NO: 10735 - protein, 187 aa, Zea mays
  misc_feature (129)..(129): Xaa can be any naturally occurring amino acid
MSDEEHQFESKADAGASKTYPQQAGTIRKNGYIVIKGCPCKVVEVSTSKTGKHGHAKCHFVGIDVFTGKKLEDIVPSSHNCDVPHVDRTEYQLIDITEDGFVSLLTDSGNTKDDLRLPTDEALEGQVSXRRQIPLHRFCSRSLRLRHFALRLQIKSGYDDGKDLLLTVMSSMGEEQICAVKEIGGKN

SEQ ID NO: 10736 - protein, 1109 aa, Arabidopsis thaliana
MNSQQSTRTKQMLQQSSTHLLCGVVLLQLFAAQVDAQRSTSPWQTLSGDAPLVIARGGFSGLFPDSSLAAYQFAMVVSVADVVLWCDVQLTKDGHGICFPDLNLANASNSEEVYPNRQKSYPVNGVTTKGWFPIDFSLTELQKVLFSLIRGILSRSGKFDENGYSISTVQNVATQMKPALFWLNVQHDEFYEQHNLSMSSFLLSTSRTVSIDFISSPEVNFFRKIAGGFGNNGPSFVFQFMGKEDFEPTTNRTYGSILSNLSFVKTFASGILVPKSYILPLDDKQYLLPHTSLVQDAHKAGLKLYASGFANDVDIAYNYSWDPVSEYLSFVDNGNFSVDGMLSDFPLTASASVDCFSHIGRNATKQVDFLVISKNGASGEYPGCTKLAYEKAIKDGSDVIDCPVQMSSDGIPFCSSSIDLVNSTTVGQTHLRNRSIIVPEISSVAGIFTFSLTWHEIQSLTPAISNPFRENGMSRNPNERNSGNLISLYEFLNLAKNSTSLSGILISLENVVYLREKKGLDVVKVVLNRLTETGYIVGTLKVMIQSTTRLVLVDFKNQSTYKTVYKIKETIGNITDSAIEDIKKFANAVVINKASVFPNSDSFLTGQTTNVLERLQKFQLPVYVELFQNEFVSQPFDFFADETVEINAYIFGAGINGTITEFPYTAARYKRNRCLGREEVPPYMLPVNPGGVLTLISTSSLPPAQDPNPIFTHDDVTEPPLPPVIAKSPTSTLGTPSTIAKPLISWSVAGVVLFLVLLTLVFCFHRKRETRLRQQKLKALIPLEHYTYAQVKRITKSFAEVVGRGGFGIVYKGTLSDGRVVAVKVLKDTKGNGEDFINEVATMSRTSHLNIVSLLGFCSEGSKRAIIYEFLENGSLDKFILGKTSVNMDWTALYRIALGVAHGLEYLHHSCKTRIVHFDIKPQNVLLDDSFCPKVSDFGLAKLCEKKESILSMLDTRGTIGYIAPEMISRVYGNVSHKSDVYSYGMLVLEIIGARNKEKANQACASNTSSMYFPEWVYRDLESCKSGRHIEDGINSEEDELAKKMTLVGLWCIQPSPVDRPAMNRVVEMMEGSLEALEVPPRPVLQQIPISNLHESSILSEDVSVYTEG

SEQ ID NO: 10737 - protein, 426 aa, Bacillus halodurans C-125
MAYEFKLPDIGEGIHEGEIVKWFVKPGDEVKEDDILLEVQNDKAVVEIPSPVDGKILEVKVEEGTVAIVGDVLVTIDAGEGVGAEETEEAPAPEEKAEEAAPAEPAPAKETAPEEDGDEDKRVIAMPSVRKYAREKGVNIKKVKGTGKNGRILREDIDAFLSGDTQAEASEEKAETAAPAAASNVEPTEIPVGEREERVPLKGIRKAIAKAMVNSKHTAPHVTHMDEVDVTALVAHRKQYKEIAAEQGTKLTYLPYVVKALTSALKKYPVLNASIDDVNEEIVYKHYFNIGIAADTEQGLVVPVIKDTDRKSIFELADNINELAIKARDGKLSAAEMKGGSCTISNLGSARGQWFTPIINHPEVAILGIGRIEEKPVVKDGEIVAAPVLALSISYDHRLIDGVTAQNALNHVKRLLNDPQLMLMEG

SEQ ID NO: 10738 - protein, 717 aa, Arabidopsis thaliana
MSQSVDYQYSCQNSFTVNVPTSFHPEERGLNLTNLESALRKGFEVKLVIDEIPCQQCSSTRGICSFNGTTQSCCNATSPSGGVSCVPYQHSADEVYRRCSESFSCGSQRDLNYPLWKPGREECGHPNFKLNCSGGFAEINIASVKFRILDSYRSLIRLARSDYIGDLCPANPLTAPFIEKFLPVLELTGETELLTLYYGCRFNSSDIPANIYVGELGCDEGRSYYVTRNLSSPLLDSSRGVLNNLREMCKRNVSVPASGPALFDLQTRPNQDNLKMALDQGFRMLITSDCERCRGSGGACGYNQTSSGFGCYCKDGKCGYEYDALGALTGVVIVFLVLLCPCFRVQIFRKRKTSDEVRLQKLKALIPLKHYTYAEVKKMTKSFTEVVGRGGFGIVYSGTLSDSSMVAVKVLKDSKGTDGEDFINEVASMSQTSHVNIVSLLGFCCEGSRRAIIYEFLGNGSLDKFISDKSSVNLDLKTLYGIALGVARGLEYLHYGCKTRIVHFDIKPQNVLLDDNLCPKVSDFGLAKLCEKKESILSLLDTRGTIGYIAPEMISRLYGSVSHKSDVYSYGMLVLEMIGARKKERFDQNSRSDGSSIYFPEWIYKDLEKANIKDIEKTENGGLIENGISSEEEEIARKMTLVGLWCIQSSPSDRPPMNKVVEMMEGSLDALEVPPRPVLQQISASSVSDSFWNSEESSSASDILVFSTNSKLESSSL

SEQ ID NO: 10739 - protein, 229 aa, Zea mays
MLRSSFRLLYITRTNLLVRASPSSLSRLPSKFTSAKPLVSSHHQIPLSTTGAKLSRSEHSMAASSEPKSIYDFIVKDAKGNDVDLSTYKGKVLLIVNVASQCGLTNSNYTELAQLYQKYKDHGFEILAFPCNQFGNQEPGSNEEIVQFACTRFKAEYPIFDKVDVNGDSAAPIYKFLKSSKGGLFGDGIKWNFAKFLVDKDGNVVDRYAPTTSPLSIEKDLKKLLGVTA

SEQ ID NO: 10740 - protein, 367 aa, Shewanella sp. MR-7
MALHSIEEIIEDIRQGKMVILMDDEDRENEGDLIMAAELVTPEAINFMAKYGRGLICQTMTKARCQQLNLPLMVTNNNAQFSTNFTVSIEAAEGVTTGISAHDRAVTVKAAVAKDAKASDLVQPGHIFPLMAQDGGVLTRAGHTEAGCDLARLAGLEPSGVIVEILNEDGTMARRPDLEIFSELHGIKIGTIAALIEYRNTKETTVVREAKCKLPTRFGEFDMVTFRDTIDNQLHFALVKGEVKPDCLVRVHLQNTFNDLLHSERDQQRSWPLEKAMERISAEGGVLVLLGNQEHPCEILSKVKAFEAEDQGQAPASAKWQGTSRRVGVGSQILASLGVTKMRLLSSPKRYHSLSGFGLEVTEYVAE

SEQ ID NO: 10741 - protein, 336 aa, Corynebacterium glutamicum
MTIRVGINGFGRIGRNFFRAVLERNGDLEVVAVNDLTDNKTLSTLLKFDSIMGRLGQEVEYDDDSITVGGKRIAVYAERDPKNLDWAAHNVDIVIESTGFFTDANAAKAHIEAGAKKVIISAPASNEDATFVYGVNHESYDPENHNVISGASCTTNCLAPMAKVLNDKFGIENGLMTTVHAYTGDQRLHDAPHRDLRRARAAAVNIVPTSTGAAKAVALVLPELKGKLDGYALRVPVITGSATDLTFNTKSEVTVESINAAIKEAAVGEFGETLAYSEEPLVSTDIVHDSHGSIFDAGLTKVSGNTVKVVSWYDNEWGYTCQLLRLTELVASQALN

SEQ ID NO: 10742 - protein, 551 aa, Xylella fastidiosa Temecula1
MTEIKEAFVPDIGDYSNVPVIEVLVAVGDTVSKGQSLITLESDKATMEVPSSTAGIIKEIKVKVGDTLSQGHVVALIEVSEETAEVTTPMTVNTPTTRAHNTAHPEDEGSLIEVRVPDIGDYTNVPVIEVLVAVGDTVSKDQSLITLESDKATLEVPSSATGVIKQLKVNIGDTLSQGDIVVVLQSAESTPLTPTTNKPALPPNSSPAGDAISAPASPAGTQSTPPITFDANTVLPSKVPYASPAVRLLARQLDVDLSRIKGSEKNGRITREDVQKFVNTTLGTGMAEGRTPSASITTNGGLNLLPWPNVDFSKFGEIETQPLSRIKKISGANLARNWAMIPHVTQFDQADITQLEALRVQINKENAASNKNGTGIKLTVLAFLIKASASALKKFPTFNASLDATGETLTLKKYFHIGFAADTPNGLVVPVIRNVDQKGIVEIAQETSDLAKKARDGKLTPADMSGGCFSISSLGGIGGTAFTPIINAPEVAILGVSKSLIQPIWDGTQFAPKMLLPLSLSYDHRVIDGALAAHFTTYLSQILADMRRVLL

SEQ ID NO: 10743 - protein, 118 aa, Zea diploperennis
MARMQQLAVATAVVALVLLAATSEAAISCGQVASAIAPCISYARGQGSGPSAGCCSGVRSLNNAARTTADRRAACNCLKNAAAGVSGLNAGNAASIPSKCSVSIPYTISTSTDCSRVN

SEQ ID NO: 10744 - protein, 507 aa, Nocardia farcinica IFM 10152
MTVTDTLSEASASTLTPVLPQVRDWLARPKQLFIGGRWVDAASGRSFETVDPATGQVLTTVAHGGAEDVDRAVRAARTAFEGEWSLWTPAQRQRLLFRIGEAIFEHAEELAQLESLDNGKSAAVAQAVDITWVAELFQYYAGWATKIEGRTIPVSMPWAPGTQWHAYTLREPVGVCGAITPWNFPLLMVAFKLPVALACGNTIVVKPAEQTPLTTLRLAEIMVEAGLPDGVLNVVTGYGDAGAALAGHLDVDKIAFTGSTEVGKLIVDAAKGNLKRVTLELGGKSPQVVFADADLDLAVPGVASGFLFNHGQTCTSGTRILVERGIFDEFTQRVADIAAASKLGPGLDPTTEVGPLVSQEQLERVTGYIDQGLRDGARALCGGRRHGDSGFYVEPTVLVDVQSSFSVYREEIFGPVVVATPFDAEDGVAAAANDTPYGLAASVWTRDISKAHRTARQIKAGTVWVNAHNAFDAALPFGGYKQSGWGRELGASAIDAYTEQKTINAQL

SEQ ID NO: 10745 - protein, 256 aa, Archaeoglobus fulgidus DSM 4304
MGERVKLELDGEIAVATLNRPEKLNALDTKTRMELAEVIEGIEEVARVLIITGSGKAFAAGADINELLQRDAIKAFEATKLGTDLFSRIEELEIPVIAAVNGYTLGGGCELAMACDIRIASEKAKFGQPEINLAIIPGAGGTQRLPRLVGLGMAKKLVLTGEIIDAQTALRIGLVEEVVEHERLMERAKEVAAKIIEKSPLAVKVAKKALNASINMPLKEGLRYEASLFALLFSSEDAKEGMRAFLEKRKPEFRGR

SEQ ID NO: 10746 - protein, 114 aa, Zea diploperennis
QQLAVATALVALVLLAATSEAAISCGQVASAIAPCISYARGQGSGPSAGCCSGVRSLNNAARTTADRRAACNCLKNAAAGVSGLNAGNAASIPSKCGVSIPYTISTSTDCSRVN

SEQ ID NO: 10747 - protein, 491 aa, Roseovarius nubinhibens ISM
MMTDTNLKSLLKDPSLLAEKSYVNGEWIDGEGGTFDVTNPARGDVIAQVTDLSRAQVSKAIDAAVTAQKDWASWTGKERAAVLRKWFDLMMENADDLATILTAEQGKPLAEAKGEIAYGASFFEFFGEEAKRIYGETIPGHQRDKRITVIKQPIGVAASITPWNFPNAMITRKAAPALAAGCAFVGRPAAETPLSATAMAVLAERAGVPAGVFNIVTSSRSSEIGKEFCENPGIRKLTFTGSTEVGRILLRQAADQVMKCSMELGGNAPFIVFDDADLDAAVEGAIMCKFRNNGQTCVCANRIYVQSGVYDAFSKKLAEAVSKLKIGDGLDDGTQLGPLINSDAITKVQEHVADAKSKGAEVILGGGEPMEGEGYFLPPTIITGATQDMAVATDETFGPLAPLFKFDDVDDVIAMANDTIFGLASYFYAKDLSRVYKVAEALEYGIVGVNTGIISTEVAPFGGVKQSGLGREGSHHGIEDYLEMKYICMSV

SEQ ID NO: 10748 - protein, 327 aa, Mycoplasma pneumoniae M129
MSKTIQANNIEALGNAMDLALERDPNVVLYGQDAGFEGGVFRATKGLQKKYGEERVWDCPIAEAAMAGIGVGAAIGGLKPIVEIQFSGFSFPAMFQIFTHAARIRNRSRGVYTCPIIVRMPMGGGIKALEHHSETLEAIYGQIAGLKTVMPSNPYDTKGLFLAAVESPDPVVFFEPKKLYRAFRQEIPADYYTVPIGQANLISQGNNLTIVSYGPTMFDLINMVYGGELKDKGIELIDLRTISPWDKETVFNSVKKTGRLLVVTEAAKTFTTSGEIIASVTEELFSYLKAAPQRVTGWDIVVPLARGEHYQFNLNARILEAVNQLLK

SEQ ID NO: 10749 - protein, 879 aa, Pasteurella multocida subsp. multocida str. Pm70
MIQQYSTMRNNISMLGRFLGETISDAQGSDILELIENIRVLSRNSRHGDDQARNALLNTLATISNENIIPVARAFSQFLNLTNIAEQYQTISRHHHDHVASERSISALFKRLKAQQVPKENVMETVQKLLIELVLTAHPTEVTRRSLVHKHVEINKCLSKLEHTDLTDAERKAIERRLLQLIAQAWHTNEIRTQRPTPFEEAKWGFAVIENSLWQAVPEFLRHLNTSAVEYFGFHLPVELNPIRFSSWMGGDRDGNPFVTAEVTRQVLRLARWKAADLFLTDIQALSDELSVVKCTPEFQAKYGSHVEPYRTVVKALRSKLTATLAYYDDLLANRTPRVAEEDIITQDAQLWEPLYDCYQSLQACGMRIIANGLLLDCLRRIRCFGVTLSRLDIRQESTRHAEAIAEITRYIGLGDYAQWSESDKQAFLIKELSSRRPLLPREWQPSAATQEVLDTCRVIAEQPEGVISCYIISMAKTASDVLAVHLLLKESGVPYHLPVVPLFETLDDLRASEQVMSELFNIGWYRGVINNKQMVMIGYSDSAKDAGMMAASWAQYCAQEALVNLCDKCNIELTLFHGRGGTIGRGGAPAHAALLSQPPRSLKNGLRVTEQGEMIRFKLGLPAVAVESLGLYASAILEANLLPPPEPKAQWRTVMDELSTISCQIYRDVVRGEKDFVPYFRAATPEQELSKLPLGSRPAKRNPNGGVESLRAIPWIFAWMQNRLMLPAWLGAGASLRQAIEKGQKTVIEDMCKTWPFFSTRIGMLEMVFSKTDTWLSEHYDQHLVDPALWYLGESLREQLKQDIQTVLSLSHEDQLMSDLPWIAESIALRNVYTDPLNLLQVELLRRLRRNPDNPNPDVEQALMITITGVAAGMRNTG

SEQ ID NO: 10750 - protein, 118 aa, Zea diploperennis
MARMQQLAVATAVVALVLLAATSEAAISCGQVASAIAPCISYARGQGSGPSAGCCSGVRSLNNAARTTADRRAACSCLKNAAAGVSGLNAGNAASIPSKCSVSIPYTISTSTDCSRVN

SEQ ID NO: 10751 - protein, 508 aa, Pseudomonas syringae pv. tomato str. DC3000
MNASLNDTSTTVARVKLLINGEWIDSQSGEWQDIVNPATQEILAQVPFATSDEVNAAVAAAHAAYRTWRDTPVGARMRIMLRLQALIREHSKRIAAVLSAEQGKTLADAEGDIFRGLEVVEHACSIGTLQMGEFAENVASGVDTYTLRQPIGVCAGITPFNFPAMIPLWMFPMAIACGNTFVLKPSEQDPLSTLLLVELAVEAGVPAGVLNVVHGGKDVVDAICMHKDIKAISFVGSTAVGTHVYDLAGRHGKRVQAMMGAKNHAVVLPDANREQTLNALVGAGFGAAGQRCMATSVVVLVGASKQWLSDLKALAQKLKVNAGHEPGTDIGPVISRRAKQRILDLIESGVREGATLELDGREVSVPGYEGGNFVGPTLFSGVTTDMQIYTQEIFGPVLVVLEVDTLDEAIALVNANPFGNGTGLFTQSGAAARKFQSEIDVGQVGINIPIPVPVPFFSFTGSRGSKLGDLGPYGKQVVQFYTQTKTVTSRWFDDDSVNDGVNTTINLR

SEQ ID NO: 10752 - protein, 410 aa, Burkholderia sp. PS12
MATHVAIIGNGVAGFTTAQALRAEGFEGRISLIGNEPHLPYDRPSLSKAVLGGSLEHPPVLAEADWYGEARIDMLSGRSVTNLNVDARTISLDDGSTFAADAIVIATGSRARTLALPGSQLTGVVTLRTNDDVRPLCRGWTPATRLVIAGGGLIGCEVATTARKLGLAVTILESADELLVRVLGRRIGAWLRGLLTELGVRVELGTGVAGFSGDDRLEEVLASDGRRFAADNALVCIGAEPEDQLARQAGLSCDRGVIVDDHGATHAEGVFAVGDAASWPLRDGGRRSLETYMNAQRQAAAVAAAILGKHGSAPQVPVSWTEIAGHRMQMAGDIEGPGEFVLRGTLGDGAALLFRLRDGRIQAVVAVDAPRDFAMAARLVEARAAIEPARLADFSNSMRDLVRAQQGDSA

SEQ ID NO: 10753 - protein, 151 aa, Triticum aestivum
TDASQDGGSKENPENNPDCTTVYVGNLGHEVNRDELHRHFYSLGVGAIEEIRVQQDKGFGFVRYSTHGEAALAIQMGNGLVVRGKPIKCSWGNKPTPPGTSSKPLPPPVAPYQPAVAMPGVPQGFTAAELLAYQRQLALSQAADGQIAGQH

SEQ ID NO: 10754 - protein, 733 aa, Mycoplasma pneumoniae M129
MFYNWLKLYKFSKMATLVEIERDFLQKTAQKFAPEVVALITKALDYSKKWHGEQKRLSGEPFFIHPLRTALRLVEWNMDSNTVCAGLLHDIIEDTQVTEADLTAIFGKEITDLVVKVTKITSESKKQRQLNRKKEDLNLKSLVNIAMSSQQEVNALVLKLADRLDNISSIEFLAVEKQKIIAKETLELYAKIAGRIGMYPVKTQLADLSFKVLDPKNFNNTLSKINQQKVFYDNEWGNFKKQLEEMLEQNQIEYRLESRIKGIYSTYQKLTFHEQNIAKIHDLFAIRLIVKSELDCYHLLGLIHLNFTVLMKHFKDYIASPKQNFYQSIHTTVRLKGLNVEIQIRTQRMDHVSKYGFASHWIYKEKKEGLLASALQVNYLNSKQMHSRDFFKRIFGTDIIKVNVSSDNEPNIVKKLNVESNSKLLDIAYELYPKQFNKLEKIKLDGVEVMSFDVTAENEMVIEFCFGKTNNLKRRWLRYMNNHVFRERVKKDLNKLKKAVKYSELPLYEKALEELHLKLADETQIKQRLNALGIKKLTEFLELIEYPHFPKNEHLYFLASNNQKWRELIKPIKFALSQAVFQNSYFEQIEGIYITKIVIETCCTKIPDMPEQVIGILMKNILRVHLHDCRELANQKQPKIIPLYWNAHQLKMRPRKFRCQINIRGVWSETTVNKIVQTIIEGDSYLERIIPKIDKQKDEFELNITMFIDNYHQLITIMEQITTKNISYVWKYL

SEQ ID NO: 10755 - protein, 91 aa, Zea mays
RLLARALQPCLPFLQGKAAKPSESNNQCCDGVRTLYAAADTRPDRQATCRCLKAAYVQVHAVLSAAQELPGDCGLSLSYNITPDIDCDKIE

SEQ ID NO: 10756 - protein, 95 aa, Erwinia carotovora subsp. atroseptica SCRI1043
MQLNITGHHIEITEPLRDFVNGKFAKLEQYFDRINQVNVVLRVEKVQQIAEATLHVNGGELHATSEAEDMYAAIDLLIDKLARQLNKHKDKLKQH

SEQ ID NO: 10757 - protein, 738 aa, Prunus persica
MEACNCIEPQWPADELLMKYQYISDFFIALAYFSIPLELIYFVKKSAVFPYRWVLVQFGAFIVLCGATHLINLWTFSMHSRTVAIVMTTAKVLTAVVSCATALMLVHIIPDLLSVKTRELFLKNKAAELDREMGLIRTQEETGRHVRMLTHEIRSTFDRHTILKTTLVELGRTLALEECALWMPTRTGLELQLSYTLRQQNPVGYTVPIHLPVINQVFSSNRALKISPNSPVARMRPLAGKHMPGEVVAVRVPLLHLSNFQINDWPELSTKRYALMVLMLPSDSARQWHVHELELVEVVADQVAVALSHAAILEESMRARDLLMEQNIALDLARREAETAIRARNDFLAVMNHEMRTPMHAIIALSSLLQETELTPEQRLMVETILKSSHLLATLINDVLDLSRLEDGSLQLEIATFNLHSVFREVHNLIKPVASVKKLSVSLNLAADLPVQAVGDEKRLMQIVLNVVGNAVKFSKEGSISITAFVAKSESLRDFRAPEFFPAQSDNHFYLRVQVKDSRSGINPQDIPKLFTKFAQTQSLATRNSGGSGLGLAICKRFVNLMEGHIWIESEGPGKGCTAIFIVKLGFAERSNESKLPFVTKVQANHVQTNFPGLKVLVMDDNGSVTKGLLVHLGCDVTTVSSIDEFLHVISQEHKVVFMDVCMPGIDGYELAVRIHEKFTKRHERPVLVALTGNIDKMTKENCMRVGMDGVILKPVSVDKMRSVLSELLEHRVLFEAM

SEQ ID NO: 10758 - protein, 307 aa, Zea mays
  misc_feature (272)..(272): Xaa can be any naturally occurring amino acid
MATEEWELREEDAYAYEFEFDLENPFTSPADEPIASLLDAEGHHAPSISAAASATRRAAAAFISKVRFGGELAVHPRVAYLALNYVDRFLSKRQLACEQQPWAPRLLAISCLSLAAKMQRVATFSTADIQRDEDFMFDAVTIRRMERVVLGALEWRARSVTPLAFLGFFLSACYPPPQHPPQVAAVKARAVDLLLHAQPEVKMAEFSPSVVAAAALLSAAGEVAAANLHAFQASLAACPFVNSEKLRECGEVLAAAGGVGRGRAAPSADTPXTVLGHQRSASSASETDWINGGDAKKRCMGPPSQWG

SEQ ID NO: 10759 - protein, 142 aa, Oceanicola granulosus HTCC2516
MALRYLHTMVRVKDLEENMAFYELLGLKETKRSENEGGRFTLVFMAPEGQEDCPVELTWNWDGDEGLPSDSRHFGHLAYSVDNIYETCQKLQDAGVTINRPPRDGHMAFVRSPDNVSIELLQAGERLPPQEPWASMENTGHW

SEQ ID NO: 10760 - protein, 488 aa, Oceanicola granulosus HTCC2516
MIDKIAHRGPDEVHVTTLADAPVTMAHCRLSIIGTEDGAQPIRQAGNMLVANGEIYNHADLRAILGEAAFETASDSETILHLFRSGRSRWIDRLDGMFAFVLATKDRIIATRDPLGIKPLYVANMGGGAIFASELKAFDGVPVDGIEAIPPGHLIDSRDGWRQWYRTPQGAASAEPGFDIGRASRELRLVLEAAVAKWMVADVEVGSFLSGGLDSSIIAAIAQKVRLAQGLGPLKTFAVGTDGSPDLRAARAVAAHIGADHHEAVFTAQDVVGALPHVIYHLESADVDLVRSALPTLFAARLARAQVKAVLTGEGADELFAGYTYHHGYADDPRALADELTRSLGTMHNINLQRVDRVTMSESLEARTPFLDRDLIDFAQSIPAELKMRHTDPEARDATGPTTEKWILRKACEDLLPADLVWRKKAQFDEGSGTVDALSGALASLIDGPVNRQSEGALYERILGETYADPDRILAAAGTWEADRVLGG

SEQ ID NO: 10761 - protein, 70 aa, Photobacterium sp. SKA34
MTKIYDFDVKALSGEVRSFSDYEGKVLLVVNTASKCGFTPQYEALQTLYEKYRDQGLVILGFPCNQFGGQ

SEQ ID NO: 10762 - protein, 292 aa, Salmonella typhimurium LT2
MSDDNSHSSDTVNSKKGFFSLLLSQLFHGEPKNRDELLALIRDSGQNELIDEDTRDMLEGVMDIADQRVRDIMIPRSQMITLKRNQTLDECLDVIIESAHSRFPVISEDKDHIEGILMAKDLLPFMRSDAEAFSMDKVLRTAVVVPESKRVDRMLKEFRSQRYHMAIVIDEFGGVSGLVTIEDILELIVGEIEDEYDEEDDIDFRQLSRHTWTIRALASIEDFNDAFGTHFSDEEVDTIGGLVMQAFGHLPARGETIDIDGYQFKVAMADSRRIIQVHVRIPDDSPQPKLDE

SEQ ID NO: 10763 - protein, 489 aa, Silicibacter sp. TM1040
MSTPTSLSLRDPSLLETRAYVNGQWINGATTFDVIDPATGRLVAEVADLDVAAAAKAVDAAHAAGPSWAALAGKERSSILRRWHDLLVENADDLATILTAEMGKPWAEARGEILYGASFIEWFAEEAKRIYGDVIPGPQRDKRIMVLKQPIGVVGSITPWNFPNAMIARKVGPALAAGCTFVARPAELTPLSALAMAVLAERAGIPAGVFNVIPSNDAPGVGRELCTNPKVRKITFTGSTRVGRILMEQASGTIKKMSLELGGNAPFIVFDDADLDAAVEGAMIAKFRNNGQTCVCANRIYVQASVYDAFAEKLAGEVKSLQVGNGFDDATTAGPLINEAALRKVEAHISDAVGKGARIVTGGHRSDLGGTFFEPTVLRDVNPHMVVCHEETFGPLAALVRFDSEEEVIALANDSEFGLAAYFYARDLSRVWRVAESLESGMVGANTGLISTEVAPFGGIKQSGLGREGSKYGIDDFVELKNICLGGMS

SEQ ID NO: 10764 - protein, 492 aa, Debaryomyces hansenii CBS767
MSKPTLNNPDLIRTKPYINGEWFESKSTKTFKVIDPATETEIVELPDQTPEEIAFAIEKAEEAFKTFKKTNAYDRARWLRKLNDLMLENIEDLAKILTWENGKCLTDATGEIKYAASYFEWFAEEAKRIYGNTIQPSNNNNKVITYKQPIGVVGLLCPFNFPTAMGARKLAPSFAAGCTTILKPDGQTPLSSLALAYLAEKAGFPKGTFNVVLASTENTPKVGLEFCESPRIKKISFTGSTPVGKLLMRQSSSTLKKLSMELGGNAPIIIFDDADLDLAVEQSIASKFRSLGQTCVCANRLYIQSGVYDKFCEKFTEKVKEFKIGNGLEKGITHGCLINDKAITKVEEHIKDAVGKGAKVLVEGGRLPNLGKNFYAPSVVKDVTQEMVVVKEETFGPLAALLKFDTKEQVLDWCNDTPYGLASYVFSENLNTIWFMSEYLESGMVAVNTGLFTDAAMPFGGVKESGFGREGSLYGIDDYTVVKAITLGNMYR

SEQ ID NO: 10765 - protein, 630 aa, delta proteobacterium MLMS-1
MLALLRRKARSPIVLVAIAIIILVFIFWLPQMGGDGGPGTVAVVNEEPLSLREFQRRYNETLSQYRDEFGVIPPDLLEALGIREQVLQQLIQEQLLLQSAKKTGLPATSSEVQREIQSMGEFSDEAGRFDLERYRQTLTAARLSVKEFEQGIRTDLLRRKIIDHLVGFAQVSDDEVRQRFHYDHDQVRLAYLRLAAADFKPASTPSAEELEAFFQENSQDYLSPPMVRLDYLLFTPEREPEAIAEEEIVAYYEANREEFSLPEQRRARHILIRSADNDSPELRASRKEQLRAVLERARAGHDFAELVALYSEDARAAGGDLGFFQRDEMVEPIEEAAFALEPGEISDIVETRFGFHILKLDELQPARQLELAEVRDEIADRLQDEEIQDESFARAGEAYELVLSEGSLERGAAAADEQVHTTGLFARQNPPARLAPYAGLLETAFDLGEGELSSIIAAGDDGYAILHVRQRQEPQVPSLAEVKEEVQADWLASQARQAARRAADEALTALHDGRELAAIAADHAVELQESPWFSRATATAVDLPEALIETGLGLRGEEPLPAEVVAAGDHFYVPRLLERRPGDEELFQRWADPIRRELLRAKQEAVIETWVGHQLKEADIRLTPGALERF

SEQ ID NO: 10766 - protein, 485 aa, Bacillus halodurans C-125
MEAIYTRQFLAGEWIEGASTQTITNYNPYTGEKIHEIKGASLDDLDQAYRAAKNAQKEWEQTLPAQKQEVLEKAAALLAERKDEVIERLVNEAGSSIIKASIEWGATLQTIKVAATFPLRMEGKILPSNIPGKENRIYRSAKGVIGVISPFNFPLVLAMRSVAPALATGNAVVLKCSSDAPITSGLLIAELFEEAGLPKGVLNVVVGKAAEIGDAFVTHPIPKLISFTGSTEVGRHIAQLAARELKETALELGGNNVMIVLDDADIEKAAEKAAVGKFLHQGQICMALNRIIVDASIYDSFVEVFKEKVSQLQTGNPAEPATLIGPLINYKQIGRIQQLVKESVAQGAVKVLEGHVQGNLMSPTILSEVTNDMPVAKEEIFGPIAPIIKAKDEAEAIAIANDSPYGLSGSIFTGSLHRGVQVAKQIDTGMIHVNDQPVNEEAHISFGGEKDSGIGRFGGEWVLDKFTTVKWISIQEKERVYPFWG

SEQ ID NO: 10767 - protein, 72 aa, Arabidopsis thaliana
  misc_feature (4)..(4): Xaa can be any naturally occurring amino acid
  misc_feature (30)..(30): Xaa can be any naturally occurring amino acid
  misc_feature (42)..(42): Xaa can be any naturally occurring amino acid
  misc_feature (45)..(45): Xaa can be any naturally occurring amino acid
  misc_feature (48)..(49): Xaa can be any naturally occurring amino acid
  misc_feature (54)..(54): Xaa can be any naturally occurring amino acid
  misc_feature (56)..(56): Xaa can be any naturally occurring amino acid
MASXMLSSATMVASPAQATMVAPFNGLKSXAVFPATRKANNXITXITXXGGRVXCXQGPEKKGLYFLPVYGE

SEQ ID NO: 10768 - protein, 716 aa, Arabidopsis thaliana
MSGSVSGCGSGGCSIVWFRRDLRVEDNPALAAAVRAGPVIALFVWAPEEEGHYHPGRVSRWWLKNSLAQLDSSLRSLGTCLITKRSTDSVASLLDVVKSTGASQIFFNHLYDPLSLVRDHRAKDVLTAQGIAVRSFNADLLYEPWEVTDELGRPFSMFAAFWERCLSMPYDPESPLLPPKKIISGDVSKCVADPLVFEDDSEKGSNALLARAWSPGWSNGDKALTTFINGPLLEYSKNRRKADSATTSFLSPHLHFGEVSVRKVFHLVRIKQVAWANEGNEAGEESVNLFLKSIGLREYSRYISFNHPYSHERPLLGHLKFFPWAVDENYFKAWRQGRTGYPLVDAGMRELWATGWLHDRIRVVVSSFFVKVLQLPWRWGMKYFWDTLLDADLESDALGWQYITGTLPDSREFDRIDNPQFEGYKFDPNGEYVRRWLPELSRLPTDWIHHPWNAPESVLQAAGIELGSNYPLPIVGLDEAKARLHEALSQMWQLEAASRAAIENGSEEGLGDSAEVEEAPIEFPRDITMEETEPTRLNPNRRYEDQMVPSITSSLIRPEEDEESSLNLRNSVGDSRAEVPRNMVNTNQAQQRRAEPASNQVTAMIPEFNIRIVAESTEDSTAESSSSGRRERSGGIVPEWSPGYSEQFPSEENGIGGGSTTSSYLQNHHEILNWRRLSQTGYVKSAFGGAKGEEHHKGCNSGEIWLDCKPSTFGTV

SEQ ID NO: 10769 - protein, 231 aa, Chlamydophila caviae GPIC
MNKKQRQKTLIAPSIMGGDLACIGAEAKKIEESGADLIHIDVMDGHFVPNLTFGPGVIAAINRSTDLFLEVHAMIYTPFDFIEAFVKAGADRVIVHFEASEDLKELLAYIKKCGIQAGLAFSPETSIEFIPPFLPFCDVLLLMSVHPGFCGQGFIPDVPDKIRFTRQALKTMGLEDSCLIEVDGGINEASAKECREAGADILVAASYMFQKDALTMEEKVLLLRGENHGIK

SEQ ID NO: 10770 - protein, 146 aa, Lactobacillus acidophilus NCFM
MTKTWRLNERHYGALRGLNKDVSRKVFGVEQVLLWRRGFNSIPPAQGSPVIDRRYKLCDQHLMPRAESLHQTQNRLMPYYYDHIAPKLLNGEDQLIVAHGSSLRALIKKLENINDHDIVNLEVPNAEPIVYTMDDQLNIINKKILR

SEQ ID NO: 10771 - protein, 225 aa, Coccidioides immitis RS
MFTFFTLPLYFQNNASASQAMVSALNKIFDSYRGAMKYLGDIKVQLDEVVCLAISELLRSPSMGEFTRESFIDGWKDSGSDTLAKQASFASNLRKRIRNEPDLFKRVYRYAFILCRLPGQRHLTLEIATEQWRLFFTADNGGISWNTSTTPWLDWWLEFVEGSWKRPINKDLWEQTEVLMRKTLEDPSLKWWSPDGAWPGAVDDFIVFAKGKLGQNSSSEAMDVE

SEQ ID NO: 10772 - protein, 112 aa, Wolinella succinogenes
MKKIEAVIKPFKLEEVKSALVERGISGMTVSEVKGYGRQKGHTELYRGAEYVVDFIPKIKLEIVVRDEEVEGIIEAIIKSAKTGKIGDGKIFVTPVERAIRIRTQESDEEAI

SEQ ID NO: 10773 - protein, 611 aa, Geobacter sulfurreducens PCA
MCGIVGKYYFNKNAGDSSDIDAMMQAIYHRGPDSSGKYINGRAALGFQRLSIIDTVSGHQPLYNETKTIVLLANGEIYNYKEFVPFLESKGHVFSTRSDCEVIIHLYEEYGIEFISKLNGMFAFCLYDTRNDVMFIARDRVGIKPLYYHLNKEAIIFGSEIKGILASGEVVTEEANDCLAEYLCFRYVANFRTFFSSVNALEPGTYIKISPNGCTFEKFWDLSKYVLNYAQDGDLVETVDAALTASVQRQMMTDVPLGTQLSGGVDSSLVSKLAAGYSPGLKTFTVSFFESAYDESAYARLLADSAGLEYHQIRVDGKTFADTLPKVIWYHDEPLCHANSVHMYLLCTYARQFVTVLLTGEGADELFAGYPRYQICRFGDAYNKLNPSVASLVKSVLKGVPARKIVKIVDNLGLGARELALWNSSFTTKEKVSWLLDSGDVTLDARSALVDSVWNDELSLFDNLLLYEQKSYLQPILMRQDKMSMAASVESRVPVLDNEMLDVANTIPYQYKVRHFTPKHVFKKVAERHISRKIVYKKKVGFGVPVDEWLRDHSGLGRYLDLLLDTARGINGVSRPRIEQLIAEHASRRYNHGDVLWPLVNYAIWREQFFK

SEQ ID NO: 10774 - protein, 192 aa, Coccidioides immitis RS
MRPLTEAETKTLFSKLANYTGSSLNHLIAPPSSSEGGQSEDERHVFRLHGSRVYYVRLSIANLATSIARDNLLSVGTCIGKFTKTGKFRLHITALDVIAPHARYKVWIKPNGEMPFLYGGNVVKAHVGRWSDDCPEHQGVVVMSMDDTPLGFGVTARSTAEARRLDPTGITTFRQGDIGEYLREEDTLFQTT

SEQ ID NO: 10775 - protein, 483 aa, Mycoplasma pneumoniae M129
MANKDQNLTLWYDQLLSKAQLVSYGDVKGTNCFLPNSWNLWLQIQRLYNNATALIKLKDKVILKQFIPIEPLPYTVEQVQLPTLSFYSEYQKEKRHVEGFNPELFLIEQIGTKKLHDPLVLRPTSEIAFCNLWKKQSFSYQNLPVIYNQWTCVFRAEKNTRPFLRNSEFYWQETHGLFSDGVNSESAAIAFWKLYQDIIVNQLCIPAFVGLKSPNERFAGAQNTWTVESIMPDGQALQCATSHDLGQTFTKPFGLTFQNQANQQAIPYSFSCGISTRILGALLLTHSDDFGLVLPWKVAPIQVKLYLFDKKGDTKTVELAQKVQTLLEQLAIRFQFIKVENQLGKQLGQGEVNGIPFQLIVDNPQTVNIFNRLTRVKTAYSFEQLASRFVELVQQYHQAMYDKAKAVVQQKVVQATTLKQIEQAFNDKKAVLCAVRLTDTLEQQLKERYQVTVRCCLEQLQKPQICPFSGESAQDYVLIARAY

SEQ ID NO: 10776 - protein, 557 aa, Aspergillus nidulans FGSC A4
MIEELVSKTTPGQAVVYLLGAFFLACLARKIQVQWQLSRLGSRAPKIPFRLPYGLLIPSISRNSHADRRLSSAMDFIYKSMQANKSDQDLEYFTDVMRNAKGAPLAEDKKTVELDAGISSRIIFTRDPENIKAILTGQFSDYGKGESFHRDWREFLGDSIFVTDGEQWSASRHLIRPMFVRDRLVDTEIFEKHVQHLIPLLAGNNESKIVDVTSLFFRYTLDAATNYLLGQGTDSLQNPETEFAEAFRYVQRRQAQYFRLGVFKFVLSRTEFRRQLKVMDDFIKPYIDRVLAMSPAELDQKLSKSDTFLHALARFTRDRRTLRDQLVAILLAGRDTTAATLSFCLFELARNPEVTAKLREEIASRLGLGASAQKPSYTDLKEMKYLNAVLNESMRLYPVVPFNVRFSLKDTTLPRGGGPDGLAPVAVRAGTRVVYSTMIMQRSPENYDPPSAPNYFDPAQWNPERWLSGWQPKPWQFIPFNGGPRICIGQQFAMIEMGYTVVRILQAFERIQAVPEAGKSVVEDPRLRFEVTLTPASELNCVFVRDGEGREDEKISR

SEQ ID NO: 10777 - protein, 181 aa, Arabidopsis thaliana
MIIYLSVYTPLYQHIYIYIAHTLHGFLILIKINKLIFEYPKKNLASSNFFKYIITSTMSGVWVFNKNGVMRLVENPYNQSAGDSSESSSSGGNQQQRMRRKILVHLPSSEVVSSYGSLEKILKNLGWERYYSGDNTDHLLQFHKRTSIDLISLPRDFSKFNSIHMYDIVVKNPNVFHVRDM

SEQ ID NO: 10778 - protein, 865 aa, Dechloromonas aromatica RCB
MLINLINNIAFLVALVAAGLIVLKRFRKHTLNRQVLLGFLFGGVTLLGMLNPVNFAPGLIFDGRSIVLSVAGVVGGGITAAIAVSMAAIYRYQLGGIGAPVGITVILLSALLGVLARHWWLRREVAPSSTEYLALGVLVQLAQLATFTQIPNGAGYPFIEQAWWILLLFYPPATMLMCLIFRDQEQRIEQQQALQAAQDAATRERSMLRTLINTLPDLIWLKDSKGVYLACNHRFEQFFGASEPEIVGKTDYDFVDKALADFFRAHDLAAMEKKAPSVNEEEITFADDGHRELLITTKIPMLDENSQLVGVLGIGHDTTQQKMAEQALENSEQQLRFVLEGAELGFWDWDIAAGTVSRNERWANMLGYSHDEIRQTTQQWTDFIFPDDRSRAWDSINAALEGRASMHRLEYRMLRKDGSIIWILDQAKVMQRDAQGKPLRMCGTHTDISEIKATHEELTQHRRHLEKLVGERTHELTLAKEAAETATIAKSAFLANMSHEIRTPLNAITGMTHILRRSGLSPEQTDKLDKIEGAGKHLLEIINAILDLSKIEAGKLTLESVPVHVGSLLENVASMLSQRARALGIAINLEPITISSPLLGDPTRLQQALLNYATNALKFTEQGHITLRVKEEAQTEERVTLRFEVSDTGVGIAPNILPKLFGTFEQADNSTTRKYGGTGLGLAITKKLAELMGGTVGVSSIEGQGSTFWFSAVLAKAEQTSDTLHRADIEEAGQTIRQNHAGKRILLAEDEPINQEIAQVLLEEVGLTVDFAADGQEAVEKATAGRYDLILMDMQMPHLDGLEAARQIRLIPEYAATPILAMTANAFAEDKARCFMAGMDDFIAKPVSPDVFYQTLLRWLDNSPG

SEQ ID NO: 10779 - protein, 370 aa, Chloroflexus aurantiacus
MSKEHVQTIATDDVSKNGHTPPTNASTPPYPFVAIVGQAELKLALLLCVVNPTIGGVMVMGHRGTAKSTAVRALAAMLPPIKAVAGCPYSCAPDRTAGLCDQCRALEQQSGKTKKPAVINIPVPVVDLPLGATEDRVCGTLDIERALTQGVQAFAPGLLARANRGFLYIDEVNLLEDHLVDVLLDVAASGVNVVEREGVSVRHPARFVLVGSGNPEEGDLRPQLLDRFGLHARITTITDVSERVEIVKRRREYDADPFAFVEKWAKETQKLQRKIKQAQRRLPEVILPDPVLYKIAELCVKLEVDGHRGELTLARAATALAALEGRNEVTVQDVRRIAVLALRHRLRKDPLETQDDAVRIERAVEEVLVP

SEQ ID NO: 10780 - protein, 634 aa, Chloroflexus aurantiacus
MVQKAIALPAAPLPFTAIVGLDTARQALLLLAVDPSLAGVAIGAGAGTGKSALVRAFARMLAGGREFDPTIPWQLVEMPVGVSEDRLLGGIDIESNPGDGERVHRSGLLARANGGMLYVDSVNLLDDSTINHILSALDSGVVRVEREGISVVEPARFVLLVTYDPAEGPPRRHLLDRLGLIVAPIGKAPVTTRAEVVRRNLQPGTDYEDDEALVLAGILAARELLPSVTISDEQVQQLSLTAMALGIEGHRADLFAVRAARAAAALAGREEVNNDDLELAVRLVMLPRATRLPEMTPEEAGPPPPPEPAPPPPSPENSDDEQRDDEEEKPPQPPEDELTIEELILAAMETDVPPDILETPFTVRRRGRSGSRGTISGQRGRHIRSVPGKPAQGRLDVIATLRAAAPWQRIRAAEYHPHRRGRIHLRADDLHIKKYRSKAGTLFCFLVDASGSMALHRMRQAKGAVNALLQQAYVHRDQVALLAFRGERADLLLPPSQSVELAKRALDVLPTGGGTPLAAALLAAYQISEQARSRGIFRTTIVLITDGRPNVPLKADPTMDKARRLEQARQEVQQLAGRLRAAGVGAVVIDTQRSFVSRGEAQQLAAWLGGRYVYLPNGRGDQIANAVIAASEEG

SEQ ID NO: 10781 - protein, 230 aa, Lactobacillus plantarum WCFS1
MAKLVLIRHGQSEWNLSNQFTGWVDVDLSEKGVEEAKAAGQKVKEAGLEFDYAFTSVLTRAIKTLHYVLEESDQLWIPETKTWRLNERHYGALQGLNKKETAEKYGDDQVHIWRRSYDVLPPLLSADDEGSAVNDRRYADLDPNIVPGGENLKVTLERVMPFWEDQIAPKLLDGKNVIIAAHGNSLRALSKYIEQISDDDIMDLEMATGEPVVYDFDEKLKVLGKEKLGK

SEQ ID NO: 10782 - protein, 397 aa, Arabidopsis thaliana
MDFNAGVPMSSLSPLMNQDAMWQMNLSSDETMETGSYPERPGEPDCSYYIRTGLCRFGSTCRFNHPRDRELVIATARMRGEYPERIGQPECEYYLKTGTCKFGVTCKFHHPRNKAGIAGRVSLNMLGYPLRSNEVDCAYFLRTGHCKFGGTCKFNHPQPQPTNMMVPTSGQQSYPWSRASFIASPRWQDPSSYASLIMPQGVVPVQGWNPYSGQLGSVSPSGTGNDQNYRNLQQNETIESGSQSQGSFSGYNPGSSVPLGGYYALPRENVFPERPGQPECQFYMKTGDCKFGTVCKFHHPRDRQAPPPDCLLSSIGLPLRPGEPLCVFYTRYGICKFGPSCKFDHPMRVFTYDNTASETDEVVETSTGKSRRLSVSETRQAATTSSGKDTTIDNTQQ

SEQ ID NO: 10783 - protein, 261 aa, Bordetella pertussis Tohama I
MSEQSILTEVRDHVGIITINRPKLHNALDTPTLLELERALTTLEADAECRVIVVTGAGEKSFVAGGDLVDLNSRQGLAHYQEFAEDIHHVFRRFETSDKPTIAAVNGWALGGGTELLLCLDLRIVADNAAIALTEVNLGLFPGAGGTQRIIRQISPCQAKEMMFTGGRISAADAVRIGLANRAVPAADLMAETLALAGQIAAKSPLVLKLLKRTLRDGADMPLANALAHEQAMIGLVLDTRDAHEGIGAFLEKRAARFTGQ

SEQ ID NO: 10784 - protein, 331 aa, Nostoc punctiforme PCC 73102
MQNLPNFRDYYEILGVSKDASGEEIKKVYRRLARQYHPDLNPGNKESEEKFKDIGEAYEVLSDSAKRSQYDQFSRYWKQKGFAGNKQTPKAKTWQSGASDRNGNQDVDPSQFSDFESFINQVIGVKNKSGASKSSNGNTSDPFRSPRTKVAYTVNTPPRTTRRDIEARLTLPLEKAYQGGNERIRLEDGRSLEVNMPLGMVTGQTIRLRNQGVGGGDLYLKITVEPHPLFKLEGLNILCQVPVTPSEAVLGGQVEAPTLDGPVKMTIPPGVRSGQKFRLGNKGYPSDDGKRGDQLVEIQIVTPKNISQEERELYEKLRQIETFKPRADLLS

SEQ ID NO: 10785 - protein, 370 aa, Aquifex aeolicus VF5
MERFDVVVVGAGPSGSSAARYLSEKGLRVLLMERKKLPRFKLCGGALSGRFSKYLPQDFKSKVLNVIHKGYLGFRGDKHKLKEREEVAYIIDRADFDHFLAQKAMEKGCELREETELLDLWEEKGKIILDTTKGKVSCDFLIGADGFHSKVAKFLGFKKEKYYRSVEVLAEGEMDFNSVVIELGLVKRGYLWVFPKGNKLNIGVASTEKENLLEVLKDYIKRQKIVKVKKIYKPKSWFIPFAEGSEELHTGRGRILLVGDAGNFVDPLLGEGIYYGYLSGLLAGDAILENPQNPEKTYRKKVKELAKEFTYAGKIAKLAYRFQRVAYKMGGGTSLERYMEFLKGHTTYEEMYKKGWLDFIKNLILYPLKS

SEQ ID NO: 10786 - protein, 324 aa, Bordetella pertussis Tohama I
MAELRFAHAINRALAECMEEDPMVFLFGEDIAEAGGPFGVTRGLHDRFGSDRIRDTPISEATMANAAVGAALSGLKPVLEIMFMDFMTLTMDALVNQAAKARFMFGGQASVPMVVRTPHGGGISAGPQHSQCLEAWFAHIPGLKVVCPSNPADAYGLLKSAIRDPDPVVFVENKALYAAKGEVPDDVGPIPLGQARIARAGRDLTVVSYGAMVHKVERAAEALARDGIEAEVLDLRSIQPWDEAAVLASLRRTHRLLIVHEAVEAFGVGAEIAARMADIGFDELDAPIVRVAAPFVPVPFAPSLEAQYQPQEADIIAAARKLCA

SEQ ID NO: 10787 - protein, 160 aa, Pseudomonas aeruginosa PAO1
MSAFHDLTLQGLDGQDLPLSPFKGKVLLVVNVASKCGLTPQYAGLENLYQTYRERGFAVLGVPCNQFAGQEPGSEADIQSFCSLNYGVSFPMSAKVEVNGSARHPLYRLLAGEGAEFPGDITWNFEKFLLGPDGRVLARFSPRTAPDDPALVQAIEKALG

SEQ ID NO: 10788 - protein, 617 aa, Oryza sativa (japonica cultivar-group)
MHRFLVTALLFSLLNYGAVMATESDEADFFRNCPPSRCSSDGPDIKFPFRLESSSSSCGAPGMQLSCSGQDTLLLHHVLGLSKVTGIDYIYGVINIVPLAESWSQCALQKIISANYSTSVYKQYGFQYASLVSCSEEFIWDSTDSIFGPISCLSNASQSLYLVAPYAFVSILPLYCKVVSTEIMIPYTSNQGRKDYNASASTEFNESAKRITTFSEITFTWSAPNITDVCIDCERQQRLCGFSSQRRTAFCKPHGSKSPAKVIIVAVSVPTIVVLTLVVASALYLSLKTKNDDEIQLKVEMFLKTYGTSKPTRYTFSEVKRITRRFKHKLGTGGFGSVYKGELSKGVPVAVKMLENSKGEGEEFINEVATIGRIHHVNVVRLLGFCSEGTRHALIYEFMPNNSLEKYIFSRDYISSQEVLVPDKMLKIALGIAQGIEYLHQGCSQRILHFDIKPHNILLDHSFSPKISDFGLAKLCARDQSIVTLTAARGTMGYIAPELYSRNFGAVSYKSDVFSFGMLVLEMLSGKRNSDPSINSQNEVFVPEWIYETIVSAQESEFAKDMTQEEKEKLRKLAIVALWCVQWNPANRPSMRKVVNMLTGSLQNLKNPPRPFVSSLS

SEQ ID NO: 10789 - protein, 554 aa, Salmonella typhimurium LT2
MCSIFGVFDIKTDAAELRKKALELSRLMRHRGPDWSGIYACDNAILAHERLSIVDVNAGAQPLYNARKTHVLAVNGEIYNHQTLRAEYGDRYAFQTGSDCEVILALYQEKGPDFLDDLQGMFAFALYDSEKDAYLIGRDHIGIIPLYMGYDEFGNFYVASEMKALTPVCRTIKEFPAGSYLWSKDGEIRQYYQRDWFEFDAVKDNVTDKNALRQALEESVKSHLMSDVPYGVLLSGGLDSSVISAITKKFAARRVEDQERSEAWWPQLHSFAVGLEGSPDLKAAQEVANHLGTVHHEIHFTVQEGLDAIRDVIYHIETYDVTTIRASTPMYLMSRKIKAMGIKMVLSGEGSDEVFGGYLYFHKAPNAKELHEETVRKLQALHMYDCARANKAMSAWGVEARVPFLDKKFLDVAMRINPQDKMCGNGKMEKHVLRECFESYLPASVAWRQKEQFSDGVGYSWIDTLKEVAAKQISDQQLETARFRFPYNTPSSKEAYLYREIFEELFPVPSAAECVPGGPSVACSSAKAIEWDEAFKTMDDPSGRAVGVHQSAYQ

SEQ ID NO: 10790 - protein, 175 aa, Pantoea stewartii
MLWIWNALIVFVTVVGMEVVAALAHKYIMHGWGWGWHLSHHEPRKGAFEVNDLYAVVFAIVSIALIYFGSTGIWPLQWIGAGMTAYGLLYFMVHDGLVHQRWPFRYIPRKGYLKRLYMAHRMHHAVRGKEGCVSFGFLYAPPLSKLQATLRERHAARSGAARDEQDGVDTSSSGK

SEQ ID NO: 10791 - protein, 518 aa, Buchnera aphidicola
MNSQVIIFDTTLRDGEQALQASLSVKQKLQIALSLENTGIDIIEVGFPISSPGDFKSVQTISKNIKNSRICSLARCLDKDIDAAAEAMHSSNAFRIHIFLATSILHMESKLKKNFDQIIDMAITSVKRALRYTDDVEFSCEDASRTTMDNLCRIVEKLINAGVKTINIPDTVGYTVPNELSSIIHNLFQRVPNIDKSIISVHCHNDLGMAVGNSISAIQAGARQIEGTINGIGERAGNTALEEVIIAIKVREDVLGVSTKIKHKEIYRTSQIISQICNLPIPPNKAIVGSNAFAHSSGIHQDGVLKNRKNYEIMEPSSIGLKEVKLNLTSRSGRAAVKHYMTEMGYRECDYKIDELYASFLKLADKKGQVFDYDLEALAFINQQQEELEHFSLSFFSVQSISNGLSTASVKLLCGKKTFIESATTSNGPIDAIYQALNRITHFPIILQKYQLIAKGKGKDALGQVDILVEHKKRKFHGMGLATDIIESSAQAMVNVLNNIWKANQVNEKLKKLKKINN

SEQ ID NO: 10792 - protein, 449 aa, Escherichia coli CFT073
MSEIVVSKFGGTSVADFDAMNRSADIVLSDANVRLVVLSASAGITNLLVALAEGLEPGERFEKLDAIRNIQFAILERLRYPNVIREEIERLLENITVLAEAAALATSPALTDELVSHGELMSTLLFVEILRERDVQAQWFDVRKVMRTNDRFGRAEPDVAALAELAALQLLPRLNEGLVITQGFIGSENKGRTTTLGRGGSDYTAALLAEALHASRVDIWTDVPGIYTTDPRVVSAAKRIDEIAFAEAAEMATFGAKVLHPATLLPAVRSDIPVFVGSSKDPRAGGTLVCNKTENPPLFRALALRRNQTLLTLHSLNMLHSRGFLAEVFGILARHNISVDLITTSEVSVALTLDTTGSTSTGDTLLTQSLLMELSALCRVEVEEGLALVALIGNDLSKACGVGKEVFGVLEPFNIRMICYGASSHNLCFLVPGEDAEQVVQKLHFNLFE

SEQ ID NO: 10793 - protein, 888 aa, Xanthomonas axonopodis pv. citri str. 306
MRDDVRRLGALVGDLLAEQVSAEFLDEIERVRTTAISRRESDAPPSTLSEQLAGRQPRDAEALVRAFSTYFQVVNIAERVHRIRRRREYQRSGTDTPQPDGLHDALRRLKAQGVTLDELSQWLPRIDVEPVFTAHPTEAVRRALLEKEQLMVASLVDNLDGMRTPNERASDAARFRMALTASWQTADSSPVRPTVDDEREHVGFYLTQVLYRVIPVMYETLEHAIEETYGSVPALPRLLRFGTWVGGDMDGNPNVDAKTIAGTLDAQRRAVLDRYQKELWQLASLLSQSTTLVQVSGELTAQLERYRALLPDAAARSRPRHGDMPYRLLNDLMRARLQATLDDADGAYAAPSELEHDLQLILDSLQANKGLHAGWFAARRLLWRVRSFGFHLARLDVRQESSVHARAVADALGQTDWDAQDATQRAAVLGPYAAGQDPLPRVDDEGNARLDAVFAALADARTRHGADALGSYIISMAHNRADVLTVLALARRGGLVDDAGAVPLDIVPLFETVDDLRGGTGTVQDLLADPVYRQHLAARGDTQMVMLGYSDSGKDGGIAASRWGLQRAQVELLEAAAELGVRLTFFHGRGGSIARGGGKTSRALDAAPRGSVDGRLRVTEQGEVIHRKYGIRALALRSLEQMTGAVLLSSLRPRAPEPREARWRPVMDLVAERSTVAYRAFVGAPEFMQYFRLATPIDVIERMTLGSRPSRRLGQDAALSNLRAIPWVFAWSQARAVIPGWYGVGSGLQAAVDAGHEETLREMAQDWPFFRTFLDDIAMVLSKGDLNIAELFSRLSGDLHTRFFPLIRDELALTKGWVKALLQQQSLLQHDPRLALSIRLRNPYIDPISVLQVDLLQRWRATDGEDEALLRALVACVNGVSQGVQNTG

SEQ ID NO: 10794 - protein, 363 aa, Buchnera aphidicola
MKKKFRIAVLPGDGIGPEIMREAYKILNILEKNFSLPLEIREFSVGGIAIDREGIALPEETLRGCENSDAILFGSVGGKKWDYLPIESRPERASLLPLRKHFNLFSNLRPAKLYSDLKNLSPLRSNIVRNGFDILCVRELTGGIYFGKPKGRSKNENGEYSFDTEIYYDFEIKRIAHLAFELASSRRCKVCSIDKSNVLASSILWREIVEEVSKNYPNIILSHLYIDNACMQIIKNPSQFDVLLCSNIFGDIISDECAMITGSIGMLPSASLNSKKFGLYEPAGGSAPDIEGKNIANPIAQILSLSMLIRHSMNLNEIADKIDSSVYRALKAGYRTLDISDGKNYIKTNEMGDIIAKFLINGK

SEQ ID NO: 10795 - protein, 187 aa, Oryza sativa
  misc_feature (101)..(101): Xaa can be any naturally occurring amino acid
GRAAFGHFGIAVEDVAKTVDLIKAKGGTVTREPGPVKGGKSVIAFIEDPDGYKFELIERGPTPEPLCQVMLRVGDLDHAINFYEKAFGMELLRKRDNPQYXDKNAVLELTYNYGVKEYDKGNAYAQIAISTDDVYKTAEVIRQNGGQITREPGPLPGINTKITACTDPDGWKTVFVDNVDFLKELEE

SEQ ID NO: 10796 - protein, 475 aa, Streptococcus mutans UA159
MTKQYKNYVNGEWKLSENEIKIYEPASGAELGSVPAMSTEEVDYVYASAKKAQPAWRSLSYIERAAYLHKVADILMRDKEKIGAVLSKEVAKGYKSAVSEVVRTAEIINYAAEEGLRMEGEVLEGGSFEAASKKKIAVVRREPVGLVLAISPFNYPVNLAGSKIAPALIAGNVIAFKPPTQGSISGLLLAEAFAEAGLPAGVFNTITGRGSEIGDYIVEHQAVNFINFTGSTGIGERIGKMAGMRPIMLELGGKDSAIVLEDADLELTAKNIIAGAFGYSGQRCTAVKRVLVMESVADELVEKIREKVLALTIGNPEDDADITPLIDTKSADYVEGLINDANDKGAAALTEIKREGNLICPILFDKVTTDMRLAWEEPFGPVLPIIRVTSVEEAIEISNKSEYGLQASIFTNDFPRAFGIAEQLEVGTVHINNKTQRGTDNFPFLGAKKSGAGIQGVKYSIEAMTTVKSVVFDIK

SEQ ID NO: 10797 - protein, 551 aa, Escherichia coli CFT073
MLMKNINPTQTAAWQALQKHFDEMKDVTIADLFAKDGDRFSKFSATFDDQMLVDYSKNRITEETLAKLQDLAKECDLAGAIKSMFSGEKINRTENRAVLHVALRNRSNTPILVDGKDVMPEVNAVLEKMKTFSEAIISGEWKGYTGKAITDVVNIGIGGSDLGPYMVTEALRPYKNHLNMHFVSNVDGTHIAEVLKKVNPETTLFLVASKTFTTQETMTNAHSARDWFLKAAGDEKHVAKHFAALSTNAKAVGEFGIDTANMFEFWDWVGGRYSLWSAIGLSIVLSIGFDNFVELLSGAHAMDKHFSTTPAEKNLPVLLALIGIWYNNFFGAETEAILPYDQYMHRFAAYFQQGNMESNGKYVDRNGKVVDYQTGPIIWGEPGTNGQHAFYQLIHQGTKMVPCDFIAPAITHNPLSDHHQKLLSNFFAQTEALAFGKSREVVEQEYRDQGKDPATLDYVVPFKVFEGNRPTNSILLREITPFSLGALIALYEHKIFTQGVILNIFTFDQWGVELGKQLANRILPELKDDKEISSHDSSTNGLINRYKAWRG

SEQ ID NO: 10798 - protein, 309 aa, Chromobacterium violaceum
MDKIVIASRESRLAMWQAEHIQARLQALYPHLTVEILGMTTQGDQILDKTLSKIGGKGLFVKELEQALMDGRADLAVHSLKDVPMTLPDGFALAAVCEREDPRDAFVSNRYQHLSELPAGSVVGTSSLRREAQLRARFPQLAVKPLRGNVQTRLKKLDDGEFDAIILAAAGLKRLGLAERIQGELAPSESLPAAGQGALGIEIRADRADLSALLAPLNHPDTRACTAAERALAKELGGSCQVPLGAFATLADGTLTLGGLVAHPDGSVVLTASASGPADYADALGRAVAKKLIDAGARPLIAAVLAEPR

SEQ ID NO: 10799 - protein, 295 aa, Oryza sativa
MGNASGREEDPAAAAGEGDVEDSSVRSSERGFPPYGGGGNHVRRACSVGVVGGGGGAGSPPGSPGRSLSPRMFVPQTPVPPLQRAADVTPVFNRILMNEQEEEFDGPPQKEIPVLIVWTLGGKNVSVEGSWDNWKSRKPMQKSGKDHSLLLILPSGVYRYRFVVDGERKCLPDLPCETDIMGNAVNLLDVHDFVPESVESVAEFEPPPSPDSSYSIQAPEEKDFSKEPPVLPSQLHLGVLNSQNSDESCARPQHIVLNHLFIEKGWGAHPLVALGLTHRFESKYVTVVLYKPIER

SEQ ID NO: 10800 - protein, 252 aa, Listeria monocytogenes str. 4b H7858
MNAATRAVVRKAIYEGLEVYGINYGFLGLVNGDIRKLELGSVGDLLHRGGTFLYSARYPEFATEEGQLKGIEQLKKHQIDGLVVIGGDGSYHGAEALTKRGFPTIGIPGTIDNDISGTDFTIGFDTALNTVLDALDKIRDTATSHERTFIIEVMGRDAGDIALWSGLAGGAEAIIVPEESFNMDDVVDRLNKGRERGKKHSIIVVAEGVMSGNEFAKQLAEYGDYHARVTVLGHVQRGGSPTAFDRVLASRL

SEQ ID NO: 10801 - protein, 504 aa, Cryptococcus neoformans var. neoformans JEC21
MDAKKATIAVIALAAAATAYKVMSTTQEKKNTEGVCPATGQKLAGSTGCPFSSGLPLPDPAHRCDPNSIQEEYKVPEVPPLTEAQKDIIKSTAPILEQHGVTITTHFYKNMIRAHPELRDVFSESAQKLGHQPAALAAAVYAYACNIHDLTPILPVVERIAHKHTSLHITANQYGIVGKHLIQAIVDILGDAVTPDIADAWYNGYWNLAHVFIKRERELYDSAIEAGGWEGWRQFKVAKRVKESNEITSFYLKPVEGSGKPLPKFRPGQYTAVQIDIPALGHKQARQYSLSDAPNGEYFRISVKREDGVPVPTFSNPEVPFHPGWMSNVLHKDYQEGSIINVASPFGDFYYAPSDSSPTAPLVLLSAGVGQTPVMAMLNAQLAKNNEPNSPAKPITYVTVARSPKVRAFKDHVKKLSEVHENVKSRIFYSRPTDDVVEGKDYDFKGRMDLEKIKEDLYLEDKTAEYYICGPSKFMLNTRDKLQSLGVDPSRIHYELFEAGNLSA

SEQ ID NO: 10802 - protein, 456 aa, Pseudomonas aeruginosa UCBPP-PA14
MSNPPPTAERTQLRKSLKLWQIVMIGLAYLTPMTVFDTFGIVSGISQGHVPTAYLLALAGVLFTAISYGKLVRQFPTAGSAYTYAQRAINPHVGFMVGWSSLLDYLFLPMINALLAKIYLTALFPEVAPWVWVVMFVLIMTLINIKSVNLVANFNTVFVLVQLAIIVVFIGLVIHGLNNGEGTATVLSTQPFFSEHAHLSAMVAGATILCFSFLGFDAVTTLSEETRDAAKVIPRAIFLTALYGGVIFITVSYFLQSYFPTNVRFKEPDAALPEIALYVGGKLFQSIFLCATFINTLASGLASQASVSRLLYVMGRDNVLPERIFGFVHPKWRTPSINVLIVGMVALSAISFDLVTATALINFGALVAFTFVNLSVIVHFYVRGGRNRSLKEHFHYLVLPLLGAAIVAVLWLNLESTSLVMGLIWAGLGFGYLFYLTRSFSRPPPRFQESELSPTQ

SEQ ID NO: 10803 - protein, 216 aa, Arabidopsis thaliana
MSDDEHHFEASESGASKTYPQSAGNIRKGGHIVIKNRPCKVVEVSTSKTGKHGHAKCHFVAIDIFTAKKLEDIVPSSHNCDVPHVNRVDYQLIDITEDGFVSLLTDSGGTKDDLKLPTDDGLTAQMRLGFDEGKDIVVSVMSSMGEEQICAVKEVGGGNVRYVIEYLWKHRVTQAAIVFDILTGFDITRFCIPCTKSGKTVIARKGQCFPLLRNWN

SEQ ID NO: 10804 - protein, 368 aa, Arabidopsis thaliana
MDFDSISRESTFLSPLLNQNAMWQMNLGSDDTMGVDGSYPERHGEPDCAYYIRTGLCRFGSTCRFNHPHDRKLVIATARIKGEYPERIGQPECEFYLKTGTCKFGVTCKFHHPRNKAGIDGSVSVNVLSYPLRPNEDDCSYFLRIGQCKFGGTCKFNHPQTQSTNLMVSVRGSPVYSALQSLTGQPSYSWSRTSFVANPPRLQDPSGFASGSQGGLFSSGFHSGNSVPLGFYALPRENVFPERPGQPECQFYMKTGDCKFGTVCKFHHPRDRQTPPPDCVLSSGEPLCVFYSRYGICKFGPSCKFDHPMRVFTYNNNTASPSPSSSLHQETAITTELRNLLVSSSVEAKPTSLPETTSAKDTIVDAQH

SEQ ID NO: 10805 - protein, 741 aa, Silicibacter sp. TM1040
MNCLANLDVNLASGAAASLWVVCSIVLIRIARNIPFSGQLSFVLTLAAMLWWLFTVIFDLASQSEACKVAWSLAAWPGIVLVPVAWSFFVFDYTMNSCRTRRPFRLLIYIGLPSLVSAIAVTNHWTHLLYGPDTRLVIEGGDSFVIFDHGPLFFAVAATLYVFLMIALGLLGFAFLKAKKIFRPFMGALIIITAAPVVANLAYIGWGVTVFGFDPTPFTFAVSLIALSWLLVNNSMMDTAAQGRTLMFYATQDPVILVDAGGQFVSANPAARQLIGDRIPDYGEPIEQLPEVGPLVKDLVKAGGLGKPGPIRLAGRAFDPRAVPIDSPIQAQIPLLGWCISLVDITERERAAEALREALSLAEAANRAKTQFLANVSHEIRTPLNGVLGMASVLGETKLDEEQQEFLQVIEDSGQVLLTTIGDVLDLSKVEAGKMTLETKPFTLRNALEGARALFSARAKEKGIGLHLEMHDDLPRVILGDDHRFRQVVHNLVSNAIKFTETGAVTISAAPAENGSILLVRVSDTGPGIPAEARDMIFQPFQQVEGGDARKFGGTGLGLSISRQLCHLMGGSLQVADDEPQGATFEIRLPLLPANEAQELLSQPASGAVSVPHGPALDVLVVDDNRTNRLILEKFLSSTPYRVKSVSNGQEAIGLVHSFSFDVILMDIQMPRMDGVETTQKIRSIEQAKGREPSFIVAVTGNAMPEQLSHYLSVGMDDVLAKPVSKTLLLSLIREIRREVA

SEQ ID NO: 10806 - protein, 164 aa, Triticum aestivum
MATVMAMGSFAGAAVLPRGSAGRFGARSLPALGRRTLIVRAQTNKPKTSTSIWNALAFSGPAPERINGRLAMVGFVTALAVEAGRGDGLLSQLGSGTGQAWFAYCVAVLSVASLVPLLQGDSAEGRAGPIMNANAELWNGRFAMLGLVALAATEIITGAPFINV

SEQ ID NO: 10807 - protein, 313 aa, Pyrus communis
MATFPVVDLSLVNGEERVATLEKINDACENWGFFELVNHGMSTELLDTVEKMTKDHYKKTMEQRFKEMVAAKGLDAVQSDIHDLDWESTFFLRHLPSNISEVPDLEEDYRKTMKEFAVELEKLAEKLLDLLCENLGLEKGYLKKVFYGSKGPNFGTKVSNYPPCPKPDLIKGLRAHSDAGGIILLFQDDKVSGLQLLKDGDWVDVPPMHHSIVINLGDQIEVITNGKYKSVMHRVIAQSDRDRMSIASFYNPGDDAFISPAPAVLEKKTEDAPTYPKFVFDDYMKLYSGLKFQAKEPRFEAMKAKESTLVATT

SEQ ID NO: 10808 - protein, 481 aa, Nocardia farcinica IFM 10152
MRNQLFIDGEWRPGRAGTFATVDPATGKVITDVAQASTADVDDAVAAAAAARAYTAPSWAAMLPATRARLLNRLADLVEAHADELALLETTDQGQPLGVAAGISVPNAVEHLRYYAGWATKITGITAPLSIPDVDYRTRREPLGVCALITPWNFPLTILTWKLAPALAAGNTVVVKPAEQTPLSTLRLAELAAEAGFPPGVINVVPGGPDTGRALVAHPGIAKISFTGSTEVGREIGAAAGRALTRVSLELGGKTPSIVTADADIDAAVRGNIAGGTLNSGQVCAAYSRIYVDRRREAEFVDKLVAAARAIKVGPGRAADTQMGPLVSAEHLDRVHTLVRTGVAEGAELVTGGARAEGDLADGYFYEPTVFTGVRQDMRIAREEIFGPVLSVLSYDDPEEIAGQANDSDFGLAAVVWSRDLATANRLAAAVRAGTVYLNLPPMLDAAAAWGGMKASGIGREMGWEAIAAYTEVKSIWTALT

SEQ ID NO: 10809 - protein, 677 aa, Lolium temulentum
MPMETRDGGSRLEPALLPCSYVPLPDDAEAAVVGRGHRTGPLFAALLLALAAVLLVVATLAGVRLVGQLPATGVVMLNQPVDEAMSTTSSSRGPESGVSEKTSGVPAEHGGMLAADAASSNAFPWSNAMLQWQRTGFHFQPEKNWMNDPNGPVYYKGWYHLFYQYNPDGAIWGNKIAWGHAVSRDLVRWRHLPIAMFPDQWYDINGAWSGSATVLPDGRIVMLYTGSTNASVQVQCLAFPSDPSDPLLTNWTKYEGNPVLYPPPHIGEKDFRDPTTAWYDGSDGMWRIVIGSKDDRHAGMALTYKTNNFIDFELIPGVLHRVPATGMWECIDLYPVGAARGIDMTEAVAAASNNGGGEVLHVMKESSDDDRHDYYALGRYDAATNKWTPLDADADVGIGLRYDWGKFYASKTFYDPAKKRRVLWGWVGETDSERADVAKGWASLQSTPRTVVLDNKTGSNLIQWPVVEVETLRTNSTNLGSITVDHGSIFPLSLHRATQLDIEASFRLDPLDVVAAKEADVGYNCSTSGGAAGRGALGPFGLLVLADARRHGGDTEQTAVYFYVARGLDGGLRTHFCHDESRSSRANDIVKRVVGNVVPVLDGEALSIRVLVDHSIVESFAQGGRSTVTSRVYPTEAIYANTGVYLFNNATGARVTATSLAVHEMDFSYNQAYMASL

SEQ ID NO: 10810 - protein, 313 aa, Pseudomonas syringae pv. tomato str. DC3000
MSSREIRIATRKSALALWQAEYVKARLEQAHPGLLVTLVPMVSRGDKLLDSPLSKIGGKGLFVKELETALLEDNADIAVHSMKDVPMDFPQGLGLFCICEREDPRDAFVSNTFESLDALPAGSIVGTSSLRRQAQLLARRPDLQIRFLRGNVNTRLAKLDAGEYNAIILAAAGLIRLGFEDRITSAISVDDSLPAGGQGAVGIECRSVDAEIHALLAPLHHEDTAVRVIAERSLNKHLNGGCQVPIACYAVLEGDDVWLRGLVGDPSGRVLLHADARAPQTSAQALGVQVAEALLAQGAAEILKAVYGEANNE

SEQ ID NO: 10811 - protein, 625 aa, Lolium temulentum
MESRAIPSAAYAALLPSAADDVALAKQDRPGVGWRGFLTVLAASGVVVLLVGATLLAGSRMGQAGDGEGNTDEDGAGGFPWSNEMLQWQRAGFHYQPEGHFMSDPNGPVYYRGYYHLFFQYNRRGVAWDDYIEWGHVVSQDLVHWRPLPLAMRPDHWYDKKGVLSGTITVLHNGTLVLLYTGVTEDPMAESQCIAVPTDPNDPLLRHWTKHPANPVLAHPQGVQGMDFRDPTSAWWDKSDATWRILIGSKDDDNGSHAGIAFIFKTKDFLSFERVPGIVHRVEGTGMWECIDFYPVGGGHSSSSSEELYVIKASMDDERHDYYSLGRYDAAANTWTPLDAELDLGIGLRYDWGKLYASTSFYDPLKQRRIMLGYVGEVDSARADVAKGWASLQSIPRTVALDEKTRTNLLLWPVEEVEALRYNSTDLSGITIDDGSVFHLPLHQATQLDIEATFRLDASDVAAINEADVGYNCSSSGGAAARGALGPFGLLVHAAGDLIRGEQTAVYFYVSRALDGTLRTSFCNDETRSTRAKDVTKRVVGSTVPVLDGEALSMRVLVDHSIVQSFAMGGRVTATSRVYPTEAIYARAGVYLFNNATGASVTAERLVVHEMASAVYDDTVMVEDS

SEQ ID NO: 10812 - protein, 141 aa, Oryza sativa
  misc_feature (75)..(75): Xaa can be any naturally occurring amino acid
GREAATLRWWSWSVVTTSDAASATPAAVFLAMPGWTQHPSIHDGVDSLPNRSEVPLLRHARRIVEEDYLDLPWEXATAEHVCDVVLLRRHTAVCNRSTLTVHPICVPHLTDGVYLPPHGGRPAWSALPNPRIGTWLRLIHR

SEQ ID NO: 10813 - protein, 171 aa, Methanothermobacter thermautotrophicus str. Delta H
MTFKDDTMKRKYSLVAVGGTFDRFHKGHRRLLDEAFRVGETVMIGVTSDEFAAAKGEGIEPCSVRMKNLEEYLRDKDADYHVMRLDDPYGTTVTDEAFEAIVVSRETEPVAREINAIRRNRGFRELDIITIDMVNADDGIPISSTRIRRGEIDPMGHIIKRIRGALRRRRE

SEQ ID NO: 10814 - protein, 533 aa, Lolium temulentum
SNAMLQWQRTGFHFQPEMNWMNDPNGPVYYRGWYHLFYQYNPEGAVWGNIAWGHAVSRDLVHWRHLPLAMVPDQWYDINGVWTGSATVFPDGTLNMLYTGSTNASVQVQCLAVPEDPNDSLLRNWTKHEANPVLLPPPGIGDKDFRDPTTAWFDESDQTWRTVIGSKDNNGHAGIAMVYKTKDFLNYELIPGYLHRVDGTGMWECIDFYPVGGKNGSEELYVIKESSDDDRHDWYTLGKYDAAANTFTAADPENDLGIGLRYDWGKFYASKTFYDPAKQRRVLWGWIGETDSERADVAKGWASLMSIPRTVELDEKTRTNLIQWPVEEIETLRINSTDLSGVTIDHGSVYPLALHRATQLDIEASFRLDSATIAALNEADVGYNCSTSGGSANRGALGPFGLLVLADGKAEQTAVYFYVAKGLDGSLQTHFCHDESRSTLAKDVVKRVVGYTVPILDGEAFSMRVLVDHSIVESFVMGGRSTATSRVYPTEAIYGAAGAYLFNNATSGTVTVEKLVVHEMDSSYNQIFMADDL

SEQ ID NO: 10815 - protein, 293 aa, Burkholderia mallei ATCC 23344
MSILINKDTKVITQGITGKTGQFHTRACREYANGREAFVAGVNPKKAGDNFEGIPIYASVKEAKAETGATVSVIYVPPAGAAAAIWEAVEADLDLAICITEGIPVRDMIEVKDRMRREGRKTLLLGPNCPGTITPDELKIGIMPGHIHRKGRIGVVSRSGTLTYEAVAQLTALGLGQSSAVGIGGDPINGLKHIDVMKMFNDDPDTDAVVMIGEIGGPDEANAAQWIKDNMKKPVVGFIAGVTAPPGKRMGHAGALISGGADTAEAKLEIMEACGITVTRNPSEMGRLLKAAL

SEQ ID NO: 10816 - protein, 231 aa, Lolium temulentum
MESRSIPGAYAYAYEPLPRSSDDDRRSTGGVRWRACAAVLAASALVVFVVASTLAGSRVDRVAVDVAAMPALSETARSRGRDAGVSEKTSGAADEMGFLGAGSGADADGFPWSNAMLQWQRTGFHFQPEMNWMNDPNGPVYYRGWYHLFYQYNPEGAVWGNIAWGHAVSRDLVHWRHLPLAMVPDQWYDINGVWTGSATVFPDGTLNMLYTGSTNASVQVQCLAVPEDPND

SEQ ID NO: 10817 - protein, 295 aa, Flavobacteria bacterium BBFL7
MIILDGKKTSNDIKNEITEIVQEMKNNGEKVPHLAAVIVGNDGASLTYVGSKVRACERVGFESTMVRMPNTTSETELLREIDKLNNNSDIDGFIVQLPLPKQIDTQKVLMAVDPDKDVDGFHPTNFGRMALDMSTFIPATPFGILELLDRYNVDTQGKHTVVIGRSHIVGRPMSILMGRKGFPGNSTVTLTHSHTKNITQITSQADIIITALGVPGFLKAEMVKDDAVIIDVGITRVPDETRERGYYITGDVDYENVAKKASHITPVPGGVGPMTIAMLLKNTLLARERHRAANR

SEQ ID NO: 10818 - protein, 633 aa, Pseudomonas fluorescens PfO-1
MIFRRWDINTRTQLISLGPALLLTLLLISFFTFVRIQDLRQELNHTGQLIANQLAPATEYGVISGNNEVLESLLKATLATPNVRFLEVQDSANRILSYVEQPADAHNRPHQVEVFQAPVRLQRIALHNDFFQDGKSSPGVASEDYLGRVIVGLSNDAFSQRQQEILLKAGILALFALLFTFVLARRLAGSLSQPIRDIGNAVKAIQDGDYKTPLPIVDDTELGALSQHINNLAQALEQASREQHQAMAQLIQTREEAEKANNAKSDFLAMMSHELRTPMNGVLGMLQLLETTDMTEEQVEYAALASESTEHLLKVINDILDFSRIERSELELEHIPFNLAEVIGACAQSFQHSAAQRGLALQLRIPEDLRDLQVQGDPTRIRQILVNLVGNALKFTEQGRVSIEAQWQSLDHELLWFTCAVRDSGIGISPESLELMFNAFQQADSSISRRYGGTGLGLPIARTLAERMGGTLRAQSEEGRGSVFTLEIPLALYKQALPALAAPRTLNGASHGEGRNVLLVEDNPVNQTVIEAMLRSLGFTVSVATDGVQAVRSAGDNRFEAILMDCRLPLIDGYEATRRIRQLPGCGQVPIIALTANALQGDRENCLAAGMNDYLAKPFKHNDLQQILQRWVQ

SEQ ID NO: 10819 - protein, 302 aa, Staphylococcus aureus subsp. aureus MSSA476
MSVFIDKNTKVMVQGITGSTALFHTKQMLDYGTKIVAGVTPGKGGQVVEGVPVFNTVEEAKNETGATVSVIYVPAPFAADSILEAADADLDMVICITEHIPVLDMVKVKRYLQGRKTRLVGPNCPGVITADECKIGIMPGYIHKKGHVGVVSRSGTLTYEAVHQLTEEGIGQTTAVGIGGDPVNGTNFIDVLKAFNEDDETKAVVMIGEIGGTAEEEAAEWIKANMTKPVVGFIGGQTAPPGKRMGHAGAIISGGKGTAEEKIKTLNSCGVKTAATPSEIGSTLIEAAKEAGIYEALLTVNK

SEQ ID NO: 10820 - protein, 985 aa, Crocosphaera watsonii WH 8501
MPNLDITANQPKTNDNRTYNIENTLAPTDSFINRHIGPNSQEIDKMLKVLGFSSLDKLIDATVPQGIHLSKTLILPEAQSEYGALAQLKSIASKNQIFRSYIGMGYHDCITPPVIQRNILENPGWYTAYTPYQAEIAQGRLKALLNYQTMIVELTGLEIANASLLDEGTAAAEAMSMSYGLCKNKNANAFFVDCHCHPQTIEVIKTRAYPLGIELIIADHRFFEFEQEIFGALLQYPATDGTIYDYRTFIESAHDKGALVTVAADPLSLALLTPPGEFGADIAVGSTQRFGVPLGYGGPHAAYFATREAYKRKIPGRIVGVSKDAQGNPALRLALQTREQHIRRDKATSNICTAQVLLAVIAGMYGVYHGPEGVKNIAQRIHQLTVILAKGLQKLSYTVNDEPFFDTVRVGVGDASVKAVIAAAAERKINLRLYTEGVLCISLDETTTVHDVVELWQIFAAKDELPFTVEEIAEEVNFDLPIFFQRTSEYLTDPVFNQYHSESKLLRYLHQLESKDLALNTSMIPLGSCTMKLNSAAEMMPVTWPEFGKLHPFAPLSQTEGYQILFQQLEVWLGEITGFDGISLQPNAGSQGEYAGLQVIRQYHENRGEANRNICLIPESAHGTNPASAVMCGMKVVPVKCDKEGNIDIADLQKQAEKHSENLGALMVTYPSTHGVFEEEIINICNIVHNHGGQVYMDGANMNAQVGVCRPADFGADVCHLNLHKTFCIPHGGGGPGMGPIGVKEHLIPFLPTTNLDKFTDPNSNGKVDTSIGAISAAPWGSASILVISWMYIAMMGEKGLTEATKVAILNANYMASRLADYYPILFKGASGCVAHECIIDLRPLKNQAEVGVDDIAKRLMDFGFHAPTVSWPVGGTMMVEPTESEDLAELDRFCDAMITIHQEAQAIADGTIDPANNPLKNAPHTAEMVICQEWDRPYSREKAAYPASWSKEHKFWPTVGRIDNAYGDRNLVCSCEGMDAYKED

SEQ ID NO: 10821 - protein, 275 aa, Bordetella pertussis Tohama I
MSFMRISYISYSDRRQSMSESFVLVETRGRVGWLTLNRPKALNALNDQLMEELGAALLALDADDGIGAIVITGSEKAFAAGADIGAMKDWSYMDVYRSDYITRNWETIKRVRKPVIAAVAGYALGGGCELAMMCDIVIAADSARFGQPEIKLGVIPGAGGTQRLPRAVGKAKAMDLALTARMMDAAEAERAGLVSRVVPADRLADEALEAATVIASMSLPSVMMAKECINRAYEVPLNDGLLFERRVFHSLFATEDQKEGMAAFTEKRKPDFKHR

SEQ ID NO: 10822 - protein, 112 aa, Aquifex aeolicus VF5
MKKIEAIIKPFKLDEVKDALVEIGIGGMTVTEVKGFGQQKGHTEIYRGTEYVIDFLPKVKIEVVVRDEDVEKVVETIVKTAQTGRVGDGKIFIIPVEDVIRIRTGERGEQAI

SEQ ID NO: 10823 - protein, 334 aa, Geobacillus stearothermophilus
AVKVGINGFGRIGRNVFRAALKNPDIEVVAVNDLTNADGLAHLLKYDSVHGRLDAEVVVNDGDVSVNGKEIIVKAERNPENLAWGEIGVDIVVESTGRFTKREDAAKHLEAGAKKVIISAPAKVENITVVMGVNQDKYDPKAHHVISNASCTTNCLAPFAKVLHQEFGIVRGMMTTVHSYTNNQRILDLPHKDLRGARAAAESIIPTTTGAAKAVALVLPELKGKLNGMAMRVPTPNVSVVDLVAELEKEVTVEEVNAALKAAAEGELKGILAYSEEPLVSRNYNGSTVSSTIDALSTMVIDGKMVKVVSWYDNETGYSHRVVDLAAYINAKGL

SEQ ID NO: 10824 - protein, 839 aa, Brassica rapa
GVRNIYHHSYTFLLVFFVMILFRPAFSLSTLSSTESLTISSNRTLVSPGNIFELGFFRTNSRWYLGMWYKKLSGRTYVWVANRDNPLSNSIGTLKISNMNLVLLDHSNKSVWSTNLTRENVRSPVVAELLANGNFVVRDPSGFLWQSFDYPTDTLLPEMKLGYDLKTGLNRFLVSWRSSDDPSSGDFSYKLDIQRGLPEFYTFKDNTLVHRTGPWNGIRFSGIPEEQQLSYMVYNFTENSEEVAYTFLVTNNSIYSRLTINFSGFFERLTWTPSLVIWNPIWSSPASFQCDPYMICGPGSYCDVNTLPLCNCIQGFKPLNVQEWDMRDHTRGCIRRTRLSCRGDGFTRMKNMKLPETTMATVDRSIGVKECEKKCLSDCNCTAFANADIRDGGTGCVIWTGRLDDMRNYAVSGQDLYVRLAAADVVEKRTANGKIVSLIVGVCVLLLLIFFCLWKRKQRRAKAMATSIVHRQRKQILLMNGMTLSNNRQLSRENKTGEFELPLIELEAVVKSTENFSNCNKLGQGGFGIVYKGTLDGQEIAVKRLSKTSVQGADEFMNEVTLIARLQHINLVQILGCCIDADEKMLIYEYLENLSLDSYLFGKTRSSKLNWKERFDITNGIARGLLYLHQDSRFRIIHRDLKVSNILLDKNMIPKISDFGMARIFARDETEANTMRVVGTYGYMSPEYAMEGIFSEKSDVFSFGVIVLEIVTGKRNREFNNENNLLSYAWSNWKEGRALEIVDPDIVDSLSPLSSTFQPQEVLKCIQIGLLCVQELAEHRPTMSSVVWMLGSEATEIPQPKPPGYWVRRSSYELDPSSSKCDDDSWTVNQYTCSVIDAR

SEQ ID NO: 10825 - protein, 565 aa, Acinetobacter sp. ADP1
MMLADPSKKYRRMYQRVDLPDRQWPNNEITKAPIWMSTDLRDGNQAIFEPMDIDQKFKMFQMLVKIGFKHIEIGFPSASQIDFDFTRKLIEENHIPDDVYIEVLVQARDHLIERTFESLAGAKRAIVHIYNANSPTFRQKVLNVGVEGAKKLAINAAHKVKEYAAQYPQTDWIFQYSPECFSATELEVAKDVCDAVTEIWEASPENKVILNLPATVEVSTPNVYADQIEWMHRNLARRDGVIISVHCHNDRGCGIAASELAIMAGADRVEGCVFGNGERTGNVDVAAIALNMYTQGVAPELDFSNINEIIATVEECTGLPVHPRHPYAGDLVFTAFSGSHQDAIKKGFEFQKNEDIWDMPYLPIDPKDLGRDYDAVIRVNSQSGKGGIAYLLESNYNVVLPRRLQIEFSQIVQQTTDANGTEISASEIWKLFQDTYVQAKEQHYTAKNYRLSDINGTQIIELDIDIDGEIQQLRGEGNGPISAFMNALQLPIDVLNYEERSISSGANAKALTLIEIQVKGTGKSAFGAGVHDNTVTSSIEAILACTNRLIEQGVLSTEQVAAAAV

SEQ ID NO: 10826 - protein, 1424 aa, Magnaporthe grisea 70-15
MNAFRALRPVASKIQAPTLPRITRGFAASSRLGYEHIQVSEPRPGVGQVTLNRPKALNALSTPLIKELNTALGDYQKSDSISVIVITGSQKAFAAGADIKEMAPLTFSKAYTESFIENWSDLTTQVKKPIIAAVSGHALGGGCELALMCDFIYCTESANFGQPEIKLGVIPGAGGSQRLTKAVGKARAMELILTGKSMTGAEAARWGVAARSFATYEELMEATLKTAETIASYSKVAVQACKEVVNKSQDLGLRDGVEYERRVFHSLFGSQDQKIGMTAFAEKKKPEWTHHAHMNSGADHEKVVRQLTRKAGRPILQILAFMEYTRMPPMGPLKQPWETPPDRPRGPASLVQPGTTASAEPPQLLLPPPSPALWAATSSCSTSDIVGACRRRLWTGQHEELQVQPLESILLSSVLSYTAFLQHAIPSPQGQPYLQPGKGRVWVIMDSPKPAVDLETELTCADWFGWQAAAAESAPTPPAPDSPIFTCPSCRAPVRDTKHDAKVATLLDMFLTVNPTKAKPENEMAEMNRKYKRGDKVLRRLKIPHRTPEQLRLDEQERRLIEEVRAVSLQEAFNAAEAQQQQQQQSSRSRRRTDEAAAATTNGTGREPRSSRPSAVATARSREPSTDSGHSAASRARDVRTRERTRRQVAEAENRIRAEQTIMLQPEARHGDERRRRSSESHHRRPGESTDSRRRPIEHQSSIRSLISTDSGSLDIDREIEEFARQIQEEGLLDGLDLENIDLTNNDELSRKITEAYRRRQRERAQRNRTERRRDTSRSSGPRTSRTQTNEPSSRSRRRSLSLSAPQAASNPHSRSTSATSQSEERSRPPVTHLDVQANSRRRRQSTSRTRSSTTPLPSSSGQAQAQQPVQQLPNRTAVRSQTDIGYSRPSETTRPAIAESRSSSSPSMPTGTAQVEQVNNVLPFSARVAGTPPVLNPSSFENNAGRGKRVGRPLDIGVGPVLSHLASDSPPAMSPNPDSSRSRKTLQVYEEPNISCSACTKQHIEYEVHYNCDICDDGNYKLCLRCYRKGKGCHHWFGFGTFGIHKWKWYREIEGSSFPEPHVLTASRYLPPEPPNSNNPAERLQRGAFCSRCLAWANDCYWTCGICNDGDWGFCNECVNQGRSCAHPLVPVARFPQISNGEQADSQPPSASSAQTPIPTPPMSPIVPASLRPGEGHSRRTSSISSVLSGPTSKFLKFTTTCDVCRCEIPPAQSRFHCYYCTSSLVPESKPGDYDICESCYGGDRRHTVNSENGAAGWRRCPQAGHRMVVVGFREAKPGRWYRLILRDLVGGRKLKVNPVEGFPQLQRWSWVSEDGRAMERLVSVDVRERAILGPEVEGLPASAVAAAETTVFPPDGGTGWRRQARWAWYPEPDAQDELMFPKGAEIREINDENPQWFSGTYMGERGVFPANYMYQPETEPGN

SEQ ID NO: 10827 - protein, 268 aa, Bordetella pertussis Tohama I
MSDYVLRERRGATFVITLNRPERRNAFDLEVRQSLAEAIFEARDDDAVKAVIITGTQGVFCAGGDLKSLSDGKRPIYQDRDRIRRLHTWFHELVNLEKPVIAAVDGPAFGAGFNLALACDFILGTPAARFCAVFGRIGLVPDLGGFFLLPRIVGLQQAKELVFTAREVGADEARALGILYRVVPAPGLLDEALALAARFHSASTLALGMSKNILNRSFNLDQNTLAELESHAQALAIHSEYHEAAVARFLDKQPLPFSWPGEDKDGQS

SEQ ID NO: 10828 - protein, 419 aa, Chloroflexus aurantiacus
MAPRVLIVGASVGGATAAITLRSFGIETIMLEKELSKAKPCGGAVPPAAFREFDLPTSLIDRKVKQCLIVSPSGQETRVPVAGTIPSDDDYVAMVRREVFDSFLRQRAQERGADLIHAQLTGLRVDRRGVVATYRTPSGHEGSVWADVVIGADGAYSPTAKFLGLPHLPRAVAIQERIKLSPDKMARWEETADLYLGYEVSPDLYAWAFPKRDHIAVGIGAGPRHSTAAKQLLTNLKRRLGDALAGGQTILREAHALPMEPRPHMAFDRAMLIGDAAGLVVHTSGEGIYWAMKSGQMAAQTLAEYLDAPSAANLRHYERRWWKQYGTMYRFLRFLQMWGYGNERQMEVFTEMCRNYDVQRLTFDSYMHKQMAPAPWLAQLRMTAEIIASEVRNYLRPRTPIREQLGLTVVEKERMVAAD

SEQ ID NO: 10829 - protein, 176 aa, Hevea brasiliensis
MASQSEPKSVYDFTVKDARGNDVDLSTYKGKVLLIVNVASQCGLTNSNYTELTQLYQKYKDQGLEILAFPCNQFGSQEPGTNEQIVEFACTRFKAEYPIFDKVDVNGNNAAPLYKFLKSSKGGIFGDNIKWNFSKFLVDKDGNVVDRYAPTTVPSQHREGCEETAGDCMSAQGRPN

SEQ ID NO: 10830 - protein, 126 aa, Glycine max
STAIFTEGARAGARHLEMTINGIGDRLGNASLEQVAMPLRCGRHVNGNLYTGINTKHTFLTSRMLPPPYALAPTSAFPHESGIHPPEMLNHQGTYEIKSPEDLGPARNHEAWHCTGQNLTCTPCLF

SEQ ID NO: 10831 - protein, 445 aa, Pseudomonas fluorescens PfO-1
MIESVESFLARLKKRDPDQPEFHQAVEEVLRSLWPFLEANPHYLTSGILERICEPERAVVFRVSWVDDQGRVQVNRGFRIQMNSAIGPYKGGLRFHPSVNLGVLKFLAFEQTFKNSLTSLPMGGGKGGSDFDPKGKSDAEVMRFCQAFMSELYRHIGADVDVPAGDIGVGAREIGFLFGQYKRLSNQFTSVLTGKGMTYGGSLIRPEATGFGCVYFAEEMLKRREQTVEGKRVAISGSGNVAQYAARKVMDLGGKVISLSDSEGTLYCEAGLSEEQWLALLELKNVKRGRISELASAFGLEFRAGQLPWSLPCDIALPCATQNELDAESARTLLRNGCVCVAEGANMPTTLEAVDIFIEAGILFAPGKASNAGGVAVSGLEMSQNAMRLLWTGGEVDSKLHGIMQSIHHACVHYGEENGRINYVKGANIAGFVKVADAMLAQGVV

SEQ ID NO: 10832 - protein, 499 aa, Roseovarius nubinhibens ISM
MQELHHFIDGALVKGKSGRFDDVFNPATGEVQYKCPMASVDETTDAIERAAKAQPAWGATNPQKRARVMMKMVALMNRDMDKLAEALSREHGKTIPDAKGDLQRGLEVIEYCVGAPQMLKGEFTDSAGPGIDMYSMRQPLGVVASIMPFNFPAMMPLWHVGPALACGNAVVLKPSERDPSVPLMLAELFVEAGLPAGCFQVVNGDKEAVDTLLDSEIIQGVSFVGSTPIAQYIYSRATANGKRAQCFGGAKNHMIVMPDADMDQAADALVGAGFGAAGERCMAISVAVPVGEETADRLIEKLVPRIEKLKVAPYTAGDDVDLGPVVTAAAKERILGLINSGVEQGAELVVDNRDFKLQGYEDGFFVGPHLFDRVTPDMDIYKQEIFGPVLSTVRAETYEEALKLAMDHEYGNGTAIFTRDGDTARDFASRVNIGMVGINVPIPVPLAYHTFGGWKKSMFGDLNQHGPDSFKFYTRTKTVTSRWPSGIKEGGEFNFKAMD

SEQ ID NO: 10833 - protein, 518 aa, Oryza sativa (japonica cultivar-group)
MGNRTSRHHRAAPEQPPPQPKPKPQPQQQQQQWPRPQQPTPPPAAAPDAAMGRVLGRPMEDVRATYTFGRELGRGQFGVTYLVTHKATGKRFACKSIATRKLAHRDDIEDVRREVQIMHHLTGHRNIVELRGAYEDRHSVNLIMELCEGGELFDRIIARGHYSERAAAALCREIVAVVHSCHSMGVFHRDLKPENFLFLSKSEDSPLKATDFGLSVFFKPGEHFKDLVGSAYYVAPEVLKRNYGAEADIWSAGVILYILLSGVPPFWAESEDGIFDAVLRGHIDFSSEPWPSISNGAKDLVKKMLRQDPKERLTSAEILNHPWIREDGEAPDKPLDITVISRMKQFRAMNKLKKVALKVVAENLSDEEITGLKEMFRSLDTDNSGTITLEELRSGLPKLGTKISESEIRQLMEAADVDGNGTIDYAEFISATMHMNRLEKEDHILKAFEYFDKDHSGYITVDELEEALKKYDMGDDKTIKEIIAEVDTDHDGRINYQEFVAMMRNNNPEIAPNRRRMF

SEQ ID NO: 10834 - protein, 144 aa, Glycine max
MGAFTEKQEALVSSSFEAFKANIPQYSVVFYTSILEKAPAAKDLFSFLANGVDPTNPKLTGHAEKLFALVRDSAGQLKTNGTVVADAALVSIHAQKAVTDPQFVVVKEALLKTIKEAVGGNWSDELSSAWEVAYDELAAAIKKA

SEQ ID NO: 10835 - protein, 423 aa, Zea mays
MDKLSGSARLMIVSDLDHTMVDHHDEENLSLLRFGALWESVYCEDSLLVFSTGRSPTLYKELRKEKPMLTPDITIMSVGTEITYGEAMVPDDGWEEYLNNKWDRNIVVAETVSFSELKLQPETEQRPHKVSFFVDKKNAQEVIKSVAERLDKCGLDAKIIYSGGQDLDILPQGAGKGQALAYLLKKLSSCGKPPNNTLVCGDSGNDAELFSIPGVHGVMVSNAQEELLQWYTENAKDNPKIIHSNERCAAGIIQAIGHFKLGPNISPRDLQFPYAKEASFKPTDAVVKFYVLYEKWRRAEVPKSDSVIKYFKNITHANGVTIHPAGLELSLHASIDALGSCYGDKQGRKYRAWVDRLFITQTGSDSWVGRFDLWESEGDVRACSLSSLALILKAESPEGFVLTHIQKTWLNGYSSGVEQAFKL

SEQ ID NO: 10836 - protein, 253 aa, Debaryomyces hansenii CBS767
MAVHKLIILRHGESEWNHENRFCGWIDIPLSEKGRDEAKFAGHLIQKYNLKPTITYTSKLTRSIQTGDIILEELGRLWCDVVKTWRLNERHYGAFQGRDKNEVYRELGAEKYQYIRRNYNGTPPPMETQYKDDCIDERYEVDDVDIADLPRGESLKLVMERVIPYLRKEIVEGSLIGDNKTVLVVTHGSIVRSVIKYFKGVSDADISKINVPTGVPMVFELDDDCNMVKDYYYLDPELAKKGIEKVSNEGTKK

SEQ ID NO: 10837 - protein, 222 aa, Arabidopsis thaliana
MRVSQSLVPFAIIALVLSFVNAYDPSPLQDFCVAIDDLKGVFVNGRFCKDPKRVDAKDFFFSGLNMPGNTNNQVGSNVTTVNVDQIPGLNTMGISLVRIDYAPHGQNPPHTHPRGSEILVLVEGTLYVGFVSSNQDNNRLFAKVLHPGDVFVFPIGMIHFQVNVGKIPAVAFAGLSSQNAGVITIANTVFGSNPPIYPELLARAFQLDASVVKELQAKFGSI

SEQ ID NO: 10838 - protein, 399 aa, Acidobacteria bacterium Ellin345
MANVTKKKGVIGILTGGGDVPGLNPAIRGVTFRALREGYDVIGLRRGWGGLVDIVRDKDHDNSENFVHLSETVVNRAARTGGTFLHTSRTNPSRVAKDKVPAHLQGQFNAEKNDLTSEMLKNLEWLGIDYLIPIGGDDTLSYGVRLYQEGVKVVAIPKTMDNDVPGTDYCIGFSTCVTRTIQMVNSLRTSAGSHERFLVVEVFGRYAGFTALLPTMAGAANRCVIPEFKFNIESLAELMANDRKRNPSRYSVVLISEGAMFEGGEMVFQSESTDAFGHKKLGGIGDLIAAKLTELSPKYCGKTVNCLTQKLGYLVRGGDPDAIDSIVPMAYGNLALDLILNKIHGRLVVLKNGRYDNVPVDVVTSSKKVIKVKEHYNTERLRPHYESFEMKPLFIMTSE

SEQ ID NO: 10839 - protein, 444 aa, Neisseria gonorrhoeae FA 1090
MTDLNTLFANLKQRNPNQEPFHQAVEEVFMSLDPFLAKNPKYTQQSLLERIVEPERVVMFRVTWQDDKGQVQVNRGYRVQMSSAIGPYKGGLRFHPTVDLGVLKFLAFEQVFKNALTTLPMGGGKGGSDFDPKGKSDAEVMRFCQAFMTELYRHIGADTDVPAGDIGVGGREIGYLFGQYKKIRNEFTSVLTGKGLEWGGSLIRPEATGYGCVYFAQAMLQTRNDSFEGKRVLISGSGNVAQYAAEKAIQLGAKVLTVSDSDGFVLFPDIGMTEAQLAALIELKEVRRERVATYAKEQGLQYFENQKPWGVAAEIALPCATQNELDEEAAKTLLANGCYVVAEGANMPSTLGAVEQFIKAGILYAPGKASNAGGVATSGLEMSQNAIRLSWAREEVDSRLFGIMQSIHESCLKYGKVGDKVNYVNGANIAGFVKVADAMLAQGF

SEQ ID NO: 10840 - protein, 316 aa, Pseudomonas aeruginosa PAO1
MPDTLRHARVIILGSGPAGYSAAVYAARANLKPLLITGMQAGGQLTTTTEVDNWPGDPHGLTGPALMQRMQEHAERFETEIVFDHIHAVDLAGKPFTLRGDNGTYTCDALIVATGASARYLGLPSEQAFMGKGVSACATCDGFFYRNREVAVIGGGNTAVEEALYLANIASRVTLVHRRETFRAEKILQDKLQARVAEGKIVLKLNAEVDEVLGDTMGVTGVRLKTRDGGSEEIAVDGMFVAIGHTPNTSLFEGQLALKDGYLVVNGGREGNATATNVPGVFAAGDVADHVYRQAITSAGAGCMAALDVERYLDSL

SEQ ID NO: 10841 - protein, 131 aa, Cicer arietinum
ERGVGLEHEDENIADLYLAVQDGIISGTTDYDILFGQLLENESGLKGSPPTAKSFVENLPLVELTEEELKGKDIVCAVCKDEVMLEEKVRKLPCSHCYHGDCILPWLSIRNTCPVCRFELPTDDADYERSK

SEQ ID NO: 10842 - protein, 521 aa, Oceanicola granulosus HTCC2516
MSQDNRVRIFDTTLRDGEQSPGATMTHAEKLEIAELLDEMGVDIIEAGFPIASEGDFRAVSEIARQAKNATICGLARANFKDIDRCWEAVRHARSPRIHTFIGTSPLHRAIPNLDQDQMAERIHDTVTHARNLCGNVQWSPMDATRTEWDYLKRVVEIAIKAGATTINIPDTVGYTAPNESAELIRRLIAEVPGADEVIFATHCHNDLGMATANSLAAVEGGARQIECTINGLGERAGNTALEEVVMALKVRHDIMPFTTGIDTTKIMNISRRVATVSGFAVQFNKAIVGKNAFAHESGIHQDGMLKNAETFEIMRPADVGLGETSLVMGKHSGRAALRAKLKDLGFDLADNQLNDVFVRFKDLADRKKEVYDEDLVALVRQNEGAEDSVRLVSLRVVCGTGGPAEAEMVLEVDGAEKSGTARGDGPVDSAFNAIKALYPHDVRLPLYQVHAVTEGTDAQATVTVRLEEDGRIATGMSADTDTVVASTKAYINALNRLIVRRQKTAPGADVKEISYRDVGE

SEQ ID NO: 10843 - protein, 308 aa, Pediococcus pentosaceus ATCC 25745
MTKQYDVVIIGAGPAGMTAALYASRANLSVVMLDRGIYGGQMNNTADIENFPGFKSVLGPDLSKDMYESSTQFGAEYAYGSVESIRDDGATKLVKTDMGDEFEAKVVIIGTGSEYKKLGVPGEEDFSGRGVSYCAVCDGAFFKGTDVVVVGGGDSAIEEGLYLTQLASKVTVIHRRDQLRAQKIIQDRAFANPKMEFVWNSNVTEVVGEGKVTGVKVNNNQTGEDSFIEAAGIFIYVGVKPMTAAFADLGILDEQGWIPTDDHMHTKVPGILAVGDVRKKDLRQITTAVGDGGVAGQQAYEYIQALND

SEQ ID NO: 10844 - protein, 426 aa, Schizosaccharomyces pombe
MKRVVITGLGAVTPLGNGVKTNWRNLIQGKSGIVSLKGFPEYEQIPSKVAGVIPRGKEKEEWNVLDYVDQGKLREVATFTQLALTSAAEALKDARWIDIDEQEKLATGVCFGTGIGNLDDALNENGVLNKAGIRKVSPRVISKILINMPAGYISQRYGFTALNHTTTTACAAGCHAIGDAFNFIKLGHADVIIAGGSESCINPLTVAGFSKARSLSTKFNDNPKAASRPFDANRDGFVIGEGSAALVLEELEHAKNRNAHIYAEIVGYGLASDSYHITAPNPNGDAAYYAMKRSLKQAGLSASQLDYINAHATSTKLGDVAESIAITRLLCDVNRNPEAFPVSSSKGSIGHLLGAAGAIESVYTVLTVQKGVLPPTLNFEYSDIPQQFQCDYVPNVAKESRINVALSNSFGFGGTNASLCFKKFLQ

SEQ ID NO: 10845 - protein, 546 aa, Salmonella typhimurium LT2
MAIHNRAGQPAQQSDLINVAQLTAQYYVLKPEAGNAEHAVKFGTSGHRGSAGRHSFNEPHILAIAQAIAEERAKNGITGPCYVGKDTHALSEPAFISVLEVLAANGVDVIVQENNGFTPTPAVSNAILVHNKKGGPLADGIVITPSHNPPEDGGIKYNPPNGGPADTNVTKVVEDRANALLAGGLQGVKRISLDAAMASGHVKAVDLVQPFVEGLADIVDMAAIQKAGLTLGVDPLGGSGIEYWKRIAEHYKLNLTLVNDQVDQTFRFMHLDKDGAIRMDCSSECAMAGLLALRDKFDLAFANDPDYDRHGIVTPAGLMNPNHYLAVAINYLFQHRPLWGKDVAVGKTLVSSAMIDRVVNDLGRKLVEVPVGFKWFVDGLFDGSFGFGGEESAGASFLRFDGTPWSTDKDGIIMCLLAAEITAVTGKNPQEHYNELAARFGAPSYNRLQASATSAQKAALSKLSPEMVSASTLAGDPITARLTAAPGNGASIGGLKVMTDNGWFAARPSGTEDAYKIYCESFLGEEHRKQIEKEAVEIVSEVLKNA

SEQ ID NO: 10846 - protein, 351 aa, Ustilago maydis 521
MSTQEPATSSSSTDPAVSDVKLERKARKEAQKALKLQQAAQKKIAIKAEQPSTASSSISKSSSANASASASSSSSSSLKAPRKPPSSDEQLSRALAYILRHGAEKEALEIRADGYVLLEHVLQRPRVKSVTITLPDGKKTKPRLEDVRRIVESNEKKRFELSQQNSAEWWVRAVQGHSLKNVVELQHVALTLENLHLLKLTHDDPHNHSLTEEHHLKTNLDALQIASEHRVQVIHGTYAPAWDLILASGGLKPMTRNHIHLAKGKFGQQGVISGMRKSANRLIYIDIVKAITDGIPFYLSSNGVVLTPGDNQHHMLGVQYFTKVEDQNAQLVWSRPPSPSPSPSPSPSPTV

SEQ ID NO: 10847 - protein, 691 aa, Kluyveromyces lactis NRRL Y-1140
MLSQRFVTRALARRAFGKTCLKLGSASASASNAASAAAGEASSRPQPAPSFNADIAGGSSGGARRNQIPLSKRSRIADKNTGVNIQNQMDDSFIGMTGGEIFHEMMQRHNVDTVFGYPGGAILPVYDAIYNSDKFTFVLPKHEQGAGHMAEGYARASGKPGVVLVTSGPGATNVVTPMADALADGVPLVVFTGQVATSAIGTDAFQEADVVGISRSCTKWNVMVKTIEELPRRINEAFEIATSGRPGPVLVDLPKDVTAAVLRNPIPMKSILPSDTLNQLTQRVVDEFTLENISRAADLINRAKKPLLYVGAGILGSEMGPQYLKQLSDRAQIPVTTTLQGLGAFNQEDHKSLDMVGMHGNAAANLAIQNADLIIALGARFDDRVTLNISKFAPEARKAALEKRGGIVHFEISPKNINKVVEAEVAVEGDVTRNLEKLLPLVESVPERPEWSAQVAKWKQEYPYAYQKETPGSKIKPQTVISKLSDLVLKSGRPAIVTTGVGQHQMWAAQHWTWKSPRSFITSGGLGTMGYGLPAAIGAQVARPDAIVIDIDGDASFNMTLMELSSAVQARTPVKVLLLNNEEQGMVTQWQSLFYEHRYSHTHQLNPDFVKLAEAMGLKALRLSKQEDTDAILKEFVDYEGPILLEVQIEKKVPVLPMVPTGKGLHEFINFDPEVEKEQNELRHKRTSGKY

SEQ ID NO: 10848 - protein, 327 aa, Alkalilimnicola ehrlichei MLHE-1
MDLRPQVSRPKLRRPRRHDKIRPLTRWFTADTPTRDQQEPSMSAQILDGKAIAAELREQVRKQVEARVERGGRRPGLAVVLVGADPASTVYVGKKRQACEQLGMHSSAHELPAETTQDELLALVDELNGRDEIDGILVQLPLPDHIDEQTVIDRIHPDKDVDGFHPVNMGRLTLRLPGLRPCTPNGVMTMLAHAGIELEGKDAVIIGQSNIVGRPMAMELLNARCTITICHSRTRNLADRVRAADIVVAAVGRPGFVPGDWIKPGAVVIDVGINRLESGKLTGDVDFAAARELAGWITPVPGGVGPMTVATLMANTLAAAEARDSRA

SEQ ID NO: 10849 - protein, 133 aa, Agrobacterium tumefaciens str. C58
MRYRGIEISTRPHHIDSGKDLLKGEPDMATVKVDAANFQSEVLESAEPVVVDFWAEWCGPCKMIAPSLEEISSELAGKVKVAKLNIDENPELAAQFGVRSIPTLAIFKGGEVADIKVGAAPKTALSAWISSAA

SEQ ID NO: 10850 - protein, 410 aa, Archaeoglobus fulgidus DSM 4304
MHRLRNLREDVSDGSLGHGGGGLMYDVVVVGAGPAGSMAAKTAAEQGLKVLLVEKRQEIGTPVRCAEGISRESIEKFFEVDKKWIAAEVTGAKIYAPNKTEIVMSEEMAGNEVGYVLERKIFDRHVARLAAKAGAEVYVKTAMVDFERKDGKVKVKLRRLGEDWEVETKILIGADGVESKIGRKAGIIKTLKLNEVESCAQYLMTGLDIDESYTYFYLGRELAPGGYAWIFPKGNGSANVGIGVLPKMAERTAKEYLDAFIEKEGIEGKIVEFVAGAVPVYGEIETAVADNIMLAGDAAYHADPITGGGIANALSAGYYAGKVAAEAVQKNDFSADFLRRYDELWKNDFGKKLRRNKKLQLKFIDMDDALLNKLAGAIAGKNLREMSVAAIVKELLKAHPKLLWDLKDLF

SEQ ID NO: 10851 - protein, 335 aa, Triticum aestivum
  misc_feature (83)..(83): Xaa can be any naturally occurring amino acid
AYLGDTIEQVCTKKQAGTGPEFPGYRRPTRPANYLGTMHHEFTFTVQDGIDAIEDVIYHTETYDVTTIRASTPMFLMSSKIKXLGVKMVISGEGSDEIFGGYLYFHKAPNKEELHRETCQKIKALHQYDCLRANKATSAWGLEARVPFLDKEFINEAMSIDPEWKMIRPDLGRIEKWVLRKAFDDGEQPFLPKHILYRQKEQFSDGVGYSWIDGLKAHAESNVTDRMMSNAKFIYPHNTPTTKEAYCYRMIFERFLPQNSAILTVPGGPSVACSTAKAVEWDAQWSGNLDPSGRAALGVHLSAYEQEHLPATILTGTSKKPRMIEVAAPGVAIES

SEQ ID NO: 10852 - protein, 486 aa, Nocardioides sp. JS614
MADFTLAQIPDLPLDLCVGGKEVPASDGGRFDVLDPATGAVLTSVANGTVEDALACVDAADAAAAAWAATAPRERSEILRKAFELMRERADELAHLISLENGKALADARGEVAYAAEFFRWYAEEAVRAAGSVMTAPSGANRIVVLQQPVGICVLVTPWNFPAAMATRKIGPALAAGCTVVLKPASDTPLTALLMAKILADAGVPAGVVNVLPARRSGAVVSAMLHDPRVRKLSFTGSTEVGRVLLREAADQVVNCSMELGGNAPFIVLDDADLDAAVDGAMIAKMRNAGEACTAANRFYVHADVADEFSRRLAERMAALRVGPGTADDTEVGPLVNDESAAKVDELVRGAVSAGARVVVGGRRPEREGYYYEPTVLLDVPVDAEILGEEIFGPVAPVVTFTDEDDAIRMANETEYGLVSYVYTRDLARGMRVSERLDSGMVGLNRGLVSDPAAPFGGTKQSGVGREGGHEGMLDYLESKYVAVSW

SEQ ID NO: 10853 - protein, 245 aa, Oryza sativa
MDSDHWISRLMAAKRQYALQRAQNHHHATATATATAASHSHLDRYGYDDVEPEDEVRPDFPCPYCYEDHDITSLCAHLEDEHPFESKVVACPVCSARISKDLLDHITLQHSYLFRLQRHHRLRRVAVPSNHALSLGGRDLQETYLKVLLGNSSRSSGTNAASSVTDSLLSSLVLNLSSSEAEDTAKFSALAVVENNWFKRTLPSKTWKASSDSNLSQEERERRRRRAAVRSSFVQHLLVSTLFDD

SEQ ID NO: 10854 - protein, 317 aa, Pasteurella multocida subsp. multocida str. Pm70
MNAMKHSQLLILGSGPAGYTAAIYAARANLKPVLVTGLQQGGQLTTTTEIENWPGDFGETTGPELMQRMLQHAEKFDTEIIFDHINKVDLSSRPFKLYGDVHTFSCDALIIATGASARYLGLPSEEAYKGRGVSACATCDGFFYRNKPVAVIGGGNTAVEEALYLANIASEVHLVHRRDSFRSEKILIDRLMKKVEEGKIILHTNRTLDEVLGDNMGVTGVRLKDTQSEATEELSLDGVFIAIGHAPNTDIFAEQLELNNGYIVVKSGLEGNATATSVDGVFAAGDVMDHNYRQAITSAGTGCMAALDAERYLDAQK

SEQ ID NO: 10855 - protein, 423 aa, Streptomyces galilaeus
MTARRVVITGLGVIAPGGIGTKAFWERIVSGVSATRTITAFDASEFRSRMAAECDFDGVRSGLTVRDTARLDRATQFAVVAAREALADSGIEIDERNAHRTGVSLGSAVGCTQKLEEEYVARSDGGQRWLVDHAAGTPYLYDYFVPSSMAAEVAWEAGAEGPAALVSAGCTSGLDSLGHALDLIREGAVDIMIAGGSDAPIAPITVACFDAIKATSPRNDTPEHASRPFDRTRSGFVLGEGAAVLVLEERESALRRGAQIYAEIAGYAGRANAHHMTGLRPDGLEMSAAITGALDDARIDREAVGYVNAHGTATRQNDIHETAAIKHSLGEHARRVPVSSIKAVIGHSLGAVGSIEAVASALVIRHGVVPPTAGLHEPDPQLDLDYVPLIARDQATDTVLTVGSGFGGFQSAMVLTSAEGGRS

SEQ ID NO: 10856 - protein, 426 aa, Arabidopsis thaliana
MQNQRLIKQQQQQQQQQHQQAMIQQAMMQQHPSLYHPGVMAPPQMEPLPSGNLPPGFDPTTCRSVYAGNIHTQVTEILLQEIFASTGPIESCKLIRKDKSSYGFVHYFDRRCASMAIMTLNGRHIFGQPMKVNWAYATGQREDTSSHFNIFVGDLSPEVTDAALFDSFSAFNSCSDARVMWDQKTGRSRGFGFVSFRNQQDAQTAINEMNGKWVSSRQIRCNWATKGATFGEDKHSSDGKSVVELTNGSSEDGRELSNEDAPENNPQFTTVYVGNLSPEVTQLDLHRLFYTLGAGVIEEVRVQRDKGFGFVRYNTHDEAALAIQMGNAQPFLFSRQIRCSWGNKPTPSGTASNPLPPPAPASVPSLSAMDLLAYERQLALAKMHPQAQHSLRQAGLGVNVAGGTAAMYDGGYQNVAAAHQQLMYYQ

SEQ ID NO: 10857 - protein, 333 aa, Roseovarius nubinhibens ISM
MTITVGINGFGRIGRCTLAHIAQSTRDDIKVVKVNATGPLETAAHLLKYDSVHGRFANEITLGDGTMDLGRGPMQMFSTYDMDELDWSGCDVVLECTGKFNDGEKAKKHLERGAKKVLLSAPGKNVDRTIVFGVNDNELQASDTMISNGSCTTNCLAPVAKVLDDSFGIESGIMTTIHAYTGDQPTLDRRHKDLYRARAAAMSMIPTSTGAAKALGEVLPALKGKLDGSAIRVPTPNVSAVDLTFVAKTDVTEDEVNAAMRAAAEGPMKGVLGYDPEPKVSIDFNHTEESSIFAPAQTKVIGGRLVRVLSWYDNEWGFSCRMADVAVAMGKLG

SEQ ID NO: 10858 - protein, 922 aa, Pseudomonas fluorescens PfO-1
MQEKGVLKKLGIKGRVLLLTLLPTSLMALVLGGYFTWTQQSDLQTQLMQRGEMIAEQLAPLVAPAMGHGDAELLERIATQSLEQPDVRAVTFLAPDRSPLAHAGPTMLNQAPSGDSAHLLRRSGNDATRYLLPVFGKHRNLAGELIPQESDRLLGWVELELSHNGMLLRGYRSLFASLLLIGAGLAGAALLALRMGRTINRPLSQIKQAVAQLKDGHLETRLPPLGSQELDELASGINRMAGTLQNAREELQHSVDQATEDVRQNLETIEIQNIELDLARKEALEASRIKSEFLANMSHEIRTPLNGILGFTHLLQKSELTPRQLDYLGTIEKSADSLLGIINEILDFSKIEAGKLVLDHIPFNLRDLLQDTLTILAPAAHAKQLELVSLVYRDTPLSLVGDPLRLKQILTNLVSNAIKFTREGTIVARAMLEEENDDSVQLRISIQDTGIGLSNQDVRALFQAFSQADNSLSRQPGGTGLGLVISKRLIEQMGGEIGVDSTPGEGSEFWISLNLPKTRDDAEDLPAAPLLGRRVAVLENHELARQALQHQLEDCGLDVTPFNTLESLTNGVTGAHQTDQAIDLAVLGITSNDMPPERLNQHIWDLEHLGCRVLVLCPTTELTLYHLSVPNPHSQLQSKPACTRKLRRALSDMVNPRQSRSEPGEPLSSRAPKVLCVDDNPANLLLVQTLLEDMGAKVLAVESGYAAVKAVQSESFDLVLMDVQMPGMDGRQSTETIRQWESERHCTPLPIVALTAHAMANEKRALLQSGMDDYLTKPISERQLAQVVLKWTGLALRNQAPDRGGESLLGNQELPILDHEEGLRLAAGKADLAADMLAMLLASLEADREAIRTARDHQDQNALLERVHRLHGATRYCGVPQLRAACQRSETLLKQDDPKASAALDELERAINRLAAQAKISA

SEQ ID NO: 10859 - protein, 629 aa, Novosphingobium aromaticivorans DSM 12444
MCGIAGIVHTEGPKPVDPDRVRRMCDAIAHRGPDGEGVWTAPGIGLGHRRLSIIDLAGSPQPMKAAEGDAVIVFNGEIYNFRDLRKELQALGAQFRTDGDTEVILQAWRQWGTACLPRLHGMFAFALYDLRQRTTLLARDRLGVKPLFTARLADGAVIFGSELKALLAHPSLRREIDPLAVEDYLAWGYVPDHRSMLKGVEKLPAGHYQLLRHDAPPAAPVQWWDVSFADRANGSAEDLGAHLLHHMRDAVTSRMVADVPLGAFLSGGVDSSSVVALMAEASATPVKTCSIGFDVAALDETAYADRIAARFATEHRKRLVSPDDFSLVDRLAGMFDEPFADASALPTFRVCELAREHVTVALSGDGADEAFAGYRRQTFQHREEQARALLPSALRKPLFGTLGRLWPKADWAPRPLRAKTTLLSLAASGEEGYARALSVTSPELRETLYTPDFKRLRGDYRAEQPLIELMRKAPARSGLDRAQYADLKFYLPGDILTKVDRTSMAVGLEAREPLLDHRLVEFGASLPERLRVRGATGKWLIKQTMRRYLPEDVLFRPKMGFVTPLAQWLRGPLAHEARALASDGLLARTGWLDAARIDALADAHVSGRADHSRLIWQLLMLRKSLQLLG

SEQ ID NO: 10860 - protein, 129 aa, Triticum aestivum
  misc_feature (70)..(70): Xaa can be any naturally occurring amino acid
  misc_feature (95)..(95): Xaa can be any naturally occurring amino acid
MARAQVMLMAVALVLMLAAVPRAAVAIDCGHVDSLVRPCLSYVQGGPGPSGQCCDGVKNLHNQARFQSDXKSACNCLKGIPPWIHNLNEDNARSXPPKCGVNLPYTSSQHRLHRCNGDIRQLGLNSSTT

SEQ ID NO: 10861 - protein, 234 aa, Triticum aestivum
  misc_feature (192)..(192): Xaa can be any naturally occurring amino acid
  misc_feature (203)..(203): Xaa can be any naturally occurring amino acid
MERAGGRKANQLRAYSCTRNPLERAHGSARWAQGDTVVVAAVYGPRPGTRKGENPEKASIEVVWKPKTGQIGRQEKEYEMTLKRTLQSICLLTVHPNTTTSLVLQVMGDDGSLLPCAINASCAALVFAGIPMKHLAVAIGCGVLADGDVILDTSKAEEQQLKSFAHLVFPNSSKSVDVKESQQKDGQSERGXLITSITHGVMXRGRLLQLYREGTCRICADLRFHEDHLAEAHT

SEQ ID NO: 10862 - protein, 368 aa, Prunus armeniaca
MATLVEPPDGIRQRGKHYYSMWQTLFEVDTKYVPIKPIGRGAYGIVCSSINRATNEKVAIKKINNVFENRIDALRTLRELKLLRHIRHENVIALKDVMMPIHRTSFKDVYFVYELMDTDLHQIIKSSQPLSSDHCKYFLFQLLRGLKYLHSANILHRDLKPGNLLINANCDLKICDFGLARTSGGTGQFMTEYVVTRWYRAPELLLCCDNYGTSIDVWSVGCIFAEILGRKPIFPGTECLNQLKLIINVLGSQHEPDLAFIDNPKARKYIKSLPYSRGTHFSRLYPQADPLAIDLLQRMLVFDPTKRISVTEALQHPYMSGLYDPRCNPPAQVPINLDIDENLAEPMIREMMWHEMLHYHPEAAFVNA

SEQ ID NO: 10863 - protein, 337 aa, Mycoplasma pneumoniae M129
MLAKSKTIRVAINGFGRIGRLVFRALLSQKNIEIVAVNDLTHPDTLAHLLKYDSAHGEFKKKVVAKDNTLMIDKKKVLVFSEKDPANLPWAEHNIDIVVESTGRFVSEEGASLHLQAGAKRVIISAPAKQKTIKTVVYNVNHKIINAEDKIISAASCTTNCLAPMVHVLEKNFGILHGTMVTVHAYTADQRLQDAPHSDLRRARAAACNIVPTTTGAAKAIGLVVPEATGKLNGMALRVPVLTGSIVELCVALEKDATVEQINQAMKKAASASFRYCEDEIVSSDIVGSEHGSIFDSKLTNIIEVDGNKLYKVYAWYDNESSYVNQLVRVVNYCAKL

SEQ ID NO: 10864 - protein, 91 aa, Brassica napus
MEIETHDSAVPVKNLVKVAFKLGTESYTVDAVQGDTVLDQLVSMKEVSMKILKEFITKHNVLDHVPDESLSDEGDEDDAVKCPVKPKKTKI

SEQ ID NO: 10865 - protein, 170 aa, Zea mays
  misc_feature (152)..(152): Xaa can be any naturally occurring amino acid
MDGGGGVGGGMGPVGGGVGGMVGPVGVGGGGGGSDVELVSKTLQFEHKLFYFDLKENPRGRYLKISEKTSTTRSTIIVPIAGVAWFLDLFDYYIRTDERDVFSKELRLDTKVFYFDIGENKRGRYLKVSEASVNRNRSTIIVPAGSSGEEGXEAFRNVLLEINDEASRLY

SEQ ID NO: 10866 - protein, 491 aa, Thalictrum flavum subsp. glaucum
MEVLSAAMVSLFFIFLFIFFILCDSRNKDLPPGPRPSPIVGNLLQLGEKPHAEFAKLAEKYGELFTLKLGSQTVVVASSPAAAAEILKTRDKILSGRYVFQSFRVYEHVLNSIVWSECNENWKLLRKVCRTELFSPKMIESQAYIREAKALDMVRFLRKKENQEVKIVEVVFNTLVNIFGNLIFSKDVFDLEDPTGGSAELKEHLWKLLDMGNSTNPADYFPIMGKFDLFGQRREVAKVLKQIYDVWGVMLKERRSITGHRENDFANVLLNAGLDDQKINALLMELFGAGTETTASTIEWAITELTNNLRVISKLRAELINVVGHKTVKESNIPHLPYLQAIVKETLRLHPPTPLLLPRRALETCKVMNYTIPKECQIMVNAWAIGRDPKTWDDPLTFKPERFMNSTVDYKGNDFELIPFGGGRRICPGLPLASQFLSLIVATLVQNFDWSFPQGMTPNEVPMDEKFGLPLQKDPPLLIVLKARTSMKLQD

SEQ ID NO: 10867 - protein, 219 aa, Actinidia deliciosa
ETGRHVRMLTHEIRSTLDRHTILKTTLVELGRTLDLEECALWMPSRRGLDLQLSHTLNNLIPIGSSVPSNLPIVNEVFNSAEAIRIPHTCPLARIKPRMGRYVPPEVVAVRVPLLHLSNFQINDWPDTSAKSYALMVLILPMDGIRKWRDHELELVEVVADQVAVALSHAAILEESMRARDQLLEQNVALDFARQEAEMAIRARNDFLAVMNHEMRTPM

SEQ ID NO: 10868 - protein, 80 aa, Glycine max
  misc_feature (73)..(73): Xaa can be any naturally occurring amino acid
CLSYARGTGSAPSASCCSGVRNLKSAASTAADRRAACNCLKNAARGVSGLNAGNAASIPSKCGVSIPYTISTXTDCSRVN

SEQ ID NO: 10869 - protein, 318 aa, Musa acuminata
MDSFPVIDMEKLLGRERGAAMEILRDACEKWGFFEILNHGISHYLMDEVEKVNKEQYNKCREQKFNEFANKALENADSEIDHLDWESTFFLRHLPVSNISEIPDLDDQYRKAMKEFAAAIEKLAERLLDLLGENLELEKGYLKKAFSNGSKGPTFGTKVSSYPPCPRPDLVKGLRAHTDAGGIILLFQDDQVSGLQFLKDGEWLDVPPMRHAIVVNLGDQLEVITNGKYKSVVHRVVAQTDGNRMSIASFYNPGSDAVIFPAPALVEKEAEEKKEVYPRFVFEDYMKLYVGHKFQAKEPRFEAMKAMEAVATHPIATS

SEQ ID NO: 10870 - protein, 335 aa, Bacillus cereus ATCC 14579
MCGITGWVDYKRSLEGERDVVTKMAETLAKRGPDDNKVWIKGNVAFGHKRLIVVDPEGGKQPMTCLKDETNYAICYNGELYNTEDIRKELLRRGYRFKGHSDTEVLLASYIEWKEECVDHLNGIYAFAVWDEQKEQVFIARDRLGVKPLFYKYDSGRLLFGSELKAILSHPDVKAEVTLEGLSEIFGLGPSRTPGHGIYAGIKELRPGHAMTFSKNGLCIWRYWNVESKKHEDSFEETVEKTRFLLQDAITRQLVSDVPLCTFLSGGVDSSAITAIAAKEYERSGKGQLHTYSIDYEDNDKYFKANAFQPNSDAPFINLMTETFQTNPSSLRHFE

SEQ ID NO: 10871 - protein, 473 aa, Salmonella typhimurium LT2
MPTHLVWFRRDLRLQDNLALAAACRDASARVLALYISTPAQWQAHDMAPRQAAFISAQLNALQTALAEKGIPLLFHEVADFNASIETVKNVCRQHDVSHLFYNYQYEFNERQRDAAVEKTLPSVICEGFDDSVILAPGAVMTGNHEMYKVFTPFKNAWLKRLKEDIPPCVPAPKIRVSGALSTPLTPVSLNYPQQAFDAALFPVEENAVIAQLRQFCAQGADEYALRRDFPAVDGTSRLSASLATGGLSPRQCLHRLLAEQPQALDGGPGSVWLNELIWREFYRHLMTWYPALCKHQPFIRWTKRVAWQENPHYFQAWQKGETGYPIVDAAMRQLNATGWMHNRLRMITASFLVKDLLIDWRLGERYFMSQLIDGDLAANNGGWQWAASTGTDAAPYFRIFNPTTQGERFDRDGEFIRQWLPALRDIPGKAIHEPWRWAEKAGVVLDYPRPIVEHKQARIATLSAYEAARKGA

SEQ ID NO: 10872 - protein, 409 aa, Glycine max
MLCSPVYMARPELGVSSFCVVGETAAGGRRALGLVAPFIMISPLIVRSHNTRESFPRGVGGAVLYISFYPPRWGWAGFPPRVFFSLRPSPKGKKNLPRKAKRNQTESSRLSAGSNFRGMATGSEAGKPAEVVLEWPKQDKKRMLHAVYRVGDLDRTIKCYTECFGMKLLRKRDVPEEKYTNAFLGFGPEDTNFALELTYKYGVDKYDIGAGFGHFAIANEDVYKLAETIKSSSCCKITREPGPVKGGSTVIAFAQDPDGYMFELIQRGPTPEPLCQVMLRVGDLDRSIMFYEKALGMKLLRKKDVPQYKYTIAMMGYAEEDKTTVLELTYNYGVTEYNKGNAYAQVAIGTDDVYKSAEAVELVTKELGGKILRQPGPLPGLNTKITSFLDPDGWKVVLVDHADFLKELH

SEQ ID NO: 10873 - protein, 463 aa, Cyanidioschyzon merolae
MSVSCGRRIFSDIVRQVRTFATVGVDARSLAGTRNATVWRSYRTTTLQYPRLWELRASRFLSGEAVEASASKRKPHLNVGGMGHVDHGKTTLAAAITKVLAETGGARYTAYEEIDKAPEERARGITINASHLKYETPSRSYAHVDCPGHRDFVKNFITGAAQVDTAILVVSGPDGPQPQTQEHVLLSKQVGVPNFVVYLNKCDMVDDPELLDLVELEVRELLSKYEYDGDNVPIVRGSALKALQGDQSELGCGSIHKLLEILDKVPIPKRDLEKPFLMPIEDSFSITGRGTVVTGRVETGILRPGDEIEIVGLRPPEVAPMRTIVTGIETFKQSLPYAEAGENVGCLLRGVKREDVLRGQVLAKPGTSRAHRKFEADVYILTQEEGGRHTPFFSNYRPQFFVRTADVTGRFLLPPEVEMCMPGDRVRCAVELIYPVALQEGLRFAVREGGRTVGAGLVTKVIE

SEQ ID NO: 10874 - protein, 310 aa, Shewanella sp. MR-7
MSENRIRIATRKSPLAMWQAEFVKAELERVHPGIVVELLPMSTKGDVILDTPLAKVGGKGLFVKELEVAMLEDQADIAVHSMKDVPVDFPEGLGLEVICEREDPRDAFVSNLYKSISELPLGATVGTSSLRRQCQLRASRPDLIIKDLRGNVGTRLAKLDNGEYDAIILAAAGLIRLKLSERIASFISAEESLPANGQGAVGIECRTNDERVKALLAPLEHLETRYRVIAERAMNTRLEGGCQVPIGAFAEIHGDEMTLRGLVGNPDGSEIIEGVITGPKTEATKLGVALAEELLSKGAKSILDAVYAKA

SEQ ID NO: 10875 - protein, 568 aa, Hordeum vulgare subsp. vulgare
  misc_feature (106)..(106): Xaa can be any naturally occurring amino acid
MSSTRPTSWRRRRRRPLCRLRFSTPSLSTGYHFRPIKNWINDPNAPMYYKGWYHLFYQYNPKGAVWGNIVWAHSVSRDLINWVALETAIQPSIKSDKYGCWSGSAXILRDGTPAIMYTGIDRADINYEVQNIAFPKNKSDPLLREWVKPRGNPIIVPEGGINATQFRDPTTAWYADGHWRLLIGALSGASRGVAYVYRSRDFMRWTRVRKPLHSAPTGMWECPDLYPVTADGRHRHKGLDTSVVSGPRVKHVLKNSLDLRRYDYYTVGTYDRKTERYVPDNPAGDEHHLRYDYGNFYASKTFYDPVKRRRILWGWANESDAAVDDVAKGWAGIQAIPRKVWLDPSGRQLMQWPVEELEALRGKRPVSIKNRVVKRGEHVEVTGLRTSQADVEVSFEVASIDGAEALDPALANDAQKLCSMRGAHVEGGVGPFGLWVLASSKLEEKTAVFFRVFKAARNINSTNNKPVVLMCSDPTMSSLNPNLYKPTFAGFVDTDIAKGKISLRSLIDRSVVESFGAGGRTCILSRVYPTLALGKNARLHVFNNGKVDIKVSELTAWEMKKPALMNGA

SEQ ID NO: 10876 - protein, 367 aa, Arabidopsis thaliana
MSRRSLTLLKNLARNANGSGIQTRSVTYMPRPGDGAPRAVTLIPGDGIGPLVTNAVEQVMEAMHAPIFFEKYDVHGEMSRVPPEVMESIRKNKVCLKGGLKTPVGGGVSSLNVQLRKELDLFASLVNCFNLPGLPTRHENVDIVVIRENTEGEYAGLEHEVVPGVVESLKVITKFCSERIAKYAFEYAYLNNRKKVTAVHKANIMKLADGLFLESCREVAKKYPSITYNEIIVDNCCMQLVAKPEQFDVMVTPNLYGNLVANTAAGIAGGTGVMPGGNVGADHAVFEQGASAGNVGKDKIVLENKANPVALLLSSAMMLRHLQFPSFADRLETAVKKVIAEGKCRTKDLGGTSTTQEVVDAVIAKLD

SEQ ID NO: 10877 - protein, 231 aa, Zea mays
EKKKKKKKKKKKKKKKKKKKKKKSYSSERRSLLRHMAAELRLDMRTDGYVRVRDLLKLNLQTFAKVPLKSHTVDEIREAVRRDNKQRFSLLEEDGELLIRANQGHTVTTVTSESLLKPILSPDEVSVCVHGTYRKNLDSILQSGLKRMARLHVHFSSGLPSDGEVISGIRQNVNILIHLDVSKALKDGMKLYISDNKVILTEGFGFDGVVPVKYFERIETWPGRAPIPFQR

SEQ ID NO: 10878 - protein, 202 aa, Prunus dulcis
  misc_feature (50)..(50): Xaa can be any naturally occurring amino acid
MASYEKQYGATPTDEYGNPIRRTDEYGNPLGHHTTTTGTTAATTGAGGYXPHDFAATTAAGQGQGVHGHDYDRKEHHGVTGAVLHRSGSSSSSSSEDDGLGGSRKKKGLKEKIKKKLPGGTKTDTTYGGTGTTGQHHQEKGTMDKIKEKLPGTGGHRADDPYPSQTHTTATTTPYGGTAYTEEHQEKKGIMDKIKEKLPGQH

SEQ ID NO: 10879 - protein, 354 aa, Nanoarchaeum equitans Kin4-M
MVMDDILKEALETMKDINLSKARAANIKVVGVGGAGCNIIEWLYKKKIENVDLIAMNTDAVHLKSMKVDPERVKRILLGPDITKGHGAGGKPEVAEQAARESAKEIKQLLEGADLVWVVAGMGGGTGTGAAPVVAEIAQNVGALVTSFAITPFRFEGRRLQIAWEGIRRLTEFSNTTVILDNNKLFEVARGLNVQQAFALSNELVAQTVSGVVEIVTGAADINRDLADIKAIMEEGHVAAIGIGESSSENRLIEAVTRAIKHPLLDVDVKGAKGALIYITAGPDFKIDELKSLETFVKNNLDSNAYVSWGLKIREDFGEKVRVIAIVTGVKSPYIIGKDFISRKKDEYGIDKIL

SEQ ID NO: 10880 - protein, 614 aa, Haemophilus somnus 129PT
MAEMHPILWSRISDRRLANPDTVSVNVLSTFEHRSFELADLGILLKPQSDLAILNYIANYLIENNAINREFIEKHTKFKRGETDIGYGLRPQDPREQIAKNVKTAGKMYDSSFEEFKKLVAPYTLEKAHEISGVPKEQLEKLAKLYADPNKKVVSYWTMGINQHTRGVWANHLIYNIHLLTGKISLPGCGPFSLTGQPSACGTAREVGTFIHRLPADLVVTKPEHRKIAEKIWKLPEGLISDKLGFHAVAQSRALKDGKMQVLWQMCNNNMQAGPNINEETYPGWRNPDNFIVVSDPYPTVSALSADLILPTAMWVEKEGAYGNAERRTQFWRQQVKAPGEAKSDLWQLVEFSKYFTTDEVWPAEILAKNPAYQGKTLYEVLYLNGQVNQYSNDELKGRLNDEAYHFGFYIQKGLFEEYASFGRGHGHDLADFDTYHKARGLRWPVVDGKETLWRYREGYDPYVKAGEGVSFYGQADKRAVILAVPYEPPAEVPDREYDLWLTTGRILEHWHTGSMTRRVPELHRSFPNNLVWMNPNDAKKRGLKHGDKIKVISRRGEITSYIDTRGRNKCPEGLIYTTFFDAGQLANKLILDATDPISKETDFKKCAVKVVKA

SEQ ID NO: 10881 - protein, 685 aa, Oryza sativa
MGDSTVAGALVPSVPKQEQAPSGDASTAALAVAGEGEEDAGARASAGGNGEAAADRDLLCPICMAVIKDAFLTACGHSFCYMCIVTHLSHKSDCPCCGNYLTKAQLYPNFLLDKVLKKMSARQIAKTASPIDQFRYALQQGNDMAVKELDSLMTLIAEKKRHMEQQESETNMQILLVFLHCLRKQKLEELNEIQTDLQYIKEDISAVERHRLELYRTKERYSMKLRMLLDEPAASKMWPSPMDKPSGLFPPNSRGPLSTSNPGGLQNKKLDLKGQISHQGFQRRDVLTCSDPPSAPIQSGNVIARKRRVQAQFNELQEYYLQRRRTGAQSRRLEERDIVTINKEGYHAGLEDFQSVLTTFTRYSRLRVIAELRHGDLFHSANIVSSIEFDRDDELFATAGVSKRIKVFEFSTVVNEPSDVHCPVVEMATRSKLSCLSWNKYSKNVIASSDYEGIVTVWDVQTRQSVMEYEEHEKRAWSVDFSRTEPSMLVSGSDDCKVKVWCTKQEASAINIDMKANICSVKYNPGSSHYVAVGSADHHIHYFDLRNPSAPVHVFGGHKKAVSYVKFLSTNELASASTDSTLRLWDVKENCPVRTFRGHKNEKNFVGLSVNNEYIACGSETNEVFVYHKAISKPAANHRFVSSDLDDADDDPGSYFISAVCWKSDSPTMLTANSQGTIKVLVLAP

SEQ ID NO: 10882 - protein, 354 aa, Nicotiana tabacum
MAADNIYDFVASNLLCTETKSLCFDDVDSLTISQQNIETKSKDLSFNNGIRSEPLIDLPSLSEECLSFMVQREMEFLPKDDYVERLRSGDLDLSVRKEALDWILKAHMHYGFGELSFCLSINYLDRFLSLYELPRSKTWTVQLLAVACLSLAAKMEEINVPLTVDLQVGDPKFVFEGKTIQRMELLVLSTLKWRMQAYTPYTFIDYFMRKMNGDQIPSRPLISGSMQLILSIIRSIDFLEFRSSEIAASVAMSVSGEIQAKDIDKAMPCFFIHLDKGRVQKCVELIQDLTTATITTAAAASLVPQSPIGVLEAAACLSYKSGDERTVGSCTTSSHTKRRKLDTSSLEHGTSEKL

SEQ ID NO: 10883 - protein, 519 aa, Yarrowia lipolytica CLIB122
MLTNLTIVLITLLVTYTVLTRTALRIQRARKAKQMGATLPPRVNNGILGWYGLWLVIQNARSMKLPHTLGKRFANGPTWLTPVAGNEPINTIDPENVKAILATQFKDFCLGIRHRALSPSIGDGIFTLDGEGWTHSRALLRPQFSRQQISRVHSLERLMQILFKLIRKENGEYFDLQNLFFMFTLDSATEFLYGASVDTLADLLGEPVEGDHGGVGEEVRKAYQQSINNAQDISAIRTRLQGLYWIAGNIYQRNLYQKSNKGVKDFSQFFVDKALNTSKEKLKEMEDSDNYVFLYELVKSTRNPVVIRDQLINILVAGRDTTASLLSFTFYTLGRRPDVLKKLRAAILEDFGTSPDEITFESLKRCDYLRYVLNEVLRLYPSVPINARSATRDTTLPRGGGPDGKQPVFVYKGQMVAYCVYWMHRDKKYWGEDALEFNPDRWDPKVQPQNKGWEYLPFNGGPRICLGQQFALTEAGYVVTRMLQEFDTVHCKNQKEEEHPPYALDLTMRHGEGVWVSMK

SEQ ID NO: 10884 - protein, 322 aa, Novosphingobium aromaticivorans DSM 12444
MATTHKTRMLIIGSGPAGLSAAIYGARAGMEPIVVQGLQPGGQLTITTDVENYPGFRDVIQGPWLMQEMQAQAEHVGTRMMWDTILEVSLDGSPFRAVGDSGDIYEGDVLVIATGAQAKWLGVPGEQEFSGKGVSACATCDGFFYRGKKVVVIGGGNTAVEEALYLTNHSPDVTLIHRRDSLRAEKILQDRLFAHPNVKVLWNQKVDSFVGEAGKGLTGVKLVDTVTGAESVVETDGAFVAIGHAPATELFKGKLELDESGYIVVQPGTPKTAIPGVFACGDVMDHTYRQAVTAAGTGCMAALDAERFLAELDFKAAQAVIA

SEQ ID NO: 10885 - protein, 259 aa, Bordetella pertussis Tohama I
MAGTIDITHEGAVSTMTINAPPLNVFSVEMLHALLEGLQALEQREQTRAIVIRGAGSRAFSAGANLNDQADFSEHDARMLRVIGREVVERIETLEKPVITAIEGWCIGGGTGIAWIGDIRIASDTAKFRAGDAYLGIIPTWSIGMVRLVHFLGRNRTLGLLLLGEDIDAAAALELGLVTRVVPAGEFNEQVAQIAARLATAAPMSVKAIKLAVRAQYRDNTDRAAQLEEEWCTRIWASEDKNEGIAAFKEKRQPRFKGR

SEQ ID NO: 10886 - protein, 531 aa, Yarrowia lipolytica CLIB122
MLQLFGVLVLALTTALLAQLAYNKYEYNRKVKQFGCGELTVAKNGFLGWKGIRAVLHVLKTKKGPAALKERIDAYGRTYVFHIGPAPVISTMEPENIKAMLATQFKDFSLGTRYRSLAPTLGDGIFTLDGHGWTHSRALLRPQFAREQVSRLDSLEAHFQILKMCVDKEMREKGNDPRGFDIQNLFFLFTLDSATEFLFGSSVDSLVDFLDDPSVRTGDHGGVDEAARKGFNNSFNHAQELCALRSRLHTLYWIVGSVVKKEPFERYNKEIKTFVDFFAAKALKARKEKDMSLMDNDQYIFMYELVKETTNPVTLRDQMLNILLAGRDTTASMLSWIYFRLARDPKLYAKLRSAILEDFGTTPEAITFESLKQCDYLRYVLNEALRLYPVVPINGRTATRDTTLPRGGGPDQSQPIFIPKGQTVSYSVYWTHRDPRFWGEDAEEFIPERWDPRNGNIGRGWEYLPFNGGPRICLGQQFALTEVGYVLSRLVQTYETLETCDHKPLPPLYNHALTMCHEEGVWVKMYKGEKA

SEQ ID NO: 10887 - protein, 480 aa, Burkholderia xenovorans LB400
MSQFANYIDGQWVDGASVSRNVNPSNLDDVIGEFAQADAEQTQRAIRAARNAFAQWSLSTPQQRFDLLDQAGSTILARKAELGRLLAREEGKTLPEAIGEVGRAGQIFKFFAGEALRIGGEIVPSVRPGMTVEVTREPLGVIGLITPWNFPIAIPAWKIAPALAYGNTVVVKPADLVPASTWELVRIIAEAGAPAGVINLVMGQGAVVGEALVSSPQVDAVSFTGSVATGRAIGAKCFASGKKFQLEMGGKNPMVVLDDADLDVAVEACINGGFYSTGQRCTASSRFIVTEGIHDRFIDAMKARMQALKVGDALADGTHIGPVVDDKQLQQDERYIAIAREEGGTIFGGERIERDTRGYFLAPALITDTTPDMRINREEVFGPVASVIKVKDYNEALAVANDTEFGLSAGICTTSLKYSSHFRRHVQAGMVMVNTATAGVDYHVPFGGRKGSSYGPREQGSYAREFYTTVKTAYVSPGAV

SEQ ID NO: 10888 - protein, 246 aa, Aspergillus oryzae
MSPPAIIAPSILSADFASLGSECSTKMAQGSDWLHVDIMDGHFVPNITFGAPVVTKIRSHVDRPTQPHGRGTFDCHMMIMEEFKNAGCDLYCFHYEAAVASVAATEPADSTTTRKTSPKELIRYIHEEGMQAGIAIKPDTPVDVLWEILESKDEKERPDMVLVMTVYPGFGGQKFMASELPKVQALRERYPNLNIEVDGGLGLGTVDQAAEAGANVIVAGSAVFGAQDPADVIAKLREAVNKRQKL

SEQ ID NO: 10889 - protein, 240 aa, Candida albicans
MTEIVTINTSVLLFDLDGTLVDSTAAVEKTWENQVNQHNQEFPDKFIDLPTLLNVSHGSRTVETFAAYFPELKTDRDSVYAWEMGIVQNYGHLGKAINGSVQTLITLNEKNIPWAIVTSANPKLAGFWLDKLFHGVKKPDVFITASDVSKGKPDPEGYCTAFERLKKVYNLNGSAKGVVFEDAPAGIKAGVNGGFTVVGIASTFPKEVLLQAGATYVVEDFTKVKIDQSGEAVKLVLEIL

SEQ ID NO: 10890 - protein, 275 aa, Zea mays
RTTSPLPRFLLLSPSPMAQSWAFFLLVVLCFCCVSDLICGSNGERVFLYPQSQKVSSIVSQRYRTAYHFQPPKNWINDPNGPMYYNGIYHEFYQYNPNGSVWGNIVWGHSVSTDLINWIPLETAIARDTPSDINGCWTGSATILPGNRLVIIYTGADPEKRQVQNIVVPKNMSDPYLREWTKAGNNPVIQPVGPGLNSGQFRDPTTGWVGPDGLWRIAVGAELNGDSAALLYKSKDFLNWTRVDHPLYSSNSSSMWECPNFFAVLQGIAVDWTGL

SEQ ID NO: 10891 - protein, 279 aa, Vibrio parahaemolyticus RIMD 2210633
MNKVLRNMSIPFHSQLFIGNVRHRRFTPVKHELNYSMFMPAIDLDEIGLLEKKVWGFGTRWWHWARFKRDDYLGEGSLKKAVQDKVAELTGVRCSGKVLAVCHLRYLGLYFSPVNFYYLYDQKGEWQYLLAEVSNTPWNERHYYAIAADPKDEDFGWEQDKAFHVSPFNPIDQLYRWKIKPLTDKLNIHLECHKGEKHFDATMVMKAQPFSSGSLLKCLFGTPIQTVKVMVGIYWHALKLWVKGAPFYSHPKYLASNERQASSDKSDKKNNKHKENSAC

SEQ ID NO: 10892 - protein, 523 aa, Yarrowia lipolytica CLIB122
MSNALNLSLALGVFLLAYYGFSVIQYHIKTRKLEKKWKCGKPKDISRFPFSASFFIPFLVESKKNRLLEFVQWMFESQVYPGYTCKTTVFGVDMYHTVDPENLKAVLATQFKDFCLGERHAQFLPVLGNGIFTLDGQGWQHSRAMLRPQFARDQVSDVEMIEEHIQYMTSRIPKDGSAFDAQELFFNLTLDTATEFLFGQSVGSQTVETNPTAVPTDMPVHLRKSFQEDFNTAQEHLGQRARLQMFYWAWRPRELYSSGERVHAFVDHYVKKALEESEKHVDDGKYVFLRELAKETKDPIVLRDQALNILLAGRDTTASLLSWCLYLMARRPEVYAKLREEVIENLGDGEDLSTITFESLKRCDYLRYVLNEVLRLYPSVPANMRYATRDTTLPRGGGPDGMQPIVVRKGNLVSYHVFTTHRLKEFWGEDAEEFRPERWYEDGASQAKGWEYLPFNGGPRICLGQQYALTEAGYALARIAQLYDTIENADDKPEPPVKFHALTMCHHTGVLVKLYNSKTTKAQ

SEQ ID NO: 10893 - protein, 378 aa, Schizosaccharomyces pombe
MSMLSTLRTAGSLRTFSRSACYSFRFSSTKAAAGTYEGVKNANGNYTVTMIAGDGIGPEIAQSVERIFKAAKVPIEWERVKVYPILKNGTTTIPDDAKESVRKNKVALKGPLATPIGKGHVSMNLTLRRTFGLFANVRPCVSITGYKTPYDNVNTVLIRENTEGEYSGIEHEVIPGVVQSIKLITRAASERVIRYAFQYARQTGKNNITVVHKATIMRMADGLFLECAKELAPEYPDIELREEILDNACLKIVTDPVPYNNTVMVMPNLYGDIVSDMCAGLIGGLGLTPSGNIGNQASIFEAVHGTAPDIAGKGLANPTALLLSSVMMLKHMNLNDYAKRIESAIFDTLANNPDARTKDLGGKSNNVQYTDAIISKLK

SEQ ID NO: 10894 - protein, 620 aa, Zea mays
  misc_feature (194)..(194): Xaa can be any naturally occurring amino acid
  misc_feature (400)..(400): Xaa can be any naturally occurring amino acid
  misc_feature (490)..(490): Xaa can be any naturally occurring amino acid
  misc_feature (563)..(563): Xaa can be any naturally occurring amino acid
  misc_feature (569)..(569): Xaa can be any naturally occurring amino acid
MRILVEEVAKRRQTKLQIKKAFDSVHWAFLLEILQHLGFGQVWCNLILNLLLTSSTQVLVNGVPGQPISLKRGLRQGDPLSPLLFILVMDVLNSLFTRADECGLLHPLAGRSISQRVSMFADDVVVFVKPVSEDLVVVREILRCFGVASGLQTNLQKSFSYPIRCDNERIELAVQTLGCASKSFPTTYLGLLAXPLSSKKLSAGDLALWIEKNAAKLPGWKAELLNLFGRITLIKSVLSAILVYLFIAINAPKWVIKAIDKIRRNFLWKGRKEARGGNCLISWDKVTRPFDLGGLGIPNLHTMNWALQMRWLWLQKTAPSKLWSGLDLKISSQARALFQVAVSTTIGNGISTFFWKDKWIHGCSIVDLAPLIAAAVPKKIREVRTVQQALTSYYWVHDIXRNLFLAVIEQYLQLWEVLETFQLQNSNDQHVWQFSSNGLYTSKSAYRAFFIGAESFEPWKRIWKSWAAPKCKVFVWLAIDNKCWTADRLXKRGLHYPEDCVLCDQEGETVQHILSNCVITRQFWHNILTPNGLSSVVPKRRDSDFAEWWRKASTRIPKSKRKXFNSMVXLGAWSLWKQRNRCVFYGARPCLSTLEDGFKDEMRLWFSAGAKNMRFLFDPA

SEQ ID NO: 10895 - protein, 591 aa, Magnaporthe grisea 70-15
MPSKFAHLPLSTSGPLDCALSGTAILNHPFFNKGSAFTAAERRDFGLLGLLPQNIQTLEQQANRAYAQYSSRPDDLAKNTFLTSLKEQNEVLFYRLLHDNLPEMFGVVYTPTEGDAIQNYSRLFRRPEGCFLNVNDVDRVREDLQRWGRPEDVDYIVVSDGEEILGIGDQGCGGILISIAKLVLTTLCAGLHPNRTLPVVLDCGTDNQGLLDDPLYLGLRERRVRGEKYDSLVREFVAAARDLFPRAVIHFEDFGVTNARRILDTYRPRAPVFNDDVQGTGCVVLAAIMAGMHVAGLKIQDLRMVVFGAGSAGTGIADMVRDAIAEESGCGKDCAAEQIWLVDKPGLLTTATQNDTAQTPYAKKPWGEGHGTDLLAVVDEVRPNVLIGTSTVPGAFTEEIVRAMAKHAPRPIIMPLSNPTRLHEAVPADLMAWTDGKALVATGSPFAPVKLDGGREVEIAECNNSVVFPGIALGSVLSRARLVTDSMLVGAVKAVAAMSPALKDPAGSLLPGVDEVRNVSVAVASGVIRAAVQEGVATEEGIPRGKDDGDLEEWVREQMWNPVYRELRKVGGGDATREAKGELKQAGTLEG

SEQ ID NO: 10896 - protein, 636 aa, Zea mays
MLSTRTAAVAASASPASPWKLGGRSEGGASCDGCRTYRNTLRRRAAPAKVRALPPRRVDAVAMVSNAETETEKEQEEAAAASEELPVMPWATSVASGYTLLRDPHHNKGLAFTEEERDGHYLRGLLPPAVLSQELQIKKFMNTLRQYQTPLQRYIAMMNLQETDERLFYKLLIDNVVELLPFVYTPTVGEACQKYGSIFGRPQGLYVSLKDKGKVLEVLRNWPHRNIQVICVTDGERILGLGDLGCQGMGIPVGKLALYTALGGVDPSVCLPITIDVGTNNEFLLNDEFYIGLRQKRATGEEYDELIEEFMSAVKQFYGEKVLIQFEDFANHNAFDLLEKYSKSHLVFNDDIQGTASVVLAGLLAALKMVGGTLAEQTYLFLGAGEAGTGIAELIALEISKQTNAPIEECRKKVWLVDSKGLIVDSRKGSLQPFKKPWAHEHEPLKTLYDAVQSIKPTVLIGTSGVGRTFTKEIIEAMSSFNERPIIFSLSNPTSHSECTAEQAYTWSQGRSIFASGSPFAPVEYEGKTFVPGQSNNAYIFPGLGLGLVISGAVRVHEDMLLAASKALADQATQDNFEKGSIFPPFTSIRKISAHIAAAVAGKAYELGLATRLPPPSDLVKYAENCMYTPVYRNYR

SEQ ID NO: 10897 - protein, 499 aa, Ralstonia solanacearum
MADAVVSHYIAGQRHAGTATRSADVFNPATGAVSAQVLLGGKAEVDAAVAAARAAAPAWAETSPLKRARILFKFKELLDQHHDALAAAITREHGKVFSDAKGEVTRGIEVVEFACGIPNLLKTEFTDNIGGGIDNWNLRQPLSVVAGITPFNFPVMVPMWMFPVALACGNTFVLKPSERDPSPSLMIADLLKQAGLPDGVFNVVQGSKEAVDALLAHPDVQAVSFVGSTPIAEYIYAEGTRRGKRVQALGGAKNHLVVMPDADLDQAVDALIGAAYGSAGERCMAISVAVAVGGVADRLVPRLAERARALQIGNGMEPRSEMGPLVTGAHKVKVEGYIAKGVEEGAQLVVDGRGHTVEGHAEGFFTGGTLFDHVTPDMTIYKEEIFGPVLSVVRVHDFAEAVDLINAHEYGNGVSCYTSDGGIARAFARQIQIGMVGINVPIPVPMAWHSFGGWKRSLFGDHHAYGEEGVRFYTRYKSVMQRWPDSIAKGAEFVMPTAK

SEQ ID NO: 10898 - protein, 590 aa, Synechococcus sp. WH 5701
MDALHRHGVTDVFGYPGGAILPIYDALHKAESRGWLKHVLVRHEQGGTHAADAYARATGRVGVCFGTSGPGATNLVTGIATAQMDSVPMVVITGQVPRAAIGTDAFQETDIFGITLPIVKHSWVVRDPADIGRIVAEAFLIASTGRPGPVLIDVPKDVGLEEFDYTPVEPGTAIPAGYQVPGGPAPEAIAQAIELIRQARRPLLYVGGGAISSGAHTSLIALAERFQLPVTTTLMGKGAFDERHPLAVGMLGMHGTAYANFAVTECDLLIAAGARFDDRVTGRLDSFAPRAQVIHIDIDAAEVGKNRLPEVPIVSDVRLALEALLEASVGESDNGRTGPWLERISRWKRHYPLVIPTPEGAIAPQEVVLALRDLAPDAFVTTDVGQHQMWAAQYLNNPPRHWISSSGLGTMGFGLPAAMGVQVAFPDDQVICVAGDASILMNIQELGTLSQYDLPVKVVILNNGWQGMVRQWQESFYGERYSASEMTRGMPDFPRLAEAFGVRGVGISERASLREQLAEALAHPGPALIDVRVRRNENCYPMVPPGASNAQMVGLPSHPELAIDTTRQCGSCGFSTESAHLFCPSCGAKL

SEQ ID NO: 10899 - protein, 259 aa, Escherichia coli CFT073
MNNGTIDLQRNGFIATLVINRPAKLNALTPEMLEQLLAHCHTLETDSEIRVVLLTSASEKAFCVGADIHRWTSLSALDMWRNWIRRGHQAFDALAQLPQPVIALLHGLAYGGGLELAATADIRICSAEAQMALPETGLATVPGWSGTQRLTALLGRSLVKELVFTGEPLDAQRALSCGLVNRVVARETLHDAGLQLAQRIAQRAPVAVQIAKQVIDAGEGIAVASTLEALAGAFSATTEDAHEGSQAFTEKRQPHFSAR

SEQ ID NO: 10900 - protein, 506 aa, Arabidopsis thaliana
MASSLLTSSGMIPTTGSTVVGRSVLPFQSSLHSLRLTHSYKNPTLFISCCSSVSKNAATSSTDLKPVVERWPEYIPNKLPDGNYVRVFDTTLRDGEQSPGGSLTPPQKLEIARQLAKLRVDIMEVGFPGSSEEELETIKTIAKTVGNEVDEETGYVPVICAIARCKHRDIEATWEALKYAKRPRILVFTSTSDIHMKYKLKKTQEEVIEMAVSSIRFAKSLGFNDIQFGCEDGGRSDKDFLCKILGEAIKAGVTVVTIGDTVGINMPHEYGELVTYLKANTPGIDDVVVAVHCHNDLGLATANSIAGIRAGARQVEVTINGIGERSGNASLEEVVMALKCRGAYVINGVYTKIDTRQIMATSKMVQEYTGLYVQAHKPIVGANCFVHESGIHQDGILKNRSTYEILSPEDIGIVKSQNSGLVLGKLSGRHAVKDRLKELGYELDDEKLNAVFSLFRDLTKNKKRITDADLKALVTSSDEISLEKLNGANGLKSNGYIPVPQVSSTV

SEQ ID NO: 10901 - protein, 582 aa, Pseudomonas aeruginosa UCBPP-PA14
MLERLSQWGVKRVFGYPGDGINGIMGAMGRRAEAFDYIRVRHEEMAAFMAGAHAKFTGEVGVCLATSGPGAIHLLNGLYDARMDHQPVLAIVGQQAATALGSDYQQEVDLQSLFKDVSAYVETVVSPAQLLHVLDRALRVAVGERQVATVIVPNDVQQMAAPKRQPHEHGHVMSAVGFVQPRPYARDADLEAAAAILNRGRRVAILAGAGALGAHRQLEAVAERLAAGVAKALLGKAAVSDDLPYVTGSIGLLGTRASSMLMEHCDTLLIVGSTFPYSEFLPKAGQARAVQIDLYPRNIGIRYPIDQALLGDAGETLERLLPLLEQKKHGAWRRRVERAVTASREEARRQAEEPADPINPQRVFRSLSEQLPDDAILCGDSGSHTNWYARDIRMRPGMLGSLSGKLATMGSGVPYAIAAKLAYPQRPVVAMVGDGAMQMNGNAELVTVQQYWQRWDSPTFIVLVLNNGDLNQVTWEQRALAGDPEFSPAQEVIDFPYARYADMLGFKGIRVDRPEDIDAAWAEAFAADRPVLLEVVTDPNVPPLPPHISFEQAKHLLGAMLQDDPKRWGVIRQSARQVLARH

SEQ ID NO: 10902 - protein, 422 aa, Arabidopsis thaliana
MERLTSPPRLMIVSDLDHTMVDHHDPENLSLLRFNSLWEHAYRHDSLLVFSTGRSPTLYKELRKEKPLLTPDITIMSVGTEITYGNSMVPDHGWVEALNNKWDLGIVKQEASNFPELKLQAETEQRPHKVSFYVEKSKAQEVTKELSQRFLKRGLDVKIIYSGGMDLDILPQGAGKGQALAYLLKKLKTEGKLPVNTLACGDSGNDAELFSIPDVYGVMVSNAQEELLKWHAENAKDNPKVIHAKERCAGGIIQAIGHFKLGPNLSPRDVSDFLEIKVENVNPGHEVVKFFLFYERWRRGEVENSEAYTASLKASVHPGGVFVHPSGTEKSLRDTIDELRKYHGDKQGKKFRVWADQVLATDTTPGTWIVKLDKWEQDGDERRCCTTTVKFTSKEGEGLVWEHVQQTWSKETMVKDDSSWII

SEQ ID NO: 10903 - protein, 391 aa, Synechococcus sp. WH 5701
MARVGVLLLNLGGPERIEDVGPFLYNLFADPEIIRLPTPLLQKPLAWLISTLRSNKSKEAYRAIGGGSPLRRITEQQARELQSELRQRGVQATTYVAMRYWHPFTESAVDDIKADSVDEVVVLPLYPHFSISTSGSSFRELQRLRQADPAFSKLPIRCIRSWYDHPGYVLAMAELIAAGVRSCHDPASAHVFFSAHGVPKSYVEEAGDPYQQEIEACSTLVMAKLEQLLGHGNPHTLAYQSRVGPVEWLKPYTDEALVRLGEEGVQELVVVPISFVSEHIETLEEIDIEYREIATEAGISNFVRVPALDTYPTFIKGLADLVQLALAGPEVNLDQAASLPTQVKLYPQDKWAWGWNNSSEVWNGRLAMLGFSAFLLELLSGRGPLHAIGLL

SEQ ID NO: 10904 - protein, 424 aa, Arabidopsis thaliana
MTTMISNLPRVLIEEIFFRVPLKSLRAVRLTCKSWNTLSKSRSFRKLYISKRATREEESMMIAMMNFDLYSMRVVVDDDVDPSKAFKKKRNKKSIAFKRQPIFLDEQVKISQVFHCEGLLLCFLKEDDTRVVVWNPYCGQTRWIQLRYSHRPHKDRFIYALGYKDKESRGSFQLLRFVDYFLGAPKNQYFWYEIYDFNSDSWTTLDVTPHWCIYCCDRGVSLNGNTYWCAKERKAEDDIVDHIISFDFTNERFGPLLPLPSKVMEHEYEIVTLSYVKEEKLAALFQHYEADWNEFDIWITTKIDAEVVSWSMFLRMDTGPRIEVPHICEGFFIDEEKKVAMGFEEDFDRKTFIIIGEAGYVRKLDIKAHVDRKCRPTVCSYVPSLVQIKKPARGKRKRQSSLEKRLFDQNMLRLEAFKKLGGYF

SEQ ID NO: 10905 - protein, 156 aa, Triticum aestivum
  misc_feature (70)..(70): Xaa can be any naturally occurring amino acid
  misc_feature (82)..(82): Xaa can be any naturally occurring amino acid
  misc_feature (91)..(91): Xaa can be any naturally occurring amino acid
  misc_feature (110)..(110): Xaa can be any naturally occurring amino acid
  misc_feature (141)..(141): Xaa can be any naturally occurring amino acid
MAPTVMASSATSVAPFQGLKSTAGLPVSRRSNGASLGSVSNGGRIRCMQVWPIEGIKKFETLSYLPPLKXTEALLKQVDYLXIRSKWVPLXLSSSKVGFIFREHNASPGXYYDGRYWTMWKLPMFGCTDAHQVINEVEEVXKEYPDAYVASSHNLK

SEQ ID NO: 10906 - protein, 481 aa, Cucumis melo
MATPSSSSPELPLKPIPGGYGFPFLGPIKDRYDYFYFQGRDEFFRSRITKYNSTVFRANMPPGPFISSDSRVVVLLDALSFPILFDTAKVEKRNILDGTYMPSLSFTGNIRTCAYLDPSETEHSVLKRLFLSFLASRHDRFIPLFRSSLSEMFVKLEDKLSEKKKIADFNSISDSMSFDYVFRLLSDGTPDSKLAAEGPGMFDLWLVFQLAPLASIGLPKIFSVFEDLVIHTIPLPFFPVKSGYRKLYEAFYSSSGSFLDEAEKQGIDREKACHNLVFLAGFNAYGGMKVLFPTLLKWVGTAGEDLHRKLAEEVRTTVKEEGGLTFSALEKMSLLKSVVYEALRIEPPVPFQYGKAKEDIVIQSHDSSFKIKKGETIFGYQPFATKDPKIFKDSEKFVGDRFVGEEGEKLLKYVYWSNERETVEPTPENKQCPGKNLVVLIGRIMVVEFFLRYDTFTVEVADLPLGPAVKFKSLTRATDMV

SEQ ID NO: 10907 - protein, 541 aa, Oenococcus oeni
MTDPVSILNDPFINKGTAFTEAEREELGLNGLLPAKVQALQEQVDQTYAQFQSKVSNLEKRLFLMEIFNTNHVLFYKLFSQHVVEFMPIVYDPTIADTIENYSELFVEPQGAAFLDINHPENIQSTLKNAANGRDIKLLVVSDAEGILGIGDWGVQGVDIAVGKLMVYTVAAGIDPSTVLAVVIDAGTNNEKLLKDPMYLGNKFNRVRGDKYYDFIDKFVNHAESLFPNLYLHWEDFGRSNASNILNSYKDKIATFNDDIQGTGIVVLAGVLGALKISGQKLTDQTYMSFGAGTAGMGIVKQLHEEMVEQGLSDEEAKKHFFLVDKQGLLFDDDPDLTPEQKPFAAKRSDFKNANQLTNLQAAVEAVHPTILVGTSTHPNSFTEEIVKDMSGYTERPIIFPISNPTKLAEAKAEDVLKWSNGKALIGTGVPVDDIEYEGNAYQIGQANNALIYPGLGFGAIAAQSKLLTPEMISAAAHSLGGIVDTTKVGAAVLPPVSKLADFSRTVAVAVAKKAVEQGLNRQPIDDVEKAVDDLKWEPKY

SEQ ID NO: 10908 - protein, 955 aa, Porphyromonas gingivalis W83
MNTNKFENRHIGIAERDLSVMLRTIGVESMDQLIRETIPGDILLPEPLDLPEAMTERELLEHFMELGSKNKIFTSYIGQGWYDTVTPAPIQRNVLENPAWYTSYTPYQAEVSQGRLEALFNFQTVITELTGLPLTNCSLLDEATAGAEAARMFFDTRSRTQIKAGANVLFVDKKVFRSTIEVIRTRIIPQGMQIVVDDYKTFSFTPEVFAAIVQFPDAEGSVNDYKSFIEAAHAANAKVAVVADLLSMTILTPPGEWGADIVFGSAQRFGIPMYYGGPSAGYLATSMDYKRNIPGRIIGMSKDAYGRPAYRLALQTREQHIKREKATSNICTAQALLATMSSFYAVYHGADGLRHIAGRVHAYAGFISEKLSGLGYKLTNKDFFDTLRVELPAGVTADKVRELAEECSVNFFYPADGSILISLDETTLPSDLGVLLYIFSSVLGKEETISEDIAIDKRYFDGAFARTSNFLDYDVFNNYHTETELMRYIKRLERKDISLAHSMIPLGSCTMKLNAASELFNLSMPQFNAIHPYAPKDQTEGYNEMLESLERYLAVITGFDATSLQPNSGAAGEYTGLLTIRGYLNSIGQGHRHLVILPASAHGTNPASAIQCGYDTVTVACDERGNVDMEDFMAKTEQHKDEIAAMMITYPSTHGIFETNIIDLCHRIHECGGQVYMDGANMNAQVGLTSPGFIGADVCHLNLHKTFAIPHGGGGPGVGPICVAKHLTPFLPSHPLREDYNGLEVSAAPYGSAGVTTITYAYIRLMGYEGLRRATKIAILNSNYMANRLKDTFGIVYTGATGRIGHELILECRKIKESGIDENDIAKRLMDFGYHAPTLSFPVHGTLMIEPTESESLAELDRFIDVMNCIWEEIQEVARGEQEATDNVLKNAPHPQYEVTANDWSHPYSREKAAYPLEYLRENKFWLNVARIDNGYGDRNLVPSLCSACEVFNNQ

SEQ ID NO: 10909 - protein, 814 aa, Burkholderia mallei ATCC 23344
MRKMKLVMVGNGMAGVRTLEELFKLAPDLYDVTVFGAEPHPNYNRILLSPVLAGEQTLEQIVLNDYAWYASHGVTLHVGKKIVKIDRVKRVVIADDGTEAAYDRLLLATGSNPFMLPVPGAQLDGVLGYRDIADTQAMIDAAARHTHAVVIGGGLLGLEAANGLKLRGMDVTVVHLAPTLLERQLDAKAGDLLRASLEARGLTFLMPKQTQALVGDEHGRVRAVHFKDGGECKADLVVMAVGIRPNTALAESAGLYCNRGLVVNDTMQTYDPRIYAVGECVSHRGIAYGLVAPLFEQAKVAANHLAQFGIGRYTGSVTSTKLKVTGIDLFSAGDFLGGDDTEDITLSDPIAGVYKKLVIKDDRIVGACLYGDTADGAWYFKLLREGRNIADIRETLMFGETSLGDTGHSGATRAMTMADDAEVCGCNGVCKGTIVSAIKEKGLFTLDDVRKHTKASASCGSCTGLVEQILMSTLGGDYSASPKAKPVCGCTDHTHAEVRAAIREHKLLSVPEAMRFLEWRTPNGCSSCRPALNYYCISTWPHDAKDDPQSRFINERAHANIQKDGTYSVVPRMWGGVTSADELRRIADVVDKYAIPTVKVTGGQRIDLLGVKKEDLPGVWRDLGMPSGHAYAKALRTVKTCVGSEWCRFGTQDSTLMGQQLERALWRMYAPHKVKLAVSGCPRNCAESGIKDVGVIGVDSGWEIYVGGNGGIKTEVAQFFCKVKTHEEVLEYAGAFLQLYREEGWYLERTVHYLERVGLDHVKARVLDDAENRRALWDRLQFALKDEPDPWHDTQDAKVDLRQFIPIAVAPADA

SEQ ID NO: 10910 - protein, 427 aa, Nocardioides sp. JS614
MPRVLRMPEVAANATEAVLAEWLVSENAEFGALDTIATVETEKALVDVEAEDAGVVLKTLVPPGALVEVGAPIAVLGAPGEAVGDLGAVLAELGVAEPVDHVLPERRSLVEPVDPVVEPVEAPAPTQGSNHRVFASPLARRLARLAEIPVEEIAGTGPRGRILRRDVEAAVAARPATPVVEQRAPASVVETPAPTQGSASKVEPVDVPHSRLRRAVANRLAESKQTAPHFYLRATVRADRLVDLRAELNEGAETRVSLNDLVVKAVAAAHARVPEMNVVWTPDAVRSFSSVDVAVAVATDRGLVTPVLRDVTSLTVTAVAAKVQDLAARAREGRLKQDELEGGTISVTNLGMYGVEEFAAIINPPHAAILAVGAVREEPVVEDGAVVPGKVLTVTLSVDHRPVDGVVAARWLAAFVDLVEHPARILA

SEQ ID NO: 10911 - protein, 326 aa, Saccharomyces cerevisiae
MSTDSTRYPIQIEKASNDPTLLLNHTCLRVKDPARAVKFYTEHFGMKLLSRKDFEEAKFSLYFLSFPKDDIPKNKNGEPDVFSAHGVLELTHNWGTEKNPDYKINNGNEEPHRGFGHICFSVSDINKTCEELESQGVKFKKRLSEGRQKDIAFALDPDGYWIELITYSREGQEYPKGSVGNKFNHTMIRIKNPTRSLEFYQNVLGMKLLRTSEHESAKFTLYFLGYGVPKTDSVFSCESVLELTHNWGTENDPNFHYHNGNSEPQGYGHICISCDDAGALCKEIEVKYGDKIQWSPKFNQGRMKNIAFLKDPDGYSIEVVPYGLIA

SEQ ID NO: 10912 - protein, 628 aa, Dechloromonas aromatica RCB
MFDAVRNNKRIVQVFLALITLPFAFFGVDSYMRSAGSGGDVASIGDIKITQQQFQQTLREQQERLRTQLGAQFDAKMLDNPEARRAILDDLINQRLLLVEASKKHMSVSNDAIRQTIGAIEAFKVDGKFSTERYEAALRAQGMSPTGFEAQLRQDLTLQQLASAVGQSGLVARSVSDRLLSLQTEKREVMEYRFSLESYLDKVKLADDAVRKFYDENGQQFQMPEQAKAEYVVLSMDSIGSQLSVSDAEIKAWYDGHKDRFQAAEERRASHILLASEKLGKDKAKAKAEELLAEIRKNPAAFADLAKKNSDDPGSASKGGDLGFFGRGMMVKSFEDTAFGLKDGEISGVVESDFGFHIIKVTGIHAAKEKPLADVKGEIEAELKKTGSSRKFAEAAEAFSNMVYEQSDSLKPVAEKFKLTIKQSDWLGRQANPANGVLGNEKIMAALFSDDSVKNKRNTEAVEIAPNTLVAARLIDYKPTALQPFDGVKAGIETMLKRKEAQVLASKDGEARLEALKKGEDKLNWGAAKSVSRLDSRLIPPPAAQSVFRMETGKLPAYTGVELPGTGYALYKLSKVVAGENLDEASKKGMLQQLGNLVAKEEVQLYLAALRSRYKVEVNQAALEAKEK

SEQ ID NO: 10913 - protein, 1015 aa, Dechloromonas aromatica RCB
MTGNPKSAVSIEKRQSILRLLWGGAFLINLFVVSMVILVLERNRAQEISQAEILTENYSKILEESLAGFISKIDITLLTVAEEVERQMASGGINQKALEKYIALQDAHVPEALGLRVVDAQGIIRYAVNDIKVRNASIADRPQFIRLRDDPNAGLVFSKPVMGRAAEKWMITLGRRINHPDGSFAGDVHVAVAVDRFIAMFANIDLGEKGNVGLWDQSTLIARYTRSDTRGASVGFANPSADLHALINSGKRAASYHTRSGVDGITRTFYFRQLGHYPLYLVVGLAEEDYLAKWWKDSLSIVLLAGLFVLASLVSSFLIGRAWKRREADREALLRQDAEYTAKLEQLNRQTDAAWRQSELILSSAAEGICGVDLEGRVIFVNPAARKMFGWNENEGIGLNLHDLTHHHDIDGKPFHNEDCPVFKTLRDGERRHVSDGLYWRKDGSSFPVEFTVSSIERDGKVTGAVNVFRDITERTRIEAELERHHRHLAELVQQRTSELMQTEARASHILESSADGLYGIDCNGIITFINPAACAILGYGAEQVIGLPAHSLFHHSKQDGSPYSAADCPSYNALRLGQKVRVDDEVYWHADGHAVPVMYATHPMLQNGQITGAVTSFIDVSVQRAAAQAREQALIAAESLAKIKSEFLANMSHEIRTPLNGVLGFAQIGYRNAENSEKARDSFAKIQLSGNRLLGVINDILDFSKIEAGKLRIEQTEVVLSEVVEHALDLLRERARAKQIELQVELAPDLPLTCISDPLRMGQVLLNILSNAVKFTEVGSVTLSVNCRDGMLLFKVADTGIGMSAEQIGTLFNPFHQVDASASRKFGGTGLGLAISKRILELMNGKVSIDSLPGVGTSVEFCLPYVKPEPSVDRQAASQGEVDKVRKPLAGISVLVADDEAINRLVLEEILIEYGAGVVLVSNGLEAVERVIHDGQDAYDVVLMDLQMPEMDGFEATRRIHELLPELPIIAQTAHAFSEERQKCFATGMVDHIAKPIEPEALGKIILQHVLSKP

SEQ ID NO: 10914 - protein, 248 aa, Zea mays
  misc_feature (81)..(81): Xaa can be any naturally occurring amino acid
  misc_feature (115)..(115): Xaa can be any naturally occurring amino acid
  misc_feature (211)..(211): Xaa can be any naturally occurring amino acid
CYLPQICIRQPHHERILPQVQRHGRCPSRSRVVVDNQILVVNTWVQDIHGNLSLAGIEQYLQLWDVLGNFQLQNMDGKHVXRFNNSGLFSSKSVYNVFIGPKSFEPWTKELGGPXKCKTFIWLAINNKCWTINRLQKRGLDYPENRVLCDKEDETVQHILTNRVFARQFLHDTLARIGLSTMVLKRRDACFAEWWRKASSKIPKNKRKGFXSVVILGACSLWKHGNRCVFDGVRPCLATLDKGFINEL

SEQ ID NO: 10915 - protein, 931 aa, Geobacter metallireducens GS-15
MAERELFWKADDQAVRLNELMTLDPALKDIPLRRDVRSLGRLLGEVIKEQAGPAAYDAEEELRRLAISHRALADQEEAVLDSPAEQELQERAVRIVGTMTVAETYQIVKAFGTFFELTNLAETNHRMRRRRATQLSPAAPVKPGSLLGTLMRMRDGGITAEKALDLLRQVEIMPVFTAHPTEVARRVVLFKRRRIARELAELDLLPLAGDEADRRQEAIFAEITALWQTDEVRRRPQGVTDEIRMGLDHYPGSLMAPLAGLYEEMAEDFRQVYGADLPDAAFPTVIRFGSWIGGDRDGNPNVTVGTTRHALESARQMILARYLDGVEELKELLTPSTNRVTVSPQLREALERYVAALAGAAAETGIYPECEPYRKFLRCVHHRLMQTRDGEDHPDAYPDAGAFAADLMLVRTSLAQGEGERLARRYVDPLLRQVETFGFHLHALDIRQHARIHARAVAELAAGAGSCEEGVHPVPPPPSAETTELLDTLRAVAKLKQRYSPKAIRSYVISGASSARDTLSLIWLMELCGIRVAASPDGKDPGVMPVPLFESIEDLRNAPGICRALWCSPEYGPFLDSWGRRQEVMLGYSDSNKDGGMFTSTWEIHKAHRDLQRVAQECGVRLRLFHGRGGTVGRGGGPTHRAIIAQPADGFSGALKITEQGEVINWKYSDPSLAKRNLELMVAASLETLARAGLVETRPEPAWEEALEEMSGSAFTFYRERITGNPDILPYFEQATPVLEFELAKIGSRPARRSRSRDIAELRAIPWGFGWIQSRHVIPGWFGVGFALDRFAVGGEGRLEFLRSMMGRFPFFFDLIRNVELALTKVDLPLARLYASLVTDAGIRERVFAMIVEEYQRTRRMVLAVTGQARLLEKNPALTASLRLRNPYIDPLSMIQIELLRRKRAGEESDELNYVLAATINGIAAGLRNTG

SEQ ID NO: 10916 - protein, 313 aa, Nanoarchaeum equitans Kin4-M
MFRISRTSFKPLDKQWDVIIIGGGPAGVVAGLYSARYGLKTLLISPDKGGMLTEASFIENYPGFISISGPDLAERLFEQYEKNGGHYLKDKVSDIKKDKNFIVITEGGYELEAKAIILATGSRRRKLNVKGENLPGVSYCAECDAPLFKGKTVAVVGGGNTAFHDALVLSNYANKVYLIHRRDQFRAESYLVENAKKKDNIEFILNSVVKEIRGQNKVESIIVQDKEGNTKELKVDGVFVAIGMETNIELAKKLGVQLDERGKIIVDRCQRTNIQYVYAAGNITNNCCDLDQIVTSMAQGAIAAKSAYEDLLK

SEQ ID NO: 10917 - protein, 423 aa, Geobacter metallireducens GS-15
MQLTGLKYGRRLLDLVEFPVSQVLTEDASHDEINELIASHGGKCIVKPVFLGGVGKKGKAGLVRICSNVFDAMVAKRDLFFATHHQGNREVQACGVTFEGYIASDIEIYVSISESSEYRMPVLLLTTKGGVDVEDVPPEDKRTIVFNPVTGVKSFHINDALRELKCPPQYISSLVQHLPKLWQVYDNYGLTTLELNPIRMGKVKGRYVPFACDIKASFDQDNPAWKRLGYPEEIFSTTITQFESEINVLRTHQGQSDVTEVNPKGTILPFIFGGGANSAATEILADRAIISSDFGGNPPYEKIRAIADITFKHWLPQANVVLLIGGRANNTNIFTTFKAIFDSLREHIRLNPDVFVVAGRGGPMVVEGMVYGRDVLDSLRVPYRFFGHDSSMMSVLQHAIEIDSFLEPKPVAVAPKQIKAKAA

SEQ ID NO: 10918 - protein, 968 aa, Arabidopsis thaliana
MAGRNIEKMASIDAQLRQLVPAKVSEDDKLVEYDALLLDRFLDILQDLHGEDLRETVQELYELSAEYEGKREPSKLEELGSVLTSLDPGDSIVISKAFSHMLNLANLAEEVQIAHRRRIKKLKKGDFVDESSATTESDIEETFKRLVSDLGKSPEEIFDALKNQTVDLVLTAHPTQSVRRSLLQKHGRIRDCLAQLYAKDITPDDKQELDESLQREIQAAFRTDEIRRTPPTPQDEMRAGMSYFHETIWKGVPKFLRRVDTALKNIGIDERVPYNAPLIQFSSWMGGDRDGNPRVTPEVTRDVCLLARMMAANLYYNQIENLMFELSMWRCTDEFRVRADELHRNSRKDAAKHYIEFWKTIPPTEPYRVILGDVRDKLYHTRERSRQLLSNGISDIPEEATFTNVEQFLEPLELCYRSLCSCGDSPIADGSLLDFLRQVSTFGLSLVRLDIRQESERHTDVLDAITKHLDIGSSYRDWSEEGRQEWLLAELSGKRPLFGPDLPKTEEISDVLDTFKVISELPSDCFGAYIISMATSPSDVLAVELLQRECHVKNPLRVVPLFEKLADLEAAPAAVARLFSIDWYKNRINGKQEVMIGYSDSGKDAGRLSAAWELYKAQEELVKVAKKYGVKLTMFHGRGGTVGRGGGPTHLAILSQPPDTVNGSLRVTVQGEVIEQSFGEAHLCFRTLQRFTAATLEHGMNPPISPKPEWRALLDEMAVVATEEYRSVVFQEPRFVEYFRLATPELEYGRMNIGSRPSKRKPSGGIESLRAIPWIFAWTQTRFHLPVWLGFGAAFRYAIKKDVRNLHMLQDMYKQWPFFRVTIDLIEMVFAKGDPGIAALYDKLLVSEDLWAFGEKLRANFDETKNLVLQTAGHKDLLEGDPYLKQRLRLRDSYITTLNVCQAYTLKRIRDANYNVTLRPHISKEIMQSSKSAQELVKLNPTSEYAPGLEDTLILTMKGIAAGLQNTG

SEQ ID NO: 10919 - protein, 376 aa, Triticum aestivum
  misc_feature (9)..(9): Xaa can be any naturally occurring amino acid
  misc_feature (11)..(11): Xaa can be any naturally occurring amino acid
MRTLEALPXGXQQRFAKETMEIFVPLANRLGIASWKDQLENLCFKHLNPEEHTKLSSKFAETFDEALITSAVDTLDEGLREAGISYHNLSGRNKNLYSVYSKMQKKNLTMDEVHDIHGLRLVVEKEEDCYRALDVVHKLWPQVTGRFKDYISRPKLNGYRSLHTVVMSDGDHTFEVQIRTKEMHLQAEYGFAAHWRYKEGSCRHSFVLQMVEWARWVLTWQCEALNKEHSSSQVKSDSIKPPCPFPLHSEECPYSYTRQCNHDGPLFVILLEHDKMSVQEFPAGSTVMDLMHRVGANSPRWSPYSIPMKEDLRPKVNHEPISDLGRALSMGDVVELTPALPDKSLTEYREEIQRMYDRGGFALAATRSGSGGSRRR

SEQ ID NO: 10920 - protein, 909 aa, Geobacter metallireducens GS-15
MNYQNNPFPYHVGVQSLHELANKHSRVCIMNIRGTESSLVTPVSHAYSGGNVVAGVQYGESGGTFETPVGDIPVFGSISDVIRAGIHFDTGVVYLPPSAVSHAVSEMCARNVNLKRIVIVTEKVSARDSRLIRYGCQNAKVDVIGANTLGIANSWDQVRIGGALGGDVPAQSLRKGSVAIYSNSGNFSTTISEYLKTAGFGTSTILSSGKDVYIHFALAEFLYCAENDPRTKAIVVYVEPGGYYEKQALDWISEGRFKLTKPIIACVTGRWKKNLTRSCGHAGAMAGSGDDAEAKEIWFDDFFGVPVFDPERPEVSKRGIRIRTIQDVPEAVTACMELMGENPDFPSTGDLSLKPWFVNDQDLTMPQQLRMHPVRAISPYGEEIEKFNKLVGARIMREPMRNRSGASAIDPADFTISLHGRKLLDLIEEPFGAVTAYSVLKTMPDAGQMAVINPLLNWFAARGSENIATVARGRANGCTPNAAIGAEVLLAGNNPLFESLRATSSWLIDRFFHETGGDLSINEELIEKACSDGEGFPAAVEDPRSEQLAEYFGALLRTHGQETILTRFAQVYSEKRRAEGEPVDSFTLLASAILLGLAWKPLAERRIAREVAQDLGTYLGLNGIIVGVSPVNPERNPFWQKLHALMDPTILSTDFASTCFQVLFNRVPQEQELFTYNALLNLTVTNGPGTLSAKGAKESISARNHIATAYAGFLANTGLAHGGNGFESVSYLLDIFSETDPYQGTPVELDPVLKGLAARATQEFVVRKKKAKIEGATERIPCINHPVFRDKAENHDPREVFIRNLLKGKEIQNPFLEFYHHLVTELHAEGITSNVYCVNVDAVIACIALDLLWKQLRDGEISEQDAQEIVFIMFLYGRMAGVSAEIADHLGRGQDLDCRTNPGELVYLA

SEQ ID NO: 10921 - protein, 286 aa, Clostridium perfringens str. 13
MSERYDIAIIGSGPAGLSAALNAKIRNKKFILFGNNDLSTKLVKAPKVNNYLGFVGKDGMDLKNQFMGHLKEMDIEITEERINSIYAMGEYFALMVNEKMYEATSIIIATGIEYTKPMKGEEEFLGKGVGYCATCDAPLYKEKTVTIIGYNKEAEEEANFVSELAAKVYYIPRYKGEFDLNSEIEVINDIPVEIQGDSKVTKLVTKNGEIETDGIFVLRDSISPGQLVPGLKITDDHIEVDRLMKTNIEGCFAAGDCTGRPYQYMKAAGEGNVAALSAVAYLDSKK

SEQ ID NO: 10922 - protein, 104 aa, Clostridium perfringens str. 13
MVKHINDQDFNTEVIEASEVVVVDFWATWCGPCKMIAPVIEELANEMENVKFVKVDVDKNPGSAGKYQIQSIPTLLIFKDGKVVDTLVGFRPKAALVEAIKKYV

SEQ ID NO: 10923 - protein, 471 aa, Vibrio vulnificus CMCP6
MAMKLVWLRRDLRSVDNTALNHAIATSQEVVACFVATPLQWRDHHMAPMQADLIARRLAVLAEELNALNIPLLYDEVDDYAQSATRVANWAEQLAVSEVVLNREYEVNERVRDEQLVNQLASSEIGVLDVEDKCVQAPGCVLNKQGDYFKVFTPFKKAWLKSFVPPQIIKTSAAQPVVLPEALQSSLWHEQAPFSYPRQSSEEWSVDSQQIRETLRHFCHEEVDRYHEQRDFPATAGTSVLSPYLAIGAISVRQCIARLYWQQSYLSNGREVWLSELIWREFYHHLIHFEPKLVKGQGFVEWEKHLLWPAKPDWFDRWCRGETGYPIVDAAMRQLNQTGWMHNRLRMIVASFLTKDLHVNWRLGEQYFMQKLVDGDFAANNGGWQWCASTGCDGQPYFRIFNPITQGEKFDPNGEFVKHWLPELVEVPSKFVHQPWNWPGHMQLDYPAPMVDHKQEREITLSLYTQAKDCL

SEQ ID NO: 10924 - protein, 907 aa, Streptococcus mutans UA159
MTINKLESRNDKEAIAEEITILTKLLDDATKTMVGSASFDKITLFKKLSIEEKHQELEREIEQLTNEEMVVVSRYFSILPLLINISEDVNLAYEINYQNNNDIDYLGKLSATIELVSSQKNAQEILENVNVVPVLTAHPTQVQRKTMLDLTNHIHELLRKYRDVKAGSINKQKWYDDMRRYVELIMQTDIIREKKLKVTNEITNVMEYYNSSLIKGVTKLITEYKHLSHQKGFDLGNAKPITMGMWIGGDRDGNPFVTAETLKISALVQNEVILNYYIDKVSDLYRTFSLSTSLSTISNAVKEMADRSTDVSIYREKEPYRKAFHYIQSRLQETLIYLKNNHLEELESEDSAQILPYQSAQEFRNDLQLIKDSLLENNGSAFITGDLTELLQAVDVFGFFLASIDMRQDSSVHETCVAELLASANIVANYSDLPEEEKIAILLKELTEDPRILSATHVEKSEILQKELAIFKTARKLKDALGEDVIKQHIISHTESISDMFELAIMLKEVGLVDTDKARVQIVPLFETIEDLDNSREIMRQYLNYDIVKKWIAANHNYQEIMLGYSDSNKDGGYLSSGWALYKAQNELTEIGYDNGVKITFFHGRGGTVGRGGGPSYEAITSQPFGSIKDRIRLTEQGEVIGNKYGNKDVAYYNLEMLVSATLDRMVTRRIVNSDNLVNYRLIMDEIVADSNLIYRDLVFGNEHFYDYFFAASPIREVSSLNIGSRPAARKTITEISGLRAIPWVFSWSQNRIMFPGWYGVGSAFKHFIDKDEKNLTKLQEMYQSWPFFHSLLSNVDMVLSKSNMNIAFEYAKLCQDEETKEVFATILDEWQLTKNVILAIESHKQLLEDNSYLKASLDYRLPYFNVLNYIQIELIKRQRRGELGENLENLIHITINGVATGLRNSG

SEQ ID NO: 10925 - protein, 535 aa, Glycine max
MGSISHVITTTLPHLPSTRSLGFPISHSNSRLLSLPPTRVAKQVGVFAELVSRSSTASFASVDFSVHDWKIQFHEDCQLRRPPPHLTDIFPNAPPIPSTFCLKMRTPIDRDFPGHYSLDEEWHGYINNNDRVLLKTIYYSSPTSAGAECIDPDCTWVEQWVHRAGPREKIYYKPEEVKAAIVTCGGLCPGLNDVIRQQIVITLEIYGVKNIVGIPFGYRGFSDKELTEVPLSRKVVQNIHLSGGSLLGVSRGGPGVSDIVDSLEKRGINMLFVLGGNGTHAGANAIHHECRKRRLKVSVIGVPKTIDNDILLMDKTFGFDTAVEEAQRAINSAYIEAHSAYHGIGVVKLMGRSSGFIAMQASLFSGQVDICLIPEVPFNLHGPHGVLSHLKYLLETKGSAVVCVAEGAGQNLLQKTNATDASGNVVFGDIGVYIQQETKKYFKEIGVHADVKYIDPTYMIRAIRANASDGILCTVLGQNAVHGAFAGYSGITVGLCNTHYVYFPIPEVISHPRLVDPNSRMWHRCLTSTGQPDFI

SEQ ID NO: 10926 - protein, 947 aa, Staphylococcus aureus subsp. aureus COL
MNNKKTATNRKGMIPNRLNKFSIRKYSVGTASILVGTTLIFGLSGHEAKAAEHTNGELNQSKNETTAPSENKTTKKVDSRQLKDNTQTATADQPKVTMSDSATVKETSSNMQSPQNATANQSTTKTSNVTTNDKSSTTYSNETDKSNLTQAKDVSTTPKTTTIKPRTLNRMAVNTVAAPQQGTNVNDKVHFSNIDIAIDKGHVNQTTGKTEFWATSSDVLKLKANYTIDDSVKEGDTFTFKYGQYFRPGSVRLPSQTQNLYNAQGNIIAKGIYDSTTNTTTYTFTNYVDQYTNVRGSFEQVAFAKRKNATTDKTAYKMEVTLGNDTYSEEIIVDYGNKKAQPLISSTNYINNEDLSRNMTAYVNQPKNTYTKQTFVTNLTGYKFNPNAKNFKIYEVTDQNQFVDSFTPDTSKLKDVTDQFDVIYSNDNKTATVDLMKGQTSSNKQYIIQQVAYPDNSSTDNGKIDYTLDTDKTKYSWSNSYSNVNGSSTANGDQKKYNLGDYVWEDTNKDGKQDANEKGIKGVYVILKDSNGKELDRTTTDENGKYQFTGLSNGTYSVEFSTPAGYTPTTANVGTDDAVDSDGLTTTGVIKDADNMTLDSGFYKTPKYSLGDYVWYDSNKDGKQDSTEKGIKGVKVTLQNEKGEVIGTTETDENGKYRFDNLDSGKYKVIFEKPAGLTQTGTNTTEDDKDADGGEVDVTITDHDDFTLDNGYYEEETSDSDSDSDSDSDSDSDSDSDSDSDSDSDSDSDSDSDSDSDSDSDSDSDSDSDSDSDSDSDSDSDSDSDSDSDSDSDSDSDSDSDSDSDSDSDSDSDSDSDSDSDSDSDSDSDSDSDSDSDSDSDSDSDSDSDSDSDSDSDSDSDSDSDSDSDSDSDSDNDSDSDSDSDSDAGKHTPAKPMSTVKDQHKTAKALPETGSENNNSNNGTLFGGLFAALGSLLLFGRRKKQNK

SEQ ID NO: 10927 - protein, 344 aa, Burkholderia xenovorans LB400
MNAKARESIPATLIPGDGIGPEVTQATVRVLEALGAPFKWDIQQAGMAGIDECGDALPQATLDSIRETKLALKGPLTTPIGGGFRSANVRLREAFELHANIRPVRTIVPGRYDDIDIVLVRENIQGLYVAHEHYIPIGDDPRAVAVLTGMNTREGGRRIARCAFDYALRHGRRKITVVHKANVLKALTGIFLEAAREVAADYAGRVALDDRIVDACAMQLVLNPWQFDMLLCTNLFGDILSDQLAGLVGGLGLAPGANIGKDTALFEAVHGSAPDIAGRGIANPVSQLLAAGLMLDHVGLDEDAKRLRRAIADTLNEDKVRTPDLGGQATTRTFTDALIERLGH

SEQ ID NO: 10928 - protein, 416 aa, Mycobacterium sp. JLS
MAKLRTGSGFGDVVVTAVASTTAVAPDAEDTWQQLLAGHSGIRALDSWFVDELDSPVRIGGQLRENFDAYLNRVELRRLAYMQKMSTVLGRRLWEAAGTPDIDPRRLMVSIGLALGSTEEIPAQYDDWRQKGLRAVSPLAVQMYMPNAPAAAVGLDRQAKGGIISPVMADASGAAAIAQAWRQIVLGEVEMAICGGVETKIEAVPVGAFTRLGLLSTNNDDPAGACRPFDKDRDGMVLGEGGALLLIETEENAKARGATILGRIMGAAMTSDGYDIVEPDPSGVPAGDAIRHAVDLAGLEPSDVDLVNAHATGTAFGDVAEGCAIRHALGAHRPAVYAPKAALGHSLGAAGAVEAVLTVQALRDGVVPPTLNVQHLDADIDLDVVTGEPRSGDFRYAVSNSFGLGGHNIVLVFGAY

SEQ ID NO: 10929 - protein, 1166 aa, Staphylococcus aureus subsp. aureus COL
MINRDNKKAITKKGMISNRLNKFSIRKYTVGTASILVGTTLIFGLGNQEAKAAENTSTENAKQDDATTSDNKEVVSETENNSTTENNSTNPIKKETNTDSQPEAKKESTSSSTQKQQNNVTATTETKPQNIEKENVKPSTDKTATEDTSVILEEKKAPNNTNNDVTTKPSTSEPSTSEIQTKPTTPQESTNIENSQPQPTPSKVDNQVTDATNPKEPVNVSKEELKKNPEKLKELVRNDSNTDHSTKPVATAPTSVAPKRVNAKMRFAVAQPAAVASNNVNDLIKVTKQTIKVGDGKDNVAAAHDGKDIEYDTEFTIDNKVKKGDTMTINYDKNVIPSDLTDKNDPIDITDPSGEVIAKGTFDKATKQITYTFTDYVDKYEDIKSRLTLYSYIDKKTVPNETSLNLTFATAGKETSQNVTVDYQDPMVHGDSNIQSIFTKLDEDKQTIEQQIYVNPLKKSATNTKVDIAGSQVDDYGNIKLGNGSTIIDQNTEIKVYKVNSDQQLPQSNRIYDFSQYEDVTSQFDNKKSFSNNVATLDFGDINSAYIIKVVSKYTPTSDGELDIAQGTSMRTTDKYGYYNYAGYSNFIVTSNDTGGGDGTVKPEEKLYKIGDYVWEDVDKDGVQGTDSKEKPMANVLVTLTYPDGTTKSVRTDANGHYEFGGLKDGETYTVKFETPTGYLPTKVNGTTDGEKDSNGSSVTVKINGKDDMSLDTGFYKEPKYNLGDYVWEDTNKDGIQDANEPGIKDVKVTLKDSTGKVIGTTTTDASGKYKFTDLDNGNYTVEFETPAGYTPTVKNTTADDKDSNGLTTTGVIKDADNMTLDRGFYKTPKYSLGDYVWYDSNKDGKQDSTEKGIKDVTVTLQNEKGEVIGTTKTDENGKYRFDNLDSGKYKVIFEKPAGLTQTVTNTTEDDKDADGGEVDVTITDHDDFTLDNGYFEEDTSDSDSDSDSDSDSDSDSDSDSDSDSDSDSDSDSDSDSDSDSDSDSDSDSDSDSDSDSDSDSDSDSDSDSDSDSDSDSDSDSDSDSDSDSDSDSDSDSDSDSDSDSDSDSDSDSDSDSDSDSDSDSDSDSDSDSDSDSDSDSDSDSDSDSDSDSDSDSDSDSDSDSDAGKHTPVKPMSTTKDHHNKAKALPETGSENNGSNNATLFGGLFAALGSLLLFGRRKKQNK

SEQ ID NO: 10930 - protein, 390 aa, Triticum aestivum
MSTNKGGGGGKKKKEVKKETKLGMGYKKDDNFGEWYSEVVVNSEMIEYYDISGCYILRPWAMEIWELLKEFFDAEIKKLKLKPYYFPLFVTENVLQKEKDHIEGFAPEVAWVTKSGKSDLEAPIAIRPTSETVMYPYFSKWIRSHRDLPLKCNQWCNVVRWEFSNPTPFIRSREFLWQEGHTVFATKEEADEEVLQILELYRRIYEEFLAVPVSKGRKSEMEKFAGGLYTTSVEAFIPNTGRGIQGATSHCLGQNFAKMFDITFENEKGERSMVWQNSWAYTTRSIGVMIMTHGDDKGLVLPPKVAPIQVIVIPVPFKDADTTAIKGACESAVYTLNQAGIRADLDARENYSPGWKYSQWEMKGVPLRIEIGPKDLANKQVRIVRRDNGT

SEQ ID NO: 10931 - protein, 492 aa, Burkholderia xenovorans LB400
MNEATARKPHPLDKLKDPSLLRTQAYVDGRSQGGAQEFAVFDPATGAEIARVPNLAAAEARQAIDAANAALPAWRALTGKQRAAMLRRWYELIVAHAADLAAIMTAEQGKPLAEARAEALYGASFVEWFAEEAKRVSGDVLASPADDRKIVVIRQPIGVCVSITPWNFPLAMITRKVAPALAAGCTIVVKPAEQTPLSALALAELAHRAGLPAGVLNVLTGDAANAIEIGKVFCESEIVRHLSFTGSTPVGRLLMQQCAPTVKKVALELGGHAPFIVFDDADVDAAVQGAMVSKYRNAGQTCVCANRFYVHDAVYERFVRQFAEASRGVKVGNGFLEGVDQGPLIDDDAVAKVRQHVDDALAKGARQVMGGRIEGRFVEPVLLAEVTHDMLIAREETFGPVAAVFRFRDEAEVTRLANDTQFGLASYFYSRDIGRVWRVAEALEYGMVGINTGLISNEVAPFGGVKQSGLGREGSKYGIEEYLQIKYLCMGV

SEQ ID NO: 10932 - protein, 175 aa, Triticum aestivum
  misc_feature (166)..(166): Xaa can be any naturally occurring amino acid
MAPTVMASSATSVAPFQGLKSTAGLPVSRRSNGASLGSVSNGGRIRCMQVWPIEGIKKFETLSYLPPLSTEALLKQVDYLIRSKWVPCLEFSKVGFIFREHNASPGYYDGRYWTMWKLPMFGCTDATQVINEVEEVKKEYPDAYVRIIGFDNMRQVQCVSFIAFKXPGCEESGKA

SEQ ID NO: 10933 - protein, 224 aa, Atriplex lentiformis
MSPSKILSCLCLLAVANYVAYASDPSQLQDFCVGVTNPIDGLFVNGLFCKNPTVVTPEDFYFKGIDKRRNTMNQVGSNVTRVTAANIPGLNTLGVSIARIDFAPFGVNTPHTHPRATELLTVLEGTIYAGFVTSNLANGDNKVFAKVLHKGDIYVFPQGMIHFEANLGKTPAVALSSFSSQNPGAVTIAAAMFGSKPSIAVGVLARAFQLDPRIVKKLQSLRFG

SEQ ID NO: 10934 - protein, 506 aa, Arabidopsis thaliana
MASSLLTSSVMIPTTGSTVVGRSVLPFQSSLHSLRLTHSYKKPALFISCCSSVSKNAATSSTDLKPVVERWPEYIPNKLPDGNYVRVFDTTLRDGEQSPGGSLTPPQKLEIARQLAKLRVDIMEVGFPGSSEEELETIKTIAKTVGNEVDEETGYVPVICAIARCKHRDIEATWEALKYAKRPRILVFTSTSDIHMKYKLKKTQEEVIEMAVSSIRFAKSLGFNDIQFGCEDGGRSDKDFLCKILGEAIKAGVTVVTIGDTVGINMPHEYGELVTYLKANTPGIDDVVVAVHCHNDLGLATANSIAGIRAGARQVEVTINGIGERSGNASLEEVVMALKCRGAYVINGVYTKIDTRQIMATSKMVQEYTGLYVQAHKPIVGANCFVHESGIHQDGILKNRSTYEILSPEDIGIVKSQNSGLVLGKLSGRHAVKDRLKELGYELDDEKLNAVFSLFRDLTKNKKRITDADLKALVTSSDEISLEKLNGANGLKSNGYIPVPQVSSNV

SEQ ID NO: 10935 - protein, 217 aa, Erwinia carotovora subsp. atroseptica SCRI1043
MNQTLLSEFGNPTERVERALDALRHGRGVLVLDDEDRENEGDMIFSAESMTVEQMALTIRHGSGIVCLCLTEERRQQLELPMMVEKNSSHYQTAFTVTIEAAEGVTTGVSAADRLTTIRAAIADNARPSDLNRPGHVFPLRAQPGGVLTRGGHTEATVDLMTLAGLKPSGVLCELTNDDGSMAHAPEVIAFAKQHDMLVLTIEDLVAYRIAAERKAS

SEQ ID NO: 10936 - protein, 103 aa, Candida glabrata CBS 138
MVKQITSVSEFDSAIAVDKLVVVDFFATWCGPCKMIAPMIEKFAAEYSTADFYKLDVDELPEVAQKNEVSAMPTLVLFKNGKEVAKVVGANPAAIKQAIANNV

SEQ ID NO: 10937 - protein, 566 aa, Arabidopsis thaliana
MAPALAVTRDLTAVGSPENAPAKGRASVYSEVQSSRINNTLPLPSVLKGAFKIVEGPASSAAGNPDEIAKLFPGLYGQPSVAVVPDQDAPSSAPKLKIGVVLSGGQAPGGHNVISGLFDYLQERAKGSTFYGFKGGPAGIMKCKYVELNAEYIQPYRNQGGFDMICSGRDKIETPDQFKQAEETAKKLDLDGLVVIGGDDSNTNACLLAENFRSKNLKTRVIGCPKTIDGDLKCKEVPTSFGFDTACKIYSEMIGNVMIDARSTGKYYHFVRLMGRAASHITLECALQTHPNITIIGEEVSAQKQTLKNVTDYMVDVICKRAELGYNYGVILIPEGLIDFIPEVQELIAELNEILANEVVDENGLWKKKLTEQSLKLFDLLPEAIQEQLMLERDPHGNVQVAKIETEKMLIQMVETELEKRKQAGAYKGQFMGQSHFFGYEGRCGLPTNFDATYCYALGYGAGVLLNSGKTGLISSVGNLAAPVEEWTVGGTALTALMDVERRHGKFKPVIKKAMVELEGAPFKKFASLREEWALKNRYISPGPIQFTGPGSDSLSHTLLLELGAQ

SEQ ID NO: 10938 - protein, 412 aa, Bacillus cereus ATCC 14579
MEKKRVVITGLGAVTPVGTDVETAWENIKKGVSGIGRLTRIDPELFPAKVAAEINDFEVEKYIDKKEARRMDRFTQYAVAAAKMAVADAKLEITEENGPRIGVWIGSGIGGMETYEEQFKIFTEKGPRRVSPFFVPMMIPDMAAGQVSIATGAKGINTCSVTACASGANSIGDAFKAIQRGDADAMITGGAEAPLTSMAFAGFSSAKALTFNEDPATACRPFDKNRSGFVMGEGSGILILEELEHALARGAHIYAEIAGYGATGDAFHITMPAPGGEGGVRAMRQALADAGLQPEDIDYINAHGTSTDANEKYETMAIKETFGEHAYKVAISSTKSMTGHLLGAAGAVEAIFSIKSITDGVIPPTINYETPDPECDLDYVPNQARHQEVNAVLSNSLGFGGHNAVLVFKSYK

SEQ ID NO: 10939 - protein, 295 aa, Zea mays
MAPTAAKDSGSADRWREVQAFEDSKLGVKGLVDSGVKSIPAMFHHPPESLKDVISPPALPSSDDAPAIPVVDLSVARREDLVAQVKHAAGTVGFFWVVNHGVPEELMASMLSGVRQFNEGSLEAKQALYSRDPARNVRFASNFDLFESAAADWRDTLYCKIAPDPAPRELVPEPLRNVMMEYGEELTKLARSMFELLSESLGMPSDHLHKMECMQQLHIVCQYYPPCPEPHLTMGVRKHSDTGFFTILLQDGMGGLQVLVDRGGGRQTWVDVTPRPGALMVNMGSFLQACMDVTN

SEQ ID NO: 10940 - protein, 546 aa, Burkholderia mallei ATCC 23344
MKRNPAEKYRPFEPVRINGRRWPSRAIERAPIWMSTDLRDGNQSLIEPMTIEQKLEYFEMLVAIGFKEIEVGFPSASQTDFDFVRKLIVERRIPDDVTIEVLVQSREDLIARTFDALEGAPRAIVHLYNAICPSFRRIVFGMSKDDVKALAVDGTRIIKAHAQARPATHWTFQYSPETFSMTELPFAREVCDAVAQTWRPTRDHKMIVNLPATVEAATPNVFADQIEWMDRNLGYRDSIVLSVHPHNDRGTAVAAAELALLAGAERIEGCLFGNGERTGNVDLVTLALNLYTQGIDPGLDFSDIDAVRRVVERCNRIPVHPRHPYAGDLVFTAFSGSHQDAIRKGLAQQRPDAIWEVPYLPIDPADLGRSYDAVIRVNSQSGKGGATYLLERAMGFAPPRRVQIEFSHAVQTLADTSGAEVTADAICALFTREYLQTIGPAARAGASASWHDREVALAHAEDAPSAARQAAAAFASAAGVAIDITSCEVERTVNGETAVFVGARIGDAALRHGAGVHRDPVAAATDAVASAINRSAWSRDKRRAAA

SEQ ID NO: 10941 - protein, 145 aa, Zea mays
MTSPMVATPVQLRSTGRLSFCSFPSSASGTAPSRRRFGAVTVRASAETMATEKLGIKVERNPPESRLSELGVRQWPTWGCEKSKFPWTYSAKETCYLLQGKVKVYPDGHGEEFVEIAAGDLVVFPKGMSCTWDVAEAVDKHYNFE

SEQ ID NO: 10942 - protein, 495 aa, Silicibacter sp. TM1040
MTDWKAAASALYDGGFRPMFINGKWCESQSGEVIEARNPASGALLATVPKGGAADVDAAVAAARAAFEGPWSKWTPFERQALLLRIADRFEAEWETLCLSDTLDMGMPIQRTLANSRRVLGMLRFYAGQAVTIHGHTIPNSFPGEIHSSTVREPVGVVGAIIPWNAPIAGSIWKIAPAIATGCTVVLKPSEEASLTVLMIARIMQEAGLPDGVLNIVTGYGAAAGAALAAHSGVDKIVFTGSTATGQAIARAATGNLKRVSLELGGKSPVIVCRDADIEKAVPVAAMAVFANSGQICIAGSRLFVAREIHDEFVRRVAEFAANLRIGHGIEESTDVGPIISARQAERIAGYLAAGPSEGAEILTGGARVKGAGFEGGHFIEPTVFGGVTDEMSIAREEIFGPVISALPFDSLDEVVERANATPYGLAAGVFSTHLGTAHKLAHRLKAGSVWVNMYHAIDPAVPFGGVKMSGYGREGGTEHMEEYLDTKAIWINTD

SEQ ID NO: 10943 - protein, 619 aa, Zea mays
  misc_feature (26)..(26): Xaa can be any naturally occurring amino acid
MDSDYGVPRELSEVQKKRTLYQPELXPPCLQGTTVRVEYGDAAIAADPAGAHVISHAFPHTYAQPIAHFLRKTAVVPDAKVISEHQAVRVGIVFCGRQSPGGHNVVWGLYEAIKAHNQNSKLIGFLGGSDGLLAQRTLEITDKVIASYKNQGGYDMLGRTKDQIRTTEQVNGAMASCQALKLDALVIIGGVTSNTDAAQLAETFAEAKCATKVVGVPVTLNGDLKNQFVETTVGFDTICKVNAQLISNVCTDALSAEKYYYFIRLMGRKASHVALECALQSHPNMVILGEEVAASKLTIFDITKQICDAVQARAEKDKNHGVILIPEGLVESIPELYALLQEIHGLHGKGVSVENISSQLSPWASALFEFLPPFIRKQLLLHPESDDSAQLSQIETEKLLAQLVETEMNRRLKEGTYKGKKFNAICHFFGYQARGALPSKFDCDYAYVLGHVCYHIIAAGLNSYMATVTNLKNPVNKWRCGATPISSMMTVKRWSRGPSATQIGKPAVHMASVDLKGKAYDVLRQNSSSFLLEDVYRNPGPLQFEGPGADSKPISLCVEDQDYMGRIKKLQEYLEKVKRIVKPGCSQDVLKAALSAMSSVTETLNIMTSSSTGQTPLSH

SEQ ID NO: 10944 - protein, 546 aa, Colwellia psychrerythraea 34H
MSSRQTLASWKKLQLLAQDKKSQHMNTLFAQDSERFNKFSIELPNMLLDYSKNLIDTETLDALLALAEETQVCDWRAKMFAGEKINKTEDRAVLHTALRRQSDEAFIIEGENVTEHVKNQLAEMEVFVNKVRQGHWLGYSGKRITDIVNIGVGGSNLGPQMVTEALKHYSDGSVNVHYVSNVDGAQIAEVLRPLEPEKVLFIVSSKTFTTTETMTNARTAINWLTSASFDENSVAKHFVAVTANKENAMSFGIEEQNIFDMWDWVGGRFSLWSAIGLAIALDLGFDKFEELLAGAHDMDQHFINAPLKDNFPAILALISVWNTTFLGSQSQAILPYDQTLHMLTAYLQQAEMESNGKSVSWDGDEIDYATVPSIWGELGINGQHAFYQYLHQSNNVVPADFIGSVKSVTPVKGHHETLMANFFAQTQALMVGVNEEQVRADLKAKGRNAEYIDNVAPHKVHKGNRPTNTILLKCINPRNLGSLIAAYEHKIFVQGIILQICSFDQWGVELGKGLAAEIQTELQTDNISAQHDCSTSSLLKFYQSAK

SEQ ID NO: 10945 - protein, 506 aa, Arabidopsis thaliana
MASSLLTSSGMIPTTGSTVVGRSVLPFQSSLHSLRLTHSYKNPALFISCCSSVSKNAATSSTDLKPAVERWPEYLPNKLPDENYVRVFDTTLRDGEQAPGGSLTPPQKLEIARQLAKLRVDIMEVGFPGSSEEELETVKTIAKTVGNEVDEETGYVPVICAIARSKHRDIEAAWEAVKYAKRPRILIFTSTSDIHMKYKLKKTQEEVIEMAVSSIRFAKSLGFNDIQLGCEDGGRSDKDFLCKILGEAIKAGVTVVNVADTVGINMPHEYAELVTYLKANTPGIDDVVFSVHCHNDLGLATANSIAGIRAGARQVEVTINGIGERSGNASLEEVVMALKCRGAYVINGVYTRIDTRQIMATSKMVQEYTGLYVQAHKPIVGANCFVHESGIHQDGILKNRSTYEILSPEDIGIVKSQNSGLVLGKLSGRHAVKDRLKELGYELDDEKLNAVFSLFRDLTKNKKRITDADMKALVTSSDGISLEKSNGANGLKSNGYIPVLQVSSNV

SEQ ID NO: 10946 - protein, 550 aa, Candida albicans SC5314
MASFKLATDLPEWKKLEETYKSVGEKFSVRDAFAKDPKRFEEFSWIYKNYDDSKILFDFSKNLVNKEILDQLVTLAKEAGVEKLRDAMFAGDHINTTEDRAVYHVALRNRALRKMPVDGKDTAQEVDDVLKHMKEFSDSIRDGSWTGYTGKSITDVVNIGIGGSDLGPVMVTEALKAYSKPGLNVHFISNIDGTHTAETLKNLNPETTLFLIASKTFTTAETITNATSAKNWFLATAKDSKHIAKHFAALSTNEKEVVAFGIDAKNMFGFESWVGGRYSVWSAIGLSVAIYIGFENFNDFLKGAEAMDQHFLTTPLENNIPVIGGLLSVWYNNFFGAQTHLVVPFDQYLHRFPAYLQQLSMESNGKSVTRANVFTNYQTGTILFGEPATNAQHSFFQLVHQGTKLIPADFILAAQSHNPIEKNLHQRMLASNFFAQSEALMVGKDEAKVKAEGATGGLVPHKEFSGNRPTTSILAQKITPATLGSLIAYYEHLTFTEGAIWNINSFDQWGVELGKVLAKVIGKELDDKKAVATHDASTNGLINQFKEWEE

SEQ ID NO: 10947 - protein, 677 aa, Ipomoea nil
MGEREGECEGESSMVGAVVPAVKARNAEEPSISHRDEATPSGMEPELDRELLCPICMQIIKDAFLTSCGHSFCYMCIVTHLHNKSDCPCCSHYLTTAQLYPNFLLDKLLKKTSAHQISKTASPVEQFRHSIEQGREVSIKELDVLLTILAEKKRKLEQEEAERNMQILLEFLHMLKKKKVDELNEVQNDLQYIKEDINAVERHRIDLYRARDRYSMKLRMLADDPLGSKSRSSSVDRNTIGLFPSSRSAHGGLASGNLMYKKNDGGSQRKDVSVTELSLNGSDSQHMNQSGLAVMRKKRVHAQFNDLQECYLQKRRQLANQLQNKEERDQNVTRREGYSAGLSEFQSVLSTFTRYSRLRVIAELRHGDIFHSANIVSSIEFDRDDELFATAGVSRRIKVFDFSSVVNEPADAHCPVVEMSTRSKLSCLSWNKYTKNHIASSDYDGIVTVWDVTTRQSVMEYEEHEKRAWSVDFSRTDPSMLVSGSDDCKVKVWCTKQEASALNIDMKANICCVKYNPGSSFHVAVGSADHHIHYYDLRNTSAPLHIFSGHKKAVSYVKFLSSHELASASTDSTLRLWDVKDNSPVRVFRGHTNEKNFVGLSVSNEFISCGSETNEVFVYHKAISKPVTWHRFGSPDVDEADEDVTSFFISAVCWKSDSPTMLAANSQGTIKVLVLAA

SEQ ID NO: 10948 - protein, 479 aa, Agrobacterium tumefaciens str. C58
MSLKTAPVIVWFRKDLRLSDNLALLAAVEHGGPVIPVYIREKSAGPLGGAQEWWLHHSLAALSSSLEKAGGRLVLASGDAERILRDLISETGADTVVWNRRYDPTGMATDKALKQKLRDDGLTVRSFSGQLLHEPSRLQTKSGGPYRVYTPFWRALEGSDEPHAPADPPKSLTAPKVWPKSEKLSNWKLLPTKPDWAKDFSDIWTPGETGALDKLDDFIDGALKGYEEGRDFPAKPATSLLSPHLAAGEISPAAVWHATKGLSRHIASNDISRFRKEIVWREFCYHLLFHFPELGEKNWNDSFDAFSWRDDEKSFKAWTRGMTGYPIVDAGMRQLWQHGTMHNRVRMIVASFLIKHLLIDWRKGEKWFRDTLVDADPASNAANWQWVAGSGADASPFFRIFNPILQGEKFDGDGDYVRRFVPELEKLERKYIHKPFEAPKDALKKAGVELGKTYPLPIVDHGKARERALAAYAAVKKTT

SEQ ID NO: 10949 - protein, 313 aa, Roseovarius nubinhibens ISM
MSDPRHTRVLIIGSGPAGYTAGVYASRALLNPILVQGIEPGGQLTTTTEVENWPGDSEVQGPDLMVRMEAHAKAMGCEIIGDIITDLDLSQRPFTAKGDSGTVYTADAVILATGARAKWLGLPSEEKFKGFGVSACATCDGFFYRGQEIAVIGGGNTAVEEALFLTNFASKVTLIHRRDELRCEAILEDRLRKHPKIELLWDHTLDEVYGTDTPLGVEGIKVKHVKTGEITDIPAKGVFIAIGHAPANELVKDQLELHAGGYVKVQPGSSLTSIPGVFAAGDITDPIYRQAVTSAGMGCMAALDAERFLAEAE

SEQ ID NO: 10950 - protein, 509 aa, Clostridium thermocellum ATCC 27405
MFLDAEIMQQLEQYLTLLENDIVIKVNAGNDKVSVDMVGLIDEIAKLTPKIHVEKAELDRTPSFSVNRPNEDTGIVFAGIPLGHEFNSLVLALLQVGGRAPKVDEALINQIKGIKGEYHFETYVSLSCHNCPDVVQALNIMSVLNPNITHTMIDGAVFREEVESKGIMAVPTIYLNGNFFESGRLTLEEILAKLGQATESPSINEKEPFDVLVIGGGPAGVSSAIYAARKGLRTGIIAERFGGQILDTLGIENFISVPYTEGPKLAENFKEHVKRYDIDVMERQRAKSIRRNELLEVELEKGAVVKSKTVIIATGARWRNVNVPGEKEFKNKGVAYCPHCDGPLFAGKDVAVIGGGNSGIEAAIDLAGIVRHVTVLEFLPQLKADKVLQERLYRLPNVTVLTNVQTKEFTGKEKLDGITYIERDTNQEKHIEVQGVFVQIGLVPNTEWLEGTIERNAMGEIIVNEKNETSMPGVFAAGDCTNSPYKQIVIAMGSGATAALSAFDYLIRN

SEQ ID NO: 10951 - protein, 328 aa, Thermobifida fusca YX
MILTVTPNPSVDRTLEIDTYVRGAVIRIHNAMAHAGGKGVNVSRALRNHGVQTVAVLPVGGAEGAQLTALLGEHGIAAVTVPVAAVTRCNITTAETDGTTTQLNVPGASLSEAEVAALLRAVESQLRHHPKWLVAGGSLPQGTPTDFYVRLSVLARRYGVPIAVDTSGEPLAVTARAGAANLLKPNHHELAELLDRELTTLGDVVDATREVLSWGNDAALVTLGSYGALLVEPDRFWWAGGPPIVPRSTVGAGDSTLAGFLFDDGAPEERLRRAVSWGSAAVALPGTTIPGPADINDEGVVVVPEPDLSLPITDLPAKLGSEAARSRP

SEQ ID NO: 10952 - protein, 346 aa, Wolbachia endosymbiont of Drosophila simulans
VNFVVANTDAQALEKSLCDKKIQLGINLTKGLGAGALPDVGKGAAEESIDEIMEHIKDSHMLFITAGMGGGTGTGAAPVIAKAAREARAAVKDRAPKEKKILTVGVVTKPFGFEGVRRMRIAELGLEELQKYVDTLIVIPNQNLFRIANEKTTFSDAFKLADNVLHIGIRGVTDLMVMPGLINLDFADIETVMSEMGKAMIGTGEAEGEDRAISAAEAAISNPLLDNVSMKGAQGILINITGGGDMTLFEVDAAANRVREEVDENANIIFGATFDQAMEGRVRVSVLATGIDGRNNKSETSPISQSEDSEKEKFKWPYSQSESTQDKTLETKPAEQVSEGAKWGSN

SEQ ID NO: 10953 - protein, 167 aa, Citrus unshiu
MASADVEFRCFVGGLAWATTDSSLHEAFSAYGDILESKIINDRETGRSRGFGFVTFRDEKSMRDAIEGMNGQNLDGRNITVNEAQSRGSGGGGGGGYGSRGGGGYGGGGRRESGGGGGYGGSRGYGGGGGGYGGRREGGYSRDGGYGGDGGSRYSRSGASDGGSWRN

SEQ ID NO: 10954 - protein, 346 aa, Wolbachia endosymbiont of Drosophila simulans
VNFVVANTDAQALDKSLCDKKIQLGINLTKGLGAGALPDVGKGAAEESIDEIMEHIKDSHMLFITAGMGGGTGTGAAPVIAKAAREARAVVKDKGAKEKKMLTVGVVTKPFGFEGVRRMRIAELGLEELQKYVDTLIVIPNQNLFRIANEKTTFADAFQLADNVLHIGIRGVTDLMIMPGLINLDFADIETVMSEMGKAMIGTGEAEGEDRAISAAEAAISNPLLDNVSMKGAQGILINITGGGDMTLFEVDSAANRVREEVDENANIIFGATFDQAMEGRVRVSVLATGIDSCNNKPEASSVNQNKIPAEEKNFKWPYNQIPISETKEYDSTEQTNERVKWGSNV

SEQ ID NO: 10955 - protein, 524 aa, Clostridium tetani E88
MENLKFNNLGLNEDILKAIEDMGFETPSKIQAEVIPIVLQGFDVIGQAQTGTGKTLAFGAPVLNSISNESKKVKSIILAPTRELAIQVYKELTTVAKYTKFKLLPVYGGDSIDRQIKSLKKGIDIVIGTPGRVQDLINRKALNLSHIEFLVLDEADEMLNMGFVDDIENILKSCNEDRRTLLFSATMPSEIKKIAKKYMKKDAKHVAIAQNSMTVSSVEQFYYEVKQKNKFESLCKVLSVDEPTRAIIFCKTKKGVDELVSSMKEKGFSAEGMHGDMTQSHRLNTLNRFKERTIPFLVATDVAARGIDVKDTSHVINYDLPQDTESYVHRIGRTGRANKKGTAYTFVTPKEFSSLKRIQKISKSKINKRQLPTMDDVLKAKFDSILNDVEQTLSKDNYNTFIPLVKDLESKFDLTNVTAALMSMLYNDEISYDYDDDNTESNSLDYTRIFLNVGRKDRLNPKILLEFLDNNANINKSQVGSIDILDKFAFVDIATDRVGDLMDNCIDKTLCRRKLNIEVAKKSK

SEQ ID NO: 10956 - protein, 357 aa, Triticum aestivum
  misc_feature (142)..(142): Xaa can be any naturally occurring amino acid
  misc_feature (170)..(170): Xaa can be any naturally occurring amino acid
AYLGDTIEQVCTKKQAGTGPEFPGYRRPTRPDNTARIEGWLDRFPMFDWVGGRTSELSAVGLLPAALQGIDVKEMLVGAALMDEETRNTVVKENPAALLALSWYWATDGIGSKDMVVLPYKDSLLLLSRYLQQLVMESLGKXYDLDGNRVNQGLTVYGNKGSTDQHAYIXQQLREGVHNFFVTFIEVLRDRPPGHDWELEPGVTCGDYLFGMLQGTRSALYSNDRESISVTVEEVTPRAVGALVALYERAVGIYASLVNINAYHQPGVEAGKKAAGEVLALQKRVLTVLNEASCKDPAEPLTLEQIADRCHCPKDIEMIYKIIQHMAANDRALIAEGSCGSPRSVKVYLGECNVDDL

SEQ ID NO: 10957 - protein, 405 aa, Helicobacter pylori 26695
MLIVQKYGGTSMGSIERIHNVAQRVLESVTLGHQVVVVVSAMSGETDRLLEFGKNFSHNPNKREMDRIVSVGELVSSAALSMALERYGHRAISLSGKEAGILTSSHFQNAVIQSIDTKRITELLEKNYIVVIAGFQGADIQGETTTLGRGGSDLSAVALAGALKAHLCEIYTDVDGVYTTDPRIEEKAQKIAQISYDEMLELASMGAKVLLNRSVELAKKLSVKLVTRNSFNHSEGTLIVAEKDFKGERMETPIVSGIALDKNQARVSMEGVEDRPGIAAEIFGALAEYRINVDMIVQTIGRDGKTDLDFTIVKTQIEETKQALKPFLAQMDSIDYDENIAKVSIVGVGMKSHSGVASIAFKALAKDNINIMMISTSEIKISVLIDIKYAELAVRTLHAVYQLDQ

SEQ ID NO: 10958 - protein, 388 aa, Arabidopsis thaliana
  misc_feature (305)..(305): Xaa can be any naturally occurring amino acid
MEATYDRASEVKAFDELKIGVKGLLDAGVTQIPRIFHHPHLNLTDSNLLLSSTTMVIPTIDLKGGVFDEYTVTRESVIAMIRDAVERFGFFQVINHGISNDVMEKMKDGIRGFHEQDSDVRKKFYTRDVTKTVKYNSNFDLYSSPSANWRDTLSCFMAPDVPETEDLPDICGEIMLEYAKRVMKLGELIFELLSEALGLNPNHLKEMDCTKGLLMLSHYYPPCPEPGLTFGTSPHSDRSFLTILLQDHIGGLQVRQNGYWVDVPPVPGALLVNLGDLLQASCYCDMIQTVRLIQIYICLCDLFCXLMTNDQFVSVEHRVLANKGEKPRISVASFFVHPLPSLRVYGPIKELLSEQNLPKYRDTTVTEYTSHYMARGLYGNSVLLDFKI

SEQ ID NO: 10959 - protein, 106 aa, Chlamydomonas reinhardtii
EAGAVNDDTFKNVVLESSVPVLVDFWAPWCGPCRIIAPVVDEIAGEYKDKLKCVKLNTDESPNVASEYGIRSIPTIMVFKGGKKCETIIGAVPKATIVQTVEKYLN

SEQ ID NO: 10960 - protein, 131 aa, Candida albicans
MATSVPHPKIVKKYTKKFKRHHSDRYHRVAENWRKQKGIDSCVRRRFRGTIPQPNIGYGSNKKTKFLNPAGYKVYLVKNVKDLDVLLLHTKSYAAEIASSVSSRKRVEIVAKAKKLGVKVTNPKGKLNLEA

SEQ ID NO: 10961 - protein, 570 aa, Burkholderia vietnamiensis G4
MQPAPAACALLSRPARRRPASRMTSTFPCLFLRLAGLLLACSAGVQAASAACTAAPADGTPQWRPAFHYTPQRNWMNDPNGLVYENGRYHLFYQYNPLGADWGNMSWGHATSTDLVHWHEQPVAMRANATEEIFSGSIVADPHNTSGLGTPGDTPLIAVYTSVYKEGSGHPPGTQAQSIAYSLDHGASWQPYAHNPVLTLDPESKAFRDPKVSWYAPGRYWLMTTVVADAQVVKLYRSDDLIHWSFLSDFTLPGVPHTGALWEMPDLVPLPVDDDPRHIKWVMIVNVNPWSIAGGSGAMYFVGEFDGRTFVPDRVAPAGSDPAQFRWVDHGADFYAAGTFSGAPGRRPLAIAWMSNWDYAAKSPTAPWRGAMTLPRELALKAIDGEPTLVVTPAAAFTGWADRRPAVHVGTLEVDSAARALPPATRGVAQRIEVTIAPGQAARAGVVVRASADGAIGTRIVYDTAARTLTLDRSRSGTPDFAATFSRQHIVALPLENGLLRLDIIVDRGSVEVFANGGRTVLTDVVFPPADADRVSVFAERGTATFSGLTVTPLGARDRAGEGDCVASAR

SEQ ID NO: 10962 - protein, 148 aa, Glycine max
EAGSSATYPMQCSALRKNGHVVIKNRPCKIVDMSTSKTGKHGHAKVHLVAIDIFTGKKLEELSPSTHNMDVPHVSRKEYQLLDIQDDGFLSLMSEDGTMKDDVKSPEGEIGAKIEKLFRDEEKDTNVIILTAMGEETAIEAKEAPRGA

SEQ ID NO: 10963 - protein, 491 aa, Coxiella burnetii RSA 493
MLIFEKSRKNRRTLAHAIADKMDANDIPANLLRHDAPRLPELSELEVVRHFTRLSTQNFSIDTHFYPLGSCTMKYNPRAANRLASLPGYLKRHPLSPAPQSQAFLQCLYELQTMLTEITGMEKISLTSMAGAQGEFAGVAMIKAYHESRGDYDRTEMIVPDAAHGTNPASAAMCGFTVKEISTTKDGDIDLEKLRQMAGAKTAGIMLTNPSTLGVFERQISEVAKIIHNAGGLLYYDGANLNAILGKYRPGDMGFDVMHLNLHKTFATPHGGGGPGAGPVAAGPRLSKFLPVPMVGKNKEGYDWLTEKECPKSIGRLSAFMGNSGVLLRAYIYLRLLGKEGLSRVAEFSTLNANYLMKRLEQLGFTLAFPNRRASHEFIITLKPLTRAYGVTALDIAKRLLDYGFHAPTIYFPLLVPECLLIEPTETESKQTLDHFIEAMEKILTEIKTTPDLLRNAPHQQLINRLDEVKAARELDLRWYPIAKETEIFIQ

SEQ ID NO: 10964 - protein, 446 aa, Coxiella burnetii RSA 493
MPFIPHTPDDIEKMLAVIGAESIDQLFDEIPSALANIQQVPPGLNEAGITRLMEKREPNKQLCFIGAGAYEHHIPAAVWEIATRGEFYTAYTPYQAEASQGSLQLIYEYQTMMAELMAMDVSNASLYDGASALAEAALMAVRIKRGKAQRILVPASVNPFYRKVLSSIVEQQKINVEIIPFDPTMGIVNSELLKAKNAEGAAAIIIPQPNFFGCLEAVDVLTDWAHANDLLVIASVNPTAMALLKPPGQWGQKGADIVCGEGQPLGVPLASGGPYFGFMCCKKDYVRQLPGRIVGRTVDKKGREGFTLTLQAREQHIRRSKATSNICTNQGLAVVAATIYLSLLGATGLREVALASHTQSRDLFQRLSAVKGVSPVFSSPIFHEFVVRLEKPVEEVLAAMAEQGIQAGFSLKNDYPKLGNGLLICVTDTKTDDDLMAYENALRSIQ

SEQ ID NO: 10965 - protein, 550 aa, Haemophilus somnus 129PT
MMQNINPTQTNAWKALEQHQKDLDQVTIQQLFEQEPTRFNDYSLKFAEQILVDYSKNNINQQTLSLLRQLAKECALNEATEAMFNGEKINRTENRAVLHTALRSCANTPVYVDGKDVMPEVNAVLAKMKSFCQRVISGDWKGYTGKAITDVVNIGIGGSDLGPYMVTEALRPYKNHLTMHFVSNVDGTHIAETLKKVNPETTLFLVASKTFTTQETMTNAISARKWFLAAAQDESQIANHFAALSTNAKEVEKFGIDTNNMFEFWDWVGGRYSLWSAIGLSIALSIGFDNFEQLLAGAHEMDNHFRTAPMEQNIPATLALIGIWNCNFLGAETEAMLPYDQYLHRFAAYFQQGNMESNGKYVARNGEVINNYQTGPIIWGEPGTNGQHAFYQLIHQGTKIIPCDFIAPAQTHNPLSDHHSKLLSNFFAQTEALAFGKTQQEVEAEFVKAGKSLDEVKEIVPFKVFTGNKPTNSILVQKITPFTLGALIAMYEHKIFVQGVIFNIYSFDQWGVELGKQLANRILPELTGDESISSHDSSTNGLINQFKAWR

SEQ ID NO: 10966 - protein, 298 aa, Triticum aestivum
  misc_feature (214)..(214): Xaa can be any naturally occurring amino acid
AYLGDSIEQVCTKKHAGTGPEFPGYRRPTRPAAGTAAHAALAATRIPTSARLHSKAASRQRVDFADFSGLRPGSCSVSAAAREASFSDVLGAQLVARASGENTVRAPAEAKLKVAINGFGRIGRNFLRCWHGRENSPLEVIVINDSGGVRNASHLLKYDSMLGTFKADVKIVDNETISVDGKNIQVVSNRDPLKLPWAELGIDIVIEGTGVFVXDGPGAGESISQAGAQERSIITRFRAKGRPTPTLRRSAVKRRANYPMNVPTIIQANAFFGHPPNPLRILPRVLGPKVSGIRKGDH

SEQ ID NO: 10967 - protein, 610 aa, Synechococcus sp. WH 5701
MRVSRLMLVTLRDDPAEAEIPSHKLLLRGGYMRRVASGVYAYLPLLWRVLSKISAIVRQEMDATGALETLLPALQPASLWERSGRWQGYTAGEGIMFHLVDRQERSLGLGPTHEEVITALAADLLRSYRQLPVTLYQIQTKFRDEIRPRFGLMRGREFIMKDAYSFHADEADLRLTYQRMDQAYRRIFSRCGLRTVAVEADSGAIGGSASQEFMVTADAGEDLILSSADGRYAANQERACSLPEPAVPLVPAAAEAVELHTPDQHSIEALCAAHGFEPSQTVKVLLLLARCAKGQPRAVLVSLRGDQQLNPTKLANAVSGSLGEGAGALLDLEPITPEQIRSEGLPAWPLGCIGPHLGDELLAGARSWHPAFLRLADPTAAELEVFVCGANRPDTHLVGARWPALGAGLPGVADLRSAQPGERCLQDPSQRLEASRGIEVGHIFQLGRKYSQALEATFTNEQGLDEPLWMGCYGIGVSRLAQAAVEQHHDQQGICWPVAIAPFEVIVLVASAQDPVQVALGEQLHDELEQAGLEVLLDDRSERAGVKFKDADLIGIPWRVVVGRGAASAQVELVERAGGAKRDVAAGAVVALLQDHIAAARLGLAATGSS

SEQ ID NO: 10968 - protein, 946 aa, Candida glabrata CBS 138
MAELIDGKACAQGIRASIKEEIEAIKQQNPSFVPTLTIVQVGDRPDSATYVRMKRKAAEEAGIRADFLHLAEDVSENELYEEVTKLNENPDIHGVIVQLPLPGHINEDKITSAVVAEKDVDGFGPINIGELNKKNGKPFFLPCTPKGIIELLKQAGVQIAGSKSVVIGRSDIVGSPVAELLKSLDSTVTITHSKTPDIPSYLNDADIVVVAIGKPEFVKGEWFANNKKGAVVIDVGTNYVDDSTKKSGYRCCGDVEFKEACKYVRKITPVPGGVGPMTVAMLMQNTLIAAKRQLETGGKLSEFEPLPLQLKRPVPSDFEISRAQKPKQITKVALEAGILPSELEPYGSTKAKVSLNILDRLKDRENGKYILVTGITPTPLGEGKSTTTVGLTQALGAHLNKTVFANVRQPSMGPTFGIKGGAAGGGYSQVIPMDEFNLHVTGDIHAISMANNLLAAAIDTRMFHESTQKDGPLYKRLVPAKKGERKFTPTMLRRLKKLGIDKTNPDDLTDEEITRFARLDIDPETITWRRVVDCNDRFLRGITVGEAPTEKGFTRKTGFDISVASECMAILALCNSLSDMRERLGKIVVAASKSGEPITCEDIGCAGAMTALLKDAVKPNIMQTLEGTPVFVHAGPFANISIGANSVLADKIALKLAGVDPKLPEEKKKEQVGYVVTEAGFDFTMGGERFLNIKCRSSGLVPDVVVIVATVRALKVHGGGPEVKAGAPLPSEYLNEDVELLRKGCANLAKHIENAKQYNLPVVVAINKMSSDTDKEHEVIREESLKAGAYDAIVSDHWAEGGAGAVDLAKGIIKAADETDNSKFSFLYESQGKVEDKIQKIANAMYGAKDVEFLPEAQKKIDLYTKQGFGDLPICIAKTQYSLSHDANLKGVPKDFTFPIRDIRASIGAGYLYALAAEIQTIPGLPTHCGFMNIEVNEDGEIEGMF

SEQ ID NO: 10969 - protein, 104 aa, Colwellia psychrerythraea 34H
MIKVEEILAEQFYQEVEQASGKVLIDFYAPWCAPCKMLAPVVEQIAQEHEDIKVIKINADNSQELMAEFGIRGIPTLLLMNKGELVATQVGAASVSQVTKFVQQ

SEQ ID NO: 10970 - protein, 1123 aa, Arabidopsis thaliana
MASGGGDDGLRRRGCSCTKDDFLPEESFQSMGNYLKALKETPSRFMDRIMTRSLDSDEINEMKARSGHEMKKTLTWWDLMWFGIGAVIGSGIFVLTGLEARNHSGPAVVLSYVVSGVSAMLSVFCYTEFAVEIPVAGGSFAYLRVELGDFMAFIAAGNIILEYVVGGAAVARSWTSYFATLLNHKPEDFRIIVHKLGEDYSHLDPIAVGVCAIICVLAVVGTKGSSRFNYIASIIHMVVILFVIIAGFTKADVKNYSDFTPYGVRGVFKSAAVLFFAYIGFDAVSTMAEETKNPGRDIPIGLVGSMVVTTPYQQIDPDAPFSVAFSAVGWDWAKYIVAFGALKGMTTVLLVGAIGQARYMTHIARAHMMPPWLAQVNAKTGTPINATVVMLAATALIAFFTKLKILADLLSVSTLFIFMFVAVALLVRRYYVTGETSTRDRNKFLVFLGLILASSTATAVYWALEEEGWIGYCITVPIWFLSTVAMKFLVPQARAPKIWGVPLVPWLPSASIAINIFLLGSIDTKSFVRFAIWTGILLIYYVLFGLHATYDTAKATLKEKQALQKAEEVNPAFSLARLCVIERERRMKLEKKKGIGAKRRGKKSSIDHDPFLEEETEKRRKFNYDDDDDIESVESEEEGKVGEEVEDEFAHETVGEKRKRLAEDTLNRIEEAKQREHEEDNEEDDDFRDSLVAKTLMQEQLEKSGRVRRANALRVQDLQSSDKFRVIVKHQHSVTGVALSDDDSRGFSVSKDGTILHWDVSSGKSDEYKWPSDEVLKSHGLKFQESWYTRHNKQSLALAVSSDGRYLATGGVDCHVHLWDIRTREHVQVNKLKNNQVKDSVHCAFTGHCGIVSSLCFREGTAELFSGSYDGTLSIWNAEHRTYIESCFGHQSELLSIDALGRERVLSVGRDRTMQLYKVGIVVPESTRLIYRASESNFECCCFVNSDEFLSGSDNGSIALWSILKKKPVFIVNNAHHVIADHDSVNHNCTPACSWVSSVAVCRGSELAASGAGNGCVRLWGVESGSSAIQPLYELPLVTWVCELFSFCKIWSVSDRWCWTGTAARKMGLLKICAERCCNTSLKAFMKGSQFRLQLILELQLCRGTTAIFLTWKGRKRTYRGSN

SEQ ID NO: 10971 - protein, 587 aa, Streptomyces avermitilis MA-4680
MARTVARVIVDALSELGVRQVFGVVGDALNPVTDAIRTTEDVEWVGCRHEEAAAFAASAQSQLSGTLGVCMGTVGPGSVHLLNGLYDAAKSRTPVLAIAGQVPLAELGSDYFQEVDNDALFSDVAVFRATITSPDQLPQLLETAVRNALGRKGVAVLTVPGDLGDRELSADRPTRFSLSTPVSRPEESAVRRAAELLDRAERITLLVGRGARAARADVLTLADRLAAPMVLTLKAKEGFEGEANPFQVGQTGLIGNPAAASALQDADTLLLLGTDFPYRDWYPDGRTVIQVDSEAAHIGRRVPVEVGLVGDTGATVRDLLGHLATAPPGTEGARDRSHLEDARKSFGKWRASQARLADPAHDKGLVGRVRSALDNRAHDIRPEALAAVVDRVADENAVFTSDTGMATVWLSRFVEMRGDRRLLGSYNLGSMANAMPQALGAQCLDRGRQVVAFCGDGGLSMLLGDLMTLKTSRLPVKLVVFDNRRLGMVKLEQEQAGLPEFGTVLDNPDFAAVATAMGITGIRVTDPAELEESVRRAFATPGPVLLDVLTNPDEIAVPAKPTVEQGWGFAVAKVKEVVRSHGDSDGH

SEQ ID NO: 10972 - protein, 693 aa, Photobacterium profundum SS9
MSMLNSESEKLQETLLDLLRSQERECQLREENSAILAGISAMAGANNKRQVFNSLLSVLRKYIGFEHALALTRDDETGPLRELVTTCDVFESSSWAIDRTFVRCINGESIALFSPKDVTEFKELSPQILEYCNSALMTGVKVSSGDAVLLFVHSKKGQFTPQCRRVLDRFRPLLERAIIDIDYRERLQSLVTARTQELTHSQQRFKDFAKTVGDWFWEVDTDYQFTYISSPHLANHVIDNANILDIFGEQSELRVKLLEQLKSKKTFEDIEWKLPEDEGGLWITLSGTPYFNKQGKLLGYRGTAKDITNRKQRLVELQLARKQAETANNAKSEFLAMMSHEIRTPLNAVLGLMDTLVDSGLDKKQMEWVSQMEQSAQLLLTIINDILDLSRIESGKFELFNTDICIADSVSLVVNQLNEQAKRKNITLTTQIDESVPGSMLGDKNRITQVMFNLIGNAIKFTNVGSVRVSVKAVNNHIEIAVTDTGIGIAPYAQNTLFNPFIQADGSITRRYGGTGLGLAISMHLIKKMDGNISLDSMLNVGSCFTVSIPITSVIGTTEKELPEQYPRSNRSLNILLAEDSNTNQLVAKLMLEKRGHRVQIANNGEEAIKALENNTHYFDIVLMDISMPVLDGIQATKRLREEEITIPIIALTANAMQCDQVEYKKAGMNDFLAKPIRAIELNQILSKYQHIA

SEQ ID NO: 10973 - protein, 531 aa, Nostoc sp. PCC 7120
MTTKPEKIIIFDTTLRDGEQCPGATLNIDEKLAIAKQLARLGVDIIEAGFAFASPGDFEAVHKIAQTVGTQSGPVICSLARARHDDIKAAAEAIKPAAKGRIHTFIATSDIHLQYKLKKTRPEVIAIAEEMVAYAKSFTDDVEFSPEDAGRSDPEFLYQVLERAIAAGATTINIPDTVGYTTPSEFGAIIKGIKENVPNIDQAIISVHGHNDLGLAVANFLEAVKNGARQLECTINGIGERAGNAALEELVMAMHVRRQYFNPFLGRHPDSEEALTNIDTKQIYKTSRLVSNLTGMLVQPNKAIVGANAFAHESGIHQDGVLKNKLTYEIMDAQLIGLTDNQIVLGKHSGRNAFRTRLKELGFELSETELNKAFVKFKEVADKKKEISDWDLEAIVNDEIQQAPDLFRVELVQVSAVAMHVQPATVTLRTPDGEELTDAAIGTGPVDAVYKAINRVVNVPNQLIEFSVQSVTAGIDAIGEVTIRLRYESRVFSGHAANTDIIVASAQAYVNALNRLYASLQTQDKQTEVTA

SEQ ID NO: 10974 - protein, 592 aa, Deinococcus radiodurans R1
MEQTGKQGQNRGEMTGAKALWATLAGHGITTVFGYPGGAIMPVYDALTFYPEVRHILARHEQGAIHAAEGWAKATGEIGVCMATSGPGATNLVTGLADAMLDSVPLLAITGNVAQHLMGTDAFQEADITGITMPITKHNYVVRDVDELPRVIAEAIRIARSGRPGPVLVDIPKDVQLAAFAGDIPTPHTRPQAPEASAESIASARELLRNAKKPVLVMGGGSLDASAELTALAHAWGLPVITTLMGLGAYPASDPLWLGMPGMHGSVAANRAISECDVLLAVGMRFDDRVTGRVSGFAPHAQIIHVELDAAEIGKIVRTHLPIRSDAKTAARQLAEGAEKLELGEWLSQIEEWKGRAVPPQQWGAAYAVGQVTARLRPDDILSSDVGQHQMLAAQLARFEKPRRWLNSGGLGTMGFGFPAAIGAALAEPGVVSMVVAGDGGFQMTAQELATLKMYDIRNVKICIINNSYLGMVRQWQELFHGKRYSEVWLGDSNPDFVKLAGAYDVPAYRASSAEELPAAIDAWLSDPKSSLLEVVVPHEHGVFPMVPAGAALHEMMETEPVRTDISAEATEVNEATWQEMTEQEAEEMNQG

SEQ ID NO: 10975 - protein, 258 aa, Mesorhizobium loti MAFF303099
MAEPLVTFESEGAIGIVTLRRPEKFNALDIPMLRALEAALDEAELAEGVRAVLLRGEGKGFCAGGDVEAWGAMSAADFQVQWVRYGHRVFDRLARLRQPTIAVLSGHALGGGLELAVACDFRVAEAHVKLGFPETSIGVVPGWSGTQRAVRRFGAQTVRRMALGGEVFLAADALALAIVDRVVETGRAFDEAKAWGEKIAERGPLATEAAKLMIAVAEGEESAAATEALASGFIALTGDLKAGVDAFKAKQMPVFSRS

SEQ ID NO: 10976 - protein, 316 aa, Nocardioides sp. JS614
MTTPWRTAATWSLADIPPQDGRTVLVTGTTVGGLGQFTALELARRGARVVLAGRTEQRLEETRAAITTEVPAAALETLVVDLADLASVRRAAVQAAGLGPIDVLVNNAGVMGTPYHRTGDGLELQLATNHFGPFLLTGLLLPQLVASGAGTVVTVSSQMHRVARSAPLDDPRSQHGRYQRWPTYARSKLANLLFTYELDRRARRAELPVRALAAHPGFAATHLAANGQYGRARGGRATILDAAIKAISPNRADEGAWPTLMAATADLPGGTYCGPSGFAEGGGVPHVTTSNKLSHDQAAQRRLWELSEQTTGIRYP

SEQ ID NO: 10977 - protein, 524 aa, Mesorhizobium loti MAFF303099
MSTPSRPSRCRYSQEARETVPMNAPLNIAMPAEASAAPKNYRLLIDGKHVDARDGRTIARKSPGHGFTVSRYAQAGEAEVEAAVQAAHKAFETGPWPRMKAGERAAILFRAADLIEARLEDIARLDALESGKPIAQARGEIGGAVDIWRYGASLARTLHGESYANLGDAMLGVVLREPIGVVSIITPWNFPFLIVSQKLPFALAAGCTAVVKPSEMTSASTFVLGDILLEAGLPAGVVNILAGLGADVGAPMVSHPLVEMVSFTGSTRVGKMTMASAAQSLKKVSMELGGKNGQIVFPDADLEAAADAAVFGGFFNAGECCNAGSRLIVHEAIADDFLSAVKALTARVTVGDPLDDQTKVGAMISSDHLAKVTDYVTAAAGEGSNVYSGGKQLASNAGQYLDPTIIRGVTEDMAIAREEVFGPVLSVLTFESIEKALHIANNTPYGLSAGVWSASIDTCMSVARGVRSGTVWVNTFMEGYPELPFGGYKQSGLGRELGKRAVEDYTEEKTIQFHRGQRTGWWVG

SEQ ID NO: 10978 - protein, 346 aa, Wolbachia endosymbiont of Drosophila simulans
VNFVVANTDAQALDKSLCDKKIQLGINLTKGLGAGALPDVGKGAAEESIDEIMEHIKDSHMLFITAGMGGGTGTGAAPVIAKAAREARAVVKDKGAKEKKILTVGVVTKPFGFEGVRRMRIAELGLEELQKYVDTLIVIPNQNLFRIANEKTTFADAFQLADNVLHIGIRGVTDLMIMPGLINLDFADIETVMSEMGKAMIGTGEAEGEDRAISAAEAAISNPLLDNVSMKGAQGILINITGGGDMTLFEVDSAANRVREEVDENANIIFGATFDQAMEGRVRVSVLATGIDSCNNKPEASSVNQNKIPAEEKNFKWPYNQIPISETKEYDSTEQTNERVKWGSNV

SEQ ID NO: 10979 - protein, 1042 aa, Thermus thermophilus HB27
MAWLNPFWSSPKAYVRPPKRGLAPELWASRIPFTHLENFYEVFRALWENRDNLPYAWRILKDGVCDGCALGTSGLEDWTLHGVHLCNVRLRLLRLNTLPPLDPKVLEDVEALKGRKSRELRRLGRLPYPMLRRKGERGFRRVSWDEALGLAAEYLRRHLPEGAFFYLTSRGVPNETYYVVQKAVRALGCNHVDNAARICHSPSTVVLKEALGVAATTCSYTDLIGTDLVVFLGSNVANNQPVMMKYLYHAKKAGTKVAVVNPYREPGMERYFVPSDLESALFGTRIADRFFQILPGGDIAFLHGAAKWMLEEGWVDPGFIRAHTAGFEAYKALLEAIPFAELEKAAGVSREEMRAFAEMVGRAERAVFVWGMGITQHTHGEDNVRAIVNLALLKGFVGREGCGLMPIRGHSGVQGGAEMGAYATAFPGGLPVNPENARRLAELWGFPVPDRPGLTTPEALDRALEGRLGVLWAIGGDFREVMPDPEAVEEALRRVPLRVHQDIVLSSQMLLEPGECVLLLPATTRYEVPGGVTETSTERRVIFSPEIPGPRPPEARPEWEVFQELVHRLRPELKDRFRFASTAEVREEIARVIPLYEGIQRLKAKGDQFQYGGRHLCEGWRFPTPDGKAHFRPVPPAPKGGPRGGLPRGHPPGEAVQLHRPRGPGPPHRGLPGRGLHEPQGRRPPGPEAWGSGGAGKRLRPLRRPGLPGGGQRGHPGGPLARGERPGRPQGPLPPGPHPGLQGGPRPPAAGGGGGPFPAPAMRGKARVRVARLEGGRWREVRDEVAAEAPLEIRLRYRDEVASLGVVLRTPGQDAELAAGLLYTEGLLQDPKEVLAIAPCADGSLPPEAREGVIQVFLRHPLPPPPKRHLALTAACGACGREALPDLGKLGLSPPPPLAVDPDLLLALPERLGEAQRLFRATGGLHAAALFDREGRLVALREDVGRHNALDKLIGWAFLQGKLPLHDHILLVSGRAGYELLVKAVAAGIPVFCAVSAPTSLAVALAQAYGLTLVGFLRPGRMNVYAGRERVGPPRGLPNPCG

SEQ ID NO: 10980 - protein, 112 aa, Dechloromonas aromatica RCB
MKKIEAIIKPFKLDEVREALSEIGISGLTVTEVKGFGRQKGHTELYRGAEYVVDFLPKIKIEIVVNSNNVEPAIDAIIKAARTGKIGDGKIFVMPVEQVVRIRTGETDEAAV

SEQ ID NO: 10981 - protein, 226 aa, Acidovorax avenae subsp. avenae
MTRQFRIAPSILSADFARLGEEVKNVIASGADWVHFDVMDNHYVPNLTFGPMVCQALKPHAVTPDGRPAPIDVHLMVQPVDALAAAFAEAGADYISFHPDASAHVHRSIQAITSKGIKAGLVFNPAAPLDVLDWVIDDIDLILVMSVNPGFGGQSFIDSALRKIEALRRRIDACGKDIRLEVDGGVKVDNIRRVADAGADTFVAGSAIFGKPDYRAVIDAMRAQLG

SEQ ID NO: 10982 - protein, 320 aa, Dechloromonas aromatica RCB
MPQNVRHNPLIILGSGPAGYTAAVYAARANLKPVLITGMAQGGQLMTTTEVDNWPAAADGIQGPELMANFEAHARRFETEIVFDHIHTTQLTEKPFTLIGDAGTYTCDALIIATGASAMYLGLPSEETFAGKGVSACATCDGFFYRNKPVAVVGGGNTAVEEALYLANIASHVTVIHRREKFKAEKIMQDKLFQREKEGKVTILWNSTLDEVLGDDSGVTGLSIKNVKSGETQKVDVHGVFIAIGHKPNTDIFAGQLEMDNGYLVTQAGRNGNATQTSIPGIFAAGDVQDQIYKQACTSAGSGCMAALDAERYLDNLGHA

SEQ ID NO: 10983 - protein, 353 aa, Oceanobacillus iheyensis HTE831
MKNFKIANIPGDGIGKEVVPAAANVLKAIAAIHGGLRFEFTEFPWSCEYYMEHGKMMPEDGLEIIKDYNAIFLGAVGNIELVPDHISLWGLLIKFRREFEQVINYRPAKVLPGVKSKIVNPKDFDLIVVRENSEGEYSEVGGRIFRGEDEIAIQNSIFSRRGTERVMRFAFELAAKRKKHVTSATKSNGIFHSMPFWDEVFKDVSRDYSTIETDSQHIDALAAFFVTNPERFDVIVASNLFGDVLSDLGAAIMGSVGVAPAANINVNGKYPSMFEPVHGSAPDIIGKNIANPIGQIWTAKLMLDHFGEEELGSLLLDVIENTTNKGILTPDIGGKHTTSEVTEEIIEGLKARF

SEQ ID NO: 10984 - protein, 326 aa, Oryza sativa
MAHFQGQQHGHPAARVDEYGNPVAAGHGITGTQEAGAGGYGAAGNVAQPQHAFGGATDAGGYGRQAGYGATGTGTHDAAGYGGSGQPAYGATGTGVHDAGGLMPGHTAGHGTTGTGVHHGAGAGLPAGQTAGYGTTGVTGAQHGAGGLGTGHTAGYGTTGAHHGAGGLGTRHMAGHGATTTPDTMAYGTTGTGAPHGATAGTGAYPHAGGQFQPAREEHKTGGILRRSGSSSSSSSSEDDGMGGRRKKGIKEKIKEKLPGGNKGGQQQPTATAATGGYGAGTGHTAAAGTTTDAGGTAYTPTTQPTHEKKGMMEKIKEKLPGGGHH

SEQ ID NO: 10985 - protein, 407 aa, Acinetobacter sp. ADP1
MKRVVVTGMSGITSLGETADAIFEKFAQGKSGIRYMADWEQYTDLRTKLGGPVESFSIPKHFNRKVTRGMGRVALMSVIAAEAALKDAKLFDDPILKSGDTGVAFGSSAGSVDAVREFGCMLIDNDMTKMNATTYIRMMSHTSAVNMTVYFGLKGLTLPTSSACTSGSMAIGQAYEAIKYGKQTVMLAGGAEEISAAGAAVFDVLLATSGMNDHPEQSPRPFDAKRDGLVIGEGAGCLVLEEYEHAQARGATIYAEIVGYGSNTDGQHVTRPDQAMMARCMQLSLKDAGLSAEQIGYVNAHGTSTDQGDIAETQATAQVLGKKPISSLKSYFGHTLGACGAIEAWLSIEMMQRNQYIPTLNLDDVDPLCGDLDYITGQSRALGADIVMSNNFAFGGINTSLIFKRVE

SEQ ID NO: 10986 - protein, 120 aa, Zea mays
  misc_feature (16)..(16): Xaa can be any naturally occurring amino acid
MARTQQLAAVATAVVXLVLLAAATSEAAISCGQVASAIAPCISYARGQGSGPSAGCCSGVRSLNNAARTTADRRAACNCLKNAAAGVSGLNAGNAASIPSKCGVSIPYTISTSTDCSRVN

SEQ ID NO: 10987 - protein, 147 aa, Arabidopsis thaliana
MSSMMETLQIRKPTSLPVSQRPNAAATADDEPGLIRRRLSSLSLNLSNQPAAIAARFARSKSVSAMGEQAGSSVKEWWEWGWSWILSRKPIFIRDLELNKDEAKSIGSQNRGSIMHVFFKLRSQIRNFMGPSSEDSLPLSCKYKRQR

SEQ ID NO: 10988 - protein, 261 aa, Capsella bursa-pastoris
MAEENKNNVPEHETPKVATTEEPSTTTTTPEVTDRGMFDFLSKKKEEVKPQETTTLESEFDHKAQISEPALAAEHEEVKENKITLLEELQEKTEEDEENKPSVIEKLHRSNSSSSSSSDEEGEEKKKKKTVEGEEEKKGAMDKIKEKLPGHHDKETEDHDVPVVSTIQVPVSESVVEHHETEGEEKKGVMDKIKEKLPGRNDKETEDSPVPTSTPLVVTEHPVGHSTEQPAEKKGIIEKIKEKLPGYHAKTEEEKKEKESA

SEQ ID NO: 10989 - protein, 490 aa, Escherichia coli O6
MSRMAEQQLYIHGGYTSATSGRTFETINPANGNVLATVQAAGREDVDRAVKSAQQGQKIWAAMTAMERSRILRRAVDILRERNDELAKLETLDTGKAYSETSTVDIVTGADVLEYYAGLIPALEGSQIPLRETSFVYTRREPLGVVAGIGAWNYPIQIALWKSAPALAAGNAMIFKPSEVTPLTALKLAEIYSEAGLPDGVFNVLPGVGAETGQYLTDHPGIAKVSFTGGVASGKKVMANSAASSLKEVTMELGGKSPLIVFDDADLDLAADIAMMANFFSSGQVCTNGTRVFVPTKCKAAFEQKVLARVERIRAGDVFDPQTNFGPLVSFPHRDNVLRYIAKGKEEGARVLCGGNVLKGDSFDNGAWVAPTVFTDCSDDMTIVREEIFGPVMSILTYESEDEVIRRANDTDYGLAAGIVTADLNRAHRVIHQLEAGICWINTWGESPAEIPVGGYKHSGIGRENGVMTLQSYTQVKSIQVEMAKFQSIF

SEQ ID NO: 10990 - protein, 207 aa, Zea mays
APSHYSLACASASRVAPPSPSPPLHPPRRPCTTAIALPSLALFLCPHLAHDFTVKDASGKDVGLSTYKGKVLLIVNVASQCGLTNSNYTELSQLYEKYKDQGFEILAFPCNQFGGQEPGTNEEIVQFACTRFKAEYPIFDKVDVNGDNTAPIYKFLKSSKGSLFGDNIKWNFSKFLVDNEGRVVERYAPTTSPLSIEKDIKKLLGSS

SEQ ID NO: 10991 - protein, 251 aa, Zea mays
MKFNIANPSTGCQKKLEIDDDQKLRAFYDRRISQEVSGDALGEEFKGYVFKIMGGCDKQGFPMKQGVLTSGRVRLLLHRGTPCFRGYGRRNGERRRKSVRGCIVSQDLSVINLVIVKKGENDLPGLTDTEKPRMRGPKRASKIRKLFNLNKDDDVRKYVNTYRRTFTTKNGKKVSKAPKIQRLVTPLTLQRKRARIADKKKRITKKKSEAAEYQKLLAQRLKEQRDRRSESLAKRRSKLSAAAKASAATSA

SEQ ID NO: 10992 - protein, 425 aa, Haemophilus somnus 129PT
MYKPRPGRVKDYIAVPKANGYQSLHTSMIGPHGVPVEVQIRTEEMDRMAEMGVAAHWAYKQSGRNDSTTAQIRAQRWLRSLVELQQSVGNSFEFIESVKSEFFPKEIYVFTPKGRIIELPKGATAVDFAYAVHTDVGHHCVAATVDRKPYPLSFALQSGQTIDISIDENSKPNSGWLNFVVTAKARTSIRQALKSLGADDAVNLGKRQLLQALLPKKLSDIPPHIVQEVLDDLKLTSFNDLLMEIGLGNQISGAIAYRLVGEPLKIDTDGNPKNNTELLQIKSSEGLSTTFGQCCHPIPGDPIVAYTSSGKGLVIHHKDCANLKKRKENTEHYMQVQWEDEDTSIEFETELRIELLNQQGALPHLMSMISSLDSRIHSIWTEEQDGRLYQIVILLTVKNTEHLEQIMRKIKSVPGFLSVKRNINN

SEQ ID NO: 10993 - protein, 471 aa, Streptococcus mutans UA159
MMTIFRKKNTNLDKTEMKRHFKVIDLIFLGLGSMVGTGIFTITGIGAAKYAGPALIISIIVSAIAVGISALFYAEFTSRIPANGGAYSYLYATLGEFPAWLAGWYIIMEFLTAISSVASGWGSYFKGLLSSYGIELPSLLNGTFNPAKNNYIDLLPALVIFLVTGIVLLNSKIALRFNSSLVVMKFSALALFIIIGLFYIKPENWSNFAPFGFGKIYGGQTGIMAGASLMFFAFLGFESISMAVDEVQKPQKNIPKGIIASLTIVTILYVSVTLVLTGIVHYSKLNVADAVAFALRQAGLVWAANYISVVAILTLITVCISMTFALARTVYSISRDGLLPKQLGIVTKHSKVPKNATLLVGFASMICAGVFPLSSIAEFLNICTLAYLIMLAIAIIKLRKDQGQPKIGEFKTPFIPFLPIVSIVICLSLMSQYKSVTWIAFGISTSIGFLIYFAYGYRHSTIFIKNNPKIR

SEQ ID NO: 10994 - protein, 314 aa, Pseudomonas aeruginosa
MSSREIRIATRQSALALWQAEYVNSTGLEQAHPGLTVTLLPMTSRGDKLLDAPLAKIGGKGLFVKELETALLEGAADIAVHSMKDVPMDFPEGLGLYTICEREDPRDAFVSNTYASLEQLPAGSVVGTSRLGRQAQLLARRPDLQIRFLRGNVNTRLAKLDAGEYDAIILAAAGVIRLGFESRIRSSISVDDSLPAGGQGAVGIECRTADSDLHALLEPLHHTDTALRVTAERALNKRLNGGCQVPIACYAIREGDQLWLRGLVGQPDGTQLLRAEGRAPLADAEALGVRVAEDLLEQGAEAILEAVYGEAGHP

SEQ ID NO: 10995 - protein, 488 aa, Oceanicola granulosus HTCC2516
MAAAANVAVALPSGQLYIDGAWVAGEGEFEVTNPADGSRVGAVAHATSAHALRALDAAEAAQAAWGRLAPRARADLMHRAYRLMLDQEDAFARIMTLESGKPLSESRAEFKLSADFLLWFAEQTAHVHGSYAESSHGGFRVMVHHQPIGPCLLITPWNFPLLMIVRKAGAALAAGCTAVVKTAQETPFTGALFTQVLHDAGFPSGVVNLLHTRTSSEISAPLLKDRRIRKVSFTGSTGVGALLMEQGARNIVNCSMELGGDGPFVVLDDADIDLAVAQAVICKFRNAGQACVAANRIIIDKKVEAEFTEKFIAKVKALTVGNGLDAVDVGPMISAKQRDGLAATLTKLTEAGGRTLAGGNPIAGPGYFFEPTVVRFEGPSEVMCSNELFAPIATIFPVDGAAEAIALANDTQFGLASYVFTRDISRAIGFAERLAFGMVGINRGIMADAAAPFGGTKASGIGREAGQDGIYEFMEPKYMALTVADELS

SEQ ID NO: 10996 - protein, 409 aa, Coxiella burnetii RSA 493
MALIVQKFGGSSVANLEGIQNVARLISEARQEGHSVVAVVSAMYGETDRLIKLAQSISGSNWREYDALISTGEQVSAALLSMALEARNCPAHSYTAAQIRLRTTNEHKKARIVDIDPEILHSDLKEGRVPVVAGFQGVSDAGDITTLGRGGSDLTAVALAAALEADECQIFTDVDGVYTSDPKIVPQARRIPKITFDEMMEMSSLGAKVLQNRCLEFAGKFKVPVRVLSSLRKGPGTLITFEWDSAEQPLVSGIAFDRRQAKLTIQGIPERPGLASYILGPISKANIEVDMIVQNVPTIDANIDFSFTLPRDDYKDAFSIMKQVANELAAGAVLGSDQVAKISLVGVGMRSHAGIASQMFSALGQEGIHIHLITATEVKISAVIDEKYLELGARTLHSAFKLNQEIKFT

SEQ ID NO: 10997 - protein, 56 aa, Glycine max
PRVREAVRAHMAFCNMFKLNPAVRVADGMRQMLRRRSGDMSKPESAKKYESSVTLY

SEQ ID NO: 10998 - protein, 384 aa, Vibrio vulnificus YJ016
MSISVLALKLTGNIAMPISTPQEIIEDIRLGKMVILMDDEDRENEGDLIMAAEHITPEAINFMAKYGRGLICLTMTKERCQRLGLPPMVQDNNAQYTTNFTVSIEAAEGVTTGISAADRARTVQAAVAKEAKAADLVQPGHIFPLAAQDGGVLTRAGHTEAGCDLARLAGFEPASVIVEILNDDGTMARRPDLEVFAEQHGLKLGTIADLIEYRNNTETTIERVAECKLPTEFGEFDLVTYRDTIDNQIHFALRKGTVGDQTPLVRVHLQDTFTDLLRSDRNAERSWTLDKAMKRIGQEGGVLVILGNEESPELLIHRVKMFEAQDKEEAPKLAKKQGTSRRVGVGSQILADLGVHDMRLLSSSNKKYHALGGFGLNVIEYVCE

SEQ ID NO: 10999 - protein, 181 aa, Brassica napus
MAYSMLSSAAVVTSPAQATMVAPFTGLKSSSAFPVTRKANNDITSIVSNGGRVNSMQVWPPVGKKKFETLSYLPDLTEVELGKEVDYLLRNKWIPCVEFELEHGFVYREHGSTPGYYDGRYWTMWKLPLFGCTDSAQVLKEVQECKTEYPNAFIRIIGFDNNRQVQCISFIAYKPPSFTGA

SEQ ID NO: 11000 - protein, 423 aa, Streptomyces ambofaciens
MKRVVITGIGVVAPGGVGTKSLWDLLTIGRTATRPITLFDASAYRSRIAAEVDFDPAAHGFASADTERLDRITQFALVAAREAIADSGIGESVERAPLRCAVSLGSAIGCTTALATQYAILSDCGNTWDLDHTEAADFLYDYFVPSSLAAALARDCGAQGPVALVSSGCTSGLDAIGHGADLIREGSADMAVVGGAEAPIAPITMASFDRLRLTSSRNDDPATASRPFDRTRDGFVLGEGAAVLVLEEQEHARRRGAQPYAELSGLAAHSSAHHMTGLRPGAQEMAAAIRAALDQARLNPADIDYISAHGAGTRHNDRHETHAFKAGLGHHAHQVPVSSIKSMIGHALGAAGALDLTAGALAIRHGIVPPTANLHQPDPTCDLDYTPLFAREQRTSTVLSVASGFGGFHTAAVLTRPRLQEAA

SEQ ID NO: 11001 - protein, 421 aa, Haemophilus influenzae
MLYPEYPEYDNFNESGALIKVVGVGGGGGNAVNHMVMNMVKQEMGGTFVGESSLTSEEHGRIVFYAVNTDAQALRKSQVQQTVQIGGETTKGLGAGANPNIGRKAAEDDQDEIRKMLEGADMVFIAAGMGGGTGTGAAPVVAKIAKELGILTVAVVTKPFTFEGKKRMQFAELGIKDLSQYVDSMIIIPNQQIQKVLPKNAKLIDAFAAANDVLRNSVMGISDMITSPGLINVDFADVRTVMSVQGQAMIGFGSAVGEPGAGRAEEAARLAVRNDLLEKIDLSNAQGILVNITAGMDLVFEEFNIIGETIGSFASEEATVVVGTSLVPEMSDEIRVTIVATGLGEIAGNEPIQVVRQGLSTQNIEGEGRVNIVPELHRRESVEVSRTASEEYQRPLDKPITDRLEAFKKNNFFNPAQREEN

SEQ ID NO: 11002 - protein, 170 aa, Micrococcus luteus
NTDAQALLMSDADVKLDVGRELTRGLGAGANPDVGRQAAEDHEEEIQEVLKGADMVFVTAGEGGGTGTGGAPVVARIARSLGALTIGVVTRPFTFEGRRRSNQAENGIETLRDEVDTLIVIPNDRLLSISDRNVSMLDAFKSADQVLLSGVSGITDLITTPGLINLDFAD

SEQ ID NO: 11003 - protein, 443 aa, Shewanella sp. ANA-3
MKRTLSALVLAMGLFNPLSQAQATTAEDIKSFTLANGMKIMVLEDSSIPNANMYLFWKVGSRNEVPGITGISHFFEHMMFNGSKKYGPKMFDRTMEAAGGANNAYTTEDMTVYTDWFPANALETMFDLEADRIANLDINPDMVESERGVVQSERSTGLENSNWNTLEGEVKGVAFLAHPYSWSVIGHESDIAAWTLEDLVQYHKTYYAPNNAVVVIAGDVKLAQVKALADKYFAPIPAQTPPKAVRTVEPLQKGERRTFVQKASVSTPNVMLAYHVPAATHADYYALDLLSSILSQGNSSRLYQALVDKQVALEAETYMPMSVDPNLFYVMGVATPEVNANTLERALIEQINSIVTNGVTQQELDKVKNIKLMDFYRAMETINGKANTIGTYEMYFGSYDKLFYAPEAYNKVTPADIQRVAQTYLRKSNRTVAVLAANEESDQ

SEQ ID NO: 11004 - protein, 165 aa, Burkholderia mallei ATCC 23344
MMFATTDLCDAHEDRLAAGTLRVLEPVFRPFGGVRRFAGPAATLKLFEDNSLVRTALEQDGAGRVLVVDGGGSLRCALVGGNLGKLAEKNGWAGIVVNGCVRDSDELAECRVGVLALAAHPRKSDKRGAGVSDAPVDVRGTRIVPGDWIYADADGVLVSDDALLE

SEQ ID NO: 11005 - protein, 493 aa, Methanosarcina barkeri str. fusaro
MVQEYKLFIGGEFKDSSTGETFEDINPATLENLATIQVAGAEDVDMAVEAAEAGFRLWNEVPAAKRAEVLFRAARILQERKEELSVLMTKEMGKVLPETRGDVQEAIDITNYAAGEGRRMLGETTTSELKEKFCMTILRPIGVVGLITPWNFPIAIPAWKVMPALVAGNAIVFKPASDTPLLAFKLIEVLSEAGLPPGVINLVTGPGGTVGKAVVQHPRIKAISFTGSLDTGKWIMEECSKTMKRVSLELGGKNPVIVMDDADLELALEGVLWGAFGTTGQRCTATSRLILHEKIKDEFIKRLLAKAKALSIGGGLLPETDIGPVINKAQLEKIERYVKIGKEEGATLLYGGNRIDPGLPGYFFEPTIFTDVRPDMRIAQEEIFGPVLGIFTVSDLEEAITLANSTKYGLSSAIYTGNIGNAFRAIEKVEAGITYVNAPTIGAEVHLPFGGVKGTGNGFREAGTEAVKEFSEVKAVYIDYSGMLQKAQIDSAE

SEQ ID NO: 11006 - protein, 466 aa, Lycopersicon esculentum
MAAHSSTLTISILLMLIFSTLSSASDMSIISYDETHIHRRTDDEVSALYESWLIEHGKSYNALGEKDKRFQIFKDNLRYIDEQNSVPNQSYKLGLTKFADLTNEEYRSIYLGTKSSGDRKKLSKNKSDRYLPKVGDSLPESIDWREKGVLVGVKDQGSCGSCWAFSAVAAMESINAIVTGNLISLSEQELVDCDRSYNEGCDGGLMDYAFEFVIKNGGIDTEEDYPYKERNGVCDQYRKNAKVVKIDSYEDVPVNNEKALQKAVAHQPVSIALEAGGRDFQHYKSGIFTGKCGTAVDHGVVIAGYGTENGMDYWIVRNSWGANWGENGYLRVQRNVASSSGLCGLAIEPSYPVKTGPNPPKPAPSPPSPVKPPTECDEYSQCAVGTTCCCILQFRRSCFSWGCCPLEGATCCEDHYSCCPHDYPICNVRQGTCSMSKGNPLGVKAMKRILAQPIGAFGNGGKKSSS

SEQ ID NO: 11007 - protein, 473 aa, Mesoplasma florum L1
MKQLEKITPRDVDFSQWYTDTVINAKLASYGPVKGTIIFRPYGYAIWELIQKYLDAKFKELEVQNVYFPLLIPQSLFQKEKDHIEGFSPEIATVTRVGDTPLPEPLFIRPTSEVLMANFFKNEVKSYRDLPLIFNQWTNVMRWEKTTRPFLRTSEFLWQEGHTVHSERKEASDLTLKILDTYTEFAQNALLLPVIPGKKTEKEKFAGADSTYTIESLMHDGQALQCGTSHYFADNFSKPYEIKFQNKEGKLEHAYSTSWGVSTRLIGAIIMTHSDDNGLVLPSMVSPVQVRLIQIKETDEVIKVTEDIKEALKNKYRVDIDKTDKSFGFKISEAEIKGIPLRIEIGPRDLENNQVTISRRDTREKIQVNVNEVTNIVDQMIKEYDANLYAKALKNREERTSRANSIEEYKNILAQNQGFVLVPFCGEIECEDDVKKQTSTNSRCIPFDQDNKTEKCFNCNKDTTLKVYFARAY

SEQ ID NO: 11008 - protein, 849 aa, Gibberella zeae PH-1
MAMLASKAAFPAGMGSSSHTPVASQPAMPLPRRTPMMPSSGAYGSPTESEFTEHDPAESVKNWDEDQVCEYLRTVKCGEYEKIFRKNHINGENLLEMDKDVLKEMGVEKVGDRVRLFLSIKKLRTRAYANEKKRNRDSFGGLDIQITAPNDSPRLHSSRGVPASSSKRYSRQLDLYGALDNGKTSSRPNSPLPGTDVRNLRARGKTYASIPVNAQGQRIVTTNPDLPANRLVTTHTRNNSSMDGSLMAALPQGQEVIRVISTGGVTKVVKISGCNTCEEVMRVTLRKFALREDHERNYCFWVLAGIDPDPGQCRRLGDTELWRIIKDQRRPERNRLILRRVPAGEPGEAELHRAAAIAMEEEQQKHARALETVDKRRSLRPFGGLRPPSELIASDLTSYFPDHTREDIDRTARLSMRRSTRMSKVNSRLSVASNLSFASSIQDAPPIPTIADSWLNANTQLAKVRTRDSHIRVPQAAYNRDSVTSSVLDTLQEESSLEPDRKSYVSFTESGSDSAPVSVTDPEGNTTATSYYDGDTSTGSGSFQEIRQALTNDGDDVDEELHSFLAGESWGDDKWMKGALIGQGSFGCVYLALHAVTGELLAVKQVETPAPGANSQGDNRKKGMIDALKREISLLRDLRHPNIVQYLGCSSTADYLNIFLEYVPGGSVQTMLNSYGALPEPLVRSFVRQILTGLSYLHNQDIIHRDIKGANILVDNKGTIKISDFGISKKLEATNILNGANNSKHRPSLQGSVFWMAPEVVKQTSYTRKADIWSLGCLVVEMMTGSHPFPDCSQLQAIFKIGGGKAAPTIPEHASEAAKEFLAQTFEIDHNLRPSADQLILSPFLIPIT

SEQ ID NO: 11009 - protein, 317 aa, Synechococcus sp. WH 5701
MAGTTLRIASRRSQLAMVQTHWVRDELTRAHPDLEISIEAMATQGDKILDVALAKIGDKGLFTKELEAQMLVDRADIAVHSLKDLPTNLPDGLMLGCITEREDPADALVLHERHRGCSLETLPEGSVVGTSSLRRLAQLRHHFPHFQFKDVRGNVITRLEKLDSGDYDCLILAAAGLGRLGLGHRIDALIDPSISLHAVGQGALGIECRHGDSAVLEQIKVLEHLPTARRCLAERAFLRQLEGGCQVPIGVNSRFEGEELVLTGMVASLDGLRLIRDEARGPQQDPEAVGTSLAQLLRSQGAGEILEEIFAEVRPEA

SEQ ID NO: 11010 - protein, 400 aa, Shewanella sp. ANA-3
MRQAESQLKVSLALPLLTMRVAMFELIHETATGAMPKLTVFGVGGCGCNTINQLSQVNLPSSVELISVNTDAQAMAATSSHYRIQIGPQTTKGLGAGAKPDVGCAAAIESAQALTEQMQHSDIVFLTAGLGGGTGTGALPQVAKLARELTKPVIAVVTMPFSFEGQHRKANAEAGLQELLESANAVIVLPNDKLAEVLGAKVTLLNAFKESNKILQDVLLGLANTISQAGLINIDLNDFISVISRQGRAAMGVSCIQGDEDLISAVKRAMQHPLLDNIELNQAQAAIVSVVAKDTIELSQYNQIGATVHEQLPRDALVIIGLTIDPDLESELEIMVIATGIGFAQPEIQAPIQAVNDNYINVHNFIKRQAISIADPAPSKFDLENLQIPTYLRQQKPQAH

SEQ ID NO: 11011 - protein, 427 aa, Arabidopsis thaliana
MRTTMSNLPKELVEDIVSRVPLHCLRAMRLTCKNWNALLESQSFKKMHIRKEEEAARELGENRMIVMMDYNVYLMGIIVNENLSIKSLGKLTCLHGSKQVKISQVFHCEGLLLCILKDDDTKIVVLNPYLGQTRWIQTRKYHRTSEWEGRDVYNYALRYETNSGNRSPKILRFIDDFHHHPENPALRYETYDFDTDLWTTLDVSPHWRIISRCGGVSLNGNTYWGAVERNASAYIGHMICFDFTRGGFGPLIPLPFKARGLVFAPLSSDRAEKIAALFRTSKKVVIWITTKIDATNVTWSNFFTIYISNLERNLSCKSFFTIYISNLERNLSCKSFFIDMEKKVAMVFDKEKGKKVAHNIINIIGEAGCVRKLVLKESGDKSCWPLVCSYVPSTVQIKQHNRGKRQKKVIRKGIDIDMRHDKRIKVD

SEQ ID NO: 11012 - protein, 303 aa, Magnetospirillum magnetotacticum MS-1
MVIGVGGAGGNAVNNMIQSKIEGVEFIVANTDAQALGLSLTERRIQLGGRVTQGLGAGSRPDVGRAAAEESLEDIQDLIGDAHMVFITAGMGGGTGSGAAPVIARAAREQGILTIGVVTKPFHFEGKHRMHTADLGIEALQEELDTLIIIPNQNLFRVATERTTFADAFKMADGVLNSGVRSVTDLVVMPGLINLDFADIRIVMSEMGKAIMGTGEAAGEKRAIDAAEAAISNPLLGDTSIKGAKGVLINITGGMDMTLFEVDSAANRIREEVAAEANIIFGSTFDDALAGKMRVSVVATGIA

SEQ ID NO: 11013 - protein, 1430 aa, Cryptococcus neoformans var. neoformans B-3501A
MVPPARAHTHNTTNTKQAQLSSAYHELANELGTDNISVVGNYTLGRVIGQGTYGSVHLATHRLTGTRAAVKKVPKSFTPHLTRELHHHRRLHHPHIVHLHEIIATESHIWLVTELCSGGELFDYLVERGRILEGEARRLFGELTLAVGWLHMHGVVHRDLKLENVLLDGELRIKLGDLGFAREWQKGRLMDTYCGTTGYASPEMLACQKYLGVETDIWSLGIILYTLLCGGLPFDDDDERVMKELIQKGEYEEPDWLSQEARDLIRGMLQHDPSKRLSIREILTHPWFKMTIVDKVYPNGDVPSIPPSPNPTSPTAAGDDFFAESALRQQQQQQSRLTPHVAGRSPLSTHLPTTPRQNSGSSEAENGDSRTERKASNMQRLNSAEFSTTEKELEQLHLCTSRPAATATGSGAISPRSISSPSMRGKTLRTLPEGQVDVDETPAGLPPPLSLIDEHPHLPVALHSRTPSRTKRRSVSSTLSLERRLSHHSSHNSYITFPPEDYLSKLDPSLLPNPDSSSSSTTTPPARSFTTPSETRLLRQLDDLGLDVGQLKHSVETDACDASAGLWWLLRQKQEERGETDEVVRRREKEVVRREEKVAEYAKEERRKAREAERERERIPTSPMGILGTRPGKRDSIEKSSEGLRFKEEQPPSIPTTPSYTSVIDLGPPVLPVDVDVDVERTAVGRDAPREAAGEEMKSWKRVESPQSVAISSQSSLDPAPTLPPPAAAGGGGAAGAKTQKEDGRDQAGLDPVAVATPMSNANSSTGASTVAKPEPNVNASANANTSANPRLKAKSPSMNMLQRATSVLGGVGKKGDDKDKDKNGMNEKREESTNDSLHPKRGGSSSPNKLKKPMPAGMKGLTSTLSRSESESEGLLAGGGGGGGGGDSPAVSASGSKTVTPGSSPRRKGLTPQGTPRGGLRDAGAKDSSGERASGNGNGNAGGGNEKGKGGKKDSLWTTFRHLFYEDRRRRKRESVTPSASSPLLLPPSDIKLPAGAVVLSRGANSRTSQFKRSNVGYAPSTGSRRTSLDGNRPVYSRRSSSVHTTSRRSSVGSLHFQDHQAMISDLSRRASQRSHGSQTPTSDREYLDYPSAAAPISRPGSSHSIRGGVGGGSRRSSFSVRSPSLHPETFSASAGGPTSTRFKSSVPPPASPLLGYRRRPAGGNDSSRVRHIKVIPESQIMRSSSVASSIRSNASSRASSMDRDRDRDRESEYESGRDDVSLRSGKRQKRRSGSQRSLAQQIHRTRSPLALSLENTYGSNSVANVGLGIGGASRIPKKPLRDVFQKKGKRKDGGDDDWVSEDEDGFACGLGQGRGIAKSFSNANANGTVWMNVNAKTNPARSAAAFPTSKMVAQPTAQGGTSRRRERGRRSSLEEERGRPQEGKGKAKGETVAQGLMGIESLSGRSRRNLPDRSTAPGIIEEEEEDEE

SEQ ID NO: 11014 - protein, 122 aa, Triticum aestivum
MAPAGNRGARAVAPAVLVLALALAPRGASAALTCSTVYNELMPCLGYVQSGGAVPRACCSGIKTLVSRARATPDRRAACACLKTVAAAAAGGPYLGRAAGLPGRCGVQPPFKIDPNVNCNAV

SEQ ID NO: 11015 - protein, 413 aa, Pseudomonas fluorescens PfO-1
MALIVQKFGGTSVGTVERIEQVADKVKKFRDAGDDLVVVLSAMSGETNRLIDLAKQISGEDQPVPRELDVIVSTGEQVTIALLAMALIKRGVPAVSYTGNQVRILTDSAHNKARILQIDDQKIRGDLKAGRVVVVAGFQGVDEHGNITTLGRGGSDTTGVALAAALKADECQIYTDVDGVYTTDPRVVSVAQRLDKITFEEMLEMASLGSKVLQIRAVEFAGKYNVPLRVLHSFKEGPGTLITIDEEETMEQPIISGIAFNRDEAKLTIRGVPDTPGVAFKILGPISAANIEVDMIVQNVAHDNTTDFTFTVHRNDYQSAQTVLENTAREIGAREVVGDTKIAKVSIVGVGMRSHAGVASRMFESLAKESINIQMISTSEIKVSVVIEEKYLELAVRALHTAFELDAPARQGE

SEQ ID NO: 11016 - protein, 488 aa, Anaplasma marginale str. St. Maries
MCWESMSVPITVAYGDGVGPEIMEAVLFILKEARADVSIETVDIGHNQYKKEWTSGIAPSAWESISRTRLLLKAPTMTPQGSGHKSLNVALRQRLGLYVNVRPCVSYFPVVGTKHPDLDVVIIRENEEDTYSGVEHKLSEDTHECVKISTRSASEKICAYAFNYARAHNRKKVTCFVKDNIMKMTDGILHASFDKVAKGYPDIEANYYIVDVGMAKIASNPEDFDVVVTTNLYGDIVSDIVSLSSGSIGLTGSANIGDYYAMFEAVHGSAPDIAGKNVANPSGLLNAAVQMLVHIGQLDKAGVIRNAFLKTLEDGVHTADIYSEKTSLRRASTMEFAQAIVGNLGTTPQRLKGLSLGKETPSTGSSGYVRSNPKRVLVGVDVTVHWDKGTDIKELVGSLSGLSSELKLQLVYAKGLELWPKAPYSYTYVDLVSCRFYAEGKEEDGVDGREVGNLLLKMEDAGIDTVKMVKLYLYDGGQGFLLRSSFGS

SEQ ID NO: 11017 - protein, 551 aa, Spinacia oleracea
MQASTFMVKGNLGFEVQNRRVAGLAGLKGLSSIRSNNLSFVNVNDNNYKSNPCKLSCGSLSMGAGFARLGLDHVMKSSPKYRSVKAQAASGGDLEDATPVKYQGKSSASVLPYVGVACLGAILFGYHLGVVNGALDYLSADLAIAGNTVLQGWVVSILLAGATVGSFTGGSLADKFGRTKTFQLDAIPLAIGAYLCATAQNVQIMMIGRLLCGIGIGISSALVPLYISEISPTEIRGALGSVNQLFICIGILAALVAGLPLAGNPLWWRTMFGIATVPSVLLALGMGFCPESPRWLFQQGKIVEAEKAVAALYGKERVPEVINDLRASVQGSSEPEAGWFDLFSSRYRKVVSVGAALFLFQQMAGINAVVYYSTSVFRSAGIASDVAASALVGASNVIGTAVASSLMDKQGRKSLLMTSFSGMAASMLLLSLSFTWKALAPYSGTLAVVGTVLYVLSFSLGAGPVPALLLPEIFASRIRAKAVALSLGMHWASNFVIGLYFLSVVTKFGISKVYLGFASVCVLAVLYIAGNVVETKGRSLEEIELALSPAV

SEQ ID NO: 11018 - protein, 233 aa, Acinetobacter sp. ADP1
MTYSHHAEDHYIHRTGWLRASVLGANDGIISVTSLVMGMAASGASSHTLFIACLAGLISGATSMAAGEYVSVQSQKDIEHADLKFEARELEKNPHLELDELTIIYIRRGLAPELAREVAIQLTEKDALEAHARDEIGILEQTAARPIQAALSSALSFSLGALCPMLAILFSPESSVSTVVLTVGIISLACMGALSSYFAGTSLWKGSLRITVWGIIAMLFSSWIGSFFNVTPL

SEQ ID NO: 11019 - protein, 225 aa, Salmonella enterica subsp. enterica serovar Typhi str. CT18
MKQYLIAPSILSADFARLGEDTAKALAAGADVVHFDVMDNHYVPNLTIGPMVLKSLRQYGITAPIDVHLMVKPVDRIVPDFAAAGASIITFHPEASEHVDRTLQLIKEHGCKAGLVFNPATSLSYLDYVMDKLDVILLMSVNPGFGGQSFIPQTLDKLREVRRRIDASGYDIRLEVDGGVKVNNIGEIAAAGADMFVAGSAIFDKPDYKKVIDEMRSELAKVSHE

SEQ ID NO: 11020 - protein, 261 aa, Salmonella typhimurium LT2
MSESLHLTRNGPILEITLDRPKANAIDAKTSFAMGEAFLNFRDDPELRVAIITGGGEKFFSAGWDLKAAAEGEAPDADFGPGGFAGLTEIFDLDKPVIAAVNGYAFGGGFELALAADFIVCAENASFALPEAKLGIVPDSGGVLRLPKLLPPAIVNEMVMTGRRMSAEEALRWGVVNRVVSQSELMESARELAQQLVNSAPLAIAALKEIYRATSEMPVEEGYRYIRSGVLKHYPSVLHSEDALEGPQAFAEKRDPVWKGR

SEQ ID NO: 11021 - protein, 534 aa, Nicotiana tabacum
FGLQNRRILQGSGDLKRNTLLASRSLRMPERSSCFGVSMDSASMGIELGRARKTVQSVFGSSAKARSHRVRASGGDIEDATPLKVQGQSSGSVLPYVGVACLGAILFGYHLGVVNGALEYLAKDLGIVENTVIQGWIVSSVLAGATVGSFTGGALADKFGRTKTFVLDAIPLAVGAFLCTTAQSVQAMIIGRLLTGIGIGISSAIVPLYISEISPTEIRGTLGTVNQLFICIGILVALVAGLPLSGNPLWWRTMFGIALIPSVLLALGMAFSPESPRWLFQQGRISEAETSIKRLYGKERVAEVMGDLEASAQGSSEPDAGWLDLFSSRYWKVVSIGAALFLFQQFAGINAVVYYSTAVFRSAGISSDVAASALVGAANVFGTMVASSLMDKQGRKSLLLVSFTGMAASMMLLSLSFTWKVLTPYSGTLAVLGTVLYVLSFSLGAGPVPALLLPEIFASRIRAKAVALSLGMHWISNFFIGLYFLSIVTKFGISTVYLGFASVCLLAVMYIVGNVVETKGRSLEDIERELSPAI

SEQ ID NO: 11022 - protein, 376 aa, Oceanicola granulosus HTCC2516
MSETYQTPGPVERDWSDAISPIEEIIEDARNGRMFILVDHEDRENEGDLVIPAQMATPDAINFMATHGRGLICLALPGERIDALGLSLMSTHNSSRHETAFTVSIEAREGVTTGISAHDRAHTVAVAIDASKGAADIATPGHVFPLRARQGGVLVRAGHTEAAVDLARLAGLNASGVICEIMNEDGSMARLPELVAFAQRHGLKVGTIADLIAYRRRHDNLVRQMSERDVTSAFGGQWRMRVYSDTTHGDEHVVLIKGDISGDDPVLVRMHALDPLQDVVGLGPEGTANEFATAMRAVAAEGRGVVVLLRDTSMKLRLSGEASPQTLRQYGLGAQILSSLGLSQITLLTNSPKPRVVGLEAYGLEIVGTRRIEEPR

SEQ ID NO: 11023 - protein, 470 aa, Solanum tuberosum
CRSHRVRAAGEDIEDAAPLKVQGQSSGSVLPYVGVACLGAILFGYHLGVVNGALEYLAKDLGIAENTVIQGWIVSTVLAGAFVGSFTGGVLADKFGRTKTFILDAIPLSVGAFLCTTAQSVQAMIIGRLLTGIGIGISSAIVPLYISEISPTEIRGTLGTVNQLFICIGILVALVVGLPLSGNPSWWRTMFGLALIPSVLLAIGMAFSPESPRWLYQQGRISEAETSIKRLYGKEKVAEVMGDLEASARGSSEPDAGWLDLFSSRYRKVVSIGAAMFLLQQLAGINAVVYYSTAVFRSAGITSDVAASALVGAANVFGTTVASSLMDKQGRKSLLLISYTGMAASMMLLSLSFTWKVLTPYSGTLAVLGTVLYVLSFSLGAGPVPALLLPEIFASRIRAKAVALSLGVHWIMNFFIGLYFLSIVTKFGISTVYMGFALSCLVAVVYITGNVVETKGRSLEEIERELSPAI

SEQ ID NO: 11024 - protein, 246 aa, Helianthus praecox
ANYGGDKQYGRETRQTGDYDNPIHSTGGQYEQDVRQTDEYGNPVRRTDEYGNPVHSTTGGTMGDYGSTGLGRGTAGIGTGGYGTTGHQGLGTGVGHTTGGIGTDYISGGRSTGQTGYQGLGTESEFGGTTGTFQNQPSATPIGGTGLGGGTGAGFGGTGTGTGTGILHRSGSSSSSSSEDDGQGGRRKKKGVMQKIKEKLPGGHSQEGQHQSQTTTTTTAGGAGYGETHEKKGMMEKIKEKLPGHH

SEQ ID NO: 11025 - protein, 290 aa, Haemophilus somnus 129PT
MAILINKNTKVICQGFTGKQGTFHCEQALAYGTQLVGGVSPGKSGSLHLGLPVFNTVREVVEKTGATATMIYVPAPFCKDAILEAIDGGIKFIVCITEGIPTLDMLEVKKKLQQSDVVMIGPNCPGVITPEECKMGIMPGNIHKKGRIGIVSRSGTLTYEAVKQTTDEGFGQSTCVGIGGDPIPGSSFIDILKLFQADPETDAIVMIGEIGGSAEEEAADFIHKHVTKPVVAYIAGVTAPKGKRMGHAGAIISGGKGTAEEKIVALEKAGVKTVRSLADIGKVLRTLLTP

SEQ ID NO: 11026 - protein, 649 aa, Pseudomonas fluorescens Pf-5
MSELIRVPDIGSGEGEVIELFVKVGDRIEADQSILTLESDKASMEVPAPKAGVIKSLKVKLGDRLKEGDELLELEVEGAAAAAPAAAPAAKAEAKPAAAPAAASAPAAAPAAASVQQVHVPDIGSSGKAQIIEIQVKVGDKVEADQSLITLESDKASMEIPSPAAGVVKAISVKLNDEVGTGDLILDLEVAGAAAPAAAPAQAAAPAAAAAPAPAAAPAAPVADSVQDIHVPDIGSAGKAKIIEVLVKAGDSVEADQSLITLESDKASMEIPSPAAGVVESVSIKLDDEVGTGDLILKLKVKGAAPAAAPAPAAAPSAPAPAAAAAPAAAAPAAAPAAAPAKPGAKVHAGPAVRQLAREFGVELSAVGASGPHGRILKEDVQVYVKAMMQKAKEAPAAGGATGGAGIPPIPVVDFSRFGEIEEVPMTRLMQAGAANLHRSWLNVPHVTQFDSADITELEAFRVAQKAVAEKAGVKLTILPLLLKSCAHLLKELPDFNSSLAPSGKAIIRKKYVNIGFAVDTPDGLLVPVIKNVDQKSLLQLAAEAASLAEKARTKKLSADEMQGACFTISSLGHIGGTGFTPIVNAPEVAILGVSKATIQPVWDGKAFQPKLMLPLSLSYDHRVINGAAAARFTKRLSDLLADIRTILL

SEQ ID NO: 11027 - protein, 363 aa, delta proteobacterium MLMS-1
MQGLIDSTLREGLQTVGLDLSQERQVELAGELAAMGIEELEVGPLRPDDDEVGQLLNRCRHQAGVARLAIWCRCRAADIERALAWQPEVLALSIPVSRLQMQVKLQRDEAAVKELVTAALRRARGRVGYLSLGLEDATRAEPRFLAEMVRLAKREGAHRIRLADTVGIATPAEISELVRLVRDCGGRRLAIGVHTHNDFGMAGANAIAALAAGADWADVTLLGLGERAGLARLEEVAAYLALRRQRPYQLTGLPQLCARLAGFCGQPIASRQPVVGSDIFACETGLHLAALQQDPATYEPFEPALVGNRRQLLYGTKTGRQALAGLSGDRPAEPPVGRLRRLARQLGRPLNEEELAVFLQAAA

SEQ ID NO: 11028 - protein, 477 aa, Acinetobacter sp. ADP1
MNQLIWFRNDLRLNDHAALWHATQAGSTIAFVALSPLQWQQHDDAIIKIDFYMRQLTQLKQELNTINIPLIVQIIPLWKDIATEIISISDRYHIQDVYANIETGINEIERDHAVQEALSKIGKNLILFHDKTLFPLGSIRNKSQAPYQVFTPFKKTCYERLNIDIPKCFPYPHKQKQQPEIAKKEAAIPSLKQLGYSQIDQHIQNEWPIGETFALNLLEDFTQDKINRYHESRDYPAQDGTSHISAYLTIGILSIRQCIQAIFQKQHGQFFLNNKGQEIWLNELLWREFYQQLLFDFPKLSRHQPFQDHTKNIPWNENDEHFEAWIQGKTGIPIVDAGMRQLKATGWMHNRVRMICAMFLSKNLLIDWRKGEKWFMQHLIDGDLAANDGGWQWSASTGTDASPYFRIFNPVTQSQKFDPEGVFLKKWIPELKHLDSKHIHDPYAYQHKTELNYPKPIIDLKATRKNAIEVFKKSSSL

SEQ ID NO: 11029 - protein, 407 aa, Streptomyces griseus
MAAPQNYLAVIKVIGVGGGGVNAINRMIEVGLKGVEFIAINTDAQALLMSDADVKLDVGRELTRGLGAGANPAVGRKAAEDHREEIEEVLKGADMVFVTAGEGGGTGTGRAPVVANIARSLGALTIGVVTRPFTFEGRRRANQAEDGIAELREEVDTLIVIPNDRLLSISDRQVSVLDAFKSADQVLLSGVQGITDLITTPGLINLDFADVKSVMSEAGSALMGIGSARGDDRAVAAAEMAISSPLLEASIDGARGVLLSISGGSDLGLFEINEAAQLVSEAAHPEANIIFGAVIDDALGDEVRVTVIAAGFDGGQPPARRENVLGANSNKREEPAAPARSSAESTRPTGGLGSVPPREESPAPAEPAPATASGESSLGPVSPPHVPPARPYQDTQAEELDVPDFLK

SEQ ID NO: 11030 - protein, 407 aa, Haemophilus somnus 129PT
MSNFDIITPDLPESVADATVVTWHKNVGDAVKCDEVLVEIETDKIVLEIPALSDGVLETILQPEGSTVVSKQLLGKVSASAGIGEVTKSTVQNVEKTPADRHSANLNTDASSDVLSPAVRRLLAEHELNADEIKGTGVGGRITREDIALVVKQKAQQTETAQASQSIATGLKIDHRNEKRVPMTRLRKRIAERLLEAKNTTAMLTTFNEVDMQPIMNLRKRYAEKFEKQHGARLGFMSFYIKAVVEALKRYPEINASIDGDDIVYHNYFDISIAVSTPRGLVTPVVRNCDKLSMADIEKEIKLLAEKGRDGKLTVEDLTGGNFTITNGGVFGSLMSTPIINPPQSAILGMHAIKDRPVAVNGEVVIRPMMYLALSYDHRLIDGRESVGFLVTVKDLLEDPTRLLLEI

SEQ ID NO: 11031 - protein, 218 aa, Actinidia chinensis
LPSYVDWRSAGAVVDIKSQGECGGCWAFSAIATVEGINKIVTGVLISLSEQELIDCGRTQNTRGCNGGYITDGFQFIINNGGINTEENYPYTAQDGECNVDLQNEKYVTIDTYENVPYNNEWALQTAVTYQPVSVALDAAGDAFKQYSSGIFTGPCGTAIDHAVTIVGYGTEGGIDYWIVKNSWDTTWGEEGYMRILRNVGGAGTCGIATMPSYPVKY

SEQ ID NO: 11032 - protein, 442 aa, Ashbya gossypii ATCC 10895
MSQGNEFHQVTEATTALNNFQQNPYGPNPADYLSNVGSFQLIDSTLREGEQFANAFFSTEKKIEIARALDDFGVDYIELTSPVASEQSLRDCQAICKLGLKAKILTHIRCHMDDAKVAVGTGVDGVDVVIGTSKFLRQYSHGKDMNYIAKSAIEVIEYVKSKGIEIRFSSEDSFRSDLVDLLNIYKTVDKIGVNRVGIADTVGCANPRQVYELVRTLKSVVSCDVECHFHNDTGCAIANAYTALDGGAKLVDVSVLDIGERNEITPLGGLMARMIVAAPDYVKSKYKLHKIRDIENLVAEAVEVNVPFNNPITGFCAFTHKAGIHAKAILANPSTYEILNPNDFGMTRYIHFANRLTGWNAIKSRVDQLNLHLTDDQVKEVTAKIKQFGTSRPLNIDDVDSIIKAFHAQIATPRVTARPANREEEINGFDLEAPPQKKTKIL

SEQ ID NO: 11033 - protein, 488 aa, Listeria monocytogenes str. 4b H7858
MNLEETMPLVFERSIPGRIGFSLPESDVPETKASDYFEQAYIRSVPADLPELSELEIMRHYTNLSNHNFGVDSGFYPLGSCTMKYNPKINEKVARFPGFANIHPNQPESSVQGALELLYDLQTSLVEITGMDEVTLQPAAGAHGEWTGLMLIRAFHEKNGDTKRTKVIIPDSAHGTNPASAAVAGFDVVTVKSNEKGLVDVADLKKVVGEDTAALMLTNPNTLGLFEKDIVEMAEIVHEAGGKLYYDGANLNAIMAKVRPGDMGFDVVHLNLHKTFTGPHGGGGPGSGPIGVKKELIPFLPTPVLTKKEEGYTFDYNYPDSIGRVKPYYGNFGINVRAYTYIRTMGPDGLKLVTEYAVLNANYMMRKLQEAYDLPFDQVCKHEFVLSGNRQKKLGVRTVDIAKRLLDHNFHPPTVYFPLIVGEAIMIEPTETESKETLDSFIDTMLKIAKEAEENPEIVQEAPHSTYVKRLDETRAARKPILRYQKEV

SEQ ID NO: 11034 - protein, 675 aa, Arabidopsis thaliana
MASSLLRNPNLYSSTTITTTSFLPTFSSKPTPISSSFRFQPSHHRSISLRSQTLRLSCSISDPSPLPPHTPRRPRPEYIPNRISDPNYVRVFDTTLRDGEQSPGATLTSKEKLDIARQLAKLGVDIIEAGFPAASKDDFEAVKTIAETVGNTVDENGYVPVICGLSRCNKKDIERAWDAVKYAKRPRIHTFIATSDIHLEYKLKKTKAEVIEIARSMVRFARSLGCEDVEFSPEDAGRSEREYLYEILGEVIKAGATTLNIPDTVGITLPSEFGQLITDLKANTPGIENVVISTHCQNDLGLSTANTLSGAHAGARQMEVTINGIGERAGNASLEEVVMAIKCRGDHVLGGLFTGIDTRHIVMTSKMVEEYTGMQTQPHKAIVGANAFAHESGIHQDGMLKHKGTYEIICPEEIGLERSNDAGIVLGKLSGRHALKDRLTEVHSNLTHTNTCIAIFVGDTNVLLSFVHFQLGYQLDDEQLSTIFWRFKTVAEQKKRVTDADIIALVSDEVFQPEAVWKLLDIQITCGTLGLSTATVKLADADGKEHVACSIGTGPVDSAYKAVDLIVKVLFIPLRLSSTNNSPEPATLLEYSMNAVTEGIDAIATTRVLIRGSNKYSSTNAITGEEVQRTFSGTGAGMDIVVSSVKAYVGALNKMMDFKENSATKIPSQKNRVAA

SEQ ID NO: 11035 - protein, 532 aa, Magnaporthe grisea 70-15
MSNFSFQLNSIALLITLTALLLIYKLLNSFVIRPLHNHLAARRLNCGSLPTEPSKWPFGIDTVLRGLQADRDQQMPDYVASRFAAMGRYTWRISVLGTSNIITAEPRNVQALLATQFDDFSMGDARTTNLRILLGRSIFAVDGAAWHGARETMRPLFARDNVSNVELLEGNFQKLLRCIKQELHKDAEGRLWTAPTSLAALLPSFTLDSASEAFLGSSAGALDARLDGSAQPHLLWALERMAPLLRVRFALRGLYFLYGTRELRRCADAMHAFVDAAMTRADDALKQDHDGQHLGGKRFEFLQKLRARCADRAEVREQVLGLLAAGTDTTAALVGWVFYSLIRHPRVFARLREAVLEDFGATGRQVTFERLKSCRYLQQVLSETLRRHSVVPLNSRRARRDTTLPTGGGADGTQRVFVPAGTEVNFSTHVLHRRGDLWGRDADDFRPERWAERRPGVFHYVPFNGGPRICIGQQFALTEAGFVVVRMLQEFDAVEGLHVDPERDWHNFGITCSPGSPEDRHAGVTCRLRLAS

SEQ ID NO: 11036 - protein, 453 aa, Bacillus licheniformis ATCC 14580
MKVVKFGGSSLASGAQLEKVFQIVTSDPERRAVVVSAPGKRHPEDTKVTDLLIECAQQYLLSKEATGLVEAIVGRYADIALELGLADDVINRIRADLLQLLEGDKTNPERFIDAIKASGEDNNAKLVAAYFRHRGVEAHYVSPKDAGLFVTSEPGNAQVLPESYDNLFQLRQQKGIIIFPGFFGFSQEGEVMTFSRSGSDITGSILANGLKAELYENFTDVDAVYSVNPAIVSNPKEIRELTYREMRELSYAGFSVFHDEALIPAFRARIPVQIKNTNNPDAEGTRVVATRDNTNGPVVGIAGDSGFCSIYISKYLMNREIGFGRRVLQILEDEGLTYEHIPSGIDDITIILRQNQMDQAAEKRMIKRIKEELDADEVAIEHNIALIMVVGEAMRHNVGTTARASKALSEAGVNIEMINQGSSEVSMMFGVKEAQEKQAVRALYQEFFAKVLV

SEQ ID NO: 11037 - protein, 354 aa, Deinococcus radiodurans R1
MTAPTPTAPGLTPAPQTQPFAAEIIANVARVLVGKEDVTRLALAAILAGGHVLLEDAPGTGKTVLARALAASLGLDFRRVQFTPDLLPSDVTGVSVFRPATGTFEFVPGPIFTGILLADEINRATPKTQSALLEAMGEGQVSESGVTHRLPQPFVVIATQNPVEHEGTYRLPEAQLDRFLLRLSVGYPSLEQEVEMLARLQERHPLQDLRAVAAPADLLAAQAQVQQVTVSSDVRRYLAALAARSRQHPQVTLGGGPRASLALQGVAQALAWTQGRTFVTPDDVQQAAPGVLAHRLSLGIEARMQGLSAADVVREVLAAEPVPVEKGPGERDMGERGTGERGPSERNTAEVRGA

SEQ ID NO: 11038 - protein, 142 aa, Campylobacter coli RM2228
MTQEQIQIIKDCVPILQKNGEDLTKEFYKIMFNDYPEVKPMFNMEKQASGEQPKALAMAILMAAKNIENLENMRSFVDKVAITHTKLNVKEEHYPIVGACLLKAIKVVLNADETTLKAWEEAYKAIAQFYIDIEKEIYAKAK

SEQ ID NO: 11039 - protein, 1005 aa, Prochlorococcus marinus str. MIT 9211
MSKSELGNTPLEQSSDLHSSFRNNQASTTKNSGSLLQQRLALVEDLWETVLCSECPSDQINRVLRLKKLSNPNNFAGEEEQKNPFNEIVLLIEEMDLAESIAAARAFSLYFQLVNILEQRIEEDTYLETIGRIEEDASNQFDPFAPPLASQTAPATFSQLFERLKRLNVPPGQLEALMQEIDIRLVFTAHPTEIVRHTVRHKQRRVANLLQQFHSEAAISFSQKESLRQQLEEEIRLWWRTDELHQFKPTVLDEVDYALHYFQQVLFDAMPQLRRRINAALVKSYPDVEVPRESFCTFGSWVGSDRDGNPSVTPEITWRAACYQRQLMLERYINSVQDLRDQLSISMQWSQVGSQLLESLEMDRVQFPEVYEERAARYRLEPYRLKISYILQRLKLTHQRNQELAAAGWKIVPEAMNSLITSGKPFEDLYYCSIAEFRSDLELIRNSLVATDLSCESLDTLLTQVHIFGFSLASLDIRQESNRHSDAIDEVTRFIDLPVIYSEMDEKEKVQWLMQELETRRPLIPSSVDWSPSTQETISVFQMLHRLQEEFGSRICRSYVISMSHSVSDLLEVLLLAKEAGLVDISSGSADLLVVPLFETVEDLQRAPSVMEELFSSSFYLNLLPRVGEKLQPLQELMLGYSDSNKDSGFLSSNWEIHQAQIALQNLASSHGVALRLFHGRGGSVGRGGGPAYQAILAQPSGTLKGRIKITEQGEVLASKYSLPELAMYNLETVTTAVLQNSLVTNQLDATPSWNELMTRLAARSRRHYRSLVHDNPDLVPFFQEVTPIEEISKLQISSRPTRRKSGSKDLSSLRAIPWVFGWTQSRFLLPSWFGVGHALFIELEEDPAQIELLKMLHQRWPFFRMLISKVEMTLSKVDLEVANHYVTSLGSRQNKEAFNKIFEVISDEYHLTKRLVLRITGKSKLLSADPALQASVELRNRTIVPLGFLQVALLRRLRDQKRQPPVSEELFNERDLARTYSRSELLRGALLTINGIAAGMRNTG

SEQ ID NO: 11040 - protein, 181 aa, Brassica napus
MASVMLSSATMTSSLAHSTMVAPFIGLKSSAAFPMTCKANTEITSITSNGGRVNCMKVWPPVGKKKFETLSYLPDLTDVEIAKEVDYLIRNKWTPCIEFELEHGFVYREHGNIPGYYDGRYWTMWKLPLFGCTDSTQVLKEVKKCKQEYPNAFIRIIGFDNNRQAQCISFIAYKPPSFTDV

SEQ ID NO: 11041 - protein, 355 aa, Bordetella pertussis Tohama I
MAAKHRIAVIAGDGIGKEVMPEGLRVLEAAATRFGIDFQWDHFDWSCDYYARHGKMMPDDWAAQIGGHEAIFFGAIGWPDAVPDHEALWGSLFRFRRDFDQYINLRPVRLMPGVPTPLANRKPGDIDFFIVRENTEGEYSNSGGRLFAGTEREVVIQESVFTRVGADRVLKFAFELARKRGKHLTAATKSNGISISMPWWDERVAEMAASYPDVRWDKYHIDILCAHFVQHPDWFDVVVASNLFGDILSDLGPACTGTIGIAPSANLNPERKFPSLFEPVHGSAPDIYGKGIANPIGQIWSGALMLDFLGYPQAAAAVVAAIEQVLVDGPRTPDMQGKATTTEVGSAIAALVAAG

SEQ ID NO: 11042 - protein, 319 aa, Vibrio sp. Ex25
MSDVKHCKLLILGSGPAGYTAAVYAARANLNPVLVTGMQQGGQLTTTTEVENWPGDAEGLTGPALMDRMKEHAERFETEIVFDHINEVELSQRPFRLKGESGEYTCDALIISTGASAKYLGLESEEAFKGRGVSACATCDGFFYRNQKVAVVGGGNTAVEEALYLSNIASEVHLIHRRDSFRAEKILVKRLMDKVESGNIVLHTDRTLDEVLGDDMGVTGVRIKDVNTGATEDLEVMGAFIAIGHQPNTQIFEGQVDMKDGYIIVKSGLEGNATQTSIEGVFAAGDVMDHNYRQAITSAGTGCMAALDAERFLDSLGDK

SEQ ID NO: 11043 - protein, 299 aa, Vibrio sp. Ex25
MNEDNSPSSNEDKKEKAEGPSRKSFFERLGQLFQGEPKDRQELVDVIRDSEVNDLIDHDTRDMLEGVMEISEMRVRDIMIPRSQMVTVERTHDLDTLVALITDAQHSRYPVISEDKDHVEGILLAKDLLKYLGSGSNPFDIEEVIRPAVVVPESKRVDRLLKEFREERYHMAIVVDEFGGVSGLVTIEDILEEIVGDIEDEFDESEETDIRKLSKHTFAVRALTTIEEFNETFGTNFSDEEVDTVGGMVMTAFGHLPSRGELVEIEGYNFKVTAADNRRVIQLQVTIPDEETLVEATQE

SEQ ID NO: 11044 - protein, 472 aa, Arabidopsis thaliana
PPQTTMATTVTLKSFTGLRQSSTEQTNFVSHVPSSLSLPQRRTSLRVTAARATPKLSNRKLRVAVIGGGPAGGAAAETLAQGGIETILIERKMDNCKPCGGAIPLCMVGEFNLPLDIIDRRVTKMKMISPSNIAVDIGRTLKEHEYIGMVRREVLDAYLRERAEKSGATVINGLFLKMDHPENWDSPYTLHYTEYDGKTGATGTKKTMEVDAVIGADGANSRVAKSIDAGDYDYAIAFQERIRIPDEKMTYYEDLAEMYVGDDVSPDFYGWVFPKCDHVAVGTGTVTHKGDIKKFQLATRNRAKDKILGGKIIRVEAHPIPEHPRPRRLSKRVALVGDAAGYVTKCSGEGIYFAAKSGRMCAEAIVEGSQNGKKMIDEGDLRKYLEKWDKTYLPTYRVLDVLQKVFYRSNPAREAFVEMCNDEYVQKMTFDSYLYKRVAPGSPLEDIKLAVNTIGSLVRANALRREIEKLSV

SEQ ID NO: 11045 - protein, 398 aa, Arabidopsis thaliana
MTMMMSDLPNDLVEEILSRVPITSLGAVRSTCKRWNGLSKDRIVCKGDANQQFTGFTRYVNESTVCSMRLDLNEIQNEDVELVELSINKINKFIELELFQVYYSDGLLLLVTDEVDSKIVVWNPYLGQTRLIQCRDTEHFKYRYALGYDNNRNHKILMYNRKNCEIYDFKSDSWKVLDIIPDLHTNIYVRDMSIKGNTYFFYRGEKIGEGLAGCLLSFDFTRERFVSCLPLPFQIAKFDDNVALSSVREEHLVVLFNNWEESEMEIWVTTKIEPNAVSWSNFLTFTHFRIKFLVTSFFIDQEKKLAVVFGRSLSKQMRCNIAYVIGDNGYLRILDFGVTFIPSNLPVSYAPSLVKITQGQELSVIEEKKRSRLLASLVYSTLFVSFIIFFSFISSVFI

SEQ ID NO: 11046 - protein, 210 aa, Haemophilus somnus 129PT
MFTGWRDVNLTERGIEEAKAAGKKLLEAGYEFDIAFTSVLTRAIKTCNIVLEESNQLWIPQVKHWRLNERHYGALQGLDKKATAEQYGDEQVHIWRRSYDVSPPDLDPQDPNSAHNDRRYALLPKDVVPNAENLKITLERVLPFWEDQIAPALLSGKRVLVTAHGNSLRALAKHIIGISDEEIMAFEIPTGQPLVLKLDEQLNFVEKFYL

SEQ ID NO: 11047 - protein, 259 aa, Nicotiana sylvestris
MAFVNKIGNMLKQIVSRHANLELCASRTSLYQAIRSMSSSKLFVGGLSWGTDETSLKEAFSQHGEVIEARVIMDRDTGRSRGFGFVSFTSTEEAASALTALDGQDLHGRQIRVNYATEKLRGSFGGGYGSGGGYGGGDGSFAGAGGYASSNYGGGGNYGSNNSYPTGGGNYGGGVRYGNGEGGNDAGGVRQGSFGGGYGGGNSGNYNADFTQGMVNNGVEEQLSADQGTESVNSDFTPGAEGSYRDDDDEPNGYANSRG

SEQ ID NO: 11048 - protein, 374 aa, Malus x domestica
MAVPVSAIGFEGYEKRLEVSFFEPGLFADPKGMGLRSLSKAQIDEILTPAECTIVSSLSNDDLDSYVLSESSLFVYPYKVIIKTCGTTKLLRSIPAILKLADSLSLAVKSVRYSRGSFIFPGAHPSPHRSFSEEVAVLDGHFGKLGLASKAYVMGSPDKTQKWHIYSASAELASLLWGSRQSGPTYTLEMCMTGLDRKRASVFYKSDASSAAGMTVESGIRNILPQSDICDFEFEPCGYSMNSIEGNAVSTIHVTPEDGFSYASFETVGYDFKDVNLTQLLYRVLDCFKPAEFSIALHTTSTAGEDLDAKCPLDLKGYCCGGSSYEGLGLGGAVMYHSFVKDDSGSQSPRSILKCCWSEDEKDEEVEEIGMAKI

SEQ ID NO: 11049 - protein, 148 aa, Aeropyrum pernix K1
MPSSFGCSRMSVNYATLGDLKKGSYIVIDGEPCRIVEMSRAKTGKHGSAKAHVVAICVFSGQKKSLVAPVDTRVQIPVIEKRLGQVLADMGDMVQIMDLETYDTFEVEKPGGNEEEEQLAAKLQPGVTVEYWLIMGKPKIIRIRSSSS

SEQ ID NO: 11050 - protein, 167 aa, Glycine max
LLTRILRHMASELNLNMRSDGYVKVNDLLKLNLKTFANIPLKLHTIDDIREAVRKDNKQRFSLLEENGELLIRANQGHTVKAVETESLLKPILSAEEFPVCVHGTYRKNLESILGSGLKRMKRLHVHFSCGLPTDGEVISVTINDHSLDLFASLYPFATYLLEGGDL

SEQ ID NO: 11051 - protein, 189 aa, Brassica napus
MGPLDEHEKPLVFEKLFKFLGSNLNKSGANPPPQAPEQKPEAGRYCFRLRKSSVYYVRESLVKRATNIYRKSLVSPGTCIAQYTHAGSFHLRIMSPNLLAANAKREVWLKPTSEMSFLYGNHVLKGGLGRITDSIVPGDGVVVFSMSDVPLGFGIAAKSTQDCRKLDPNGIVVLHQADIGEYLRDEDEL

SEQ ID NO: 11052 - protein, 246 aa, Helianthus praecox
ANYGGDKQYGRETRQTGDYENPIHSTGGQYEQDVRQTDEYGNPVRRTDEYGNPVHSTTGGTMGDYGSTGLGRGTGGIGTGGYGTTGHQGLGTGIGHTTGGTGTDYTSGGRSTGQTGYQGLGTESEFGGTTGTFQNQPSATPIGGTGLGGGTGAGFGGTGTGTGTGILHRSGSSSSSSSEDDGQGGRRKKKGVMQKIKEKLPGGHSQEGQYQSQTTTTTTAGGAGYGETHEKKGMMEKIKEKLPGHH

SEQ ID NO: 11053 - protein, 381 aa, Staphylococcus aureus subsp. aureus NCTC 8325
MIRIQDNTIRDGMQQSNVRKSLIIKKEVLKQINKLNINSVEVGMCTTIEDEFNIHQFRDILSPEKELVVLTRLNEKEIKKIVKLKIHNLVVKILLPISDLHIKEKLNFSNKYYIQKIKDCLDILKKDKKGVDICFEDGTRTSREKLKEYMEIISKYQVRTVTFADTVGCSTPLEYGDIFNYFVKKYSNIIFSAHCHNDLGLATANTLAAILNGAKQIETTFLGIGERAGNAPIEEIITILTKKQIESTEFTLPDVYKTSINISKILDFQISENKPIIGENIFKHESGIHQDGTKKNINMYQYLVPSDLGLKNSQVVQFPISNISSKKILHNKFKSIVNTEEIDENISFYKLVNKFSPEVAPEDTVDLLQIIKRRSKDGNFK

SEQ ID NO: 11054 - protein, 847 aa, Salmonella enterica subsp. enterica serovar Typhi str. CT18
MSKVRLAIIGNGMVGHRFIEDLLDKSDASLFDITVFCEEPRKAYDRVHLSSYFSHHTAEELSLVREGFYEKHGVKVLVGERAITINRQEKVIHSSAGRTVYYDKLIMATGSYPWIPPIKGSETQDCFVYRTIEDLNAIEACARRSKRGAVVGGGLLGLEAAGALKNLGVETHVIEFAPMLMAEQLDQMGGEQLRRKIESMGVRVHTSKNTQEIVQQGNEARKTMRFADGSELEVDFIVFSTGIRPRDKLATQCGLAVAQRGGIVINDTCQTSDPDIYAIGECASWNNRVYGLVAPGYKMAQVAVDHILGSENAFEGADLSAKLKLLGVDVGGIGDAHGRTPGARSYVYLDESKEVYKRLIVSEDNKTLLGAVLVGDTSDYGNLLQLVLNAIELPENPDSLILPSHASSGKPAIGVDKLPDSAQICSCFDVTKGDLIAAINKGCHTVAALKAETKAGTGCGGCIPLVTQVLNAELAKQGIEVNNNLCEHFAYSRQELFHLIRVEGIKTFEELLTKHGKGYGCEVCKPTVGSLLASCWNEYILKPQHTPLQDTNDNFLANIQKDGTYSVIPRSAGGEITPEGLVAVGRIAREFNLYTKITGSQRIGLFGAQKDDLPEIWRQLIEAGFETGHAYAKALRMAKTCVGSTWCRYGVGDSVGFGVELENRYKGIRTPHKMKFGVSGCTRECAEAQGKDVGIIATEKGWNLYVCGNGGMKPRHADLLAADLDRDTLIKYLDRFMMFYIRTADKLTRTAPWLDNLEGGIEYLKSVIIDDKLGLNEHLEEEMARLRAAVVCEWTETVNTPAAQVRFKHFINSDKRDPNVQVVPEREQHRPATPYERIPVTLVEENA

SEQ ID NO: 11055 - protein, 618 aa, Nostoc punctiforme PCC 73102
MALIVQKYGGTSVGSVERIQAVAQRVYKTVQAGNSLVVVVSAMGKTTDGLVKLANEISPNPNRREMDMLLSTGEQVTIALLSMALQELGQPAISMTGAQVGIVTEAEHSRARILHIDTTRLCRHINAGKVVVVAGFQGTSSTGEMEITTLGRGGSDTSAVAIAAALRANFCEIYTDVPGILTTDPRLVAEAQLMDDITCDEMLELASLGAKVLHPRAVEIARNYGVPLVVRSSWTDQPGTWVTSAKPQGRSLINLEIARPVDAVEFDTDQAKVALLRVPDKPGVAARLFGEISRQKVDVDLIIQSIHEGNSNDIAFTVTTPILKRAEAVAAAIAPALRNPSNPKSDEAEVMLEHNIAKVSIAGAGMIGRPGVAAKMFATLAEAGVNIQMISTSEVKVSCVVDAAECDHAVLALRTAFEIEAGEQGSRGAGESACIDSPPPLCPSAPLPNCPPVRGVALDLNQARLAIRQLPDRPGMAAKLFGLLAQHNISVDMIIQSQRCRVIDGVPRRDIAFTVSRIDAESAKKMLTQVAAELGWGEVVLDSAIAKVSIVGAGMVGQPGVAAKMFEALAQHQINIQMIATSEIKISCVVAQEQGVKALQAIHAAFGLAGSEKVVVPA

SEQ ID NO: 11056 - protein, 124 aa, Triticum aestivum
  misc_feature (24)..(24): Xaa can be any naturally occurring amino acid
  misc_feature (27)..(27): Xaa can be any naturally occurring amino acid
  misc_feature (47)..(48): Xaa can be any naturally occurring amino acid
  misc_feature (55)..(55): Xaa can be any naturally occurring amino acid
  misc_feature (67)..(67): Xaa can be any naturally occurring amino acid
  misc_feature (102)..(102): Xaa can be any naturally occurring amino acid
  misc_feature (106)..(106): Xaa can be any naturally occurring amino acid
  misc_feature (110)..(110): Xaa can be any naturally occurring amino acid
MARLNSKAVVSAVVLAAVVLMMAXREXATALSCGQVDSKLAPCVSYXXGKGALRXSKECCSGVQGAXNGLARSNPDRKIACKCLKTSANKHQSINMAKSPGXPGNXALSXPFPSTISTNCNNVN

SEQ ID NO: 11057 - protein, 347 aa, Psophocarpus tetragonolobus
GGELFDRIVQKGHYSERQAATLIKTIVEVVEACHSLGVMHRDLKPENFLFDTLHEDAKLKATDFGLSVFYKPGESFCDVVGSPYYVAPEVLRKLYGPESDVWSAGVILYILLSGVPPFWAETEPGIFRQILLGKIDFQSEPWHSISDSAKDLIRRMLDQNPKTRLTAHEVLRHPWIVDDNLAPDKPLDSAVLSRLKQFSAMNKLKKMALRVIAERLSEEEIGGLKELFKMIDTDNSGTITFDELKDGLKRVGSELMESEIKDLMDAADIDKSGTIDYGEFIAATVHLNKLEREENLVSAFSYFDKDGSGYITLDEIQQACKDFGLDDVHIDDMIKEIDQDNDGQIDY

SEQ ID NO: 11058 - protein, 474 aa, Lactobacillus plantarum WCFS1
MDLSHTRLLRKKDINAMLATYHSPLKKELKTFDLTMLGIGAIIGTGIFVLTGTGALTAGPGLMISFVLAAIACLFASLCYAEFAAMVPESGSAYTYAYTTLGEIVAFIIGWDLMLEYLFAVSTVSAGWSGYFQSFLAGFGLKLPAALSAAAGSVPGVTSYFNLPAFTIIILITTLLSLGVKETKRVNNVMVVIKLAVVLLFIFTAVRFIKPANWSPLLPFGFKGVFGAASSVFFAFIGFDAISSSVEETLEPSKTLPRSMLLSLGICTILYVAVSAIMTGVVPFETFAKYIDHPISAVLIYSGQNWMAGIIDLGAILGMTTVMLVCLYGQTRISFSMSRDGLLPHVFSDISAKTGAPLKSTVLFGSIAAIMGGFIPLADLAELVNIGTLTAFTLVSFSILRLRKTQPDLRRPFKTPWVPFVPIMSIICCVFLLINLKPVTWIRFVVWLAIGMVVYFGYSVKHSQLKTDTATDEK

SEQ ID NO: 11059 - protein, 155 aa, Archaeoglobus fulgidus
MPMARVNYAYKPEDETKAAKAMGYEMPISFKHAVEICRAIRGKKIEEARKLLEDVVEMKRAIPFKRHKKKVAHRRGLEKWYAGRYPQKAAKYVLKVLRNLEANAEYKGLDVENLVIVHAQAQKGRVIERYMPRAFGRATPRFQQLTTVELVAEVR

SEQ ID NO: 11060 - protein, 149 aa, Glycine max
MRTEASCRIRHEYSPSPIQPNPNTHPFDSVSMASLKVAFLAAVLCMVVVSAPMAHAAITCGQVTSSLANCIGYLQKGGTPSSGCCNGVKSLNAAAKTTADRQTGCNCLKSAASQISGFNANNAASLPGKCGVSIPYKISTSTNCATIKV

SEQ ID NO: 11061 - protein, 523 aa, Chlorella sorokiniana
CRPPSSPSLSWPPGLRSPALPRAVACARGRSAKRDVAAKRLRSRSPRMDATTGDFTALQKAVKQMATKAGTEGLVHGIKNPELRQLLTEIFMKDPEQQEFMQAVREVAVSLQPVFEKRPELLPIFKQIVEPERVITFRVSWLDDAGNLQVNRGFRVQYSSAIGPYKGGLRFHPSVNLSIMKFLAFEQIFKNSLTTLPMGGGKGGSDFDPKGKSDAEVMRFCQSFMTELQRHISYVQDVPAGDIGVGAREIGYLFGQYKRITKNYTGVLTGKGQEYGGSEIRPEATGYGAVLFVENVLKDKGESLKGKRCLVSGAGNVAQYCAELLLEKGAIVLSLSDSQGYVYEPNGFTREQLQAVQDMKKKNNSARISEYKSDTAVYVGDRRKPWELDCQVDIAFPCATQNEIDEHDAELLIKHGCQYVVEGANMPSTNEAIHKYNKAGIIYCPGKAANAGGVAVSGLEMTQNRMSLNWTREEVRDKLERIMKDIYDSAMGPSREYNVDLAAGANIAGFTKVADAVKAQGAV

SEQ ID NO: 11062 - protein, 109 aa, Escherichia coli
SDKIIHLTDDSFDTDVLKADGAILVDFWAEWCGRPCKMIAPILDEIADEYQGKLTVAKLNIDQNPGTAPKYGIRGIPTLLLFKNGEVAATKVGALSKGQLKEFLDANLA

SEQ ID NO: 11063 - protein, 353 aa, Listeria monocytogenes str. 4b H7858
MSKLTKIQETLGKEKIEAVLVTSEFNRRYVSGFTGTSGVALILPEKAYFVTDFRYTEQAAKQAEGYEIVQHTGPIFDTVEDLLIKNDTKTLHFEADYVTVSEFKQMERVFNRQLIPLTGFFEEMRKVKTASELKAIRTACDIADAAFAHIIQFIKPGMAEIEVSNELEFFMRRAGATSSSFDTIVASGVRSALPHGVASDKKIEVGDFVTMDYGCYYDGYCSDMTRTIAVGEPAEKLKEIYQITLDAQLKVIDSLKPGMTGIEADAIARDYISSFGYGDAFGHSLGHGIGLEIHEGPNLSFKSPQKLEVGHVVTDEPGIYLPGIGGVRIEDDLLITETGNEILIHSPKELIIL

SEQ ID NO: 11064 - protein, 113 aa, Triticum aestivum
  misc_feature (65)..(65): Xaa can be any naturally occurring amino acid
  misc_feature (96)..(96): Xaa can be any naturally occurring amino acid
MARTAATKLVLVALVAAMILAASDAAISCGQVSSALAPCVAYAKGSGTSPSGACCSGVRKLAGLXRSTADKQATCRCLKSVAGGLNPNKAAGIPSXKCGVSVPYTISASVGLL

SEQ ID NO: 11065 - protein, 335 aa, Mycobacterium tuberculosis
MTAPPVHDRAHHPVRDVIVIGSGPAGYTAALYAARAQLAPLVFEGTSFGGALMTTTDVENYPGFRNGITGPELMDEMREQALRFGADLRMEDVESVSLHGPLKSVVTADGQTHRARAVILAMGARARYLQVPGEQELLGRGVSSCATCDGFFFRDQDIAVIGGGDSAMEEATFLTRFARSVTLVHRRDEFRASKIMLDRARNNDKIRFLTNHTVCAVDGDTTVTGLRYRDTNTGAETTLPVTGVFVAIGHEPRSGLVREAIDVDPDGYVLVQGRTTSTSLPGVFAAGDLVDRTYRQAVTAAGSGCAAAIDAERWLAEHAATGEADSTDALIGAQR

SEQ ID NO: 11066 - protein, 1306 aa, Arabidopsis thaliana
MEVCNCIEPQWPADELLMKYQYISDFFIAIAYFSIPLELIYFVKKSAVFPYRWVLVQFGAFIVLCGATHLINLWTFTTHSRTVALVMTTAKVLTAVVSCATALMLVHIIPDLLSVKTRELFLKNKAAELDREMGLIRTQEETGRHVRMLTHEIRSTLDRHTILKTTLVELGRTLALEECALWMPTRTGLELQLSYTLRHQHPVEYTVPIQLPVINQVFGTSRAVKISPNSPVARLRPVSGKYMLGEVVAVRVPLLHLSNFQINDWPELSTKRYALMVLMLPSDSARQWHVHELELVEVVADQVAVALSHAAILEESMRARDLLMEQNVALDLARREAETAIRARNDFLAVMNHEMRTPMHAIIALSSLLQETELTPEQRLMVETILKSSNLLATLMNDVLDLSRLEDGSLQLELGTFNLHTLFREVLNLIKPIAVVKKLPITLNLAPDLPEFVVGDEKRLMQIILNIVGNAVKFSKQGSISVTALVTKSDTRAADFFVVPTGSHFYLRVKVKDSGAGINPQDIPKIFTKFAQTQSLATRSSGGSGLGLAISKRFVNLMEGNIWIESDGLGKGCTAIFDVKLGISERSNESKQSGIPKVPAIPRHSNFTGLKVLVMDENGVSRMVTKGLLVHLGCEVTTVSSNEECLRVVSHEHKVVFMDVCMPGVENYQIALRIHEKFTKQRHQRPLLVALSGNTDKSTKEKCMSFGLDGVLLKPVSLDNIRDVLSDLLEPRVLYEGIDCRSVLDDILKQKGNNKIETLNRIMASALRRLVEQQQWRYLVSQSTRSPKLIHGFFSFSSKTNPNPNKQQQILIDYISKSLQSNDTWETLSTKFSSIDLSDSLIETILLRFKNPETAKQALSFFHWSSHTRNLRHGIKSYALTIHILVKARLLIDARALIESSLLNSPPDSDLVDSLLDTYEISSSTPLVFDLLVQCYAKIRYLELGFDVFKRLCDCGFTLSVITLNTLIHYSSKSKIDDLVWRIYECAIDKRIYPNEITIRIMIQVLCKEGRLKEVVDLLDRICGKRCLPSVIVNTSLVFRVLEEMRIEESMSLLKRLLMKNMVVDTIGYSIVVYAKAKEGDLVSARKVFDEMLQRGFSANSFVYTVFVRVCCEKGDVKEAERLLSEMEESGVSPYDETFNCLIGGFARFGWEEKGLEYCEVMVTRGLMPSCSAFNEMVKSVSKIENVNRANEILTKSIDKGFVPDEHTYSHLIRGFIEGNDIDQALKLFYEMEYRKMSPGFEVFRSLIVGLCTCGKVEAGEKYLKIMKKRLIEPNADIYDALIKAFQKIGDKTNADRVYNEMISVR

SEQ ID NO: 11067 - protein, 407 aa, Rickettsiella grylli
MALIVQKFGGSSVGSIDKIQQVANKIIETRTQGHQLVVVVSAMEGETNRLISLAKILNEEPDSREYDLLLATGEQAATALLAMALLAQGCPARSYNSFHVPIYTDNHHKKARILNIKEEILRDDIKVGRIPIVAGFQGISDSGDMTTLGRGGSDTTAAALAAVLKADECQIYTDVDGIYTADPRFVPQAKRLERIGFIEMTEFARAGAKVVQHRAVELASKYHIPLRVLSSSQEGSGTLIQVNEEESAIEGVKITGVTASHREAKLTLQGLTAEKEAMSLFFSLLKDARIEIDMLTQQQISPNQMDITFTLARADYHQAKQRLQTLVKKKYALSIVGNKRLAKLSVVGMGLHSHPGIIHTLFQALESENIPIILTLSSALRISLMVNDGEVLQGVRILHQIFGLGEK

SEQ ID NO: 11068 - protein, 392 aa, Pseudomonas aeruginosa UCBPP-PA14
MSGHGDAHNPPHQAIIVRPRARGEIIMSSNFLNPVTTQTWANGRHLVRCVKVIQETWDVRTFCFMADQPILFFFKPGQFVTLELEIDGEPVMRSYTISSSPSVPYSFSITIKRVPGGRVSNWLHDNLKEGQELPVHGPVGLFNAIDFPADKVLFLSGGVGITPVMSMARWFFDTNANVDMVFVHSARSPKDIIYHRELEHMASRIDNFSLHIICERHGLGEAWAGYRGYLNLRMLELIAPDFLEREIFCCGPTPYMSAVKHLLQGHGYDMSRYHEEAFGPTPPEVRADVRELAAEAAEAPEVPVADQHQVEFTATGKSIRVSPGETVHAAAAKLGLHIPKACGMGICGTCKVMKTAGEVEMEHNGGITDEDVAEGYILSCCSVPKGDVVIDY

SEQ ID NO: 11069 - protein, 736 aa, Lycopersicon esculentum
MDCNCFDPLLPADELLMKYQYISDFFIAVAYFSIPIELVYFVQKSAVFPYRWVLVQFGAFIVLCGATHLINLWTSTPHTRTVAMVMTTAKFSTAAVSCATAVMLVHIIPDLLSVKTRELFLKNKAAELDREMGLIRTQEETGRYVRMLTHEIRSTLDRHTILKTTLVELGRALQLEECALWMPTRTGVELQLSYTLHHQNPVGFTVPIQLPVINQVFSANCAVKISPNSAVARLRPTRKYIPGEVVAVRVPLLHLSNFQTNDWPELSPKSYALMVLMLPSNSARQWHVHELELVDVVADQVAVALSHAAILEESMRARDLLIEQNVALDLARREAETAVRARNDFLGVMNHEMRTPMHAVVALSSLLQESELIPEQRLMVETILKSSNLLATLINDVLDLSRLEDGSLQLDVGTFNLHALFREVLNLIKPVAAVKKLFVTLSLSSDFPEVAIGDEKRLMQILLNVVGNAVKFSEEGSVSVSAVNAKSESLIDPRAPEFFPVQSENHFYLRVQVKDTGSGINPQDFPKLFCKFAQNQEPATKNSAGTGLGLAICKRFVNLMEGHIWIESEGVGKGSTAIFIVKLGIPGRLNESKLPFTAGLPANHMQMTFQGLKVLVMDDNGFSRMVTKSLLVHLGCDVTTIGSGDECLRILTREHKVLIMDASITGMNCYDVAVSVHEKFGKRLERPLIVALTGNTDQVTKENCLRVGMDGVILKPVSIDKMRSVLSGLLEHGTVL

SEQ ID NO: 11070 - protein, 413 aa, Photobacterium profundum SS9
MSKRRVVVTGMGMLTPVGNSVESSWKALLSGTSGISTIEHFDASLFATQFAGMIKDFNPEEYMTKKDARKMDLFIQYGIAAGVQAFKDSGIEVTEENAHRIGVAIGSGIGGLGLIEAGHQALMEKGPRKISPFFVPSTIVNMIAGHMSIMHGLRGPNIAISTACTTGLHNIGHAARMIAYGDADAMLAGGAEKASTELGMGGFAAAKALSTRNDDPQAASRPWDKDRDGFVLGDGAGVIVVEEYEHAKARGATIYAELVGFGMSGDAYHMTSPSPDGSGGALAMEATLRDAGINADKIGYINAHGTSTPAGDAAETRGIKRAMGTAADDVLVSSTKSMTGHLLGAAGSVEAIISIMSLVDQAVPPTINLDNPDEGCDLDYVAGEARQVKNLEYSLCNSFGFGGTNGSLLFKKI

SEQ ID NO: 11071 - protein, 102 aa, Triticum aestivum
GREPGETTLSDLPAVLAQRKDMCDRMSLSESQIPTALLERLLAAGKKEHPPVCAILGGILGQEVIKSISCKGDPIKNFFYYDAADGKGIMEDIPPTPVEQFA

SEQ ID NO: 11072 - protein, 365 aa, Brassica napus
  misc_feature (26)..(26): Xaa can be any naturally occurring amino acid
  misc_feature (42)..(42): Xaa can be any naturally occurring amino acid
MTMAATFAKRLIGSRSTSTATTSVAXAFCSSTTPITATLFPXDGIGPEIAESVKKVFTTAGVPIDWEEHFVGTEIDPRTQSFLTWESLESVRRNKVGLKGPMATPIGKGHRSLNLTLRKELNLYANVRPCYSLPGYKTRYDDVNLITIRENTEGEYSGLEHQVVRGVVESLKIITRQASLRVAEYAFHYAKTHGRERVSAIHKANIMQKTDGLFLKCCREVAEKYPEITYEEVVIDNCCMMLVKNPALFDVLVMPNLYGDIISDLCAGLVGGLGLTPSCNIGEDGVALAEAVHGSAPDIAGKNLANPTALLLSGVMMLRHLKLNEQAEQIHRAIINTIAEGKYRTADLGGSSTTTDFTKAICDHL

SEQ ID NO: 11073 - protein, 193 aa, Zea mays
  misc_feature (147)..(147): Xaa can be any naturally occurring amino acid
MAATVMASMSPLASATPGARRAFPVRLLQASTLAPRRRALAVRAQSDDAEPKEEVASSSPSPSATPAPKSKAAATASPGLWDALAFSGPAPERINGRLAMVGFVSALAVEASRGGGLLSQAGSGSGLAWFAATAAVLSVASLVPLLXRGDSAEARSGAVMSADAELWNGRFAMLGLVALAFTEYLTGAPFINA

SEQ ID NO: 11074 - protein, 456 aa, Xanthobacter autotrophicus Py2
MAIEVLMPALSPTMEKGNLTKWLKKEGDTVKSGDVLAEIETDKATMEVESIDEGILGRILVPEGAQDVAVNTPIATILADGEDANAAPAPAPKAAESAPAPATAPAPAAPAVIAPQAVAQPDPEVPAGTEFVTQTVREALRDAMAEEMRRDGDVFVMGEEVAEYQGAYKITQGLLQEFGERRVIDTPITEHGFAGVGVGAAMAGLKPIIEFMTFNFAMQAIDHIINSAAKTLYMSGGQMHCSVVFRGPNGAAARVAAQHSQDYTSWYSNVPGLRVIAPYTAADAKGLLKAAIRDPNPVIFLENEILYGHSFEVPKLDDFVLPIGKARIARSGKDVTLVSFSIGMTYALKAADELAKQGIEAEVIDLRTIRPMDVDTIIASVKKTGRCVSVEEGWPQSGVGAEIVAQLMDKAFDYLDAPVLRVTGKDVPMPYAANLEKLALPTVADVIAAVHAVTYR

SEQ ID NO: 11075 - protein, 294 aa, Anaplasma marginale str. St. Maries
MSVLVDKNTRVICQGFTGSNGTFHSEQAIAYGTKVVGGVTPGKGGTTHLGLPVFDTVLQAKVETQANASVIYVPAPYAADAIFEAIEAEIELIVCITEGIPVLDMVQVKRALAGSKSRMIGPNCPGIITPEECKIGIMPGYIHKKGNIGVVSRSGTLTYEAVAQTTAVGLGQSTCIGIGGDPVHGMSFLDCVQLFLEDEDTHGIVIIGEIGGSEEEEAVEFLQSSGTKKPVVGFVAGQTAPPGKRMGHAGAISSGSSGTAKGKIEFMKRAGVAVAETPAVIGKTVLDVMGKRNS

SEQ ID NO: 11076 - protein, 101 aa, Thermotoga maritima
MGSDKIHHHHHHMEVKIEKPTPEKLKELSVEKWPIWEKEVSEFDWYYDTNETCYILEGKVEVTTEDGKKYVIEKGDLVTFPKGLRCRWKVLEPVRKHYNLF

SEQ ID NO: 11077 - protein, 116 aa, Nicotiana benthamiana
GQSQGRKFYGGIRIPVKKGRSQLHVAISNVATEVSPAQEQGQKLAEESQRPVYPFAAIVGQDEMKLCLLLNVIDPKIGGVMIMGDRGTGKSTTVRSLVDLLPEIKVISGDPFNSDP

SEQ ID NO: 11078 - protein, 496 aa, Thermobifida fusca YX
MKACVVGPEWMRKTTLRSSSVTNMSQRPFWLAGSATTGDNELTVTNPYTGQTVATVAVPSPEQVDQAVAAAHGALDATAALPAHVRATALAHVARRLQERSEEIAQLITAESGKPILWARAEVGRAVSVFTWAAEEVRRDSGRVQRLDTDSAGEGRIALIRRVPKGAVLAISPFNFPLNLVAHKVAPAIAVGAPIVVKPAPATPLSALVLGEILAETDLPAGAFSVLPMPNELAQPLITDERLPVISFTGGQFGWELRKMAPNKHVTLELGGNAAAVVLADADLDWAARRIALFGNNQAGQVCIGVQRVIVEDAVYDEFAAKLVQRVEELVTGDPADEATQVGPLINEAAAARVEQWVNEAVAGGATVLTGGTRDGVTMAPTVLADVPDDAKVVCEEVFGPVMVLRRVSGVDEAFAEVNNSKYGLQAGVFTRDLATAFRAHRELKVGGVIIGDVPTYRADQMPYGGVKKSGVGKEGVRSAMDDLTDERVMVLTGVL

SEQ ID NO: 11079 - protein, 122 aa, Triticum aestivum
HVQGGPGPSGQCCDGVKNLHNQARSQSDRQSACNCLKGIARGIHNLNEDYDRTIPPKCGANLPYTIILNMDCITEIIGTRSAFLVLTSSVRVKLKRTVNIPMYRDKLCEILLNMFNNTPQIA

SEQ ID NO: 11080 - protein, 170 aa, Glycine max
LEPIRLEARTVGVAVDFSPTSKLALRWAVDNLINKGDQIILITVQPPQAHHTRKELFEDTGSPLVPLEELRELNFTKQYGIARDPEVIGILDTASKTKGAKAVAKVYWGDPREKLCNAVEDLHLDSLVVGSRGLGPIKRVLLGSVSKHVMTNASCPVTVVKGKQSSNSRH

SEQ ID NO: 11081 - protein, 210 aa, Anaplasma marginale str. St. Maries
MNVEPLASGVFAPIDEVIEAASQGKAFVLLDDAERENEGDLVVLADKVSVATINMMIRYGSGIICLAISEQHANRLGLALMPRRNAKDGCTAFTTSIDARYGITTGVSAYDRATTILAAVAEHSTADDIVTPGHVFPIIADSGGVTKRAGHTEASVEIAKLAGATSAAVICELMNPDGTMSRLPEIIAFAQAHDVGVTTIKGLVEYLSNS

SEQ ID NO: 11082 - protein, 160 aa, Triticum aestivum
RDVMDFLDCKLENVNPGHEVVKFYLFYERRRRAEVENFEPYLASLKAACDPSGVHVEPTGFEHSLCDGVDGMRSIYGDKQGKQFRVWIDRVLPTQISSNTWLVKFNKWELSGEERNCCITTVIISSKDAAVASDGFTWMHVHQTWSQEETNLKDNSTIIF

SEQ ID NO: 11083 - protein, 848 aa, Pseudomonas synxantha
  misc_feature (233)..(233): Xaa can be any naturally occurring amino acid
  misc_feature (240)..(240): Xaa can be any naturally occurring amino acid
MLNPPPTGNSSRLLQRTGNDATRYLLPVFGRHRNFAGDVIPDEADRLLGWVEVELSHNGMLLRGYRSMFASLLLIAIGLMFTAALALRISRTINSPIGQIKQAVAQLKDGNLETRLPPLGSQELDQLASGINRMAETLQNAQEEMQHSIDQATEEVRQNLETIEIQNIELDLARKEALEASRIKSEFLANMSHEIRTPLNGILGFTHLLQKSELSPRQLDYLGTIEKSADNLXGIINEIXDFSKIEAGKLVLDSVPFNLRDLLQDTLTIFAPAAHAKQLELVSLVYRDTPLALVGDPLRLKQILTNLISNAIKFTREGTSSPGDGRDEQEDSVQLRISVQDTGIGLSNQDVRALFQAFSQADNSLSRQPGGTGLGLVISKRLIEQMGGEIGVDSTPGEGSEFWISLNLPKTRDDVEDLPAPPLLGRRVAVLENHELARQALQHQLEDCGLEVTPFNTLESLTNGITSAHQTEQAISLAVLGVTANDIPPERLNQHLWDLEHLGCKVLVLCPTTEQMLFNQSVPNPNSQLQAKPACTRKLRRSLADLISPRPSRSEPGEPLSSRAPRVLCVDDNPANLLLVQTLLEDMGAKVQAVESGYAAIDAVKQETFDLVLMDVQMPGMDGRQSTEAIRQWESERHGTPLPVVALTAHAMANEKRALLQSGMDDYLTKPISERQLAQVVLKWTGLALRNQGPERVNDGLAQGVQLLVLDHEEGLRLAANKADLAADMLAMLLASLEADRLAITVAREANDNHALIERVHRLHGATRYCGVPQLRAACQRAETLLKQDDAKAMAALDELDMAIARLASVSQSQRLTQFYGQHQSKCGGKPPPTFSQHFHRVNCREPS

SEQ ID NO: 11084 - protein, 362 aa, Burkholderia xenovorans LB400
MTRKYRIAVIPGDGIGNEVMPEGLRVLDAACRRFDIGIEYRQIGWASCDYYAQHGQMMPDNWKEQLQDCDAILFGAVGWPEKVPDHISLWGSLLKFRREFDQYVNLRPARLFEGVPCPLANRKPGDIDFMIVRENTEGEYSSVGGTMFEGTEREVVMQQSIFTRHGTERVMKFAFDLAQRRAKKITVATKSNGIAISMPWWDARADEMAARYPDVKMDRQHIDILCARVVLNPDRFDVVVASNLFGDILSDLGPACTGTIGIAPSGNLNPDRRFPSLFEPVHGSAPDIAGKGIANPVATIWSTAMMLEFLGNGARVERDAHDAIVAAITEVLKDGPHTGDLGGRASTTEVGAAIAARVAQAG

SEQ ID NO: 11085 - protein, 422 aa, Triticum aestivum
MDKLKGSARLMIVSDLDHTMVDHHDEENLSLLRFGALWESVYCQDSLLVFSTGRSPTLYKELRKEKPMLTPDITILSVGSEITYGEAMVPDHGWEEYLNNKWDRNIVLEETAKFSELKLQVETEQRPHKVSFLVDKKNAQGVIKSLSETFEKRGVDAKIIYSGGQDLDILAQGAGKGQALAYLLKKLGSCGKTPNNTLACGDSGNDAELFSIPGVHGVMVSNAQEELLQWHAENAKDNPKIIHATERCAAGIIQAIGHFKLGPNVSPRDVEFPYIKEDPFKPTVAIVKFYVLYEKWRRADVPKADSVIQYFKNITDANGVIIHPSGVELSIHSSIDELASCYGDKQGKKYRSWVDRLVILQTASDSWLVRFDLWEAEGAAWVCCFTTLALNVKPESPGGFVVTHIHKTWRKEYPGVEQSSKL

SEQ ID NO: 11086 - protein, 492 aa, Burkholderia xenovorans LB400
MSTNLEQLARALIRTDNFINGQWIAAASGRRFAVTDPATGNLIADVADSGPADARAATDAAAKALPAWRALLASERAAILHRWHALIVANRDALGALISLEQGKPLTEGRGEVGYGASYVAWFADEATRIYGDLIPQQQRGKRMSAVKEPIGVVAAITPWNFPLAMIARKIAPALAAGCTVVAKPAEDTPLTAIALVMLAHEAGVPDGVLNLISASRAAAAETVGDWLADSRVRKITFTGSTPVGKHLARESAGTLKKLSLELGGNAPFIVFDDADLDAAVNGLLAAKFRNGGQTCVCPNRVYVQHGVYEHFAALLRARVAELRVGPASDPTSQIGPMINVRAVDKIARHVDDAVEHGAVVLTGGRRLTELGPHYYAPTVLGNASASMALCGEETFGPVVPLFPFDTEQDAVQAANDTPFGLASYFYSENMRRIERVSRALEAGIVGINEGALASEAAPFGGVKESGYGREGSKYGLDDYLSIKYLCQGGLQ

SEQ ID NO: 11087 - protein, 463 aa, Bacillus licheniformis ATCC 14580
MGKQQMKKTMSQTDVLFLAIGAMLGWGWVVLSGDWISTAGFLGSTIAFIIGGILVILIGLTYAELSSAIPETGGGLIFVYRAFGRKTAFVAAWGVLFGYVSVITFEAVALPTVIDYVLPVEHQGFLWSLSGWDVYVTWVLIGSGGAVVLTALNYFGVKPAAIFQSVFTIAIIATGFLLLGGALVNGDFEHVQPLFKDGFSGMMSVLVMIPFLFVGFDVIPQVAAEINAPKKIIGKILIISIISAVVFYLLIVFGVTMGLSESELATTSLATADAMVNLLGNQLFGTVLVLGGVAGIITSWNAFIIGASRILFAMSEKGMVPKWFGFIHPKYKTPTNAILFLGALAFFAPLLGRPALVWIVNAGGTGIIVGYLIVSIAFMKLRKTEPDLHRPYKINKWKTTGISAILLSVIFLAFYLPGMPAALTWPYEWLILAGWTLIGFLLYNSSSKRKGEEIQHDQHARSI

SEQ ID NO: 11088 - protein, 580 aa, Cryptococcus neoformans var. neoformans JEC21
MTSPYIPLPAAPLPLSEDPSSMELSSSADDDEGHGRPRLGRSATINSLGDFEFEHALLPLTLSGDADVDSHKEERHVELWHGVALVVGAQVGSGIFSSPGVVVQEVGSVGASLMVWVISGVLAWTGASSYAELGCAIPLSGGSQAYLAYAFGPITSYLFTWTAVSALKPGSAAMIALIFGEYVNRLISHSLGDSEVPAWSIEVTAVFAIFLCSILNAISPTMGTNSTVVLTVIKIGALVFVAVLGAIVLLRDGPGEGLMPSGLFKGTLADAGNYAIAIYSGLWAFDGWDACCYVAGEMRDTNRDLPRALHSSMAIVVVLFLGANLSYFIVLSPSVVASSNTVALDFGKVTIGKFGAVVFSTLVAISCFGALNGGLYTTARLIYAASKEHFLPSIFSRLHPQRRTPDNAILLQGGLAIFFVIFGGGFRALLNFFSVASWTFYLLTVLGLLVLRVKEPHLDRPYRAWLVTPIVFCAVSMFLLLMPIFAAPWEAFAAFVFIASGMPVYYLTVRSRTRNAELDGASSSGWGVRVTLSDAWIKFREDIDRLLPREWQQPYRPQPHYNSDRRRGMLGEQVEMSERR

SEQ ID NO: 11089 - protein, 435 aa, delta proteobacterium MLMS-1
MKAHKLFKIFLATGLLAAWPASALAGDQGLYTANNAWMLMATFLVFVMHLGFASLEAGMTRAKNTVNILFKNTAIIAIGILTYAVIGFNLMYPGEFALGSWLGFAGFGIGTSPEELKILEDGVGVYTYWTDFIFQAMFAATAATIVSGAVAERIKLHSFLLFTAIYVALIYPWLGSWQWGGGWLDARGFYDFAGSTLVHSVGGWAALAGVIVLGPRLGKYINGKIRPIPGHNMPLATIGVFLLWLGWFGFNGGSVLSADPAMISFVFVTTALAASAGILSAMATSWAVTKKPDLTMALNGALAGLVGITAGADVVGTGSAVIIGLIAGALVVFSILILDRIKLDDPVGAISVHLTCGIWGTLAVGIFAAEFSLATQLLGVVAYGAVAFAAALVIFLMIKFSIGLRVSEEEERGGLDLSEHGMEAYSGFEMTPPSS

SEQ ID NO: 11090 - protein, 464 aa, Bacillus licheniformis ATCC 14580
MTSMLEVYNPATGEKIKSVPQQSAKEVEEAVVRSHEAFQKWSKTSAAERAGLLKKWFDLIVEQKDELAKLITLENGKPYAEAQGEVLYSAGYIEWYAEEAKRIYGRTVPASVTNKRIIVTRQGVGPVAAITPWNFPAAMITRKAGPALAAGCTFIIKPAPDTPLTALELVRLGHEAGIPKDVLQCVIGDGQEIGSIFTSHPLIRKITFTGSTPVGKHLMKNSAETVKHVSMELGGHAPLIVDEDANIDLAVKQTMLSKYRNAGQTCVCANRLIVHESVKDEFAEKLRAEVAKLKVGNGLEEGVSIGPIINKNGFQKIVDQINDAVNKGAKVLIGAEYESDDEKSCYFVHPTVLTDVDPSMTIMHEETFGPVAPITSFKTLDEAVKLANDTPYGLAAYFFTENYRRGIYLSENLDYGILGWNDGGPSTVQAPFGGMKESGIGREGGLEGIEPYLETKYLSIGLDE

SEQ ID NO: 11091 - protein, 339 aa, Haemophilus influenzae
MAIKIGINGFGRIGRIVFRAAQHRDDIEVVGINDLIDVEYMAYMLKYDSTHGRFDGTVEVKDGNLVVNGKTIRVTAERDPANLNWGAIGVDIAVEATGLFLTDETARKHITAGAKKVVLTGPSKDATPMFVRGVNFNAYAGQDIVSNASCTTNCLAPLARVVHETFGIKDGLMTTVHATTATQKTVDGPSAKDWRGGRGASQNIIPSSTGAAKAVGKVLPALNGKLTGMAFRVPTPNVSVVDLTVNLEKPASYDAIKQAIKDAAEGKTFNGELKGVLGYTEDAVVSTDFNGCALTSVFDADAGIALTDSFVKLVSWYDNETGYSNKVLDLVAHIYNYKG

SEQ ID NO: 11092 - protein, 683 aa, Coxiella burnetii RSA 493
MGRQNWKIKNLEVCMEVSTTRIHKPILKKLGSLFLNLAETSQDIFWIRSVDFYTHVYVSPAFENIFGISRQTLYANPNKWMNAVIIEDRDRLRHLIMEWQVKNKKGAAYTVDYRIIDAYGEMHWINETSYPVYEDDQCLGYAGVVKDVSSEKLRVKEFDNAVHYFRHFVERVSGVFWVKGSRGDKQIYISPTYEKIWGVSCESLYQNPKSWIDYVLPEDISNGKVNVNFYETAADQRTPDSKYEFHFRIRRPDGEIRWIKDTYFPIMENGKLVGFAGIAEDVTNDALREKELWEAKEFAEQANRTKSDFLAMMSHELRTPLNAILGMSQILKTHNLSDEQQGQIDVISQAGQNLLALLNDLLDFAKLEAGKLSFTEETMDLHELVMKIKGDMLLLAHKKGIQLKFDYPENIPSKVMGDAKRIRQVLVNLLSNALKFTEKGYVQLTANCLKKDHKKMTLCFTVKDTGIGMEKTKLSSIFNRFQQINSVYQRKYDGVGLGLSIVKELLEKMGGTISVTSEPGVGSEFTCIIPFRLQADSNPTLPARDLLEKQAVNNSTYDRESRFNMNVLVVEDNLINQRISKIMLEQVGCQVDIAGCGKDAIEKMKKHYDMVFMDIGLPDMDGFETTQCIRHNETPGQRVPIVAMTAHVFAQDRKRCFDVGMDEVMAKPIMQDDLIKVLKRWAA

SEQ ID NO: 11093 - protein, 112 aa, delta proteobacterium MLMS-1
MKKVEAIIKPFKLDAVKEAVTALGIHGMTVSEVKGFGRQKGHTEVYRGAEYVVDFVAKIKVEIVVESEKASLLVETITQAARNGNIGDGKIFVTPVESVCRIRTGELDQDAI

SEQ ID NO: 11094 - protein, 337 aa, Neurospora crassa
MSEQKETVHIGTRRSALALRQVDLVIAALQPHHPNVHFQVHALATLGDKNQTASLPSLGKGLWTNELEAKLFNKEVDFIVHCLKDMPTTLPEGGKIGVVTEREDPRDVVVMKKKWAEQGKYKSLADLPEGAIVGTSSVRRAAQLRRRYPGLVFKDVRGNIETRMRKCDEEDYDCIILAAAGLLRMGYDERIAQWLDSTTEGGGMLHAVGQGALAMEIREGDEKTLEIIKPLCHEKTMVATFAERAVMRTLEGGCSVPIGVETKWVGEDQLQLKVTVVSLDGKESVDGQSVEVIKTIEEAEAMGQKLAEDLAKRGAQKILDFVNQGRASGGALKIGDL

SEQ ID NO: 11095 - protein, 358 aa, Zea mays
  misc_feature (12)..(12): Xaa can be any naturally occurring amino acid
  misc_feature (14)..(15): Xaa can be any naturally occurring amino acid
  misc_feature (20)..(20): Xaa can be any naturally occurring amino acid
  misc_feature (24)..(24): Xaa can be any naturally occurring amino acid
  misc_feature (32)..(32): Xaa can be any naturally occurring amino acid
  misc_feature (45)..(45): Xaa can be any naturally occurring amino acid
  misc_feature (51)..(52): Xaa can be any naturally occurring amino acid
  misc_feature (58)..(58): Xaa can be any naturally occurring amino acid
  misc_feature (67)..(68): Xaa can be any naturally occurring amino acid
  misc_feature (71)..(72): Xaa can be any naturally occurring amino acid
  misc_feature (77)..(77): Xaa can be any naturally occurring amino acid
  misc_feature (83)..(83): Xaa can be any naturally occurring amino acid
  misc_feature (86)..(86): Xaa can be any naturally occurring amino acid
  misc_feature (95)..(95): Xaa can be any naturally occurring amino acid
  misc_feature (113)..(113): Xaa can be any naturally occurring amino acid
  misc_feature (115)..(115): Xaa can be any naturally occurring amino acid
  misc_feature (125)..(126): Xaa can be any naturally occurring amino acid
  misc_feature (136)..(137): Xaa can be any naturally occurring amino acid
  misc_feature (147)..(148): Xaa can be any naturally occurring amino acid
  misc_feature (158)..(159): Xaa can be any naturally occurring amino acid
  misc_feature (166)..(166): Xaa can be any naturally occurring amino acid
  misc_feature (175)..(176): Xaa can be any naturally occurring amino acid
  misc_feature (190)..(190): Xaa can be any naturally occurring amino acid
  misc_feature (199)..(199): Xaa can be any naturally occurring amino acid
GSPITEIEDISXAXXSTVTXDARXGISTGVSXADRAKTILTLASXDSKPSXXRRPGHXFPLKYRNGXXLKXXGHTEXSVDLVXLAXLRPVSVLSXVMDPRDGSMAGVTVLQQXAXEHDKPIVSIXXLIRYRRKPGXXLVELISVSRXXTKWGLFRAYXXQSRLDGXEHIAVVKGXXGDGEEVLVRVHSEXLTGDILGSXRCDCGNQLELAMKLIQKAGRGVLVYLRGHEGRGIGLGQKLRAYNLQDQGHDTVEANVELGLAVDAREYGIGAQILRDIGVRTMRLMTNNPAKFIGLKGYGLAVVGRVPVISPITEENQKYLETKRTKMGHVYGSDLPGSLPEFANPQDTPTEQEDDNQN

SEQ ID NO: 11096 - protein, 670 aa, Zea mays
MIPAVADPTTLDGGGARRPLLPETDPRGRAAAGAEQKRPPATPTVLTAVVSAVLLLVLVAVTVLASQHVDGQAGGVPAGEDAVVVEVAASRGVAEGVSEKSTAPLLGSGALQDFSWTNAMLAWQRTAFHFQPPKNWMNDPNGPLYHKGWYHLFYQWNPDSAVWGNITWGHAVSRDLLHWLHLPLAMVPDHPYDANGVWSGSATRLPDGRIVMLYTGSTAESSAQVQNLAEPADASDPLLREWVKSDANPVLVPPPGIGPTDFRDPTTACRTPAGNDTAWRVAIGSKDRDHAGLALVYRTEDFVRYDPAPALMHAVPGTGMWECVDFYPVAAGSGAAAGSGDGLETSAAPGPGVKHVLKASLDDDKHDYYAIGTYDPATDTWTPDSAEDDVGIGLRYDYGKYYASKTFYDPVLRRRVLWGWVGETDSERADILKGWASVQSIPRTVLLDTKTGSNLLQWPVVEVENLRMSGKSFDGVALDRGSVVPLDVGKATQLDIEAVFEVDASDAAGVTEADVTFNCSTSAGAAGRGLLGPFGLLVLADDDLSEQTAVYFYLLKGTDGSLQTFFCQDELRASKANDLVKRVYGSLVPVLDGENLSVRILVDHSIVESFAQGGRTCITSRVYPTRAIYDSARVFLFNNATHAHVKAKSVKIWQLNSAYIRPYPATTTSL

SEQ ID NO: 11097 - protein, 607 aa, Bacillus anthracis str. 'Ames Ancestor'
MCGITGWVDWKEDLSNQHVILKKMANRIQHRGPDAEGFWFSPRAAFAHRRLIVIDPEGGAQPKTFRAGDYTYALTYNGEIYNFRELREQLQKCGHTFETHSDTEVLLHAYLEWKEDCVQHLNGIFAFALWDDQKQRLFLARDHLGVKPLFYTERNDSIIFGSEIKALLAHPSVPAEIDADGINEIFGLGLFRTPGCGVFKHIEEVRAGHSITFTRDKKVVTKYWNLESKVHTDSIEDTSSHILSILQDTVKRQLIADVPLVCMLSGGLDSSGITALAGKEFAAENKTLHTYSVDFVNSAKDFELTFARTGLDAPWVKRVSEHVGTSHHDIIVNAEELANHLFVPLRAKDLPSAGEMETSLYLLFCEMKKDATVALSGESADEVFGGYPWFHQEELLYVDKFPWLTNWKNTSPLLLHEISNQCNLENYIDTRFQEAILEVPTLEGESKKSAKQRQMFYLFLTRFLPFLLDRKDRMSMAVGFEVRVPFCDYRLVEYLWNVPFNIKSIDNIEKGILRRALKPALPDDVRNRRKSAYPTSQDPQYLQTIRHLSLDMCSNKNNPIFSLINHSTLLAIADGSNKEINNFEARSAMEYMLQVNEWLKTYHIHIA

SEQ ID NO: 11098 - protein, 321 aa, Vibrio parahaemolyticus
MSISNTVSKVEEFEYDNASETTIDNELEKSSSTTEGKTAVREEFDASSKSLDATQLYLGEIGFSPLLTAEEEVLYARRALRGDEAARKRMIESNLRLVVKISRRYSNRGLALLDLIEEGNLGLIRAVEKFDPERGFRFSTYATWWIRQTIERALMNQTRTIRLPIHVVKELNIYLRTARELSQKLDHEPTAEEIAAQLDIPVEDVSKMLRLNERISSVDTPIGGDGEKALLDIIPDANNSDPEVSTQDDDIKSSLIHWLEELNPKQKEVLARRFGLLGYEPSTLEEVGREIGLTRERVRRLREILIKQGLNMENLFNVEDD

SEQ ID NO: 11099 - protein, 764 aa, Bacillus licheniformis ATCC 14580
MGKQRLVLIGNGMAGVRTAEEISLHGGSRFEIVIIGSEPHPGYNRILLSSVLQGETDWNDVMTKSRSWYEENGITLYTGETAVAIDTVNQTVATDQNREIAYDKLIIATGSSPFILPVHGADKEGVYGFRTIDDCRAFINASKRFKKAAVIGGGILGLEAARGLANLGMKVDVVHHSSSIMQTQLDPPASAMLQKELERQGIHFLLEKDTEAILGTSRAEGVRFKDGTKISADLVVMAAGVRPNIELAKASGISTNRAIIVSDYMETNVPNVYAVGECAEHNGTVYGLVKPLYEQGKVLAKHICGLECSGYQGSVQSAALKMSGIDVFSAGKITEDDSTTAIKLLDEAAGVYKKAVFQGDKMAGVILYGDTSGSQRLLESIIKQRDITVVKKELFQSEEDSSVASMAVRETICQCNAVSKGMIMEAIQTHGLKTAEEVKRCTKASGSCGGCRPLVEELLLHTAEHDGHISAAEQPMCACTSFTEDEVVNEIQMRNLSSVHEVISALGWKNSSGCRICVPALHYYLKMIRPDIAYEEHEEETDAIIPQMYGGRTNAEELKRIAGVIEKYQIQEVYMTHHQRLKLAGIKPEHIERVKEELGMPYCLPQQQRIAAVKTCPCGSPQIQTLAADLEKAAESLLIPAKVSIGVSGCLDDCVYASVHDIGLLKVNGGWEIYAGGQGGQHASPGELLSVADSAEEAGELMKGLLQYYRETANYLEKIGHWIERAGIIHIREVLFDNGLRGQLFERLEKEKRLAQQEMIKGLM

SEQ ID NO: 11100 - protein, 95 aa, Colwellia psychrerythraea 34H
MQINLSGHHVEVTSSLREYVDTKFSKLERHFDHINNVHVVLTVEKLNQKAEANVHMNGSEVFASAVNTDMYASIDTLVDKLDRQILKYKAKVSHH

SEQ ID NO: 11101 - protein, 379 aa, Triticum aestivum
HYRTSLYKKAGWYRSGIPGISSTHASARTIPVKKTGMYNMYFIHCDPALAGLEIDGKTIWKNPTGYLPGRMAPLKNFFGLMSFAFVILGIYWFYQYMKFWREVLPLQNCITLGHAVGMLEMALWYFEYAEFNETGVRAKAITFWAVTFGTIKRTVARLIILIVSMGYGVVRPTLGGLTSKVVMLGGTFFVATEILELVENLGTVNDLSGKARLFLVYPVAILDASFIVWIFISLAKTLSQLQARRLMAKLDIYRKFTIALAITVLVSIGWIGYEIYFKSTDVFNERWQYAWIIPAFRHALSGSLLCVISYLWAPSQSSMRFTNDASEKFDREDSLSLIRPRPIVSNNGWSIASSTDVKMTKNTDSVTSFDEDDEENKRE

SEQ ID NO: 11102 - protein, 218 aa, Ustilago maydis 521
MKLPMMLRTTTQRGLRTTATIRTISTRSALTATIRKNVSALPTKIIVTRAFSQRTPMVSSRWFSMSQKMAQPTAKYTASPLTDSQYHKLSNNVLDSLQETFETLLEEADVEALEEEARAKQQSATRAAPASEWDIECASGVMNLRCGAHGTWVINKQPPNKQIWLSSPKSGPKRFDFDADSNTWFCLKEGETSTLDQLLQDELSLVFGTEVQVLLEDE

SEQ ID NO: 11103 - protein, 287 aa, Porphyromonas gingivalis W83
MRQLKISKSITNRESASLDKYLQEIGREDLISVEEEVELAQAIKRGDRKALEKLTRANLRFVVSVAKQYQNQGLSLPDLINEGNLGLIKAAEKFDETRGFKFISYAVWWIRQSILQALAEQSRIVRLPLNQVGTLNKIIKAQQKFEQENERRPSSAELAKELDIAEDKIADTMKVSGRHISVDAPFVEGEDNSLLDVLVNEDTPNTDKSLINESLAVEIERALSTLTEREAEIVKLFFGIAGCQEMTLEEIGDKFGLTRERVRQIKEKAIRRLRQSNKCKNLKGYLG

SEQ ID NO: 11104 - protein, 431 aa, Brassica oleracea var. acephala
MKGIRKTYDNSYTSCLLVFFVLILFRPAFSINTLSSTESLTISSNRTLVSPCSNFELGFFRTNSSSRWYLGIWYKKLSNRTYVWVANRDNPLSNSIGTLKISGNNLVLLGHSNRSVWSTNLTRENERSTVVAELLANGNFVMRDASGFLWQSFDYPTDTLLPEMKLGYDLKTGLNRFLTSWRSSDDPSSGDFSYKLETRRLPEFYISSGVFLLYRSGPWNGIRYSGILEDQKLNYMVYNFTENSEEVAYTFRMTNNSIYSRLTLSFSGYFERQTWNPALGMWNVLWSLPFDSQCDTYRMCGPYSYCDVSTSPICNCIQGFNPSNVQQWDQSSWSGGCIRRTRLSCSGDGFTRMRNMKLPETTMAIVDRRIGVKECEKKCLSDCNCTAFSNADIRNGGMGCVIWTGRLDDMRNYVADHGQDLYVRLAAADLV

SEQ ID NO: 11105 - protein, 69 aa, Zea mays
MADWGPVIVATVLFVLLTPGLLCTLPGRGRVAEFGSMHTSGLSILIHAVLYFALVTIFLIAVGVHVYTG

SEQ ID NO: 11106 - protein, 405 aa, Porphyromonas gingivalis W83
MEEIKLNTIEEALEDFKEGKFLIVVDDEDRENEGDFIIAAEKITPDKVNFMMHHGRGVLCAPISEERAHELELEMQVPDNTSVHETPFTVTVDRLGNGCTTGVSMYDRAQTILALADPNTRPSDLGRPGHICPLRARSRGVLRRAGHTEAAVDLARLCGMQPAAALIEIINEDGTMARLPQLWEVSKRFGLKIIAIKDLIAYRLKQESIVEKGVEVDMPTEYGHFRLIPFRQKSNGLEHIALFKGTWDENEPILVRMHSSCATGDIFGSMRCDCGGQLLQAMEKIEKEGKGAIIYLNQEGRGIGLMEKMKAYKLQEQGMDTIDANLCLGHKADERDYGIGAQILRLLGIKKMRLMTNNPVKRIGLEAFGLEIVENIPLETAPNRYNEFYLRTKKERMGHELHNIK

SEQ ID NO: 11107 - protein, 850 aa, Brassica oleracea var. acephala
MQGVRYIYHHSYTLLVFVVMILFRPALSIYVNTLSSTEYLTISNNKTLVSPGDVFELGFFKTTSSSRWYLGIWYKTLSDRTYVWIANRDNPISNSTGTLKISGNNLVLLGDSNKPVWSTNLTRRSERSPVVAELLANGNFVMRDSNNNDASQFLWQSFDYPTDTLLPDMKLGYDLKTGLDRFLTSWRSLDDPSSGNFSYRLETRKFPEFYLRSGIFRVHRSGPWNGIRFSGIPDDQKLSYMVYNFTDNSEEVAYTFRMTNNSIYSRLTVSFLGHFERQTWNPSLGMWNAFWSFILDSQCDIYKMCGPYAYCDVNTSPICNCIQGFNPSDVEQWDRRSWAGGCIRRTRLSCSGDGFTRMKNMKLPETTMAIVDRSIGVKECEKKCLSDCNCTAFSNADIRNGGMGCVIWTGRLDDMRNYAADGQDLYFRLAAVDLVKKRNANWKIISLTVGVTVLLLLIMFCLWKRKQKRAKANATSIVNRQRNQNLPMNGMVLSSKTEFSEENKIEELELPLIDLETVVKATENFSNCNKLGQGGFGIVYKGRLLDGKEIAVKRLSKTSVQGTDEFMNEVTLIARLQHINLVQIIGCCIEADEKMLIYEYLENLSLDSFLFGKTRRSKLNWKERFDITNGVARGLLYLHQDSRFRIIHRDLKVSNILLDKNMIPKISDFGMARMFAREETEASTMKVVGTYGYMSPEYAMHGIFSEKSDVFSFGVIVLEIVTGKRNSGFNNLNYEDHLLNYAWSHWKEGKALEIVDPVTVDSLPSTFQKQEVLKCIQIGLLCVQELAENRPTMSSVVWMLGSEATEIPQPKPPGYCIRRSPYELDPSSSRQYDNDEWTVNQYTCSFIDAR

SEQ ID NO: 11108 - protein, 80 aa, Nicotiana tabacum
GIPFPFFGGLLGFFGGFAFAPTTYFLPCIMWLAIYKPRRWSLSWIANWICIIFGVLLMVLAPIGGLRSIIVQAQTYKFYN

SEQ ID NO: 11109 - protein, 372 aa, Oryza sativa
MGEAVKGPVVVTGASGFVGSWLVMKLLQAGYTVRATVRDPSNVGKTKPLLELAGSKERLTLWKADLGEEGSFDAAIRGCTGVFHVATPMDFESEDPENEVIKPTVEGMLSIMRACRDAGTVKRIVFTSSAGTVNIEERQRPSYDHDDWSDIDFCRRVKMTGWMYFVSKSLAEKAAMEYAREHGLDLISVIPTLVVGPFISNGMPPSHVTALALLTGNEAHYSILKQVQFVHLDDLCDAEIFLFESPEARGRYVCSSHDATIHGLATMLADMFPEYDVPRSFPGIDADHLQPVHFSSWKLLAHGFRFRYTLEDMFEAAVRTCREKGLLPPLPPPPTTAVAGGDGSAGVAGEKEPILGRGTGTAVGAETEALVK

SEQ ID NO: 11110 - protein, 233 aa, Zea mays
MCGILAVLGCGDESQGKRVHVLELSRRLKHRGPDWSGLHQVADNYLCHQRLAIIDPASGDQPLYNEDKSIAVAVNGEVYNHEELRARLSGHRFRTGSDCEVIAHLYEEYGESFIDMLDGVFSFVLLDARDNSFIAARDAIGVTPLYIGWGIDGSVWISSEMKGLNDDCEHFEIFPPGNLYSSKEKSFKRWYNPPWFSEVIPSVPYDPLRLRSAFEKAVIKRLMTDVPFGVSLS

SEQ ID NO: 11111 - protein, 206 aa, Escherichia coli
KHFAALSTNAKAVGEFGIDTANMFEFWDWVGGRYSLWSAIGLSIVLSIGFDNFVELLSGAHAMDKHFSTTPAEKNLPVLLALVGIWYNNFFGAETEAILPYDQYMHRFAAYFQQGNMESNGKYVDRNGNVVDYQTGPIIWGEPGTNGQHAFYQLIHQGTKMVPCDFIAPAITHNPLSDHHQKLLSNFFAQTEALAFGKSREVVEQE

SEQ ID NO: 11112 - protein, 298 aa, Schizosaccharomyces pombe
MGNVQSQEGETRAHAVPSQDATTTPDNANNVPKEPRAQSMISIAADDLNQEGEMSDDNQQEGGNNRTSQNGTSGSSGHTKRRSQTSGKKTHQPYSGPCVPTIIRWRGGGEVVYVTGSFSRWKKKIQLLKSEDYTVLLQLRPGTQRFKFLVDGIWCCSSDFPTATDAEGNLYNYLEVEANEKLGASIDERLSQVHTDLPMEEKSESEQYSTEIPAFLTSNTLQELKLPKPPSLPPHLEKCILNSNTAYKEDQSVLPNPNHVLLNHLAAANTQLGVLALSATTRYHRKYVTTAMFKNFDV

SEQ ID NO: 11113 - protein, 112 aa, Agrobacterium tumefaciens str. C58
MKKIEAIIKPFKLDEVKEALQEVGLQGITVTEAKGFGRQKGHTELYRGAEYVVDFLPKVKVEVVLADENAEAVIEAIRNAAQTGRIGDGKIFVSNIEEVIRIRTGETGVDAI

SEQ ID NO: 11114 - protein, 634 aa, Methanococcoides burtonii DSM 6242
MCGICGYAGFDDEDLLGKMCDAIVHRGPDDSGSFTDKGIGLGHRRLSIIDLEGGHQPVCNEDGTIYVVYNGEIYNFLSLRDELEKRGHRFQTSSDTEVIVHLYEEYGKDLVHHLRGMFAFALWDSNTRTLLLARDRLGVKPLYYTTIDNRLLFASEIKSIVQYSGYEKAVDIGTLHDYLTFRHALGTETMFAGIKKLLPGHVMTYREGEVNISEYWDVPLVTVGNESEDFYIKKTRLLLEESVKMRLMSEVPLGIYLSGGIDSGIVTGLMSKMVDEPIETFSVGFGERGEIGELSQAQEAADFFGTNHHEIIVDQGAFKQNLKDIIWHNDEPIADPSALAMFQLSKMASKHVTVVLNGAGGDEVFGGYISYKVGLANQKYHKIVPKVIRQGLVRPFVNAISPHLSSKMYVGIQSATQEVEEHGFLFTKSVFSEEDKEDIYTDKIKDKIHHNTFEKATTSLFRGKRYSGAIDERSSAKNTDLLSKMMYADTKSYLVDHILLETDKLTMSSSIEARVPIIDHKVVEFAASIPQELKLRGMTEKYILKKVGQGMLPPAAQNRKKRPFRIPIDTWFKDELHEMSQQVLDESSIVEQGYFRPEVVKDIMKKHERAELLYNHQMYALLVFEMWHERFMKM

SEQ ID NO: 11115 - protein, 168 aa, Zea mays
MAMETCFRAWALHAPAGSKDRLLVGNLQVLPSKRALAPLSVGRVATRRPRHVCQSKNAVDEVVVADEKNWDGLVMACETPVLVEFWAPWCGPCRMIAPVIDELAKDYAGKITCCKVNTDDSPNVASTYGIRSIPTVLIFKGGEKKESVIGAVPKSTLTTLIDKYIGSS

SEQ ID NO: 11116 - protein, 98 aa, Cytophaga hutchinsonii
MASFKELINSDKPVLVDFHATWCGPCKQLAPVIEKVAGTFNERLKVVKVDVDKNTAAAQAYQVKGVPTMILFKQGKIVWRSSGYMDEGKLSKTLQAFI

SEQ ID NO: 11117 - protein, 381 aa, Clostridium perfringens str. 13
MLDFDVDIQSFTNIKVIGCGGGGGNAVNRMIQEGLRDVEFIAINTDKQALTLSHAQNKIQIGDKLTKGLGAGANPEIGKKAAEESRDEITEAISGADMVFITAGMGGGTGTGAAPVVAEIAKSMGILTVGIVTKPFPFEGRRRMTHAEMGIANLKEKVDTLVTIPNERLLSMVDKKTTLLESFKKADDVLRQGVQGISDLITNPGLINLDFADVRAVMLDKGLAHMGVGYGKGETRAQDAAREAISSPLLETSIVGATGVLLNVTGDSELGLLEINEAAEIVQEAADPDANIIFGTVIDETLKDEIRITVIATGFEKERQRMGMGAQGVTSGATQTQREVIVENVEEKVAEQEVAASSQTQQEDRYNDDLEIPMFLRRGRR

SEQ ID NO: 11118 - protein, 351 aa, Vibrio parahaemolyticus RIMD 2210633
MFFEWQGNQPVTLRCIDKYFETHDTVSIKLAELTESLLFQFKPGQFINLGVEIDGKMEFRAYSISSINEDDHLQLTIKRVSGGKVSNYIVDSLLLGDTVQALPPAGEFNCIDHPPVLRDGETRALLISAGCGVTPVFSMAKHWLSNQDENDNDVDIAFLHIARSPEETIYYDQLETFDAVYPNFHLKLLLKNREGTSHPQGRLNADWLKELVPDFKQRTVYLCGPSQFMQDVHGYLNDLGFDMTNFYQESFTPATGAETSVSDEVVHVSVPDFAQTIDAQKGQVLADVLEGAGLPLIVACRSGICGSCKCKVRQGSVSSTSLETLTPEEIEQGYVLACSSTIEADLEVQIG

SEQ ID NO: 11119 - protein, 419 aa, Rickettsiella grylli
MSKKNVFYAQSGGVTAVINATACGVIETARKYKNKMGKVYAGCNGIMGALTEDLIDTGKESHQAIASLYYTPGGAFGSCRYKLKSLKDNRAEYERLLQVFNAHNIGYFFYNGGGDSQDTAHKVYRLSQTLGYPLRCIGIPKTVDNDLPITDNCPGFGSVAKYVAISTLEASLDVASMHATSTKVFIMEVMGRHTGWIAAASGLARQNKGDAPHIILFPEISFNESLFLQEVDKTVKKWGYCVIVLAEGVQDGTKKFLAEGGTTDAFGHKQLGGAAPIVAQLIKTKLGYKYHWALPDYLQRSARHIASEVDVEQAYALGKAAVELAIEGKNAVMPTIVRVANKPYQWVIGETKLVTVANKEKKLPRSFITQSGFHITSRCRDYLLPLIQGESYPPYRKGLPNYRSLKKIKVKKKLEDFAI

SEQ ID NO: 11120 - protein, 806 aa, Bacillus licheniformis ATCC 14580
MKKKQLVLVGNGMAGVRAIEEILKISNEEFQITIFGSEPHPNYNRILLSKVLQGDTDVKDITLNDWDWYEENGIQLYTGEEVVKVDPESKTVITDTGRVQPYDELILATGSLPFILPLPGADKEGVTAFRDIKDTDIMLEASKTYKKAAVIGGGLLGLEAARGLLNLGMDVTVVHLAPYLMERQLDAAAGRLLQKELEKQGMKFLLEKQTEEIYGETRVEGLKFKDGSTLEADLVVMAVGIKPNVQLGKDCGLPVNRGIVVNDYMETEVPNIYAVGECAEHRGIAYGLVAPLYEQAKVLAKKICGVETAPYEGSVLSTQLKVSGVEVFSAGDFNEDDGEDKKALKVFDEQDGIYKKIVLRGNQVIGAVLFGDSSEGNRLFSMIQKGADISDTSKISILQPLNQEEGMSLTAAMSDDEIVCGCNGVSKGMIIQAIKEQGCTSTDEIKACTGASRSCGGCKPLVAEILQHTLGSEFDASAQKEAICGCTDLSRDELVAEIREKGLTHTKEVMNVLGWKTAEGCSKCRPALNYYLGMINPKEYEDERESRFVNERMHANIQKDGTYSVVPRMYGGVTNSNDLRRIADVVDKYEIPLVKMTGGQRIDLIGVKKEDLPKVWADLDMPSGFAYGKTLRTVKTCVGEQFCRFGTQDSMALGIDLEKKFEGLYTPHKIKMAVSACPRNCAESGIKDIGVVGIDGGWEIYVGGNGGTHLRAGDLLMKVKTAEEVIEITGAYLQYYRETANYLERTSAWIERVGLSHVQSVLNDKEKRKELNDRINQALSVHKDPWKDFLEDGKTTRQLFENVVTS

SEQ ID NO: 11121 - protein, 598 aa, Neisseria gonorrhoeae FA 1090
MNTVSNYLSALREAMKAQGLDALVIPSADPHLSEYLPEHWQARRELSGFTGSVGTFVVTADEAGVWVDSRYWEQAAKQLSGSGIELQKSGQVPPYNEWLAANLPENAAVGIPSDMVSLTGKRTLAQSLAAKNIRIQHPDDLLDQVWTSRPAIPAETVFIHDHAYVSETAAEKLARVRAVMAEKGADYHLVSSLDDIAWLTNLRGSDVPFNPVFVSFLLIGKDSAVLFTEQCRLNAEAAAALQTAGITVEPYAQVADKLAQIGGALLIEPNKTAVSTLVRLPESARLIEGINPSTFFKSVKSEADIARIREAMEQDGAALCGFFAEFEDIIGKGGSLTEIDVDTMLYRHRSARPGFVSLSFDTIAGFNANGALPHYSATPESHSTISGNGLLLIDSGAQYKGGTTDITRVVPVGTPTAEQKRDNTLVLKAHIALAEAVFPENIPSPLIDAICRKPLWQAQCDYGHGTGHGVSYFLNVHEGPQRIAFAAPATPETAMKKGMVTSIEPGLYRPGKWGIRIENLAANQAVADPQETEFGSFLCFETLTLCPIDTRLMDTALMTDGEIDWVNRYHAEVRRRLEPLTEGAAKAWLIKRTEPLAR

SEQ ID NO: 11122 - protein, 402 aa, Rickettsiella grylli
MKTQPPNINSALEDLRLGKMVILFDHENRENEGDLVLAAEKVTPRAINFMAQHARGLICLALAEEDIKRLQIPMMVENATNPFNTAFTASIEAAKGVTTGISAADRAHTIHVAIDPKSGPQDIVMPGHIFPIRARKGGVLARMGQTEGSTDLVRLAGLNSAAVICEIMNPDGSMARFPDLERFAKQHQITLLSIRDLIQYRLQTESLVKEIASIHLPTKDYGDLTIKLFESQLDKHHHLAIIKEKIKKSYHPTLVRIHSECFTGDLFGSTRCDCGWQLHESLTQISEHGGALLYLRQEGRGIGLLNKLKAYALQDQGFDTVEANQKLGFGSDDRNYWIGAQILQRLKILKIKLLTNNPQKIIDLKQYGIEITERVPLIATPSPTNLTYLKTKQSKLGHLLNL

SEQ ID NO: 11123 - protein, 306 aa, Ralstonia solanacearum
MSARNGFTEADVPDQSGKGFIVTGANTGLGLETSRVLAARGARVLLACRDRSKAEAAMAHIRQTHPGADLAFLPLDLADLASVRAAAGQAMTAPRIDALINNAGVMMPPLMRTTQGFELQLGVNHLGGFALTALLLPKLAQTPGSRVVVTSSLAHRGASIDWDDLSAATRYNRVKRYGASKLANALFFFELDRRLRASGSPVTAVGCHPGAAVTDLVRYMGALQLLQPLVRRFLNTAAMGAWPTLQAATGPVQPGGYYGPTGLRGIRGPSGRATRSAQAQDPLLAQRLWDVSIAMTGIDPGLPVEN

SEQ ID NO: 11124 - protein, 242 aa, Zea mays
NSLEGVSKLSHLSKLARDNNTASRTVEADRLHTMLLAMADARAVLIKLADRLHNMETLEALPCAKQERFAKETMEIFVPLANRLGVASWKDQLENLCFKYLNPEEHEELSSKLRESFDEELITSAVDKLDKGLRDAGVSYHSLSGRHKSLYSIHCKMLKKNLTMEEIHDIHGLRLLVESEEDCYEALCVVHRLWPRVTGRFKDYISRPKLNGYRSLHTVVMSEGVHPFEVQIRTREMHLQAE

SEQ ID NO: 11125 - protein, 450 aa, Methanothermobacter thermautotrophicus str. Delta H
MRVVIVGGGAGGLSTASNIRKHDKDADIKVITRDKHVAYSPCAIPYVMCGEVECFDDIVMHRPEDYRERNIDILTETEVEAIDPQKKTVTYRGKDGLREIPYDVLVLATGGSPFIPPVEGTDLEGVFTIRTLTDGERITEWASKSKRAVVVGAGLIGLEIAYGLLRMGLEVTVTEMLPQIVPRSLDPDMAAIVQGYLEEKGIRVILGKALDRIVGDERVEGVVVGDECLEADLVVLATGVRPETKLARMAGCEIGQWAVKVNDRMQTSVPDIYAVGDCVEVYDAVTGFRTQSPLGSTAVRQARVAAKNIVGMDARFRPVLNAMVSKIGELEFGAVGLTEVMALQNGIKVVSGKKRALTKARYYPGAERIDVKMICDLRGRIIGCQMVAKERVAERVDTMSLAISQGLTCSELSETEFSYAPPVSMVIDPIILAAEDACEKLKRVNGRPQD

SEQ ID NO: 11126 - protein, 198 aa, Oryza sativa
  misc_feature (158)..(158): Xaa can be any naturally occurring amino acid
  misc_feature (176)..(176): Xaa can be any naturally occurring amino acid
MDSEHWISRLAAAKRFYAAQLGHADRAGMEEVDMDEEVRPEFACPYCYEDHDVVSLCAHLEEEHPFEPHAAPCPICSDKIAKDMLNHITVQHGYLFKVLLGGGGHRSNNSSNTTNISADPLLSSFGLSFPTSDTEETSKPPISIPDDASVIKETPGSXPWDSSIDSSLTREEREQXRKQASVRATFVQDLLLTTLFGD

SEQ ID NO: 11127 - protein, 160 aa, Vibrio sp. Ex25
MRDITPDICDQFEDQVTLLTLPLQNFGQRTAFYGEIVTVRCYHDNSKVREVLGEDGTGKVLIVDGHGSCQKALLGDQLAILGIENGWEGIIVYGAIRDVAQISQMDIGVQALGTNPFKTEKRGMGEVNVTLTMQNQIVQPKHYVYADWNGVLISKQKLDF

SEQ ID NO: 11128 - protein, 162 aa, Ustilago maydis 521
MSASDDEQHNATFETADAGSSLTFPMQCSALRKNGHVVIKGRPCKIVDMSTSKTGKHGHAKVHLVAVDIFTTKKYEDISPSTHNMDVPNVRREEYQLVNIDDGFLNLMTNDGDTKDDVRVPDGELGDQIQAAFDDGKDLMVTVVSAMGEEHCLSFKDAPQGK

SEQ ID NO: 11129 - protein, 55 aa, Brassica carinata
NLKKVQHLLDLPNAKTQLTLWKADLSDEGSYDDAINGCDGVFHIATPMDFESKDP

SEQ ID NO: 11130 - protein, 141 aa, Deinococcus radiodurans R1
MRASIPGRLRLAQPVPMPRLSADMREGGIVPNMKPVELTDGNFTSEIAQGLTLVDFWAPWCGPCRIIAPVIEELAGQYEGRVKVAKVNVDDNPATSGQFRVMSIPTMILFKDGQPVEGMVGAQPKRAFESVLDKHLGVAVN

SEQ ID NO: 11131 - protein, 285 aa, Burkholderia mallei ATCC 23344
MTATLIDGNALSKTLRAQAAERAAALAARGHRPGLAVILVGDNPASEVYVRNKIKACEDNGFFSLKDRYPATLSEPELLARIDELNRDPKIHGILVQLPLPAHIDSHKVIEAIAPEKDVDGFHVANAGALLTGKPLFRPCTPYGVMKMFEAYKIPLQGANAVVIGRSNIVGKPMALLLLEAGATVTICHSKTCELAAHTRAADIVVAAVGKRNVLTADMVKPGATVIDVGMNRNDEGKLCGDVDFAGVSQVAGHITPVPGGVGPMTITMLLVNTIEAAERAAAAA

SEQ ID NO: 11132 - protein, 477 aa, Sinorhizobium meliloti 1021
MTLHQNLIAGEWVGGDGVANINPSNTDDVVGEYARASAEDAKAAIAAAKAAFPAWSRSGILERHAILKKTADEILARKDELGRLLSREEGKTLAEGIGETVRAGQIFEFFAGETLRLAGEVVPSVRPGIGVEITREPAGVVGIITPWNFPIAIPAWKLAPALCYGNTIVFKPAELVPGCSWAIVDILHRAGLPKGVLNLVMGKGSVVGQAMLDSPDVQAITFTGSTATGKRVAVASVEHNRKYQLEMGGKNPFVVLDDADLSVAVEAAVNSAFFSTGQRCTASSRIIVTEGIHDRFVAAMGERIKGLVVDDALKPGTHIGPVVDQSQLNQDTDYIAIGKQEGAKLAFGGEVISRDTPGFYLQPALFTEATNEMRISREEIFGPVAAVIRVKDYDEALAVANDTPFGLSSGIATTSLKHATHFKRNAEAGMVMVNLPTAGVDFHVPFGGRKASSYGPREQGKYAAEFYTNVKTAYTLA

SEQ ID NO: 11133 - protein, 355 aa, Verticillium dahliae
MSRSNAPNPSGSRKISFNVSEQYDIQDVVGEGAYGPPSSAIHKPSGQKVAIKKITPFDHSMFCLRTLREMKLLRYFNHENIISILDIQKPRGYDTFNEVYLIQELMETDMHRVIRTQDLSDDHCQYFIYQTLRALKAMHSANVLHRDLKPSNLLLNANCDLKVCDFGLARSAASQEDNSGFMTEYVATRWYRAPEIMLTFKEYTKAIDVWSVGCILAEMLSGKPLFPGKDYHHQLTLILDVLGTPTMEDYYGIKSRRAREYIRSLPFKKKVPFRTLFPKTSDLALDLLEKLLAFNPVKRITVEEALKHPYLEPYHDPDDEPTAPPIPEEFFDFDKHKDTLSKEQLKQLIYQEIMR

SEQ ID NO: 11134 - protein, 437 aa, Nostoc punctiforme PCC 73102
MKTNQIPPGSFGLPVLGETLSFVFDRDFAKKRYHQYGPIFKTHLLGRPTVVMAGPEALEFVLSSHIENFSWREGWPDNFKTLLGESLFLQDGEEHRRNRRLMMPALHGPALASYFSTMEDITRSYLQKWEKKQEFTWFQEFKQLTFDIASQLFLGTRPGPECVRLSQLFTTLTNGLLAINPLPLPFTTFGKAIAARNEILEHLTQVVRERQQNPTQDTISLLIKAKDEDGNSLSEKEIIAQAVLLLFAGHETTTSMLTWLCTELACHPEVLEKARVEQLQLASQGDLDLEQLGKMPYLEQVLWEVERLHQPVGGGFRGVIKDFELNGYHVPTGWQLYYSIGVTHQIEEIYSEPELFDPDRFSPQRQEHKKYPFSLVGFGGGPRICIGIAFAKMEMKIVAAHLLRSYHWEILPNQSLEVVAVPTNRPKDGLRVRFQPR

SEQ ID NO: 11135 - protein, 421 aa, Haemophilus influenzae R2866
MLYPEYPEYDNFNESGALIKVVGVGGGGGNAVNHMVMNMVKQEMGGTFVGESSLTSEEHGRIVFYAVNTDAQALRKSQVQQTVQIGGETTKGLGAGANPNIGRKAAEDDQDEIRKMLEGADMVFIAAGMGGGTGTGAAPVVAKIAKELGILTVAVVTKPFAFEGKKRMQFAELGIKDLSQYVDSMIIIPNQQIQKVLPKNAKLIDAFAAANDVLRNSVMGISDMITSPGLINVDFADVRTVMSVQGQAMIGFGSAVGEPGAGRAEEAARLAVRNDLLEKIDLSNAQGILVNITAGMDLVFEEFNIIGETIGSFASEEATVVVGTSLVPEMSDEIRVTIVATGLGEIAGNEPIQVVRQGLSTQNIEGEGRVNIVPELHRRESVEVSRTASEEYQRPLDKPITDRLEAFKKNNFFNPAQREEN

SEQ ID NO: 11136 - protein, 143 aa, Glycine max
GAFTEKQDALVSSSFEAFKANIPQYSVVFYNSILEKAPAAKDLFSFLANGVDPTNPKLTGHAEKLFALVRDSAGQLKASGTVVADAALGSIHAQKAVTNPEFVVKEALLKTIKEAVGDKWSDELSSAWEVAYDELAAAIKKAK

SEQ ID NO: 11137 - protein, 273 aa, Zea mays
  misc_feature (8)..(8): Xaa can be any naturally occurring amino acid
  misc_feature (26)..(26): Xaa can be any naturally occurring amino acid
  misc_feature (115)..(115): Xaa can be any naturally occurring amino acid
TLFWTDRXLNGAAIRELAPEVLAKVXKRSLYSRTVAPALENWQWVRDIKAPLSLAGLQQYLLLWDSVRGVEISHVPDQHRWRHETSGIFSSKSCYKSLFSGSTTFEPWKRLWKTXTPPKCKFFLWLAMRNRCWTADRLEKRGLPHPAVCPLCDQHQETIQHLLASCIFTRQFWFSILSPFGLGHLIPAVDEPSFAEWWRHMVLRVPNGRKKGLNNVIILGAWCVWLHRNKVIFNGEPPSLANLQRSFLDECVCWVMAGAKNLGSLDLARALNV

SEQ ID NO: 11138 - protein, 547 aa, Nostoc punctiforme PCC 73102
MNTAELLVQCLENEGVQYIFGLPGEENLHVLEALKHSSIKFITTRHEQGAAFMADVYGRLTGKAGVCLSTLGPGATNLMTGVADANLDGAPLVAITGQVGTDRMHIESHQYLDLVAMFAPVTKWNKQIVRPSITPEVVRKAFKRSQSEKPGAVHIDLPENIAAMPVEGKPLRKDNSEKTYASFASIRAAAAAICQAVNPLILVGNGAIRAQASDAVTQFATLLNIPVANTFMGKGVIPYTHQLALWSVGLQQRDFITCGFDNTDLVIAIGYDLIEFSPKKWNRNGEIPIVHIGVSPAEIDSSYIPNAEVVGDISDSLYEILKLADRQGKPDPFAISLRSDIRADYEQYAHDDGFPIKPQKLIYDLRQVMGPDDIVISDVGAHKMWMARHYHCHSPNTCIISNGFAAMGIAIPGALAAKLVHPKRKVVAVTGDGGFMMNSQELETALRVGTPFVTIIFNDGGYGLIEWKQENHFGKGNSSFVHFSNPDFVKYAESMGLKGYRVESALDLIPTLKEALAQDVPAVIDCPVDYRENHRFSQKAGELSCAV

SEQ ID NO: 11139 - protein, 320 aa, Pseudotsuga menziesii
MAIPVIELGDLKGNGREKFMAEMGKACEEVGFFQLKGHGVPVELMERVKKVCSEHYNCVREPKFKTESVPVKMLNKSLTEAKLSNSTPKKVENVDWEDCIVLQYAQEDYPWPSEPTEFKETMVEFGKEISKLAETLLELLSEYLGLEKGYLKRTLAGGDGPDQKAFFGTKISHYPPCSRPDLVEGLRAHTDAGGLILLFQDDEVGGLQVLDNTDRWIDAPPMKDSLVIDVGDQLEAISNGRFRSAWHRVLATDNGNRMSVASFYNPSFDAVISPAPQLLLQPNEGSDLSIYPKFVFGDYMNVYAQQKFLPKEPRFQAVTA

SEQ ID NO: 11140 - protein, 419 aa, Thermococcus waiotapuensis
MVELDPFEMAVQQLERAAQFMDISEEALEWLKRPMRIVEVSVPVEMDDGSVKVFTGFRVQHNWARGPTKGGIRWHPAETLSTVKALATWMTWKVAVVDLPYGGGKGGIIVDPKKLSEREQERLARSYIRAVYDVIGPWSDIPAPDVYTNPKIMGWMMDEYETIMRRTGPAFGVITGKPLSIGGSLGRGTATAQGAIFTIREAAKALGIDLKGKTIAVQGYGNAGYYTAKLAKEQLGMKVVAVSDSQGGIYNPNGLDPDEVLKWKNETGSVKDFPGATNISNEELLELEVEVLAPAAIEGVITEKNADGVKAKIVAEVANGPVTPEADEILREKGILQIPDFLCNAGGATVSYFEWVQNINGYYWTEEEVREKLDKKMTKAFWDVYNTAKEKNIHMRDGAYVVAVSKVYQAMKDRGWVKH

SEQ ID NO: 11141 - protein, 496 aa, Methanothermobacter thermautotrophicus str. Delta H
MQVRVLDTTLRDGEQTPGVSLTPEEKLRIALKIDALGADIIEAGSAITSEGEREGIRKITSEGLRAEICSFARAVREDIDAAISCDVDSVHLVVPTSDLHLEHKLRKTREEVLEQAVDCTEYAVDHGILVELSAEDSTRSDMDFLRTIFREGIEAGAERICACDTVGILTPERSYEFYRGLSELGAPLSVHCHNDFGLAVANSLAGLRAGASEVHATINGIGERAGNAALEEVVVALKSLYDVDTSINIEMLYETSRMVARMTGVYLQPNKAIVGENAFAHESGIHADGVLKKAETYEPITPEMVGHGRGFVMGKHIGTHALRKRLDELGMKVADDKLMEIFRRVKTLGDMGKCVTDVDLQAIAEDVLGVMEDKVVDLQEVTIVSGNRVTPTASVKLRVDDREVLEAGTGVGPVDAAIVAIKKSLEDFADITLEEYHVDAITGGTDALIDVVIKLRHGDRIISARSTQPDIIMASVEAFLSGVNRLLANEKSEGTH

SEQ ID NO: 11142 - protein, 306 aa, Vibrio vulnificus YJ016
MCAITHLIALLNRETMNDDNSQNSEGPSRKSFFGRLGQLFQGEPKDRQELVDVIRDSEVNDLIDHDTRDMLEGVMEIAEMRVRDIMIPRSQMVTIERKDNLDSLIALITDAQHSRYPVISEDKDHVEGILLAKDLLKYLGSDSAPFDIEEVIRPAVVVPESKRVDRLLKEFRQERYHMAIVVDEFGGVSGLVTIEDILEEIVGDIEDEFDEEEDADIRKLSKHTYAVKALTTIEEFNETFGSRFSDEEVDTVGGLVMTAFGHLPTRGEIVEIDGFNFKVTAADNRRVIQLQVTVPDSVSVAETTPE

SEQ ID NO: 11143 - protein, 375 aa, Methanothermobacter thermautotrophicus str. Delta H
MTDYDVLIMGAGPAGSTLARLTATKGFRVGLFERKKIIGLPLQCAGLVSHRIMEVNVLPDEFILNSVRGAVLHSPSGIKLRVSKDRPEAHVIDRTAYDQHLAELAMEAGAELTKGTAVRDFNEKTGHVRVNGDELSADVLVDARGQSAAPSRYPARQYLVRFRDSEMDTDFVDLKVDSRLSPGFMWRIPIDEQTARVGVFGPQQNLKEFLKGFISDLSSDFEILESHHGFIPRPDLDLRLVRGRCILLGDAAGQVKPTTGGGIVLASRAAGVAAEVIQGVLEGDADLKEYEDACRKIHMSEMKNQMRVQRTFRLLSDKDLDHIFLKMKEYGAEDIISEYGDMDRQTPLIREFLKRGILFRIIPSILTSKVAGIWK

SEQ ID NO: 11144 - protein, 396 aa, Azoarcus sp. EbN1
MAKGKFERTKPHVNVGTIGHVDHGKTTLTAAITTILSKKFGGEAKAYDQIDAAPEEKARGITINTAHVEYETANRHYAHVDCPGHADYVKNMITGAAQMDGAILVCSAADGPMPQTREHILLARQVGVPYIIVFLNKCDMVDDEELLELVEMEVRELLSKYDFPGDDVPIIKGSALKALEGDQSDIGEPAIFRLAEALDSYIPTPERAIDRPFLLPIEDVFSISGRGTVVTGRVERGIVKVGEEVEIVGIKATVKTTCTGVEMFRKLLDQGQAGDNVGVLLRGTKREDVERGQVLCKPGSIKPHTHFTGEVYVLSKEEGGRHTPFFNNYRPQFYFRTTDVTGSIELPEGTEMVMPGDNVSITVKLMAPIAMEEGLRFAIREGGRTVGAGVVAKIIE

SEQ ID NO: 11145 - protein, 587 aa, Leptospira interrogans serovar Lai str. 56601
MNHLESFILPWTQEPFPNTVRKEANLALEKFSRGESGPEVEAFSIPLEFGTGGMRGKLGNGIGRMNEFTVGRAALGFISYLSKKNKKASIVIAYDSRRRSKEFAEVTAGIAAYLGVKVILFKEVTPTPILSYAIRYYKASGGVVITASHNPPEYNGFKAYLSDGGQLVPPDDQKIISKIDSIQDWKQIPILSTKDPIYKKMVKFAGKDCFTSYKKDLSKAGILSISLKPKDRTALKIVYSPLHGTGGKSMQELLNSFGYKNVFLVPEQKDPNGEFPTVKYPNPEEAEAMELSKKFAIQKNAHAFIATDPDADRLGIGVKNENGEYVLFNGNQIGSIMAAYLCEAYSTGKKKKKAVLVKTIVTTDLQENIAKKNKVKYKNVLTGFKFIAQVMAKIDKSKTDFFLFGGEESFGYLPVSFVRDKDSLSSALLLLEILTEKKDLFNYMDEIYLKYGLFQESLKSLTLEGSAGKEKIRKSLESLRTLDLLGKKIHHRKITGILDYKTQIAKGNASKSAFSGCPLSDVIQVILEGNAKLTIRPSGTEPKIKIYSSFQSLKAPKSKEEIKILTKDLLSEIKTSEEIFLQLAGLS

SEQ ID NO: 11146 - protein, 467 aa, Synechocystis sp. PCC 6803
MVHKKIDLNQLSEAESLLTPTYAARGLANSVSKYEMPETEMLPAIAYNLIHDELGLDGNSRLNLATFVTTWMEPEARQLMADTFDKNMIDKDEYPQTAEIELRCVNILSRLWNAPASAEATGCSTIGSSEAAMLGGMAMKWKWRQRRQAAGKPGDRPNLVMGINVQVCWEKFCRYWEVEPRFVPMEGDRYHISPEEAVKLIDENTIGVIGILGSTFDGSYEPIEALNDALETLNQRTGWQVPLHIDAASGGFIAPFLDPDLRWDFRLPWVKSINTSGHKYGLVYPGVGWIIWRDKEELPEELIFHCNYLGGDLPNFALNFSRPGNQVVAQYYNFLRLGKEGYRKIQQTCRDTALYLSGKIAQLGPFELLTDGGDIPVFAWRLKDEVLANTCYTLYDMADKLRERGWLVPAYRMPKNREDLVVQRIVVKEGFSRDMADLLLADMERAIAYFASQPDHKPKQEGSHFSH

SEQ ID NO: 11147 - protein, 559 aa, Synechococcus sp. WH 5701
MAPLRFLGGPSTDKFSLGSRFVKPARMTTLPDYSFHEPQVQWQRFCDLLWHHDDLGIWVDVSRMELNQAHLEALEPAFDRAFTAMQALEAGAIANPDEGRQVGHYWLRTPDLAPDPEAAAHIKAEVERIDAFGQQVIGGACPAPSGTPFTDVLWIGIGGSGLGPLLILRALKEEGLGLPFHFFDNVDPQGMSRTLSALGERLLTTLVVVVSKSGGTPEPRLGMEQARARLEALGGSWAQQAVAVTMVGSQLDQRAEAEGWLARFDMFDWVGGRTSITSAVGLLPAALIGADLHGFLEGAARMDAATRAANLRENPAALMAAAWHVAGGGAGGRDMVVLPYRDRLEVFSRYLQQLVMESLGKRLDRDGREVHQGIAVYGNKGSTDQHAYVQQLRDGVDNFFVTFIEALDDPADVAPVDGDYPGDFLDGFLQGTRSALTEGGRQSLSISLRRFDARSLGALVALFERAVGLYGELVNVNAYDQPGVEAGKKAAATILDLQGRVEALLADGQARSVAAIGEELQLPSPEAAFWILRHLCGNDRGFSAEGDWGDPAGLVFRKV

SEQ ID NO: 11148 - protein, 117 aa, Prunus dulcis
MAYSAMTKLALVVALCMVVSVPIAQAITCGQVSSNLAPCIPYVRGGGAVPPACCNGIRNVNNLARTTPDRQAACNCLKQLSASVPGVNPNNAAALPGKCGVNIPYQISPSTNCANVK

SEQ ID NO: 11149 - protein, 479 aa, Mesoplasma florum L1
MKLNKETILNLITEHNQDDIKKANELVASDKYYRPTYHIAPPNGLLNDPNGLVYIDGEHYIHYQWSPLQPYHGMKHWRLVKTKDFVNYDDLGVSVIPTEEFERTGAFSGSAFKEKDGVKIYYTGNIEENGEMIEEVQIKADFIDEKIVNKRVVVEHDKNLFTPHVRDPKIFEYENNKYMIFGAQCKADMLGGLVFYKTDDMEKYTFDRILKPSLDQTYGYMWECPNLDYLEGKMLFMQSSEGWFNEENPYELNSSRNVVYTQIDKLDFENNKLNEKSILKTMDFGHDFYAPQTYWVDKKLLMIGWLGAVDVQYPTDEYSWHSMLTIPRELSWSKEILVQKPYSEFKKNVLTKTTKKAFKELSVNKAIHLEFDLSDNLDIKILNEKNEFIEIKFTDKEIILDRTNQTAKVDWNFETPRKALRKFKNQKVEIFIDSSSIEIFADNYETIFTSRFFVKNFNKIQLNKEHEMLLSDIKEMKLK

SEQ ID NO: 11150 - protein, 310 aa, Staphylococcus epidermidis RP62A
MTEVDFDVAIIGAGPAGMTAAVYASRANLKTVMIERGMPGGQMANTEEVENFPGFEMITGPDLSTKMFEHAKKFGAEYQYGDIKSVEDKGDYKVINLGNKEITAHAVIISTGAEYKKIGVPGEQELGGRGVSYCAVCDGAFFKNKRLFVIGGGDSAVEEGTFLTKFADKVTIVHRRDELRAQNILQERAFKNDKVDFIWSHTLKTINEKDGKVGSVTLESTKDGAEQTYDADGVFIYIGMKPLTAPFKNLGITNDAGYIVTQDDMSTKVRGIFAAGDVRDKGLRQIVTATGDGSIAAQSAADYITELKDN

SEQ ID NO: 11151 - protein, 123 aa, Prunus dulcis
MASSGQLLKLVCLVAVMCCMAVGGPKAMAAVSCGQVVNNLTPCINYVANGGALNPSCCTGVRSLYSLAQTTADRQSICNCLKQAVNGIPYTNANAGLAAGLPGKCGVNIPYKISPSTDCKSIK

SEQ ID NO: 11152 - protein, 423 aa, Medicago truncatula
MGKEDEEMRGEIEERIINEEYKIWKKNSPFLYDLVITHALEWPSLTVEWLPDRTEPSGKDYSVQKLILGTHTSENEPNYLMLAQVQLPLDDSENDARHYDDDRPEVGGFGCANGKVQIIQQINHDGEVNRARYMPQNSFVIATKTVSAEVYVFDYSKHPSKPPIDGSCNPDLRLRGHNTEGYGLSWSKFKQGHLLSGSDDAQICLWDINGTPKNKSLDAHQIFKVHEGVVEDVAWHLRHEYLFGSVGDDQYLLVWDLRTPSVTKPVQSCIAHSSEVNCLAFNPFNEWIVATGSTDKTVKLWDLRKIGNVLHTFDCHKEEVFQVGWNPKNETVLASCCLGRRLMVWDLSRIDEEQSPEDAEDGPPELLFIHGGHTSKISDFSWNPCEDWVVASVAEDNILQIWQMAENIYHDEDDMPEQSAQAP

SEQ ID NO: 11153 - protein, 515 aa, Porphyromonas gingivalis W83
MLDKDTLAQVGSYFAQLKKSYTLRLNAHTSHPSYNEAKEMLDGLASVSDHVRAEYNAADDFRIDLLVDGADSGIGFRGIPGGHEFSSLLLAILNNDGIGRNIPDEGVQDRIRRINGPIELKTYVSLSCTNCPDVVQTLNMIAILNPTINHTMVDGSFFPDEVESLGIASVPTVMAGDEVIHVGRGDMAALLNKIEAKYGSVPAESADKTLRPFDLLVVGGGPAGSAAAIYSARKGLKVAIVAERVGGQVNETVGIENLISVPYTTGSELASNLNSHIKANTISLFEARTVSSITQQEGISRVEVTSGEVFTAPALIMATGASWRKLGVPGEKEYTGNGVAYCAHCDGPFFKGKRVAVVGGGNSGLEAAIDLAGICEHVTVVEFLDVLRADEVLQKKARETANIDILLSTATKEIMGNGQKVEGILLTDRNTGEEKQIALSGVFVQIGLAANTSLVKDLVETNSRGEVLIDTSCRTNTPGIYAAGDCTTVPYKQIVIAMGEGAKAALSAFEDRIRG

SEQ ID NO: 11154 - protein, 373 aa, Porphyra yezoensis
MSKPAVVIDNGSGRCKAGIAGEDSPKSVFPAVIGTPKAKSIMVGTGSKDVYVGDAAMARRGVLIIKYPLEHGIVTNWGDMEKIWHHGFFTELRVDPAEHPCLLTEAPLNPKANRERMTQIMFETFNVPAFYVAIQAVLSLYASGRTSGIVVDSGDGVTHTVPIYEGYSLPHAVQRIDLAGRDLTEYLCRLLQTKGYSFTTSAEKEIVRDIKQQLCFVAEDYDKEMAGAASNKTLEKEYELPDGQIITVAEERFQCPEALFKPDLTGMEMQGMHLTAYTSIMKTDIDIRKDLYNNCVMSGGSTMFAGIASRVQREIETLAPSSMKIKVIAPPERQYSVWIGGSILSSLSTFQQMWVSRSEYESDGPSVVHRKCF

SEQ ID NO: 11155 - protein, 318 aa, Haemophilus influenzae 86-028NP
MSDIKHAKLLILGSGPAGYTAAIYAARANLKPVLVTGLQQGGQLTTTDEIENWPGDFEMTTGSGLMQRMLQHAEKFETEIVFDHINRVDLSSRPFKLFGDVQNFTCDALIIATGASARYIGLPSEENYKGRGVSACATCDGFFYRNKPVGVIGGGNTAVEEALYLANIASTVHLIHRRDSFRAEKILIDRLYKKVEEGKIVLHTDRTLDEVLGDNMGVTGLRLANTKTGEKEELKLDGLFVAIGHSPNTKIFQGQLELNNGYIVVKSGLEGNATATSVEGVFAAGDVMDHNYRQAITSAGTGCMAALDAERYLDAQEA

SEQ ID NO: 11156 - protein, 323 aa, Haemophilus influenzae 86-028NP
MTKSAKIGVLLANLGTPDSPTPKSISRYLWQFLTDPRVVDLPRCKWYPLLKAIILPLRSKRIAKNYQAIWTEQGSPLLAISRQQKDALQAYLDTQNINAQVEIAMTYGNPSIQSTVKNLLKNQVERIIVLPLYPQYSSSTTGAVFDAFANALKEERGLVPFDFIHSYHIDENYINALANSIKVRLKSDEFLLFSYHGIPLRYEKMGDYYREHCKQTTIAVVNKLGLTENQWGMTFQSRFGREEWLQPYTDKFLESAATQNIQKIAVICPGFSVDCLETIEEIDKENRENFLTNGGQSYQYIPALNVEHTHIEMMGKLILEKLA

SEQ ID NO: 11157 - protein, 969 aa, Schizosaccharomyces pombe
MVSFNQLRNYFLESNSLRPSKWLFQSYGTSSSANILNGKLLARKLQRSVAEEVQALKAKDRNFKPALAIVQVGKREDSNVYVRMKEKAARLVGIDFKYCPFPETIQMPALLHELKKLNDDHTVHGVLVQLPLPKHLNERTVTESITPPKDVDGFGAFNIGLLAKNDATPIHYPCTPKGIMELLKDNKISVAGLNAVVLGRSDIVGNPISYLLRKDNATVTVCHSKTKDLIQHISNADLVIAALGKPEFVRGEWLKPGSVVVDVGINAVQRNGKRVLVGDVHFESASKVASSITPVPGGVGPMTVAMLMENIVNAAKIARTENIYRKIDLNPLELKKPVPSDIEIANSQEPKLISNLAKEMGIYDTELENYGNYKAKVNLAVYERLKHRKDGNYVVVSGITPTPFGEGKSTVVAGLVQAMGHLGKLGIACVRQPSQGPTFGVKGGAAGGGYAQFIPMDDFNLHMTGDIHAVTAANNLLVAALETRMFHENTQSDAALIKRLIPVKNGRRVIPRGLIGRWNRICASHNMDPEDVNNASPELLKEFVRLNVDPDTIECNRVLDVNDRFLRSIEVGKASTEKGHVRKTSFDISVASECMSILALSCDLNDMHSRLSRMVIANDKYGNAITAGDLGVSGALTVLLKDAIKPNLMQTLEGTPAFVHAGPFANISIGASSIIADKIALKLAGTESFDRPEDAGYVVTEAGFASDMGMEKFFNIKCRYSKLVPNTVVLVTTVKALKLHGGGPKLKPGAPIPEEYLVENLDLVKNGCSNMVKHIQNCHKFNIPVVVAINSYKTDSSKEHEIIREAALQAGAVDAVPSDHWAQGGKGAIELAKSVMTACDQSSNSKFRLLYDSETSIEDKVNVIAKEMYGANGVEFSSLAKERINTFIKQGFGNLPICMAKTQYSLSHNPEFRNVPKNFTVPIRDMRLNAGAGFIYPLAAEIQTIPGLPTAPAYLNIDICENGEIVGLS

SEQ ID NO: 11158 - protein, 493 aa, Zea mays
MVLSHGVGGSDESVHSTFASRYVRTSLPRYRMPEQSIPKEAAYQIINDELMLDGNPRLNLASFVTTWMEPECDKLIQASVNKNYVDMDEYPVTTELQNRCVNMIAHLFNAPLGDAETAVGVGTVGSSEAIMLAGLAFKRRWQNKMKAAGKPCDKPNIVTGANVQVCWEKFARYFEVELKEVKLSDGYYVMDPQKAVDMVDENTICVAAILGSTLNGEFEDVKLLNDLLTKKNAETGWDTPIHVDAASGGFIAPFLYPELEWDFRLPLVKSINVSGHKYGLVYAGIGWCIWRTKEDLPEELIFHINYLGADQPTFTLNFSKGSSQVIAQYYQLIRLGFEGYKNIMENCQENATVLKQGLEKTGKFNIVSKDNGVPLVAFSLKDSSRHNEFEISDFLRRFGWIVPAYTMPPDAQHVTVLRVVIREDFSRTLAERLVLDIEKVLHELDALPARVPSGDLAALAAAESSEREMEKQRQVISLWKRAVLAKKKTNGVC

SEQ ID NO: 11159 - protein, 505 aa, Dehalococcoides ethenogenes 195
MDKIKIFDTTLRDGEQAAGASLNAQEKLEIARQLEKLGVDIIEAGFPITSPGDFEAVKLIAQEVRTPVICGLARAIPADIDRAWEALKEAAHPRIHVFISSSEIHMVHQIKKSREEVMELARTMVARAKSYTDDIEFSPMDASRSDPEFLYKLLEAVIDAGATTLNIPDTVGYAIPSEFGELIKGIRQNVPNINKAVISVHCHDDLGMGTANSLAAVKNGARQVECTLNGIGERAGNAALEEVVMALRTRSDFFNFETGINTQEIYRSSRLVSALTGFAIQPNKAVVGENAFRHQSGIHQDGVIKMAKTFEIMDPKEVGIQASSLVLGKLSGRHAFKQHLTELGFDLNEEDFDRAFKAFKDLADKKKDVTDRDIEALVAEELRTTVELYHLDRIQVTSGDRGIPTAAVRLTTPNGGAAEDAALGSGPVDAVYKAINRIVNVPNKLTEFSVKSVTAGIDALGEVLIRIESDGVTYTGRGSDTDIIVASAKAYMNALNRLLRVKNAS

SEQ ID NO: 11160 - protein, 517 aa, Zea mays
  misc_feature (47)..(47): Xaa can be any naturally occurring amino acid
  misc_feature (198)..(198): Xaa can be any naturally occurring amino acid
  misc_feature (207)..(207): Xaa can be any naturally occurring amino acid
  misc_feature (238)..(239): Xaa can be any naturally occurring amino acid
  misc_feature (246)..(246): Xaa can be any naturally occurring amino acid
  misc_feature (271)..(271): Xaa can be any naturally occurring amino acid
  misc_feature (275)..(276): Xaa can be any naturally occurring amino acid
  misc_feature (278)..(278): Xaa can be any naturally occurring amino acid
  misc_feature (290)..(292): Xaa can be any naturally occurring amino acid
  misc_feature (299)..(299): Xaa can be any naturally occurring amino acid
MVSESNRGGADRTTAAGEERGQLLFDVPEIRFTKLFINGSFVDAVSXRTFETRDPRTGGVIASVAEADKEDVDLAVRAARAAFDHGEWPRMSGSERGRIMARLADLVEERADELAALESLDAGKHPAVTRAVDVGNAAGSLRYFAGAADKIHGETLKMPGQFQGHTLREPLGVAGVIIPWNFPSTMFAVKVAPALAAXGCALVVKPXEQTPLSALYLAQLAKQAGVPDGVINVVPGFXXTAGAALXSHMDVDMVSFTGSTEVGRLIMKASXESNXXPXYLELGGKSPLIXXXDADLDMXVELAVGASFFNKGEACVAASRVYVQERVYDRFEERLPERMRSWVVGDPFSDPSADQGPQVDKAQYERVLSYIDHGKREGATLLTGGRPCGPEGKGYYIEPTVFTNVKEDMIIAKEEIFGPVMCLMKFKTVEEAIARANDTRYGLGAGVVTRDLDVANRVVRSVRAGVVWVNCYFAMGSDCPFGGRKMSGFGKDEGMHALDKYLAVKSVVTPLRASPWI

SEQ ID NO: 11161 - protein, 1012 aa, Schizosaccharomyces pombe 972h-
MSNNMNIDQTDQNTIDEGLYSRQLYVLGHEAMKQMSQSNVLIIGCKGLGVEIAKNVCLAGVKSVTLYDPQPTRIEDLSSQYFLTEDDIGVPRAKVTVSKLAELNQYVPVSVVDELSTEYLKNFKCVVVTETSLTKQLEINDFTHKNHIAYIAADSRGLFGSIFCDFGENFICTDTDGNEPLTGMIASITDDGVVTMLEETRHGLENGDFVKFTEVKGMPGLNDGTPRKVEVKGPYTFSIGSVKDLGSAGYNGVFTQVKVPTKISFKSLRESLKDPEYVYPDFGKMMRPPQYHIAFQALSAFADAHEGSLPRPRNDIDAAEFFEFCKKIASTLQFDVELDEKLIKEISYQARGDLVAMSAFLGGAVAQEVLKATTSKFYPLKQYFYFDSLESLPSSVTISEETCKPRGCRYDGQIAVFGSEFQEKIASLSTFLVGAGAIGCEMLKNWAMMGVATGESGHISVTDMDSIEKSNLNRQFLFRPRDVGKLKSECASTAVSIMNPSLTGKITSYQERVGPESEGIFGDEFFEKLSLVTNALDNVEARMYVDRRCVFFEKPLLESGTLGTKGNTQVVVPHLTESYGSSQDPPEKSFPICTLKNFPNRIEHTIAWARDLFEGLFKQPIDNVNMYLSSPNFLETSLKTSSNPREVLENIRDYLVTEKPLSFEECIMWARLQFDKFFNNNIQQLLFNFPKDSVTSTGQPFWSGPKRAPTPLSFDIHNREHFDFIVAAASLYAFNYGLKSETDPAIYERVLAGYNPPPFAPKSGIKIQVNENEEAPETAANKDKQELKSIADSLPPPSSLVGFRLTPAEFEKDDDSNHHIDFITAASNLRAMNYDITPADRFKTKFVAGKIVPAMCTSTAVVSGLVCLELVKLVDGKKKIEEYKNGFFNLAIGLFTFSDPIASPKMKVNGKEIDKIWDRYNLPDCTLQELIDYFQKEEGLEVTMLSSGVSLLYANFQPPKKLAERLPLKISELVEQITKKKLEPFRKHLVLEICCDDANGEDVEVPFICIKL

SEQ ID NO: 11162 - protein, 328 aa, Pseudomonas putida
MELLIQPNNRLISFSPGANLLEVLRENGVAISYSCMSGRCGTCRCRVTDGSVIDSGAGSGLPNLVDEHYVLACQSVLTHNCAIEIPETDEIVTHPARIIKGTVVAVESPTHDIRRLRVRLAKPFEFSPGQYATLQFSPEHARPYSMAGLPDDQEMEFHIRKVPGGRVTEYVFEHVREGTSIKLSGPLGTAYLRQNHTGPMLCVGGGTGLAPVLSIVRGALKLGMTNPILLYFGVRSQQDLYDAERLHKLAADHPQLTVHTVIAMGPINESQRAGLVTDVIEKDIISLAGWRAYLCGAPAMVEALCTVTKHLGISPEHIYADAFYPGGI

SEQ ID NO: 11163 - protein, 519 aa, Oryza sativa (indica cultivar-group)
ESETNMQILLVFLHCLRKQKLEELNEIQTDLQYIKEDISAVERHRLELYRTKERYSMKLRMLLDEPAASKMWPSPMDKPSGLFPPNSRGPLSTSNPGGLQNKKLDLKGQISHQGFQRRDVLTCSDPPSAPIQSGNVIARKRRVQAQFNELQEYYLQRRRTGAQSRRLEERDIVTINKEGYHAGLEDFQSVLTTFTRYSRLRVIAELRHGDLFHSANIVSSIEFDRDDELFATAGVSKRIKVFEFSTVVNEPSDVHCPVVEMATRSKLSCLSWNKYSKNVIASSDYEGIVTVWDVQTRQSVMEYEEHEKRAWSVDFSRTEPSMLVSGSDDCKVKVWCTKQEASAINIDMKANICSVKYNPGSSHYVAVGSADHHIHYFDLRNPSAPVHVFGGHKKAVSYVKFLSTNELASASTDSTLRLWDVKENCPVRTFRGHKNEKNFVGLSVNNEYIACGSETNEVFVYHKAISKPAANHRFVSSDLDDADDDPGSYFISAVCWKSDSPTMLTANSQGTIKVLVLAP

SEQ ID NO: 11164 - protein, 713 aa, Medicago truncatula
MNMRSLSSSSSSSPATVTKLALSIHSSFPTLNLNPIFFYKFKSNKHNKPPFFSIRNCTTSNSISAKPSSQLRKNRSSNSDSDPKLTALRRLFSKPDVSIDAYIIPSQDAHQSEFIAQSYARRKYISAFTGSNGTAVVTNDKAALWTDGRYFLQAEKQLNSNWILMRAGNPGVPTTSEWLNEVLAPGARVGIDPFLFTSDAAEELKHVISKKNHELVYLYNSNLVDEIWKEARPEPPNKPVRVHGLKYAGLDVASKLSSLRSELVQAGSSAIIVTALDEIAWLLNLRGSDIPHSPVVYAYLIVEIDGAKLFIDNSKVTEEVDDHLKKANIEIRPYNSIVSEIENLAARGSSLWLDTSSVNAAIVNAYKAACDRYYQNYESKHKTRSKGFDGSIANSDVPIAVHKSSPVSLAKAIKNETELKGMQECHLRDAAALAQFWDWLEKEITNDRILTEVEVSDKLLEFRSKQAGFLDTSFDTISGSGPNGAIIHYKPEPGSCSTVDANKLFLLDSGAQYVDGTTDITRTVHFGKPTTREKECFTRVLQGHIALDQAVFPEDTPGFVLDAFARSFLWKVGLDYRHGTGHGVGAALNVHEGPQGISYRYGNLTPLVNGMIVSNEPGYYEDHAFGIRIENLLYVRNVETPNRFGGIQYLGFEKLTYVPIQIKLVDVSLLSTTEIDWLNNYHSVVWEKVSPLLDGSARQWLWNNTQPIIRETV

SEQ ID NO: 11165 - protein, 837 aa, Cytophaga hutchinsonii
MKNETHILVVGNGMVGYKFCEKLKKKDSSGNFTITVLGEEPRPAYDRVHLSEYFSTRSADHLTMAPKEWYAANNINLVLGNPVVSIDREQKSVTTFSGAVYTYDKLILATGSAAFVPPIKGVEKDGIFVYRTIEDLEMMIKQAEKSKVGAVIGGGLLGLEAAKALLDLGLKPHVIEFAPRLMPRQLDEAGSKILQQKLESLGLSIHLNKTTSYFDGDAAVTAMQFADDTRLELDMVVISAGIKPRDEIAKKAGLTVGPRGGIEVNDALQTSDPNIYAIGECALHWGMIYGLVAPGYEMAEVVAENLIHEHSKAFRSFDMSTKLKLIGVDVASFGDAFGTEEGSVTITYENKDKGIYKRLNLSADKKRVIGGILVGDAESYNMLLQMVTNKMALPPDPEDLILGSRGEGRSEGGNAGVMSLPDEALICSCEGVTKGMICCAVTDQHVTDLPGMKKCTKAGTGCGGCVPMVNDLISETLKSQGKVIKKVLCEHFDYSRQELLDLIKINEYKSYDVILNEAGKGDGCEICKPAIGSILASVWNEVILKQATIQDSNDRFLANLQKGGTYSVVPRVAGGEITADKLIVLGEVAKKYDLYCKITGGQRIDLFGAPVHQLPDIWEELIHAGFESGHAYGKSLRTVKSCVGSTWCRFGVQDAVSYAIRIEDRYKGIRSPHKVKMAVSGCVRECAEAQSKDFGIIATDKGWNLYVCGNGGAKPQHALLFASDLDDETCIRYIDRIMIFYIRTAEPLMRTATWLNKLEGGMDYLRDVIINDSLGMCSQFEKELQLLVDTYHCEWKEVVENPELRKRFNTFINSEEADETMAFVEMRTQKKPANWKA

SEQ ID NO: 11166 - protein, 108 aa, Vibrio parahaemolyticus RIMD 2210633
MTMNITGKNIEITSAIRAHIESKFKKLEKWQVDIIGCQATFSEEPNKQKKFEAVIKVPKGQLVASATHEDLYAAINEVEQKLERQLNKLTHKPEARRANKPELVEEEE

SEQ ID NO: 11167 - protein, 534 aa, Oryza sativa
  misc_feature (227)..(227): Xaa can be any naturally occurring amino acid
  misc_feature (238)..(238): Xaa can be any naturally occurring amino acid
  misc_feature (247)..(247): Xaa can be any naturally occurring amino acid
  misc_feature (267)..(267): Xaa can be any naturally occurring amino acid
MSSGKGGGGGGKGGGGKKKEVKKETKLGMAYKKDDNFGEWYSEVVVNSEMIEYYDISGCYILRPWAMEIWELLKEFFDAEIKKLKLKPYYFPLFVTENVLQKEKDHIEGFAPEVAWVTKSGKSDLEAPIAIRPTSETVMYPYFSKWIRSHRDLPLRCNQWCNVVRWEFSNPTPFIRSREFLWQEGHTAFATKEEADEEVLQILELYRRIYEEFLAVPVSKGRKSEMXKFAGGLYTTSXEAFIPNTGXRGVQGATSHCLGQNFAKMFXITFENDKGSRSMVWQNSWAYTTRSIGVMVMTHGDDKGLVLPPRVAPLQVIVIPVPYKDVDTTAIVNECKKTVETLEKAGIRADLDTRENYSPGWKYSHWEMKGVPLRIEIGPKDMANNQGTFVIMHFPENCYIFTVREKELVVVVVMARVVRRDNGAKADIPTADLVEKVNGLLDEVQKNLFETAKQKRDACLKVVNTWDEFIVALNDKKLILAPWCDEEEVEKDVKARTKGDLGAAKTLCTPFEQPDLPEGQHDNIEENQTKTKCA

SEQ ID NO: 11168 - protein, 381 aa, Schizosaccharomyces pombe 972h-
MFTNNFSQKQILGVSKDASESEIRKAYRQLTKQWHPDKNPGNEEAQEKFIEINKAHEVLSDPEQRKIYDAYGEEGLNGQPGGPGGGPGEGFPGGGFGFDPFGDIFDNIFGGRRRQNAVRRGPSMEQIVQIHLSSFYTGGSFTLEIPVKRTCSVCSGQGFNPKYSADKAIESCPVCGGSGFRVIEHMIAPGFRQQMRMPCNACNGNGRTIKHKCPRCKGERVAEVVESFDIKVPAGAPEGYRIGFRGKADEIPGMEAGDIIVILEAAGGDYGWTRKDNDLYRKETISVREALLGNWKRKIQKLDGSFMEVKRSAGEVVHPGETERVKNQGMPIYNLHKGKTTSAHGSAYIEWEVKFPKKLKGKFLKDLNNLFEKYDNEFDEL

SEQ ID NO: 11169 - protein, 448 aa, Thermotoga maritima
MSLKFDFSNLFEPNISGGLTDEDVKSVEEKVTSAVRNFVENTPDFAKLDRSWIDSVKSLEDWIINFDTVVVLGIGGSGLGNLALHYSLRPLNWNEMTREERNGYARVFVVDNVDPDLMSSVLDRIDPKTTLFNVISKSGSTAEVMATYSIARGILEAYGLDPREHMLITTDPEKGFLRKLVKEEGFRSLEVPPGVGGRFSVLTPVGLLSAMAEGIDIDELHEGAKDAFEKSMKENILENPAAMIALTHYLYLNKGKSISVMMAYSNRMIYLVDWYRQLWAESLGKRYNLKGEEVFTGQTPVKALGATDQHSQIQLYNEGPNDKVITFLRVENFDREIVIPETGRAELSYLARKKLSELLLAEQTGTEEALRENNRPNMRVTFDGLTPYNVGQFFAYYEAATAFMGYLLEINPFDQPGVELGKKITFALMGREGYTYEIKERSKKVIIE

SEQ ID NO: 11170 - protein, 519 aa, Acinetobacter sp. ADP1
MLDQNIKTQLKAYLERLESPIELVAALDDSDKAAKIKELVTEIAELSNQVTARFDGQNTRRPSFGIAKAGEQPRVFFAGLPMGHEFTSLILALLQTSGYAPKVSDEILNQIKGLNLKADFDVFVSLSCHNCPDVVQALNLIAIYNPNSTATMIDGAFFQDEVEERKIMAVPMVFQNGNHIGQGRMTLEEIVAKLDSNAAEKDAAAINAKDVFDVLVVGAGPAGGTAAIYAARKGIRTGMIAERFGGQVMDTMDIENFTSVQKTVGPKFAADMEAHVREYDVDIMNLQRVSKIVGADQTASGLVEVELENGAKVESKTVILSTGARWRKMGVPGEQEYATRGVAYCPHCDGPLFKGKKVAVIGGGNSGVEAAIDLAGIVEHVTLVEFDTKLRADQVLQDKLNSLPNATIITNALSTEVIGDGAQVTGLKYKDRATDTEHTIELAGIFVQIGLLPNTDFLKGSVELSPRGEIIINERNETNVKGVFAAGDCTTVPYKQIIIATGEGAKASLSAFDYIIRHG

SEQ ID NO: 11171 - protein, 386 aa, Ustilago maydis 521
MFTVPAFRSASSSLAKRPTLASSALKLNRMSVRGLAMPVTNAPTSAYNKQKGSDGKYTVTLIPGDGIGPEVSNAVKEIYHAANVPIKWEEVSVAPFIKDGKQTIPEESIVSIKKNTVALKGPLATPIGKGHVSLNLTLRRTFHLFANVRPCKSIEGFKTAYDNVDTVLIRENTEGEYSGIEHEVVDGVVQSIKLITYEASERVARYAFHHAEQNGRNKVTAVHKAPIMRMSDGMFLHACRQVAKEYPHIAYDEDLLDRACLRIVQDPAPYADRVMVMPNLYGDILSDMCAGLIGGLGLTPSGNIGKDASIFEAVHGSAPDIAGQDKANPTALLLSSIMMLRHMSLFDKADQIENAIFKTIAAGERTGDLGGKLGTRAFTDKIISRL

SEQ ID NO: 11172 - protein, 100 aa, Zea mays
MRKRQVVLRRASPEEPSRSSSTASSLTVRGVRYGECQKNHAAAVGGYAVDGCREFMASNGEEGSVAALTCAACGCHRSFHRREIETEVVCDCNSPPSTGN

SEQ ID NO: 11173 - protein, 318 aa, Rickettsiella grylli
MNKVQNHRLIILGSGPAGYTAALYAARANLKPVLITGLQKGGQLMTTTDVDNWPGDEEGLQGPALMERMYQQVQRFNSHIIFDHINQVDLSKNPFSLKGDGTLYHCDALIIATGASAKYLGLPSEKEFMGRGVSACATCDGFFYKGQKVAVIGGGNTAVEEALYMANIAEQVFLIYRKSKFFRPEEILLDKLMAKVNAKKISLMFDTEIDKILGDEKGVNGIKLFNNKTKATSQLDVQGVFIAIGHNPNTTIFKNQLDMENNYILVRGGNKGFATATSKKGVFAAGDVMDSVYRQAITSAGTGCMAALDAEKYLSENP

SEQ ID NO: 11174 - protein, 492 aa, Methanosarcina mazei Go1
MIREYKLLIGGKSVDSSTGETFDDINPATLENLATLQVAGIEDVDRAVEAAEAGFRVWSEVPAPGRAEVLFRAARIMQERKEGLARLMTEEMGKVLPETRGDVQEAIDITIYAAGEGRRMFGETTTSELRDKFCMTVLRPVGVVGMITPWNFPIAIPSWKIMPALIAGNAIVFKPASDTPLLTIKLVEILMEAGLPPGVINIVPGPGGSTGKAIVQHPRIRAISFTGSLDTGKWIMEECAKSMKRVSLELGGKNPVIVMDDANLELALEGVVWGAFGTTGQRCTATSRLILHEKIKDEFIKRLLAKTKSLRVGNGLLPETDVGPVINKAQLEKIEKYVRIGKEEGAAILVGGNRIDPGLPGYFFEPTIFTDVSPEMRIAQEEIFGPVLSIITVSDFDEAIEVANNIKYGLSSAIYTENVRTAFRAIEKLEAGITYVNAPTIGAEVHLPFGGIKGTGNGFREAGTEAIKEFTEVKAVYIDYSGRLQKAQIDTE

SEQ ID NO: 11175 - protein, 509 aa, Zea mays
MVLSHGVGGSDESVHSTFASRYVRTSLPRYRMPEQSIPKEAAYQIINDELMLDGNPRLNLASFVTTWMEPECDKLIQASVNKNYVDMDEYPVTTELQNRCVNMIAHLFNAPLGDAETAVGVGTVGSSEAIMLAGLAFKRRWQNKMKAAGKPCDKPNIVTGANVQVCWEKFARYFEVELKEVKLSDGYYVMDPQKAVDMVDENTICVAAILGSTLNGEFEDVKLLNDLLTKKNAETGWDTPIHVDAASGGFIAPFLYPELEWDFRLPLVKSINVSGHKYGLVYAGIGWCIWRTKADLPEELIFHINYLGADQPHFTLNFSKVTSRQANLVMAHKTISGSSQVIAQYYQLIRLGFEGYKNIMENCQENATVLKQGLEKTGKFNIVSKDNGVPLVAFSLKDSSRHSEFEISDFLRRFGWIVPAYTMPPDAQHVTVLRVVIREDFSRTLAERLVLDIEKVLHELDALPARVPSGDLAALAAAESSEREMEKQRQVISLWKRAVLAKKKTNGVC

SEQ ID NO: 11176 - protein, 983 aa, Photobacterium profundum SS9
MTFNRNGIGGKLLLAFSAMAALMILAVVIGVAGFSLVAKTERTVINSAVPALVEARHLSDLSSRIIFTAQVLATSKTEHERQRQGRALTIYIEGLKDSLTALKSYPFDEDLMSQLDGDVKSIIDNLALMGLLVGRQIRLQAQSDELTSEMLVATQQVDSLSQSQVSNASTIAVANVSRIYDLVESGDNQAVYNALDSLVEVDMDLSERLFELRFLALQVINMLDDSKRLGDIGNLTRLKERFIHAVNVMSYRVKSVEDPSRSAQLTELTSNLNRGGVLFGVLEQLLYATKDVERLDQQNLVLFQQLNSTVDGIITAANEGTQQAVTKVDETLTVARTTLISISVIGLAALVLIMWRFVYASVICRFNDYSQALLSLACGDLDIQLDIKGDDELAHMGRAIMVARDTASERFRLTLVERKIRQELQLHKESLERLVAQRTSELEKTNSRLNEEVINHEKARAEAEKANRAKSAFLATMSHEIRTPMNGILGTASLLGDTGLNQQQARYLNVINRSGETLLDILNDILDYSKIEAGHLDIRPVDFSLSELVLDVHNMLESRALAKHIQLVNHIDDSMNNVWLGDVTRIRQVLINLVGNAIKFTDQGQVTIAVSMNPDMPDELLFEVTDSGIGIDEAEQDILFNAFKQAEEGRKTIGGTGLGLAISRHIVAAMEGEIGVDSTINVGSCFWFSIPLERGKLSTGTEGTMITIPPAHILLVEDNPVNSMVAEGFLRRLGHSVITAEDGKSAEREFHQHAFDMALLDINLPDTDGVTLLHRLRRIEEANSESWEEPVPMVAFSAHVFREEVEQYLTAGFAGFLPKPVTEKQLIATIGSILKGDKRVVVENIPFDNVSVIENDKQDNNNAEKSESDSVFPVLKESVLGDDLQVLGVEQVQKLIALFASSSSETLDKLQQAVEASDMAEVSNHAHTLKGAAGTMGLIRLHQECLLFEKAGKAGSLDGVDIKTVSQAFEASKQALESTFIPH

SEQ ID NO: 11177 - protein, 692 aa, Sinorhizobium meliloti 1021
MAQAALKKDRRNAPDESIDWKKVVQLLLLSRALDEMEEQRLVPEKKILYQFSARGHDMAQILLGLHLTGRHDAACGYYRSRPLLLALGVDPADALGSAMGRAGGYSDGRDIGVVFNYPNPHGASALPMCGGVGTQYTPTAGWAQAITYFSEVLGKEEYQKDIAVVLGGDGSVASNGFWSALTIATTQGLPLLFYIEDNGFGISVPSSFQTPEGNIAGNLAGWKNLTVLDGDGSDPEEAARLTKGAVELVREGRMPVLLRLEVPRLEGHSFQDTQTYKSEELVRSEWAHDPLPRLRDYIVPAMLSAEEWNEAARDAKAAAERARVEAESRPVADPETVTSHVFFEGRMQVMGGQHPAGYRPPKTTETATGDGQRINMVTAIRRTLDHEMTVNQRVVLFGEDIGPKGGVHAVTLGLQEKFGTARVFDTSLSEEGIIGRAVGMALAGLVPVPEIQFRKYAEPAIEQLNDCGTIRWRTSNRFAAPIVVRMAGGFLKCGDPWHSQTNEVAFVHQPGWKIAVPSNAEDAVGLLRTALRGNDPVIFFEHRAMLDHPWARRPYPGDAFALPFGKAKFTREGRDITIVTWGAMVPRCEEAAEGISADVIDLRTLMPWDRKAVIASVRRTRRCLIVHEDLATAGFGAEIAAAVADEAFIDLDAPISRLTMPDIPSPHNPALLDWAVPSTERIRRKIIDLLEF

SEQ ID NO: 11178 - protein, 492 aa, Burkholderia thailandensis E264
MSAMSVYGLQRLYIAGAYADATSGKTFDTFDPATGELLASVQQASADDVERAVASAREGQREWAAMTSMQRSRILRRAVELLRERNDALAELEMRDTGKPIAETRAVDIVTGADVIEYYAGLATAIEGLQVPLRPESFVYTRREPLGVCAGIGAWNYPIQIACWKSAPALAAGNAMIFKPSEVTPLSALKLAEIYTEAGVPAGVFNVVQGDGSVGALLTAHPGIAKVSFTGGVETGKKVMSLAGASSLKEVTMELGGKSPLIVFDDADLDRAADIAVTANFFSAGQVCTNGTRVFVQQAVKDAFVERVLERVARIRVGKPSDPDTNFGPLASAAQLDKVLGYIESGKAEGAKLLAGGARLVNDHFASGQYVAPTVFGDCRDDMKIVREEIFGPVMSILSFETEDEAIARANATEYGLAAGVVTENLSRAHRAIHRLEAGICWINTWGESPAEMPVGGYKQSGVGRENGITTLEHYTRIKSVQVELGRYQPVF

SEQ ID NO: 11179 - protein, 323 aa, Candida albicans SC5314
MSKPAGRTILASTIAKPFQEEVTKAVKQLNFTPKLVGLLSNEDPAAKMYANWTGKTCESLGFKYELLEVNKNDLETALIKANKDDSVNGIMVYFPVFGDKQDQYLQQLISPEKDVEGLNFLYYHNLYHNVRFLDPPQNQQKSILPCTPLAMVKILEYLGVYNTILHYGNRLYGKKVLIVNRSEIVGRPLAALLANDGATVYSVDINNIQQFTRGDDLSEQRHKVVDLSPEEYTLEKLAPQCDVIIIGVPSENYKFPSDLVSHGTVVINFASSKNFNDDVKLRAGLYVPSIGKVTIAILLRNLLRLIHNKQIRQGEVSDATSSA

SEQ ID NO: 11180 - protein, 432 aa, Sulfolobus solfataricus P2
MIYFFMVDAVELSRKYEGKIEIYPKVPITSYNDFALIYTPGVAEVSKAIYKDPDKSFELTSRWNTIAVVTDGTRVLGLGNIGPTAAMPVMEGKSLLFKYLGGVDAIPLPINVKSADEFTNVVKALETSFGGINLEDIESPKCFYILEKLQSMLNIPVWHDDQQGTAAAILAGLINAMILTNKDPKESKVVFYGAGASNIAAARILAKYGFKYENIVMIDSKGPLYADREDVDHLMLHHKWKYELAIKTNKWEAKEIKDAFSGADAVVAASTPGPNVIKKEWISLMNKEAIVFALANPVPEIWPQDAKEAGAKIVATGRSDFPNQVNNSLIFPAIFRGVLDSRAKAITDEMTIAASEALAKYARDRGINENYIIPRMDEWEAFYEEAAAVASKAVELGLARVKKSREEFREIAKERIIRARKIMNLVISTWSP

SEQ ID NO: 11181 - protein, 324 aa, Streptomyces sp. FR-008
MSEIREVVIIGSGPAGYTAALYTARAQLRPVLFGSSIFVGGSLTTTTEVENFPGFPEGVDGPVLMENMRAQAEKFGAEMIDDDIVAVDLTGDIKLLTDSAGTVHRAKTVIIATGSGFRKLGLPNEDELSGRGVSWCATCDGFFFRDRDIVVVGGGDTAMEEATFLTRFAKSVTVVHRRSTLRASKVMQDRAFSDDKISFAFDSEIAEIKDTGGMLGGVVLRDVLTGATRDLDVTGLFIAIGHDPRTELFTGQVELDDEGYIKVDSPSTRTNLPGVFAAGDVVDHIYRQAITAAGTGAAAALDAERYLAARGVAQTEPATAAVPV

SEQ ID NO: 11182 - protein, 320 aa, Nicotiana glutinosa
MENFPIINLEKLNGSERADTMEMIKDACENWGFFELVNHGIPHEVMDTVEKLTKGHYKKCMEQRFKELVANKGLEAVQAEVTDLDWESTFFLRHLPVSNISEVPDLDDQYREVMRDFAKRLEKLAEELLDLLCENLGLEKGYLKNVFYGSKGPNFGTKVSNYPPCPKPNLNKGLRAHTDAGGIILLFQDDKVSGLQLLKDGQWIDVPPMRHSIVVNLGDQLEVITNGKYKSVMHRVIAQTDGTRMSLASFYNPGSDAVIFPAPALVEKEAEESKAIYPKFVFDDYMKLYALLKFQAKEPRFEAMIKAMETDVKCDPVATA

SEQ ID NO: 11183 - protein, 435 aa, Staphylococcus epidermidis RP62A
MTTKTLNISEEQLVDYSKAHNEPSWMTELRKKALKLTETLEMPKPDKTKLRKWDFDTFKQHHTTGDAYTQLTDLPKSVKEIIDVENSENLIIQHNNELAYTQVSDQAKHDGVIIEGLSEALVNHSDLVQKYFMTKAVDVDEHRLTALHTALVNGGIFVYVPKNTVVEHPIQYVVLHDDEQASFYNHVIIVTEESAEVTYVENYLSTTSGEDNQLNIVSEVIAGANSNVTYGSVDYLDKGFTGHIIRRGSADADASINWALGLMNEGSQIIDNTTNLNGDRSTSALKSVVVGTGDQKINLTSKIVQYGKETDGYILKHGVMKENASSVFNGIGYIKRGGTKSIANQESRVLMLSENARGDANPILLIDEDDVEAGHAASVGRVDPEQLYYLMSRGISRAEAERLVIHGFLDPVVRELPIDDVKRQLREVIERKVSK

SEQ ID NO: 11184 - protein, 308 aa, Glycine max
MCALRALTRSVCNSSSYVKTSKPYLILNLITHQHQTRRNLILESSASEFVRLHKLTGPDSGIVEISLDRPQAKNAIGKEMLRGLSHAFELINQKSYANVAMISSSVPGVFCAGADLKERRTMSQSETKIFVKSLRSTFSFLEDVRVPTIAVIEGVALGGGLEMALACDIRICGENALMGLPETGLAIIPGAGGTQRLPRLVGKAIAKDIIFTGRKIDGKEALSLGLVNYCVPAGEAYSKALAIAHDINQKGPVALRMAKRAINEGVETDLTSALELEEDCYDQVLNTKDRLEGLAAFAEKRKPSYTGE

SEQ ID NO: 11185 - protein, 816 aa, Haemophilus somnus 2336
MRVLKFGGTSLANPQRFLQAAALIEKAHLEEQAAGVLSAPAKITNHLVALSEKAALNQPTDGHFDEAIEIFYNIINGLYAENTHFDLVGTKALIESEFAQIKGLLENIRQAGKVEDAVKATIDCRGEKLSIAMMNAWFEAKGYTVTVINPVEKLLAYGSYLESSVDIAESTKRVDAKSIPAKNIVLMAGFTAGNDKGELVLLGRNGSDYSAACLAACLGASVCEIWTDVDGVYTCDPRLVPDARLLSSLSYREAMELSYFGAKVIHPRTIGPLVEPQIPCLIKNTGNPEGAGSIIDNRENISEGLQVKGITNLDNVAMFNVSGPGMQGMVGMAARVFSAMSKASVSVILITQSSSEYSISFCVPTKAIEKAKAALNAEFEQELVAKDLDPVEVIHDLSIISVVGDGMERSKGIAASFFSALASANISIVAIAQGSSERSISAVVPLNKAIEAVKATHQALFNNRKVVDMFLVGVGGVGGELIEQIKRQSEYLAKKDIEIRVCALANSNKMLLNENGLNLGNWREDLANATQPSDFDVLLSFIKLHHVVNPVFVDCTTAESVAGLYERALKEGFHVITPNKKANTRELDYYNQVRENARKNHRKFLYDTNVGAGLPVIDNLQNLLAAGDDVVSFNGILSGSLSFIFGKLEEGLSLSEATALAREKGFTEPDPRDDLSGQDVARKLLILAREIGLELELSDIEVEGVLPQGFSEGKSADEFMAMLPSLDEEFAERVAKAKSEGKVLRYVGQIEEGKCKVSIVAVDGDAPLYKVKNGENALAFYTRYYQPIPLLLRGYGAGNAVTAAGIFADILRTLKH

SEQ ID NO: 11186 - protein, 1031 aa, x Tritordeum sp.
MERARRLASRALLRRLLAASSSATSPAPSRGVSTLAPKPAAGSRPRARPAHQYTPGCPVSVSALQPSDTFPRRHNSATPAEQAVMASECGFNTLDALIDATVPAAIRAPPMQFTGKFDAGFTESQMLEHMAHLASMNKTYKSFIGMGYYNTHIPAVILRNLMENPAWYTQYTPYQAEIAQGRLESLLNYQTMVADLTGLPMSNASLLDEATAAAEAMAMCLGIVKSKKKTFLIASNCHPQTIDICQTRATGFDINVVVSAAKDFDYSSGDVCGVLVQYPGTEGEVLDYAEFVKDAHAHGVKVVMATDLLALTTLRPPGEIGADIAVGSAQRFGVPMGYGGPHAAFLATSQEYKRLMPGRIIGVSVDSSGKPALRMAMQTREQHIRRDKATSNICTAQALLANMAAMYAVYHGPAGLKAIADRVHGLAGTFAHGLKKLGTVTVQELPYFDTVKITCADANAIAEEARKNEMNLRVVDANTITVAFDETTTLEDVDKLFKVFSGGKPVDFTAESIAPEVSSSIPPSLVRDSPYLTHPIFSMYHTEHELLRYLHKLQSKDLSLCHSMIPLGSCTMKLNATVEMMPVTDPKFANMHPFAPIDQAAGYHEMFDNLGDLLNTITGFDSFSLQPNAGASGEYAGLMVIRAYHKARGDHHRNVCIIPVSAHGTNPASAAMCGMKIVAVGTDAKGNINIEELRKAAEANKDNLSALMVTYPSTHGVYEEGIDEICRIIHENGGQVYMDGANMNAQVGLTSPGFIGADVCHLNLHKTFCIPHGGGGPGMGPIGVKKHLAPFLPSHPVIPTGGFPLPEKTDPLGSISAAPWGSALILPISYTYIAMMGSQGLTEASKIAILNANYMAKRLEKHYPVLFRGVNGTVAHEFIIDLRGFKATAGIEPEDVAKRLMDYGFHGPTMSWPVPGTLMIEPTESESKAELDRFCDALISIREEIAEVENGKADAHNNVLKGAPHPPQLLMGDAWTKPYSREYAAFPAAWLRGAKFWPTTCRVDNVYGDRNLICTLQQASQVAEEAAAATA

SEQ ID NO: 11187 - protein, 316 aa, Nicotiana glutinosa
MESFPVVNMELLNSEQRAATMETIKDACENWGFFEVVNHGISHELLDTVEKFTKGHYNECMERRFKEMVASKGLEAVQTEIKDLDWESTFYLKHLPVSTISQVPDLEDEYRKIMKEFAEKLEKLAEQLLDLLCENLGLEQGYLKKAFYGSNGPTFGTKVSNYPPCPKPDLIKGLRAHTDAGGIILLFQDDKVSGLQLLKDDKWIGVPPMRHSIVINLGDQLEVITNGKYKSMEHRVIAQPDGNRMSIASFYNPGSDAGISPAPELLEKENKVIYPKFVFEDYMKLYAGLKFQAKEPRFEAMKAVETAVNSAPIATV

SEQ ID NO: 11188 - protein, 465 aa, Staphylococcus epidermidis RP62A
MAKQAPDVGDYKYGFHDEDVSIFRSERGLTENIVTEISKMKEEPQWMLDFRLKALKLFYKMPMPQWGGDLSELDFDDITYYVKPSEHTERSWDEVPEEIKRTFDKLGIPEAEQKYLAGVSAQYESEVVYHNMEKELEEKGIIFKDTDSALRENEELFREYFASVVPAADNKFAALNSAVWSGGSFIYVPKNVKLDTPLQAYFRINSENMGQFERTLIIADEGASVNYVEGCTAPVYSTSSLHSAVVEIIVHKDAHVRYTTIQNWANNVYNLVTKRTFVHENGNMEWVDGNLGSKLTMKYPNCVLLGEGAKGSTLSIAFAGKGQVQDAGAKMIHKAPNTSSTIVSKSISKNGGKVIYRGIVHFGRKAKGARSNIECDTLILDNESTSDTIPYNEVFNDNISLEHEAKVSKVSEEQLFYLMSRGISEEEATEMIVMGFIEPFTKELPMEYAVEMNRLIKFEMEGSIG

SEQ ID NO: 11189 - protein, 494 aa, Schizosaccharomyces pombe
MLSEYQCLKNIGFSHKTVLKRRLFRKECTPALKSFYSTQDPALNEVRTEKLKNGVTYVCDPRPGHFSGLGVYVKAGSRYETKKFSGVSHFMDRLAFQATERTPVGEMKAKLENLGGNYMCSTSRESMIYQAAVFNDDVKSMSKLLAETVLAPKIQEDDLVHYRDSIIYENSELWTKPDALLGEFAHVTAFQNNTLGNCLLCTPDKVNGITATSIREYLKYFYRPEHLTLAYAGIPQEIAKEITKELYGHLPSSSLPPLEAIPSHYTGGFMGIKKSEAPPVPYQQEFTHVVIAMEGLPVTDPDIYALACLQFLLGGGGSFSAGGPGKGMYSRLYLNVLNQYPWVETCMAFNHSYTDSGLFGMFVTILDDAAHLAAPLIIRELCNTVLSVTSEETERAKNQLKSSLLMNLESRMISLEDLGRQIQTQNGLYITPKEMIEKIDALTPSDLSRVARRVLTGNVSNPGNGTGKPTVLIHGNVDEVGDVFALCKKAGIGH

SEQ ID NO: 11190 - protein, 286 aa, Xylella fastidiosa Ann-1
MSDKSHIFDVTDADFETAVLKKSLETPVLVDFWAPWCAPCRSLIPILEKLVAEYRGGFELAKINVDQEQQVAAALQVRSVPMVYLVKDGQLVDGFPGAKPETQVREFLTKHGILPARSAAFGEDTPALPLDPEAEVARLRQALAAEPENNDLKLDLALALLKTNVADEAAGLIDALPAKLATDDRMLRAKAWLRFIEVLNGAPSLDVLQAACAADASDFDQRHLLGVHLLLDGQCEAALEHFLEMLRQNRDFKDGLPRKALIDAFYLIEDKELVGRYRRKMSALLF

SEQ ID NO: 11191 - protein, 94 aa, Oryza sativa
  misc_feature (61)..(61): Xaa can be any naturally occurring amino acid
KKIKPTNPLRIGGGISVQNEASGRKSPGKGGYQFVHKYGAKLGGYSPIYSREERFPPGCPXVGGPPGFLFWAVPLPGFLGGGALLVYNPRALAG

SEQ ID NO: 11192 - protein, 500 aa, Brucella melitensis 16M
MPYCPIALHKETTMKAQPKASHFIGGAFVEDKAGKPLPVIYPATGEEIASLYSATPGIIEAAYAAALKAQGEWAALKPVERGRILRRTAEILREKNRKLSKLETLDTGKALQETLVADAASAADALEFFGGIISGFNGEFVELGGSFAYTRREALGICVGIGAWNYPIQIAAWKSAPALAMGNAFIFKPSENTPLSALALAEAYKEAGLPDGLFNVVQGYGDVGAALVNHRLTAKVSLTGSVPTGRRIMAQAGEQLKHVTMELGGKSPLIVFDDADLESAIGGAMLGNFYSTGQVCSNGTRVFVHKNIRERFIERLVERTRKIRIGDPFDEATQMGPLISAAQRDKVLSYIKKGKAEGATLACGGGVPKLQGFDKGFFIEPTVFADVTDTMTIAREEIFGPVMSVLEFSDEDEVIARANDSEFGLAAGVFTADLSRGHHVIGQIKAGTCWINAYNLTPVEVPFGGYKQSGIGRENGIAALAHYSQIKTVYVEMGKVDSPY

SEQ ID NO: 11193 - protein, 175 aa, Triticum aestivum
MAPTVMASSATSVAPFQGLKSTAGLPVSRRSSSAGLSSVSNGGRIRCMQVWPIEGIKKFETLSYLPPLSTEALLKQVDYLIRSKWVPCLEFSKVGFVFREHNSSPGYYDGRYWTMWKLPMFGCTDATQVLNEVEEVKKEYPDAYVRVIGFDNLRQVQCVSFIAFRPPGCEESGKA

SEQ ID NO: 11194 - protein, 112 aa, Zea mays
  misc_feature (20)..(20): Xaa can be any naturally occurring amino acid
  misc_feature (22)..(22): Xaa can be any naturally occurring amino acid
  misc_feature (38)..(38): Xaa can be any naturally occurring amino acid
  misc_feature (79)..(79): Xaa can be any naturally occurring amino acid
ACTLQTDLYLWIMKSSGGPXYXYIDIDGDTLDELMLSXTHMKGLRPLLTFSTNFDEQAHWKLVKEMITQICASSKDHRXAKTFHDHVFVLSFDDGNVLFSNYQILVPHNEID

SEQ ID NO: 11195 - protein, 365 aa, Dehalococcoides ethenogenes 195
MDFKLTVLPGDGIGPEVMAEGLKVLNAVAKKYKHSFEYQYGLIGGCCIDKEGVALSPETLAMCKKSDAVLLAAVGDPRFDDPKLPVHPEDGLLALRRGLGLFANIRPVKVAPSLVNSAPIKAEIVKGTDFIFIRELTGGVYFAKPKKRWTTPSGIRKATDSMTYSEKEIERIVRVGFELARSRKKKLVSVDKANVLLSSRLWRQIVIEIAKDYPDITVEHILVDACAMKLILAPTYFDVIVTENMFGDILTDEASMLAGSMGMLPSASLAGIPAKGTKTFGLYEPIHGSAPTIAKQNIANPIATILSIAMMLRYSCGLETEAAEIEAAVDKVLAAGYATIDIFKEGNTKLGTAEMGSQIAKIIGG

SEQ ID NO: 11196 - protein, 387 aa, Ustilago maydis 521
MNALRQLNRAAAPALKQATKSGLVLPNVPQLLRPATTLAAGTPKISKGPTKYGGVYTVTLIPGDGVGVEITDSVKEIFEVMNVPVEWEQFNVSGETHGSESLFKEAMESLKRNKVGLKGILFTPIETGSHNSWNVAMRQQLDIYASLVICKSLPGYPTRHKDVDFAIIRENTEGEYSGLEHSSYPGVVESLKVSTRAKAERISRFAFDFALKNGRKRVTCVHKANIMKLGDGLFLNTFRRVAEEYKSSGIESNDMIVDNTSMQLVSRPQQFDVMVMPNLYGNIVSNIGAALVGGPGTVPGCNIGREFALYEPGCRHVAKDIMGTNAANPAAMILSATMMLRHLGLDTQANQIAESVYKVIADGKVRTADMGGKSKTHEFTQAVLSNL

SEQ ID NO: 11197 - protein, 462 aa, Thermobifida fusca YX
MLGGGPAIVFAFAEEGPMTTVPIAAEQEVGTTVTLLEPGDGTGLVRRTVLPGGLRVVTETMQGVRSVAFGISATTGSRDEDAEHAGAAHFLEHLLFKGTERRSALDISALLDGVGADYNAYTTKEQTTYYAKVLDRDLPLAIDVISDMVANSVLDPAEVETERGVILEEIAMYEDEPADVVDDVFAAHFFKGSPLGRPILGTNDTIRALTRERILEQYRSAYVPSELIVAAAGNLDHDTVVRQVAEAFRDKLDAAGDARPAAPRIGTEPPATNPGTVLVSRDSEQAHLILGREGVKRTDPRWYALRVLSAILGGGMSSRLFQEVREKRGLAYAVHGYTCSYSDTGLFQVYVGCLPDKIDEVLDVCRTELERAAAHGVDAAELARAKGQIRGSWVLGTEGTNARMSRLTSHELGYRRHLSLSEDLALFDAVTSEDVSEVAAEILTRPEALAVVGPYEEGRSFV

SEQ ID NO: 11198 - protein, 151 aa, Agrobacterium tumefaciens str. C58
MERNKMRYLHTMVRVKDLGESLKFYVDLLGLTEIRRIENEKGRFTLVFLSARDDIAAAKENKAPCLELTYNWDTEDYTGGRNFGHLAYEVDNIYDFCARLQQSGIVINRPPRDGHMAFVRSPDGISFEILQKGESLAPAEPWISMQNTGSW

SEQ ID NO: 11199 - protein, 533 aa, Dehalococcoides ethenogenes 195
MQVKLYDTTLRDGSQREGISFTVADKLKIAQKLDELGIHYIEGGWPGSNPKDSEFFVQVKSLKLKNAKMVAFGSTRRPKVKAEADATLKQLVEAGTEYVTLVGKSSARQVTQVLETTLEENLAMITDSIEYLRSKCIKVFLDAEHFFDGYKDNPEYSIQVLQAAEKAGAEGVVLCDTNGGSLPEEIAEAVEAVTKSVNICVGIHSHNDTEMAVANSIAALKAGASQIQGTINGFGERCGNANMCSIIPILKLKMGIDCITDSQLKLLTDTSHYISELANLVSEPFLPYVGASAFSHKAGLHVSGLSKWSGSYQHIEPELVGNRQRLLVSELAGRSNIVQRAKAIGINLTSDSKEVKDLLQQVKKMESMGFQYENAEASFDLLVNRTQAGYAAPFELIDFMVVVEKQRRPSAMRSQDEMMAEGIVKVRVDGEVMHTVAEGNGPINALDAALRKGLCQFYPELSSVHLSDYKVRILEQTSGTDALVRVLIESTDGESTWHTVGASPNIIEASWLALSDSFEYWLITKKCKNCKKQ

SEQ ID NO: 11200 - protein, 501 aa, Zea mays
MSPPPPPPLLRNELSRRTAVLGLRLWVLVGIAVGAAFVLLLVLISLHLAAARRRRPRKGVAHAPAHAPAGAPPLSPSTIPPVSKEIQEVAVHVGSLRHYLETGHAFLKDGGDGDGDGESVAHGSQRVHIEAGKGQRMVAAASDALSAAVGPEVSHLGWGHWYTLRELEEATAAFAPEHVVGEGGYGIVYRGVLADGYQVAVKNLLNNRGQAEREFRVEVEAIGRVRHKNLVRLLGYCAEGAQRILVYEYVDNGNLEQWLHGDVGAVSPLTWDVRMNIVLGMAKGITYLHEGLEPKVVHRDIKSSNILLDRRWNPKVSDFGLAKLLGADSNYVTTRVMGTFGYVAPEYASTGMLNERSDVYSFGILIMEIISGRSPVDYARPAGEVNLVEWLKNKVTNRDYEAIVDPKLPEKPSSKALKKALLVALRCVDPDSQKRPKMGHVIHMLEVDDFPYREDRRTLRPGNGSPLEKARNPAAGSCDGSSCYGGDTTTASTPSRLVQDM

SEQ ID NO: 11201 - protein, 407 aa, Clostridium perfringens str. 13
MRYIVVGASAAGISGAKTLRELDKDAEIILVSKDENVYSRCILHHYISGHRDIEALDFTDRDFFEKYNIEWKKGLEVKSIDDREHIIGLSNGESLKYDKILLATGASAFIPPVENLREAKNVVGLRNLEDAIKIKEEAEKVKNVVVLGAGLVGIDAIAGLVGKNLNVTLVEMGDRVLPIQLDKYASSKYEKRFEDAGVKLKLGVRAEKVLIDENKNPKALLINTGEEIPCELIIVATGVRSNVAFLKDSSIETDRFGLIINEKGETNARDVYGAGDITGRNPIWPTAVKEGIIAANNMVGNEIFMEDFFGSKNTMNFLGLTTMSLGVVNVPDDSYTEEIDISGENYKKIIHKDGKIYGAIIQGDLSYAGVLTQLIKEKIHVSKVKKPLFEIDYADFFNIKENLEYTY

SEQ ID NO: 11202 - protein, 1176 aa, Cytophaga hutchinsonii
MSQSTKTYTSTCSYCGVGCGVKIHKAVNGSLQIEGDKSYPANQGMLCSKGMNLHYAAMDQTDRLLYPEMRGNRNMPLQRVSWDTALDRAAAVFKALIEKYGPDSVGYYVSGQCLTEEYYIANKITKGFIGTNNIDTNSRLCMSSAVVGYKLALGEDSVPLSYDDIELADCFFITGANPAWCHPILFRRLENHKAANPHVKIIVADPRKTQSCSLADVHLQLQPGTDIVLCHAIARRLIETGKIDQAFIDAHTSGYEAFKEKVFTLSLQEAADICVLEKELIIQAADMIGDSQAFISMWAMGLNQSVIGVNKNVSLLNLSLITGQIGKPGAGPLSLTGQPNAMGGREVGGLSNMLPAHKNLLNPAHRKEVADFWGVPAINEKPGFTATEMFDQLLSGKMKAVWIICTNPLVSLPDARNAEAALRNARFVVVQDISNKSDTLKYADLVLPAAAYMEKEGVMTNSDRRISYLSKVMEPPGEALPDVDILCRFAHKMGWKESFNYASNAEIFEEYTRITKGTNIDISGLSYADLIQRRSVQWPVPEKGHPGTPRLFTDHTFYTPTGLANIISVDSMNHSEKLDDDFPLILTTGRIRDQWHTMTRTGKVRKLNKHISKPFLEIHPEDAGIRGIKQDDVVTIESRRGDVRVTAILTEDIKKGVVFLPMHWGRMLSTDLTRTNNVTNNLIDPVSKEPDYKFTAVQVTKYVKPREHIVIVGAGAASCQFIKRHRELGAEDTITVFSAENFHFYNRVLLPEYVSKHKSWDNLEKLRKAEWLELGVTLIPRKITRLITESKSIVDDTGEVHCYDRLLVATGSRSTQMKHIAPVKGIFTMRRREDADALIHHLSTGDSVVVVGGGLLGLEMADSLLEIGMKVSVIQRSSRLMDRQLDKTAANLLAKELTERGMDLYFDDEVLYVNGEYAVESLRLKSSRKIDCKAILFAIGTQPNVEFLKEAGIQVNRGVIVDEHLQTSNEFVYAMGEIAERNGALFGITAGAEEQATVLAEYLNGSTTSNYTGTLSMNILKVHGVELCSIGMVEAPPNNPDYEEIIFLDKTRKYYKKCIVYQDRLVGAILMGDKSEFNEFRDWIKSGVELGEKRESLLMSGSISKEPMLGTLVCSCNTVGSGNIENAIKGGCKDVTSICNTTGAGTGCGSCKPEVKAILERMHAVTESSNSQKTYA

SEQ ID NO: 11203 - protein, 489 aa, Medicago truncatula
MATFTCSASDLHALLGGSANSTAAAEYICGGFNAVANKFIDTSYAVDNTYLLFSAYLVFAMQLGFAMLCAGSVRAKNTMNIMLTNVLDAAIGGIFFYVFGFALAFGTPSNGFIGKHFFGLTDFPSQSFDYGFFLFQWAFAIAAAGITSGSIAERTQFVSYLIYSSFLTGLVYPIVAHWFWSADGWGSPVRSENLLFGSGVIDFAGCGVVHLVGAVAGFWGAFIEGPRIGRFDHEGKSSPIRGHSGTLVVMGTFLLWFGWYGFNPGSFLNIVKAYGESGHYYGQWSAIGRTAVTTTLAGCTAALTTLFGKRMQTGHWSVSDVCNGLLGGFAAITAGCSVVDPWAAIICGFVAAWVLIGCNLLAEKFHYDDPLEAAQLHGGCGTWGIIFTALFAKKQYVNEVYSGSPDRTYGLLLGGGGRLLAAHVVQILAIVAWVSITMGTMFFLLHKLNLLRSSPEEEMEGLDLTSHGGLAYEYHQEAEEHAKRRAFEV

SEQ ID NO: 11204 - protein, 593 aa, Schizosaccharomyces pombe
MSESLTRIAIVSEDKCRPKKCRQECRRSCPVVRTGKLCIEVNPTDRIAFISETLCIGCGICVKKCPFGAINIINLPTNLESEVTHRYSANSFKLHRLPTPRPGQVLGLVGTNGIGKSTALKILSGKMKPNLGRYDNPPDWAEVVKYFRGSELQNFFTKVVEDNIKALIKPQYVDHIPRAIKTGDKTVSGLIKARANNNNFEEVMDHTDLQNLLNREVGHLSGGELQRFAIAAVATQKADVYMFDEPSSYLDIKQRLKAGRVIRSLLATTNYVIVVEHDLSVLDYLSDFVCVLYGVPSMYGVVTLPYSVREGINIFLDGHIPTENLRFRSEALTFRLADASDEITADRTAEYNYPDHVIEQGDFKLTIKSGGFSDAEIIVLLGENGTGKTTFCKWMAKNSDLKISMKPQTIAPKFQGTVRMLFLKKIRAAFLNGKFQSEVCKPLSIDNIIDQEVLNLSGGELQRVAICLALGMPADVYLIDEPSAYLDSEQRIIASKVIRRFIVNSRKTAFIVEHDFIMATYLADRVILFEGQPSRDARCNPPQSLLTGMNTFLKNLDVTFRRDPNTLRPRINKFDSQMDQEQKNAGNYFFLEN

SEQ ID NO: 11205 - protein, 592 aa, Bacillus anthracis str. 'Ames Ancestor'
MAETLAKRGPDDNKVWIKGNVAFGHKRLIVVDPEGGKQPMTCLKDEANYAICYNGELYNTEDIRKELLRRGYTFKGHSDTEVLLASYIEWKEECVDHLNGIYAFAVWDEQKEQVFIARDRLGVKPLFYKYDSGRLLFGSELKAILAHPDVKAEVTLEGLSEIFGLGPSRTPGHGIYTGIKELRPGHAMTFSKNGLCIWRYWNVESKKHEDSFEETVEKTRFLLQDAITRQLVSDVPLCTFLSGGVDSSAITAIAAKEYEKSGKGQLHTYSVDYEDNDKYFKANAFQPNSDAPFIHLMTETFQTIHHRCVISNEQLAQYLTEAVLVRDLPGMADIDSSLLWFCREIKQDFVVGLSGECADEIFGGYPWFYREDDLQSSAFPWMRSTEAREQLLKKEWRNKLNLQQYVQQRYEESIQEVPILDGESPLEAKRRQLFYLNMVWFMTTLLDRKDRMSMGASLEVRVPFADHRLVEYAWNIPWEMKMYKNREKGLLRKALEGLLPNDILYRKKSPYPKTHNPHYTKAVTVWIQDLLTDKGSILHELFDKEQLSGLIESGGSAFQTPWYGQLMTGPQLLAHLAQIHVWFKEYGVNIKE

SEQ ID NO: 11206 - protein, 622 aa, Burkholderia thailandensis E264
MCGITGWIDFSRDLRNEAPIVGTMTDTLARRGPDARGVWLDTHAALGHRRLSIIDLERGAQPMLTPERGPRGLPRAVISYAGETYNFRELRAELGALGHRFDTHCDTEVVLRAYLEWGAAFVDRLNGMYSIAIWDTARDELLLVRDRLGVKPLFYYPTADGVIFGSEPKAILAHPDVRARTSSEGLCDALLFLRTPGQVPFSGMREVKPGHLLRVRRGGLVEERYWALEARPHTDDLPTTIATIRALLDDIVSRQMISDVPLCALLSGGVDSSTVAALAQKQRRANGGGALATFCVDFTGHTRNFRADPIRPTADAPFALEVARHIGSDHHTIELDQAGLLDPQVRETVLRAWDLPFNFADLDVSLYRLFAEVRQHASVALSGEAADEIFGGYLWFSDPVARRAQTFPWLKLGAHRGLDPRALFHRAFIDELKLGEYEAQLYRAALAEVPRLDGESAEDRRTRELHYLTLTRWLPVLLDKKDRMGMASGLEGRVPFCDHRLVEYVFNIPWSMKTFSGQEKALLRAAAADLLPDSVLSRKKAAYPSIQTPGYDRGLIERLNRAIAAGRAPLEPFIDAGALRNLTAKTATGSLSEFERILLESSSRLNDWLDLYRVELDGVPAG

SEQ ID NO: 11207 - protein, 1955 aa, Ustilago maydis 521
MSFHLDSFVNSPASADQAPAWQLHSSTDSYLEWDANPKSLIEQQPSSTTTSPPPSMSRLRSTSSTVATLAPGAQTPAEPPSTDSASVLSHNGHTTSPERSVSPSYFTKLYFHPPDRTTSATSPTITFTSAIEPSLVAHAQPSPLLPTDAQSASHLPSPARESHTGRRPSISAVGSSSTTSPLTTPLSPTLSSRSSAAGGGFFASLRPSSPGNLPISTSKPQDGDNLGKPRRPSSVFDHVGNVWERFGRKVHHTRTATSEHHSSSSSHTRRSASQASPPIGLTPESADPFDTARNSPSGSFISQASPSQSTTTDSECRTPATPGGEPPAQLSTPQPLPSAPAYTSVSALDSSVNAPQQEEAEELPYLAPESPRPQPQSFNTIGSPRIPSGQRSATSHRRTSSLLERVLIQVTDDNERFSVVDISGVDSADAIKERMFAKLHLFDADHSSFQLFRTEIGQSEATGPVVSDDALLVLCLQMGDDRGTLKFLVQQIAPPPNSTVRALPPPTSTIVSQRAINNIRRTSGTGSAPGQHLRTESQSSKSSLSDALVYPEMIGADAAHEGSNRNSGSSLTRSKAQTRRALPSAPPVDDLRSPTHSCISSTTQSAVQDRRSIASSGDGSANESWARHGASASDGAPSAIPTQRSSSVNANASAAQSSSSGSAGRHPSNLEDDRQRYDAEPGVNRSLHAPATGSSHWQERSDEGARESLRVQTTAQLPGLTLHNAKSMDDLHRPSQSASQPSTLTTQAEVRKQAGMDRDGRYPTPAIMRPSTAAPAGAGARESASSHRQYSSDALGSSRSPQEPTLGLDPRMLQRNRSAQAAIPSGQQLVNHGPTRMSSTPQIRSPPMQHVYLGQGQIDPRFNTQPPHSAHPMQAHPSNMVARPPYSAAPSFASQPAYQSQSFGQAALRPMGHGFVNEFGARAPAASVNFNTYHGHDPRMNASAMQGSLTPRPYSYYEQPSMHQQQPMYRPYAQPSLVTASPYRTREDPFTTRYFPASSSRQVSEFQMQAGRLEPGMTVQQTLRTQEAIWGHTSAGSPGQAYQSAHAHPPGPSYGPRDPRQPGQSNQYTGMQAYPNASAAPQMQQRPSYQGSAMPNLHHVPPPRPQSYPSAQPQPQPPRNAHDRHPAPPAGHSGPQMMPQSSGSSAGRAPMQPQQNQQLSQPSQPSQREQPGHAQAMPGSESHRRDPPVRTNASERSSGSSFSSQGSFQHGRPHNDDCNSRNSIEESFSAPTSARSSQSEAASAKPVNVEHRSSYADQERDLADDELEHVRPLPKLPHSSATTRTDAFKSSSCDASGATVGGSVRRSEDEDTLRAGEWAQLWRALDPKSDGTVSGTAISGSSGGDGDTVRAEPSTPGASRPQTKDGATLPISLEPPRIPSPSLAPEENGTVSSFGTFDDDETESGTWAQPLDSDVNAPRLPLRLDADSEALSDDHATLLPGQDTLLQASTRGTRGFSAASNSPKRPELRLTIDPAAGPTVMTWTASQASTNSPRASTSHLSSALNSGGITRSNSFARRDDDWAFRPPPEQLYENLDDFFPKHDLDKPLLDTTAGPESGLVSSPRAEASVPSVASVGAQQGLSQRSRHKKSIRLVAEDRKRILERADTRRAAQGAELSSGLVRRRSTKLWGTKVVEMTPGQELATPASATSAESPWSDTASTTGQPVFKWVKGDLIGKGTYGRVYLALNATTGEMIAVKQVELPRTASDREDSRQKGVVAALKSEIETLKDLDHPHIVSYLGFEETRQFLSIFLEYVPGGSVGSCLRKHGKFEESTIKSFLHQILEGLAYLHSKGILHRDLKADNILVDFEGTCKISDFGTVRRSDDIYGNVENMSLQGSIFWMAPEVVSLSKKGYSAKIDIWSLGCVVLEMFAGRRPWSDDEAVQAMFKIGAQRKAPPIPADVKLTKQAAHFLKNCFEIDPAKRPTAQRLLDHVFTVPVPGWQFSHSALCRSLHR

SEQ ID NO: 11208 - protein, 319 aa, Bacillus anthracis str. 'Ames Ancestor'
MKKKKIGLLVMAYGTPDSLDEVEAYYTHIRHGRKPSEEALQDLIGRYKAIGGISPLAKITKEQAHKLTDSMNNMFTEYEFNCYLGLKHTAPFIEDAVEEMKRDGIEQAISIVLAPHYSTFSIKAYNERAIRLSEEIGGPVIKPIDQWYDEPKFISYWADQIKETFTKIEDKEKAVVIFSAHSLPEKIIAAGDPYVEQLQHTADLIAAAANIQNYTIGWQSAGNTPDPWIGPDVQDLTRDLFEEYRYESFIYCPVGFVAEHLEVLYDNDYECKVVTDELNAAYFRPNMPNAQSTFIDCLATIVSRKMKEIVDKELILNNN

SEQ ID NO: 11209 - protein, 145 aa, Polaromonas sp. JS666
MTESLHIVCPHCHTTNRVRADQLGSAPDCGSCKKALFTAHSTALDEAAFDKHIGRNHIPVLVDFWAPWCGPCRQMAPAYEQVAAQLEPRVRVAKVDTEAVPNLGARFNIRSIPTLALFQNGREVARQAGAMGAADIVRWVQSKLR

SEQ ID NO: 11210 - protein, 830 aa, Burkholderia thailandensis E264
MNEPLRALPTLPAVEVDVRRSARVRRLRHMTIGLIISLAPFAAFRASAATLFTDEEQHWIDTHPVVRFAAGPGAQPFDYVEDGRHQGLTADYLDAVARISGLEFERVDTSRWGSPTAAFAAHEIDLLPNVAYGLQNDVLQREAIFSSPYLVGSAVIVTRESKTVIFDLDKLSGQTIAVRSGGAYERFLRQHYPSIRLLPALEQRDTLDAVATGRADAAIGLDAMLVPAIRSSYSHRLYISGAVANMPAVIVMATRKDLPVLASIIDKSLNSLTARDVNELTTHWLYSSDFGAPSWRAITHYYTIEIVLGVFVVSGFAMLAFRSRAQYRLTAESEARKSRFIAVMSHEIRTPLNAIVSAIDLLSRAKLGPMEKQLADTAVKASASLVGMLDDVLDISKLHADKLQLAHVASDIRTVAESAAIIMRAQADAKGLPLELHLDAPDDLDIYIDQTRIRQILVNLLSNAIKFTDAGRVRVDVGLAAADPPTRARGELTLKVSDTGIGIPKNRQDRLFDAFEQADSTTTRRFGGTGLGLTICKELVALMGGTLTLDSKERVGTSVTVVIPVDTAQREVCASVDKDAVADAPSMARADRPRVLVVEDQPLNAEMIRLQLAELHCDATIANTGRAALGLLDEQAFALVLLDCNLPDIDGYEVARRIRAARRNAAAYLPIIAISALTDHAHLHECIAAGMDGSLRKPLMLNDVASMIDLWCRAAGATGGTAEFSDQASPAEQEIDLPRLKSLFATTCAEDSARIDSALANGDFKLAASCAHRIKSAAQVMRVHDIAHTAERLERALSAPDVNVGAARRDAARLARLVCGIDPDRLSFDA

SEQ ID NO: 11211 - protein, 688 aa, Methanosarcina barkeri str. fusaro
MKNHNIIVYPFTAIVGQEKMKKALILNAINPKVGGVLIRGEKGTAKSTAVRALANLLPEIQVVEGCKYRCDPNDVNAMCEECLEKVKAGALKSSSIKMKVVDLPVSATEDRVVGTLDIEHAIKKGEKRFEPGVLAHAHRGILYVDEINLLDDHLVDVLLDSAAMGVNTVEREGISFSHPANFVLVGTMNPEEGELRPQLLDRFGLCVDIKGIMDVARRVELIKYRLSYETDPEAFAANWQAAESELCEQILLAQKLLPEVKISDSMLELISQICVDMGVDGHRADITMMKTSITLAAFNGRTEVLEEDVKEAAELVLPHRMRRKPFDNYSDKQDKLNESMEKQREKKKEKEKEKEKNKNEQQKKEHNEQSGKAQAHPEEQNSDDPQDSTGEQPDASSETIFATGEGYQIKQFSPDFRRENRNGSGRRSKTLTKSTQGRYIKSKIPEEKTTDIAFDATLRAAAPYQLVREKNGNSIVIHDLDFRQKVREKKIGNLVLFVVDASGSMGAQQRMVASKGAVLSMLMDAYQKRDKVGLIAFKGTGAELLLPPTSSVEMAQKYLEELPTGGKTPLSHGLMKGYETIHAELRRDPDTCPFMVLISDGRANVSMNGEPPLQETKTIASMFRKECIQSAVIDTESSIIKFGLAQEISSALGAKYLALEDLKADSIVEAVRSSAPFEFSVSSGSFSS

SEQ ID NO: 11212 - protein, 370 aa, Campylobacter coli RM2228
MSEFLVEEMQHNKGAKIKVIGCGGGGGNMINHMVKMGLSDLDLIAANTDAQAISNSLAKTKIQLGEKKTKGLGAGMLPEVGAESARESFEEIKASLSQSDIVFIASGFGGGTGTGATPVIAQAAKEIGALTVSVVTMPFAFEGKQRKKLAENGLLELKKESDSILVIQNEKLLSIIDKKAGIKDAFKLVDDILARAVKGMVSILLDNGDINVDFADVRTIMSHRGLALMGVGSASGENAIEEALSNAIESPLLDGMDIKGAKGVILHFKTSSNCSLIEISAAANNIEEIVDENAKIIFGSTTDDSMEDRVEVTIIATGFEDRDSIAKKAAEEAETPKKNPYLNLRKVSGGFDEEIMAQIETPTFLRRQMD

SEQ ID NO: 11213 - protein, 573 aa, Bacillus licheniformis ATCC 14580
MANKTAGKIAAELLKEWNIDHVYGMPGDSVNEFIDELRHEENSLRFIQVRHEETAALAAAADAKLTGKIGVCLSIAGPGAVHLLNGLYDAKADGAPVLAITGQVSSDEIGRDYFQEIGLERMFEDVALFNQQVHSAEALPDLLNQAIRTAYSQKGAAVLSVSDDLFAEKIKRKPVYTSALYIEGDLEPKKSQLMQCAQLINQAKKPVILAGRGMKSARDELLEFADKAAAPIIVTLPAKGVVPDRHPHMLGNLGHIGTKPAYEAMEESDLLIMLGTSFPYRDYLPEDAPAIQLDNNPAKIGKRYPVTAGLVCDAKKGLFELTKTIERKSNRAFLESCIQHMRKWRYEVEKDEQVATEPLKPQQVIARLEDAVADDAVLSVDVGNVTVWTARHFNMTNQDFLISSWLGTMGCGLPGAISAKLSHPERQVVAVCGDGGFSMSMHDFPTAVKYELPIVVVILNNQNLGMIQYEQQEKGHVNYATALENVDYAKFAEACGGKGFSVTKHEELIPALKSAFHSQKPSIIDVAIEDEPPLPGKISYTQAVNYSKYMIKKLVEKKELDLPPLKKSLKRIF

SEQ ID NO: 11214 - protein, 583 aa, Staphylococcus epidermidis ATCC 12228
MIKMSNQKSMASPHPSVHQTKESQPLITRSGSQLLVEALQQEDVDFIFGYPGGAVLPLYDTFYDGKIKHILARHEQGATHAAEGYARVSGKTGVVVVTSGPGATNAITGITDAYSDSLPLVVFTGQVATPGIGKDAFQEADLLSMTTPITKHNYQVKKIEDIPRIVHEAFHLANTGRKGPVVIDFPKDMGVLKTDVELTKDINIPGYEVNSNPNKEDINKLIYMIKEAKKPLILAGAGINHSKSNHLLTEFVTRHQIPTVTTLLGLGAVPYHHPLFLGMGGMHGSYASNMALTNCDLLINLGSRFDDRLASKPDAFAPNAKVVHVDIDPSEINKVINTDLGIVADCKLVLENLCHEQVLTSSHEEWNDYCINNKSNYPFKYDENDKNFCKPQKAIEYIGKVTNGNAIVTTDVGQHQMWTAQFYPFKNYGQWVTSGGLGTMGFGIPSAIGAQLAEPEKTVVCFVGDGGFQMTNQEMALLPEYGLNVKIVLINNGTLGMVKQWQDKFFNKRFSHSVFNDQPDFMKMAEAYGIKGFLIDSPDKLESSIDEAFAYHGPALIEVRISPIEPVNPMVPSGKSNHEMEGY

SEQ ID NO: 11215 - protein, 170 aa, Magnetospirillum magnetotacticum MS-1
MRFSPPYHDDPFYIEAMAQSIREVLAKLDFEPEVILTSFHGVPKSYLLKGDPYHCQCLKTGRLIREAMGYTPERMRVTFQSRFGNEEWLKPYTDETVQALAKSGVKRMAIVAPGFSADCLETLEELDGENRHYFEENGGEKYAFIPCLNDSDLGMRVIENVVRRELQGWI

SEQ ID NO: 11216 - protein, 261 aa, Escherichia coli O157:H7
MSESLHLTRNGSILEITLDRPKANAIDAKTSFEMGEVFLNFRDDPQLRVAIITGAGEKFFSAGWDLKAAAEGEAPDADFGPGGFAGLTEIFNLDKPVIAAVNGYAFGGGFELALAADFIVCADNASFALPEAKLGIVPDSGGVLRLPKILPPAIVNEMVMTGRRMGAEEALRWGIVNRVVSQAELMDNARELAQQLVNSAPLAIAALKEIYRTTSEMPVEESYSYIRSGVLKHYPSVLHSEDAIEGPLAFAEKRDPVWKGR

SEQ ID NO: 11217 - protein, 172 aa, Triticum aestivum
MATMMATSSFAGAAVLPRGSAGRSGARSLPALGRRALVVRAQTEGPSAPPPNKRKASTSIWDVMAFSGPAPERINGRLAMVGFVTALAVEAGRGDGLLSQLGSGTGQAWFAYTVAVLSMASLVPLLQGESAESRAGAIMNANAELWNGRFAMLGLVALAATEIITGAPFINV

SEQ ID NO: 11218 - protein, 147 aa, Fritillaria agrestis
TMLSSVATAARAAPAQASMVAPFVGLKSTSSFPVTQKPATGLSTLPSNGGRVQCMKVWPIVGLKKFETLSYLPTLSVESLLKQIEYLIRNGWVPCLEFSLEGFVSRDNNKSPGYYDGRYWTMWKLPMFGCTDAAQVVKEAAECKKEY

SEQ ID NO: 11219 - protein, 394 aa, Mycoplasma fermentans
MAKQDFNRNKDHVNIGTIGHVDHGKTTLTAAIATVLSKKGLAEAKDYAAIDNAPEEKARGITINTSHIEYETEKRHYAHVDCPGHADYIKNMITGAAQMDGAILVVAATDGAMPQTREHILLSKQVGVPRMVVFLNKCDMLKGEEEMIELVEMEVRELLSKYGFDGDNTPVIRGSALEALKGNKEYEDKIMELMNAVDTWIQTPVKEFDKPFLMAVEDVFTITGRGTVATGRVERGRLNLNEEVEIVGLHPTKKTVVTGMEMFRKNLKEVQAGDNAGLLLRGIERAGIERGQVLAKPGTIIPHTEFTAAIYVLTKDEGGRHTPFFKNYKPQFYFRTDVTGGVEFEKGREMVTPGENVNLTVKLISPIAVENGTKFSIREGGRTVGYGNVTKIIK

SEQ ID NO: 11220 - protein, 550 aa, Xanthobacter autotrophicus Py2
MATNNLAKIEKAPKSNLSGLNLLHDPVRNKGTAYTRDDRRQLGLEGLLPHAVETLDRQVERVLDHLDHVKDELDQYSYLMDLEARNETVFYKAVMSDPKRFIPILYDPTVADACEAFGNLYRRPRGMYITRHMKGRMAEVLRNWPQKDIRFVCVSTGGRILGLGDIGANGMGIPIGKLQLYTACAAVPPDVLLPVLFDIGTSNEHLRADPFYLGTREAPVSEAELDELTEEFVQAVNEVFPGCCVHFEDWKGTDAIRMLDRYKDKILCYNDDIQGTASVALAGIAAAMKQTGGKLKDQRILFLGAGSAGLGISKLIAAELQTLGLSAEEARKRVRLFDVNGLIESSRTDLTETQKLWAQNEKPTNNFLEVIESFKPTVLIGVSTKPRAFTKEVIEAMSRLNDRPVIFALSNPTHKAECTAEQAYTWSKGKALFAAGVQFDEVAYDGKTYRPGQANNFYIYPAIGLATYAARPKLLNDECFIVAAHATADQVGPSLQAKGMLFPSQEHILETEVTTATRIVEYMFDAGLATVERPREIRSWVESLLYAPAY

SEQ ID NO: 11221 - protein, 147 aa, Fritillaria agrestis
TMLSSVATAARAAPAQASMVAPFVGLKSASAFPVTQKPATGLSTLPSNGGRVQCMKVWPIVGLKKFETLSYLPTLSVESLLKQIEYLIRNGWVPCLEFSLEGFVSRDNNKSPGYYDGRYWTMWKLPMFGCTDAAQVVKEAAECKKEY

SEQ ID NO: 11222 - protein, 191 aa, Bradyrhizobium sp. BTAi1
MIDRRTVLFGIGASMAGSAFISPAARAENAVSKTTAYRFSFPALSGDPIRLAEFTGKPVLVVNTASQCGYTPQYTGLQQLWSEFHERGLSIIAVPSNDFNQEPGVAGDIAELANKQFGVTFPMTAKAVVTGSNAHPFYRWAAEARPKDTPRWNFHKYLIGRDGYIADVFASSVEPTDTRVKTAIARNLADG

SEQ ID NO: 11223 - protein, 329 aa, Methanothermobacter thermautotrophicus str. Delta H
MKSMKIAVIPGDGIGVEVMEAALHILNTLDLDLEFIHADAGDACLKRTGTALPEETLEAVGEARATLFGAAGESAADVIVRLRREFDLFANLRPVKSLPGVPCLYPDLDFVIVRENTEDLYVGDEEYTPEGAVAKRIITRTASRRISQFAFQYAQKEGMQKVTAVHKANVLKKTDGIFRDEFYKVASEYPQMEATDYYVDATAMYLITQPQEFQTIVTTNLFGDILSDEAAGLIGGLGLAPSANIGEKNALFEPVHGSAPQIAGKNIANPTAMILTTTLMLKHLNKKQEAQKIEKALQKTLAEGLVTPDLGGKLGTMEMAAEIARHLED

SEQ ID NO: 11224 - protein, 409 aa, Sinorhizobium meliloti 1021
MTHIVIIGAGECGARAAFALREKGFGGEITLTGAEPHLPYERPPLSKDGLAQASLPKFIAGAARYEEARITVLTGVTAESIDRVHKAVTLSDGVSLDYDRLLLATGARPRAFPRVPENAGRIRTLRTHADALAIRGALTPGARLAVIGGGFIGLELAATARKLGAEVVLVEGLPRVLSRGVPEEIAVLVAERHRREGVEIICGAQIAAIDGAGDGARLLLADGVDIEADLIVVGIGAVPNTELAEAAGLAIENGIAVDERLCTSDPRHLCRPATAAPSLCPHYGGRRVRLEAWRNAQDQGALAAANLMGAGETMVSVPWFWSDQYEFTLQIAGLADGAETTVRRDMEEGAFILFHLDGEGRLIAASGIGPGNAVARDIRLAEMLIAAGAKPEPLALASPETRLKKLLAA

SEQ ID NO: 11225 - protein, 174 aa, Zea mays
  misc_feature (29)..(29): Xaa can be any naturally occurring amino acid
  misc_feature (40)..(40): Xaa can be any naturally occurring amino acid
  misc_feature (44)..(44): Xaa can be any naturally occurring amino acid
  misc_feature (53)..(53): Xaa can be any naturally occurring amino acid
  misc_feature (59)..(59): Xaa can be any naturally occurring amino acid
MATIAATSLNTGTQLAVITSEARPVRLAXPVRLNILGNIXSRTXHRMVTVRPXKATAEXDIGLGGESIQDAKETCACDTVSGKSVTSWDQVQELNATHLTPLKTKKKNPSLLEEYWKNIPETKGGGNFRPVPLGSPVPPPNIKFTKKTFFPPLFLGRKKKKVAPLEPRHGFLIF

SEQ ID NO: 11226 - protein, 150 aa, Triticum aestivum
  misc_feature (124)..(124): Xaa can be any naturally occurring amino acid
MTWTEGVENYNHLANLAISSSLPELTTTTIASLIEMARSAVAQVVLVAVVAAMLLAVTEAAVSCGQVSSALSPCISYARGNGASPSAACCSGVRSLASSARSTADKQAACKCIKSAAAGLNAGXAAGIPTKCGVSVPYAISSSVDCSKIR

SEQ ID NO: 11227 - protein, 481 aa, Glycine max
MNATSYSALPSTFRSLHHRNFSAFCSDIQNPGYVDCHSNCNKSTSQASLFLCSDSNSRRNGVFGRPLCVNPSGRRNLVGPAFYSLETSAYDVAALESPSRVAEEKVGVLLLNLGGPETLNDVQPFLFNLFADPDIIRLPRLFRFLQRPLAKLISVLRSPKSKEGYAAIGGGSPLRKITDDQALAIKMALEAKGISSNVYVGMRYWYPFTEEAIQQIKRDRITRLVVLPLYPQFSISTTGSSIRILEHIFREDAYLSKLPVSIINSWYQREGYIKSMGNLIQKELQSFSEPKEVMIFFSAHGVPVSYVEDAGDPYRDQMEECIFLIMQELKARGISNEHTLAYQSRVGPVQWLKPYTDEVLVELGQKGVKSLLAVPVSFVSEHIETLEEIDMEYKELAIESGIKNWARVPALGVTPSFITDLADAVIEALPSATAMYAPTSISEDVDHDPVSYFIKIFCGSILAFILFLSPKMIMAFRNQVI

SEQ ID NO: 11228 - protein, 681 aa, Volvox carteri
MALRFCPTAAPPRGCGTPIQHPVLLLPHKALLPYSTAASRQAARPARVCVTAYAKLADGSARRMQSEEVRRAKEVAQAALAKESPADWVDRFGSEPRKGADILVQCLEREGVDNVFAYPGGASMEIHQALTRSDRITNVLCRHEQGEIFAAEGYAKASGRVGVCIATSGPGATNLVTGLADAMMDSIPLVAITGQVPRRMIGTDAFQETPIVEVTRAITKHNYLVLDIKDLPRVIKEAFYLARTGRPGPVLVDVPKDIQQQLAVPDWDSPMSITGYISRLPPPVEESQMIPVLRAIQSASKPVIYYGGGCLDARDELREFAARTGIPLASTFMGLGVVPAEDPNHLQMLGMHGTVAANYAVDQADLLVALGVRFDDRVTGRLDAFASRARIVHVDIDAAEISKNKTAHVPVCGDVKQALRHLNRMLEAEPLSDRFVAWRAELAAKRAEFPLRYPQRDDAIVPQYAIQVLGEETKGEVIITTGVGQHQMWAAQWYPYKEPRRWISSGGLGSMGFGLPAALGAAVAFDGKQGREKRIVVDIDGDGSFLMNVQELATVFIEKLDVKVMILNNQHLGMVVQWEDRFYKANRAHTYLGKREAEWHATGDEEDIYPNFVGMARSFGVPSMRVIRKEDLRGAIRTMLDTPGPYLLEVMVPHIEHVLPMIPGGATFKDIITEGDGSVKY

SEQ ID NO: 11229 - protein, 674 aa, Sordaria macrospora
MPSATSTNGANGNGNGNGASASPAPGNLSANDNIRRFAAPSRPLSPLPAHALFNEKTRCFVYGLQPRAVQGMLDFDFICKRSTPSVAGIIYTFGGQFVSKMYWGTSETLLPVYQEVQKAIAKHPDVDVVVNFASSRSVYSSTMELMEHPQIKTIAIIAEGVPERRAREIAYVAKKKGITIIGPATVGGIKPGCFKIGNTGGMMDNIVASKLYRKGSVGYVSKSGGMSNELNNIISQTTDGVYEGVAIGGDRYPGTTFIDHLLRYQADPACKILVLLGEVGGVEEYKVIEAVKQGIITKPIVAWAIGTCASMFKTEVQFGHAGAFANSQLETAATKNKSMREAGFYVPDTFEDMPALLKQVYDKLVADGTIVPAPEPVVPKIPIDYSWAQELGLIRKPAAFISTISDDRGQELLYAGMPISDVFREEIGIGGVMSLLWFRRRLPDYAAKFLEMVLMLTADHGPAVSGAMNTIITTRAGKDLISSLVAGLLTIGSRFGGALDGAAEEFTKAFDKGLSPREFVDTMRKQNKLIPGIGHRVKSRNNPDLRVELVKEYVKAKFPSSKLLDYALAVETVTTSKKDNLILNVDGCIAVCFVDLLRNCGAFSTEEAEDYLSMGVLNGLFVLGRSIGLIAHYLDQKRLRTGLYRHPWDDITYLLPSLQQPGPPGTEGRVEVQI

SEQ ID NO: 11230 - protein, 450 aa, Streptomyces carzinostaticus subsp. neocarzinostaticus
MNGRRPVSPPLRALPGLLRKLAVDRLGMMRDAAALDDAVLVSMGPKKLFVFNRPDYAKHVLADNAANYRKGIGLIESRKMLGDGLLTSEGELWREQRRTVQPAFRPARVAAQADAVAEETMNLRDLLMRRGADGPVDVLQEVTGFTLGVLGRTVLNTDLGGYGGIAHAFEAVQDQAMFDMVTQNMVPTWAPLATQRRFRRARRELIRTVDELVADRSARMTDGEEADDAFSLMIAAARRQTDPRTGQGRLRDELVTLLLAGHETTASTLAWTLLLLARHPHMRDLVREEARGVLADGRAPDAGDLRKLTYTTQVVQEAMRLYPPVWILPRVARQSDEVGPYSVSAGADVLICPYTLHRHPDLWERPEQFDPGRFDPARVADRPRYAYIPFGAGPRFCVGSNLGMMEAVFVTALLTRDLVLEVVPGDERTPEPMMSLRMRGGLPMTVRPVR

SEQ ID NO: 11231 - protein, 76 aa, Zea mays
  misc_feature (12)..(12): Xaa can be any naturally occurring amino acid
  misc_feature (40)..(40): Xaa can be any naturally occurring amino acid
  misc_feature (44)..(44): Xaa can be any naturally occurring amino acid
KRESHGHVKGAXSKSKFVCVARRIYDSSGRLGVVDIKFEXSMHXVETSAVGLAYGAAPSGISAVRPHVNRGISQVR

SEQ ID NO: 11232 - protein, 520 aa, Listeria monocytogenes
MTKFSEFGLDEKIVKSVNRMGFEEATPIQEKTIPLGLEGKDLIGQAQTGTGKTAAFGLPMIHKIDQKSNNVQALIIAPTRELAIQVSEELYKLSYDKHVRVLAVYGGSDISRQIRSLKKNPQIVVGTPGRILDHINRRTLKLDHVETLVLDEADEMLNMGFIDDIETILKEVPAERQTLLFSATMPDPIRRIGERFMHSPELIRIKAKEMTALLIEQFFVKVHEKEKFDVLSRLLDVQAPELAIVFGRTKRRVDELSRALDMRGYVAEGIHGDLTQAKRMSVLRKFKEGKIDVLVATDVAARGLDISGVTHVYNYDIPQDPESYVHRIGRTGRAGKEGMAITFVQPREMGYLRIVEETTKKRMQPLQAPTWDEAFAGQLRVATEKIQEAITEENLADYKTFANELLEKYDATDIAAAMLKMLAKEPDKTPVHITEERPLPSRGGGGYKGKNGKGGKGGGYRGGSGKGGSYRDRNNSGKGRRSGGGSGGGSGSGGGGNRDRRGGGEQRSGGNKGNYSQKSK

SEQ ID NO: 11233 - protein, 518 aa, Mesorhizobium sp. BNC1
MGAAPKHSPLIKEALLQTTMKSLEGSRQELFIGGRFRAPSSGRFIPSFDPTTGEVWYEFAEADAADVDAAVTSATKAFHNPAWRRMTQTDRGKLIRRLAELVLEHADELALMETRDNGKLIKEMMAQMRAMPDSYIYFAGMADKLQGDTIPVNKLDSLNYSQREPLGVVGMITPWNSPLMLLTGTLAPCLAIGNTVVVKPSEHATASTLALAELVVEAGIPEGVVNVVTGTGAVTGEALTRHPGLAKIVFTGSTATGRRIAANAAENLIPCQMELGGKSPHVVFSDVDIERAVNGVVSGIFAAAGQTCVAGSRCFVEANIYDRFLEALVERTRHIRVGHPMEESTDVGPLAMKSQLEKIEGYVASGARDGAKIAVGGRRPKDGDLARGWYFEPTVMADARNDMKFMRDELFAPVVGVMPFRDEAEMITLANDTEYGLASGIWTRDIDRAMRFASQIDAGTVWINTYRSAAYMSANGGFKNSGYGRRGGFDVMREFSRSKNVLIDYSGAMQDPFVIRLK

SEQ ID NO: 11234 - protein, 121 aa, Brassica napus
MVNQAPQDDYDDEKSARQKEIEDWLPITSSRNAKWWYSAFHNVTAMVGAGVLGLPYAMSQLGWGPGVAVLVLSWVITLYTLWQMVEMHEMVPGKRFDRYHELGQHAFGEKLGLYIVVPQQL

SEQ ID NO: 11235 - protein, 411 aa, Dehalococcoides ethenogenes 195
MSPKDLRPNLADKAGAAVNKKPAIGDDILLEKYTDNTDDHKYVNKPSELGAEDKSRMLESGVILDDLKERSGTFIQMDNRPVHFSTQQDGIEIMSTSEAALKYDWLKDYWWKAVSVDADKYTAHVELNKADGYFIRALPGVKTEFPVQSCMYMAKNQAIQNVHNIIIAEEGSELHIITGCTSAHRTETGLHLGVTEFFIKKGAKVTFTMIHTWSPDIAVRPRTGAIVEEDGVFLSNYVVMKTVKNLQSYPVAYLNGENAVARFNSVMVCPPGSKMDVGSRVFLNARHTRTELITRALTTGGEIISRGYIEGKVPDCKGHLECRGLILGDNGIIYAIPELMGKVAGVDLSHEAAVGKIAEEEVEYLMARGLNKDEATAAIVRGFLNVDVEGLPPLLKEEMDKAIKLGDQEGM

SEQ ID NO: 11236 - protein, 147 aa, Fritillaria agrestis
TMLSSVATAARTAPAQASMVAPFVGLKSTSAFPVTQKPATGLSTLPSNGGRVQCMKVWPIVGLKKFETLSYLPTLSVESLLKQIEYLIRNGWVPCLEFSLEGFVSRDNNKSPGYYDGRYWTMLKLPMFGCTDAAQVVKEAAECKKEY

SEQ ID NO: 11237 - protein, 415 aa, Desulfovibrio desulfuricans G20
MTGKRVVVTGLAAITPLGNNVETSWENLIAGKSGIGPITRFDASEYTSRVAGEVKGLDLGEYIPPKQARRMDRFTQYAVACAKQLMKHAEYTVPEETAHRVACLLGVGLGGLETIEQFHTKLVEAGPNRISPFMIPQLISNMAPGQIAMEIGAKGGNVVMTSACASGTHAIGYAFTEVKVGRYDAVVTGGAESTITPMGVSGFTALRALSTASNDAPEKASRPFDANRDGFVIGEGAGLLLVESLESARARGATIYAEIVGFGSSDDAFHMTAPRDDAEGMARAMLMAIEEAGISPADVDCINAHGTSTQLNDKSETLALKKVFGDHASKLRISANKSQTGHLLGAAGGVEGVFSCLTLATGTVPGTANYETPDEDCDLNYMGGGSESYQAQYVLSNSFGFGGTNACMLFKRWEG

SEQ ID NO: 11238 - protein, 285 aa, Bacillus anthracis str. 'Ames Ancestor'
MRGKHIFIITALISILMLAACGQKNSSATVATATDSTITKSDFEKQLKDRYGKDMLYEMIAQDVITKKYKVSDDDVDKEVQKAKSQYGDQFKNVLKNNGLKDEADFKNQIKFKLSMNKAIKQSVTEKDVKDHYKPEIKASHILVSDENEAKEIKKKLDTGASFEELAKQESQDLLSKEKGGDLGYFHSGAMTPEFETAAYKLKIGQISDPVQSPNGYHIIKLTGKKDLKPYDEVKNSIRKNLEEERTADPIFGKKLLQSELKKANIKINDSELEDTFTIVSPQGN

SEQ ID NO: 11239 - protein, 147 aa, Fritillaria agrestis
TMLSSVATAARTAPAQASMVAPFVGLKSTSAFPVTQKPATGLSTLPSNGGRVQCMKVWPIVGLKKFETLSYLPTLSVESLLKQIEYLIRNGWVPCLEFSLEGFVSRDNNKSPGYYDGRYWTMWKLPMFGCTDAAQVVKEAAECKKEY

SEQ ID NO: 11240 - protein, 147 aa, Fritillaria agrestis
TMLSSVATAARAAPAQASMVAPFVGLKSTSSFPVTQKPATGLSTLPSNGGRVQCMKVWPIVGLKKFETLSYLPTLSVETLLKQIEYLIRNGWVPCLEFSLEGFVSRDNNKSPGYYDGRYWTMWKLPMFGCTDAAQVVKEAAECKKEY

SEQ ID NO: 11241 - protein, 401 aa, Leptospira interrogans serovar Copenhageni str. Fiocruz L1-130
MAKEKFDRSKPHLNVGTIGHVDHGKTTLTAAITTTLAKAIGGKNKAVAYDQIDNAPEEKARGITIATSHQEYETANRHYAHVDCPGHADYVKNMITGAAQMDAAILVVSATDGPMPQTKEHILLARQVGVPYVIVFINKADMLAADERAEMIEMVEMDVRELLNKYSFPGDTTPIVHGSAVKALEGDESEIGMPAILKLMEALDTFVPNPKRVIDKPFLMPVEDVFSITGRGTVATGRVEQGVLKVNDEVEIIGIRPTTKTVVTGIEMFRKLLDQAEAGDNIGALLRGTKKEEIERGQVLAKPGSITPHKKFAAEVYVLTKDEGGRHTPFINNYRPQFYFRTTDVTGVCNLPNGVEMVMPGDNVSLTVELISPIAMDKGLKFAIREGGRTIGSGVVAEITE

SEQ ID NO: 11242 - protein, 147 aa, Fritillaria agrestis
TMLSSVATAARAAPAQASMVAPFVGLKSTFAFPVTQKPATGLSTLPSNGGRVQCMKVWPIVGLKKFETLSYLPTLSVESLLKQIEYLIRNGWVPCLEFSLEGFVSRDNNKSPGYYDGRYWTMWKLPMFGCTDAAQVVKEAAECKKEY

SEQ ID NO: 11243 - protein, 136 aa, Triticum aestivum
MFPAGMAAGFSVFSPELRLFRAFEVNDFARTGSIATQPVELKEGPLEQFSHEMEPFLRKQGLPVRLNKGVVELVADHVVCEEGKPLSPEAAHTLRVLGTKMATFRLYLVCRWSSDDFEVYKEGLAHLGGEEADESS

SEQ ID NO: 11244 - protein, 355 aa, Burkholderia thailandensis E264
MKIAVLPGDGIGPEIVNEAVKVLNALDEKFELEHAPVGGAGYEASGHPLPDATLALAKEADAILFGAVGDWKYDSLERALRPEQAILGLRKHLELFANFRPAICYPQLVDASPLKPELVAGLDILIVRELNGDIYFGQPRGVRAAPDGPFAGEREGFDTMRYSEPEVRRIAHVAFQAAQKRAKKLLSVDKSNVLETSQFWRDVMIDVSKEYADVELSHMYVDNAAMQLAKAPKQFDVIVTGNMFGDILSDEASMLTGSIGMLPSASLDKNNKGLYEPSHGSAPDIAGKGIANPLATILSAAMLLRYSLNRAEQADRIERAVKTVLEQGYRTGDIATPGCRQVGTAAMGDAVVAAL

SEQ ID NO: 11245 - protein, 317 aa, Vigna radiata
MANFPVVDMGKLNTEERGTAMEMIKDACENWGFFELVNHGISIELMDTVEKLTKEHYKKTMEQRFKEMVANKGLESVQSEINDLDWESTFFLRHLPVSNVSENTDLDQDYRKIMKQFAEELEKLAEHLLDLLCENLGLEKGYLKKVFYGSKGPNFGTKVSNYPPCPTPDLIKGLRAHTDAGGIILLFQDDKVSGLQLLKDDQWIDVPPMRHSIVINLGDQLEVITNGKYKSVMHRVIAQTDGTRMSLASFYNPGDDAVISPAPALVKESDETSQVYPKFVFNDYMKLYAGLKFQAKEPRFEAMKAVSSVDVGAIATV

SEQ ID NO: 11246 - protein, 178 aa, Brassica napus
MMGDSSSSSSWSSQTDTQDDRMIALMLSEEYTKLDGAVGRRLSNLAPVPHVPRINSYIPNLNDATLDHQRLLQRLNVYGLCELKVSGDGNCQFRALSDQLYRSSEYHKQVRGEVVKQLKDNRTIYESYVPMKYKRYYKRMAKLGEWGDHITLQAAADRFAAKICLLTSFRDTCFIEIC

SEQ ID NO: 11247 - protein, 568 aa, Brucella melitensis biovar Abortus
MARDATKLEATVAKLKKHWAESAPRDMRAAFSTDPGRFGRYSLCLDDLLFDWSKCRVNDETMALLKELAVAADVEGRRAAMFAGEHINNTEDRAVLHVALRDTSSKEVLVDGHNVLPDVKHVLDRMAAFADGIRSGALKGATGRKITDIVNIGIGGSDLGPVMATLALAPYHDEPRAHFVSNIDGAHIADTLSPLDPASTLIIVASKTFTTIETMTNAQTARKWVADTLGEAAVGAHFAAVSTALDKVAAFGIPEDRVFGFWDWVGGRYSVWSAIGLPVMIAVGPDNFRKFLAGAHAMDVHFRDAPLEKNLPVMLGLIGYWHRAICGYGSRAIIPYDQRLSRLPAYLQQLDMESNGKSVTLDGKPVSGPTGPVVWGEPGTNGQHAFFQLLHQGTDTIPLEFIVAAKGQRADTGINQHEMLMANCLAQSEALMKGRTLDEARAQLQAKNPACVASGAHSPAPASFPANRPSLTLIHDMLDPYALGRLIALYEHRVFVEAQIFGINPFDQWGVELGKELATELLPVVSAKEGASVRDASTQGLVAHLHARRKACRIICKVRNTRKAGPEA

SEQ ID NO: 11248 - protein, 513 aa, Oceanospirillum sp. MED92
MSNDNRVIIFDTTLRDGEQSPGASMTRDEKLRVAKQLEKMRVDVIEAGFAIASPGDFESVKTIAEAVTESRVCSLSRALDADIDRAGEALQNAAMGRIHTFIATSPIHMKYKLQMEPDQVVEQAVKAVTRARNLIDDVEFSLEDASRSELDFMCRIIEKVIDAGASTINIPDTVGYAVPEEFAHTIGQLVQRIPNADKAIFSVHCHNDLGLAVANSLAAVGAGARQVECTINGLGERAGNASLEEIVMAIRTRKDTLGLETNIDTTQIVPASRLVSSVTGFPVQPNKAIVGANAFAHESGIHQDGVLKHRETYEIMTAQDVGWNTNRMVLGKHSGRAAFRSRLEELGTTFATDSELNNAFSRFKDLADKKHEIFDEDLVALVSDTRAEASSEQFKLSSLSVTSQTGETPVAKIVMQVGNEERRAESTGSGPVDATFKAIESIAESGASLQIYSVNAVTEGTDSQGEVTVRLENGGRIVNGLGADTDIIIASAKAYIHALNMLDANVQKAHPQV

SEQ ID NO: 11249 - protein, 499 aa, Arabidopsis thaliana
MYRTAASRAKALKGILNHNFRASRYASSSAVATSSSSSSWLSGGYSSSLPSMNIPLAGVSLPPPLSDHVEPSKLKTTTLPNGLTIATEMSPNPAASIGLYVDCGSIYETPQFRGATHLLERMAFKSTLNRSHFRLVREIEAIGGNTSASASREQMGYTIDALKTYVPEMVEVLIDSVRNPAFLDWEVNEELRKVKVEIGEFATNPMGFLLEAVHSAGYSGALANPLYAPESAITGLTGEVLENFVFENYTASRMVLAASGVDHEELLKVVEPLLSDLPNVPRPAEPKSQYVGGDFRQHTGGEATHFALAFEVPGWNNEKEAIIATVLQMLMGGGGSFSAGGPGKGMHSWLYLRLLNQHQQFQSCTAFTSVFNNTGLFGIYGCTSPEFASQGIELVASEMNAVADGKVNQKHLDRAKAATKSAILMNLESRMIAAEDIGRQILTYGERKPVDQFLKTVDQLTLKDIADFTSKVITKPLTMATFGDVLNVPSYDSVSKRFR

SEQ ID NO: 11250 - protein, 83 aa, Archaeoglobus fulgidus
MGRTKKVRSAGRFGPRYGLRVRRTWLEIEAVQRQKYVCKKCGKKAVKRSGTGIWECRHCGYKFAGGCYQPVTPGGKIVEKSVG

SEQ ID NO: 11251 - protein, 145 aa, Arabidopsis thaliana
MQRQEDNGRGVKMAVPLLTKKVVKKRSAKFIRPQSDRRITVKESWRRPKGIDSRVRRKFKGVTLMPNVGYGSDKKTRHYLPNGFKKFIVHNTSELELLMMHNRTYCAEIAHNISTKKRKAIVERASQLDVVVSNKLGRLRSQEDE

SEQ ID NO: 11252 - protein, 405 aa, Arabidopsis thaliana
MAAALQTNIRTVKVPATFRAVSKQSLAPFRVRCAVASPGKKRYTITLLPGDGIGPEVVSIAKNVLQQAGSLEGVEFNFREMPIGGAALDLVGVPLPEETISAAKESDAVLLGAIGGYKWDNNEKHLRPEKGLLQIRAALKVFANLRPATVLPQLVDASTLKREVAEGVDLMVVRELTGGIYFGEPRGIKTNENGEEVGFNTEVYAAHEIDRIARVAFETARKRRGKLCSVDKANVLEASILWRKRVTALASEYPDVELSHMYVDNAAMQLVRDPKQFDTIVTNNIFGDILSDEASMITGSIGMLPSASLSDSGPGLFEPIHGSAPDIAGQDKANPLATILSAAMLLKYGLGEEKAAKRIEDAVLVALNNGFRTGDIYSAGTKLVGCKEMGEEVLKSVDSQVPASV

SEQ ID NO: 11253 - protein, 210 aa, Methanococcoides burtonii DSM 6242
MLFMAFQIVFAAIALAILTSGVAERIKLSSFIVFGLLWTTLVYDPLAYWAWGDGWVGSMGALDFAGGTVVHISSGFGALALSFVIGKRIGFGKYSMEPENITTTLLGGALLWFGWFAFNAGNALAANAFVVTLISASSGALTWMGASWIKGKSSSLGMNSGAIAGLVAITPACGFVGPLAAIIIGGSAGILCYGTLLFCIYKKFDESLDA

SEQ ID NO: 11254 - protein, 110 aa, Methanococcoides burtonii DSM 6242
MKKITAIIRPGKLETVKEELVTAGLNAMTIFDVKGRGEQKGICLQFRGKRNLIDMIPKIQIDIVVKNDEVVTVIQTIKHAVRTGKIGDGKIFGPPVEMMIGIRTGECITE

SEQ ID NO: 11255 - protein, 42 aa, Morinda citrifolia
FGGCPKFLRRVDTALKNMGINERVPYNAPLIQFSSWMGGDRD

SEQ ID NO: 11256 - protein, 375 aa, Methanococcoides burtonii DSM 6242
MAQYKIPVLPGDGIGPEIITEGKKVIDAAGEKFGFDVDWIEYPQGADHYLETGELISEDTLKELSAYDAIYLGSIGDDRIAPGVLEKGILLAARFYFDQYINLRPIKLLEGVWCPLKDKTPADIDFTVVRENTEDFYIGIGGRAKTGASKDLLEVSRTLYSAKFGLDIETDSEEIAYQIGMISKEGTQRVIDYSFDLAEKSDKHVSSVDKANVLSDIYGFWREEFNTIAAKHPDVKTDLNYVDAITMWFVKNPEWFDIVVTPNMFGDIITDLGAMVQGGLGLAPGGNINPNGTSMFEPIHGSAPKYKGLNKVNPIATIWAGSMLIEQLGEKEAADAIVSAIEKNILEAKVQTYDMGGSSTTSDVGSDIARILLEM

SEQ ID NO: 11257 - protein, 496 aa, Mentha x gracilis
MELDLLSAIIILVATYIVSLLINQWRKSKSQQNLPPSPPKLPVIGHLHFLWGGLPQHVFRSIAQKYGPVAHVQLGEVYSVVLSSAEAAKQAMKVLDPNFADRFDGIGSRTMWYDKDDIIFSPYNDHWRQMRRICVTELLSPKNVRSFGYIRQEEIERLIRLLGSSGGAPVDVTEEVSKMSCVVVCRAAFGSVLKDQGSLAELVKESLALASGFELADLYPSSWLLNLLSLNKYRLQRMRRRLDHILDGFLEEHREKKSGEFGGEDIVDVLFRMQKGSDIKIPITSNCIKGFIFDTFSAGAETSSTTISWALSELMRNPAKMAKVQAEVREALKGKTVVDLSEVQELKYLRSVLKETLRLHPPFPLIPRQSREECEVNGYTIPAKTRIFINVWAIGRDPQYWEDPDTFRPERFDEVSRDFMGNDFEFIPFGAGRRICPGLHFGLANVEIPLAQLLYHFDWKLPQGMTDADLDMTETPGLSGPKKKNVCLVPTLYKSP

SEQ ID NO: 11258 - protein, 112 aa, Bifidobacterium adolescentis
MKLITAIIQPHKLDDVKEALAAAGVHGLTVSEANGYGRQRGHTEVYRGAEYTVDLIPKIRIEVLSDDADAETLVGVIVKSAGSGTIGDGKVWVAPLDSVTRVRTGETGSAAI

SEQ ID NO: 11259 - protein, 127 aa, Arabidopsis thaliana
MESYQNQSGAQQTHQQLDQFGNPFPATTGAYGTAGAPAVAEGGGLSGMLHRSGSSSSSSSEDDGLGGRRRKKKGITEKIKEKLPGHHDSNKTSSLGSTTTAYDTGTVHHEKKGMMEKIKEKLPGGHH

SEQ ID NO: 11260 - protein, 494 aa, Mentha x gracilis
MELNLLLVIIILVATYTVSLLNKQWRKPKSQQKQPPKLPVIGHLHLLWGGLPPQHLLRSIAREYGPVAHVQLGEVYSVVLSSAEAAKQAMKVLDPNFADRFDSVGSRIMWYDNDDIIFSPYNDHWHQMRKICVSELLSPKNVRSFGFIRQEEIERLIRVMKQSEGAPVDVTEEVSKMSCFVVCRAAFGSVLKDQGSLAELVKESLAMASGFELKDLYPSSWLLNLLSFNNYRLKRMRRRLDHVLDGFLEEHRVKKNGEFGGEDIVDVLFRMQKDSNIKIPITSNGIKGFIFNTFSAGAEASSTTISWALSELMRNPAKMAKVQAEVREALKGKTSVDLSEMQELKYMRSVVKETLRLHPPFPLIPRQSREECEINGFYIPARTRILINAWSIGRDPLYWEDPDTFRPERFDEVSRDFMGNDFEFIPFGAGQRICPGLHFGLANVEIPLAQLLYHFDWKLPQGMTDADLYVAGTPGLSGPRKKNVFLVPTIHKSR

SEQ ID NO: 11261 - protein, 207 aa, Mesembryanthemum crystallinum
MASRRRKLLKIIILGDSGVGKTSLMNQFVNKKFSNQYKATIGADFLTKELQFEDRLFTLQIWDTAGQERFQSLGVAFYRGADCCVLTYDVNVMKSFESLNRWREEFLIQASPADPDNFPFVLLGNKIDVDGGSGRVVSEKKAKAWCMSKGNIPYFETSAKDGTNVEEAFQCIAKNAIQNEPEEETYLPDTIDMAGSTRPQSSSACEC

SEQ ID NO: 11262 - protein, 489 aa, Agrobacterium tumefaciens str. C58
MAAVQETIDQVRQIDVDQYKYGFETEIEVDKAPKGLSEEVIRFISAKKQEPEWMLEWRLEAYKRWLTMEEPTWARVSYPKIDFNDLYYYAAPKSTPGPKSLDEVDPELLKVYEKLGIPLKEQEILAGVENRRVAVDAVFDSVSVVTTFKAELAKAGVIFMSISEAVREYPDLVKKYLGSVVPQTDNFYATLNSAVFTDGSFVFVPKGVRCPMELSTYFRINEKNTGQFERTLIIAEEGAYVSYLEGCTAPQRDENQLHAAVVELVALDDAEIKYSTVQNWYPGDKDGKGGIYNFVTKRGDCRGNRSKISWTQVETGSAITWKYPSCILRGDDSRGEFYSIAVSNGHQQIDSGTKMIHLGKNTSSRIIAKGIAAGFSENVYRGQVSAHRKATNTRNFTQCDSLLIGDKCGAHTVPYIEAKNSSAHFEHEATTSKISEDQLFYCLQRGIPEESAIALIVNGFVKDVIQQLPMEFAVEAQKLIGISLEGSVG

SEQ ID NO: 11263 - protein, 407 aa, Desulfovibrio desulfuricans G20
MPMCTAEEAIEEIRSGRMLILVDDEDRENEGDLTIAAEHVTPEIINFMAMHGRGLICLAMAPEWVDKLQLPLMARRNESKFGTNFTVSIEARQGVTTGISAKDRATTILTAVKDDVKPEDIVTPGHIFPLRAQKGGVMVRAGQTEGSVDLARLAGLKPAAVICEIIRDDGEMARMPDLVEFAEKHGLKIATIRDLIRYRMQPGQLSVQRVAEAKMPTKYGDFTVIAYENDHGDETHLAMVKGDIKNQDAVLVRVHSECLTGDVLGSLRCDCGDQLAAAMCTVAAEGAGVVLYMRQEGRGIGLANKIKAYALQDQGYDTVEANHKLGFKADLRDYGIGAQILVDLGVRKMRMMTNNPKKIVGIEGYGIQVVERVPIEMHACEFNENYLRTKKEKMGHMLHLSDEGQEQ

SEQ ID NO: 11264 - protein, 312 aa, Vibrio vulnificus CMCP6
MTHSTPIRIATRKSPLALWQAYYVKDALQKAHPGLEVELVTMVTKGDVILDTPLAKVGGKGLFVKELEVAMLEGRADLAVHSMKDVPVDFPEGLGLVTICEREDPRDAFVSNTYHHVDELPQGAVVGTCSLRRQCQLKAYRPDLVIKELRGNVGTRLSKLDAGEYDAIILAAAGLKRLELEERIRSFIEPEQSLPAVGQGAVGIECRTNDERILKLLEPLNHADTADRVKCERAMNLTLEGGCQVPIGSYALLEGDEIWLRALVGEPDGSEIVRGEIRGPRAQAEQLGVQLANQLLDEGAREILTKLYQDHE

SEQ ID NO: 11265 - protein, 415 aa, Zea mays
  misc_feature (99)..(99): Xaa can be any naturally occurring amino acid
MDRELLETFDAAKKAADEAAGDGNSPEAGRCLDALRRLRDIRVNTDILVSTQICLVESTACFPSLSSKTTPGRRAQETGPSFGTRSIEFLSLFWVDTGXVGKRLRPLTKHPHSGIQAVAADLFGYWKKVVLEESGKKNGGSENERSSDSSGKVEKVRPVKIEKNSASASMKLEKRDVDVRGQKPNNVKVEKTTSNGSKAQSVKVERVSKEVIRTPDSKRPASVPNGHPKLTSLVKCNDPTRDKIRELLAEAFVSVSRETSDDDRDEVKNILDEVEACDPYRVAVTVESALFERLGPSTGTHRAKYRSIMFNLRAENNTDFRRRVLIGLVAPERLPDIPPDEMASDARKQENMQIKEKALFDCERGAAPKATTDQFKCARCGQRKTTYYQLQTRSADEPMTTFVTCVNCNNHWKFC

SEQ ID NO: 11266 - protein, 164 aa, Pyrococcus furiosus DSM 3638
MKVGVLSDTHIPKAYFPPQIFEFLKKRNVQYIIHAGDITSKEFLEKLEEVAPVIAVKGNMDRIDLPEEEKIEIGNFSILILHGHQFLSLNLDNLTYKALEEEVDILVFGHTHRPYYNVVRSYGREIILLNPGSPTLPRMSEPTFAILEVSNEDIDVHFYNVFSL

SEQ ID NO: 11267 - protein, 120 aa, Arabidopsis thaliana
  misc_feature (10)..(10): Xaa can be any naturally occurring amino acid
  misc_feature (17)..(18): Xaa can be any naturally occurring amino acid
  misc_feature (22)..(22): Xaa can be any naturally occurring amino acid
  misc_feature (26)..(26): Xaa can be any naturally occurring amino acid
  misc_feature (31)..(31): Xaa can be any naturally occurring amino acid
  misc_feature (36)..(36): Xaa can be any naturally occurring amino acid
  misc_feature (40)..(40): Xaa can be any naturally occurring amino acid
  misc_feature (42)..(42): Xaa can be any naturally occurring amino acid
  misc_feature (46)..(46): Xaa can be any naturally occurring amino acid
  misc_feature (51)..(59): Xaa can be any naturally occurring amino acid
  misc_feature (62)..(64): Xaa can be any naturally occurring amino acid
  misc_feature (70)..(70): Xaa can be any naturally occurring amino acid
  misc_feature (76)..(77): Xaa can be any naturally occurring amino acid
  misc_feature (80)..(80): Xaa can be any naturally occurring amino acid
  misc_feature (82)..(82): Xaa can be any naturally occurring amino acid
  misc_feature (87)..(87): Xaa can be any naturally occurring amino acid
  misc_feature (89)..(89): Xaa can be any naturally occurring amino acid
  misc_feature (91)..(91): Xaa can be any naturally occurring amino acid
  misc_feature (93)..(97): Xaa can be any naturally occurring amino acid
  misc_feature (100)..(103): Xaa can be any naturally occurring amino acid
  misc_feature (106)..(106): Xaa can be any naturally occurring amino acid
  misc_feature (108)..(110): Xaa can be any naturally occurring amino acid
  misc_feature (112)..(112): Xaa can be any naturally occurring amino acid
  misc_feature (114)..(115): Xaa can be any naturally occurring amino acid
MASSMLSSAXVVTSPAXXTMVXPFTXLKSSXAFPVXRKTXKXITSXASNGXXXXXXXXXPPXXXKKFETXSYLPDXXDVXLXKEVDXLXRXKXXXXXSNXXXXHGXVXXXHXNXXGKPLA

SEQ ID NO: 11268 - protein, 319 aa, Wolbachia sp.
LCDKKIQLGINLTKGLGAGALPDVGKGAAEESIDEIMEHIKDSHMLFITAGMGGGTGTGAAPVIAKAAREARAAVKDRAPKEKKILTVGVVTKPFGFEGVRRMRIAELGLEELQKYVDTLIVIPNQNLFRIANEKTTFSDAFKLADNVLHIGIRGVTDLMVMPGLINLDFADIETVMSEMGKAMIGTGEAEGEDRAISAAEAAISNPLLDNVSMKGAQGILINITGGGDMTLFEVDAAANRVREEVDENANIIFGATFDQAMEGRVRVSVLATGIDGRNNKSETSPISQSEDSEKEKFKWPYSQIESAQDKTLETKPAE

SEQ ID NO: 11269 - protein, 308 aa, Vigna radiata
PVVDMKNLNNEERGATMEKIKDACENWGFFEVVNHGISIELMDSVDRLTKEHYKRCMEERFKEMVASKGLECAESEINDLDWESTFFLRHLPVSNISEIPDLADDYRKVMKDFAVELEKLAELVLELVCENLGLEKGYLKKAFYGSKGPNFGTKVSNYPPCPKPELIKGLRAHTDAGGIILLFQDHKVSGLQLFKDGHWIDVPPMRHSIVVNLGDQLEVITNGKYKSVMHRVITQTDGNRMSIASFYNPGNDAVIAPAEALVKEDESSKVYPKFVFDDYMKLYAGLKFQAKEPRFEAMKAIDGPIATV

SEQ ID NO: 11270 - protein, 567 aa, Zea mays
MASAALICGTEQWKALQAHVGAIQKTHLRDLMADADRCKAMTAEYEGIFLDYSRQQATGETMEKLLKLADAAKLKEKIEKMFKGEKINSTENRSVLHVALRAPRDAVINSDGVNVVPEVWSVKDKIKQFSETFRSGSWVGATGKPLTNVVSVGIGGSFLGPLFVHTALQTDPEAAECAKGRQLRFLANVDPVDVARSIKDLDPETTLVVVVSKTFTTAETMLNARTLKEWIVSSLGPQAVAKHMIAVSTNLKLVKEFGIDPNNAFAFWDWVGGRYSVCSAVGVLPLSLQYGFPIVQKFLEGASSIDNHFYSSSFEKNIPVLLGLLSVWNVSFLGYPARAILPYSQALEKLAPHIQQLSMESNGKGVSIDGAQLSFETGEIDFGEPGTNGQHSFYQLIHQGRVIPCDFIGVVKSQQPVYLKGETVSNHDELMSNFFAQPDALAYGKTPEQLHSEKVPENLIPHKTFKGNRPSLSLLLPTLSAYEVGQLLSIYEHRIAVQGFIWGINSFDQWGVELGKSLASQVRKQLHGTRMEGKHVEGFNHSTSSLLARYLAVKPSTPYDTTVLPKV

SEQ ID NO: 11271 - protein, 337 aa, Synechocystis sp. PCC 6803
MTRVAINGFGRIGRNFLRCWLGRTDSQLEVVGINDTSDPRTNAHLLRYDSMLGKLDGDISADENSITVNGKTIKCVSDRNPLNLPWAEWNVDLVIEATGVFVTHEGATKHVQAGAKKVLITAPGKGPNIGTYVVGVNAHEYKHEEYEVISNASCTTNCLAPFGKVINDNFGIIKGTMTTTHSYTGDQRILDASHRDLRRARAAAVNIVPTSTGAAKAVALVIPELQGKLNGIALRVPTPNVSVVDLVVQVEKNTIAEQVNGVLKEAANTSLKGVLEYTDLELVSSDFRGTDCSSTVDGSLTMVMGGDMVKVIAWYDNEWGYSQRVVDLAEIVAKNWK

SEQ ID NO: 11272 - protein, 319 aa, Wolbachia sp.
LCDKKIQLGINLTKGLGAGALPDVGKGAAEESIDEIMEHIKDSHMLFITAGMGGGTGTGAAPVIAKAAREARAAVKDRAPKEKKILTVGVVTKPFGFEGVRRMRIAELGLEELQKYVDTLIVIPNQNLFRIANEKTTFSDAFKLADNVLHIGIRGVTDLMVMPGLINLDFADIETVMSEMGKAMIGTGEAEGEDRAISAAEAAISNPLLDNVSMKGAQGILINITGGGDMTLFEVDAAANRVREEVDENANIIFGATFDQAMEGRVRVSVLATGIDGRNNKSETSPISQSEDSEKEKFKWPYSQSESTQDKTLETKPAE

SEQ ID NO: 11273 - protein, 449 aa, Desulfotalea psychrophila LSv54
MDPIIQQLHAKDQDQHEFHQAVEEVLESVKPVLDRNLWYRQQGVWERLIEPERVIMFRVPWVDDEGNVRVNRGFRVEMNSALGPYKGGLRFHPSVNLSIIKFLAFEQTFKNSLTTLPMGGGKGGSDFNPKGCSDFEVMRFCHSFMLELYRHIGPNTDVPAGDIGVGAREIGYLFGMYKKIKNEFTGVLTGKSLGWGGSLIRPEATGYGNVYFASEMLTTRDQTIEGKSCLVSGSGNVAQFTIEKILDLGGKVHTISDSDGYIYDEEGIDCDKLGWIKQLKNIRRGRVAEYVETYPQAVYTPIDPTLGYNPLWDHSADCAFPSATQNEINEQDAKNLVKNGVFLISEGANMPSSPEAVAVFHDANCLYGPSKAANAGGVAVSGLEMSQNTIRMSWPREEVDTRLKQIMHSIHSTCVDAASEYNYGQNYVAGANIAGFVKVVNAMLDQGVV

SEQ ID NO: 11274 - protein, 337 aa, Podospora anserina
MTVKVGINGFGRIGRIVFRNAVEHPDVEIVAVNDPFIEPKYAEYMLKYDSTHGVFKGTIQVSGSDLIVNGKTVKFYTERDPSAIPWKDTGAEYIVESTGVFTTTEKASAHLKGGAKRVIISAPSADAPMYVMGVNEKTYDGKAAVISNASCTTNCLAPLAKVVNDKFGIVEGLMTTVHSYTATQKTVDGPSAKDWRGGRGAAQNIIPSSTGAAKAVGKVIPELNGKLTGMAFRVPTSNVSVVDLTCRLEKPASYETIKAALKEASEGELKGILGYTEDEIVSSDLNGNANSSIFDAKAGISLNDNFVKLVSWYDNEWGYSRRVLDLLSYVAKYDASH

SEQ ID NO: 11275 - protein, 319 aa, Wolbachia sp.
LCDKKIQLGINLTKGLGAGALPDVGKGAAEESIDEIMEHIKDSHMLFITAGMGGGTGTGAAPVIAKAAREARAPVKDRAPKEKKILTVGVVTKPFGFEGVRRMRIAELGLEELQKYVDTLIVIPNQNLFRIANEKTTFSDAFKLADNVLHIGIRGVTDLMVMPGLINLDFADIETVMSEMGKAMIGTGEAEGEDRAISAAEAAISNPLLDNVSMKGAQGILINITGGGDMTLFEVDAAANRVREEVDENANIIFGATFDQAMEGRVRVSVLATGIDGRNNKSETSPISQSEDSEKEKFKWPYSQSESTQDKTLETKPAE

SEQ ID NO: 11276 - protein, 364 aa, Aspergillus oryzae
MSSYNIVVFGGDHCGPEVTAEAIKVLRAVEKNRDVTFNLQDHLLGGASIDATGSPLTDEALNAAKNADAVLLGAIGGPKWGTGAVRPEQGILKLRKEMGTFGNLRPCNFAAPSLVESSPLRADVCRGVNFNIIRELTGGIYFGERKEDDGSGYAMDTEPYSRAEIERIIRLAAHLALQHDPPLPVWSLDKANVLATSRLWRKVVTEVMAKEFPQLKIEHQLIDSAAMIMVKNPRQLNGIVVTSNLFGDIISDEASVIPGSLGLLPSASLSGIPDGNSKVNGIYEPIHGSAPDIAGKGIVNPVAAILSVAMMMQYSFGLFAEARAIEQAVSNVIESGVRTGDIGGKATTAEVGDAVAAELEKLLK

SEQ ID NO: 11277 - protein, 337 aa, Thermoproteus tenax
MKIGVLTGGGDAPGLNIAVYTFVKLAERKHEVYAIYHGWRGLLNKEVKRVSSRDLLDFAFSGGTYIRTSRTNPFKDEERARLLESNVKELGLDVVVAIGGDDTLGAAGEAQRRGILDAVGIPKTIDNDVYGTDYTIGFDSAVNAAIEATESFKTTLISHERIGVVEVMGREAGWIALFTGLSTMADAVLIPERPASWDSVAKRVKEAYNERRWALVVVSEGIKEYGGPKDEYGHSRLGGVGNELAEYIERSTGIEARAVVLGHTIRGVPPTAFDRILAVRYATAAYEAVENGRYGVMVAYSNGDIAYVPIVDVVGKNRLVSGYWMRLYETYWPDLAG

SEQ ID NO: 11278 - protein, 448 aa, Trichodesmium erythraeum IMS101
MNMNFKSSNPASSLALPPGDLGLPFIGQNKKIFKNPQNFIEEVYQKYGPVYKTNFLGKNFIYFQGYEAIKFILTNENKYFTYSQILRNYQRIFGENDITVLAGKEHRERQKILAKTIKSKNLNNYIDIIHDLSQSYFLKWIKSDYVDLYSEINNYTLDMILKLLLGIDYASKSEISNYLKDMSSGLNTIPVVFPWTKFGSALESKNKLFNQFEQIIVRRKKENNFGSDILGILLTVQEQMNYELTPREIVGQMVNLLSLGKKELSSALSSFFILTSEHLDVLKLLQIEQEKMDVSEPLSLDKYKKMVYLEQVIKEVLRLVPPVSGGLRKIIEDCSFQGFRIPKGWHAYYYISSVLKDPEIYKQPEIFNPERFNPTNAEDKKKPLCYIPFGGGARECIGKEFAYLVIKIFISALLDNCSWKFKENQDLTINTFPVARPAHKIEVCFTPK

SEQ ID NO: 11279 - protein, 319 aa, Wolbachia sp.
LCDKKIQLGINLTKGLGAGALPDVGKGAAEESIDEIMEHIKDSHMLFITAGMGGGTGTGAAPVIAKAAREARAAVKDRAPKEKKILTVGVVTKPFGFEGVRRMRIAELGLEELQKYVDTLIVIPNQNLFRIANEKTTFSDAFKLADNVLHIGIRRVTDLMVMPGLINLDFADIETVMSEMGKAMIGTGEAEGEDRAISAAEAAISNPLLDNVSMKGAQGILINITGGGDMTLFEVDAAANRVREEVDENANIIFGATFDQAMEGRVRVSVLATGIDGRNNKSETSPISQSEDSEKEKFKWPYSQSESTQDKTLETKPAE

SEQ ID NO: 11280 - protein, 194 aa, Triticum aestivum
MVDLQAAALVISVVAAEVYRAAAAMVKYSTDPANPTKSAKAMGRDLRVHFKNTRETAFALRKMSLNKAKRYLEDVLAHKQAIPFRRYCRGVGRTAQVKNRQPNGQGRWPAKSAKFVLDLLKNAESNAEAKGLDVDALYISHIQVNQAQKQRRRTYRAHGRINPYMSNPCHIELILSEKEEPVKKEAESQIARKA

SEQ ID NO: 11281 - protein, 346 aa, Xanthobacter autotrophicus Py2
MRVGINGLGRIGRLSLRAAMGAAQRPDNDPRGNNRLDIVHLNEIKGGAEAIAHLLEFDSVQGRWRAPISHDEGSVRIGDKAMSFSAHAAPTDIPWGDLGVDVVLESTGKFLTPQVLEGHLKRGAKRVIVAAPVKDPSVLNVVVGVNENLYDREKHPIVTAASCTTNCLAPVVKVVHEAIGIRHGQITTIHDPTNTNVVVDAPHKDLRRARSAMLSLQPTTTGSATAIALIYPELKGKLNGHAVRAPVLNASLTDCVFELNRETTAEEVNALFTEAAAGALNGILGFEPRPLVSADYARDTRSAIVDGPSTLVTDGTLLKVYAWYDNEMGYACRMVDLACHLERVGL

SEQ ID NO: 11282 - protein, 456 aa, Candida albicans SC5314
MVLPHEPEFQQAYDELVSAVEDSTLFKEEPQYKKVIPVVSIPERIIQFRVTWENDKGEIEVNNGFRVQYNSALGPYKGGLRFHPTVNLSILKFLGFEQIFKNALTGLSMGGGKGGSDFNPKNRSDNEIRRFCVSFMRQLARYIGPDTDVPAGDIGVGGREVGFLFGAYKQMRNNWAGVLTGKGLTWGGSLIRPEATGYGCVYYVEKMIEKATNGKETFKGKRVAISGSGNVAQYAALKVIELGGTVVSLSDSKGSIISKNGITADQVYAIAAAKLKFKSLEEIVADSVQLFSGDHSVEYLAGVRPWTKVGQVDVALPSATQNEVSGEEAKALVDAGCKFIAEGSNMGSTKEAIEVFEANRDSNGVWYAPGKAANCGGVAVSGLEMAQNSQRVQWTNEEVDAKLKEIMYTCFENCYKTAQKYSIEKNENGLPSLLKGANIAGFIKVADAMFDQGDVF

SEQ ID NO: 11283 - protein, 498 aa, Mesorhizobium loti MAFF303099
MTLSFDPRAKATTLYHGEFRPMFIGGKWVAAQSGQEMQALNPATGEVLTTVPRGGAADVDAAVAAARAAFEGPWSKFSPYERQCVLLRIADLFETHWEELSVSDTLDMGLPITRTLANRRRVIGMLRFYGGMATALHGEAIDNSIPGEIVSFTRREPVGVVGAIIPWNAPTAASIWKIAPALATGCTIVLKPSEEASLTPLLIARLMQEAGVPDGVVNIVTGTGAEAGARLAEHPDVNKIVFTGSTLTGQAIARAGVTNLKRVSLELGGKSPIIVCRDADIDKAVPVAAMAVFVHSGQICIAGSRLFVAREIHDEFVRRVAEFAGRLRIGHGIEAETEIGPLINARQAGKVEGYIKAGSDEGAKLVAGGSRLTGALYDGGNFIAPTVFGSVSDKMTIAREEIFGPVISAMPFDTLDEVVARANATPYGLAAGIFTTHLGTAHKLARRIRAGSVWVNMYHAIDPAVPFGGMKMSGYGREGGIEHLHEYLETKSVWIQTD

SEQ ID NO: 11284 - protein, 594 aa, Neurospora crassa
MAIFAMGWQKPDNVAGSSAPAIMVGLFVATGGLLLGYDTGTINGILAMKSFKDHFSTGYIDGNGQPGIYPKESALIVAMLSAGTAIGALLAAPLGDHYGRRRSLIGAIGIFVIGAILQVCAYNIDLLVAGRTVAGVGIGIVSVLVPLYQSEMAPKWIRGTLVCTYQLSITMGLLAAAVVNILTYKLKTAAAYRVPIGLQLTWACVLALGLTVLPETPRYLIKRGDKNAAALSLSRLRRLDITHPALVEELAEIEANHQYEMALGPDSYKDILFGEPHLGRRTFTGCCLQMLQQLTGVNFIMYYGTTFFNNAGVGNPLKISLIMQVINTASTIPGLFVVESWGRRRLLMVGAIGMAICQLLIAAFATASGSNNLSAHNKVLITFVAIYIFFFAASWGPVVWVVTSEIYPLKVRAKSMSITTASNWFLNFGIAYGTPYMQTNSAASDESSIDLGSKVFFVWGAFCIVAVGFVWCMVYETSKISLEQIDEMYERVDHAWHSRRFEPSWSFQEMRDLGFSDGGIPPTQQLQQQPQQPQQQQQQHHQQQQHQLQVDLQQSQSRTSNSSTSQTDTGGSNNTGASQDDKLVASLGNIDLSY

SEQ ID NO: 11285 - protein, 42 aa, Morinda citrifolia
LEGVPKFLRRVDTALKNMGINERVPYNAPLIQFSSWMGGDRD

SEQ ID NO: 11286 - protein, 56 aa, Morinda citrifolia
KGVPKFLRRVDTALKNIGINERVPYNAPVIQFSSWMGGDRDGNPRVTPEVTRDVCL

SEQ ID NO: 11287 - protein, 56 aa, Morinda citrifolia
KGVPKFLRRVDTALKNIGINERLPYNAPVIQFSSWMGGDRDGNPRVTPEVTRDVCL

SEQ ID NO: 11288 - protein, 92 aa, Brassica oleracea
KETVCVTGASGFIGSWLVMRLLERGYFVRATVRDPGNLKKVLHLLDLPNAKTQLTLWKADLSDEGSYDDAINGCDGVFHIATPMDFESKDPE

SEQ ID NO: 11289 - protein, 497 aa, Mentha x gracilis
MELQISSAIIILVATFVASLLIKQWRKSESQQNLPPGPPKLPLVGHLHLLWGKLPQHAMADMAKKYGPVTHVQLGEVFSVVLSSREATKEAMKLLDPACADRFESIGTRIMWYDNDDIIFSPYSDHWRQMRKICVSELLSARNVRSFGFIRQDEMSRLLRHLQSSAGETVDMTERIATLTCSIICRAAFGAIINDHEELVELVKDSLSMASGFELADLFPSSKLLNLLCWNKSKLWRMRRRVDTILEAIVEEHKLKKSGEFGGEDIIDVLFRMQKDSQIKVPITTNAIKAFIFDTFSAGTETSSTTTLWVMAELMRNPAVMAKAQAEVRAALKGKTSVDVDDVQELKYMKSVVKETMRMHPPIPLIPRSCREECEVNGYKIPNKARIMINVWSMGRNPLYWEKPETFWPERFDQVSRDFMGSDFEFIPFGAGRRICPGLNFGLANVEVPLAQLLYHFDWKLAEGMKPSDMDMSEAEGLTGIRKNNLLLVPTPYNPSS

SEQ ID NO: 11290 - protein, 472 aa, Zea mays
MPRTTVVESSGCPPLRALTTDILGLVKVVEAHARPAGAAKVVETWGAPDASRAIVAASLADRAADPVLAVARRNGVVELLNPLNGSALAAVKTAGSAPNDSGAEGDPLAALHLFARQTSDSILGTFLACTEKGKASIRSITKENADSGSDVGPSATWDVCNGANVQFCSVDHGESYVIFGGKGIEVNLWDITSSSKTWSAKSPRANSLGIFTRPWFTAGTFLCKNDHRKIVACTNNHQVRLYDTALQRRPAVSVDFRESPIKAVAADPNGHDVYIGTGTGDLASFDMRIGNMLASCYIGSIRSIVRHPDLPLIASCGLDSYLRIWDTNTRQLLSAVFLKQHLTTVVLDSHFSVEEPGEMKSKQLESSVETETEVRKEKKKKSKAITEDETEAQIRKEKKSRTIEEEEQAGLVDHSDINDEVYARKEKKKKKSRGIEGGKERDSDGEICSPKRRKSGERSKCLKKRSKKQLVA

SEQ ID NO: 11291 - protein, 222 aa, Zea mays
MASLVALLAVALVAQLASWQQAAVAYDPSPLQDFCVADKNSPVRVNGFPCKDPMAVTPDDFFNPAMIIGKRRDTNNKVGSNVTNVNVESFPGLNTLGISLARIDYAPLGVNPPHIHPRATELLTVLEGTLYLGFVTSNPNRLFSKVVKKGDVFVFPKAMIHFQMNLDHEKPAAALSSLSSQNPGVITIASAVFGSKPPISDDVLAKAFQVEKKLIDWLQSQF

SEQ ID NO: 11292 - protein, 437 aa, Clostridium acetobutylicum ATCC 824
MKIVVTKFGGSSLADSNQFKKVKGIIDSDANRKYIIPSAPGKRTNKDYKITDLLYLCNAHVKNGIPFDDVFKLISQRYTEIVSELNIDMDIAYYLEKVKKNIENGASSDYAASRGEYLNGVILAKYLNAEFIDAAEVIFFDKSGCFDEKKSYEKIKEKVLSCNKAVIPGFYGSSFNGDVKTFSRGGSDVTGSIISAGVNADLYENWTDVSGFLMADPRIVENPKTISKISYKELRELSYMGATVLHEEAIFPVKDSGIPINIKNTNKPSDPGTLILSDTHKEINLGTITGIAGKKNFTVIAIEKALLNSEVGFCRKILSILEMYGVSFEHMPSGVDSVSLVIEDCKLDGKCDKIIEEIKKQCNPDSIEIHPNMALVATVGTGMAKTKGIANKIFTALSKENVNIRMIDQGSSEINVIVGVETVDFEKAVKSIYNAFN

SEQ ID NO: 11293 - protein, 247 aa, Clostridium acetobutylicum ATCC 824
MENKVLAVVNGQEITESDLNATINSFPEERRRQFLNPEGRKRLLDEIVSFELVYNDAKDSGIEEQEVVKAQIENARKQILTHASLDKIFSDIVVADSEVEKYYEANKEMFKDPEKVAAKHILVQTEEDALKIREEIKEGKTFEEAAAEYSSCPSKERGGDLGAFTRGQMVPEFEEAAFSQEIGEVGAPVKTQFGYHLIKVEGKIEPAQRDFPSVKDAIKNRLLQERQSMKYSWYIDQLKNKYKVEIK

SEQ ID NO: 11294 - protein, 277 aa, Clostridium perfringens str. 13
MDKILSGKTVAIDIKGQIKSYTEELKASGKSLKISSILVGDDGGSVYYQNFQEKLANNLGIDFEKIKLDESISEENLKLKIEELNKDDSVNGIMLLLPLPKHIDERAVTNLIDADKDLDCLSEVSVGRFYKGEKCFMPCTPNSVITLLKAYNIEIEGKEVVIIGRSNIVGKPLFQMFLNENATVTVCHSRTKNLKEVCKRADILVVAIGRANFIDSSYVREGAVVIDVGTSEVNGKITGDVNFDDVYDKASLITPVPGGVGSLTTTLLLKNVCKELD

SEQ ID NO: 11295 - protein, 107 aa, Arabidopsis thaliana
  misc_feature (67)..(67): Xaa can be any naturally occurring amino acid
MAVPLLTSTVGNKTSARYSIPHSDRRLTSPERWSRPNGIDSRVRRKFSGVTLLPTVGYRSENKTRHXVPTGLNKYIDQTTSELDLRIMHHTSYCAEIAHNIATMQRN

SEQ ID NO: 11296 - protein, 210 aa, Oryza sativa
  misc_feature (134)..(134): Xaa can be any naturally occurring amino acid
  misc_feature (147)..(147): Xaa can be any naturally occurring amino acid
  misc_feature (151)..(151): Xaa can be any naturally occurring amino acid
  misc_feature (167)..(167): Xaa can be any naturally occurring amino acid
  misc_feature (187)..(187): Xaa can be any naturally occurring amino acid
  misc_feature (191)..(191): Xaa can be any naturally occurring amino acid
MERELLETFEAAKKAADAAAGADDSPEADRCLDAMRRLRGLRVTTDVLVSTQVGKRLRYLTKHPHSDIQSMATDLLGYWKKVVIEEGKKNGTTENVGSTNSAARAEKAQPMKVDKSSASGSVKPEKREVNVRGXQKPESIQVERITXNNDXSKTQQVKVERASKGGXLNFLFKEPISCSNWPPKLAXLVKXMDPLGNKIRDLIGDAFFKG

SEQ ID NO: 11297 - protein, 2124 aa, Arabidopsis thaliana
MAVPLLTKKVVKKRSAKFIRPQSDRRITVKGYEIVHLDNALWYLVARILILFLVTSFLHGQKVNLLQESWRRPKGIDSRVRRKFKGVTLMPNVGYGSDKKTRHYLPNGFKKFIVHNTSELELLMMHNRTYCAEIAHNISTKKRKAIVERASQLDVVVSNKLERCKEMNVVAVKLGSRVDSFVANSVVVMFSGNMNDAVSVFIDNWRKNLVSWSSSIVGFYKKEESFLVTCQADQIISRKIKHYTCKLKEVKSLWFFEDCHTVIKSDLKSCGNWDKRLRLFPPLLMASSSSSSRNWSYDVFPSFSGEDVRKTFLSHFLRELERKSIITFKDNEMERSQSIAPELVEAIKDSRIAVIVFSKNYASSSWCLNELLEIMRCNKYLGQQVIPVFYYLDPSHLRKQSGEFGEAFKKTCQNQTEEVKNQWKQALTDVSNILGYHSKNCNSEATMIEEISSHILGKLSLTPSNDFEEFVGIKDHIEKVRLLLHLESDEVRMVGIWGTSGIGKTTIARALFSNLSSQFQSSVYIDRAFISKSMEGYGRANPDDYNMKLRLRENFLFEILGKKNMKIGAMEERLKHQKVLIIIDDLDDQDVLDALVGRTQWFGSGSRIIVVTKNKHFLRAHGIDHVYEACLPSEELALEMFCRYAFRKNSPPDGFMELSSEVALRAGNLPLGLKVLGSYLRGRDIEDWMDMMPRLQNDLDGKIEKTLRVSYDGLNNKKDEAIFRHIACLFNGEKVNDIKLLLAESDLDVNIGLKNLVDKSLIFVREDTIEMHRLLQDMGKEIVRAQSNEPGEREFLVDSKHIYDVLEDNTGTKKVLGIALDINETDGLYIHESAFKGMRNLLFLNFYTKQKKDVTWHLSEGFDHLPPKLRLLSWEKYPLRCMPSNFRPENLVKLQMCESKLEKLWDGVHSLTGLRNMDLRGSENLKEIPDLSLATNLKKLDVSNCTSLVELSSTIQNLNQLEELQMERCENLENLPIGINLESLYCLNLNGCSKLRSFPDISTTISELYLSETAIEEFPTELHLENLYYLGLYDMKSEKLWKRVQPLTPLMTMLSPSLTKLFLSDIPSLVELPSSFQNLHNLEHLNIARCTNLETLPTGVNLELLEQLDFSGCSRLRSFPDISTNIFSLVLDGTGIEEVPWWIEDFYRLSFLSMIGCNNLQGVSLNISKLEKLETVDFSDCEALSHANWDTIPSAVAMATENIHSKLPVCIKFSNCFNLDHKAVLLQQSIFKQLILSGGEMFSYFTHRTTGTSLTNIPLLHISPCQPFFRFRACALVDTESMDIGSVFFQVQVSCRFTDRLGNYLDSPYQHEVFAVLEKGSHMVISDCCFPFNEDNAPLAELIYDHVDIQFHFTQENDELKLIGCGLRLSEADNDLGNEIDGSEEWEDCNDSGLGSESDNLEAEEDTFWIGHADCCTSSPAWDLRVEMWSRAIFQRFRFRAFSISHVIHGKCYRSFSVTVEFQNREVLICNHLLSRRIDEAREVFNQVPSPHVSLYTKMITGYTRSNRLVDALNLFDEMPVRDVVSWNSMISGCVECGDMNTAVKLFDEMPERSVVSWTAMVNGCFRSGKVDQAERLFYQMPVKDTAAWNSMVHGYLQFGKVDDALKLFKQMPGKNVISWTTMICGLDQNERSGEALDLFKNMLRCCIKSTSRPFTCVITACANAPAFHMGIQVHGLIIKLGFLYEEYVSASLITFYANCKRIGDSRKVFDEKVHEQVAVWTALLSGYSLNKKHEDALSIFSGMLRNSILPNQSTFASGLNSCSALGTLDWGKEMHGVAVKLGLETDAFVGNSLVVMYSDSGNVNDAVSVFIKIFKKSIVSWNSIIVGCAQHGRGKWAFVIFGQMIRLNKEPDEITFTGLLSACSHCGFLEKGRKLFYYMSSGINHIDRKIQHYTCMVDILGRCGKLKEAEELIERMVVKPNEMVWLALLSACRMHSDVDRGEKAAAAIFNLDSKSSAAYVLLSNIYASAGRWSNVSKLRVKMKKNGIMKKPGSSWVVIRGKKHEFFSGDQPHCSRIYEKLEFLREKLKELGYAPDYRSALHDVEDEQKEEMLWYHSERLAIAFGLINTVEGSAVTVMKNLRVCEDCHTVIKLISGVVGREIVLRDPIRFHHFKNGTCSCGDYW

SEQ ID NO: 11298 - protein, 448 aa, Pseudoalteromonas tunicata D2
MSSSFIVAKFGGTSLADFDAMFRCAQIIHDDNNVRVVAVSASAGVTNHLVALSHKDISDAVRQSHIDGVLAIQNNILAKLTLDADLATLFSQTLADFEQCAALTSTSEQHNDELLSFGERLSSCLFTQVLRDLGIKAERFDVRSVLKTDAHFGKATPNVAQTRAAALEHLVPLLNETVVVTQGFIGSDQHGRTTTLGRGGSDYSAALLAEAIDACSVHIWTDVVGIFSTDPRLCQKAKPIPKLSFDEAAEMATFGAKVLHPATILPASRAGISVFVGSSRAPEQGGTWIEKEKSQHPGIRAVTQRKNQILLTLKSPEMLLASGFLARVFTILSEYNISVDLVTTSEISVALTLDNAPNASRPELDQACLQRLSEFCHVTVENNLTLVALVGSEIQLRQHEMNLMQVLADFNIRMICHGASKHNLCFLVEQSESDAVVQSIHRRLLEVC

SEQ ID NO: 11299 - protein, 907 aa, Mycobacterium leprae
MRADIRLLGTILGDTLREQNGDEVFDLVERVRVESFRVRRSEIDRADMARMFSGLDIHLAIPIIRAFSHFALLANVAEDIHRERRRHIHLDAGEPLRDSSLAATYAKLDLAKLDSATVADALTGAVVSPVITAHPTETRRRTVFVTQRRITELMRLHAEGHTETADGRSIERELRRQILTLWQTALIRLARLQISDEIDVGLRYYSAALFHVIPQVNSEVRNALRARWPDAELLSGPILQPGSWIGGDRDGNPNVTADVVRRATGSAAYTVVAHYLAELTHLEQELSMSARLITVTPELATLAASCQDAACADEPYRRALRVIRGRLSSTAAHILDQQPPNQLGLGLPPYSTPAELCADLDTIEASLCTHGAALLADDRLALLREGVGVFGFHLCGLDMRQNSDVHEEVVAELLAWAGMHQDYSSLPEDQRVKLLVAELGNRRPLVGDRAQLSDLARGELAVLAAAAHAVELYGSAAVPNYIISMCQSVSDVLEVAILLKETGLLDASGSQPYCPVGISPLFETIDDLHNGAAILHAMLELPLYRTLVAARGNWQEVMLGYSDSNKDGGYLAANWAVYRAELALVDVARKTGIRLRLFHGRGGTVGRGGGPSYQAILAQPPGAVNGSLRLTEQGEVIAAKYAEPQIARRNLESLVAATLESTLLDVEGLGDAAESAYAILDEVAGLARRSYAELVNTPGFVDYFQASTPVSEIGSLNIGNRPTSRKPTTSIADLRAIPWVLAWSQSRVMLPGWYGTGSAFQQWVAAGPESESQRVEMLHDLYQRWPFFRSVLSNMAQVLAKSDLGLAARYAELVVDEALRRRVFDKIADEHRRTIAIHKLITGHDDLLADNPALARSVFNRFPYLEPLNHLQVELLRRYRSGHDDEMVQRGILLTMNGLASALRNSG

SEQ ID NO: 11300 - protein, 313 aa, Parvularcula bermudensis HTCC2503
MTDPIAPAAQNNALIKDATIETFQADVLQASMSVPVVVDFWASWCGPCRQLGPLLEAQITARGGKILMVKVDTDQNQLLAQQLRIQSLPTVMAFVGGQPVDGFQGALPDSQIGQFLDRVEQIAAQAGLGGGQGETDPEAMLDDAEALLDQGDVATAMQIFAGVADATEAGSDAQARALAGLARCALSAGNKDQASDMLKAIPEEKQSLPAVSRAQALLELGGNAPDSAALTAARDRAQQSPEDPAALFALGEAEIDNGSVDAGMDALLKSIALDKDWDEGAARQKLLKLFDALPPTHPSVKTGRRRLSSLLFA

SEQ ID NO: 11301 - protein, 483 aa, Chlamydia trachomatis D/UW-3/CX
MDAPVDKFLQQQEYPYGFVTPIQSEGLAPGISQEHIEQLVHLRGEPKFLLDFRLKAFRFWQKMEEPTWARLRYPPIAYDDIVYFSAPKTKKPLGKLEDADPEILETFKKLGIPIDEQKRLLNVQDVAMDLVFDSVSIGTTFKKTLEDAGVIFCSFREAIHNYPDLVKRYLGSVVPARDNFFAALNSAVFSDGSFVYIPKGVCCPMEISTYFRINDKESGQFERTLIIAEDDSYVSYLEGCTAPSFSSHQLHAAVVELVAHNRSVIRYSTVQNWYPGDRKTGKGGIYNFVTKRGLCAGEHSKISWSQVEVGAAITWKYPSCILKGENSVGEFYSIALTNGKMQADTGTKMLHIGKGSSSTIVSKGISAEESHNTFRSLVSISSQAVGSCNYTQCDSMLVGEHCGAYTDPQIVVNNGESCVEHEAATSKLREDQLFYLRSRGFNTEEAVSLVVHGFCREVIELLPLEFAREATKLLMIKLENSVG

SEQ ID NO: 11302 - protein, 559 aa, Gibberella zeae PH-1
MGASSRSTPALSRASILTSSSGPSHVAARRIHATTKQLQPVTAALASTASSYPTTHAKVEVVDTPYFIDNKFVASTADKYIDLHDPATNELVTRVPQMTDAEMKAAVESAEKAFKSWKNTSVISRQQIMFRFVQLIRENWDRLAASITLEQGKTFADAKGDVLRGLQVAEAAVAAPELLKGEVLEVAKDMETRTYREPLGVTAAICPFNFPAMIPLWCIPIATITGNTLILKPSERDPGAAMIIAELVEKAGFPAGVVNIIHGAHRTVDFILDEPAIKAISFVGGNKAGEYIFSRGSANGKRVQANLGAKNHAVVSPDANKNQFINSIVGAAFGAAGQRCMALSTLVMVGETKEWLHDVAEQAKNLNVNGGFEQGADLGPVITPQSKERIEKLIDSAEKEGATILLDGRGFKPSKYPNGNWVGPTIITNVTPDMTCYKEEVFGPVLVCLNAESIEDAIDLVNKNEYGNGTAIFTRSGATAEIFRKNIEAGQVGINVPIPVPLPMFSFTGNKKSIAGGGANTFYGKPGINFYTQLKTVTALWQSADAVAKKADVSMPTQQ

SEQ ID NO: 11303 - protein, 359 aa, Burkholderia mallei ATCC 23344
MPKSKRHDPQAESEKISRAKQASVERTGASADEDEDAADNERDYESRDADPDESGEGRGDAQPDLDDFRALLQAELTADTIQHYLNRISVKPLLTVEEEQRYSRLAKAGEFEARQVMIERNLRLVVSIAKGYLNRGVPLLDLIEEGNLGLMHAIEKFDPTRGFRFSTYATWWIRQSIERAIMNQARTVRLPVHVIRELNQVLRAKRHLEKNSMSTGEAAERREASIDDIAYLTGKTAEEVTDILALNEHTASLDAPLDLDPASSLLDLLPDDQSQSPDAEVQHRELETLTRAWLSRLSDKHRHVIERRFGLNHIEPATLEELADEMGLTRERVRQIQQEALVRLKRFFASNGVRKDAVL

SEQ ID NO: 11304 - protein, 130 aa, Pyrococcus furiosus DSM 3638
MDEKEFKRLLRVRARLKRKKPRFLRQEWWRYPKFKNDPKWRRPKGIDSKMRLKLKGKPRSPSIGWSSPKLVRGLHPSGYEEVLVHNVKELEALDPKRQAARIAHTVGKKKRIEIIKRAEELGIKVLNPRV

SEQ ID NO: 11305 - protein, 75 aa, Brassica napus
  misc_feature (3)..(3): Xaa can be any naturally occurring amino acid
  misc_feature (13)..(13): Xaa can be any naturally occurring amino acid
  misc_feature (23)..(23): Xaa can be any naturally occurring amino acid
  misc_feature (25)..(25): Xaa can be any naturally occurring amino acid
  misc_feature (33)..(33): Xaa can be any naturally occurring amino acid
  misc_feature (38)..(38): Xaa can be any naturally occurring amino acid
  misc_feature (43)..(43): Xaa can be any naturally occurring amino acid
  misc_feature (56)..(57): Xaa can be any naturally occurring amino acid
  misc_feature (71)..(72): Xaa can be any naturally occurring amino acid
  misc_feature (74)..(74): Xaa can be any naturally occurring amino acid
MAXSMLSSAAVVXSPAQATMVAXFXGLKSSAAXPVTRXANNDXTSITSNGGRVSCXXVWPPVGKKKFETLXXLXD

SEQ ID NO: 11306 - protein, 156 aa, Haemophilus influenzae
NRTNTPVLVDGKDVMPEINAVLAKMKDFCQRIISGEWKGYTGKAITDVVNIGIGGSDLGPYMVTEALRPYKNHLNMHFVSNVDGTHIAETLKKVNPETTLFLVASKTFTTQETMTNAQSARDWLLKAAKDESAVAKHFAALSTNAKDVEKFGIDTN

SEQ ID NO: 11307 - protein, 425 aa, Staphylococcus epidermidis RP62A
MSENIIMPKLGMTMKEGTVEEWFKSEGDTVKQGESIVTISSEKLTNDVEAPASGTLLEIKVQAGEDAEVKAVLGIIGEEGEAIDKDEDDLASEKVKEDNEHEKETQEVKDTSQQSSDNKDNSPKSAARERIFISPLARNMAEDKGLDINKIKGTGGNHRITKLDIQRVEANGYDYASDTTSNEDTSHVPTQTVDTSAIGEGLNPMRQRIAQNMRQSLNSTAQLTLHRKVDADRLLDFKDRLATELKQADQDVKLTVTTLLAKAVVLALKEYGAMNARYEQGELTEYEDVHLGIATSLDEGLMVPVINHADTKSIGTLAHEIKSSAEAVREGNTGAVQLEGATFTITNMGASGIEYFTPILNLGETGILGVGALTKEVVLEADNIKQVSKIPLSLTFDHQILDGAGAADFLKVLAKYIENPYLLML

SEQ ID NO: 11308 - protein, 346 aa, Staphylococcus epidermidis RP62A
MSEERKLTFMGAINEAIDQSMEKDEDVILIGTDVSGGAKVDHIKDDDTFGGVFGVTKGLAKKYSRKRVIDTPIAEHITLSTAVGAAATGLRPIAELMFNDFIGFGLDPILNQGAKMRYMFGGKAKIPLVVRTVHGAGASAAAQHSQSLYNMFAAIPGVKVVVPSNPYDAKGLLMSAIQEDNLVVFSEDKTLLGQKGNVPEEPYTIEIGKANVTREGDDLTIVAIGKMVAVAEETAEKLAEDQVSVEVIDLRSVSPWDQETVLDSVKKTGRLIVIDESNPQCNIAGDVASVIGDVGFDYLDGPIKKVTAPDTPVPFAANLEAAYMPNADKVLDIASELIDDLKKANA

SEQ ID NO: 11309 - protein, 384 aa, Senecio vulgaris
MHNNSSNSRELIKKWPRSNKEAIDSARSNVFKESESLEGTCAKIGGYDFNNGIDHSKLLKSMVSTGFQASNLGDAMIITNQMLDWRLSHDEVPENCSEEERKNRESVKCKIFLGFTSNLISSGVRETICYLTQHRMVDVLVTTTGGIEEDFIKCLASTYKGEFSLPGADLRSKGLNRIGNLIVPNDNYIKFEDWIIPIFDQMLIEQKTQNVLWTPSKMIARLGKEINNETSYLYWAYKNNIPVFCPSITDGSVGDMLYFHSVSNPGAGLVVDIVQDVIAMDNEAVHASPQKTGIIILGGGLPKHHICNANMMRNGADFAVFINTAQEYDGSDSGARPDEAVSWGKISSTGKAVEVHCDATIAFPLLVAETFAVKKEKASKVNGF

SEQ ID NO: 11310 - protein, 194 aa, Triticum aestivum
  misc_feature (170)..(170): Xaa can be any naturally occurring amino acid
MAATVMASSATSVAPFQGLKSTAGLPVSRRSNGASLGSVSNGGRIRCMQVWPIEGIKKFETLSYLPPLSTEALLKQVDYLIRSKWVPCLEFSKVGFIFREHNASPGYYDGRYWTMWKLPMFGCTDATQVINEVEEVKKEYPDAYVRIIGFDNMRQVHCVSFIAFKPPGCXESGKAYTAHSRQAIYKVPLQLSQL

SEQ ID NO: 11311 - protein, 267 aa, Zea mays
MTSAQKLVVARQLARLGVDIIEAGFPASSPDDLDAVRSIAIEVGNPAPGPAGEEDAVHVPVICGLSRCNRKDIDAAWEAVRHARRPRIHTFIATSDIHMQHKLRKTPDQVVAIAREMVAYARSLGCTDVEFSPEDAGRSNREFLYHILGEVIKAGATTLNIPDTVGYNLPYEFGKLIADIKANTPGIEKAIISTHCQNDLGLATANTLAVVMAIKCRRELLDGLYTGIDSRHITLTSKMVQEHSGLHVQPHKAIVGANVFAHESGIH

SEQ ID NO: 11312 - protein, 151 aa, Sulfolobus solfataricus P2
MMLIYYVGMAVLTFVGMEFVARLMHKYVMHGLLWFIHEDHHKEKQAELEKNDLFGLVFASVSVYLFFLGIQGSYVALSIAIGMSSYGIAYFFIHDMVIHDRHLHLRSWGLKHRPFKDLILVHDIHHKEGKGNWGFLFVIKGLDKVPILKDE

SEQ ID NO: 11313 - protein, 231 aa, Zea mays
MPKSKRNRPVTLSKTKKKPGLERKGKVVAEIKDAVDKYTSAYVFTYDNMRNQKLKDLREQLKSSSRIFLAGKKVMQIALGRSAADEAKTGLHKLSKFLQGNSGLLFTNLPRDDVERMFREFEEHDFARTGSTAADTVELKEGPLEQFTHEMEPFLRKQGLPVRLNKGVVELVADHVVCEEGKPLSPEAAQTLRLLGIQMATFRLYLVCRWSSDEFEAYKEGLMHLGADDSS

SEQ ID NO: 11314 - protein, 479 aa, Vibrio fischeri ES114
MDYKHNLQCVWFRHDLRTIDNPALQAAVDNQQPTFALFIYSESQWKKHNKAPIQIDLIKRRLVELKNELEQLNIPLIVISSPLFSEIPAKITALFNELSVNALFANKEYEHDERLRDTQVYESLLNTNCYFFDAKCILPVGTIINRTQQPYKVFTPFKKAWKASFYQQQPHITKTGKSVLCDPKLIKKLSLNNDDSFVFSSSNESGSWPVSTKAIIDILRQFCRQKVSQYHNNRDYPEIQGTSQLSPYLAIGAISAKQCALRLHLEANYELNQGEDIWLDELIWREFYTHLLHFYPNLSKNQAFLSYDKYIEWDNNLDHFERWCKGETGFPIVDAAMKQLNTTGWMHNRLRMITASFLVKDLHIDWRWGEQYFMSKLIDGDFASNNGGWQWCASVGCDSSPYFRIFNPITQGKKFDADCTFIKHWLPELKALSNKEIHHPNPAPLLKSDNYPDQIVDHAQQRIKVIEVYKQAKQLDIAS

SEQ ID NO: 11315 - protein, 206 aa, Arabidopsis thaliana
MAVGEVMRMEIPAGGDLTVTTPELHVLAVDDSIVDRKVIERLLRISSCKVTTVESGTRALQYLGLDGGKGASNLKDLKVNLIVTDYSMPGLSGYDLLKKIKESSAFREVPVVIMSSENILPRIQECLKEGAEEFLLKPVKLADVKRIKQLIMRNEAEECKILSHSNKRKLQEDSDTSSSSHDDTSIKDSSCSKRMKSESENLFSLL

SEQ ID NO: 11316 - protein, 442 aa, Agrobacterium tumefaciens str. C58
MLSHGARCCRKTDDLDKGGALAMRRVVITGTGMVSPLGCGTEVTWERLLAGQNGARLVTEFEVEDLPAKIACRIPVGDGSNGTFNADDWMEPKEQRKVDPFILYGMAAADMALADANWHPETDDDQIATGVLIGSGIGGLEGIVEAGYTLRDKGPRRISPFFIPGRLINLVSGQVSIRHKLRGPNHSVVTACSTGAHAIGDAARLIALGDAEVMVAGGAESPVCRISLAGFAACKALSTQHNDDPQKASRPYDRDRDGFVMGEGAGIVVLEELEHAKARGAKIYAEVVGYGLSGDAFHITAPSEDGDGAYRCMSMALKRAGLTPDDIDYINAHGTSTMADTIELGAVERLVGESAPKISMSSTKSATGHLLGAAGAIEAIFATLAIRDNIVPPTLNLDNPDVETKIDLVPHKARKRQVNVALSNSFGFGGTNASLVLRRYEA

SEQ ID NO: 11317 - protein, 255 aa, Triticum aestivum
  misc_feature (246)..(246): Xaa can be any naturally occurring amino acid
MGANGALEGEEERPRADGEEEEEGGATVFRGTNYSLPRTIAALALWLGGIHFNVILILASLFLFPLRLAALVVALQLVFMFTPLNDEDKLGRKIGRFICKYAMGYFPISLHVEDYNAFDSSRAYVFGYEPHSVLPIGVAALANHVGFMPLPKLKVLASSAVFHTPFLRQIWTWIGLIAATRKNFYSYLAAGYSCVVVPGGIQEILHMDHDSEVAFLNSRKGVVKIAMQAGCPLSLFSASGQEQTYXWWEARRQLL

SEQ ID NO: 11318 - protein, 206 aa, Pennisetum ciliare
MASRRRTLLKVIILGDSGVGKTSLMNQYVNKKFSNQYKATIGADFLTKEVQFEDRLFTLQIWDTAGQERFQSLGVAFYRGADCCVLVYDVNSMKSFDNLNNWREEFLIQASPSDPDNFPFVLLGNKVDVDGGNSRVVSEKKAKAWCASKGNIPYFETSAKEGTNVEDAFQCIVKNALKNEPEEELYVPDTVDVVGGNRAQRSSGCC

SEQ ID NO: 11319 - protein, 536 aa, Streptococcus thermophilus LMG 18311
MFFLLLLFLLLERGLSMRKVEFLDTSLRDGEQTPGVNFSIKEKVAIAKQLEKWGISSIEAGFPAASPDSFEAVKQISAAMTTTAVSGLARSVKSDIDACYEAIKDAKFPQCHVFIATSPIHREFKLKKSKEEILEIIKEHVTYARERFDVVEFSPEDATRTELDYLLEVVQTAVDAGATYINIPDTVGFTTPEEFGHIFKYLIENVKSDREIIFSPHCHNDLGMAVANTLAAIKNGAGRVEGTVNGIGERAGNAAIEEVAVALNIREDYYQATSDIVLNETVNTAELVSRYSGIAIPKNKAVVGGNAFSHESGIHQDGFLKNPLTYEIITPELVGVKKSSLPLGKLSGRHAFIEKLKELELDFVEKDIKPLFAKFKRLADKKHDITDADIRALVAGTNVENPEGFHFQDLRLTTNPDETITAAVSLVNEDGEAVEFLANGQGSVEAIFNAIDKFFNQTVRLTSYNIDAITDGIDAQARVLVSVENVDTDTIFNASGLDFDVLKASAIAYINANTLVQKENAGEMARKVSYRDLPQT

SEQ ID NO: 11320 - protein, 504 aa, Corynebacterium glutamicum ATCC 13032
MSEPQTISHWIDGAISPSTSGKTAPVYNPATGQVTANVALASQEEIDATIASATKAAKTWGNLSIAKRQAVLFNFRELLNARKGELAEIITAEHGKVLSDAMGEILRGQEVVELATGFPHLLKGAFNENVSTGIDVYSLKQPLGVVGIISPFNFPAMVPMWFFPIAIAAGNAVILKPSEKDPSAALWMAQIWKEAGLPDGVFNVLQGDKLAVDGLLNSPDVSAISFVGSTPIAKYIYETSAKNGKRVQALGGAKNHMLVLPDADLDLVADQAINAGYGAAGERCMAVSVVLAIESVADELIEKIKERIDTLRIGNGAGDEQGEPHLGPLITDVHRDKVASYVDIAEADGAKIIVDGRNCAVDGHEEGFFFGPTLIDDIPLTSRAYTEEIFGPVLSVVRVASFDEAIELINSGEFGNGTAIFTNDGGAARRFQHEIEVGMIGINVPIPVPVAYHSFGGWKNSLFGDAKAYGTQGFDFFTREKAITSRWLDPATHGGINLGFPQND

SEQ ID NO: 11321 - protein, 470 aa, Pseudomonas fluorescens Pf-5
MPSANALSSSPPASAHNASLDGGFTHSAQGTSLRRILGLPALVFFGLVYMVPLTVFTTYGVVTQLTGGRTAAAYVITLLAMIFTALSYSVMVKKYPIAGSAYSYASLSFGPGIGFLAGWSLLLDYLFLPMINYLVIGLFLNLAFPAVPAWVFVVATISLVTLLNIRGIGSVSSMSNLIVCAQMVFVVVFMALVVRQLAGAESLDLSAPWVGDGSQDGLLPLMAGAAVLCLSFLGFDAVSTLAEETRDPRRDIPRAIVITTLGAGLLFILLAMTSQLAFPGSSFKDADSAASEVMLHAGGRFLEMFFTATYVAGAAGSALASQASVSRILFSMGRDGILPRRVFGTLSERYKTPVVAIVLVSLVSLLAVVIDLTTLASMISFGALVAFSVVNLAVIKSHLGQGQPRSTARLLQYGLLPLIGFALIAWLWTSLSALTLGIGLAWFALGLLYLGIHTRGFRQPAPTVQFSEQA

SEQ ID NO: 11322 - protein, 139 aa, Prochlorococcus marinus str. MIT 9312
MSIRIYIGNLPQGFNQKEFDNLLKSVSDSIRFKAVLDKETKECRGFGFATASNEENADLIIQKLNGFEFNGSKLRVELSEKKDSLSKKRNSGNFNKNKKKKDFKKIVHSDAPNLEAPDPRWAGELSKLKDLLANQKTPA

SEQ ID NO: 11323 - protein, 382 aa, Burkholderia vietnamiensis G4
MMRDAANFEPVDSRVTHPAFWNALPERWTSDVEETLVCCHVRQETHDVKSFFFRSPQGRTFSFEPGQFITLELDIDGETINRCYTISSSPARPHTISITVKRVPGGKVSNWLHDNLQPGAPVRVLGPAGEFTCARHPARKYLFLSAGSGITPLMSMSRAHHDLAEDRDIMFVHSARTPDDIIFARELDLIASNHTNFRTSFVVERVGARTNWPGVTGFLTLPLLKLIAPDFMEREIFTCGPAPYMKAVRDLLDEAGFDRKQYHEESFSFETLAQTASDDVLAELVPAADGGDVATKQYTVSFAKSNREISCGSEQHVLDAARQSGVRLPASCTQGMCGTCKVKLVSGQVEMKHNGGIRQREIDQGMVLLCCSKPLSDLVIDK

SEQ ID NO: 11324 - protein, 393 aa, Polaromonas sp. JS666
MLTAQQRAIVKSTVPLLESGGEALTTHFYQILLTEHPEVRPFFNQAHQANGDQPRALANGVLMYARHIDKLEQLGGLVAQIINKHVSLQIEPAHYPIVGACLLRAIREVLGAEIATGEVLAAWGAAYGQLADILIGAEEKIYAETAAAPGGWRGARRFIVARKVAESAEITSFYLQPEDGAALAAFQPGQYLGLKLVINGEEIRRNYSLSAAPNGRDYRISVKREPGGVASCYLHDELQEGGGLDVFPPAGEFVLADGDRPVVLISGGVGITPTLAMLDAALERQRPVHFIHFARNKSVHAFRDALATRQARHAQLRHFYVYDEHAGEADAPHATGLVDSGQLAQWLPASRDVDAYFLGPKPFMRRVRQQLRELGVPESQTRYEFFGPASALD

SEQ ID NO: 11325 - protein, 253 aa, Ralstonia eutropha JMP134
MMPAAWLLRCRVMHERLRPARHRFVYPTFCLRVDIDALPNLRRWWFGVDHPRLVSLYTRDYGPRDGTGLGRWIRPRLADLGLPDDGPIWLQTSPRIFGYAFNPVSFWYCYDKAGALRALVADVNNTFGDHHAYLVTAPDLGAIQASTVLATRKCLHVSPFNTVQGHYAFQVRETDDVAHVGIDYYDDSGGLVLRTSIGGRKAPLTLGGMMTILASQPWAAIAVIVRIHWQALRLWRMSVPFYGKQPPSVPPVG

SEQ ID NO: 11326 - protein, 290 aa, Trichodesmium erythraeum IMS101
MMNLTKYSKVIVQGVTEKISTQIALTMRSCGTNVVAGISPGEGGEEWLGIPVFSLVEQAVAKMGVIDTSVIVMPAYQVLDAALEAITSGLKQIVIITEGVPPLDMVKLLRKAETTETLIVGPNCAGIIIPEKLLLGTHPTQFYTPGPIGIISRSNTLTYEVAWELTRSRLGQSICVSLGCDPIVGSSFLQWLQILDEDDQTELIVLVGEVGGVAEELAASYISETIDKPVIAYIAGTCAPINQNYSPVNCLISNKVVREIESERTGAFEGANIPVAKRPSDIPSLVRNLL

SEQ ID NO: 11327 - protein, 252 aa, Aspergillus nidulans FGSC A4
MSPPAIIAPSILSADFATLGSECSTKISEGADWLHVDIMDGHFVPNITFGAPVVTKIRSHVHRPSQPQGKGTFDCHMMIAEPQKWVKDFKDAGCDLYCFHYEAAVSSVAAKEPADKETTRKTSPKELIRFIHEEGMQAGIAIKPDTPVDVLWDILAADDEKERPDMVLVMTVHPGFGGQKFMASELPKVKALREKYPDLNIEVDGGLGLGTIDQAAEAGANVIVAGSAVFGAENPGDVIQKLRDAVNKHRKA

SEQ ID NO: 11328 - protein, 253 aa, Desulfovibrio desulfuricans G20
MYKLVLVRHGQSTWNLENRFTGWTDVDLTPLGETEAREGARLIAAAGLTFDECHTSVLKRAIRTLNIIQEELDLLWLPVHRHWRLNERHYGALQGLNKKEMSEKYGEEQVFIWRRSFDTPPPALTADDPRHPAHDRRYASLTARQMPLCESLKDTVARVLPYWHETLAPAIQAGRRLLVAAHGNSLRALVMHLDGMSPDEVTGLNIPTGLPLVYELDSNLTPLRRAYLGDAEAAEAKARAVAEQAKAGTTERP

SEQ ID NO: 11329 - protein, 405 aa, Leptospira interrogans serovar Copenhageni str. Fiocruz L1-130
MTNIIVQKYGGTSVGTPERIQNVAKRIKSYHDKGQQVAVIVSAMGHTTDELVDLAAKISSNPPKREMDMLLSTGEQISTALLAMALWEIGVPATSFTGSQIKLLTDGNFSNAKIKMIDRSRIDSALNEGKVVIIAGFQGIDAEENITTLGRGGSDTSAVAVAAILGAKECEIYTDVDGVYTADPRVVPSAKKHKQITYEEMLELASLGAGVLHSRSVELGMNYDVVIHVRSSFNDNIGTLVVSEDKIMEKLKVSGVTAKNDQARITIAGVPDKPGLAAGLFGELSSKHILVDMIVQSSPHNGINTISFTIPKKDVHEAKPILEGFSKSHNAKEPEINENIAIVSAVGVGMKSHVGVAAGMFKALADNGINIEMISTSEIKISCVIAESQAKIAVNKIHDVFGLSS

SEQ ID NO: 11330 - protein, 108 aa, Burkholderia mallei ATCC 23344
MSEQIKHISDASFEQDVVKSDKPVLLDFWAEWCGPCKMIAPILDEVAKDYGDKLQIAKINVDENQATPAKFGVRGIPTLILFKNGAVAAQKVGALSKSQLTAFLDSHL

SEQ ID NO: 11331 - protein, 167 aa, Erwinia amylovora
RHFADTPEEKNLPILLALIGIWYNNFFGAETEAILPYDQYMHRFAAYFQQGNMESNGKYIDRAGNAVSYQTGPIIWGEPGTNGQHAFYQLIHQGTKLVPCDFIAPAVSHNKLSDHHSKLLSNFFAQTEALAFGKSREAVEQEFADAGKDAKSVEHIVPYKVFEGNRP

SEQ ID NO: 11332 - protein, 410 aa, Pseudomonas syringae pv. phaseolicola 1448A
MALIVQKFGGTSVGSVERIEQVADKVKKFREAGDDLVVVLSAMSGETNRLIELARQISDQPVPRELDVIVSTGEQVTIALLAMALMKRGVPAVSYTGNQVRILTDSAHNKARILQIDDQKIRSDLKAGRVVVVAGFQGVDEHGNITTLGRGGSDTTGVALAAALKADECQIYTDVDGVYTTDPRVVSQAQRLDKITFEEMLEMASLGSKVLQIRAVEFAGKYNVPLRVLHSFKEGPGTLITIDEEESMEQPIISGIAFNRDEAKLTIRGVPDTPGVAFKILGPISAANIEVDMIVQNVSHDNTTDFTFTIHRNDYQAALQVLESTAREISAREVFGDTKIAKVSIVGVGMRSHAGVASRMFEALAKESINIQMISTSEIKVSVVIEEKYLELAVRALHTAFELDAPRQGE

SEQ ID NO: 11333 - protein, 167 aa, Pectobacterium carotovorum
QHFATTPAEKNLPVLLALIGIWYNNFFVAETEGILPYDQYMHRFAAYFQQGNMESNGKYVGRNGNPVDYQTGPIIWGEPGANGQHAFYQLIHQGTKLVPCDFIAPAMTHNALSDHHSKLLSNFFAQTEALAFGKSREVVEAEFAAAGKSAKEVEHVAPFKVFEGNRP

SEQ ID NO: 11334 - protein, 106 aa, Cytophaga hutchinsonii
MGKAVEITDANFEEIINTDQPVLVDFWAEWCGPCKMIGPVVEELAGDYAGKAVIAKLNVDENPVVSAKFGIRSIPTLLVLKKGEIVDKQVGVVPKSVLAQKIDAQL

SEQ ID NO: 11335 - protein, 435 aa, Candidatus Protochlamydia amoebophila UWE25
MATNKMGLMSAILLGINMILGSGIFLLPGKVSELTGASSLYVYVFVSLLILSIAWCFAQCAALFDRNGGAYLYAKEAFGDFIGFEIGFMRWIAGAMAWASLIVGFVTALSSIWPNALTEPLRGFLILIFLALLILFNMGGTEKLKNINNVVTIAKVLPLLFFVLIGFFYTKGNFQAIDVSLSHLDSISFGNAAIVIFYAFGGFETLVIAAGEIKNPHRNLPIAVMAVISFCSFLYFLIQIIAMEILGPHLAESSIPLADATEQMIGSAGRWIVTLGMIISIGGVNLTASFITPRSGAALAEDGLVPRWIAKNNKAGVPVVAIFLTASLTTIAALSGSFTQLAVISVVSRFVQYGATCLAVFVLYYRNRATLKMLKKISLVIIPSLSLIGLIWMLFQASSSQLYWGLGALLPGIPIYFFQKWKNNLTLATVSEMGD

SEQ ID NO: 11336 - protein, 250 aa, Vibrio fischeri ES114
MSVHQADLIHSCIYHGDVRHRRFQTREHSFSYEMFFIALDLDELEQTESVGWFRKNRFSPLSFRRSDYLGKAEQPLKQAVWDKVEELGGLSLQTRVLFVGQVRCFGVYFSPINLYYCYDKNDQLTYLLAEVSNTPWNQTHYYLIEMDSDKIIDKAFHVSPFLNLEMKYHWFVKAPNKHLSLHLENRGLDKNQEKIFDATISMTRKPFNSKNIKQQVISIPMMTVKIVYGIYWQALKLCLKRIPFVPHPEK

SEQ ID NO: 11337 - protein, 347 aa, Wolinella succinogenes
MPLNRVREAIEAIKKGEMIIMMDDEDRENEGDLVYAAAFSTPEKVNFMVSEAKGLVCVCVTSTCSDRLGLAPMVRENNSQHETAFTVSIDARECSTGISAFERDLTIRKMVDGTSKPEDFVRPGHIFPLIAKEGGVLVRTGHTEGSVDICKLAGVAPVAVICEIIKKDGHMARRDDLMEFAKEHHLKIVYISDLIEYRMQNEMLILIKERSEVEFLGKRAERYVFQDHHRREHTLYAFGKIIDNSLVKYHTVGKDLSLLESEKKYSTLMQAIKKIQEENGLIIFMDTPQNAAPQIKDFGIGAQMLRFLGIKNFRLLTSEENREYVGLSGFGLNVTEKIVLQGGPIQL

SEQ ID NO: 11338 - protein, 253 aa, Bifidobacterium adolescentis
MALIVQKFGGSSVADPESIKRVARRIIETKNAGNDVAVVVSAMGDTTDDLIDQALSIDSNPPAREMDMLMTAGERISMSLLAMAIHAAGSHAYSFTGSQAGFMTDAQFGTAHIKAVKPDRVRRALDKGSVAIVAGFQGVNEGGDATTLGRGGSDTSAVALAVALDADICEIYTDVDGVFTADPRIVPTARRIPVIDYESMLEMSSCGSKVLALRCVEYAQRFGMPLHVRSSFSHRRGTLIVPEGVDPRTLPNI

SEQ ID NO: 11339 - protein, 366 aa, Clostridium perfringens str. 13
MMQPIKKIAILTGGGDCPGLNAVIRAVTRTAILKYGYEVIGYKFGYRGLYNNDFVKLDLDSVSGILHRGGTILHSSNKDNLFDYQVEDENGKIVKKDVSDVGVENLKKEGVDALVVIGGDGTLTSARDFSRKGVNVIGVPKTIDNDLLATDVTFGFNTATEIATEALDRLHTTAESHHRIMLLEVMGRNAGWIALESGIAGSADVILLPEIPYDINKIVEKVKEREEAGKQFTIIVVAEGAKPKDGEVVVSKIVDDSPDPIRLGGIANKLAIDLEGLIKNHEIRSTVLGHIQRGGNTSTYDRILSTKYGVKAVELINSNLFGNMVALKGNKVSYESLENVIGHTKNVDPEGELVNTAKSIGISFAD

SEQ ID NO: 11340 - protein, 436 aa, Triticum aestivum
MMQPPPPSQPQPGMGAPMPPQGAGGQPPHWGAIPPPMPHYAQPPPQQQPPPQAMWGQPPPQAAPYGQVPAPQQYYAAPQAPAAPAASDEVRTLWIGDLQYWMDENYIYSCFANTGEFQSVKLIRDKQTGQLQGYGFVEFASHAAAERVLQTFNGQMMPNVELAYRLNWASAGEKRDDTPDYTIFVGDLAADVTDYMLQETFRVHYPSVKGAKVVTDKMTMRSKGYGFVKFGDPTEQARAMTEMNGMPCSSRPMRIGPAANRKTTGVQERVPIPNTNTQGAQSDNDPNNTTIFVGGLDPNVTEDALKQVFAPYGEVVHVKIPVGKRCGFVQYANRPSAEQALQLLQGTLVGGQNVRLSWGRSPSNKQTQPQEATQWGAGAAAGAAGGYYAGYGQGYEAYGQGYAQPQDPNMYGYGAYAGYPNYQQPAAAPQPPPPQQ

SEQ ID NO: 11341 - protein, 526 aa, Medicago truncatula
MASSESNSQMKVVHGDAGYILEDVPHLSDYVPNLPTYPNPLRSNPAYSVVKQYFVHMDDTVPQKVVVHKDGPRGVHFRRAGPRQKVYFRSDDVIACIVTCGGLCPGLNTVIREIVCGLSYMYGVDKVLGIDFVKCARKGGYRGFYSKNTITLTPKVVNDIHKRGGTILGTSRGGHDTGKIVDSIQDRGINQVYIIGGDGTQRGAAVIYEEVRRRGLKVAIAGIPKTIDNDIPVIDRSFGFDTAVEEAQRAINAAHVEAESVENGIGVVKLMGRYSGFIAMHATLASRDVDCCLIPESPFYLEGKGGLYEFITKRLKESGHMVIVIAEGAGQDLLTESMQDMDQKDASGNKLLQDVGLWISHKIKDHFAKENKMAIVLKYIDPTYMIRAIPSNASDSVYCTLLAQSAVHGAMAGYTGFTAGLVNGRHTYIPFNRITEKMNNVVITDRMWARMLSSTNQPSFLKPKDVHQIMKAGQSPTQLLEGSNCNGGGEEAKKVEQIPTQLMEGDKSKDNQKSRNLADSDSCIKK

SEQ ID NO: 11342 - protein, 629 aa, Bifidobacterium adolescentis
MFDLAAVAAASNGGNNDPLLPPARYIGAPQKPSKMPYNKYVAYDKQVPFDFPERTWPGKRLQRAPRWCSVDLRDGNQALVNPMDSERKLRFWNLLVSMGFKEIEVGFPSASETDYDFIRMLIERELIPDDVTIVVLTQAREHLIRKTYECLKGAKRAIVHFYNSVSVLQREVVFRKDKAGIKKLATDAAALCKELEGEAKGIDLYYEYSPESFTGTEPEYAVEVCNAVIDVIKPTPEHPMIINLPATVEMTTPNVFADEVEYVSNHLVPRDAVVLSLHPHNDEGMGVAATELAVLAGADRVEGCLLGNGERTGNVDLVTLGLNFLTQGIDPQIDYSNVPEIRKTVEYCNQIKISERHPYAGNFVFTAFSGSHQDAIKKGLEARQVAADRAGADLDSFVWLVPYLPIDPKDIGRSYEAIIRVNSQSGKGGMAYLLKTNHNLDLPKRLQVEFEKVVQNYADETKKEVKDEDIWRLFKDEYLPVEESGATAAGVVVGDSKDETLEQWGRLKLLKVSVSSGEDGSDTVLKARILDRGVNVGVDEPVEREVSGIGNGPIAAFLNAVSNFGIEASVMDYVEHTMSVGTDAMAASYVECQIGEEDNTSIVWGVGIDTSIVTSSLKAIISAINRSER

SEQ ID NO: 11343 - protein, 521 aa, Arthrobacter ureafaciens
MTPAISRRAVLQGAGAGALALIFGGAVPPAARASAPGSLRAVYHMTPPSGWLCDPQRPVTTHGAYQLYYLHSDQNNGPGGWDHASTTDGVAFTHHGTVMPLRPDFPVWSGSAVVGTANTAGFGAGAVVALATQPTDGVRKYQEQYLYWSTDGGFTFTALPDPVIVNTDGRAATTPAEIENAEWFRDPKIHWDTARGEWVCVIGRLRYAAFYTSPNLRDWTLRRNFDYPNHALGGIECPDLFEITADDGTRHWVLAASMDAYGIGLPMTYAYWTGTWDGEQFHADDLTPQWLDWGWDWYAAVTWPSIDAPETKRLAIAWMNNWKYAARDVPTDASDGYNGQNSIVRELRLARQPGGWYTLLSTPVAALTNYVTATTTLPDRTVDGSAVLPWNGRAYEIELDIAWDTATNVGISVGRSPDGTRHTNIGKYGADLYVDRGPSDLAGYSLAPYSRAAAPIDPGARSVHLRILVDTQSVEVFVNAGHTVLSQQVHFAEGDTGISLYTDGGPAHFTGIVVREIGQAI

SEQ ID NO: 11344 - protein, 248 aa, Burkholderia sp. 383
MYKLVLIRHGESTWNKENRFTGWVDVDLTEQGRNEAYQAGELLKEAGYTFDIAYTSVLKRAIRTLWHVQDKMDLMYLPVVHSWRLNERHYGALSGLNKAETAAKFGDDQVLVWRRSYDTPPPALEATDERAPFNDPRYAKVPREQLPLTECLKDTVARVLPLWNESIAPAVRAGKQVLIAAHGNSLRALIKYLDGISDSDIVGLNIPNGVPLVYELDENLKPIKHYYLGDQDAIAQAQAAVAKQGKAG

SEQ ID NO: 11345 - protein, 608 aa, Brassica rapa
MCGILAVLGCVDNSQATRSRIIKLSRRLRHRGPDWSGLHCYEDCYLAHERLAIIDPISGDQPLYSEDKTVVVTVNGEIYNHKALRESESLKSHKYHTGSDCEVLAHLYEEHGEEFINMLDGMFAFVLLDTKDKSYIAVRDAIGVIPLYIGWGLDGSVWFASEMKALSDDCEQFMAFPPGHIYSSKQGGLRRWYNPPWFSELVPSTPYDPLVLRDTFEKAVIKRLMTDVPFGVLLSGGLDSSLVASVAIRHLEKSDARQWGSKLHTFCIGLKGSPDLKAGKEVADYLGTRHHELHFTVQEGIDAIEEVIYHVETYDVTTIRASTPMFLMSRKIKSLGVKMVLSGEGSDEIFGGYLYFHKAPNKKELHEETCRKATPLEFLDHDVSCAYLLCLNLVCLLLMQIKALYQYDCLRANKSTSAWGVEARVPFLDKAFLDVAMGIDPEWKMIRPDLGRIEKWVLRNAFDDEKNPYLPKHILYRQKEQFSDGVGYSWIDGLKDHANKHVSDAMLTNANFVFPENTPLTKEAYYYRAIFEKFFPKSAARATVPGGPSVACSTAKAVEWDAAWKGNLDPSGRAALGVHVAAYEGDKAEAPRPEKVQKLAEKTAEAIV

SEQ ID NO: 11346 - protein, 385 aa, Brassica oleracea var. capitata
MVAHKETVCVTGASGFIGSWLVMRLLERGYFVRATVRDPGNLKKVQHLLDLPNAKTQLTLWKADLSDEGSYDDAINGCDGVFHIATPMDFESKDPENEVIKPTVNGVLGITKACDKAKTVRRIVFTSSAGTVNVEEHQKNVYDENDWSDLDFIMSKKMTGWMYFMSKTLAEKAAWDYAKEKGIDFISIIPTLVIGPFITTSMPPSLITALSPITRNEAHYSIIRQGQYVHLDDLCHAHIFLYEQAAAKGRYICSSHDATILTISEFLRQKYPEYNVPSTFEGVDENLKSIMFSSKKLIDMGFNFKYSLENMLVESIETCRPKGFLPVTLPEHLKSEDRVPGSDDNKEIKNGSAGLTDGMVACKKTEPGMVGEKADSHMSAQQICA

SEQ ID NO: 11347 - protein, 256 aa, Ralstonia eutropha JMP134
MPINLHYDDYLAVITIDRRESLNALSLSLLQELGLAIDEVARSPARALALVGAGNKAFCAGADVEGLLDRDFWAEREGIRLGQDTFAKLDRLRVPSIAVLHGYALGGGLELAMSCTFRVATTSGKFGLPEVRLGLLPGYGGTQRLPRLVGESRALELIMTGRMIDAREAREIGLVNDVVEDGDAVAIAKVFADRFVRHSQCASLLARTAVQRALDLPLAEGLRMEADLIMQAFQTDDAHEGIRAFLGKRPAGFTDR

SEQ ID NO: 11348 - protein, 312 aa, Polaromonas sp. JS666
MTDILTITMNPALDVSTSTDKVMDTHKLRCAAAQLHPGGGGINVARVVQRLGSDCIALFLAGGINGQLLRQLLDREQVRSHWIPIAGETRESFSVHETSSGKDFRFVLPGPTLTAPEWQACLDFVSKLGVPAAYVVASGGLPPGVPGDFYAQLTRLTRSRGSRVVVDTWGPALAAALAEGVYLIKPSLQELRELTGLPLADEPQWREAAKRIILAGHAQVVALSLGEDGALLVTADRTLRARAVPVKVASTIGAGDSFVGGLVWALNRGDDLEQAFRYGMASGAAALLTAGTALGQAADVERLSKDVIVEPA

SEQ ID NO: 11349 - protein, 697 aa, Burkholderia vietnamiensis G4
MRDAESRNAGDPSRAADRRDAALDRRGRPARHDARVGRAAREDLDGHRQSLLRRQGRPARSHDAARAARSVGGHHAPPRRRAQGSAREAARDRRRQLRRHAGQRAGDEDLARVLVAEHARAEAQAPAARQHAAPALEPVRRIREAPAAREGARSGQRPRRADRRPVAARRARRRPDRYPGGLEARPRLHRPAARVRVTRRAVANLEILMSVYGLQRLYIGGAYVDATSGKTFDTFDPATGELLAQVQQASAADVDRAVASAQQGQREWAALTAMQRSRILRRAVDLLRERNDELAAIETRDTGKPIGETLAVDIVTGADVIEYYAGLATAIEGLQVPLRAESFVYTRREPLGVCAGIGAWNYPIQIACWKTAPALAAGNAMVFKPSEVTPLTALKLAEIYTEAGVPAGVFNVVQGDGSVGALLTGHPDIAKVSFTGGVETGKKVMSLAGASSLKEVTMELGGKSPLIVFDDADLDRAADIAVIANFFSSGQVCTNGTRVFVQRSIKDAFTAKVLERVKRIRVGKPTDADTNFGPLVSAAQLDKVLGFIASGKAEGAKLLAGGTRLTDGHFADGQYVAPTVFGDCRDDMKIVREEIFGPVMSILDFESEDEVIARANDTHYGLAAGVVTENLSRAHRTIHRLEAGICWINTWGESPAEMPVGGYKQSGVGRENGITTLEHYTRIKSVQVELGRYNPVF

SEQ ID NO: 11350 - protein, 406 aa, Zea mays
  misc_feature (146)..(146): Xaa can be any naturally occurring amino acid
MAAAAAETQMGDGAPPPGALYSFGTPWPELNQGLTYTDTFRCADADAATTLIEFYSTNHKSSAPLPGWIKRIRNGQITVDGEVVTDPDMTLGDGSKLVYHRFPWQEPFAPYLLEVLYEDDDMVALNKPSGLQVLPKGLFQQRTVLXQLQLKDWKMASSCRFKRKDVQSHPVPVHRLGRGTSGLLLCAKTKVAKVRLASYFAEGAINAAKKRDKSEFSEERKISKFYRALVTGILDDDEVVVTQPIGLVHYPGVAEGLYAACSSGKPAMSKVCVLERLAHQNHTLVQVEIHSGRPHQIRIHLAYIGHPLVDDPLYGIGGHPNFVEPESTGTDSSFASDGGYERPLQPVPGDCGYHLHAHWLVLCHPTTNKVIKHIYNLGQMVKITASLPQILQTREERRAAAEQTGG

SEQ ID NO: 11351 - protein, 250 aa, Oryza sativa
MDLATTPARRPMEAGMARRLWHVVLAVCHMLRRGLCRKRLMVDLHVLLGRGKLAGKALRGLLAHHAAAGHGHHLAASSSSSAALASFYGRRPREVEFSCTTTPSSYPHYGLFPFKSRGGGGGRRGGGGGGEYGGLDAAAVARAFEMMSAEVEGTPSSSAAAVQGGGGGGWATATPSPMVAWILGRSPAGVRPLRVTDSPFPAVPENGGGGGGEQRVDDAEFEDFINKFYEQLRMQPSAATPDCQLRRRGR

SEQ ID NO: 11352 - protein, 479 aa, Polaromonas sp. JS666
MFKNLINGDWVEAPGVTRNINPSDTRDLIGEYAKADAAQTKDAIAAAQAAFPAWSLSTPQQRFDILDAVGSEILARRNELGDLLAREEGKTLPEAIGEVARAGNIFKFFAGEALRPGGEVLPSVRPGVGVEITREPVGVVGIITPWNFPIAIPAWKIAPALAYGNCVVFKPAELVPGSAWALADILSRSGLPKGVFNLVMGPGSQVGATLLDDARIAAITFTGSVGTGKRVAAACVGRMAKFQLEMGGKNPMVVLDDADLGVAVNCAVQSGFFSTGQRCTASSRVIVTEGIHDRFVAAVVEKLRSLKVDDARKTGTDLGPVVDASQLAQNLKYVEIARGEGATLAYGGDALEHNADGQPGFYMRPALFTDTTAGMRINGEEVFGPVVSVLRAKNYDEALHLANDTPFGLAAGIATTSLKYATHFKRHSQAGMVMVNLPTAGVDYHVPFGGRKGSSYGPREQGRYAAEFYTTVKTAYTQA

SEQ ID NO: 11353 - protein, 167 aa, Pantoea agglomerans
QHFASAPAEQNLPVLLALIGIWYNNFFGAETEAILPYDQYMHRFAAYFQQGNMESNGKYVDRAGHPVDYQTGPIIWGEPGTSGQHAFYQLIHQGTKLVPCDFIAPAITHNALADHHPKLLSNFFAQTEALAFGKSRDVVEKEFTDAGKSAESVAHIVPFKVFEGNRP

SEQ ID NO: 11354 - protein, 135 aa, Brassica napus
MVDAGDITAGGPPRAHEEEQAGTPAYGSVVLGGTFDRLHDGHRRLLKASADLGRDRIVVGVCTGPMLAKKEYAELIEPVDKRIKGVEDYIKSIKPELIVQVEPIEDPYGPSITDEKLDAIIVSKETLNGGLAVNR

SEQ ID NO: 11355 - protein, 367 aa, Coccidioides immitis RS
MAFLFSRNKSRQPAEIAKTLKDLLARLWQAPGSPKIEEDLAKHLAQIKLMVQGTQEVDSLPDQVHQLIQAFILDDLLYELARSIQHLPFEARKDTQTIFSHLLRFRPPNITSTDPPVISYIVNKRPEILIQLCHGYENSRSSTPCGTILREALKFEVVTGIVLYDQSKDEEPAIRLNEVQPGTVQTGAGVFWNFFHWINESSFEVSADAFTTFREILTRHKALVAGYLATNFDLFFSTYNNVLVLSDSYVTKRQSIKLLGELLLDRANYGVMTTYVDSGEHLKLCMNLLKDDRKMVQYEGFHIFKVFVANPNKSVAVQRILINNRDRLLKFLPKFLEDRTDDDQFTDEKSFLVRQIEILPPEPVAPR

SEQ ID NO: 11356 - protein, 167 aa, Photobacterium sp. WH69
KHFAEAPLEQKLPVILALIGIWYNNFHGAETEAILPYDQYMHRFAAYFQQGNMESNGKYVDRGGNPVDYQTGPIIWGEPGTNGQHAFYQLIHQGTKLIPCDFIAPAISHNPLGDHHPKLMANFFAQTEALAFGKSREKVEAEFFAAGKSQEEVNELAEFKVFEGNRP

SEQ ID NO: 11357 - protein, 96 aa, Pseudomonas sp.
KDRLTQPLRWRDGQYDKQGEFTPISWDQAFDIMAEKFKGAMKEKGPEAAGMFASGQWTVWEGYAAAKLFKAGLRTNNLDPNARHCMASAVVGFMRT

SEQ ID NO: 11358 - protein, 167 aa, Serratia marcescens
KHFAETPAEKNLPVLLALIGIWYNNFFGAETEAILPYDQYMHRFAAYFQQGKMESNGKYVDRNGNPVDYQTGPVIWGEPGTNGQHAFYQLIHQGTKLVPCDFIAPAISHNPLGDHHAKLLSNFFAQTEALAFGKSLEVVEAEFAAQGKTPEQVKHVAPFKVFEGNRP

SEQ ID NO: 11359 - protein, 131 aa, Zea mays
  misc_feature (29)..(29): Xaa can be any naturally occurring amino acid
SFPLITDLNHTVLGPGYHFSTLSKMWMNXPNGPMIYKGIYHLFYQYNPYGAVWDVRIVWGHSTSVDLVNWISQPPAVNPSQPSDINGCWSGSVTILPNGKPVILYTGIDQNKGQVQNVAAPVNISDPYLRE

SEQ ID NO: 11360 - protein, 879 aa, Haemophilus influenzae 86-028NP
MTQEYSTLRNNISMLGRFLGETINDAQGEDILELIENIRKLSRNSRAGDDKARQALLDTLGSISNENIIPVARAFSQFLNLTNIAEQYQTISREHSLAQSSSQSLSELFKRLKEQNASVEEVHKTVEKLLIELVLTAHPTETTRRSLIHKHIEINKCLSKLEHHDLTEKERNIIERLLLRLIAEAWHTNEIRTVRPTPFDEAKWGFAMLENSLWQAVPEFLRQLNETAREFLGYDLPVGLKPVRISSWMGGDRDGNPFVTAQITKKVLYFARWKAADLFLQDISKLADELSMMKCSDEFRDKYGEHLEPYRFVVKNLRNQLTATLAYFDDHLSNRTPRVSESEIILEDNQLWEPLYDCYQSLIQCGMRIIANGSLLDILHRISCFGVTLSQMDIRQESTRHTDAIAEIMRYIGLGDYSQWMEDDKQAFLIRELSSRRPLIPQNWTPSPETKEILDTCKVIAQQKQGVIACYVISMARSASDVLAVHLLLKEAGVPYHIPVVPLFETLEDLDAAEKVMTQLFNVGWYRGVINNRQMVMIGYSDSAKDAGMMAASWAQYRAQEALVNLTEKLGIELTLFHGRGGTIGRGGAPAHAALLSQPPRSLKNGLRVTEQGEMIRFKLGLPAVAVETFDLYASAILEANLLPPPEPKPEWRTIMDELSTISCDIYRGVVRGDKDFVPYFRSATPEQELSKLPLGSRPAKRNPNGGVESLRAIPWIFAWMQNRLMLPAWLGAGAAIRQVIEQGKGDIIHKMCENWPFFSTRIGMLEMVFSKSDTWLSQQYDQRLVKKELWYLGENLRKQLEDDIQTVLSLSHQSELMSDLPWIADSIALRNIYTDPLNLLQVELLHRFRENPEQVNPDVEQALMITITGIAAGMRNTG

SEQ ID NO: 11361 - protein, 97 aa, Pseudomonas sp.
VDRLTQPLLRMTNGQYDKQGEFHPVSWKQAFDVMELKYKEALKNKGGESIAMFGSGQWTIWEGYAANKLMKAGFRSNNIDPNARHCMASAVMGFMRT

SEQ ID NO: 11362 - protein, 2341 aa, Coccidioides immitis RS
MEESRILGEDLPLTTDQLFERLGQIPGYTWDTTLQPVHSSYDHWQVTGTKHSSEPDVFSSTPASSSSFSKDSSFAHDSLRSEPRSFPRNNGRSSISEGSSGVASPRVDPEISVPVVARISSHIIRLEREYHSMKTIIDMSDPECKHTVRPIDIIRFTPQPGHRAPLLVTIFEFPGPNYLGELVSFGPAFYQAKGQCDPDNLPLVDEVPLSVFLDFAIGACECLELLHYGLKNVHGEIRADAFHFSRETGAVKLSNTGNGSRAFDNALSEGWSTLSKESGAKDKLRSIAPEQTGRLLTEPDSRTDIYALGVLFWSMLVGRPAFDGNDPVEVVQNVLSKRLSPVSSKRMDTPDAISAVIQKMVQKQITDRYHTISSVKMDLQKIMKLLGDGDSQALKTFQIAQRDVTAFFTLPTALFGRKEECERILQVVQRRLQEPSVQPNTKTSVHPKYSFSSGSSVSGERIDPIEFGDASSDSGSYGLASFRNTPTPVPNLLPQLSSHASTNSVESSASTQKNLHLSRVKSPIDSRLSWDNSDKEAGAGGLSTPQENFPWLGKLMAQSKYRHGGRCEVITISGAGGSGKSDLIQRVQPEIRKGGYMAISRLDRSRRVPFEPFMKVLATLLQQIFSERDITTEYHSSIRTTLRPVWRTLHRTLDLPQQLIYPSAGNGKHLGSKSTVLPLQIKEAPEGEAGHDNPNLSGSFSLQTPKNIYQEQPAAKNLRFADIFVDVLRTMTMQKLICICLEDVQYADDETSGLLLEIMRTKLRCVFIVTGRPEEIVVPEVKTLFHSEGPQITRIELGPLSENDILKYVAATLHRPADNSLIPLAAIIQEKSRGIPFYIRLILETCSRKNCIWYSWRDSTWQFDIDRIFTELAAPDYGQGLEIDFVAKRFEELPSEARSILLWAAFLGSPFCFSVIQKLLSEEFSEDTDDEESARCENQKRTKLSQSSSNVVAGLQYLLQSYIILPGDSDDEFRFSFDRYAQAATLMKRCRNQEKMHFIIAQTLMKYFASSENMLYARAHHISIAAKLIKEKVSHRIRYREELSKAAMTAQKSSASTTALTFYQTCIFLLQDDPWNPTRPDVFYEETRELYLLTAEMFLAQGRASEATDLLSVVSANAHTPACKARGWVLQSRISSSNGEITAALDALLSNLSDLGVNINREVTWQEIDEAYAELSAYLYTADLDELFSRPLSEDRTLLAIGAVMTEALGLCVWIQPKLFCRYAIDLMNIYISRGAFPQIAYLCTHLNMIVTSRYKDSVLGLKLSDAALGLLDRCKEPSFSTRGVLIDNVFVNHMRVPMASTLPLLESSMQIAHVLGERHITLFTIGIMVATGFSLGQDLIELEQHCNCASEEVSDWATDVRGGSIIMAVRQAARALQGKTFVNIAEKIMSDHSHDEHQYLECLISSGSNLHSLNSYRAMMLIPLYLYGYYDRVVEVGTEIVNNIECLWSSRFATQTYFYLSLGIMSRRLEDPGRPGLKEDIELVRKYKKEIDFMESACHTNFGMWSLLVQALLSEISNDYSATMQGLEAALDHTQLHNFPLEEAMALELQVDFLVRRGARRAAQAILRHAIPAWNRMSATGKSKQLAERHEWLLRMGSIARSQDVECQTVDALAVSSNSVSESSGTQGQDEHNRNWLEQDQDWTEGTLDVSRVGLVDIIDLSSILEFSQVMSSELEVDKLLTKMVGIILESCSGSEIALVITEFESQGWCVAAAGEIDKGEVAYADGLPFAEVEDKMAQQITHYTLRSREPVLVHNVLEDERFSNVSDVYASRNPEGRSVIALPILQANNFLGVIHIEGKPNSFTHRNLVVLRLVCNQVGISLANAFLFQEARKISAANEAMIEAQKRSLAQAREAEQKAKEAEAEARHNVKLKEEAAKAKSIFLANISHDLRTPMTGVIGLSELLKQTNLDRQQDVYVESIRVCADTLLTLINDILDFSKLEAGKMKVSTVPLNLRQTIAEVVRALRYTHRDRGLETIEDLDDIAPDLLVLGDPVRLHQIFMNLLSNSYKFTPKGSVTVRAKVAEEDETTIRVTCIVADTGIGISNEHLARLFRPFSQADSSTARSYGGSGLGLSICKAIIEEVLGGKIWLRSEVGVGTTVTFTVTFKKAPEDAVARTPWSQELSQDKKQPPQKRVVRDLTCIPRDQIRVCIAEDNPINQKIAVNFVHNLGLTSEVFSDGQQAVWALQQRSKEGNPFHVVLMDVQMPVLDGYDATRKIRENEDPNVNEVLVIAMTASAIEGDREKCIDAGMNNYLAKPVRSDVLRSMLDRYLAPQSRRTTRPKFGGSISRPNQLGTEKTSARATLPIRSVSNMTVEEAADNVESNASNGGAKADDTQGT

SEQ ID NO: 11363 - protein, 97 aa, Pseudomonas sp.
VDRLTQALLRMTNGQYDKQGEFHPVSWKQAFDVMELKYKEALKNKGGESIAMFGSGQWTIWEGYAANKLMKAGFRSNNIDPNARHCMASAVMGFMRT

SEQ ID NO: 11364 - protein, 299 aa, Triticum aestivum
MGNASGREEDAAAPGEADAADVDVEDGGDDSSARGFPPYGGGANHVRRACSVGVVGASGGPGSPPVSPGRSLSPRMFVPQTPVPPLQRPADVTPVFNEILMNEQEEEFDGPPQKEIPALIVWTLGGKNVSVEGSWDNWKSRKPMQKSGKDHSLLLILPSGVYRYRFVVDGERRCFPDLPCETDAMGNAVNLLDVHDFVPESVESVSEFEAPPSPESSYSFQAPEEKDFANEPPALPSQLHLGVLNSQNSEEICARPQHIVLNHLFIEKGWGAHPLVALGVTHRFESKYVTVVLYKPIER

SEQ ID NO: 11365 - protein, 446 aa, Thermobifida fusca YX
MTHQGIQQFVLPDVGEGLTEAEILTWHVQPGDQVDVNQVICEIETAKAVVELPSPFAGRVEALLVEAGETVPVGTPIIAVDTGGAAGEPRPEPAPAAAPAEPPAEEKREPVLVGYGVKSGATKRRARRRTPSAVPAQTVGQRTVVLAKPPVRKLAKDLGVDLRTVVPSGPNGVITRDDVRRHAEQNQPQPSAPRVPEPAAPAPAASPAPERDVREERIPVKGVLKHMAAAMVDSAFTAPHVTEFLQVDVTKTVKVVQKLRQRPEFADVKVSPLLLVARALLIAVRRHPRINASWDEANQEVVVKHYVNLGIAAATDRGLVVPNIKEADRLPLPDLARALTDLTEKARAGQTAPADLTGGTITITNIGVFGIDGGTPILNRGEAAILALGQIRDMPWVHKGKIKIRKVTTLSLSFDHRLVDGELGSKVLRDVATILEDPEEMVLAWG

SEQ ID NO: 11366 - protein, 97 aa, Pseudomonas sp.
VDRLTQPLLRMSNGQYDKQGEFQPVSWTQAFDIMELKFKEALKNKGADSIAMFGSGQWTVWEGYAANKLMKAGLRCNNIDPNARHCMASAVMGFMRT

SEQ ID NO: 11367 - protein, 537 aa, Ornithobacterium rhinotracheale
MAEIIKMPRLSDTMEEGKVESWNKKVGDKVSYGDILAEIETDKAVQEFETDVEGTLLYIGVEAGQAAPVDSILAIIGAEGEDISGLVSGGGASQSAPAQEAAAPAEEPQAEAAPAAEVPENVTIVSMPRLSDTMEEGKVESWNKKVGDKVSYGDILAEIETDKAVQEFETDVEGTLLYIGVEAGQSAPVDSILAIIGPEGTDVSAIVAGGGAKPAAKAEAPKAEAPKQAAPAQEKKETPAPAAPKAQATNNSGRVFISPLAKKLADEKGYDINQIQGTGDNGRIIKKDVENFTPQAAAAKPAVAGPVALEVGEDTVIPNSQMRKVIAKRLSESKFTAPHYYLTIEVDMDNVMAARKQINQIPNTKVSFNDIVLKATAMAVKKHPVVNSTWKDNEIVQYAAVNIGVAVAVPDGLVVPVVKNTDLKSLSQISAEVKDLATRSRDRKIKADEMEGSTFTVSNLGAYGVESFTSIINQPNSCILSVGAIVEKPVVKNGQIVVGHTMKLCLACDHRTVDGATGSTFLQTLKQYLETPMSMLV

SEQ ID NO: 11368 - protein, 106 aa, Brassica napus
  misc_feature (13)..(15): Xaa can be any naturally occurring amino acid
  misc_feature (29)..(29): Xaa can be any naturally occurring amino acid
MMDVEPVMCECCXXXEDCTQHYISEVKAXFAGKWLCGLCSKVVSDEVSRDLKQTTMEEALNAHVLFCGKFKANPAELVADGMKQMLRRRSGDMLPAKSKMFGRSKF

SEQ ID NO: 11369 - protein, 179 aa, Fritillaria agrestis
MASSATMLSSVATAACVAPAQASMVAPFVGLKSASAFPVTQKTVTGLSTLPSNGGRVQCMKVWPIVGLKKFETLSYLPTLSVESLLKQIEYLIRNGWVPCLEFSLEGFVSRDNNKSPGYYDGRYWTMWKLPMFGCTDAAQVVKEAAECKKEYPAAFIRVIGFDNVRQVQCVSFIVEKPE

SEQ ID NO: 11370 - protein, 179 aa, Fritillaria agrestis
MAASSTMLSSVATAACAAPAQASMVAPFVGLKSTSAFPVTQKPATGLSTLPSNGGRVQCMKVWPIVGLKKFETLSYLPTLSVESLLKQIEYLIRNGWVPCLEFSLEGFVSRDNNKSPGYYDGRYWTMWKLPMFGCTDAAQVVKEAAECKKEYPAAFIRVIGFDNVRQVQCVSFIVERPE

SEQ ID NO: 11371 - protein, 173 aa, Flaveria pringlei
MASIPATVATVAQANMVAPFTGLKANAAFPVTKKVNDFSTLPSNGGRVQCMKVWPPLGKKKYETLSYLPDLTEVQLAKEVDYLLRNKWVPCLEFELEHGFVYRENARSPGYYDGRYWTMWKLPMFGCTDSAQVMKELQECKKEYPQAWIRIIGFDNVRQVQCISFIASKPGGF

SEQ ID NO: 11372 - protein, 178 aa, Flaveria pringlei
MASISSTVATVSRAAPAQANMVAPFTGLKSNVAFPATKKANDFSTLPSNGGRVQCMKVWPPLGKKRYETLSYLPNLTEAQLAKEVDYLLRNKWVPCLEFELEHGFVYRENARSPGYYDGRYWTMWKLPMFGCTDSAQVMKELQECKKEYPQAWIRIIGFDNVRQVQCISFIASKPEGF

SEQ ID NO: 11373 - protein, 163 aa, Glycine max
GSSDEGERTCPLCAEEMDLTDQQLKPCKCGYEICVWCWHHIMDMAEKDDTEGRCPACRSPYDKEKIVGTAANCDRLVNGVNIEKRMKTQKTKSKSTDGRKQLSSVRVIQRNLVYIVGLPLNLADEDLLQRREYFSQYGKVLKVSMSRTAAGAIQQFPNDTCSV

SEQ ID NO: 11374 - protein, 179 aa, Fritillaria agrestis
MASSATMLSSVATAARAAPAQASMVAPFVGLKSASAFPVTQKPATGLSTLPSNGGRVQCMKVWPIVGLKKFETLSYLPTLSVESLLKQIEYLIRNGWVPCLEFSLEGFVSRDNNKSPGYYDGRYWTMWKLPMFGCTDAAQVVKEAAECKKEYPAAFIRVIGFDNVRQVQCVSFIVEKPE

SEQ ID NO: 11375 - protein, 179 aa, Fritillaria agrestis
MASSATMLSSVATAACAAPAQASMVAPFVGLKSASAFPVTQKTATGLSTLPSNGGRVQCMKVWPIVGLKKFETLSYLPTLSVESLLKQIEYLIRNGWVPCLEFSLEGFVSRDNNKSPGYYDGRYWTMWKLPMFGCTGAAQVVKEAAECKKEYPAAFIRVIGFDNVRQVQCVSFIVEKPE

SEQ ID NO: 11376 - protein, 88 aa, Oryza sativa
MSVRLASGRITDDEINELIFKLQSLLPESSRRRGATSRSPATKLLKEMCSYIKSLHREVDDLSERLSELMATMDSNSPQADIIRSLLR

SEQ ID NO: 11377 - protein, 464 aa, Enterococcus faecalis V583
MSTVPELEEYKFGFHDDVEPVFSTGDGLTEDVVREISRVKGEPEWMLDFRLKSLEQFNKMPMQEWGPDLSDIDFSKIKYYQKPSDKPARDWDDVPDKIKETFEKIGIPEAERAYLAGASAQYESEVVYHNMKEEFEKLGIIFTDTDSALKEYPDLFKEYFSKLVPPTDNKLAALNSAVWSGGTFIYVPKGVRVDVPLQTYFRINAENTGQFERTLIIVDEGASVHYVEGCTAPTYSSNSLHAAIVEIFTRKDAYCRYTTIQNWSDNVYNLVTKRAKAYEGATVEWIDGNLGAKTTMKYPSVYLDGKGARGTMLSIAFAGANQIQDTGAKMIHNAPNTSSSIVSKSIAKDGGEVNYRGQVTFGKDSAGSISHIECDTIIMDEKSKSDTIPFNEIHNSQVSLEHEAKVSKISEEQLYYLMSRGLSEAEATEMIVMGFVEPFTKELPMEYAVELNRLISYEMEGSVG

SEQ ID NO: 11378 - protein, 428 aa, Enterococcus faecalis V583
MKKVNLMDYLDEVTAFSLEHEEPAWMTELRTTALRNADESELPHIDRVKFHRWPLLNVHMESYVPSEGNVASFDQMKDNPLIVQQGSFHAFEQLPASLAEQGVIFTDIFTALQEHPELVKEYYMTKAVLPEEDKLTAAHAAFMNSGVFLYVPKNVVIEEPIESLFIQDSDSNQPFFKHVLIVADNHSEFSYLERFQSTGHHAEKASGNIVVEVIAKDGAKVKYSAVDQLGQTVTTYMNRRGYIMRDASVDWALGVMNDGDVVADFDSDLVGEGAHSEVKVVAISAGKQTQGIDTRVTNKAPHSIGHILQHGVIRERGTLTFNGIGHILKGAKGADAQQESRVLMLSDKARGDANPILLIDENEVTAGHAASVGRVDPEEMYYLMSRGLRKEEAERLVIRGFLGSVITAIPVKEVQNEFVEVIEGKLNA

SEQ ID NO: 11379 - protein, 231 aa, Glycine max
GRVGSKEEEAVCCIQNVHGFVLEGRPLRACFGTTKYCHAWLRNVPCSNPDCLYLHEIGSQEDSFTKDEIISAYTRSRVQQITGATNNMQRRSGNVLPPPLDDNMNSSSVKPIVKNSSCNSVNIVRGSPPNGIYGKNMALPASAAWGTQASNCQPPAGGLSYPNGPSKPKPDTGCSTLAFSAAVTGSIQASDVTKRPPSSDGCHSMTPTVKSELLKPVKQYNNSVGSLVSAG

SEQ ID NO: 11380 - protein, 323 aa, Erythrobacter sp. NAP1
MATHHTKMLIIGSGPAGYSAAIYAARAMLEPIVVQGLQPGGQLTITTDVENYPGFRDVVQGPWLMEEMKAQAEHVGTRMMYDIITSVDLEGGSPFRAVGDSGDEYIADTIVIATGAQAKWLGVPGEQELGGKGVSACATCDGFFYRGKKVAVIGGGNTAVEEALYLTNHSDDVTLIHRRDELRSEKILQDRLFKSPKISTLWNKTVESFEAGENGTLSHLVLKDTQTGETSTLEVDGAFVAIGHAPATELFKGKLPMDESGYLDTEPGTPKTVIPGVFAAGDVTDHVYRQAVTAAGMGCMAALDGERFLATMEDAEEEAEAAE

SEQ ID NO: 11381 - protein, 406 aa, Methanothermobacter thermautotrophicus str. Delta H
MELIVAKFGGTSIGNGRRIKKAARSVVKEYMKGRKVVVVVSAINKTTDELLQIVDEAMEDAVTEKQLAEIVSMGEMTSVRIFSSAIEALGVKSEYIDPFMDEWPIITDSNLLNAKVDFEATEEKSRELLKLLDQGIIPVVCGFLGRDPNGYITTLGRGGSDITAFLLGHCLKADEVIIVTDVGGVMSTDPNKLQGAKKLDKISVEEMRDLATHGAQVLHPHALKYKDPDIKAKIIGFEHGDLSAPGTEIIGPSKNKMVKTTTLNPDPISVVAVVGEKILNKPGILARLTSRLAENSINIIGISTGQNSVTIFVDKKDADEAHRLLHDVVIADDDLSSLSLGRDIAMITISSPDFIDTPGIISEITKPLRDNDLNIVEISSSQTSVVIFVDWNDGKKAYELVRGVLE

SEQ ID NO: 11382 - protein, 468 aa, Thermotoga maritima MSB8
MKNRKTPMKEQSPESRRRNFEEVALGYTLEEALEEAQRCLQCPTHPCVSGCPVEIDIPGFIRKLRDGKLEESYRILKSYNNLPAVCGRVCPQEVQCESRCVVGKMKDSEPVAIGRLERFVADWAAENLEEDVKPLAGSKKEKVAVVGSGPAGLTAAADLAKMGYHVDIFEAFHKPGGVLVYGIPEFRLPKRIVEREVSYIRKLGVNFHLNTVVGKTVKVKELLSEYDAVFIGTGAGTPKFMGIPGTNLNGVYSANEFLTRVNLMKAYLFPEYDTPIRVGKKVAVIGAGNTAMDAARSALRLGAEKVYIVYRRTEREMPARREEYHHALEEGIEFLWLTLPIRYIGDANGNVEAMECVRMELKEADGSGRPRPVPIEGSNFVLEVDMVIEAIGQGPNRVLLSEFPGLELNERGYIKADEDTGATSVKGVFAGGDIVTGAATVIKAMGAGKKAAQFIHSYLTGEWNPWQK

SEQ ID NO: 11383 - protein, 127 aa, Brassica napus
MAFVTTAEVCDANQDLIRSGELRALQPVFQIYGRRQIFSGPVVTVKVFEDNGLIRQFLEEKGNGRVLVVDGGGSQRCAILGGNPVVQAQNNGWAGIIVNGCIRDVDEINGCDIGVRALASHPIKASK

SEQ ID NO: 11384 - protein, 405 aa, Coxiella burnetii
MAIEIKVPTLPESVSDATVAKWYKKEGDSISRDENLVDLETDKVMLEVPAPKDGVVEKIVAKEGEVVKADQILALLKEGGSVAKEKEKKDEKETKKEKEKKEEKKDKEKKEKTEEKESDLSPAVRRMVSEKDVDVEEIEGSGKGGRITKKDVEDYLEKQKEKPSEGKEGPADERTEKRVPLSRIRQRVAERLVQVQQEAALLTTFNEINMQLVMELRKKYREEFEKKFKVRLGFMSFFTKAVVEALKRFPMVNASIDGSDIIYHNYYDIGIAIGTERGLIVPILRNAEKMNMADIEKQIREYASRAQEGRLNIEELTGGTFTITNGGTYGSLLSTPIINPPQTAILGMHKIMDRPTVENGEVVVRPIMQVALSYDHRVIDGREAVLFLVTIKELLEDPARMILEC

SEQ ID NO: 11385 - protein, 579 aa, Glycine max
MCGILAVLGCSDSSQAKRVRVLELSRRLKHRGPDWSGLHQYGDNYLAHQRLAIVDPASGDQPLFNEDKTVVVTVNGEIYNHEELRKQLPNHTFRTGSDCDVIAHLYEEHGENFVDMLDGIFSFALLDTRDNSFIVARDAIGVTSLYIGWGLDGSVWISSELKGLNDDCEHFESFPPGHLYSSKERAFRRWYNPPWFSEAIPSAPYDPLALRHAFEKAVVKRLMTDVPFGVLLSGGLDSSLVAAVTARYLAGTNAAKQWGTKLHSFCVGLEGAPDLKAAKEVADYIGTVHHEFHYTVQDGIDAIEDVIYHIETYDVTTIRASIPMFLMSRKIKSLGVKWVISGEGSDEIFGGYLYFHKAPNKDEFHQETCRKIKALHKYDCLRANKSTFAWGLEARVPFLDKDFIRVAMNIDPEYKMIKKEEGRIEKWVLRRAFDDEEHPYLPKHILYRQKEQFSDGVGYGWIDGLKAHAEKHVTDRMMLNAANIFPFNTPTTKEAYYYRMIFERFFPQNSARLSVPGGPSVACSTAKAVEWDAAWSNNLDPSGRAALGVHASAYGNQVKAVEPEKIIPKMEVSPLGVAI

SEQ ID NO: 11386 - protein, 233 aa, Saccharomyces cerevisiae
MSSAITALTPNQVNDELNKMQAFIRKEAEEKAKEIQLKADQEYEIEKTNIVRNETNNIDGNFKSKLKKAMLSQQITKSTIANKMRLKVLSAREQSLERIFEETKEKLSGIANNRDEYKPILQSLIVEALLKLLEPKAIVKALERDVDLIESMKDDIMREYGEKAQRAPLEEIVISNDYLNKDLVSGGVVVSNASDKIEINNTLEERLKLLSEEALPAIRLELYGPSKTRKFFD

SEQ ID NO: 11387 - protein, 473 aa, Debaryomyces hansenii CBS767
MASKLSKLEAEQMAIRRQSGTMNRGRSHSPSKSGHNSRSSLILNDEFNRDLKWSITNHDPLERLVQKDIGEQNENKDDVNELWINEVSEEEHISDNEDNEKFHYDDTGNILPNYACQDDKINEISSILENSNLHDRAVTKRLEELTANERAFANAKNIGSNVDKDFLDKLKNDKHELTGNGLDLSKSEQDAASRKQKLENYSIYRKKIIDQENDNLKPNESNEDESSSSSDRPEESNEKDFMIPYTSAVEDKLDSEFASKLNETIKEGEIDSNKSNSRAIQVITRGNFFQLINPRVKPKIFLVCMDFSPESIFALEWCLGTVLVDGSVLFIVCVIEENDNNHHLKGNTLNESTRENQRLNTLNKAKQQVLNLLKLTKLQIHIVIEIIHHPIPRHLILEIIENLQPTLAVVGSKGQSAIKGVLLGSLSNYLVTKLTVPVMVVREKLKKINRFKTGSSVFSNNIKPLTLSEARVD

SEQ ID NO: 11388 - protein, 466 aa, Leifsonia xyli subsp. xyli str. CTCB07
MRKTNADDRPAVVWFRDDLRLADNPALHAAAESGRPVICLYVWDEDSPGLRSPGEAARWWLHHSLTSLEESIGRAGSALAIRTGPAERVLAEVLAEVDAGAVFWNRRYGEGERRVDERVKSAARDTGLVANSFGANLLFEPWTVRTGSGTAFSVYTPFWRACLARPEPRRPLPALRRLRPGPSLPSLELDELKLLPVHPDWADGLRETWKPGERAAHRELSAFLGEGLARYRAERDVPGIAATSRLSPRLRWGELSPFQVWHATAAARDRSTAEGAATFLSELGWREFAYHTYFERPALATVNIHREYDSFPWPRLHPSALRAWQQGRTGVPLVDAGMRELWRTGVMHNRVRMVAASFLTKNLLIDWRRGEQWFWDTLVDADPASNPFNWQWVAGSGADTAPYFRVFNPEVQREKFDPHGDYVRRWVPEWDTADYPEPLVDLAETRRAALAAWETVKAARGTAERS

SEQ ID NO: 11389 - protein, 421 aa, Mycobacterium tuberculosis CDC1551
MALVVQKYGGSSVADAERIRRVAERIVATKKQGNDVVVVVSAMGDTTDDLLDLAQQVCPAPPPRELDMLLTAGERISNALVAMAIESLGAHARSFTGSQAGVITTGTHGNAKIIDVTPGRLQTALEEGRVVLVAGFQGVSQDTKDVTTLGRGGSDTTAVAMAAALGADVCEIYTDVDGIFSADPRIVRNARKLDTVTFEEMLEMAACGAKVLMLRCVEYARRHNIPVHVRSSYSDRPGTVVVGSIKDVPMEDPILTGVAHDRSEAKVTIVGLPDIPGYAAKVFRAVADADVNIDMVLQNVSKVEDGKTDITFTCSRDVGPAAVEKLDSLRNEIGFSQLLYDDHIGKVSLIGAGMRSHPGVTATFCEALAAVGVNIELISTSEIRISVLCRDTELDKAVVALHEAFGLGGDEEATVYAGTGR

SEQ ID NO: 11390 - protein, 659 aa, Mycobacterium tuberculosis CDC1551
MRRSEVPSHHPGATTVTTSESPDAYTESFGAHTIVKPAGPPRVGQPSWNPQRASSMPVNRYRPFAEEVEPIRLRNRTWPDRVIDRAPLWCAVDLRDGNQALIDPMSPARKRRMFDLLVRMGYKEIEVGFPSASQTDFDFVREIIEQGAIPDDVTIQVLTQCRPELIERTFQACSGAPRAIVHFYNSTSILQRRVVFRANRAEVQAIATDGARKCVEQAAKYPGTQWRFEYSPESYTGTELEYAKQVCDAVGEVIAPTPERPIIFNLPATVEMTTPNVYADSIEWMSRNLANRESVILSLHPHNDRGTAVAAAELGFAAGADRIEGCLFGNGERTGNVCLVTLGLNLFSRGVDPQIDFSNIDEIRRTVEYCNQLPVHERHPYGGDLVYTAFSGSHQDAINKGLDAMKLDADAADCDVDDMLWQVPYLPIDPRDVGRTYEAVIRVNSQSGKGGVAYIMKTDHGLSLPRRLQIEFSQVIQKIAEGTAGEGGEVSPKEMWDAFAEEYLAPVRPLERIRQHVDAADDDGGTTSITATVKINGVETEISGSGNGPLAAFVHALADVGFDVAVLDYYEHAMSAGDDAQAAAYVEASVTIASPAQPGEAGRHASDPVTIASPAQPGEAGRHASDPVTSKTVWGVGIAPSITTASLRAVVSAVNRAAR

SEQ ID NO: 11391 - protein, 115 aa, Hordeum vulgare subsp. vulgare
MARAAATQLVLVAMVAAMLIVATDAAISCGQVSSALSPCISYARGNGAKPPVACCSGVKRLAGAAQSTADKQAACKCIKSAAGGLNAGKAAGIPSMCGVSVPYAISASVDCSKIR

SEQ ID NO: 11392 - protein, 96 aa, Triticum aestivum
  misc_feature (13)..(15): Xaa can be any naturally occurring amino acid
  misc_feature (18)..(18): Xaa can be any naturally occurring amino acid
  misc_feature (56)..(56): Xaa can be any naturally occurring amino acid
  misc_feature (67)..(67): Xaa can be any naturally occurring amino acid
  misc_feature (73)..(73): Xaa can be any naturally occurring amino acid
  misc_feature (83)..(83): Xaa can be any naturally occurring amino acid
  misc_feature (90)..(90): Xaa can be any naturally occurring amino acid
MASPIPREWVGLXXXPPXTQTELHELLGKLKEEDVSTLTILVMGKGGVGKSSTVNXIVGERIATVSXFQSEGXRPMMWSRQGXVHLNIIXTPGLLK

SEQ ID NO: 11393 - protein, 1299 aa, Nostoc sp. PCC 7120
MTTDRDSSSKKFGLSPEQFAALFPFHLVIDRELKIVQAGEVIQRILEPMVLLDSYLGEHFQISRPKCLTSFEGICQQTRSLFILQAHYQEIQLKGQMLNLESRDHLLFLGSPWITDIADLKNLGLKINDFPLHDSVSDYLFLLQAKNSALADAQKLTTKLKDQKTELQTTALRLRTLIESLQSGILLEDANQHIILVNQEFCDYFRIPLPPQALQGMDCQQALEASKHLFTEPERFICTTDEIIRQGKMFLHQEWELQDGRTLEQNYIPIVVDHKLYGHLWKYRDITQYKKSEVALRLSEERLKLAVDAVEEGLWDWNLVTGEVYRSARWFTMLGYTPMEIGNDIKFRDKLIHPDDIPLMQQRLISHLKGDTPFYEVEIRLLAKSGEWRWILDRGKLVSRDSQGRAIRMVGTHLDITQRKQAEQDLQQQYQHTLLLKQITEEIRQSLQWEKILKTTVTEVQRILQVDRALIFQINSDGSGKVVQEAVMPGWSVTLDQDIYDPCLKDGYLNMYRDGRITAIADVYQGGLKPCYVEFLQQFQVKANLVVPIRVRRNLWGLLIVHQCDRPRQWTELELDLLKHLADQMGIALTQSQLLAQETRQAQLLALQNEELNVAKQVAEKANMAKSNFLATMSHEIRTPMNAIIGMSGLLLDTTLKPEQFDYVETIRNSSHTLLTIINDILDFSKIESGKLELEEQPFDLRLCVEEALDLLAPQAASKGIELMYQLEPDTPTLVVGDITRIRQILWNLVSNAVKFTKIGEICITIGAKQKIYKQTDPTRYEFQFAVQDTGIGIERDRLHRLFKPFSQVDASMTRRYGGTGLGLAISKRLSEIMGGKMWVESQSHQGSIFYFTATLQVNSSAINSAAKVDPELVGKRLLLAVGNANLRKCLTRQLQSLGLDVQAVDSNATALHCLWQHTSLALAVLDVDSPQINGLHLSTKIRAIPQHQNLPLVMLSAKGKQTLEVKQVASEFTAFLHKPLRHYQLHNTLLQIVRGKWLSKSTPQGIIPSYSRLPKPNLPAIDTHLAENLPLKILLVEDVLVNQKIAMNMLHLLGYRTDVANNGLEALEALQRQLYDVVFMDIQMPEMDGWETTHKIRQEFSPTLQPWIIAMTAHARPEDRQQCLAAGMDDYISKPISLEDITTALKKFGSQRQPALESPASVSISAPPAPTPQPKIEEVIDQQTLEYLRNLGGSDEADEDGGGSSIITELIQLYLEDTPAKIQAIQDAATLEDRSQLARIAHALRSPSVSIGAINLGKICETVEDEAKEQSMDQLTALVNQLNNEYQNVVAALKTLIF

SEQ ID NO: 11394 - protein, 592 aa, Bradyrhizobium japonicum USDA 110
MRGPPARPAVKIRRLEFLELSDVAMGQDGQQRNDREALMSRFARPEQTFPALTSAEIERIRHFGELRTYSDRELLFETGKPGPGMFVILKGHVAITQRDGLGHVSPVIDQGPGQFLAELGQLSGRPALVDGRAEGDVEVVLIPPDRLRALLVAEAELGERIMRALILRRVSLIQGGVGGPVLIGPSNSAGVVRLQGFLTRNGQPHHLLDADSEHDAAEVIARYSPKPEDWPLVVTADGSVLRNPSEIELGRAIGMIGGAKDDRIYDVAIVGCGPAGLATAVYAASEGLSVAVVDTRAFGGQAGASARIENYLGFPTGISGQALAGRAFTQAQKFGAEIMIPMSVKSLDCSRSGGTFALALDCGDTLRSRAVVVASGARYRRPEIAKLDTFEGRGVWYWASPVEAKLCAGEEVALVGAGNSAGQAAVFLSGHAKKVLMIIRGGGLGASMSRYLIERIEATPNIELMFNTEITALEGDEASLLRRIRWKSRLSSDEDSADIRNLFLFVGADPATGWLDGCGVTLDRGGFVVTGAQSEQNQGRLVAPLETSVPGVYAVGDVRSGSVKRVGGAIGEGAQVVASLHGYLGDAAKPAL

SEQ ID NO: 11395 - protein, 251 aa, Brassica napus
  misc_feature (7)..(7): Xaa can be any naturally occurring amino acid
GTASVVXAALIGALRFVGGSLANHRFLFLGAGEAGTGIAELIALEISKKCQIPLEEARKNIWLVDSKGLIVSSRKESIQHFKKPWAHDHKPIKELVDAVKAIKPTVLIGTSGVGQTFTQEVVETMAELNEKPIILSLSNPTSQSECTAEQAYTWSKGRAIFASGSPFAPVEYEGKTFVPGQANNAYIFPGFGLGLIMSGTIRVPDDMLLPASHAFPPHPTDPPYEKGMIFPPFRNIRKISARIAAKVAAKA

SEQ ID NO: 11396 - protein, 346 aa, Enterobacter cloacae
MPARVSRPGITGRSHLMSQNTLKVHDLNEDAEFDENGAEAFDEKALVEEEPSDNDLAEEELLSQGATQRVLDATQLYLGEIGYSPLLTAEEEVYFARRALRGDVASRRRMIESNLRLVVKIARRYGNRGLALLDLIEEGNLGLIRAVEKFDPERGFRFSTYATWWIRQTIERAIMNQTRTIRLPIHIVKELNVYLRTARELSHKLDHEPSAEEIAEQLDKPVDDVSRMLRLNERITSVDTPLGGDSEKALLDILADEKDNGPEDTTQDDDMKQSIVKWLFELNAKQREVLARRFGLLGYEAATLEDVGREIGLTRERVRQIQVEGLRRLREILQGQGLNIEALFRE

SEQ ID NO: 11397 - protein, 866 aa, Haemophilus somnus 2336
MLGHFLGETISDAQGSDILDLIENIRVLSRDSRSGDEKAREKLLDTLSTISNENIIPVARAFSQFLNLTNIAEQYQTISRKHIDQVASDRSLEALFERLKAQNVPAEKVISTVEKLLIELVLTAHPTEVTRRSLLHKYVEINRCLSRLEHDDLTQSESTKLKRRLMQLIALAWHTNEIRTQRPTPVDEAKWGIAVIENSLWKAVPDFCRQLNLHLEKNFGVQHSVNLAPVKFSSWIGGDRDGNPFVTAETTRQVLIMNRWKAAELFLADIQVLSEELSVVHCTEEFRAKYGDHLEPYRVVVKNLRAKLVKTVAYYGEILENKPSTINTNDILTDDQQLWEPLYDCYQSLHQCGMRIIANGILLDCLRRIRCFGLSLSHLDIRQESLRHTKALSEITRYIGLGDYSQWMEDDKQAFLIRELSSRRPLLPRNWTPSPETQEILETCRVIAQQPEGVISCYIISMARTASDVLAVHLLLKEAGVTYYLPVVPLFETLDDLNASKEVMTQLFNVGWYRGVINNKQMVMIGYSDSAKDAGMMAASWAQYRAQEQLVNLCEKMGVELTLFHGRGGTIGRGGAPAHAALLSQPPRSLKNGLRVTEQGEMIRFKLGLPAVAVNSFDLYASAILEANLLPPPEPKESWRAIMNELSDSSCNIYRSVVRGDKDFVPYFRSATPEQELSKLPLGSRPSKRNPNGGVESLRAIPWIFAWMQNRLMLPAWLGASASIRQSIEKGNKETIEEMCKNWPFFSTRIGMLEMVFSKTDTWLSEHYDLNLVKKELWYLGQSLREQLQADIKTILSLSHEDELMSDLPWIAESIALRNIYTDPLNLLQVELLRRLRENPENPNPDVEQALMITITGIAAGMRNTG

SEQ ID NO: 11398 - protein, 311 aa, Mycobacterium smegmatis
MSTSQTVHDVIIIGSGPAGYTAAIYAARAQLKPLVFEGTQFGGALMTTTEVENYPGFREGITGPELMDQMREQALRFRADLRMEDVDAVQLEGPVKTVVVGDETHQARAVILAMGAAARHLGVPGEEALTGMGVSTCATCDGFFFRDQDIVVVGGGDSAMEEATFLTRFARSVTLIHRRDEFRASKIMLERARANEKITFLTNTEITQIEGDPKVTGVRLRDTVTGEESKLDVTGVFVAIGHDPRSELVRGQVELDDEGYVKVQGRTTYTSLDGVFAAGDLVDHTYRQAITAAGSGCAASIDAERWLAEQD

SEQ ID NO: 11399 - protein, 112 aa, Mycobacterium smegmatis
MSEDSATVAVTDDSFSTDVLGSSKPVLVDFWATWCGPCKMVAPVLEEIAAEKGDQLTVAKIDVDVDANPATARDFQVVSIPTMILFKDGAPVKRIVGAKGKAALLRELSDAL

SEQ ID NO: 11400 - protein, 309 aa, Sinorhizobium meliloti
MQTKPFRIGTRGSPLAMAQTHETRDRLAAAHGLPPEMFEIVILSTKGDRITDRSLAEIGGKGLFTEELEQQLLSGDLDFAVHSSKDMPTKLPEGLFLSAFLPREDIRDAFVGRSAKRLVDLPQGATVGSSSLRRQALIRRLRPDIDVITYRGQVETRLRKLAEGQVDGTLLAYAGLRRLGMEHVPTELLDPEEFPPAPAQGAICVEARIGDDRINTLLAAIDDPRTHEAVSCERGFLATLDGSCRTPIAGYAQSDGTHIRFAGMILTPDGTTSHQIEIDGRAADAERLGQEAGERIRAKAGPGFFSSWS

SEQ ID NO: 11401 - protein, 284 aa, Glycine max
MSSFLLTFPYFPNDASWQVKLCPSPQIRLVCVKTNLKTLTKASSQNCVESMSSLTSLAPLEAVLFDVDGTLCDSDPLHYYALREMLQELGFNGGAPITEEFFVETFSGKHSDDTALVVFPGDLERGLKFVEDKEAMFRRLASEQLNPLKGLDKVRKWVENHGLKRAAVTNAPRKNAELIISKLGLTDFFDAVIIGDECEHAKPHPEPYLKALEVLKASKDHAFVFEDSASGIKAGVAAGMPVIGLATRNPENLLMEAKPAFLIKDYEDSKLWAALEELDKAGAR

SEQ ID NO: 11402 - protein, 400 aa, Campylobacter lari RM2100
MLIVQKYGGTSVGTLERIDEVAKRVAKSKKTCDKLVVVVSAMSGVTNELIDFAHHFSKNPSGREMDMLLSSGERVTSSLLAIALNEMGLKATAFSGRNAGIITDDVYTKARIERIDTANINKALDEGYIVVVAGFQGIDKMGNVTTLGRGGSDLSAVALAGALNADLCEIYTDVDGVYTTDPRIEPKAKKLDKISYEEMLELASLGAKVLQNRSVELAKKLNVKLVTRSSFNENEGTIITKEENMEQALVSGIALDKNQARVTLRNIDDKPGIAAEIFGTLANENINVDMIIQNVGVDGATNLGFTVPENELDLATNAMKKVLGANAIIETDSAVVKVSVVGVGMKSHSGVASAAFKALANENINIQMISTSEIKISVIVHEKYGELAVRVLHEVYKLDI

SEQ ID NO: 11403 - protein, 172 aa, Dunaliella bardawil
MQLHMNLPTSRIAAGASINVRPAPLLRTAAPKRVCKHIVRAENNPSTPPPSSPSPPPPPPTPAAPTVTEVMGFSGAPEIINGRLAMLGFVAALGAELSTGESVLTQLGDQPTLIALTFVLFSAASLIPAFARRKGDAMGPFTPDAEMTNGRFAMIGFAAMLVYEGIQGIALF

SEQ ID NO: 11404 - protein, 715 aa, Arabidopsis thaliana
MVVATTIALYASPASTVCSTAHQINAHISCDLDLNSRSSSASSSTSSPTIGGLSLLFSGASVKSSSSSSSSHPSVGEELASIRHDRSEDRTLSGSFCYSPSKFIGSSYLKRDHQSPVSVLHGPISSGNSPPMRISRDRNLDGGSALRVGSSRLFNGFVRKAIGSCVDYDTDSVLVDEQLPFTMDDGFEGERRQPYARDLLRRAQLKHKIFEDESVIKAFYEAEKAHRGQMRATGDPYLQHCVETAMLLADIGANSTVVVAGILHDTLDDSFMSYDYILRTFGSGVADLVEGVSKLSQLSKLARENNTACKTVEADRLHTMFLAMADARAVLIKLADRLHNMMTLYALPPVKRQRFAKETLEIFAPLANRLGISSWKVKLENLCFKHLHPDQHHEMSDMLEDSFDEAMITSAIEKLEQALKKEGISYHVVSGRHKSLYSIYCKMLKKKLTMDEIHDIHGLRLIVDNEKDCYKALGVVHKLWSEVPGKLKDYISHPKFNGYQSLHTVVMGDGTIPLEVQIRTKEMHLQAEFGFAAHWRYKEGDCKHSSFVLQMVEWARWVVTWHFETMSKDGSSICSSEPLCSFPSHAEDCPFSYKPSGNQEGPVYVIVIENEKMSVQEFPENSTVSDLLRRAGPGSSRWSMYSIPAKEELRPRLNQTPVSDLKCKLKMGDVVELTPAIPDKSLTEYREEIQRMYDRGLAFSRPHRAATGTMVGWGS

SEQ ID NO: 11405 - protein, 157 aa, Mycobacterium leprae
MIVSFRPTADLVDSIGVDVRSCDLQFRQFGGCSEFAGPISTVRCFQDNALLKSVLSQTSAGGVLVVDGAGSLHTALVGDVIAELAHSNGWAGLIVNGAVRDAAALRGIDIGIKALGTNPRKSTKIGTGERHVEVNLGGVTFVPGEVVYSDDDGIVVV

SEQ ID NO: 11406 - protein, 173 aa, Flaveria pringlei
MASIPATVATVAQANMVAPFTGLKSNAAFPVTKKVNDFSTLPSNGGRVQCMKVWPPLGKKRYETLSYLPNLTESQLAKEVDYLLRNKWVPCLEFELEHGFVYRENARSPGYYDGRYWTMWKLPMFGCTDSAQVMKELQECKKEYPQAWIRIIGFDNVRQVQCISFIASKPDGF

SEQ ID NO: 11407 - protein, 178 aa, Flaveria pringlei
MASISSTVATVSRAAPAQANMVAPFTGLKSNAAFPATKKANDFSTLPSNGGRVQCMKVWPPLGKKKYETLSYLPNLTEAQLAKEVDYLLRNKWVPCLEFELEHGFVYRENARSPGYYDGRYWTMWKLPMFGCTDSAQVMKELQECKKEYPQAWIRIIGFDNVRQVQCISFIASKPDGF

SEQ ID NO: 11408 - protein, 508 aa, Bacillus cereus ATCC 10987
MILDADIKTQLSQYLQLMENDILLKVSAGDDDVSKDMLALVDELATMSSKITVEKVELERTPSFSVNRPGEDTGVVFAGIPLGHEFTSLVLALLQVSGRAPKVEQKLIDQIKNIQGEYHFESYISLSCHNCPDVVQALNVMSVLNSGITHTMIDGAAFKEEVESKDIMAVPTVFLNGESFGSGRMTLEEILAKMGNGPDASELSDKDPYDVLVVGGGPAGASAAIYAARKGIRTGIVAERFGGQVMDTMGIENFISVKRTEGPKLVASLEEHVKEYDIDVMNLQRAKRLEKKELIEVELENGAILKSKSVIVSTGARWRNVGVPGEAEFKNKGVAYCPHCDGPLFTGKDVAVIGGGNSGIEAAIDLAGIVNHVTVLEFMPELKADAVLQERLNSLPNVTVLKNVQTKEITGTDKVNGISYIDRETEEVHHVELQGVFVQIGLVPNTDWLGETVERVRGEIVTDKHGATNVPGVFAAGDCTNNPYKQIIISMGSGANAALGAFDYLIRN

SEQ ID NO: 11409 - protein, 640 aa, Capsicum annuum
MAIHPSSYDPETSTTHYTFLPGQPDSGHRKSIKVVSVILLSSFFLLYLAAFVILNNQPPNLQNKSPSASETLTPATPSRGVSQGVSEKTFKDVSGTSQVSYTWSNAMLNWQRTAYHFQPQKNWMNDPNGPLYHKGWYHLFYQYNPDSAIWGNITWGHAVSTDLIHWLYLPFAMVPDQWYDINGVWTGSATILPDGLIMMLYTGDTDDYVQVQNLAYPANLSDPLLLDWVKYQGNPVLVPPPGIGVKDFRDPTTAWTGPQNGQWLLTIGSKVGKTGIALVYETSNFKLLDGVLHAVPGTGMWECVDFYPVSTLDANGLDTSYNGPGIKHVLKASLDDNKQDHYVIGTYDPVKNKFSPDNPDLDCGIGLRLDYGRYYASKTFYDPKKQRRVLWGWIGETDSESADLQKGWASVQSIPRTVLFDKKTGTHLLQWPVAEIESLRSGDPKVKEVNLQPGSIELLHVDSAAQFDIEASFEVDRVTLEGIIEADVGYNCSTSGGAASRGILGPFGVVVIADQTLSELTPVYFYISRGADGRAEAHFCADQTRSSEAPGVAKQVYGSSVPVLDGEKHRMRLLVDHSIVESFAQGGRTVITSRIYPTKAVNGAARLFVFNNATGAIVTASLKIWSLESADIRSFPLQKL

SEQ ID NO: 11410 - protein, 173 aa, Flaveria pringlei
MASIPATVATVAQANMVAPFTGLKSNAAFPVTKKVNDFSTLPSNGGRVQCMKVWPPLGKKRYETLSYLPNLTEVQLAKEVDYLLRNKWVPCLEFELEHGFVYRENARSPGYYDGRYWTMWKLPMFGCTDSAQVMKELQECKKEYPQAWIRIIGFDNVRQVQCISFIASKPDGF

SEQ ID NO: 11411 - protein, 204 aa, Schizosaccharomyces pombe
MLASIEEAVNDFRDGKFLIVLDDETRENEGDLIIAGCKVTTEQMAFLVRHSSGYVCVPMTGERLDSLEIPMMVDNNEDRMRTAYAVTLDYANGTTTGISAHDRALTTRQLANPEVTSPREFNRPGHIVPLRARDGGVLERDGHTEAAVDLCKLAGLPPVGAICELVREEDGLMSRFDDCISFGKKWGIKVITIESLKSYIKGRM

SEQ ID NO: 11412 - protein, 222 aa, Brassica rapa subsp. pekinensis
MAAPPARARADYDYLIKLLLIGDSGVGKSCLLLRFSDGSFTTSFITTIGIDFKIRTIELDGKRIKLQIWDTAGQERFRTITTAYYRGAMGILLVYDVTDESSFNNIRNWIRNIEQHASDNVNKILVGNKADMDESKRAVPTAKGQALADEYGIKFFETSAKTNLNVEEVFFSIGRDIKQRLSDTDSRAEPATIRISQTDQELDCAGHTEVCMLWKLKTNYIN

SEQ ID NO: 11413 - protein, 168 aa, Xylella fastidiosa Ann-1
MTSIYTFTFTRLDGRPQALADWRGQVLLLVNVASHCGFTPQYAGLEMLWQRYRDAGLIVIGFPCDQFAGQEPGDEAKIAEFCTLTYGVDFPMAAKIKVNGADAHPLWQWLKHRRRGLFGVAAIKWNFTKFLIGRNGQPIARYSPIKSPEQLEVHIVRALGEEGGGNTH

SEQ ID NO: 11414 - protein, 182 aa, Fagus crenata
MASSMISSATVATVSRATPAQATMVAPFTGLKSTAAFPATRKSNNDITSLASNGGRVQCMKVWPPLGLQKFETLSYLPPLSIESLAKQIEYLILKGWIPCLEFELEHPFVYRENNRSPGYYDGRYWVMWKLPMFGCTDATQVLAELQEASKTYPTSHIRIIGFDNKRQVQCISFIAYKPPAK

SEQ ID NO: 11415 - protein, 363 aa, Pseudomonas fluorescens Pf-5
MALNSIEELVEDIRQGKMVILMDDEDRENEGDLIMAAECCKAEHINFMAKHARGLICMPMSRERCELLKLPLMAPRNGSGFGTKFTVSIEATEGVTTGISAADRARTVQAAAAKDAKAEDIVSPGHIFPLMAQPGGTLARAGHTEAACDLARMAGFEPSGVICEVMNDDGTMSRRTELEAFAAEHNIKIGTIADLIHYRMIHERTVQRIAEQPLDSELGQFNLVTYRDSVEGDVHMALTLGEICAEEPTLVRVHNMDPLRDLLMVKQPGRWSLRAAMATVAEAGSGVVLLLGHPLDGDVLLAHIRETAEHQPAKKPTTYSIVGAGSQILRDLGVRKMRLMSAPMKFNAISGFDLEVVEYVPSE

SEQ ID NO: 11416 - protein, 233 aa, Prochlorococcus marinus str. MIT 9312
MTSNKIIEKSEVREYFNGTGFERWNKIYSKSDEINTVQKNIRKGHQKTVDDVVSYIKNYPELTKKSFCDAGCGVGSLSIPLLRLGIKDLQVSDISCEMIKETKKRIKELALNKAKIKYEVCDLEQLKGLFDVVVCLDVFIHYPQPVAEEMVQHLCDLSKEKLIVSFAPYTPVLAVLKNIGKLFPGPSKTTRAYTLKEKGIINAAKEKGFNVVKTKLNQAPFYFSKLIVFEKNK

SEQ ID NO: 11417 - protein, 40 aa, Chlamydomonas reinhardtii
PVSGECVRAWDEVEELSAAASHARDRKKESDPLEDYCKDN

SEQ ID NO: 11418 - protein, 33 aa, Ceratodon purpureus
EESIKSAQETCADDPVSGECVRAWDEVEELSAA

SEQ ID NO: 11419 - protein, 342 aa, Ginkgo biloba
MAPQAYPTAGQTTTVCVTGAAGFMASWLVKRLLEKGYIVHATVRDPENKAKVSHLLNLPGATDRLKLFRAELCEDGSFDAAVAGCNGVFHVATPTEFMPKDPENDLIKPAIEGTLNVLKSCTKVDSIKRVVVTSSAATVSINNSSEQNQYIDESCWTDVNFLTSQKPPGWAYPVSKTLAEQAALKYAEEHSLDVVTVIPVLVVGPAVTPTVPSSVELALSLITGDEFKMGALKGMQFVSGSISLVHIDDVCSAQIFLMEKPSAQGRYICFPVNTGIPQLAEFLSKRYPQYKVPTKFDDVPATPKLTISSQKLLDCGFSFKYGIEDIYDQAIEYMKTKGLLTC

SEQ ID NO: 11420 - protein, 290 aa, Pseudomonas fluorescens Pf-5
MSQETPYIFDARTADFDQSVIENSFHKPVLVDFWAEWCAPCKALMPMLQQIAESYQGELLLAKVNCDIEQDIVARFGIRSLPTVVLFKDGQPVDGFAGAQPESAVRAMLEPHVQMPPPPAADPLEQAEALFAEGRIGDAEALLKVLLGEDNSNAKALILYARCLAERGELGEAQTVLDAVKSDEHKAALAGAKAQITFLKQAADLPDAAELKARLAKDPQDDEALYQLAIQQLARQQYEAALEALLKLFMRNRSYNEGIAHKTLLQVFDLLGNDHPLVTAYRRKLFAALY

SEQ ID NO: 11421 - protein, 400 aa, Thermoplasma volcanium GSS1
MYEFKLPDIGEGVTEGEIVKWDVAEGDEVKKDQDLVEVMTDKVTVKIPSPVNGKISKILYKEGQVVPVGSTLVQIDTGEETSQQTMAEEHAELKPQTTAAQQIAIETVPAGKVLASPAVRRIARENGIDLAKVKGTGDNGRVTLDDLDAYMRGETKAKAPEKPIEAAKPAEVPPVQRSPGREEILEMHGLRRIIFDKMTKAKQIMPHFTVVEKVDVTGMISIIESAKSSGKKVTITGYIARIVPIVLKQYPYLNAIYDEANRRYLIKKYYNIGIAVDTPDGLNVFVVKDADRKSMYEITAEITDKAERARNNQLKIDEVQDSTFTITNVGTIGGVLSTPIINYPEVAILGVHRVMDENGKKIMYLSLSCDHRLIDGAVATRFIMDLKKIIEDPNSLIYEM

SEQ ID NO: 11422 - protein, 259 aa, Geobacter metallireducens GS-15
MSAKQIAVRHDDAIAVVSLARPESRNVLSRDLVLGLLSTFTSLKDDGRVKGIVVTGEGKSFCAGADISEMARMSPAEASSFAELGQRLMFAVERVGKPVVAAVNGHAFGGGLELALACDFIVAAESAVFAAPEVLLGVMPGFGGTQRLPRLIGKSRAKEMIFTGERINAAKAHSIGLVNRVVSDERLLAETVSLVKNICNRGLLSLRVAKEVIDAGAGIDLATACLMERDAFALCFSTDDQKEGMRAFMEKREPRFTGR

SEQ ID NO: 11423 - protein, 353 aa, Oryza sativa (japonica cultivar-group)
MGEAVKGPVVVTGASGFVGSWLVMKLLQAGYTVRATKERLTLWKADLGEEGSFDAAIRGCTGVFHVATPMDFESEDPENEVVKPTVEGMLSIMRACRDAGTVKRIVFTSSAGTVNIEERQRPSYDHDDWSDIDFCRRVKMTGWMYFVSKSLAEKAAMEYAREHGLDLISVIPTLVVGPFISNGMPPSHVTALALLTGNEAHYSILKQVQFVHLDDLCDAEIFLFESPEARGRYVCSSHDATIHGLATMLADMFPEYDVPRSFPGIDADHLQPVHFSSWKLLAHGFRFRYTLEDMFEAAVRTCREKGLLPPLPPPPTTAVAGGDGSAGVAGEKEPILGRGTGTAVGAETEALVK

SEQ ID NO: 11424 - protein, 85 aa, Glycine max
  misc_feature (79)..(79): Xaa can be any naturally occurring amino acid
VCISMKEEDLERLDLHLMVNSQYNDEKLRTAFTVTVDAKHGTTTGVSAHDRATTVGILASKDSQPSDFNRPGHIFPLKXQEGGVL

SEQ ID NO: 11425 - protein, 538 aa, Zea mays
  misc_feature (62)..(62): Xaa can be any naturally occurring amino acid
  misc_feature (70)..(70): Xaa can be any naturally occurring amino acid
  misc_feature (416)..(416): Xaa can be any naturally occurring amino acid
RHSPRHSLSVVAPHQSSPPVRGQIKRWPRRFTSPPRRRRRRVARQRRQTTRATASATDRPRXVVSPKRRXLPLRKVPGDYGPPVLGAIRDRFEYFYGPGGRDGFFNSRVRAHGSTVVRLNMPPGPFVARDPRVVALLDAASFPVLFDTSLVDKTDLFTGTFMPSTELTGGYRVLSYLDPAEPNHGPLKTLLFYLLSHRRQHVIPKFREVYGDLFGLMENELARVGKADFGHYNDAAAFSFLCQALLGRDPAESALQGDGPKLITKWVLFQLSPLLSLGLPKHVEDSLLHSFRLPPALVKKDYDRLADFFRDAARRVVDEGERLGVAREEAVHNILFAMCFNSFGGMKILFPSLVKWLGRAGGRAHGRLATEVRDAVRAHGGEVTMKALAEMPLVKSAVYEALRIEPPVAMQYGRAXQDMVVESHDYGFEVREGEMLFGYQPMAPKDPRVFARAEEYVPDRFLGEDGAQLLRHVVWSNGPETASPALQDKQCAGKDFVVLIARLLVAELFLRYDSFDVQVGASALGSSVTITSLKKATF

SEQ ID NO: 11426 - protein, 278 aa, Enterococcus casseliflavus
  misc_feature (79)..(79): Xaa can be any naturally occurring amino acid
GAILVVSAADGPMPQTREHILLSRNVGVPYIVVFLNKMDMVDDEELLELVEMEVRDLLSEYDFPGDDVPVIAGSALKAXEGDASYEEKIMELMAAVDEYVPTPERDTDKPFMMPVEDVFSITGRGTVATGRVERGQVRVGDEVEIVGIAEETAKTTVTGVEMFRKLLDYAEAGDNIGALLRGVAREDIQRGQVLAKAGTITPHTKFKAEVYVLTKEEGGRHTPFFTNYRPQFYFRTTDVTGVVELPEGTEMVMPGDNVTIDVELIHPIAIEDGTRFSI

SEQ ID NO: 11427 - protein, 679 aa, Pseudomonas fluorescens Pf-5
MSSSSPWHAGERQLQARAGVAERMEAFGTKVIRQAMPDQHRQFYGQLPFILVGAVDAQGNPWTSILEGPPGFAQAPEATRLRLGSLPAADDPVQLQEGAALGLLGIELHTRRRNRFNGRVSAVDRHGFSVTVQQAFGNCPQYIQQRELQQVALSDPASRPAQYRDGLDPEARALIGGADTFFVASYVDLDGQRSVDVSHRGGQAGFVRVEGNCLTIPDFAGNLHFNTLGNLLLNPRAGLLFIDFHSGELLQLSGRTEIIHDGPLVKAFQGAERLWRFTVERLVRRPAALSLRWQLQGFSPNSLLTGSWPQAEARLRATALGQQWRPLRVTRIEDESSSIRSFYLEPADAAGAPSFVPGQHLPVQVVLDGQPLIRTYSLSSAPSDDFLRISVKREGQVSRHLHQALKVGDLLQARAPQGRFTADALSSQPLVLLAAGVGITPLLSMLREVLYQGLRTRHTRPTWLIQGSRTLAEQPFAKELQTLLAQAGDSVRLLRLLSQPEAGARPGAGFDHCGRIDVQLLLAQPDLDLDRADFVLCGPGAFTQGLYDSLRDLDIDDRQIHAETFGPSTLRRRPDPEAVPFAQPPAATRAVAVRFQQAGRELSWEPASGSLLQLAESAGLHPPFSCRGGSCGTCQTRLISGQVNYPQVPAQLPEPGQVLICCAVPAAVDNLVPALVLDL

SEQ ID NO: 11428 - protein, 558 aa, Streptomyces coelicolor A3(2)
MAQADGETRTVIMTVDDDPGVSRAVARDLRRRYGATYRIVRAESGESALDALRELKLRGDLVAVILADYRMPQMNGIEFLEQALDVYPGARRVLLTAYADTNAAIDAINVVDLDHYLLKPWDPPEEKLYPVLDDLLQAWRAGDHRPVPSTKVVGHRWSARSSEVREFLARNQVPYRWYSSDEPEGRRLLSAAGQDGQRLPVVITPDGTPLVEPEAPELAARVGLATTPTSDFYDLVVIGGGPAGLGAAVYGASEGLRTVLVERSATGGQAGQSSRIENYLGFPDGVSGGQLTERARRQAARFGAEILTAREVTGLEANGAARVVRFSDGSAIAAHSVILATGVSYRQLTAPGTEDLAGCGVFYGSALTEAASCQGHDVYIVGGANSAGQAAMYLARGAKSVTLLVRGGSLEASMSYYLIQQIEETPNIRVRCGTLVEGAHGDGHLERLTLRDAASGATELVDAQWLFVFIGAAPLTDWLDGTVLRDERGFILAGPDLTPDGRPPAGWELDRPPYHLETSVPGVFVAGDARAESAKRVASAVGEGAMAVMLVHRYLEQS

SEQ ID NO: 11429 - protein, 604 aa, Desulfotalea psychrophila LSv54
MLLLAGAFRAWAMMLVSIGIIIKILLEKRMGERIVIIGGVAAGPKAACRIKRLSPRAEVVVIDQDALISYGGCGIPYYVSGDVADEKELRSTSFHMLRDEFFFDKAKRVTAMTSTRAISIDRAEKTVLLQDVKTGAEETVSYDKLLLATGSQPFILPIPGVDLDGVFTVTDMHKAIEIKARIAKGQVGKAVVIGGGAIGIEMAEALKDLWGVETSLVEFQKQLLPNILDWPMAAMLAQHMDDKDVHLYLGESAAEIVAGDADHVAGVRLSSGKTLDCDMVIMATGVRPRSELAKEAGLHVSSKGGIVVNERMQTSDPTIYAAGDCVEIPHLVSGRSFYAPLGSLANKEGRVAADNIVGIPTIFKGAIGSFILKAFDFSAASTGLSLESALAEGFDADVSLTSSSDRAHFFPTQQVLCLQLVFDRRTRRVLGLQGIGGASDALLARIDAAAVAITAGATVDDFGNIEMAYAPPFSTAIDAINAAGYVAENLIDGRMRQMRLELFYAWMENVTSQPDWLVLDVRHPKQAKPFMEKYGDLWLNLPYEQVRDRYAELPTDKTLVIFCNAGSRSFEIQRLLDSVGLENNIVLAGGYNFIKRMGADWLPV

SEQ ID NO: 11430 - protein, 151 aa, Glycine max
MGAFTEKQEALVNSSFEAFKANLPHHSVVFFNSILEKAPAAKNMFSFLGDAVDPKNPKLAGHAEKLFGLVRDSAVQLQTKGLVVADATLGPIHTQKGVTDLQFAVVKEALLKTIKEAVGDKWSEELSNAWEVAYDEIAAAIKKAMAIGSLV

SEQ ID NO: 11431 - protein, 278 aa, Enterococcus casseliflavus
GAILVVSATDGPMPQTREHILLSRQVGVKHLIVFLNKTDLVDDDELIDLVEMEVRELLTEYDFPGDDIPVIKGSALKALEGDPDAEAAILTLMDTVDEYIPTPERDTDKPLLLPIEDVFSITGRGTVASGRIDRGMVKVGDEVEIVGIKPETQKAVVTGVEMFRKTMDFGEAGDNVGVLLRGITRDEIERGQVLAKPGSITPHTKFQAEVYVLTKEEGGRHTPFFNNYRPQFYFRTTDVTGNIVLPEGTEMVMPGDNVTIDVELIHPIAVENGTTFSI

SEQ ID NO: 11432 - protein, 924 aa, Campylobacter coli RM2228
MNRRDFIKNTAIASAASVAGLSVPRPVFGAQEEEWKWDKAVCRFCGTGCGIMIARKDGKIVAIKGDPAAPVNRGLNCIKGYFNAKIMYGEDRLVMPLLRMNDKGEFDKKGKFKQVSWQRAFDEMEKQFKKAYNELGVTGIGIFGSGQYTIQEGYAALKLAKAGFRTNNIDPNARHCMASAVVGFMQTFGVDEPSGCYDDIELTDTIITWGANMAEMHPILWSRVSDRKLSNLDKVKIVNLSTFSNRTSNIADIEIIFKPNTDLAIWNYIAREIVYNHPEAMDKKFIKDHCVFATGYADIGYGMRNNPNHPKFKESEKDTVAKENAITLDEEEATSLSYLGVKAGDKFEMKHQGVADKNWEISFEEFKKGLAPYTLEYTAKVAKGDDNESLEDFKKKLQELANLYIEKNRKVVSFWTMGFNQHTRGSWVNEQAYMVHFLLGKQAKPGSGAFSLTGQPSACGTAREVGTFSHRLPADMVVANPKHREISEKIWKVPAKTINPKPGSPYLGIMRDLEDGKIKFAWVQVNNPWQNTANANHWITAARDMDNFIVVSDCYPGISAKVADLILPSAMIYEKWGAYGNAERRTQHWKQQVLPVGAAMSDTWQILEFAKRFKLKEVWKEQKVDGKLTLPSVLEEAKAMGYSEDDTLFDVLFANKEAKNFTSNDAVMKDYDNSEVKGDERKIQGSDGKEFKGYGFFVQKYLWEEYRKFGLGHGHDLADFNTYHQVRGLRWPVVNGKETQWRFNTKFDYYAKKAAPNSDFAFYGEFNKMLTNGDLIAPKDEKEHSIKNKAKIFFRPFMKAPERPNEEYPFWLSTGRVLEHWHSGTMTMRVPELYRAVPEALCYMSEKDGEKLGLNQGDLVWVESRRGKVKARVDMRGRNKPPVGLVYVPWFDENVYINKVTLDATCPLSKQTDFKKCAVKIYKA

SEQ ID NO: 11433 - protein, 313 aa, Bradyrhizobium japonicum USDA 110
MRRGNPVTIIDQGNGAAGPAAADLIKDTTTQTFVKDVIEESKRQPVLIDFWAEWCGPCKQLTPVLEKAVKAAKGKVKLVKMNIDQHPAIPGQMGIQSIPAVIAFVNGQPADGFMGAVPESQLNAFIEKLTKGVTAPGEPNIAEILQEAEAVLAEGDAAAAAQIYAEVLSHDSTNIAALAGLAKCYTVSGAMEQAKQTLAMVPESKRNDPAVKAVQTAIDLAEQAEQLGPVAELEQKVAANPLDHQARFDLATALNAQGNRAAATEQLLAIIKRDRKWNDDGARKQLVQFFEAWGGTDDATVEGRKRLSTILFS

SEQ ID NO: 11434 - protein, 654 aa, Zea mays
MDGCDCIEPLWPTDDLLVKYQYISDFFIALAYFSIPLELIYFVKKSSFFPYRWVLIQFGAFIVLCGATHLINLWTFTTHTKTVAMVMTIAKISTAVVSCATALMLVHIIPDLLSVKTRELFLKNKAEELDREMGLIRTQEETGRHVRMLTHEIRSTLDRHTILKTTLVELGRTLGLEECALWMPSRSGSSLQLFHTLRHQITVGSSVPMNLPVVNQVFSSNRAIIIPHTSSLARVRPLAGRYVPPEVAAVRVPLLHLSNFQINDWPELSAKSFAIMVLMLPSDSARKWHVHELELVEVVADQVRAVSFAMVTITYYFHPEKDVAVALSHAAILEESMRARDLLMEQNVALDLARREAEMAIRARNDFLAVMNHEMRTPMNAIIALSSLLLETELTPEQRLMVETVLKSSNLLATLINDVLDLSKLEDGSLELEIKAFNLHAVFKEVMGFIKPIASIKRLSVSVMLAPDLPLCAIGDEKRLMQTILNISGNAVKFTKEGHITLVASIVKADSLREFRTPEFHPTASDEHFYLKVQVKDTGCGVSPQDLPHVFTKFAHPQSGGNRGFNGSGLGLAICKRFVSLMGGHIWIDSEGTGRGCTATFVIKLGVCDNTNTYQQQLVPLVWPSSADSNLSAPKVLPDGRGSVSLKSRYQRSV

SEQ ID NO: 11435 - protein, 342 aa, Yersinia pestis KIM
MGRWWRYKWITFHPSLTHADNTEKQERTATIIGAGIGGFPAIAHAVRTSDSRGPKRLSPFTVPSFLVNLAAGHVSIKHHFKGPIGAPVTACAAGVQAIGDAVRMIRNNEADVALCGGAEAVIDTVSLAGFAAARALSTHFNSTPEKASRPFDTARDGFVMGEGAGLLIIEELEHALARGAKPLAEIVGYGTSADAYHMTSGAEDGDGAYRAMKIALRQAGITPEQVQHLNAHATSTPVGDLGEINAIKHLFGESNALAITSTKSATGHLLGAAGGLETIFTVLALRDQIVPATLNLENPDPAAKGLNIIAGNAQPHDMTYALSNGFGFAGVNASILLKRWVD

SEQ ID NO: 11436 - protein, 163 aa, Triticum aestivum
RGRGRGQTPKKRGDERGGGATLGSTAWEAFRRHFSRKRAVDIRRINPKVPKEEAVAISGRLLQILADHGPLTVGSTWNHAKDAAIDGLNSKTHMKILLKWMWGRRIIKLSCTQAGNTKKFLYSPFTAEDTEAAEEPAEEQPKRKGWKGKHPKYQTKKQPATAA

SEQ ID NO: 11437 - protein, 384 aa, Tropheryma whipplei str. Twist
MQLASQSPTQTRSERFCSENPSDFPEPSNRDLAWKYAPIPIVENFLSKDFYPYEYHISLAGSDAGNVKPAIDRPIFRWSTKENVALGRAGLPEDRASAFAWQRTQRVLLVDLEGTESIILDRRFERCTVAHTIIHVKAHADAKLFINNHGYDGLIENLEIILEDNAILQLISCQDWDEASVHLAYHFVYFGKNSRLKHCSATTGGRFVRLNPAFQLAEEGSEVESLGIYFAQNKQHFEHQVYVHHAAQDTKSEINYRGVLSGNGARTAWVGDVLIDTLARNSDSYEQNRNLMIGSGTRADSVPNLEIKNGNILGAGHASATMRFDDEHLFYLQSRGIDKNQALRMVVSGFVHGMLQKSDIGCGGDVLLCLFSKKLDALVSCIGD

SEQ ID NO: 11438 - protein, 957 aa, Bradyrhizobium sp. BTAi1
MTTPLKPLDDAATSFARRHIGPSPRDVAAMLETVGAKSVAELMAQTLPGTIRQATPLTLEPALSEVEAIGHMRALAAQNQVFTSLIGQGYSGTIMPAVIQRNILENPAWYTAYTPYQPEISQGRLEALFNFQTMICDLTGLDVANASLLDEGTAAAEAMALAERSARAKTKAFFVDRNVHPQTLAVLRTRAEPLGWQLIVGDPVKDLDGAEVFGGLLQYPETTGALRDPRADIAKLHDKGALAILAADLLALTVIASPGELGADIAIGSAQRFGVPMGYGGPHAAYMAVRDALKRSLPGRIVGLSVDSRGAPAYRLALQTREQHIRREKATSNICTAQVLLAVIAAMYAVYHGPDGLKSIARTVHRRAAVLAAGLRKLGFAPASDSFFDTVLVEAGANCDEIIARAESQRINLGRDGSRLRIALDETTTADVVEAVWRAFGGELSYAAIEAEARDAVPAELKRQRPFLTHPVFHAHRSETEMLRYLRKLADRDLALDRAMIPLGSCTMKLNATTEMIPLTWPEFSSLHPFVPRAQAAGYHTMFADLQDWLCRISGYDAVSLQPNSGAQGEYAGLLAIRGYHAARGEGHRTICLIPSSAHGTNPASAHMVGMEVVVVGCDSNGNVDLADLKAKAELHSAKLAAIMITYPSTHGVFEEHIRDICDIVHAHGGQVYLDGANLNAQVGLSRPGDYGADVSHFNLHKTFCIPHGGGGPGMGPIGVKAHLAPFLPGHPATDAATPSPVGPVSAAPYGSASILTISYIYMLLMGGEGLTRATEIAILNANYVAARLDPHFPVLYRNERGRVAHECIIDPRPLKQTCGVTVDDIAKRLIDYGFHAPTMSFPVAGTLMIEPTESESKAELDRFCDAMIAIRKEIAAVEQGRFTIEASPLRHAPHTVHDIADDDWNRVYRRSEGCFPEGTSRTDKYWCPVGRVDNVYGDRNLVCSCPPIGDYAQAAE

SEQ ID NO: 11439 - protein, 473 aa, Tropheryma whipplei str. Twist
MSENLIANRPDLDSLGKYEYGWHDSDRAGSDARRGLSRDVVEEISETKGEPDWMRSMRLRALEIFYRKPMPNWGADLTGIDFDQIKYFVRSTERQANSWEDLPEEIRNTYERLGIPDAERQRLVAGVAAQYESEVVYHQINAELERQGVVFLDTDTALKEHPDILRKYFGSVIPAGDNKFAALNTAVWSGGSFVYVPEGVKVEIPLQAYFRINTENMGQFERTLIIADKNSYVHYVEGCTAPIYSSHSLHSAVVEILVKEGARVRYTTVQNWSTNVYNLVTKRAYVSKNSTMEWIDGNIGSKVTMKYPSVYLADEGAKGEILSVAFAGPGQYQDAGAKAIHIAPRTKSAIVSKSIARGGGRTAYRGEVRVEEGAKDSANSVRCDALLVDTISRSDTYPAIDIRRDDAQLAHEATVSKVNEDQLFYLMSRGLEEAESVAMIVRGFIDPIVRELPMEYAMELNKLIEMSMEGAVG

SEQ ID NO: 11440 - protein, 312 aa, Bradyrhizobium japonicum USDA 110
MTDWTTADIPSLSGRTAVVTGATGGLGYETAMALAGAGAIVILTGRNDAKGLRAIEGICERFPDALIAYEHLDLASLSSVADFAKRFAAGNEQLDLLVNNAGVMALPKRQQTEDGFEMQLGTNYLGHYALTARLLPQLRRAKASRIVNLSSLAHRSGAINFDDLQGKRSYRPWRAYCQSKLAMLMFALELQRRSLAAGWGVTSVAAHPGYARTDLIANGPGANTLQWRVGRWLQPFISQSAAEGALPTLFAATSPAAEPGGYYGPNRFYELKGPPAPAKITPQARDFAAAAMLWDVSATLTGVSFDDIAVAA

SEQ ID NO: 11441 - protein, 410 aa, Staphylococcus epidermidis ATCC 12228
MSPLIIGGLKLNRSVLKFGGSSVSDFKKIKNIAEMLKTRIEDGEELIVVVSAMGKTTDQLMNNVSSLTPTPKDQELALLLTTGEQQTVSYLSMVLNDIGVNAKAMTGYQAGIKTVGHHLKSKIAEINPNIFNEAFKNHDILVVAGFQGINEDFELTTLGRGGSDTTAVALAASNQTPCEIYTDVDGVYATDPRILNEAKRLEYVSYEEMMEMSALGAGVLETRSVELAKNYDIPLYLGRTLSNVKGTWIMSKSDLLEKKAVTGVALDTHMMHVTISYPLPDNQLLTQLFTALEEESVNVDMISQIVNLEGLQLSFSIKDSDAHQISSILENLSTHFSALDYKINEAYVKISLIGSGMRDMSGVASKAFTTLINSDIPFYQTTTSEISISYVIDEENGEKAVEELYHAFEI

SEQ ID NO: 11442 - protein, 80 aa, Arabidopsis thaliana
  misc_feature (6)..(6): Xaa can be any naturally occurring amino acid
  misc_feature (8)..(8): Xaa can be any naturally occurring amino acid
  misc_feature (12)..(12): Xaa can be any naturally occurring amino acid
  misc_feature (18)..(18): Xaa can be any naturally occurring amino acid
  misc_feature (20)..(20): Xaa can be any naturally occurring amino acid
  misc_feature (31)..(32): Xaa can be any naturally occurring amino acid
  misc_feature (37)..(37): Xaa can be any naturally occurring amino acid
  misc_feature (41)..(41): Xaa can be any naturally occurring amino acid
  misc_feature (43)..(43): Xaa can be any naturally occurring amino acid
  misc_feature (51)..(51): Xaa can be any naturally occurring amino acid
  misc_feature (58)..(58): Xaa can be any naturally occurring amino acid
  misc_feature (60)..(60): Xaa can be any naturally occurring amino acid
  misc_feature (64)..(64): Xaa can be any naturally occurring amino acid
  misc_feature (67)..(67): Xaa can be any naturally occurring amino acid
  misc_feature (69)..(72): Xaa can be any naturally occurring amino acid
  misc_feature (74)..(75): Xaa can be any naturally occurring amino acid
  misc_feature (78)..(78): Xaa can be any naturally occurring amino acid
PYLPLXRXASPXQATMVXPXNGLKSSAAFPXXRKANXDITXIXSNGGRVNXMHVWPPXGXKKFXTLXYXXXXTXXELXKE

SEQ ID NO: 11443 - protein, 463 aa, Legionella pneumophila str. Paris
MDLFRKKDIKGSLDNESHLAKCLSVFDLTFLGVGAIIGAGIFVLTGIVAATISGPAVIFSYVVAGFACAFAALSYAELAASIGGCGSAYGYAYAGFGELIAWIVGWDLLLEYSIAVSAVSIGWSGYANDFLMALKIFIPTHLLHGPADGGDLNILAILIIAVLTTLLIVGVKSSSRFNNIMVFVKLLVIFIFIAIAFGEVKVENWSSFMPYGWAGVMKGASIIFFAYVGFDAVSTAAEEAINPQRDLPIGIIASLAICTVIYILVSGLLTGIAHYTTLNVSSPISHVLLVLGYKTAAGLVGVGAIAGLTTVMLVLFYGLTRVFLAMSRDGLLPRFLSKTNEHTKTPIRIILLCGILMASLASVTPIGTLAELVNIGTLFAFIVVCGGVLYLRRTHPDMERPFKTPFMPYVPILGIISCFYLILNLPWVTILRFIIWMLVGIAVYFAFSRTNSALSVEGDCAAE

SEQ ID NO: 11444 - protein, 395 aa, Pseudomonas syringae pv. phaseolicola 1448A
MLSTAHRDIIKATVPILETGGEALTTHFYRIMLNDYPQVRPLFNQANQANGAQPRALANAVLMYARNVDRLENLGSLAAQIVNKHVALQILPEHYPIVGACLLRAIREVLGAEIATDAVIDAWAAAYQQLADMLISAERDVYESIAAAPGGWRGGRLFKVVRKVPESSEIMSFYLQPVDGKPVIAHKPGQYIGIRLNTEGGEIRRNYSLSAPANGVSYRISVKREQGGVASGYLHDQVAVDDTLELFPPSGEFVLIEGSKPLVLISGGVGITPTLAMAEAALQAGGRHVVFIHYARNASVQAFQAVIDDWRERYAQFAAHVVYSEAKAGDVPANTVTGLASTEHLQQWLPEDTDVEAYFLGPKPFMVFMKRALHELGVPDRQSHYEFFGPAEALA

SEQ ID NO: 11445 - protein, 322 aa, Xanthomonas axonopodis pv. citri str. 306
MSASSASPAKHSRLLILGSGPAGWTAAVYAARANLKPVVITGLQQGGQLMTTTEVDNWPGDPHGLMGPDLMSRMQAHAERFETEVIFDHIHTADLSQRPFRLIGDGAEYTCDALIIATGATAKYLGIPTEEAFKGRGVSACATCDGFFYKDQDVVVVGGGNTAVEEALYLSNIARKVYLVHRRDTLRAEKIMQDKLFAKVAAGKIETVWHHAIDEVLGNDAGVTGVRVKSTIDGSTRDIDAHGFFVAIGHHPNTQLFDGQLAMNNGYLEIRSGLNGAATETSVAGVFAAGDVADQHYRQAITSAGFGCMAALDAERFLDKSA

SEQ ID NO: 11446 - protein, 249 aa, Xylella fastidiosa Ann-1
MTRKLVLLRHGQSQWNSMNRFTGWVDIGLTEQGHQEATMAGHLMKEEGLEFDVAHTSLLKRAIHTLQDALKALDQDWLPIYKSWRLNERHYGALQGLDKIDTAAKHGEEQVNIWRRSYDIQPPPIDLDDPSHPMRDRRYAALDRKVLPVTESLKNTLERVLPYWNDAIAPQLNDNKTVLISAHGNSLRALYKYLNQESDEKILNVNIPTGIPLLFELSDTLQVVSYRYLGDPDAAQRAAEMVANQGKAK

SEQ ID NO: 11447 - protein, 426 aa, Streptomyces fradiae
MSGAHSRRVVITGIGVTAPGGVGSKNFWSLLSDGRTATRRISFFDPSPFRSQVAAEADFDAELLGLSPQEIRRMDRAAQFAVVTAREAVADSGLEFASLDPHRTGVTVGSAVGATMGLDQEYRTVSDSGRLDLVDHEYAVPHLYNYLVPSSFAAEVAWAVGAEGPATVVSTGCTSGLDAVGYATELIREGSADVMVAGAADAPISPITVACFDAIKATTPRNEDPEHASRPFDGTRNGFVLGEGSAVFVLEELDSALRRGAHVYAEIAGYATRSNAFHMTGLRPDGREMAEAIRIALDEARLNPEDIDYVNAHGSGTKQNDRHETAAFKRSLGDHAYAVPVSSIKSMVGHSLGAIGSIEIAASALAMEHGVVPPTANLHTPDPECDLDYVPRTARDWKTDAVLSVGSGFGGFQSAIVLARPDRRTA

SEQ ID NO: 11448 - protein, 629 aa, Cytophaga hutchinsonii
MCGITGIFAFNQIGAFYMINLGKSIELLAHRGPDGRGTFVEELIALGHRRLSVIDTINGRQPMHDSTDRYVLTFNGEIFNYKILREQLIQEAGYTFTTDSDTEVLLNAYIHWGEACLLKLNGFFAFAIYDKQKHEIFVARDRMGVKPLLYYKDEDKFIFASEMKAVLAYNVPKEIDWVSVQQYFTLGYIPEPDSIFKDVKKLEAGSYLLINKAGVISKKYYEIPSSTQTKHQHSFEQAAAHVKELVDASVKDRLVADVPVGAFLSGGLDSSIVVASASKHVENLHTFSVGFKGADFYDETKSAELVAKTFNTSHTTFSLSQTELADNILPCLESMSEPFGDTSSLPLFVLSKKVAPSMKVILSGDGADELFGGYNKHRAEWLIKNPNWQIRFAQLIQPVVKILPGNRNTPMGDKIRQAQKLIEGLTLTDAERYYRWCSVFSEEAHKEMFQENIADNEEYKIRKGGILHAFKKNPYDLNRILYTDLNLVLGSDMLHKVDSMSMANGLEVREPMIDYRLVEYVSTLPSSYKINKNGGKQVLKHAYKDELPAEILSKAKHGFDVPLTKIFSKELKAWILDELLSQKFIEQQHVFKWSYIKNIRNAIDKNSNLDESKIWPLITFQFWWKKFMN

SEQ ID NO: 11449 - protein, 309 aa, Lycopersicon esculentum
MAAAARISASSTSRTFYFRHSPFLGPKPTSTTSHVSPISPFSLNLGPILRSRRKPSFTVCFVLEDEKLKPQFDDEAEDFEKKIEEQILATRLAEKLARKKSERFTYLVAAIMSSFGITSMAVMAVYYRFSWQMEGGEVPVTEMLGTFALSVGAAVGMEFWARWAHKALWHASLWHMHESHHKPREGPFELNDVFAITNAVPAIALLNYGFFHKGLIAGLCFGAGLGITVFGMAYMFVHDGLVHKRFPVGPVANVPYLRKVAAAHSLHHSEKFNGVPYGLFFGPKELEEVGGTEELEKEVIRRTRLSKGS

SEQ ID NO: 11450 - protein, 178 aa, Glycine tomentella
MASSMISSPAVTTVNRAGAGTVAPFTGLKSMAGFPTRKTNNDIASIASNGGRVQCMQVWPTTGKKKFETLSYLPDLDDAQLAKEVEYLLRKGWIPCLEFELEHGFVYRENHRSPGYYDGRYWTMWKLPVFGCTDASQVLKELQEAKTAYPNGFIRIIGFDNVRQVQCISFIAYKPPSF

SEQ ID NO: 11451 - protein, 207 aa, Triticum aestivum
VTSRQGCKKTVSYRSGIPGISSTHASAAVFPNGTTGHALDILARTPLWKSGLDYRHGTGHGIGSYLNVHEGPHLISFRPSARNVPLQASMTVTDEPGYYEDGNFGIRLENVLIVKEADTKFNFGEKGYLSFEHITWAPYQTKLINTALLTPAEIEWVNLYHSDCQKILESYLNVQEKEWLKKATQPYNCEQLTQPLHGYCCWDPNVK

SEQ ID NO: 11452 - protein, 178 aa, Glycine tabacina
MASSMISSPAVTTVNRAGAGTVAPFTGLKSMAGFPTRKTNNDIASIASNGGRVQCMQVWPTTGKKKFETLSYLPDLDDAQLAKEVEYLLRKGWIPCLEFELEHGFVYREHHRSPGYYDGRYWTMWKLPMFGCTDASQVLKELQEAKTAYPNAFIRIIGFDNVRQVQCISFIAYKPPSF

SEQ ID NO: 11453 - protein, 182 aa, Betula pendula
MACSMISSATVAAVSRASPAQSSMVAPFTCLKSTSAFPVTQKTNNDITSIASNGGRVQCMQVWPPLGLKKFETLSYLPPLSSEQLAKEVDYLLRKNLIPCLEFELEHGFVYREHNRSPGYYDGRYWTMWKLPMFGCNDSSQVLKELEECKKAYPSAFIRIIGFDNKRQVQIISFIAYKPPGV

SEQ ID NO: 11454 - protein, 599 aa, Crocosphaera watsonii WH 8501
MALIVQKYGGTSVGSVERVQSVAQRIHRTVQQGNTVVVVVSAMGKTTDTLVNLAQEITANPSRREMDMLLSTGEQVTIALMTMALQEIGQPAISLTGAQVGIVTEAEYSRARILSIKPDRIKRHLDQAQVVVVAGFQGVSSRENLEITTLGRGGSDTSAVALAAALKANFCEIYTDVPGILTTDPRLVPSARLMEEITCDEMLELASLGAKVLHPRAVEIARNYGVSLVVRSSWSDAPGTRVVSPIPKPRSLEGLEITKAVDGVEYDGDQGKISLLRVPDRPGIAARLFGEIAHQQVDVDLIIQSIHEGNSNDIAFTVVKNILSKAEAVTEAIAPALRSTPSNPTEAEVMIETGVAKISIAGAGMIGRPGIAAKMFKTLAEANINIEMISTSEVKVSCVVAKEDGDRGIKVLCEAFDVQLSPNPVASQTVALAPPVRGVALDMKQAQIAIRHVQDKPGMAASIFGVLAENNISVDTIIQSQRCRILAGKPTRDIAFTVAQVDVEAACRALNNLSDGFDQVVIDEDIAKVSIVGAGMIGQPGVAAKFFGALAQEKINIKMIATSEIKISCVVPKEEGVKALKYVHDAFELAGVETVEVPA

SEQ ID NO: 11455 - protein, 349 aa, Bacillus cereus ATCC 10987
MNREELFDVTVIGGGPAGLYSAFYSGLREMKTKIIEFQPQLGGKIHVYPEKMIWDVGGLLPVTGDKLIEQLVQQGLTFQPEVVLNTKVESIIRNKDGTFTLKANDGKEHFSKTVIVATGSGILKPQKLSIEGAERFEVSNLNYTVKSLKRFKDKTIIISGGGNSAVDWANELEPIAKKVYVTYRKEELSGHEAQVKQLLNSSAECFFHTSITKLIAGDSHEAIEYVELTNHETGEVSHLLIDEVIINHGYERDITLLENSELDVAIIDNFYIAGNANSESSVDGLYAAGDILKHEGKLHLIAGAFQDAGNAVNKAKQFIQPDASEYGMVSSHNEVFKKRNRELIKQMMK

SEQ ID NO: 11456 - protein, 192 aa, Apium graveolens var. dulce
GNSIPPIMPIGRGAYGIVCSIMNTETNEMVAIKKIANAFDNYMDAKRTLREIKLLRHLDHENIIALTDVIPPPVRRNFSDVYIATELMDTDLHQIIRSNQVLSEEHCQYFLYQLLRGLKYIHSANIIHRDLKPSNLLLNSNCDLKICDFGLARPNTDDEFMTEYVVTRWYRAPELLLNSSDYTAAIDVWSVG

SEQ ID NO: 11457 - protein, 173 aa, Flaveria pringlei
  misc_feature (63)..(63): Xaa can be any naturally occurring amino acid
  misc_feature (172)..(172): Xaa can be any naturally occurring amino acid
MASIPATVAAVAQANMVAPFTGLKANAAFPVTKKVNDFSTLPSNGGRVQCMKVWPPLGKKKYXTLSYLPNLTEAQLAKEVDYLLRNKWVPCLEFELEHGFVYRENARSPGYYDGRYWTMWKLPMFGCTDSVQVMKELQECKKEYPQAWIRIIGFDNVRQVQCISFIASKPDXF

SEQ ID NO: 11458 - protein, 173 aa, Flaveria pringlei
MASIPATVATVAQANMVAPFTGLKSNAAFPVTKKVNDFSTLASNGGRVQCMKVWPPLGKKRYETLSYLPNLTEVQLAKEVDYLLRNKWVPCLEFELEHGFVYRENARSPGYYDGRYWTMWKLPMFGCTDSAQVMKELQECKKEYPQAWIRIIGFDNVRQVQCISFIASKPDGF

SEQ ID NO: 11459 - protein, 169 aa, Arabidopsis thaliana
  misc_feature (130)..(130): Xaa can be any naturally occurring amino acid
GGPGPEYRGGPHPSGRPRASFMLFSVPMVAFPVKAIMVVLLNGLKSSVAFQATRRVNTAITSITGNGGGVNCLQGWPPMGKKKLGTFFYLPDLTDSEWVKEVDYLIRTRGIPGVEFKWEHGFGSRGPGTXPGSYDGRSWPMGKLPLFGCTDSVQGLKEGERCKRESPNA

SEQ ID NO: 11460 - protein, 262 aa, Geobacter metallireducens GS-15
MPYKKLRIEIRNKVGYILLCSGQRFNKLSITTLREVKRAITELSHNPEAVCLVITGYPGESFAVGADISQMAEFGPADGFSFGELGQSLFEAMESCPKPVIGALNGITMGGGCDLALACDLRIASDALVIAHPGAKLGIITGFCGTQKLPRLVGRNYAREIFMTSEPYRAADALRMGLVDRVYPAGEFWERVVAFAERIAKVSPAALAMAKKAINAAEDCDLKTGCALEAASYAYLFATSTERGRMTEFLEGTTNVFGSEDT

SEQ ID NO: 11461 - protein, 180 aa, Musa acuminata
MVSSMMVSSAATFTRASPAQSSMVAPFTGLKSASAFPVTRKPNADLSHLPSNGGRVQCMKVWPIEGVKKFETLSYLPTMKDEALVKQIEYLLRSKWIPCLEFCPKGFVWRENHRSPGYYDGRYWTMWKLPMFGCTDAVQVAKEVEECKKEYPHAFIRIIGFDNNRQVQCISFIAYKPTGY

SEQ ID NO: 11462 - protein, 318 aa, Crocosphaera watsonii WH 8501
MVVSSRAIRIGSRKSQLALVQTYWIQEQLQKHYPDRQFDVETMSTQGDKILDVALAKIGDKGLFTKELETAMLQNQVDFAVHSLKDLPTNLPEGLMLGCVTERVNPADALVVHEKHRDKQLDTLPEGSVIGTSSLRRLAQLRHHYPHLTFKDVRGNVNTRLGKLDSGEYDAIILAVAGLQRLDMSDRIHQVIPDDISLHAVGQGALGIECRTGDPEILELLKVLEDTETRDRCYAERAFLRQLEGGCQVPIGVNTKIENNVLTLIGMVASLDGKTLIKDTIEGEPSQAESLGQTLATRLRDAGATEILAEIFAQIQRS

SEQ ID NO: 11463 - protein, 449 aa, Prochlorococcus marinus str. MIT 9211
MLRIAVIGGGPSGSCAAEILAKAGIKTWIFERKLDNAKPCGGAIPLCMVSEFDLPDSIIDRKVRNMRMISPSNREVNISLDKVYGENDNEYIGMCRREVMDAFMRNRAADLGATLINGLVTKIETGTNKQGPYTLSYSDFSNGETTGENKKLEVDLIIGADGANSRVAKAMDAGDYNVAIAFQERIKLPKKEMGYYEDLAEMYVGTDVSPDFYGWVFPKYDHVAVGTGTMQKNQSLIKSLQEGVRQRAQKRLVNGEVIKVEAHPIPEHPRPRRVVGRMALVGDAAGYVTKSSGEGIYFAAKSGRMCAEEIVEASKNGAKIPTEQDLKKYLKKWDKKYGTTYKVLEILQNIFYSNDGAREAFVEMCDDMDVQRLTFDSYLYKTVVAMKPWQQLKLTFLTLGSVLRGRALAPKSYKPVASAVRDEEEVKKMLAVSTIKGGIKVKNTPQKVS

SEQ ID NO: 11464 - protein, 420 aa, Desulfotalea psychrophila LSv54
MAFRIAEQTGIAVIKVFGVGGGGGNAINSMVRNGLQGVQFISVNTDLQALQESMADVVLQMGPGITKGLGAGADPETGKLAALESLEDLKAAVEGCDMVFVAAGLGGGTGTGAAPVIAKIAKEAGALTVAVVTKPFSFEGKVRARHAEQGWQELRANVDTIITVPNDRLLSLGQKTSKLADMLLMADTVLLQAVRGISNLINVPGLINADFADLRTVMKEVGPAIMGVGSASGENRAIDAARIAIDNQLLEDVGVDGARGVLINVSASSESLTLEELNEVSLLIQEKVDEDAVIVVGALYDDELGDEIRVTVVATGVGGVLACKEVVAKPRVLNRAETSGKTPGLNLVPPGPEAVTHGSPAPKNVQHRATKLPRSSFDSLENLGISGGSGQAGNASSATSGTKRDLELLETPTYLRKNAN

SEQ ID NO: 11465 - protein, 393 aa, Dehalococcoides sp. BAV1
MPIVFFAKKPDNVTMNTDVLVIGAGPVGLHTAKCLAECGYEVRLLEKKPEAAKQVCCTGIISTECASKYGFDGKYIQNYFSEASVYSPVGQKLLLKRDTPQAIMLDRASFQAKLLQQAINCGVRTSFGFQANSIEYIENGLRITTKEGQSFTAKAVVLAAGYNTALSRATGLGEINNFAYGLQAEVDTSIPANLSLFTGKAISQGYFGWLSPINDCTAKMGLLTRKNPFECWSALHNTLYKQGLITAKHINYVCRPVPIGNLSASFGDRVLAVGDFAGQLKPTTGGGIYFGLLCADLAVSCLDKNIKTNKISKANLAEYEKNWKSLIGSELYIGRLLSRAYTGIDDRLLEQIFKKCATSGMIEKMAAKSHLGFDWHGKAFGHLLKNPFDLVRS

SEQ ID NO: 11466 - protein, 313 aa, Pseudomonas syringae pv. syringae B728a
MSSREIRIATRKSALALWQAEYVKARLEQAHPGLLVTLVPMVSRGDKLLDSPLSKIGGKGLFVKELETALLENNADIAVHSMKDVPMDFPQGLGLFCICEREDPRDAFVSNTFASLDQLPAGSIVGTSSLRRQAQLLARRPDLQIRFLRGNVNTRLAKLDAGEYDAIILAAAGLIRLGFEDRITSAISVDDSLPAGGQGAVGIECRSVDAEIHALLAPLHHEDTAVRVIAERSLNKHLNGGCQVPIACYAVLEGDDVWLRGLVGDPSGSVLLHADARAPQTSAQALGVQVAEALLEQGAADILKAVYGEANNE

SEQ ID NO: 11467 - protein, 393 aa, Arabidopsis thaliana
MTTICDLPRDLVARILSRVPLTSMRRVRFTCKRWNTISKDPSFAKTHFGKAARQFIMMSQSRVSLMSVKLHGDGKLTSLNNLDQVEISKVFHCNGLLLCLTKDKTRLTSLVVWNPYLGQTRWIKPRHAFHRLDVYALGYDKNLKNHKILRFVDSYEPAVKHSIIEHEIFDLKSNAWRVLDATPDWEIDSYQRGVSLKGNTYFFAKEKIVVEGDDVVVIEDFKDFLICFDFTSERFNLDHVCLYRFTLTMERPVREEQLAVLYQQDTCLMEIWVTNKIEPDVVSWSKVFLAVDMEPLTGSFIPFAFFAGSFFIDEEKKIAVVFDKDQEEINDRAYLIGENGYYKEVDLGYMNGYYQQQVDPRGPDPVFPLVCSYSPSLVTIPQGTRGKRKERDY

SEQ ID NO: 11468 - protein, 131 aa, Arabidopsis thaliana
MMSDEEHHFESSDAGASKTYPQQAGNIRKGGHIVIKGRPCKVVEVSTSKTGKHGHAKCHFVAIDIFTAKKLEDIVPSSHNCDVPHVNRVDYQLIDISEDGFVSLLTDSGGTKDDLKLPTDDNLSALMKSGF

SEQ ID NO: 11469 - protein, 112 aa, Bradyrhizobium japonicum USDA 110
MKLVVAIIKPFKLDEVRQALTAIGVHGMTVTEVKGYGRQKGHTEIYRGAEYVVNFLPKLRIEIAVASDVADKAVAVITATARTGQIGDGKIFVTPIDHALRIRTGETDSDAL

SEQ ID NO: 11470 - protein, 513 aa, Erythrobacter sp. NAP1
MTDQSRIADAWERLSALPTETLAGLFDADEDRVARLSQRLEFDLGELGEVGILLDWSKTHLNDAALDAFEELAKASQFGAARDALFDGGIVNPTEGRPATHGAMRGSGRESDVEEAEALLARMGMLVEAIHQGTLGEIKHLIHIGIGGSALGPDLAVDALTRDLKLVDVHVVSNIDGLALEQAFAACDPATTLIAVASKTFTTTETMTNASSALKWLADNGVSDPSGRVVALTANPEKAVQWGVDETRILPFPESVGGRYSLWSSIGFPVALAVGMDDFSAMLAGAQAMDAHFRESEGRANGPLLAAFGDLYYTRVRGCQTRAVFAYDERLALFPDYLQQLEMESNGKSVTADGKPVNGPTAPITWGGVGTDAQHAVFQLLHQGTHLVPVDFIASIAPGDELDPAHHSSLLMNCLAQGAALMAGKTSDDPARNYPGDRPSAMFLVDDLDAATLGALIAFHEHRTFANAVLMGINPFDQFGVELGKAMAKAIDSGEGEFDASTKALMQAAGLGG

SEQ ID NO: 11471 - protein, 74 aa, Synechocystis sp. PCC 6803
MSNIQEKIEQELANARQVCSTDEASPAECAAAWDAVEELEAEAAHQRQQHPTQTTLEKFCDENPDAAECRIYDD

SEQ ID NO: 11472 - protein, 91 aa, Prunus domestica
ITCGQVSSNLAPCINYVKGGGAVPPACCNGIRNVNNLARTTADRRAACNCLKQLSGSIPGVNPNNAAALPGKCGVNVPYKISASTNCATVK

SEQ ID NO: 11473 - protein, 298 aa, Pyrococcus horikoshii
  misc_feature (23)..(23): Xaa can be any naturally occurring amino acid
  misc_feature (27)..(27): Xaa can be any naturally occurring amino acid
  misc_feature (36)..(36): Xaa can be any naturally occurring amino acid
  misc_feature (39)..(39): Xaa can be any naturally occurring amino acid
  misc_feature (75)..(75): Xaa can be any naturally occurring amino acid
  misc_feature (123)..(123): Xaa can be any naturally occurring amino acid
  misc_feature (139)..(139): Xaa can be any naturally occurring amino acid
  misc_feature (146)..(146): Xaa can be any naturally occurring amino acid
  misc_feature (253)..(253): Xaa can be any naturally occurring amino acid
MGSSHHHHHHSSGRENLYFQGHXKVIXTTKVDKASXNIXNKLIENFGFKETEYVFEGNPVYKRGDVLILTTNDEXIYYDYLDREIENQLGFKPEIIAFASRHSSKQKLPALTTHVTGNWGKAXYGGKDESFAVAIPSAXKLSLLKXSELNDLGWTVCYEATHHGPTELEVPSFFIEIGSSEEEWINDRAGEIIAETIIYVLDNYEKGRSKFKVALGIGGGHYAPKQTKRALEGDLAFGHILPKYAQPVSRDVXIKALNRFGEKVEAIYVDWKGSRGETRQLAKSLAQELGLEFIKDGS

SEQ ID NO: 11474 - protein, 642 aa, Neisseria gonorrhoeae
MSKNQNHEEYQDDARPLTIEEQRARLRQLIIMGKERGYITYSEINDALPDDMSDADQIDNIVSMISGLGIQVTEHAPDAEDILLSDNAAVTDDDAVEEAEAALSSADSEFGRTTDPVRMYMREMGQVDLLTREDEIIIAKKIENALKNMVQAISACPGSIAEILELIEKICKDEIRVDEVVEAIIDPNEVLRNELGLGHLETTAPEKPSNDNSDENEDDEESEEDADEISAANLAELKQKVIGHFAQIEKDYKKMIGCLEKHHSRHKDYLAYRDAIANKLLEVRFATRQIDSLSSSLRGKVENIRKLEREIRDICLDRVHMERDYFIQNFLPEITNLQWIEEEIAKGRVWSNALDRFRHAILEKQTELADMEKETRISIEELKEINKNMVSSEKVSAAAKQEMIQANLRLVISIAKKYTNRGLQFLDLIQEGNIGLMKAVDKFEYRRGYKFSTYATWWIRQAITRSIADQARTIRIPVHMIETINKMNRISRQHLQETGEEPDSAKLAELMQMPEDKIRKIMKIAKEPISMETPIGDDDDSHLGDFIEDANNVAPADAAMYTSLHEVTKEILESLTPREAKVLRMRFGIDMNTDHTLEEVGRQFDVTRERIRQIEAKALRKLRHPTRSDRLRSFLDSEDSKL

SEQ ID NO: 11475 - protein, 516 aa, Bacteroides fragilis NCTC 9343
MLDSAIKEQLRTIFAALEANYTFDITVSPQHESRTELLELLNDVASCSEKLSCRINEGKGLEFTLLKGEHRTGITFRAVPNGHEFSSLLLAILNTDGKGKNFPDEGICNRVKSLKGPVRLTTYVSLTCTNCPDVVQALNAMTTLNGQIQHQTVDGAINQAEVEALKIQGVPSVFADGKLIHVGRGDFGELLAKLEEQYGTETNSAETSIKKYDVIVAGGGPAGSAAAIYSARKGLNVAVIAERIGGQVKETVGIENLISVPSTTGSQLADNLKTHMSQYPIDLLEHRQIEKIELDGKDKVLTAKGGERFSAPAVIVATGASWRKLNVPGEAEYIGRGVAFCPHCDGPFYKGKQVAVVGGGNSGIEAAIDLAGICSKVTVLEFMDELKADQVLQEKLKSLPNVEVLVHSQTTEVVGNGDKVTGIRVKDRKTEEERVISLDGIFVQIGLVANSGIFRDVVEVNRPGEIVIDAHCRTNVPGIYAAGDVSTVPYKQIIIAMGEGAKAALAAFEDRMRGEI

SEQ ID NO: 11476 - protein, 320 aa, Synechocystis sp. PCC 6803
MTVSTSAPTVRIGSRKSQLALVQTYWVQEELQKHFPDRQFDVETMETQGDKILDVALAKIGDKGLFTQELEDGMLGKRTDLAVHSLKDLPTNLPAGLMLGCVTKRVNPADALVLNAKHQGKDLASLPEGAVIGTSSLRRLAQLRYHFPHLTFKDVRGNVNTRLAKLDSNEYDAIILAAAGLERLDMANRIDQLIPPEISLHAVGQGALGIECREGDQEILSLLKVLEDENSRDRCLAERAFLRQLEGGCQVPIGVNTHLDGDNLTLTGMVASLDGQRLIKDTLSAPRKEAEKLGQDLALKLREQGAGEILAEILAEAGRG

SEQ ID NO: 11477 - protein, 517 aa, Aspergillus nidulans FGSC A4
MNSREDTELSAAHAPLLAQEPVLRQHDEDQSKHSSGRFIWYLTFSAGISGLLFGYDTGVISSTLVSIDSDLSNRPLTTLDKSLITSCTSLFALIASPLAGILADRLGRKRVILVADVLFTVGSFIQAATGEVWGMIIGRSIVGFAVGSASLVTPLYISELAPSDARGRLVTILSLFITGGQVVAYIIGWLFSYVGGGWRWMVGLGMLPAVFQLIIVVALPKTPRWLVQAGYEDKAQRILSEVHQDDQTAKQTLRDIQQEVAEENSSNKSAGFKQRSHDLFKIAGNRRALTIAVMLQALQQLCGFNSLMYFSATIFSLLSFSSPTLTSLSVALTNFLFTLLAFVYIDRIGRRRILLYSIPVMIISLFVCAVTFSFVELPKDTSEAQARQAATDSSVIPLLILLCLTVYTAAYAFGLGNVPWQQSELFPLNVRSLGSALATATNWGSNFVVGLTFLPMMELLSPSLVFALYGVVCIAGWFGVRTFYPEMSGLNLEDVKALLADSWGVRASLIGVRNRSA

SEQ ID NO: 11478 - protein, 152 aa, Brassica napus
MAAFPTAEACDSNAELIANGDLRALHPIFNIYGQRRCFSGPIVTLKVFEDNVLVRNQLETKGEGRVLVIDGGGSKRCALVGGNLGQLAQNNGWAGIVVNGCVRDVDEINDCDVGVRALGSNPLKSTKKGHGEKNLQRYIGGTLSRDGGRALC

SEQ ID NO: 11479 - protein, 171 aa, Candida albicans SC5314
MGNELLSTARIYTFKIPDAYNNVIDFDQFKNKVILIVNVASLCGFTPQYKELQLLYEKYHERGLEILGFPCNQFGNQEPLQEEEIVESCRRNFGVSFPIMKKTKVNIDCDGHESELYKYLKSEKPGEVGFKGVRWNFEKFIVNRKGEVVARFNSLITPLQLEGFIEQLLSE

SEQ ID NO: 11480 - protein, 249 aa, Triticum aestivum
  misc_feature (49)..(49): Xaa can be any naturally occurring amino acid
LKGVKITLAGARGPSNGERPTLGGGRKESPRQWSCSDLPNLASEGEGMXVRFGPDWVHMDVMDGHFVPNLTIGAPVIESLRKHTKAYLDCHLMVTNPSDYVEAFGKAGASGFTFHIEVARDNWKELIQNIKAKGMRPGVSLKPGTPVEDVFPLVEAETPVELVLVMTVEPGFGGQKFMPEMMDKVRTLRKKYQSLDIEVDGGLGPSTIDAAASAGANCIVAGSSVFGAPDPGQVISALRKSVEASQIKS

SEQ ID NO: 11481 - protein, 418 aa, Geobacter metallireducens GS-15
MVSKTILDNGVRVISEYMPHAHSVSIGIWVANGSRHERREHNGVAHFIEHLLFKGTVRRSALDIAREIDSVGGVLNAFTSREYVCYYAKVLDKNLPQAVDLLTDIFLNSTFDPEEIEKERKVVLQEISMLEDSPDDYVHDLFHRSFWRGHPLGMSILGSAESVSNLSRDAIVAHRDAMYRSEDIIVAVAGNVRHDELLKLISGSFDSVPEGTGRNCCHLPVYDQKLEIVEKDLEQLHICLGTKSLPHNHPRRFEAYLMNTILGGSMSSRLFQEIREHLGLAYTVYSYVVSHTDAGSLVVYAGTSPEKLSDVLEITCSELRRLKFEPVPATELEAAREQLKGNILLSLESSDNRMTKLAKNEIYFGRYLSLAELTGGFDSATADGIAELANDFFSGDYVTLALTGKISGQIPDLSHLVL

SEQ ID NO: 11482 - protein, 295 aa, Yarrowia lipolytica CLIB122
MSKITYSIFGSSLVEVYTGMSMYKLLLALATLQLTCLPTCSLNLFYHAYFEGPSCPAYHTIHTMICLPGDQIDFPKQDLTLGPGFLDDPLAADPIPIVAGEVHRTDPEDKKTKNQNLVYIDSDTRRYIPAVNDNVIGTVTTRHAEGYKVSVSDLSPGVQLNAMAFPNASKKNRVNLANDALVYARVSSASREVEAEIECIDPQSGKAGGYGELKDGFCFDAPIAFTRQLLFKGHTVLDTIGELVPFEIAIGVNGKIWVKSEDVPTTLKIYQCIDKCREWPEDQVRENVEQIMSAP

SEQ ID NO: 11483 - protein, 528 aa, Alkaliphilus metalliredigenes QYMF
MTNSVAEVKQADVIFITGSNTTESHPVIGAQVRQAVKNGTKLIVADPREIDLAQDADVFLKIKPGTSIALSNAMLNVIFEEGLEDKTYIEENTEGIEELKKVVQKYTPEMAGEICGVKPEDIRAAARLYGQGVRGSILYCMGITQHHNGTESVMSLSNLALATGNLGKEGTGINPLRGQNNVQGACDMGALPNVMPGYQQVTNAEVINKFEKAWNTKLSNNVGLTIPEVMHKAAHGDVKMIYIFGENPMVSDPDTHHVEEALKNSFVVVQDLFLTETAELADVVLPAASFAEKDGTFVNTERRVQRVRKAVNSQGEAKADWMIFMELMNHLGYDKQYKNVEEIFEEIRQVTPQYAGISYDRIEDIGIQWPCPTEDHPGTKFLHTGKPARGAGLFMAVEHVESSELGNEEYPLILTTGRILYQYHTRTMTGKTEGINQMAPESYIEMHPNLAVSLGITNGETVKVKSPRGEVRTKAKVTKIVDENVVFMPFHYFEGAANVLTNGTDLDKYCKIPGLKVTGVKVVKIIAR

SEQ ID NO: 11484 - protein, 513 aa, Arabidopsis thaliana
PVRKFPGRPTRPVRRVWVGKNTLLSTPAVSAVIRERSGADGSKATGAFILTASHNPGGPTEDFGIKYNMENGGPAPESITDKIYENTKTIKEYPIAQDLPNVDISAVGVTSFEGPEGKFDVEVFDSADDYVKLMKSIFDFEAIRKLLSSPKFTFCYDALHGVAGAYAHRIFVEELGAQESALLNCTPKEDFGGGHPDPNLTYAKELVARMGLGKSDTGGEPPEFGAAADGDADRNMILGKRFFVTPSDSVAIIAANAIGAIPYFSSGLKGVARSMPTSAALDVVAKSLNLKFFEVPTGWKFFGNLMDAGMCSVCGEESFGTGSDHIREKDGIWAVLAWMSILAHKNKGNIDGNAKLVSVEDIVRQHWATYGRHYYTRYDYENVDAGKAKELMEHLVKLQSSIPEVNKIVKGIRSDVASVASADEFEYKDPVDGSISKHQGIRYLFEDGSRLVFRLSGTGSEGATIRLYIEQYEKDASKTGRESQEALSPLVDLALKLSKMEEFTGRSAPTVIT

SEQ ID NO: 11485 - protein, 141 aa, Zea mays
  misc_feature (65)..(65): Xaa can be any naturally occurring amino acid
ALPKGLKNAEKALELDPPFSKGSPRKGAIPFFMKKYDKAVETFQGGLKHGPKNPGFLYGVRRCVXQITKGSKGELSGGGLKKSQNKPLQAPGIQNILIDPIIHQVFPVLQENPRGGQGPPKNPGVMQKIPKLVSPGIVQIK

SEQ ID NO: 11486 - protein, 133 aa, Bradyrhizobium japonicum USDA 110
MANQSRNARPRPDRAQAGIGPMKIVMAIIKPFKLEEVRDALTAIGVHGLTVTEVKGYGRQKGHTEIYRGAEYAVSFLPKIKIEVAVASDQVDKTIDAITSAAKTGQIGDGKIFVINLDHAVRIRTGEADAAAL

SEQ ID NO: 11487 - protein, 505 aa, Triticum aestivum
MSTNKGGGGGKKKKEVKKETKLGMGYKKDDNFGEWYSEVVVNSEMIEYYDISGCYILRPWAMEIWELLKEFFDAEIKKLKLKPYYFPLFVTENVLQKEKDHIEGFAPEVAWVTKSGKSDLEAPIAIRPTSETVMYPYFSKWIRSHRDLPLKCNQWCNVVRWEFSNPTPFIRSREFLWQEGHTVFATKEEADEEVLQILELYRRIYEEFLAVPVSKGRKSEMEKFAGGLYTTSVEAFIPNTGRGIQGATSHCLGQNFAKMFDITFENEKGERSMVWQNSWAYTTRSIGVMIMTHGDDKGLVLPPKVAPIQVIVIPVPFKDADTTAIKGACESAVYTLNQAGIRADLDARENYSPGWKYSQWEMKGVPLRIEIGPKDLANKQVRIVRRDNGTKVDIPSTDLVEQVRVLLDGIQVNLLETAKAKRDACIKIISTWDEFIAALNDKKLILAPWCDEEEVEKDVKARTKGELGAAKTLCTPFDQPDLPSGTVCFASGKPAQKWSFWGRSY

SEQ ID NO: 11488 - protein, 214 aa, Synechococcus sp. WH 8102
MSIFVGNLPFRAEQEDVIELFAQFGEVANCALPLERDTGRKRGFAFVEMADEAVEDAAIEGLQGAELMGRPLRINKAEPRGSAPRGGGGGYRGGGGGYGGGGGYGGGGGRDGGGGYGGGGGGYRGGGGGYGGGGGGGRDGGGGYGGGGGGYRGGGDAGDRPSGARGWEDRSYGARDSGGEGGGGHDDGRSRRRRGSSGGGGGGDDYSGYGGAEG

SEQ ID NO: 11489 - protein, 219 aa, Tropheryma whipplei str. Twist
MEIRISPSILSADFCNLERDLQLISSADMVHVDVMDGHFVPNITFGLPVVKRICEVSPVPLDVHLMVENPDYWALQYADLGVYSVTFHFEAAKDPIATARNIRSNKSKVGLAVSPDTDIGECVHVLPEVDMLQVMTVYPGFGGQKLIRRVLDKFSRITRSEFENLSFSVDGGVTLGNISEIASVGVDTFVAGSSVFLSQLPADSVESLRKLAKVAYKRF

SEQ ID NO: 11490 - protein, 994 aa, Propionibacterium acnes KPA171202
MTDHAENRCGLEGPRPFSSRHVGSVEDDLRYIAETIGVTSPEQIIRDAIPASVLDSNEGDSSVRTPSFPPAADETTARAELVEIASGNRVTRALIGRGYYGTLTPPVIRRNILENPSWYTAYTPYQPEISQGRLEMLTIYQQLITDLTGLALANSSLLDEATAASEGMLLARRAARKVKSNRFLVHTHLFDQVRDVVLGHAEATGIEVVETDLRDPQSWRPEVEAGCFGVLAPYPDSTGALWNPSEVFDAVHKVGGITIAECDLLSLTLLAPPGELGADVAVGSSQRFGVPMGNGGPHAAYMSVRSGLERQIPGRLVGVSTDADGNPAYRLALQTREQHIRRDKATSNICTAQVLLAVVAAAYAVWHGPTGLTRIARQVTDRAHQLASALRAAGLDVADQQFFDTIRIRTKGGAKELWNRAREGGYTLDLVDGDILQISVDETVTDDELRELTQLLGGSTDEIRGPADRAWPEDLRRTSSFMTHPVFSSYHTETTMMRYLKRLADHDYGLDRGMIPLGSCTMKLNAAAEMEAMTWPAFSQMHPFAPVEDQAGSLRLIRDLEIWLAELTGYDTVSLQPNAGSQGEYTGLAAIRSYHVSRGDTERNVCLVPASAHGTNAASAASAGLRVVVVKSNDDGTIDRDDLAAKIAANEGRIAAIMITYPSTHGVYEDGVRQVCDMVHEAGGQVYIDGANFNALVGWGQFARIGGDVSHLNLHKTFAIPHGGGGPGVGPVAAKAHLAPFLPGHPLNPRNEHPLNDGGTVTHDGHAVSAAPFGSVSVLPISWAYLRLMGLKGLQFATEVAVLNANYIAHRLHDKIPILYTGQNGYVAHECILDLRPLTTETGITVDDVAKRLIDYGFHAPTMSFPVAGTLMVEPTESEDLAELDRFCDAMLAIVEEARMVQSGHWPANDNPLINAPHPAARLVADEWNHPYSRELGCYPGMRLGIQRDQERGLDVNTVTRIQAKYWPPVGRVDNTYGDRHLVCSCPPPEAFED

SEQ ID NO: 11491 - protein, 456 aa, Pseudomonas aeruginosa PAO1
MSNPPPTAERTQLRKSLKLWQIVMIGLAYLTPMTVFDTFGIVSGISQGHVPTAYLLALAGVLFTAISYGKLVRQFPTAGSAYTYAQRAINPHVGFMVGWSSLLDYLFLPMINALLAKIYLTALFPEVAPWIWVVMFVLIMTLINIKSVNLVANFNTVFVLVQLAIIVVFIGLVIHGLNNGEGTATVLSTQPFFSEHAHLSAMVAGATILCFSFLGFDAVTTLSEETRDAGRVIPRAIFLTALYGGVIFITVSYFLQSYFPTNVRFKEPDAALPEIALYVGGKLFQSIFLCATFINTLASGLASQASVSRLLYVMGRDNVLPERIFGFVHPKWRTPSINVLIVGMVALSAISFDLVTATALINFGALVAFTFVNLSVIVHFYVRGGRNRSLKEHFHYLVLPLLGAAIVAVLWLNLESTSLVMGLIWAGLGFGYLFYLTRSFSRPPPRFQESELSPTQ

SEQ ID NO: 11492 - protein, 582 aa, Frankia sp. EAN1pec
MAAGENPAGQAHPGSGGGQGERGNPGGGRGAPRAVLLTVDDDVSVSRAVARDLRRRYGGTYRIVRAESGAQALEALREIKLRGDAVAVLLADYRMPGMNGIEFLEQAMDLFPAARRVLLTAYADTEAAIDAINVVDLDHYLLKPWDPPEEKLYPVLDALLDAWRAADHRPVAETRVVGHRWSARSYEVRDFLARNQVPYRWYLADEPEGSRLLTAAGADPESLPCVITTDGSALTDPTDTELAAQVGLATAPTGDFYDLVVVGGGPAGLGAAVYGASEGLRTVLLERHATGGQAGQSSRIENYLGFPDGVSGSQLTDRARRQAVKFGAELLTAADVVTLEAAGPARRLLLADGGQIDAHTVILATGVSYRQLAAPGLTELTGRGVFYGSALTEAPSCSGQDVYVVGGANSAGQAAMYFSRHARSVTMLVRGKSLEASMSHYLIQQIAAVPTITVRVCTEVVSAQGTDHLESLVLRDNSTGQAEQVDSQWLFVFIGAAPRTDWLDGVVVRDEHGFVVAGPDLVVDGQRPSGWDLDRDPYHLESSVPGVFVAGDARAESVKRVASAVGEGAMAVALVHRYLAKR

SEQ ID NO: 11493 - protein, 411 aa, Oryza sativa
MNALAATSRNFKQAAKLLGLDSKLEKSLLIPFREIKVECTIPKDDGTLASYVGFRVQHDNARGPMKGGIRYHHEVDPDEVNALAQLMTWKTAVANIPYGGAKGGIGCSPGDLSISELERLTRVFTQKIHDLIGIHTDVPAPDMGTNSQTMAWILDEYSKFHGYSPAVVTGKPVDLGGSLGRDAATGRGVLFATEALLAEHGKGIAGQRFVIQGFGNVGSWAAQLISEAGGKVIAISDVTGAVKNSNGLDIAKLMKHSSENRGIKGFDGGDAIDPRSLLTEECDVLIPAALGGVINKDNANEIKAKYIIEAANHPTDPEADEILSKKGVLILPDILANSGGVTVSYFEWVQNIQGFMWDEEKVNNELKTYMTRGFRDVKEMCRSHHCDLRMGAFTLGVNRVARATVLRGWEA

SEQ ID NO: 11494 - protein, 180 aa, Physcomitrella patens
MASAVVNQSEAAAVRAPSKPVKTYSKENEQLVKQSWEILKKDAQRNGINFFRKVFEIAPGAKAMYSFLRDSTIPFEENPKVKNHARYVFMMTGDAAVQLGEKGAYQVLESKLQKLAATHVNAGVTDDQFEIVKEAILYAIEMGVPDLWSPELKSAWGDAYDMLAEQVKAEMHAQRSAATS

SEQ ID NO: 11495 - protein, 600 aa, Methanocaldococcus jannaschii
MKLGFYLLGGDFMRLAIIDYDRCQPKKCSMECMKYCPGVRMGEKTIEIDENTGKPVISEVLCSGCGICVKRCPFKAISIIGLPEELSEDKIVHSYGQNRFKLFGLVIPRDGVVGIIGQNGIGKSTVLRILAGELIPNLGKHDKEPNYDDVIKYFRGTELQEYFEKLKNKGVKAIHKVQYVDILPKVVKGKVGDLLKKVDEKGKFDEVVEKLELKNILDRELSQLSGGELQRVAIAAAYLRNGDIYFFDEPSSWLDIRQRFNAARLIRELNKVVVVEHDLIVLDYLSDYIHIMYGVPSAYGIVSMPKSVRVGINEYLYGELREENIRFRKEPIIFEKRAVIDFKNRPILLSYSSMKKTLGDFKLEVSGGTIYKGEVIGILGPNGIGKTTFVKLLAGVIKPDEGEVIKEGDIKVSYKPQYITPDYDGTVEDLLSSITNIHTSYYKSEIINPLQLEKLLDREVRELSGGELQRVAIAACLSRDADIYLLDEPSAFLDVEQRLRVSKVIRRIADEKEAGMFVVDHDILFQDYISDRFIVFSGEPGKFGVGSSPMNKRDGANKFLKEMQITFRRDPETGRPRANKEGSQRDIMQKEKGEYYYVDE

SEQ ID NO: 11496 - protein, 479 aa, Synechococcus elongatus PCC 7942
MSATVQALVNQPYKYGFVTDIETEKIAKGLSEEVVRLISAKKEEPEWMLEFRLKAYRRWLTMEEPDWAAVGYPAIDYQNIVYYAAPKQKAEKKQSLDEVDPTLLETFEKLGIPLSEQKRLANVAVDAVFDSVSIATTFREKLAEEGVIFCSISEAVREYPEMVKQYLGSVVPIGDNYFAALNSAVFSDGSFVFIPKGVRCPMELSTYFRINSGDTGQFERTLIVAEEGSHVSYLEGCTAPMFDTNQLHAAVVELVALDDAEIKYSTVQNWYAGDENGKGGIYNFVTKRGLCKGRNSKISWTQVETGSAITWKYPSCVLVGDNSVGEFYSVALTNNCQQADTGTKMVHIGKNTRSTIVSKGISAGRSQNSYRGLVKVGPQATGARNYSQCDSMLIGDRAAANTFPYIQVQNAGAQVEHEASTSKIGEDQLFYFQQRGISLEDAVSMLISGFCKDVFNQLPMEFAVEADRLLSLKLEGSVG

SEQ ID NO: 11497 - protein, 409 aa, Legionella pneumophila str. Paris
MSIEVKVPVLPESVADATVAAWHKKVGDKVSRDENLVDLETDKVVLEVPSPVDGVLSDILFNTGDTVGSGDLLAKISQSVSVESQKTEKEEKPVKKEEIKISESESVSTKEDKSTSPVVRRMMAENDLKAGQIQGTGKDGRITKEDVLSYIESNREKSNQTAEVQKESSMRTLSFGGREEKRVPMTRLRAKIAERLLQAQHNAAMLTTFNEVNLKAVMDMRSQYKDSFEKKHGVKLGFMSFFTKAVVESLKRFPAVNASIDGQDIVYHGFYDIGIAVSTERGLVVPVIRDADQLSMAEIELAINDAASKARTGKLSMEEMQGGTFTITNGGVFGSLLATPIINPPQTGILGMHKIEERPIVEKGQIVIRPMMYVALSYDHRLIDGKDSVQFLVSVKELLEDPSRLLLNV

SEQ ID NO: 11498 - protein, 224 aa, Brassica napus
  misc_feature (205)..(205): Xaa can be any naturally occurring amino acid
  misc_feature (210)..(210): Xaa can be any naturally occurring amino acid
APRPRRVDTGEETELEAKGLFYGIGHSPNSQLLEGQVELDSSGYVLVREGTSNTSVEGVFAAGDVQDHEWRQAVTAAGSGCIAALSAERYLTSNNLLVEFHQPQTEETKKEFTQRDVQEKFDVTLTKHRGQYALRKLYHESSRVICVLYTSPTCGPCRTLKPILNKVVDEYNNDVHFVEIDIEEDQEIAEAARIMGTPCVQFFKXKEMLXTILGVKMKKEYREF

SEQ ID NO: 11499 - protein, 627 aa, Lotus japonicus
MPAWWNRKPWKNKQEHDDDEDGEYEAEEVEEAPRSGLQFNFMKSPISSARSSDKKKKKKIKDKKKPKSFDEVLYRNSPRTSKDCDGGAAAMEKKGLPLPRPTTPCDQASISGSSLSSSASASFDDHSISPHFNANRGQEEVKFNVRPKSPCSRGPTSPTSPLHQRLHALSLDSPTGGKQDEGTSQCHPLPLPPGSPTSPSAPCNTRANGVLENNTCNLSKWKKGKLLGRGTFGHVYLGFNSENGQMCAIKEVKVFSDDKTSKECLKQLNQEINLLNQFSHPNIVQYYGSELGEESLSVYLEYVSGGSIHKLLQEYGAFKEPVIQNYTRQIVSGLAYLHSRNTVHRDIKGANILVDPNGEIKLADFGMSKHINSAASMLSFKGSPYWMAPEVVMNTNGYGLPVDISSLGCTILEMATSKPPWSQFEGVAAIFKIGNSKDMPEIPEHLSDDAKNFIKQCLQRDPLARPTAQSLLNHPFIRDQSATKVANASITRDAFPYMSDGSRTPPVLEPHSNRSSITTLDVDYATKPALAAVRTLRNPRDSTRTITSLPVSPSSSPLRQHRPTHNSPFFSPPHPSYAMMGQSSYTSNNMHKNPARSNATLTLDPWLETSRYKAHTPPGGSPRMRFI

SEQ ID NO: 11500 - protein, 146 aa, Brassica napus
MADEAKAKGNAAFSSGDFTSAVTHFTDAINLAPTNHVLFSNRSAAHASLHHYEEALSDAKKTVELKPDWAKGYSRLGAAHLGLNHHEEAVEAYSKGLEIDPSNEALKSGLADASRSRAAPPPNPFGDAFKGPEMWAKLTADPSTRG

SEQ ID NO: 11501 - protein, 604 aa, Oryza sativa (japonica cultivar-group)
MCIVTHLSHKSDCPCCGNYLTKAQLYPNFLLDKVLKKMSARQIAKTASPIDQFRYALQQGNDMAVKELDSLMTLIAEKKRHMEQQESETNMQILLVFLHCLRKQKLEELNEIQTDLQYIKEDISAVERHRLELYRTKERYSMKLRMLLDEPAASKMWPSPMDKPSGLFPPNSRGPLSTSNPGGLQNKKLDLKGQISHQGFQRRDVLTCSDPPSAPIQSGNVIARKRRVQAQFNELQEYYLQRRRTGAQSRRLEERDIVTINKEGYHAGLEDFQSVLTTFTRYSRLRVIAELRHGDLFHSANIVSSIEFDRDDELFATAGVSKRIKVFEFSTVVNEPSDVHCPVVEMATRSKLSCLSWNKYSKNVIASSDYEGIVTVWDVQTRQSVMEYEEHEKRAWSVDFSRTEPSMLVSGSDDCKVKVWCTKQEASAINIDMKANICSVKYNPGSSHYVAVGSADHHIHYFDLRNPSAPVHVFGGHKKAVSYVKFLSTNELASASTDSTLRLWDVKENCPVRTFRGHKNEKNFVGLSVNNEYIACGSETNEVFVYHKAISKPAANHRFVSSDLDDADDDPGSYFISAVCWKSDSPTMLTANSQGTIKVLVLAP

SEQ ID NO: 11502 - protein, 568 aa, Propionibacterium acnes KPA171202
MRPSPRRSTSSARSEFRPEHLLQGRSSLRRIPGPVPFPPPFRRTMLDNALTTQLKTYLEMVREPIVLVPSPYRGDDAAKSSKSAHMDELLSEIAALSDKVSVGKPVDNERTPSFAITRPGSPIDIRFAGLPMGHEFTSLVLALLQVGGHPVKEEQSLIDAVRAVKGEHHFVTYMSLTCQNCPTVVQALNAMAVLNPNIHHTAVDGGTHTDEVEAKGIASVPAIYLDGEDWGSGRMDMAEILERLDADAAQGAKEDLSQRDPYDVLVVGAGPAGAAAAVYAARKGIRTAMVGSRIGGQVLDTEAIDNLISVPHTTGPRLADALRSHVNDYNIDVIERQTASAIETTGGMTTVHLTDGDLRARSVIVATGARWRNLGVPGEKEYRTKGVTYCPHCDGPLFTGKKVAVVGGGNSGIEAAIDIAGVVDHVTVVEFLDALKADDVLLRTLNSLPNVDVITSARTTQILGDGSKVTGLEYEDRTSGDVKTIELAGVFVQIGLLPNTEWLEGALERNQRGEIVIDERGTTSAPGIFAAGDCTTQPYKQIIISMGAGATAALGAFDHLIRQNPTQN

SEQ ID NO: 11503 - protein, 559 aa, Symbiobacterium thermophilum IAM 14863
MAQRKIVIVGGVAGGATAAARARRTDEHAEIVLFEKGPYISFANCGLPYYVGKEIGDRSALLLQTPESFRARFEVDVRVLHEVVAIDRAAKRVTVRNLETGEVYHESYTALVLAPGSVPIRPPLPGIGLPNVFTVRTVPDAVAIRELVERESPARAVVVGAGFIGLEMVENLAGLGLAVTLVEKADQVLPPLDPEMAAFVQSHLEQMGVEVITGDGIAAFTGNDRATAARLESGREVEGDLFILGLGVRPDTRLAREAGLAIGPTGGIQVNERMQTNDPAIYAAGDAVETIHLVTGRPALIPLAGPANKQGRVAGANAAGDSLTFPGAIGTAIVRVGSLVAAVTGLSEKAARREGLKVYTSYTLSGDHADYYPGMQELMTKLVVESDTGRLLGAQVIGANGVDKRTDVYATAILGRMTVDQLANLDLAYAPPFGAAKDAAVVAGMVAQNIRRAALRVITPEELLGRMEAGEELQVVDVRNPYEYDMGAVPGAVNIPVDELRSRLGELDPSRETVVYDRTGAMAYVAARILAQRGYSVSSLAGGYALFPAAEAVRAQRTL

SEQ ID NO: 11504 - protein, 330 aa, Geobacter metallireducens GS-15
MRLNRSLTFGLFLLGVMFTLHLLQTPVSADEVNKTGKVVARVNGVPIYENALQSHLAALANKGRASGFARDPAKMNDYQKKKALYSLIDAELLRQASNQQQVTDLDAKVSKRLQEVKGKFPDEEAFLKNLQARGKTLDIFVAELRDGIRYDEYLTSKKVIGVPVPDEEIQKFYRDNPTSFSVPEQIKVRHILIEPDGSTAEAVAKAEKKAGEIRNRVVRDKDFAAVAKEVSACSTASSGGDLGYVSRGTMPAEFDKVAFSLKLNEVSEPVRTKFGFHIMEVLDKKPVTVRPYSEVREFISRYLQRFDDEKRLNAHTLELRKKATIEVLLD

SEQ ID NO: 11505 - protein, 380 aa, Thermococcus kodakarensis KOD1
MRALIIGVGQCGTKIADLFALVDFDTIALNTSRGDLEYLKHIPHDRRILIGESITGGKGVNANPLLGREAMKRDLPLVMRKIGSIVGYEDVDIFFLTFGFGGGTGAGGTPVLAEALKEEYPDSLVVAIGALPLKEEGIRPTINAAITIDKLSKVADSIIAIDNNKLKESGDDISSAYEKINYTIVERIASLLALVDVPGEQTLDASDLKFVLKAFGSFATVGYAKADASKVKNLSRLIIKSFESEGLYLDANIESALYGLVAIHGPPEVLKASDIFEALDYLTSKIRGKQIFRGFYPDPRERDVEVVTLLSGIYESKSIENIVRTAKEYARSFMQAKSEAETKKKELLTGLPDFDDVYPSLEATGSDDPEGFAEYREVSR

SEQ ID NO: 11506 - protein, 357 aa, Burkholderia vietnamiensis G4
MDGAALYEALAAAEPDPSRRDVFMQLAEAEHEHAEIWHAKLQQRGVDVATTRPTFKTRALRMLIRSFGPRFVLPALAAAEFADRDKYATQTDAGALSADESTHAAVVAAVARSNPSGGVKGSDIARAESWHRGWSGNDLRAAVLGANDGLVSNFCLVMGVAGAGASNKTILLTGLAGLIAGASSMALGEWLSVTNARELAQTQIARESEELQRTPKAELRELALIYQAKGLDKDDAHRLAEEMMRNRDKALDTLTREELGLDPEDLGGNPWRAAGTSFGLFALGAIFPAVPFFWSHGLVGIGISVSFSVLCLTVIGVVTSLFNGRSPWFSVIRQIVIGCVAAAFTYGAGALLGVSMS

SEQ ID NO: 11507 - protein, 291 aa, Aquifex aeolicus VF5
MALILDGKSLSKKIREEIKKEVENFTSKGFRPPALAVILVGNDPASEIYVNNKRKACEKVGIKSLFYHLPQDVSEEKLLGLIYELNMNEEVDGILVQLPLPKHIDQTRVILSISPEKDVDGFHPENMGKLVAQIEDGFIPCTPLGIDILLKHYGIDVKGKDVTIVGAGFIVGRPLSLLMLWRNATVSVCHIHTKDVKKFTKEADILISATGVPHLIKEDMIKEGAVVVDVGISRLNGKIVGDVDFERVKEKASAITPVPGGVGPMTVTALLLNTLKSYKRKFAHLISTTNP

SEQ ID NO: 11508 - protein, 716 aa, Schizosaccharomyces pombe
MSVDSLVSCLEQLITDDLKLVEHQEVSNGATWASALQSTKDVPSHALTKTIVLKPKTAKSQTVVPIILAALETTSTPSGIAAKAVGSKEARMAAADLVEEVFGIPPTDVGIFSVNKENASKVHVVLDAALIQHNGLLAFHPSSSAKTVFVSPAAVQTYLKSVGVNPIIVDFSAPGSATAPSKPAAQKKKAEPSKNDAAIENAALIGITVRKDADFPNWYQQVLTKSDMIEYYDISGCYILKPWSYSIWEAIQGWFDKEIKKLGVRNGYFPLFVSSKVLEKEKDHVEGFAPEVAWVTRAGTSELDEPIAIRPTSETVMYPYYAKWIRSHRDLPLKLNQWNSVVRWEFKNPQPFLRTREFLWQEGHTAHMTLEGATEEVHQILDLYARIYTDLLAVPVIKGVKSENEKFAGGMFTTTVEGYIPTTGRGIQGATSHCLGQNFSKMFNIVVEDPNAEIGPTGERPKLFVWQNSWGLSTRTIGVAVMVHGDDKGLKLPPAIALVQSVVVPCGITNKTTDQERNEIEGFCSKLADRLNAADIRTEADLRAYTPGYKFSHWEMKGVPLRLEYGPNDAKKNQVTAVRRDTFEKIPVPLNNLEKGVSDLLAKIQTNMYETAKAERDAHVVKVKEWADFVPALNKKNIVMIPWCNTTECEKEIKKNSARQVNGDEPEDEKAPSMGAKSLCIPLEQPSGEDAIIEGTTKCAGCGNLAKVWGLFGRSY

SEQ ID NO: 11509 - protein, 482 aa, Aquifex aeolicus VF5
MELIFEKSKKGRKGYKLPELDVEEVNIKEYLPEEYLREELDFPEVSELDVVRHYTNLSHLNYAVDTTMVPLGSCTMKYNPRINEELVNKKEFLNVHPLTPEEYIQPLLKLVYELKELLKELGGFAEVSLQPAAGAHGELLGLLLIHAYHQDRGNKEKKVVLIPDSAHGTNPASAAICGFDIKVVKSDKKGELDFEDFIKKLDERVAALMITNPNTLGIFERKIKEIAEELHKRDALLYMDGANFNALVGRFKPGEWGVDVMHFNLHKTFSTPHGGGGPGAGPVGVSERLKPYLPVPQIEYDGKKYYLNWNIEKSVGKILAFHGHFLVWLKALAYILTYGKDIKKVSEYAVLNARYLKHLLKGVFKDPYPESPCMHEFVLSATNLTKYGVRASDVAKRILDYGFYAPTMYFPLIVREALMIEPTETENPDTLKKFALILRKIVKEAKEKPEILKKAPHRTPVRRIKEAEANRNLILKFKDIKE

SEQ ID NO: 11510 - protein, 496 aa, Triticum aestivum
MAGTGVFADVLDGEVYKYYADGEWRASASGKTVAIVNPTTRQTQYRVQACTQEEVNKVMDAAKVAQKSWARTPLWKRAELLHKAAAILKEHKTPIAESLVKEIAKPAKDAVSEVVRSGDLVSYTAEEGVRILGEGKLLVSDSFPGNERNKYCLSSKVPLGVVLAIPPFNYPVNLAVSKIGPALIAGNSLVLKPPTQGAVAALHMVHCFHLAGFPKGLISCVTGKGSEIGDFLTMHPGVNCISFTGGDTGIAISKKAGMVPLQMELGGKDACIVLEDADLDLVAANIVKGGFSYSGQRCTAVKVVLIMEAVADTVVEKVNAKLAKLKVGPPEDDSDITPVVTESSANFIEGLVMDAKEKGATFCQEYRREGNLIWPLLLDHVRPDMRIAWEEPFGPVLPVIRINSVEEGIHHCNASNFGLQGCVFTRDINKAIMISDAMESGTVQINSAPARGPDHFPFQGLKDSGIGSQGITNSINMMTKVKSTVINLPSPSYTMG

SEQ ID NO: 11511 - protein, 410 aa, Geobacter metallireducens GS-15
MRRVVVTGVGAISPLGTGNGKNWDALVAGRSGIDLITRFDASELPVKIAGEVKDFTPEDFIEKKEVKKMDLFIQYALAAAQFAMEDSGLQITDENAERVGVIVGAGLGGLPTIEKYHAAMLEGGYKKISPFFIPMLIINLAPGHISIKYGAKGPNLSSVSACATGTHSIGDAYHMIKRGDADAMIAGGTESTVTPLGIGGFAVMKALSTRNDDPKGASRPFEKSRDGFVLAEGAGIVILEEYESAKKRGAKIYAEVVGYGLSGDAYHLTAPAPEGEGAARCIKMALNNAGINADQVDYINAHGTSTHFNDYYETLAIKKVFGDHAKKIMVSSTKSMTGHLLGAAGGVEAVFSLMAMDKGVVPPTINYQEQDSECDLDYVPNTARDAKITYAMSNNFGFGGTNASLLFKKI

SEQ ID NO: 11512 - protein, 601 aa, Triticum aestivum
  misc_feature (164)..(164): Xaa can be any naturally occurring amino acid
ARGAFDSISWPFLFEVLRKYGFGDRFREWMAILLSSASTRVMINGVPGPPIWHRRGLRQGDSTSPQLFVLAVDTLGRLMRHALQTGILQQLHPRRAIPAISLYADDVMMFCHATTEEIAAVKGILDVFGTASGLRVNYAKSSATILHAGDYEVGLLEPLVPCRXLPVTYLGIPLSTRRPSAAQLQPLVDAVAGRLPSWKAWLMNKAGRLALVKSVLNAIPIHQLLALAPPKKTLKQLEKIQRGFLWAGRADAHGGHCHVNWRKVCRPLEYGGLGIRDLERTGLSLRLRWLWLTRTDTTRAWQGLDTQFTTEERALFYASTTMAIGDGRTALFWEDRWLGGQSVRELAPRLLKCIPKQRQKSRTVAEALAGNSWARDIHGLLGLPEIGQYLQLWHLVQHVELSNEPDRLLWSWTASGVYTAQSCYWATFQGATGCHSWKLIWRSWAPPKVKFFHWLACQDRCWTAERLARHGLQHHPRCLLCDQEPETIGHLMLTCPFTKQTWQEVLSWLRLPAPAPEHDGSLMDWWLRAKERTPPALRKALKSVALLVPWMIWKHRNACVFDHVSPSLNELVDRIKDETRCWAKAGAQGLRVVLPSSWDVH

SEQ ID NO: 11513 - protein, 341 aa, Synechococcus sp. WH 8102
MTLRVAINGFGRIGRNVMRGWISRGADTGLEIVGMNSTSDPKTSAHLLTYDSILGKLDPSVKIETTDDTMLVNGKEIKFFADRNPLNCPWKDWGVDLVIESTGVFNTDEKASMHLEAGASKVILTAPGKGDGVGTFVVGVNDDQYRHEDWNILSNASCTTNCLAPIVKVLDQNFGLDWGLMTTIHSYTGDQRILDNSHRDLRRARAAALNMVPTTTGAAKAVALVYPEVKGKLTGFAMRVPTPNVSAVDLTFGPSRATSVDEVKAVIKAASENGMKGIIKYSDLPLVSTDYAGTNESTIFDADLTYAMGDKAVKILAWYDNEWGYSQRVVDLAEVVARNWK

SEQ ID NO: 11514 - protein, 400 aa, Leptospira interrogans serovar Copenhageni str. Fiocruz L1-130
MIRFEEETKTSPAVIKVFGVGGGGMNAVTRMSNSSLKGVEFAILNTDEQVLLRSPVENKIILGTKVTRGMGAGGDPELGLKAAEEDKERIQSIVRGSDMVFITAGMGGGTGTGAAPVIAKIAKEMKCLVVGVVTLPFSFEGRRRMEFARKGIEQLRSHVDTLILINNDSIFRVVDKNTPIDLAFQVIDDILLNAVRGISDIINNPGLINVDFADVKTIMRDTGDAVMGVGEGSGEGKVKEAVEYAINNSLLDSTSIAGASSLLINVSGGKDLTISDWNEVSGIITSQVDPNANIIVGLHEDESLSNKIRVTVIATGFHKRGKLLQNQDSIQRGAQENYGFQRKAVGMENSALEKKDFFQDENTEQNRNSGSLRLRSSNSSSSKVEDYDIPAYLRRNSSGP

SEQ ID NO: 11515 - protein, 480 aa, Pseudomonas syringae pv. syringae B728a
MQLKDSTLFRQQAYINGQWLDADGGQSIKVNNPANNEILGTVPKMGAAETRRAIEAADKALPAWRALTAKERGNKLRRWFELMIENQDDLGLLMTLEQGKPLAEAKGEITYAASFIEWFAEEAKRVYGDVIPGHQPDKRLIVLKQPIGVTAAITPWNFPAAMITRKAGPALAAGCTMVLKPASQTPFSALALAELAERAGIPAGVFSVVTGSAGDIGAELTGNPIVRKLSFTGSTDIGRQLMAECAKDIKKVSLELGGNAPFIVFDDADLDKAVEGAMISKYRNNGQTCVCANRIYVQDAVYDAFAEKLKAAVGKLKIGNGLEEGVTTGPLIDDKAVAKVKEHIADAVSKGATVLTGGNSLEGSFFEPTILVNVSKDAAVAREETFGPLAPLFRFKDEAEVIAMANDTEFGLASYFYAQNMSRVFRVAEALEYGMVGINTGLISNELAPFGGIKSSGLGREGSKYGIEDYLEIKYLCLSV

SEQ ID NO: 11516 - protein, 121 aa, Brassica napus
MAGVGTSMLVSVLLFTVVLSLQQVYRGKLASSELFTILGGFTSSLLFLFSLTFIGNLQESSGGKSSWGAVIIAEIIALVAASTVHRVCITTCFLFSAGLLYEMNKISGYMLSKAESKSKRH

SEQ ID NO: 11517 - protein, 377 aa, Nostoc sp. PCC 7120
MNKVLINDTTLRDGEQAAGVVFTLEEKVAIAKFLDTIGVPELEVGIPAMGEEEMRAICAISNLGLKANLLAWNRAVISDIKASVACGMERVHIAIPVSGIQIAAKFHGQWRVSLQRLKDCISFAVDQGLWVAVGGEDSSRADENFLLDVALYAQEWGASRFRFCDTVGVLDPFTTYGKVKLLVSALTIPVEVHTHNDFGMATANALAGIKAGASSVNTTVIGLGERAGNAALEEVVMAIKRIYGVDMGIDTPRLLELSQLVAAASGANVPPWKAIVGENTFAHESGIHAHGVLQNPDTYEPFAPEEVGWERRLVVGKHSGRHSVSNLLEQHGIFLNPEETQSVLDAVRQQSIKKKRSLTTEELLNLVKEQRYSHAAR

SEQ ID NO: 11518 - protein, 339 aa, Synechococcus elongatus PCC 7942
MTIRVAINGFGRIGRNFLRCWFGRQNTDLEVVAINNTSDARTAAHLLEYDSVLGRFNADISYDENSITVNGKTMKIVCDRNPLNLPWKEWDIDLVIESTGVFVTAEGASKHIQAGAKKVLITAPGKGEGVGTYVIGVNDSEYRHEDFAVISNASCTTNCLAPVAKVLHDNFGIIKGTMTTTHSYTLDQRILDASHRDLRRARAAAVNIVPTTTGAAKAVALVIPELKGKLNGIALRVPTPNVSVVDLVVQVEKPTITEQVNEVLQKASQTTMKGIIKYSDLPLVSSDFRGTDESSIVDSSLTLVMDGDLVKVIAWYDNEWGYSQRVVDLAELAARKWAA

SEQ ID NO: 11519 - protein, 826 aa, Bacteroides fragilis NCTC 9343
MKIIIIGGVAGGATTAARIRRSDETAEIILLEKGKYISYANCGLPYYIGDVIEEREKLFVQTPEAFGVRFRVDVRTENEVIFIDRKKKTVTVRLKSEDTYEESYDKLLISTGASPVRPPLPGIDSTGIFTLRNVADTDRIKAYVNNRPPRRAVVIGAGFIGLEMAENLHALGAQVSIVEMGNQVMAPIDFSMAALVHQHLMEKGVNLYLEQAVASFEQAGKEVKVVFKNGQSILADIVILSIGVRPETTLARAAELTIGEAGGIAVNDYLQTSDESIYAIGDAIEFRHPITGKPWLNYLAGPANRQGRIVADNLLGAQIPYEGAIGTSIAKVFDMTVASTGLPGKRLKQAGIVYASSTTHPASHAGYYPDAMPMSIKITFDPQTGKLYGGQIVGYDGVDKRIDELSLVIKHEGTIYDLMKVEQAYAPPFSSAKDPVAIAGYVAENIILGRVKPVYWRDLRDIELKDVFLLDVRTPDEFALGSLPGAVNIPLDEIRDRIAELPSNKPIYTFCAVGLRGYLVYRILIQHGFKEVYNLSGGLKTYRAATAPIILHENEETDDTPSAQDSPAEPSVAAEAPQTTTAANPKTIRVDACGLQCPGPVLKMKKTMDTLVPGERVEIVATDPGFSRDAAAWCNSTGNKFISKDSTGGKSVVVIEKGEPQACNLTTTCDSKGKTLIMFSDDLDKALATFVLANGAAATGQKVTIFFTFWGLNVIKKLHKPKVEKDIFGKMFGTMLPSSSLKLKLSKMSMGGMGGKMMRYIMHRKGIDSLESLRQQALENGVEFIACQMSMDVMGVKREELLDEVTVGGVATYMERADNANINLFI

SEQ ID NO: 11520 - protein, 360 aa, Nocardia farcinica IFM 10152
MSDAKAVRLGLIDGDGIGPEVVRATRAVVDEALVAAGGAAVVWVPLLIGHRAIEEYGTPLPQQTLDGLAAVDAWILGPHDNASYPGEHRGAVPPGGAIRKHFDLYANIRPARALPGVRAAAPDIDLVIVRENSEGFYADRNMVAGSGEFQPSIDLAMAVAVVSRQATERIAHEAFRLAQTRRKKVTIVHKANVLPRTMGLFRDVCYEVAASYPGVVVDDEHVDAAAAHLVRAPGDYDVVVTENLFGDILSDLAGQLSGSLGTAASLNCSATRAMAQAVHGAAPDIAGHNRANPVALQCSAAMLLRWLAIRRGESVLSRAAERIERAVAATFAAGIATADLGGQASTAEFTEQVCARVHRR

SEQ ID NO: 11521 - protein, 319 aa, Agrobacterium tumefaciens str. C58
MHSCQEGTIRSLRNPAGAGRMAVVIDGKAKAASVTEAVRKSAEALEAEKGVKPGLAVVIVGNDPASHAYVNSKSKMAKQCGFNSIQHTLPEETTQAALLKLVGELNTDASIHGILVQLPLPKHFNSDEIIQSILPEKDVDGLSVLNAGKLATGDLATGLISCTPAGAMLLVRGIHGDDLSGLNAVVIGRSNLFGKPMGQLLLNANATVTMAHSRTKDLVTVCKTADILVAAVGRAAMVKGDWVKPGATVIDVGINRIAAPEKGEGKSKLVGDVAFDEASAVAAAITPVPGGVGPMTIAMLMANTVIAAHRALGKTAPKF

SEQ ID NO: 11522 - protein, 257 aa, Mesorhizobium sp. BNC1
MAYETILVETRGRVGLITLNRPKALNALNTKMMEELIGAAEAFDANPRVGTVVITGSERAFAAGADIKEMQPKTFIDVYMEDLYSDWERLTRVRKPLIAAVSGYALGGGCELAMMCDFIIAADNAKFGQPEITLGVTPGMGGSQRLARFVGKSKAMEMCLTGRMMDAEEAERCGLVSRVVPLGELIEDVLEVAGKIAEFSMPAVMMTKEAVNRAYETTLSEGLRFERRAFHSLFALDDREEGMAAFTEKRSPQFRNR

SEQ ID NO: 11523 - protein, 423 aa, Streptomyces galilaeus
MTARRVVITGLGVIAPGGIGTKAFWERVVSGVSATRTITAFDASGFRSRMAAECDFDGVRSGLTVRDTARLDRATQFAVVAAREALADSGIEIDERNAHRTGVSLGSAVGCTQKLEEEYVARSDGGQRWLVDHAAGTPYLYDYFVPSSMAAEVAWEAGAEGPAALVSAGCTSGLDSLGHALDLIREGTVDIMIAGGSDAPIAPITVACFDAIKATSPRNDTPEHASRPFDRTRSGFVLGEGAAVLVLEERESALRRGAQIYAEIAGYAGRGNAHHMTGLRPDGLEMSAAITGALDDARIDREAVGYVNAHGTATRQNDIHETAAIKHSLGEHAHRVPVSSIKAVIGHSLGAVGSIEAVASALVIRHGVVPPTAGLHEPDPQLDLDYVPLTARDQATDTVLTVGSGFGGFQSAMVLTSAEGSRS

SEQ ID NO: 11524 - protein, 576 aa, Vitis vinifera
MATSSHGLLGFFFSRFLGHGFVPLEASPPSLHPTSKISLPSSLKTHQPYRTGYHFQPRKNWMNDPNGPMIYKGLYHFFYQYNPHGAVWGNIVWAHSTSTDLVNWTPHKYAISPSQPADINGCWSGSATILPNGKPVILYTGIDPQNKQVQNMAVPKNLSDPFLLEWTKLSQNPLMEPTTINSINASSFRDPTTAWQGTDGRWRVIIGSKIKRKGLAILYRSKDFVRWTKAQHPLHSGKNTGMWECPDFFPVSINSSTGVDTSSISKTLKYVLKLSLDDTKHDYYTIGSYNREKDTYVPDKGSVDNDSGLRYDYGKFYASKTFFDNAKNRRILWGWINESSSVEHDIEKGWSGVQAIPRNVWLDKSGKQLLQWPIAEIEKQRIKPGHMSSRELKGGSKVEVGGITASQADVEISFKISDFKKAEVFDESWSNPQLLCSQRGASVKGGLGPFGLMVLASKGMEEYTAVFFRIFKRQTKYVVLMCSDQSRSSLDNDNDKTTYGAFLDVDPVHEKLSLRSLIDHSIVESFGGGGKVCITARVYPTLAIDGEAHLYAFNKGTGSVGMTTLRAWSMKKAKIN

SEQ ID NO: 11525 - protein, 205 aa, Schizosaccharomyces pombe
MAGKKKHLLKVIILGESGVGKTSIMNQYVNRKFSKDYKATIGADFLTKEVLVDDKVVTLQLWDTAGQERFQSLGVAFYRGADCCVLVYDVNNSKSFETLDSWRDEFLIQASPSNPETFPFILLGNKVDVEEQKRMVSKSKALAFCQARGEIPYFETSAKEAINVQEAFETVAKLALENMDSDDIAADFTDPIHLDMESQKTSCYC

SEQ ID NO: 11526 - protein, 596 aa, Triticum aestivum
MAQAWAFLLPVLVLGSYVTSLFFPSYISNPLCGGDGGRSLFLCAQAPKDQDPSPAVSTMYKTAFHFQPAKNWMNDPSGPMYFNGIYHEFYQYNLNGPIFGDIVWGHSVSTDLVNWIGLEPALVRDTPSDIDGCWTGSVTILPGGKPIIIYTGGDIDQHQAQNIAFPKNRSDPYLREWIKAPNNPVLRPDEPGMNSIEFRDPTTGWIGPDGLWRMAVGGELNGYSAALLYKSEDFLNWTKVDHPLYSHNGSNMWECPDFFAVLPGNNAGLDLSAAIPQGAKHALKMSVDSVDKYMIGVYDLQRDAFVPDNVVDDRRLWLRIDYGTFYASKSFFDSNKNRRIIWGWSRETDSPSDDLEKGWAGLHTIPRTIWLAGDGKQLLQWPVEEIESLRTNEISHQGIELNKGDLFEIKEVDAFQADVEIDFELASIDDADPFDPSWLLDPEKHCGEAGASVPGGIGPFGLVILASDNMDEHTEVYFRVYKSQEKYMVLMCSDLRRSSLRPDLEKPAYGGFFEFDLEKERKISLRTLIDRSAVESFGGGGRVCITSRVYPAVLADVGRAHIYAFNNGSATVRVPQLSAWTMRKAQVNVEKGWSAI

SEQ ID NO: 11527 - protein, 158 aa, Chromobacterium violaceum ATCC 12472
MSIYDFSFRRLDGSEQAMADYRGSVLLLVNTASRCGFTSQYAGLEALHRRFGPQGLAIIGFPCNQFGAQEPGDAGEIGAFCQKNYGVDFAMADKVDVNGANAHPLWQYLKRQKRGLLGQAIRWNFSKFLVDRQGRVVARFAPFTRPEKLAARIEALLK

SEQ ID NO: 11528 - protein, 187 aa, Triticum aestivum
  misc_feature (80)..(80): Xaa can be any naturally occurring amino acid
  misc_feature (86)..(86): Xaa can be any naturally occurring amino acid
  misc_feature (101)..(101): Xaa can be any naturally occurring amino acid
  misc_feature (128)..(128): Xaa can be any naturally occurring amino acid
  misc_feature (132)..(132): Xaa can be any naturally occurring amino acid
  misc_feature (139)..(139): Xaa can be any naturally occurring amino acid
  misc_feature (143)..(143): Xaa can be any naturally occurring amino acid
  misc_feature (150)..(150): Xaa can be any naturally occurring amino acid
  misc_feature (156)..(156): Xaa can be any naturally occurring amino acid
  misc_feature (160)..(160): Xaa can be any naturally occurring amino acid
  misc_feature (163)..(163): Xaa can be any naturally occurring amino acid
  misc_feature (167)..(167): Xaa can be any naturally occurring amino acid
  misc_feature (171)..(171): Xaa can be any naturally occurring amino acid
  misc_feature (174)..(174): Xaa can be any naturally occurring amino acid
MAPTVMASSATSVAPFQGLKSTAGLPVSRRSNGASLGSVSNGGRIRCMQVWPIEGIKKFETLSYLPPLSTEALLKQVDYXIRSKWXVPCLQFNKVGFILPXSTTHPLGYYDGRYWTMWKLLCSGCNDXTQVXNKVEEVXKDYXYPYVRIXRFNNMXQVHXSTXRLKXTGCXDPXKAKHKGILNAFNL

SEQ ID NO: 11529 - protein, 319 aa, Geobacter metallireducens GS-15
MKKIGILTSGGDCSGMNAAIRAAVRTAIRLNIEVVGFRKGYLGLMKGDAIPLDTKAVSGILHRGGTFLQSARSPEFKTPEGQQKAIDNLKELGVEGLVVLGGDGSLTGALALHRLGLPVVGIPSSIDNDIPYTDMALGVDTALNNIIYAVDCIKDTASSHARAFVIEVMGRNSGYLASISAIATGAEFALVPEREYDLAEICQQLRARFEEGRDNAIIILAEGAGHAREISDSIKDAIGFETRITVLGHYQRGGAPTVFDRLLASRFGKRAVELLISGNSGVMVGLSCNAILATPLEDVIKGEKRPQDEVLRLAEVLGV

SEQ ID NO: 11530 - protein, 344 aa, Thanatephorus cucumeris
MTVKIGINGFGRIGRIVLRNAIEHGDVDVVAVNDPFIDLEYMVYMFKYDSTHGRFKGEVKADKDNKQLVINGKNIAVHSERNPGDINWDASGAEYVVESTGVFTTIEKASEHFKKSPSLKKVIISAPSADAPMHVVGVNLDAYDPKGPKVISNASCTTNCLAPLAKVIHDKFGIVEGLMTTVHATTATQKTVDGPSAKDWRGGRGASANIIPSSTGAAKAVGKVIPSLNGKLTGLAFRVPTSNVSFVDLVARLEKPATYDEIKAAIKEASEGPYKGIFGYTEDDVVSTDFVGDQHSSIFDSKAGISLNKKFVKLVSWYDNEWGYSRRVVDLIAYVAKKDKEAGC

SEQ ID NO: 11531 - protein, 318 aa, Prochlorococcus marinus str. MIT 9312
MEIIESDVVIIGGGPAGCTCALYTSRSNLKTVILDKNPSVGALAITHQIANYPGVPVDISGEKLLTLMREQAVQYGTDYRRAQVFGIDASGEWKTVFTPEGTFKAKALVLASGAMGRPASFKGEADFLGKGVSYCATCDGAFYKNREVAVVGVNKEAIEEATVLTKFASTVHWITSSDPKSDNEEAMELIDNSNIKHWSRTRLLEILGDDMGVNGVIVKNKQEENPINLNLDGVFVYMSGSKPITDFLGDQIALKDDGGVIVDDFMSTNSDGVWAIGDIRNTPFKQAVVAASDGCIAAMSIDRYLNSRKNIRVDWIHS

SEQ ID NO: 11532 - protein, 360 aa, Prochlorococcus marinus str. MIT 9211
MKTYNVVLLPGDGIGPEIMDVATKTIDYVAQKYNFGIEYEQKLIGGSAIDKYNDPLPEETLKACKSSDAVLLSAIGSPKYDALPREKRPESGLLNLRSGLGLFANIRPVKVWPALISESSLKQEIVQNVDLVVVRELTGGIYFGQPKGRLQSENGERAFNTMTYSTMEIDRIARVAFELATDRKKKLCSIDKANVLDVSQLWRERVIELSYNFPKVELNHLYVDNAAMQLIRQPDQFDVILTGNLFGDIISDEAAMLTGSIGMLPSASLRLEGPGLFEPVHGSAPDIANKDIANPMAMVLSAAMMLRVGLKENNAADDLENAIDKVLKDGYRTSDLMTNGKKVLGCREMGEQILMSLAAA

SEQ ID NO: 11533 - protein, 101 aa, Cyanidium caldarium
MQIDELSFDTEVLQSHQLVLVDFWAPWCGPCRMIAPILDEIAQELDIKVVKLNTDENPNLATEYGIRSIPTLMLFKKGQRLDTVIGAVPKSTLMNTIEKYL

SEQ ID NO: 11534 - protein, 343 aa, Thanatephorus cucumeris
MTVKIGINGFGRIGRIVLRNAIEHGEVDVVAVNDPFIDLDYMVYMFKYDSTHGRFKGEVKVDKEKKQLVINGKNIDVHSERNPGDINWDASGAEYVVESTGVFTTIEKASEHFKKSPSLKKVVISAPSADAPMHVVGVNLDAYDPKGPKISNASCTTNCLAPLAKIIHDEFGIVEGLMTTVHATTATQKTVDGPSAKDWRGGRGAAANIIPSSTGAAKAVGKVIPSLNGKLTGLAFRVPTADVSVVDLVVRLEKSATYDEIKATIKKASEGEYKGIMGYTEDDVVSTDFVGDEHSSIFDAKAGISLNKNFVKLVSWYDNEWGYSRRVVDLIAYVAKKDKEAGC

SEQ ID NO: 11535 - protein, 337 aa, Thanatephorus cucumeris
MAVKIGINGFGRIGRIVLRNAILHGDIDVVAVNDPFIALDYMVYMFKYDSTHGRFKGQVEAKDGKLIIEGKPVAVHSERDPSTINWGDAEYVVESTGVFTTVEKASAHFKASPNLKKVVISAPSADAPMYVVGVNLDAYDPKGPKISNASCTTTCLGPLDKVINDEFGIVEGLMTTVHATTATQKTVDGPSAKDWRGGRGAAANIIPSSTGAAKAVGKVIPSLNGKLTGLAFRVPTSDVSVVDLVVRLEKSASYDEIKAALKKASEGEYKGIIGYTEDDVVSTDFVGDEHSSIFDAKAGISLNKNFVKLVSWYDNEWGYSRRVVDLIAHIAKKDAEA

SEQ ID NO: 11536 - protein, 372 aa, Pyrococcus horikoshii OT3
MLKLVENVVERVSSEETKVQEVQVPQSSIDEELKKIVEQIKARIHVVGVGGAGCNTVNRMMEVGVTGAKIIAVNTDAQDLLKVKAHQKILIGKEITRGLGAGNDPKIGEEAAKESEREIREALEGADMVFVTCGLGGGTGTGAAPVIAEMARKMGALTVSVVTLPFTMEGIRRAKNAEYGLKRLAKASDTVIVIPNDKLLEVAPKLPIQMAFKVADEILVQAVKGITELITKPGLVNLDFNDVRAVMKDGGVAMIGIGESDSEKRALEAAEQALNSPLLDVDISGAKGALISISGADVKLEEAQQIIEYVTRNVDPKAQVIWGIQLEPELEKTIRVMVIVTGITSRYVTFQEETPAPSEEETTPVKIDIPEL

SEQ ID NO: 11537 - protein, 550 aa, Streptomyces coelicolor A3(2)
MSDTPKLNQRPEWTALADHAKGTLPHPDLRELFAQDPGRAERYVVRVGDLRIDYSKHLVTDETLALLQELAAATGVSGLRDAMFRGERINITEDRAVLHTALRAPRDAVIEVDGENVVPQVHAVLDKMAGFADRVRSGEWTGHTGRRIRNVVNIGIGGSDLGPAMAYEALRAFTDRSLTLRFVSNVDGADLHEAVRDLDPAETLFIIASKTFTTIETITNATSARSWLLDGLGGDEKAVAKHFVALSTNAEKVADFGIDTANMFEFWDWVGGRYSFDSAIGLSLMIAIGPDRFREMLDGFRIVDEHFRNAEAPANAPLLLGLLGVWYGDFLGAQSHAVLPYSHYLSKFTAYLQQLDMESNGKSVDREGNPVQWQTGPVVWGTPGTNGQHAYYQLIHQGTKLIPADFIGFARPVDELSEELKAQHDLLMANFFAQTQALAFGKTPDEVRAEGVPEELVPHKTFRGNHPTTTVLAAELTPSVLGQLIALYEHKVFVQGAIWNIDSFDQWGVELGKVLAKRVEPALTEGADVPGLDPSTAALVAAYRELKEVH

SEQ ID NO: 11538 - protein, 145 aa, Oryza sativa
  misc_feature (15)..(15): Xaa can be any naturally occurring amino acid
  misc_feature (18)..(18): Xaa can be any naturally occurring amino acid
  misc_feature (62)..(62): Xaa can be any naturally occurring amino acid
  misc_feature (79)..(79): Xaa can be any naturally occurring amino acid
INNMGAEAIIMEALXKFXKGFKNPFFRSAKKNMGFFLAEFEKITKKLGIPKGVFPKIEEELXLEIPKSELPEFKKECFXPMGVPLKRGGFKAGEMPYVKKLAIRNFLWAINFSRLFERLGPSIRVFFSSATRPCKHPKEGYFCFL

SEQ ID NO: 11539 - protein, 112 aa, Erythrobacter sp. NAP1
MKKIEAIIKPFKLDEVKEALHEIGVSGITVTEARGFGRQKGHTELYRGAEYVVDFLPKVKLEVVVPDDQADRVVEAVAAAAQTGRIGDGKIFVSPIERALRIRTGETDDDAI

SEQ ID NO: 11540 - protein, 1106 aa, Pseudoalteromonas tunicata D2
MTADWLTAFFVSSNDNLLITGLYSPLLVSISVLIAIFSAFMAFEVVTQAVKSHSTTRQQLMLLTSSVALGGGVWSMHFIGMLAFDLCTPVTYSFTLTALSLLPSIAASWVALNLLAKPSFKVSQILLSGILVGAGIGTMHYIGMASMQMAPLLRYDPWIFALSILVAVVLAILALWVKAGLNHVAQTKISTRLSNSLASIVMGLAIAGMHYTGMAAARFVLPPGLELTTQSSNISFYLAMGVTITTIVMVSIVLVVNILFKYKDISLLAKSNEDRLHAMMNTAIDGIITIDAKGNVVSVNQAVETILGWQACELIGSNVKKIMPSAIADEHDNFLTRYLNTRQAKIIGIGREVTAVHKQGHLVPVHLGIGHVKQGKEHFFVGFISDLTKRNTMELALKRKESKFRSLISNIPGIAYRCKNEPGWPMVYISNAVQTITGYAPSEFELPNPQRFFSDLYHPDDIAFIESQAKPPTFALEYRIIRRDGQIRWLFEHGNYIQDNNSGETWLDGFIMDITERKEMEQDLLLAKEHAEQAAAARAAFLANMSHEIRTPMNAIIGFSDILLDTALDKEQLKHLSTISRSAKSLLHLLNDVLDSAKLDKGKLELENRVFSLTDEIDTVVSTLWLQAKQQNLALEADISPKMASHYLGSPERLRQILTNLIGNAVKFTAQGKVTVKIYPSAEQSVTFEIIDTGIGMSAEQLEHVFDAFSQADASMSRKYGGTGLGTTISKQLVELMGGEIEVESELGKGSIFRFTLPMQISQQPEVQLQPKATTLPPLVILVVDDIQQNIDLLTVLLTRAGHTVLTARDGQQALVRMKQNDIAVTLMDLQMPIMDGLSATQARREQERNENLPYMPIIALTASVLAQDKIATQQAGMDGFANKPIDLALLNSEIARVLNLTMSPISAATLQHKPKLIDTTQGITLWGSETVYFSELAKFCTQWPSKYQALQLAVDQQDLTRIKQLSHGLKGICGNLALTQWMTIFAQLEQNDPDTFQVLLDTLANSFPAIKAQLDTNKSDNQQSCITSENNAVETHTLLMQVEILIGAVCHHTYDQSNLDTLVTLASNHHPNLVESIVKALDDFDFEIAHQALLALKQALLENEE

SEQ ID NO: 11541 - protein, 332 aa, Glycine max
  misc_feature (226)..(226): Xaa can be any naturally occurring amino acid
MASFNLSYSSSPALSRPRASKQFKLFNDVPFVRMNSKFPSSDNAIGRIKAKLISGGGDLLSYPNGNGIVIGKNLVGDESVQIEVQPNGTLADDTGLTSNVFSMDNNEFDSDSPSAGFASIPEAIEDIRQGKMVVVVDDEDRENEGDLIMAAQLATPDAMAFIVKHGTGIVCVSMKEEDLDRLELPLMVNSKDNDEKLCTAFTVTVDAKHGTTTGVSAHDRATTVLXLASRDSTPGDFNRPGHIFPLKYREGGVLKRAGHTEASADLAVLAGLDPVAVLCEIVDDDGSMARLPKLRQFAERENLKIVSIADLIRYAVTIHGPCNKIHCMHIYV

SEQ ID NO: 11542 - protein, 275 aa, Magnetospirillum magnetotacticum MS-1
VSGVNAETADRDLGRGGSDTSAVAIAAAIGAERCDIYTDVDGVYTTDPRVVPKAQRMERVTFEEMLEMASLGAKVLQVRSVELAMVHRVPTTVRSSFDPPDAARPGTLICDEDQIVEQQIITGIAFSKDEAQITLRAVKDSPGIAAAIFGPLADANINVDMIIQTVSGDQSTTDMTFTVPAADYERSRAILDAQRDTIQFGQIEGATDVVKVSAIGVGMRSHAGVAAKAFRALAQKGINIRAITTSEIKFSVLIDAAYTELAVRTLHSLYGLDQA

SEQ ID NO: 11543 - protein, 417 aa, Propionibacterium acnes KPA171202
MAIPSQNYLAVIKVVGVGGGGCNAVNRMIEAGLKGVEFLAVNTDAQALLTSDADVKLDIGRDLTRGLGAGADPDKGRQAAEDHADEIEESLKGADMVFVTAGEGGGTGTGAAPVVAKIARSLGALTIGVVTRPFSFEGHRRSSQAEQGIDNLRDEVDTLIVIPNDKLLDMTDQQIAILDAFKQADQVLMQGVSGITDLITTPGQINLDFADVKSVMSNAGSALMGIGRASGEDRARAAAEMAISSPLLEVSIDGARGVLLSIAGGSDLGLFEVASAANLIEAAAHDEANIIFGTIIDDALGDEVRVTVIAAGFENGQLTSTKQPGISQRPASRPAMTNRSSAGVIGAGTGSAASTSAGSSSSASRQPADNQRPTPIRPQTQGSPFGKAQSQQQSHPVEPVNPPEEPDDDLDVPDFLK

SEQ ID NO: 11544 - protein, 417 aa, Triticum aestivum
TRPPTRPQKEKDHIEGFAPEVAWVTKSGKSDLEAPIAIRPTSETVMYPYFSKWIRSHRDLPLKCNQWCNVVRWEFSNPTPFIRSREFLWQEGHTVFATKEEADEEVPPRPELYRRIYEEFLAVPVSKGRKSEMEKFAGGLYTTSVEAFIPNTGRGIQGATSHCLGQNFAKMFDITFENEKGERSMVWQNSWAYTTRSIGVMIMTHGDDKGLVLPPKVAPIQVIVIPVPFKDADTTAIKGACESAVYTLNEAGIRADLDARENYSPGWKYSQWEMKGVPLRIEIGPKDLANKQVRIVRRDNGTKVDIPSTDLVEQVRVLLDGIQANLLETAKAKRDACIVSISTWDEFIAALNDKKLILAPWCDEEEVEKDVKARTKGELGAAKTLCTPFDQPDLPSGTVCFASGKPAQKWSFWGRSY

SEQ ID NO: 11545 - protein, 470 aa, Leifsonia xyli subsp. xyli str. CTCB07
MSESVSLPALGESVTEGTVTRWLKNVGDHVDVDEPLLEVSTDKVDTEIPSPVSGVIEAILVQEDKTVEVGTALVTIGDGSGAGEPPAAPAAETTAPAAEAAPASPGPAAQETAAAAAVLSAPTVDATPAPAQQATVAPAVAAPTVEAALAPAQQAAPAAAPAPAPGGAHTGNVGYVTPIVRMLANQQGVDLSAVTGTGVGGRIRKEDILSAAAPAATGLAAAAVPAPAAEVSPLRGTTQPMSRLRKVVAERAVVSMQSTAQLTSVVEVDVTKVAALRDRVKSDFLAKTGVKLSFLPFFALAAAEALKTYPVINATVDGDNIVYPNQENMSIAVDTERGLLTPVVRNASELDLAGLAKEISDLAERTRDNRLKPDELAGGTFTLTNTGSRGALFDTPVVFLPQVAILGTGIVTKKPVVVSADGTDSIAIRSTIYLALSYDHRIVDGADAARFLVAVKNRLEGADFERSLGL

SEQ ID NO: 11546 - protein, 710 aa, Aspergillus nidulans FGSC A4
MTKRTKKVGITGKYGTRYGASLRKQVKKMEVSQHARYVCTFCGKNTVKRQAVGIWECKGCKKTIAGGAYTVSIERRVRTCQTNRIKSEGGHTRLALGHVGSQTVSGDLGESASDPLAASVPRPDLEPDGKAPDISTKAEGSDGSEDSFIAQLLPCGHILHNNCLKPWVERANSCPICRRTFNEVELSDRVGGPVISSYAVEDRVQVADVDPSMVVEYIDDDVSDFQPCPICGDSENEEVLLLCDGCDVPTHIYCVGLDEVPAGPWYCSRCETQRPIGLSSDAVDRLSHAQTRRRHRTRAQQRRVLSRNQINSLHWARVWQSVWDNLNIDLDFPFDDDRAVERALQQQRREEANQREFRTWQRRFDVAERQGGRNRFRDTAALLDIEAPRPSRPRAPRAPTPEPESLEEMRAWNAFERAREIENNPSAARKRKEPTMSPSPEPAEPARKLKRPRTRRAEDLAALAVQNGESSRSATAQASARLNADNSSEPSFLSSLLKEVEDASTPQSVNSYGPSAHVSAEQSTLGLSSPSISPVPSNQSSPRLSSTTPPPHSGSRPISPMQLTPPREVSSPTFSPEVSPASSHKDVREETPSRSRPRRIPRAAHIVRAVRSNESSPARIGLSLEVKSDIQKLVSAALKPHYRSKVVSKEEYTDINRNISRKLYEHALGLDSLESTTKARLEAKAKEEVHNAVEALRQSKARANGSDDSS

SEQ ID NO: 11547 - protein, 564 aa, Xanthomonas axonopodis pv. citri str. 306
MCSIFGIFGLQPGDDLQALRRQALECSQRQRHRGPDWSGVYVDTGAILVHERLAIVDPAGGSQPLLSEDGQLALAVNGEIYNHRELKAELLQPYAFQTGSDCEVINALYREDTPASYLNRLNGIFAFALWDKTEGRVIIARDPIGVVPLYWGHDREGRLRVASELKSLVDDCADAAQFPPGHWYDSATGALNRYYERAWRQYGAVEGVQVQLQELREAFERAVHRQLMTDVPYGVLLSGGLDSSLVAAVAARYARHRIEENDITEAWWPRLHSFAIGLKGSPDLAAAEVAAAALGTVHHGFEYTFDEGLDALPDVIRHIETYDVTTIRASTPMFLLARRIKAMGVKMVLSGEGSDEIFGGYLYFHKAPNAREFHEELVRKLDALNNYDCLRANKSMMAWGVEPRVPFLDREFLDVAMRMDARFKMIDKTSSGATRMEKGVLREAFAGYLPESILWRQKEQFSDGVGYGWIDGLKAHAQSQVSDRELAAADRRYPVNPPQTKEAYFYRSLFEQFFPGQAAAETVPGGKSIACSSPTAIAWDASFAAMADPSGRAIAGVHAQALAS

SEQ ID NO: 11548 - protein, 404 aa, Rhodospirillum rubrum ATCC 11170
MFKGKVVVAQGGGPTAVINQSMVGAVLESRKFRNVELVYGAVHGVRGIVDEHFLDLTQETTHNLEMVAETPSSALGSTREKPDLKYCQEIFKVLKAHEIGYFFYIGGNDSSDTVRIVSEEAAKADYGLRCIHIPKTIDNDLVVNDHTPGFPSAARFVAQAFSGVNLDNQALPGVYIGVVMGRHAGFLTAASALGKKFQDDGPHLIYLPERTFDVDTFVSDVKEVYDRTGRCIVAVSEGIHDASGEPIITKLAEEVERDAHGNVQLSGTGALADLLVSVVKKKSGIKRVRGDTLGYLQRSFVGCVSDVDQREAREVGEKAVQYAMWGQTNGSVTIHRTGFYSVDYQLTPLLDVAGKTRTMPDSFIAANGHDVTTDFLMYLRPLLGRGMPDAYRLRDNRVAKVLNR

SEQ ID NO: 11549 - protein, 967 aa, Arabidopsis thaliana
MANRKLEKMASIDVHLRQLVPGKVSEDDKLVEYDALLLDRFLDILQDLHGEDLRETVQELYEHSAEYEGKHEPKKLEELGSVLTSLDPGDSIVIAKAFSHMLNLANLAEEVQIAYRRRIKKLKKGDFVDESSATTESDLEETFKKLVGDLNKSPEEIFDALKNQTVDLVLTAHPTQSVRRSLLQKHGRIRDCLAQLYAKDITPDDKQELDEALQREIQAAFRTDEIKRTPPTPQDEMRAGMSYFHETIWKGVPKFLRRVDTALKNIGIEERVPYNAPLIQFSSWMGGDRDGNPRVTPEVTRDVCLLARMMAATMYFNQIEDLMFEMSMWRCNDELRARADEVHANSRKDAAKHYIEFWKSIPTTEPYRVILGDVRDKLYHTRERAHQLLSNGHSDVPVEATFINLEQFLEPLELCYRSLCSCGDRPIADGSLLDFLRQVSTFGLSLVRLDIRQESDRHTDVLDAITTHLDIGSYREWSEERRQEWLLSELSGKRPLFGSDLPKTEEIADVLDTFHVIAELPADSFGAYIISMATAPSDVLAVELLQRECRVKQPLRVVPLFEKLADLEAAPAAVARLFSVDWYKNRINGKQEVMIGYSDSGKDAGRLSAAWQLYKAQEELVKVAKEYGVKLTMFHGRGGTVGRGGGPTHLAILSQPPDTINGSLRVTVQGEVIEQSFGEEHLCFRTLQRFTAATLEHGMRPPISPKPEWRALLDEMAVVATEEYRSVVFQEPRFVEYFRLATPELEYGRMNIGSRPSKRKPSGGIESLRAIPWIFAWTQTRFHLPVWLGFGSAIRHVIEKDVRNLHMLQDMYQHWPFFRVTIDLIEMVFAKGDPGIAALYDKLLVSEELWPFGEKLRANFEETKKLILQTAGHKDLLEGDPYLKQRLRLRDSYITTLNVCQAYTLKRIRDPSYHVTLRPHISKEIAESSKPAKELIELNPTSEYAPGLEDTLILTMKGIAAGLQNTG

SEQ ID NO: 11550 - protein, 135 aa, Frankia sp. EAN1pec
MTTKELIMITSDVQDRSAPAAPAGTVWHADDTTFDEIVLRSPLPVLVDFSAEWCPPCRMMRPVLAQIAADLADRLRVVEVDADASPQTAIAYGVLAMPTLVVVRGGETVTKLVGARSRRRLLADIGERDDPDLGG

SEQ ID NO: 11551 - protein, 66 aa, Glycine soja
ETRHPVYRGVRRRDSGKWVCEVREPNKKSRIWLGTFPTAEMAARAHDVAAIALRGRSACLNFADSA

SEQ ID NO: 11552 - protein, 445 aa, Pseudomonas aeruginosa
MTQSVDAFLERLKRRDPDQPEFHQAVEEVLRSLWPFLEANPHYLEAGIIERIVEPERAILFRVPWVDDQGRVRVNRGYRVQMSSAIGPYKGGLRFHPSVNLGVLKFLAFEQVFKNSLTTLPMGGGKGGSDFDPKGKSDAEVMRFCQSFMSELYRHVGADLDVPAGDIGVGAREIGYLFGQYKRLSNQFTSVLTGKGLSYGGSLIRPEATGFGCVYFAQEMLKDRGRGFDGQRVAISGSGNVAQYAARKVMEMGGKVISLSDSEGTLYAEAGLSDEQWEYLMELKNARAGHPRDGVEQFSLQFLEGVPPWGLACDIALPCATQNELDAEDARRLLANGCVCVAEGANMPSTLEAVDLFLEAGILYAPGKASNAGGVAVSGLEMSQNAMRLRWSEGEVDTKLHGIMQSIHHACLLYGEEQGRVNYVKGANIAGFVKVADAMLAQGVV

SEQ ID NO: 11553 - protein, 436 aa, Arabidopsis thaliana
MPGHRSKSEKKDADKQLRRDPYEVLGVLRNSTDQEIKSAYRKLALKYHPDKTANDPVAADMFKEVTFSYNILSDPEKRRQFDSAGFEAVEAESQELELDLSSLGAVNTVFAALFSKLGVPIKTSVSATILEEALNGRVSVDPLVLGQAVSKKVEKQCAHFYAVTISEEEVSAGLVCRVESSSKSKFKLLYFDQEANSGLSLALQEDSKRTGKITSAGMYFLGFPVYRLDHTINSMAQAKDPETAFFKKLDGFQQCEVTELKAGTHVFAVYGDNFFKNVSYTIQVLCAAAFTQEKEDLRSVEAQILTKRAELAKFETEYREVLVQFTDMTSRYAQEMQSIDELLKQRNEIHSAYTTIPLMKRSSSKNRMRKSSFKKAAAKAPAPTEQEEEEEEEEEEEEESSRQKNKKPSTCDKSETLKKKSKWFNLHLKLDKKKPC

SEQ ID NO: 11554 - protein, 506 aa, Sulfolobus tokodaii str. 7
MVTLKELTGFKDIYTIDSDGIPVFKTYLVGEWVGSKEIENIKSPIDLTVYARVPKLNYEMVDNTLSILYSKGRWAIRDLPGEKRLKIYHTLADLIEKYREDFVEVLMIGNGKTKSAAQGEVNAAIERLIRADLDVRKLYGEYVPGDWSSESLEAEAIIRREPLGVVLAITPFNYPLFDIVNKLVYSTVAGNAFMLKPASSTPLPAIMLAKLLEIAGFPKEALAIIAVPGSEMDKIVADKRISVISLTGSSETGEHVMKVAGLKQYVMELGGGDPAIVLDDSDPKTTAQKIVTGITSYSGQRCDSIKFIFAEPKVYEELKNYIVEELKKVKVGDPREADTVMGPIIDTRTVDEFEYAVKDAVEKGGNILYGGKRLGPTYIEPTLIEIDKEKIKDLYLYKKEVFLSIAVITKVNNIDEAIELSNGRRYGLDAAIFGNDITKIRKLIRMLEVGAVYVNEYPKHGIGYFPFGGRKDSGIGREGIGYTIENVTAYKTIVYNYRGKGVWEYL

SEQ ID NO: 11555 - protein, 225 aa, Glycine max
MLSISATRIFFLRSTTIRLSSSSSSLQFFSNPNRTLFRPFLHTSFKPLPSSFSFRTDHTMATSNAKSVHDFTVKDAKGNDINLGDYKGKVLIIVNVASQCGLTNSNYTELSQLYEKYKQKGLEILAFPCNQFGAQEPGSNEQIQEFVCTRFKAEFPVFDKVDVNGDKAAPLYKYLKSSKGGLLGDGIKWNFAKFLVDKEGNVVDRYAPTTSPLSIEKDLLKLLDA

SEQ ID NO: 11556 - protein, 713 aa, Burkholderia sp. 383
MNTPTAVVPGWELDSAPFHAGELAVQQRAGVTEAAGSAGRRGIRRFMPDQHRTFFAQLPFFVLGGVDAHGQPWATLRAGAPGFVTSPDARTLRIAARALPGDPLAGAWQPGAPLGGLGIEFDTRRRNRVNGVVRAIDGDALTIAVEQSFGNCAKYIQGRKPTFVAREVDTSAAPDVSDALNDADRALLAQVDTFFVASANTSADAGAARGADVSHRGGMPGFVRVDDARTLTTPDFSGNRFFNTLGNLQHDPRAGLLFVDFDNGDLLYVAARAEIVWDGPLVASFDGAQRVVRFHVREVRRMRAVLPFRWSAVERAPQFAAMAAGAGAGANANANAAAAAAAVVVPSASTPESTSESTSTSTSASTPASTSAPAWRPLRIAKIVDEARAIRSFHFEPVDGGTLPAYEAGQHLTLRVALPGSDSPAIRSYTLSDAPGDAHYRITVKREGRVSAWLHDHAHLGMTVDAQMPRGRFSFDLASPRPAVLVSAGIGITPMIAMLRRALADDQPSRRVVFVHGARESDDRPFAEELARVAATDERLSLHWFDSHPQEGSAAHAGRIDIAQLKRILSFDDYDFYLCGPSAFMRDLYDGLRALNVPDERIRFEAFGPSSVVRSATRAAATPAVASVPIVFRRTGREAAWTPADGTLLEFAEGQRVDVPSECRSGSCGTCATRVLSGAVDYEQAPDAPVEPGCALLCVARPVQGSEPLVLDR

SEQ ID NO: 11557 - protein, 89 aa, Escherichia coli
MLDNVLRIATRQSPLALWQAHYVKDKLMASHPGLVVELVPMVTRGDVILDTPLAKVGGKGLFVKELEVALLENRADIAVHSMKDVPVEF

SEQ ID NO: 11558 - protein, 487 aa, Burkholderia sp. 383
MTIKHWIGGREVESRETFTTLNPATGDVITDVASGGEAEVDAAVRAAKEAFPKWASTPAKERAKLMRKLGELIEKNVPNLAALETQDTGLPIAQTSKQLIPRASENFNFFAEVCVQMNGRTYPVDDQMLNYTLYQPVGVCALVSPWNVPFMTATWKTAPCLALGNTAVLKMSELSPLTADQLGRLALEAGIPPGVLNVVQGYGATAGDALVRHPDVRAVSFTGGTVTGKRIMERAGLKKYSMELGGKSPVLIFDDADFDRALDASLFTIFSINGERCTAGSRIFVQRTIYDRFVQEFARRANNLIVGDPSDPATNLGAMITRQHWEKVTGYIRIGEQEGARVVAGGADKPAGLPDHLRNGNFVRPTVLADVDNRMRVAQEEIFGPVACIIPFEDEDDGLRLANDTAYGLASYIWTQDVGKVHRLARGIEAGMVFVNSQNVRDLRQPFGGVKESGTGREGGEYSFEVFAEIKNVCISMGSHHIPRWGV

SEQ ID NO: 11559 - protein, 262 aa, Bacillus cereus ATCC 14579
MLQLQNISVDYVTPHVVKISLYRERQANSLSLALLEELQNILTQISEESNTRVVILTGAGEKAFCAGADLKERAGMNEEQVRHAVSMIRTTMEMVEQLPQPVIAAINGIALGGGTELSLACDFRIAAESASLGLTETTLAIIPGAGGTQRLPRLIGVGRAKELIYTGRRISAQEAKEYGLVEFVVPANLLEEKAIEIAEKIASNGPIAVRLAKEAISNGIQVDLHTGLQMEKQAYEGVIHTKDRLEGLQAFKEKRTPTYKGE

SEQ ID NO: 11560 - protein, 334 aa, Xylella fastidiosa Temecula1
MSIEQLAETAQAMVASGKGIIAIDESAGTIAKRFSSVGIENIEENRRAYRELLLTTPKLSDYISGAILFDETIRQSTKAGVPFPKYMAEHGIIPGIKVDKGAYPLAGCPGELVTEGLDGLRARLEEYYKLGARFAKWRAVINIGDDIPSGMCIDANVHALARYAALCQEQGLVPMVEPEVIMDGNHDISAAYEVTEATLRSLFNALYEQNVVLEGTILKASMVIPGTDCEEQASIDEVAESTVMCLKSTVPAILPGIVFLSGGQTDAQSTAHLNAMNQFDPLPWPLSFSYGRAMQQAALKLWSQDMKGNFAKAQQVVYERAKENGLAALGKWKG

SEQ ID NO: 11561 - protein, 387 aa, Crocosphaera watsonii WH 8501
MDRVGVLLLNLGGPEQLQDVRPFLFNLFSDPEIIRLPFPWLQKPLAWFISNARVNTSQENYRQIGGGSPLRKITEAQGEALEQKLAETGQKADIYIGMRYWYPFTEEAIARIKRDRLRKLVILPLYPQFSISTSGSSFRVLEEMWEADPMLRQIEYTLIPSWYDHPLYLQAMADLIAQELDKCPNPDDIHIFFSAHGVPQSYVEEAGDPYQAEIEACTRLIMKTLSRPNAHTLAYQSRVGPVEWLKPYTEEALQELGAEGVKNLLVVPISFVSEHIETLQEIDIEYREVAEEAGITNFLRVPALNTHTLFIDALADLVTHSLKEPPVTFKSITHPKKNMKMYPQERWQWGLTTAAEVWNGRLAMLGFFGLLIELMTGHGPLHYVGLL

SEQ ID NO: 11562 - protein, 274 aa, Pyrococcus horikoshii OT3
MKVIMTTKVDKASMNIMNKLIENFGFKETEYVFDGNPVYKRGDVLILTTNDEMIYYDYLDREIENQLGFKPEIIAFASRHSSKQKLPALTTHVTGNWGKAMYGGKDESFAVAIPSAMKLSLLKMSELNDLGWTVCYEATHHGPTELEVPSFFIEIGSSEEEWINDRAGEIIAETIIYVLDNYEKGRSKFKVALGIGGGHYAPKQTKRALEGDLAFGHILPKYAQPVSRDVMIKALNRFGEKVEAIYVDWKGSRGETRQLAKSLAQELGLEFIKD

SEQ ID NO: 11563 - protein, 397 aa, Bacillus thuringiensis serovar konkukian str. 97-27
MFHRIEEALEDLKQGKVVIVCDDENRENEGDFIALAEYITPETINFMITHGRGLVCVPITEGYAERLQLEPMVSHNTDSHHTAFTVSIDHVSTTTGISAHERATTIQQLLNPASKGADFNRPGHIFPLIAKEGGVLRRAGHTEAAVDLAQLCGAEPAGVICEIINEDGTMARVPDLLQCAKQFDIKMITIEDLIAYRRHHETLVTREVEITLPTDFGTFQAIGYSNSLDTKEHIALVKGDISTGEPVLVRVHSECLTGDVFGSCRCDCGPQLHAALAQIEREGKGVLLYMRQEGRGIGLLNKLRAYKLQEEGFDTVEANEKLGFPADLRDYGIGAQILKDLGLQHLRLLTNNPRKIAGLQGYDLTVTERVPLQMPAKEENKTYLQTKVNKLGHLLNL

SEQ ID NO: 11564 - protein, 139 aa, Aquifex aeolicus VF5
MAGRVIELNEQNWEQEVLQSDKPVLVDFWAPWCGPCRIIAPIIEEIAEELGDKVKVGKLNTDENPNIAMRYGIRAIPTIILFKNGEVVDTRIGVQPKERLNKWFLSTFNNLWRLRPVLIPLLKPHVTSFGGPPPRKSFS

SEQ ID NO: 11565 - protein, 143 aa, Glycine max
GAFTEKQDALVSSSFEAFKANIPQYSVVFYNSILEKAPAAKDLFSFLANGVDPTNPKLTGHAEKLFALVRDSAGQLKASGTVVADAALGSIHAQKAVTNPEFVVKEALLKTIKEAVGDKWSDELSSAWEVAYDELAAAIKKAF

SEQ ID NO: 11566 - protein, 405 aa, Aquifex aeolicus VF5
MAKEKFERTKEHVNVGTIGHVDHGKSTLTSAITCVLAAGLVEGGKAKCFKYEEIDKAPEEKERGITINITHVEYETAKRHYAHVDCPGHADYIKNMITGAAQMDGAILVVSAADGPMPQTREHVLLARQVNVPYIVVFMSKCDMVDDEELLELVELEVRELLSKYEYPGDEVPVIRGSALGALQELEQNSPGKWVESIKELLNAMDEYIPTPQREVDKPFLMPIEDVFSISGRGTVVTGRVERGVLRPGDEVEIVGLREEPLKTVATSIEMFRKVLDEALPGDNIGVLLRGVGRDDVERGQVLAQPGSVKAHKRFRAQVYVLSKEEGGRHTPFFVNYRPQFYFRTADVTGTVVKLPEGVEMVMPGDNVELEVELIAPVALEEGLRFAIREGGRTVGAGVVTKILD

SEQ ID NO: 11567 - protein, 285 aa, Thiobacillus denitrificans ATCC 25259
MEPESSHRPSLLERLSHWLMREPEDREQLIELLHGAYENNLMDADALAMIEGVLQVSEMRVGEIMIPRAQMDIVDINDAPETFIPHVIETAHSRFPVIDKDRDDVIGILLAKDLLRHYAESDSDIRGMLRPAVFIPESKRLNVLLKEFRSNRNHIAIVVDEYGGVAGLVTIEDVLEQIVGDIEDEYDFDETEDNIIRENEGVFRVKAGTEIEDFNEILGAHFSDEEFDTVGGLVVSRFGHLPKRGETVRFDGFQFSILRADSRRLHAVRVTRLSPEEEEVQLPLV

SEQ ID NO: 11568 - protein, 367 aa, Enterococcus faecalis V583
MNQEKIADLKNWMHQEKIDFTYISDPGHIAYFSGYESEPHERVLALFIAADDQSFLFTPALEVEDAEKSSWTYPVYGYLDSENPWEKIAALLNKRTQGTPRFALEKQALSLARFDQLKTYFPASDFSHDVTPLIEKLQLIKTEPEIQRLLEAGSWADVAFEIGFKAIQAGVAEQEIVAEIEYQLKRQGIRSMSFDTLVLTGKNGASPHGVPGETKIEPHDLVLFDLGVVHNGYCSDATRTVSYLEPSDFQKEIYGIVLEAQLAATEAVKPGVTAGELDDIARGVITKAGYGEYFNHRLGHGIGTTVHEYPSLVHGNDLVIEEGMCFSIEPGIYIPGKVGVRIEDCLHVTKTGSEPFTKTTKELQIIQ

SEQ ID NO: 11569 - protein, 337 aa, Candida albicans SC5314
MAFLFKRNPKTPPELVRALNDQVSKLDYASPDNAKKYQDECARYLKNMKVILHGDDEVEPQPDQITQLAQEIYSTDCLYYLVVNLRKLDFDSRKDVVILFSTLLRRTMANKSPTVDYLVHSKPEIITMLIKGPENLEIGLICGQILRDCIKFEVINRFVLYSPSFYNFFKYVQIPTFEIATDAMMTLHELLTTHRKLVSEFLGNNYDVFITAINKLITSKNYVTKRQSVKLLNELVSQRSNQQFLSKFFDDANNLKLTMLLLSDKSKNLQLEGFHTLKFFVANPKRSQKVTDILIKNKANFIEFFKTFDIASFHDSNIIEERDYTLGEIKNLPDRIH

SEQ ID NO: 11570 - protein, 424 aa, Parvularcula bermudensis HTCC2503
MSQSSMFPEAGAAPLAYASSLAFVPTRAAALARLDAFAPNMGSLYAKNRNRDDGPADRRYVSCLSPYLRHRLITEQEVIAAALNRFAFSTAEKFIQEVYWRTYFKGWLERRPWVWDLYTDDRDRRLNELSGDQATAYQAAVEGRTGIDGFDAWTKELIATGYLHNHARMWFASIWIFTLRLPWSLGADFFHRHLLDGDAASNTLSWRWVGGLHTKGKTYLARPSNIEKFTNGRFSPSPEDLAKEAPALEDDWNGEPGDPPGDLPLTSRDPAFLLLHEEDLGLETLPVEKARLVGVGLFVDPACRSAAPVGGLVSQFTQGAIDDTRHRAKTVVGCDAVIVPDEDNLLEAVTAAGANTVILPYLPVGPLRGPVARMTGRLAAEGFRVETMLRSHDRHAWPHASKGFFRLKKKIPSLIARERTPSLL

SEQ ID NO: 11571 - protein, 329 aa, Pyrobaculum aerophilum str. IM2
MKLDLRRITLAQDVLEAVGSQLLDVIIVGGGPAGLAAAMYATRFGLNTLIITEDVGGQLTKAGLIEDYLGFRSVQGPELARVFESHVRKYGVSILLDKVEDIRRDGGSFVIKTENSGDFRSLTAIIAVGERRKKLGVPGEEEFNARGVSYCAPCDAPLFRDKVVAVMGGGDAAAQAALLLTNYASKIYLIHKRDRLRAQPHYQKLLNHEKIEILWNTIVKELRGDKALREAVIKRTDTGEEGVLKIDGIFIEIGAEPPAEFFKRIGLITTDDGYVKVNEAMETNIPGLFAAGDCTSAMPRGFKQIQIAAAHGAIAAYSAYNYILKLRGG

SEQ ID NO: 11572 - protein, 457 aa, Staphylococcus epidermidis ATCC 12228
MAIGVILNRVFRLNNNPLFDYIYSNKESINHCYFIIPTEEFEEEAKKKAQYYYGSIQKFMYELQRYDIEPFLMSYDKLIDFCKKQAIDKVVVAGDIMSYHHEEYDILHQRKRFKQANIQVISLRANHYFNPRKTYNKQGEPYKVFTSFYRKWRPYLMIRDEYDYHLEDISKVVVKSQHKIKEDYHSYGISERDVQNRWSEFLSQDIENYKENREYLPEVLTSQLSIYLAYGMIDIIQVFNDLLQNYDKNEQNYETFIRELIFREFYYVLMTNYPETAHVAFKEKYQQLKWSYNEENFKLWKDGNTGFPIIDAAMEELKTTGFMHNRMRMVVSQFLTKDLFIDWIWGESFFKQKLIDYYAASNVHGWQWSASTGTDAVPYFRMFNPIRQSERFDNNARYIKTYIPRLNQVDAKYLHDTHKFEQQIKGQGVEIGKDYPKQMIDHKESRQRVMSEFKALD

SEQ ID NO: 11573 - protein, 453 aa, Ashbya gossypii ATCC 10895
MLAFTRIAPKVRTLASVARMQLRTYASYPPHTIIGMPALSPTMTQGNLAVWTKKEGDKLSPGEVLAEVETDKAQMDFEFQEEGFLAKILVPEGAKDVPVNKPIAVYVEEEGDVAAFKDFKVEESAAESKDAPAKEEAAPAKAAPAAAAPAKAAKKSTGSAASGGRIMASPLAKTIALEKGISLKEVTGTGPNGRITKEDVEKYLAKAPKKTESAAAPAAATYEDVPISNMRRVIGSRLLQSCQSIPSYPISSDISVAKLLKLRQSLNAAGKDQYKLSINDILIKAIAGAAKRVPEANAYWLEDQGVIRLFKNVDVSVAVATPTGLITPIVKNAESKGLRSISAEIKELGKRAKENKLAPHEFQGGTICISNLGMNNAVSSFGSIINPPQSTILSIGTLRRVPVEDAGAEYGFTFEDRMNITGVFDHRTIDGARAADFMRELKNIIENPLELML

SEQ ID NO: 11574 - protein, 408 aa, Pseudomonas sp. Cam-1
  misc_feature (36)..(36): Xaa can be any naturally occurring amino acid
  misc_feature (51)..(51): Xaa can be any naturally occurring amino acid
  misc_feature (104)..(104): Xaa can be any naturally occurring amino acid
  misc_feature (119)..(119): Xaa can be any naturally occurring amino acid
MIDTIAIIGAGLAGSTAARALRAQGYEGRIHLLGDXSHQAYDRTTLSKTVXAGEQPEPPAILDSAWYASAHVDVQLGRRVSCLDLANRQIQFESGAPLAYDRLXLATGARARRMAIRGXDLAGIHTLRDLADSQALRQALQPGQSLVIVGGGLIGCEVATTARKLSVHVTILEAGDELLVRVLGHRTGAWCRAELERMGVRVERNAQAARFEGQGQVRAVICADGRRVPADVVLVSIGAEPADELARAAGIACARGVLVDATGATSCPEVFAAGDVAAWPLRQGGQRSLETYLNSQMEAEIAASAMLSQPVPAPQVPTSWTEIAGHRIQMIGDAEGPGEIVVRGDAQSGQPIVLLRLLDGCVEAATAINATREFSVATRLVGTRVSVSAEQLQDVGSNLRDLLKAKPN

SEQ ID NO: 11575 - protein, 430 aa, Cenibacterium arsenoxidans
LREGKDISEIRDSLMFGEANTTRPGDTGHEGFSKAAAMPDSAEVCGCNGVCKGTIVKAIKEKGLFTIEDVRKHTKASASCGSCTGLVEQIIMATAGGDYSASSKAKSMCGCTDHTHQEVRDAIRAEKLLTVATTMERMNWRTPNGCTTCRPAINYYLISTWPHEARDDPQSRYINERAHANIQKDGTFSVIPRMWGGETSSSELRRIADVVDKFKIPTVKVTGGQRIDLLGVKKEDLRAVWHDLGMPSGLAYAKGLRTVKTCVGSEWCRFGTQDSTRMGQQLEHQLARMYAPHKVKLAVSGCPRNCAESGIKDVGIIGVDSGWEIYVGGNGGIKTEVAEFFVKLKTHEEVLEYAGAFLQLYREEGWYLERTVHYLARVGLEHAKQKVIEDAENRKALYERLLFSLEGEADPWHEPEKAMVDTRQFESLSV

SEQ ID NO: 11576 - protein, 404 aa, Bacteroides fragilis NCTC 9343
MEPIRLNTIEEAIADFKEGNFVIVVDDEDRENEGDFIIAAEKITPEKVNFMLTHGRGVLCAPITEERCAELELDMQVSSNTSIYETPFTVTVDLLEGCTTGVSMHDRAMTIRALADPKTKPADLGRPGHINPLRARSRGVLRRAGHTEASVDLAKLAGLYPAAALIEIINEDGTMARLPQLVEVARRFGLKIISIKDLIAYRLQMESIVDRGVEVDMPTQFGHFRLIPFRQKSNGMEHIALIKGTWDTDEPILVRVHSSCMTGDIFGSCRCECGEQLHKAMEMIEAAGKGVIVYMNQEGRGIGLMNKIAAYKLQEEGYDTVDANLHLGFDADERDYGVGAQILREIGVKKMKLMTNNPVKRIGLEAYGLEITENVGIEIKPNPYNERYLKTKKDRMGHTLHFNK

SEQ ID NO: 11577 - protein, 81 aa, Triticum aestivum
  misc_feature (48)..(48): Xaa can be any naturally occurring amino acid
MSESGRPLPKFGEWGVNDPASADGFTVIFNKARDEKKAGNGQDTESPXKDARTERVGILCHQGQIQRKWFCCVDTKVLHNL

SEQ ID NO: 11578 - protein, 108 aa, Corynebacterium nephridii
MSATIVNTTDENFQADVLDAETPVLVDFWAGWCAPCKAIAPVLEELSNEYAGKVKIVKVDVTSCEDTAVKYNIRNIPALLMFKDGEVVAQQVGAAPRSKLAAFIDQNI

SEQ ID NO: 11579 - protein, 541 aa, Lactobacillus acidophilus NCFM
MTNAYNILNDPFLNKGTAFTKSERESLGLIGALPAKVQTIDEQATRIYDQDQLHEKGIDQRKFLMELFNTNRTLFYYVIEQHIEELMPIIYDPVIAPAIEEYSEIFMKPQGAAFLSIDNPGEIEASLTNAAGGRKIKLIVVTDGEGILGIGDWGSNGVNISVGKLMVYTAAAGIDPREVLPIVLDVGTDNQTLIDDPLYLGEKHARVTGDKYYDFVDKFVKIARKVFPDVYIHFEDFGRDNATKILNKYRKEIPVFNGDVQGTGIVCLAGVLGVLNISKQKFSDQIFLTFGAGTAGMGIANMMYREMLVEGMDPEEAKKHFYLVDKQGLLFSDTPGITPEQRPFVRERSEFVNADELTNLEAVIKTVHPTVMIGTSTTPGAFTEKAIKEMATHTERPIIFPISNPTKLIEASAEDLIKWTDGRALVATGVPSDPVKYNGVTYHIGQANNALIYPGLGLGVLASKAKLVTDEMLSAAAHSLGGIVDPNEKGASVLPPISKIRIFSDKEAISVAQTAIDQKLATPNITDAKAATENIKWIPKY

SEQ ID NO: 11580 - protein, 433 aa, Triticum aestivum
PNSRAPPSTSSPGGLNNRRFDLRAPASHQGHQRRDALASSDPPNPPLQSGNVIARKRRVQAQFNELQEYYLQRRRTGAQSHRQEDAVTMNREGYHEGLEDFQSVLTTFTRYSRLRVIAELRHGDLFHSANIVSSIEFDRDDELFATAGVSKRIKVFEFSTVVNEPSDVHCPVVEMATRSKLSCLSWNKYSKNVIASSDYEGIVTVWDVQTRQSVMEYEEHEKRAWSVDFSRTEPKMLVSGSDDCKVKVWCTNQEASAINIDMKANICSVKYNPGSSYYVAVGSADHHIHYFDLRNPSAPLHVFGGHKKAVSYVKFLSNNELASASTDSTLRLWDVKDNCPLRTFRGHKNEKNFVGLSVNNEYIACGSETNEVFVYHKAISKPASSHRFLSTDLDDAEDDPGSYFISAVCWKSDSPTMLTANSQGTIKVLVLAP

SEQ ID NO: 11581 - protein, 181 aa, Xanthomonas campestris pv. campestris str. ATCC 33913
MSQSIHDIPVTDINGGATSLAAHRGKVLLVVNVASKCGLTPQYEGLEALYRDKQAQGLEVLGFPANDFNGQEPGSEAEIAQFCQLTYDVTFPLFSKIAVTGAEIHPLYQALTSAQPQATGDGPMREKLAGYGIAANPAPGVLWNFEKFLIGRDGQVIERFAPDVAADDVRLRQAVDAALAH

SEQ ID NO: 11582 - protein, 408 aa, Nocardioides sp. JS614
MTVRRVALLTAGGLAPCLSSAVGALIERYTEVEPEIEIIAYLNGYAGLLGGRYLTITPEVRDQAHLLHRYGGSPIGNSRVKLTNVKDCVKRGLVQEGQDPLHVAAEQLTRDGVDVLHTIGGDDTNTTAADLAAYLHENDYELTVVGLPKTIDNDVVPIRQSLGAWTAAEQGALFARNIIAEHSSNPRMLIIHEVMGRNCGWLTAATAAKYREWVVAQEFSGFGGNTQEHWDVHAVYVPELSFDIAAESERLKAVMDQTGCVNIFLSEGAGVSTIVEEMLARGEEPKRDAFGHVKLDTINPGAWFGKQFGKLVGAEKTMVQKSGYFSRSAAANDEDLALIRACSDLAVDAALRGESGVVGQDEDADGELRVCEFPRIRGGKVFDTSAPWFGELLAGIGQPTGEPVAADH

SEQ ID NO: 11583 - protein, 302 aa, Crocosphaera watsonii WH 8501
MNKGWIYREKIKQNHAGLTLIEYYTKHYHHSNYQQWLERIISGQVLVDEQTVDPQTVLKTGQRLSYHRPPWQEPEVPLSFEIIYEDDNLLIVNKPSGLPVLPGGGFLEHTLLWQLKKQYPQNEPIPIHRLGRGTSGLMLMGKSAIARSHLTQQMREQKISKVYQGLIGKNNLPDKFSIDHPIGKIPDPVLGYIYGAKVDGKYAYSECRVLGRYVDKTLLEVTILTGRPHQIRIHLATIGYPLLGDPLYVVGGIPKTGFKEDNDTINVPGDCGYFLHAYQLSFVHPVTNQCLTFTCERPFLEE

SEQ ID NO: 11584 - protein, 453 aa, Mesorhizobium sp. BNC1
MRFLSFIAAFLIVAAASLPQASAQSSPDVFEAETFSLENGLQVVVIPQRRVPVVTHILFYKAGGADEERGQSGIAHFFEHLMFKATKNHEAGAFEAAVKAVGGSQNAFTTSDFTAYFEQVPPSALKDMMAFEADRMRNLVLSDDAIETERRVVMEERLMRVDNDPSGILREAVGANLFHNHPYGTPVIGWMHEIEKLTKEQLQTFYDRYYRPNNAVLVVAGDVDAETVRKLAEETYGKLERGPDLPPRIRPMEPDLKVEQVVILRDPRVTLPSFSRNWFGPAPFGENEQDADALVLLSTILGGGERSRLHQELVVKRQIASSAGAWTSMNLRDYSQMGVYASPIDPDKLREVQQAVDKEIEKMASENVSEHELETAKKVLASQLIFSWERQMSRALEVGTTLMVGGTLDDVASIRERIDAVTADQIREAAQRYLSVRRSVAGYLLPVDAEDPA

SEQ ID NO: 11585 - protein, 439 aa, Bacillus thuringiensis serovar konkukian str. 97-27
MAVENITMPQLGESVTEGTISKWLVNVGDHVNKYDPLAEVMTDKVNAEVPSSFTGIVKELIAGEGDTLAVGEVVCVIQVEGADEVAATAVEEKTKEEPKAEVATPEKAPKAKQPTDGKPRFSPAVLKLAGEHNVDLDLVEGTGANGRITRKDILKLVESGNIPQAGAVKKEEAVAAVVEARPEAPKAAPVAQKVEAAKPVSVPTMPGDIEIPVTGVRKAIAANMLRSKHEAPHAWMMIEVDVTNLVSYRNSIKGDFKKREGFNLTFFAFFVKAVAQALKEYPQINSMWAGDKIVQKKDINLSIAVATEDELFVPVIKHADEKTIKGIAREITELAGKVRTKSLKADEMQGGTFTINNTGSFGSVQSMGIINYPQAAILQVESIVKRPVIMENGMFGARDMVNLCLSLDHRVLDGLICGKFLGRVKEILENTSENNTSVY

SEQ ID NO: 11586 - protein, 419 aa, Brassica souliei subsp. amplexicaulis
HHRSYNLFFFVVLVLFHHVFSTNTLSPNETLTISSNKTLVSPGDVFELGFFTTTTHTDRWYLGLWYKTTSHKTYVWVANRDNPLHSSTGTLKISHSNLFLLDQFNTPVWSTNITETVTSPLTAELLSNGNFVLRDSKTKDTNQFLWQSFDFPVDTLLPEMKLGRNLKTGHDRVLTSWKSPTDPSSGDYSFKLETHQGSLLHEFYLLKNELKVYRTGPWFNAIPKMQNWSYIVNSFIDNKEEVSYAFKVNNHKMIHTRFRMSSTGLLQVITWTKTTPQRNMFWSFPEDQCDYYTSCGSYAYCDTNTTPTCNCIKGFMPKNDQAWALRDASSGCVRSSRLSCGEGDGFYRMSHMKLPETSGAVVDKGIGLKECKERCSRDCKCTGFANMDIRNGGSGCVMWTGELMDMRSYVAGGQDLYLK

SEQ ID NO: 11587 - protein, 281 aa, Solibacter usitatus Ellin6076
MKSAVLLLAHGAPERIEDVERYLAFVRGGQVVSPRVLEEVTSRYAAIGGSSPLTLWTRAQAEALETMLGIPVFFGMRNWHPFVKETMDQVRAAGVGRLACLCLAPQYSEMSVGLYMKHAREAAGAIELAWAHSYHDEPLLIEAFAERLQGMSGKVLFTAHSLPSPNEIYDAESRATASAVAAKLGLADWEFAYQSQGMSGGTWLGPTVESCIERYAAAGIRDLVIAPIGFVCDHVEVLYDIDVHFRDFAAARGIRIRRPESLNGSPLFTRALAKVAGTCLA

SEQ ID NO: 11588 - protein, 400 aa, Geobacter metallireducens GS-15
MTVARIEEAIEDIKQGKMIILVDDEDRENEGDLTMAAEMITPEAINYMAKYGRGLICLTMTSERCDYLRLPLMVSDNTSSFGTAFTVSIEAKRGVTTGISAADRAHTVLTAVADATKPEDLARPGHIFPLRARNGGVLVRAGQTEGSVDLARLAGLKPAGVICEIMNDDGTMARMPQLKKFAKEHGIKICTIADLVAYRLKHESLVRRAADVELPTEAGEFRAIAFENDVDKLEHLALVKGEISGDEPILVRVHSECMTGDVFGSLRCDCGGQLHRAMEMIEAEGKGAILYMRQEGRGIGLFNKLKAYALQDQGKDTVEANLELGFKPDMRDYGIGAQILVDLGIKNIRLMTNNPRKLIGLQGYGINIVERVPIEIPATGSNAGYLKTKREKLGHLLENI

SEQ ID NO: 11589 - protein, 361 aa, Burkholderia thailandensis E264
MSDKVYRIAVIPGDGIGVEVMPEGLRALDAVSRRFGLRFEYEPIEWASCGYYAKHGQMMPDDWKAQLSGMDALLFGAVGWPETVPDHVSLWGSLIKFRREFDQYVNLRPARLFDGVPCPLAGRKAGDIDFMIVRENTEGEYSAVGGTMFEGTEREFVVQQAVFTRHGTERVMKFAFELAQRRAKRLTVATKSNGIAISMPWWDARAAEMAARYPDVAWDKQHIDILCARFVMQPDRFDVVVASNLFGDILSDLGPACTGTIGIAPSANLNPERNFPSLFEPVHGSAPDIAGKQVANPIAMIWSAAMMIDFLGEGAGPAREAHDAIVAAIEHVLKHGPRTRDMGGQASTSEVGDAIVARLLG

SEQ ID NO: 11590 - protein, 166 aa, Pasteurella multocida subsp. multocida str. Pm70
MYIDTSELCDIYLDQVDVVEPIFSSFGGVNRFYGKVTTVKCFENNGLITDILEENGEGRVLLIDGGGAVRRALVDAELAQLAVDNGWEGIIVYGAVRQIQQLEEMDIGIHALAPIPVGADKQNIGEIDVPVNFGGVTFFPEDYVYADLTGIILSQEPLELDEFNDA

SEQ ID NO: 11591 - protein, 479 aa, Escherichia coli K12
LISGRHDRKPYYAGEAAIMAINSPLNIAAQPGKTRLRKSLKLWQVVMMGLAYLTPMTVFDTFGIVSGISDGHVPASYLLALAGVLFTAISYGKLVRQFPEAGSAYTYAQKSINPHVGFMVGWSSLLDYLFLPMINVLLAKIYLSALFPEVPPWVWVVTFVAILTAANLKSVNLVANFNTLFVLVQISIMVVFIFLVVQGLHKGEGVGTVWSLQPFISENAHLIPIITGATIVCFSFLGFDAVTTLSEETPDAARVIPKAIFLTAVYGGVIFIAASFFMQLFFPDISRFKDPDAALPEIALYVGGKLFQSIFLCTTFVNTLASGLASHASVSRLLYVMGRDNVFPERVFGYVHPKWRTPALNVIMVGIVALSALFFDLVTATALINFGALVAFTFVNLSVFNHFWRRKGMNKSWKDHFHYLLMPLVGALTVGVLWVNLESTSLTLGLVWASLGGAYLWYLIRRYRKVPLYDGDRTPVSET

SEQ ID NO: 11592 - protein, 359 aa, Dehalococcoides sp. BAV1
MYHNVTLIPGDGIGPEISEATRRVLEATGVKFNWEVVNAGADVVAEYGTPLPDIVLESIRKNKVAIKGPVTTPVGSGFRSVNVGMRKALNLYTCLRPCKTYPGVPSRYDNVDIVIVRENMEDLYAGIEFEKGSAEALRLIEFIKENKKVEIRTDSGISIKPISVFGTERIFRWAFKYAKDNNRKKVTAVHKANIMKYSDGLFLAVGRKVAEEYPEIEFEDRIVDNMTMQLVKTPTQFDILVCPNLYGDILSDLCAGLVGGLGVAPGANIGDEYALFEPTHGSAPKYKGLNKVNPMAMMLSGVLMLRYLKEEKAADKLENAIAAVIAEGKSVTYDMLSPDKQAVAVGTSQVADAIIAKMK

SEQ ID NO: 11593 - protein, 181 aa, Wolbachia endosymbiont of Tunga trimamillata (Bos)
GINLTKGLGAGALPDVGKGAAEESIDEIMEHIKDSHMLFITAGMGGGTGTGAAPVIAKAAREARAVVKDKGAKEKKILTVGVVTKPFGFEGVRRMRIAELGLEGLQKYVDTLIVIPNQNLFRIANEKTTFADAFQLGDNVLHIGIRGVTDLMIMPGLINLDFADIETVMSEMGKAMIGTGE

SEQ ID NO: 11594 - protein, 541 aa, Oenococcus oeni
MTDPVSILNDPFINKGTAFTEAEREELGLNGLLPAKVQALQEQVDQTYAQFQSKVSNLEKRLFLMEIFNTNHVLFYKLFSQHVVEFMPIVYDPTIADTIENYSELFVEPQGAAFLDINHPENIQSTLKNAANGRDIKLLVVSDAEGILGIGDWGVQGVDIAVGKLMVYTVAAGIDPSTVLAVVIDAGTNNEKLLKDPMYLGNKFNRVRGDKYYDFIDKFVNHAESLFPNLYLHWEDFGRSNASNILNSYKDKIATFNDDIQGTGIVVLAGVLGALKISGQKLTDQTYMSFGAGTAGMGIVKQLHEEMVEQGLSDEEAKKHFFLVDKQGLLFDDDPDLTPEQKPFAAKRSDFKNANQLTNLQAAVEAVHPTILVGTSTHPNSFTEEIVKDMSGYTERPIIFPISNPTKLAEAKAEDVLKWSNGKALIGTGVPVDDIEYEGNAYQIGQANNALIYPGLGFGAIAAQSKLLTPEMISAAAHSLGGIVDTTKVGAAVLPPVSKLADFSRTVAVAVAKKAVEQGLNRQPIDDVEKAVDDLKWDPKY

SEQ ID NO: 11595 - protein, 358 aa, Wolinella succinogenes
MKKYEIAIIKGDGIGPEIVDEAKKVLDAISYSHGFELSYHDYLMGGIAVDRAGVPLPDETIEGCLRADAVLFGAIGGEKWDSLPRELRPESGLLKLRKSLEIFANLRPTVVYDELIEASTLKESVIKGVDILVVRELIGGIYFGEPKGREGDKAFNTMVYSVPEIERIAHVAFKAAMRRQKRVCSVDKANVLDVSQLWRETVTRIAKEYPEVELSHMYIDNAAMQLIRNPKQFDVILTGNLFGDILSDEASMLSGSIGLLPSASIGGKAALYEPIHGSAPDIAGQGIANPIATIASASMMLRHSLGEVEAADAIDKAIVKTLKEGYRTKDIAAFGAKEICTTDEMGSIIANYAAKKGE

SEQ ID NO: 11596 - protein, 338 aa, Yarrowia lipolytica CLIB122
MAIKVGINGFGRIGRIVLRNALKNPEVEVVAVNDPFIDTEYAAYMFKYDSTHGRFKGKVEAKDGGLIIDGKHIQVFGERDPSNIPWGKAGADYVVESTGVFTGKEAASAHLKGGAKKVIISAPSGDAPMFVVGVNLDAYKPDMTVISNASCTTNCLAPLAKVVNDKYGIIEGLMTTVHSITATQKTVDGPSHKDWRGGRTASGNIIPSSTGAAKAVGKVIPELNGKLTGMSLRVPTVDVSVVDLTVRIKNGASYEDIKATMKAASESPELKGILGYTDEDVVSTDFIGDTHSSIFDAKAGIGLNDNFVKLISWYDNEYGYSARVVDLIVAVAKKDASA

SEQ ID NO: 11597 - protein, 182 aa, Arabidopsis thaliana
  misc_feature (52)..(52): Xaa can be any naturally occurring amino acid
  misc_feature (123)..(123): Xaa can be any naturally occurring amino acid
  misc_feature (131)..(131): Xaa can be any naturally occurring amino acid
  misc_feature (152)..(152): Xaa can be any naturally occurring amino acid
QWLSSMLSSATMVASPAHATMAAPFNGLKSSAAFPVTRKAINDITSITSNGXRDNCMQVWPPIVKNKIETLSYLPDLTDSKLAKEDDYLIRNKGIPCVAFQLEHRFENREPRNSPLYYDGPDXHMRKLPLXGCPHSDSPLNHEQNGNKEYPXAFIRIIEFHIHPSKSQGIGFLVYKPQDSPA

SEQ ID NO: 11598 - protein, 466 aa, Photobacterium sp. SKA34
MALHEVTRKIGNDPIYGSDTIHNVAATTKLPQQEQAPNVIYQMIRDELYLDGNARQNLATFCQTWEEDEVHKLMDLSIDKNMIDKDEYPQSAEIEGRCVHILADLWNSPESVTTVGTSTTGSSEACMLGGLAALWRWREKRRALGQPTDKPNMVCGPVQVCWEKFARYWDIEMRETKMADGHYCMTPEDMLELVDANTIMVVPTFGQTFTGLYETVKPLSDALDTYEHDTGNAIDIHVDGASGAMLAPFCATEIDPWDFRLERVKSISTSGHKFGLAPLGCGWVVWRSKEDLPDGLVFHVNYLGGDMPTFALNFSRPAGQIIAQYYNFLRLGYEGYKRIHDASYDVCEYLVKELNKFNLFEFLFDGNREKGIPAISWRLKNNADVSFSLYDLADRLRTRGWLVPAYSLPANAQDIVVQRILVKQGLTIDLANLLIEDFKRSMDFLNTHAQAKCTAEDVKTFDHSGR

SEQ ID NO: 11599 - protein, 537 aa, Xanthomonas axonopodis pv. citri str. 306
MGAGTIGPVFSMTGLPLTTSISPGASAGARLPLQIPFIIGNEACERFSFYGMRNILVQFLITSLLLQEISGPGREAEAKHILHSFMIGVYFFPLLGGWLADRFSGKYNTILWFSLVYCAGHACLALFEGSRDGFFLGLGLIALGAGGIKPLVASFMGDQFDQSNKHLAKVVFDAFYWIINFGSLFASLLIPLALKNLSPAWAFGIPGILMFVATLVFWLGRKRYVLVPLPPKDPHGFAAVVRTALLTHAPGQGRPGLLLAVVSVLLALAGFALIEPLGIVVCLCIALVLLLAGIGGGTWWQLERARGTHPDVAVEGVRALLRVLVIFALVMPFFSLFDQKASTWVLQGREMTMPAWFTASQMQALNPLLVMLLIPFNNLVLYPLLRRGGWEPTPLRRMTSGIAFSGVAWIAVGAIQMIMDGGEPMHIAWQILPYALLTFGEVLVSATGIEFAYSQAPPSMKGVVMSFWYLTTTVGNLWVLLSNVAVRNATVTAHIADTGLSEAAFLMFFFAAFAFLAALAFGLYARRYRMVDNYRTA

SEQ ID NO: 11600 - protein, 461 aa, Burkholderia xenovorans LB400
MTFLKSPPPTPEDVADEYAATISGSSLPKYRIPEASSDRRAVFDLVRDELFMDGNSRQNVATFCTTYADDEVRHLMDLSIDKNMIDKDEYPQTAEIEMRCVHMLADLWHASKAWKTTGCSTTGSSEACMLGGLALKWQWKKRREAQGKPTDKPNFVCGPVQVCWAKFARYFDVEMRQVPLRGEATGLTPEDLAEYCDENTIGVVATLGITFTCVYEPVKALAGALDALQANVGLDIPIHVDAASGGFVAPFIQPDLEWDFSVPRVKSINASGHKYGLAPLGVGWVVWRSTQDLPDELIFRVDYLGGDMPTFALNFSRPAGQIIAQYYMLLRLGREGYRRIQQECADTAQALADGLAKIDQLEMIYDGRGALPAVCYKLKHPETAGFTLFDLSDQVRMRGWQIASYELPAGREDTIVQRVLIRRGVTRDMAAMLLEDIRHAIGHLTKNPVLHSSAGPTFHHN

SEQ ID NO: 11601 - protein, 528 aa, Brassica napus
MERTNSIEMDQERLTAEMAFKDSSSAVIRIRRRLPDFLTSVKLKYVKLGLHNSFNFTTFLFLLIILPLTGTVLVQLTGLTFETFSELWYNHAAQLDGVTRLACLVSLCFVLIIYVTNRSKPVYLVDFSCYKPEDERKMSVDSFLKMTEQNGAFTDDTVQFQQRISNRAGLGDETYLPRGITSTPPKLNMSEARAEAEAVMFGALDSLFEKTGIKPAEVGILIVSCSLFNPTPSLSAMIVNHYKMREDIKSYNLGGMGCSAGLISIDLANNLLKANPNSYAVVVSTENITLNWYFGNDRSMLLCNCIFRMGGAAILLSNRRQDRSKSKYELVNVVRTHKGSDDKNYNCVYQKEDERGTIGVSLARELMSVAGDALKTNITTLGPMVLPLSGQLMFSVSLVKRKLLKLKVKPYIPDFKLAFEHFCIHAGGRAVLDEVQKNLDLEDWHMEPSRMTLHRFGNTSSSSLWYEMAYTEAKGRVKAGDRLWQIAFGSGFKCNSAVWKALRVVSTEELTGNAWAGSIENYPVKIVQ

SEQ ID NO: 11602 - protein, 149 aa, Glycine max
MLPAVSMLRPCTTLSSSCASSRRLALFHLVSTGGIALPQAQLFGAEKLAQPEKNLFDWVKNDNRRFLHVVYRVGDLEKTININVCEIRFGDVVCNLMTLLGCWFYTECLGMKLLRKRDIPEDRYSNAFLGYGPEESNFTVELTYSEFQT

SEQ ID NO: 11603 - protein, 273 aa, Propionibacterium acnes KPA171202
MPTISQVDDVYHLSADEQHIYGDPLGVPSCTNLQLRQVPVVELPVGVTEDRVAGTLDVETALVRGQQRFQPGLLASAHRGILYVDEVNLLDDHIVDILLDSAAMGVNTVEREGMSVIHPSRFSLVGTMNPEEGQLRPQLLDRFGLCVTVQGETDPEVRMEIVQRRLSFEDDPDGFITEWSSHSRRLAERIENAMTLVQSVEIPKNILSTAVQICLDSNIDGHRGDITIIHAARALAAWAGRDRIIQADLEKVAPLVLNHRLQYASGVARAPRG

SEQ ID NO: 11604 - protein, 194 aa, Burkholderia sp. 383
MNTKKNELPAPDATRISRTLSYLLRHAPQTIGLQLDPEGWADIDELIAGIARQGLHLDRATLETVCATNDKQRFALSDDGRRIRAVQGHSTPVVQRRYPAAQPPERLYHGTATRFLDSIRAQGLKPGARHHVHLSPDIRTALAVGTRYGVPVILEVDAQRMHRQGHTFFVAENGVWLTDTVPAEFLKEMDQPAR

SEQ ID NO: 11605 - protein, 586 aa, Shewanella sp. MR-7
MPKSPTALPNAYNAFIDAAMMRRFHLITDFPVGEEQVAIHQRAGQTASQTDLVNIPKLMSHYYSIKPNVDAAEQRVTFGTSGHRGTAFQASFNQDHIWAITQAVVDYRQSVNIDGPLFLGIDTHALSYAAYVSAIEVLAANKVTVHIQQNDGFTPTPVVSHAIICANREAALSGAALSDGLIITPSHNPPQDGGIKYNPPHGGPAEGNITAWIESRANDYLRAGLKGVNKLAYADALTSGYVHAIDLITPYVADLVNVVDMHAIAKAKLKLGVDPLGGSGIHYWAPIAKHYGIDITLVNDKVDPSFSFMSLDKDGKIRMDCSSPYAMAGLLAHKESFDLCVGNDPDYDRHGIVCPGTGLMDPNHYLAVAIDYLLTHRPEWSEQLAIGKTLVSSALIDKICAFHGKKLLEVPVGFKWFVDGLAEATIAFGGEESAGAAFLRRDGSTWCTDKDGFILVLLAAEMLAVTGKTPGQRHQELVAQFGQSFYKRIDSPISLENKAKFAKLNAETLNATMLAGEKIDAVLTHAPGNNASIGGIKVTTANGWFAARPSGTEALFKIYGESFISEQHLADIIKDAQALIDKALSA

SEQ ID NO: 11606 - protein, 436 aa, Brassica napus
MKGVRKNYDNCCTLSFLLVFLVLILLRPVFSINILSSTEYLTISGNGTLVSPGDVFELGFFRTTSSSRWYLGIWYKKVYFRTYVWVANRDNPLSRSIGTLRISNMNLVLLDHSNKSVWSTNLTRGNERSPVVAELLANGNFVMRDSNNNDASGFLWQSFDFPTDTLLPEMKLGYDLKTGLNRFLTAWRNSDDPSSGDYSYKLENRELPEFYLLKSGFQIHRSGPWNGVRFSGIPENQKLSYMVYNFTENSEEVAYTFRMTNNSFYSRLKVSSDGYLQRLTLIPISIAWNLFWSSPVDIRCDMFRVCGPYAYCDGDTSPLCNCIQGFDPWNLQQWDIGEPAGGCVRRTLLSCSDDGFTKMKKMKLPDTRLAIVDRSIGLKECEKRCLSDCNCTAFANADIRNGGTGCVIWTGHLQDIRTYYDEGQDLYVRLAAADIG

SEQ ID NO: 11607 - protein, 544 aa, Coccidioides immitis RS
MIPPLNVAEIARQAAAYEYSPSTKLQYWLRTAASLVKEADVYEREGNDQQAYLLLFRHAQLVLVNLIMHPQAQDPSCRRGLAEAQREVQNSLKRLEVLKPRINQRYKQYQEARDIEFRKTIAAQLDDHADLLRDRESHDPAIAGRPQPLAAAENKDLAVKLAQKELKRRAAAKLGHYLSENLHPHKQRKLLAPVQGQSTQEQHGVSDQDDLASRLQEVRARVEGDQTHRTSIQESQPASSEVQTILRRPEPNRSATGYKYPAVPAQSIFTITETVPPLPSKGLLQPLPLRPPAIPAKIPEPPSRPISATPPSAPPVPSKVAPNTTSITPPEPPRQPDYITPSSSDLQPSTFTFKPSSYLENGNPLRTIFISPDLRQRFLEIAYPNTRRNLETCGILCGSLISNAFFISKLLIPEQESTPDTCEMVNEGAVFEYCDAEDLMVLGWIHTHPTQTCFMSSRDLHTQSGYQVMLAESIAIVCAPSRTPDWGVFRLTDPPGLKTVLACTKQGLFHPHEETDIYTDALRPGHVFEAKGLEFETVDLRNKR

SEQ ID NO: 11608 - protein, 325 aa, Shewanella sp. MR-7
MAEMNMLQAVNEALSIAMQSDERMVVFGEDVGHFGGVFRATSGLQEKFGRSRCFNTPLTEQGIAGFANGLASNGMTAVAEIQFADYIFPAFDQIVNESAKFRYRSGNEFNVGSLVFRTPYGGGIAGGHYHSQSPEAYFTQTPGLKVVVPRNPEQAKGLLLASIRDKNPVVFFEPKRLYRASVGEVPAGDYEIELGKAEVVREGKDITLVAWGAQMEIIEKAADMAAKEGISCEIIDLRTLAPWDVDTVADSVKKTGRLLINHEAPLTGGFAGEIAATIQQECFLYLESPISRVCGLDTPYPLVHEKEYMPDALKTFEAIKASVNF

SEQ ID NO: 11609 - protein, 411 aa, Xylella fastidiosa Temecula1
MAHFELIEKMAPNAVIKVVGVGGGGGNAVAHMVNSTVDGVEFIIANTDSQAIKNCGAKLQLQLGANVTKGLGAGANPEVGRQAALEDRERIIDALQGADMVFITAGMGGGTGTGAAPVVAQLAKEMGVLTVAVVTKPFPFEGRRRMQVALKGIEELNQHCDSLITIPNEKLITVLGRNATMIQAFRAANDVLQGAVQGIADLIVRPGLINVDFADVRTVMSEMGLAMMGTGSARGDDRAQAAAEAAVQNPLLDDVNLAGANGILVNITAGSDFTMAEFDEIGRTIDGFASEDATVVVGTVLDPEMQDEVRVTVVATGLSRTVSRAAQQRPEQQRASVKLVRNATTGQAEFGDLDNTGGAVSRAVGGSLGLGFGLRRSGTDAVSGSAPSAPVTAELPSDYLDIPAFLRRQAD

SEQ ID NO: 11610 - protein, 419 aa, Brassica barrelieri
FYHSCIIFFAVLLQFHHVFSTNTLSSNEALTISSNRTLVSPGDVFELGFFKTTTRNSQDGGDRWYLGIWYKTTSDLRTYVWVANRDNPLHNSIGTLKISHSDLVLLDQSDTPVWSTNCMGVVQSSVTAELLANGNFVLRDSKTKDLNRFMWQSFDFPVDTLLPEMKLGRKRNSSENEKILTSWKSPTDPSSGDYSFILETEGFIHEFYLLKNEFKVYRTGPWNGVRFNGIPKIQNWSYIINNFIDNKKEVAYTFQVSNNHNIHSRFRMSSTGYLQVITWTKTVPQRNMFWSFPEDTCDLYKVCGTYAYCDMHTTPTCNCIKGFVPKNAAAWELRDMSGGCVRSKRLSCGEGDGFLRLGQMKMPETSEAFVDESIGLKECKEKCIRDCNCTGFANMDIMNGGSGCVTWTGELVDMRKYDA

SEQ ID NO: 11611 - protein, 154 aa, Triticum aestivum
LESMCEEQQDAVNSGGVRADRDDQETEDSREGTEEEEDANGTAEIREEGVPPPKTGSNLHRDSRMSIADVLQSTMEDELIAARESGLLAGGAGTSRRCRGENSGNGRGRNRRALQDDSVPPMKRLPPGGRSCFGSKSGRAVVVDSDNPVRGGQS

SEQ ID NO: 11612 - protein, 147 aa, Coccidioides immitis RS
MSKLFIGGLAWHTTDETLRQGFSKFGSIEEAIVVKDRDTNRSRGFGFVRFASEGEAEAAMNEMNNQEFDGRTIRVDKAADRPSGPRNDGFNRSNYSRFEGGGAGGYNRGGYGGNNGGGYDQRQGGTGGGWGGYQQNWSNQNQGGSAA

SEQ ID NO: 11613 - protein, 476 aa, Bacillus cereus ATCC 10987
MAKEQVQAITKMEEDFAQWYTDIVKKAELVDYSSVKGCMILRPYGYALWENMQKVMDEKLKATGHENVYMPMFIPESLLQKEKDHVEGFAPEVAWVTHGGDEKLAERLCIRPTSETLFCEHFSKIVQSYNDLPKLYNQWCSVVRWEKTTRPFLRTTEFLWQEGHTIHETAEESQAETLNILNLYASFCEDYLAIPVIKGQKTEKEKFAGAKATYTIESLMHDGKALQTGTSHNFGTNFSEAFDIKFLDRNGKWQYVHQTSWGVSARMIGGLIMVHSDNNGLVMPPKVAPVQVVIVPIAQHKEGVLAKATELQEHIQKVARVKIDASNKTPGWKFNEYEMKGIPIRLEVGPKDIEKNQVVLVRRDTKEKEFIAMEQLEERIPALLEEIHNSLFNKAKVFRDENTYSVTKFEEMKKVADEKQGFIKAMWCGELACEEKLKEEVGVSSRCMPFEQEHLANECICCGKEAKQMVYWGKAY

SEQ ID NO: 11614 - protein, 425 aa, Brassica deflexa
YHHSYTLFFFVVLVLFPHVFSTTNTLSSNETLTISSNKTLVSPGDVFELGFFKTTTRKSQDGTDHCWYLGIWYKTTTSNQRTYVWVANRDNPLHNSTGTLKISHASLVLLDQSNTPVWSTNHTGVAHLPVTAELLANGNFVLRDSKTNDLDRFMWQSFDFPVDTLLPEMKLGRKINSSEKEKILTSWKSPTDPSSGDYSLILETEGFLHEFYLFNNDFKMYRTGPWNGVRFNGIPKIQNWSYIDNNFIDNKEEVAYTFKVNNNNNHNIHTRFRMSSTGYLQVITWTKTIPQRNMFWSFPEDACDLYQVCGHYAYCDMHTTPTCNCIKGFVPKNASAWGLRDMSGGCVRSSKLTCGEGDGFLRLGQMKLPEPNEAFVDKRIGLKECKEKCVRACHCTGFAGMDIMNGGSGCVTWTGELVDMRKYDA

SEQ ID NO: 11615 - protein, 392 aa, Geobacter sulfurreducens PCA
MPYDFKLPDLGEGITEAELRRWLVKEGDTVAEHQPVVEVETDKAVVEVPSPRAGRVITRARLEGETVMVGETLLTIAEEEATPPVRKPSVGIVGELPEAEEAVGTQQPAILATPLVRKLARERGIDLATVRGSGPRGSITPEDVAGAGAPARPDAGEFGPAERIPLRGVRRSIARNVMTSQRNTAFVTGMEEADITELWHLREREQQAVEQRGTHLTFLPFFIKAVQHALREHPYLNAAIDDVAGEIILKKHYHFGIAVETPDGLMVPVIRNVDAKSIIELASELQELGRKARERTITLDEMRGSTFTLTNFGHFGGVFATPVINWPDVAILGFGRIADRPWVHAGQIVVRTILPLSLTFDHRVTDGADAAQFLSKVVRYLEDPALLFIESI

SEQ ID NO: 11616 - protein, 420 aa, Raphanus raphanistrum
YHHHSYTFFFVILVLFPHAFSTNTLSSNEALTISSNRTLVSPGDVFELGFFKTTTRNSRDGTDRWYLGIWYKTTSDQRTYVWIANRDNPLLNSMGTLKISHANLVLFDQSATPVWSTNLTGAAHLPVTAELLANGNFVLRDSKTKDLDRFMWQSFDFPVDTLLPEMKLGWKHKILEREKILTSWKSPTDPSSGDYSFILETEGFLHEFYLYKNEFKVYRTGPWNGVRFNGIPKIQNWSYIDNSFIDNHEELAYSFQVNNNHNIHSRFRMSSTGYLQVITWTKTVPQRNMFWSFPEDTCDVYLVCGPYAYCDMHTTPRCNCIEGFVPKNAAQWELRDMSSGCVRSSKLTCGEGDGFLRLGKMKLPETTEAVVEKRIGLKECKEKCLRDCQCTGFANIDNMKGGSGCVTWTGELDDMRKYDA

SEQ ID NO: 11617 - protein, 425 aa, Streptomyces roseofulvus
MNRQVAVTGIGVVAPGGIGRKPYWEQLTSGRTATRAISFFDASPFRSRIAAEVDFDPAAAGLSPREVRRMDRAAQFAVVSARESLADSGLDVADLDPHRIGVSIGSAVGGTTSLEPEYLALSDSGRQWELDLSYLSPHLYDAFTPSSLAREVAGVIGAEGPAAVVSTGCTSGIDSLGHARDLIAEGSADVVLAGGTDTPISPIAVACFDAIKATSPSNDDPAHASRPFDRERNGFVLAEGAAVLVLEELGHARARDAHVYALVSGYATRCNAYHMTGLTPHGREMAEAIRHALAESGTDPAAVDYVNAHGSGTKQNDRHETAAFKATLGERARSVPVSSIKSMIGHSLGAIGSLEIAAWALAMEYGVVPPTANLDTPDPECDLDYVPHEARETRVDRVLSVGSGFGGFQSAMVLTRDTGARLPTA

SEQ ID NO: 11618 - protein, 912 aa, Lactobacillus acidophilus NCFM
MTFTKLENSSDQAVVAEEVKILTKLLNESTRQLIGDDAFAKIQDLIDTSASKDQKQLESKISSLNNREMIVVARYFATLPLLINISEDVELASKVNVFNNTDQDYLGKLSDTIDLVAQKDDAKRILENVNVVPVLTAHPTQIQRKTVLELTDKIHHLLRSYRDVKNGTINQREWTEQLRACIEILMQTDIIRGHKLKVSNEITNVLAYYPKALIPAITKFTTRYKELAKEHNLTLDQATPITMGMWIGGDRDGNPYVTADTLELSATLQSQVIFEYYMKELKKLYRAISLSTSYMQPSAAVEKLSKLSNDDSPFRTDEPYRRAFYYIESRLVHTEKELLGIIDKNIFIKPHDLENLDNIPVYNNPQEFKSDLETIKASLDEDHDQAVTHSFFTQILEAIDVFGFHLATIDMRQDSSVNESCVAELLKSAGICDNYSDLSEKEKVELLLSELENDPRNLHANNKPKSELLQKELKIYKTARQLKDRLGEDVIKQHIISHTESVSDMLEQAIMLKEYNLVDSEKARIQVVPLFETVEDLLNAREIITQYLSFPIVKKWLVSQNNYQEIMLGYSDSNKDGGYLASCWNLYKAQKDLTAIGEKLGVKITYMHGRGGTVGRGGGPSYEAITAQPFKSINDRIRMTEQGEIIQNKYGNKDTAYYNLEMLASAAIDRMVSKQAVSEERITDFRSSMDKIVEESNKIYRKLVFENPAFLDYFFQATPIKEISNLNIGSRPASRKKLTDFSGLRAIPWVFSWSQSRIMFPGWYGVGSAFANFINADPTHLKELQEMYKGWPFFHSLLSNVDMFLSKSNMEIAREYASLCDDEETKKVFDIIYQEWKLTKKVILQIEDHDDLLAEAPILKQSLDYRMPYFNILNYIQIEMIKRGREDEIQGVYQSIIPITINGVASGLRNSG

SEQ ID NO: 11619 - protein, 422 aa, Brassica maurorum
YDHFYTFSFVILVLFPHAFSTNTLSSNESLTISSNKTLVSPGDVFELGFFKTTTRSSRGGSTDRWYLGIWYKTTSQRRTYVWVANRDNPLHNSIGTLKISHASLVLLDHSDTPVWSTSLTGVAHLPVTAELLANGNFVLRDSKTKDLDRFMWQSFDFPVDTLLPEMKLGRKVNSSEKEKILTSWKSPTDPSSGDYSLILETEGFLHEFYLFKNEFKVYRTGPWNGVRFNGIPKKMQNWSYIVNSFIDNKSEVAYSFQVDNNRNIIHSRFRMSSTGYLQVITWTKTVPQRNMFWSFPEDACDPYQVCGPYAYCDMHTSPMCNCIKGFVPKNASRWDLRDASGGCVRSSKLSCGEGDWFLRMSQMKMPETTEAFVDKTIGLEECKEKCMRDCHCTAFANMDIMNGGSGCVTWTGELVDMRKYDA

SEQ ID NO: 11620 - protein, 695 aa, Oryza sativa
  misc_feature (174)..(174): Xaa can be any naturally occurring amino acid
  misc_feature (281)..(281): Xaa can be any naturally occurring amino acid
  misc_feature (291)..(291): Xaa can be any naturally occurring amino acid
  misc_feature (313)..(313): Xaa can be any naturally occurring amino acid
  misc_feature (324)..(324): Xaa can be any naturally occurring amino acid
  misc_feature (334)..(334): Xaa can be any naturally occurring amino acid
  misc_feature (396)..(396): Xaa can be any naturally occurring amino acid
  misc_feature (405)..(405): Xaa can be any naturally occurring amino acid
MASSLLSSPKPSSFSSANPTSTPRPRAQTLSPFRAAAPRFSHGLATAAAAANPSASRRCYHRAFARPVRASMAQPRRPEYVPNRIDDPNYVRIFDTTLRDGEQSPGATMTSAEKLVVARQLARLGVDIIEAGFPASSPDDLDAVRSIAIEVGNTPVGEDGHVPVICGLSRCNKXDIDAAWEAVRHARRPRIHTFIATSEIHMQHKLRKTPEQVVAIAKEMVAYARSLGCPDVEFSPEDAGRSNREFLYHILEEVIKAGATTLNIPDTVGYTLPYEFGKLIXDIKANTPGIXTNAIISTHCQNDLGTSQTANTXLAGAHAGARQXLEVTINGIWXTGLGNASLEEVVMAIKCRRELLGGLYTGNQYPTYHYVQPHMVQEHSGLHVQPHKAIVGANAXFAHESGIHXQDGMLKYKGTYEIISPDDIGLTRANEFGIVLGKLSGRHAVRSKLVELGYEITDKEFEDFFKRYKEVAEKKKRVTDEDIEALLSDEIFQPKVFWSLADVQATCGTLGLSTATVKLIGPDGDEKIACAVGTGPVDAAYKAVDDIIQVTVAIFLMVLALIYQFNGMEYGCVFSIYENETSCICKTGEILKHLRIICNSQIPTVLREYSMTSVTEGIDAIATTRVVVTGDVSDSKHALTGHSFSRAFSGSGAALDIVVSSVRAYLSALNKMSSFVGAIKASSEVSESQRVQTTE

SEQ ID NO: 11621 - protein, 286 aa, Bacillus thuringiensis serovar konkukian str. 97-27
MVAVIIKGNEVAEKKRAQLKEEVVKLKEQGIVPGLAVILVGEDPASRSYVKGKEKGCEQVGIYSELIEFPETITEERLLAEIDRLNGDDRINGILVQLPLPKHIEEKAIIERISPEKDVDGFHPISVGRMMTGQDTFLPCTPHGIVELVKETNLDISGKHVVVIGRSNIVGKPVGQLFLNENATVTYCHSKTQNMKELTKLADILIVAVGRPKMVTADYIKEGAVVIDVGVNRLETGKLCGDVDFDNVLDVAGYITPVPKGVGPMTITMLLHNTVESAKRAGVVCK

SEQ ID NO: 11622 - protein, 452 aa, Propionibacterium acnes KPA171202
MTEPDQQLHRSLRNRHIQLIALGGAIGTGLFYGAADSIAAAGPAVIVSYLIGGVVIYLIMRALGEMSVHNPTSGAFSEYAHQWWGDLPGFISGWNYWFNYIFVSMAELSVVGIYINYWFPVVPRWVSAAVLLAIVTTVNLLHVRAYGEVEFWFAIIKVVAIIAMIVLGLWIIFFGTGSTPATGIGNLWRNGGFLPHGVTGMLAGIIVVMFSFGGTELIGITAGEAEDPQRSIPRAINRVVGRILLFYVGALIVMVAIVPWTKIDGNASPFVQIFDLVGIPGAAAILNLVVLTAAISAYNSGLYANGRMLHALAHQGDAPAFLGKVNKAGSPWAGVLLSSAVTAIAVVVVGLLPEQAFVYIMSIAMIAAIINWATIIITQMLFRRRLDPESRSELRFTMPGAPVTNWIVLAFLVLMVVVMTTMPPYRIAVAIGPIWLAVLGLGWRVSRRRQTL

SEQ ID NO: 11623 - protein, 419 aa, Brassica nigra
NHHSCTIFFVVLLQFHHVFSINTLSPNEALTISSNKTLVSPGDVFELGFFKTTTRNSQDSADRWYLGIWYKTTSERTYVWIANRDNPLHNSIGTLKISHANLVLLDQSDTPVWSTNLTGVVQSSVTAELLANGNFVLRGSYSTEDEFMWQSFDFPVDTLLPEMKLGWNLKPGPERILTSWKSPTDPSSGDFSFMLETHTIRLHEFYLLKNEFIVYRTGPWNGVRFNGIPKMQNWSYIVNSFTDNNGEVAYAFHVDNHNIHSRFRMSSTGYLQVITWTKTVPQRNMFWSFPEDSCDAYKVCGPYAYCDMNTTPTCNCIKGFVPKNASRWELRDMSGGCVRSSRLSCGEGDGFLRMSQMKLPETSEAVAVLVDKRIGFKECKERCIRDCNCTGFANMDIMNGESRCVIWSGELVDMRNYVA

SEQ ID NO: 11624 - protein, 342 aa, Aquifex aeolicus VF5
MAIKVGINGFGRIGRSFFRASWGREEIEIVAINDLTDAKHLAHLLKYDSVHGIFKGSVEAKDDSIVVDGKEIKVFAQKDPSQIPWGDLGVDVVIEATGVFRDRENASKHLQGGAKKVIITAPAKNPDITVVLGVNEEKYNPKEHNIISNASCTTNCLAPCVKVLNEAFGVEKGYMVTVHAYTNDQRLLDLPHKDFRRARAAAINIVPTTTGAAKAIGEVIPELKGKLDGTARRVPVPDGSLIDLTVVVNKAPSSVEEVNEKFREAAQKYRESGKVYLKEILQYCEDPIVSTDIVGNPHSAIFDAPLTQVIDNLVHIAAWYDNEWGYSCRLRDLVIYLAERGL

SEQ ID NO: 11625 - protein, 296 aa, Dehalococcoides sp. BAV1
MSAHIINGTEIAAAIREEIRSEVIALKAKAGIVPGLATVLVGDDPASHSYVDSKIKMCQNLGIYSEHHPLPQNATIEDLLTLIAKLNADPKISGILVQVPLPAQISESLVLNAINPDKDVDGFHPVNVGRMCLGEPCFLPCTPHGVQELLIRSGIKIEGTHVVIVGRSNLVGKPLANILLQKAPGANATVTICHSGTKNLPEITRQADILVAAMGKPKFITSDMVREGAVVIDVGTTCIGYTPEGKRILSGDVDFEEVKEKAFAITPVPKGVGPMTIIMLMLNTLTAAKRAAGLIK

SEQ ID NO: 11626 - protein, 161 aa, Xanthomonas axonopodis pv. citri str. 306
MSDISTFAFTDLEGRTQSMRDYAGNVLLVVNVASKCGFTPQYAGLQALWQRYRERGLVVIGFPCDQFGHQEPGDAAQIRQFCSLDYAVDFPLAAKIDVNGNGAHPLWQWLKHEQRGVLGSEAIKWNFTKFLIGRDGRVLERYAPTTKPEALATEIERALDA

SEQ ID NO: 11627 - protein, 220 aa, Thermotoga maritima MSB8
MVKIAASILACDLARLADEVKRVEEHVDMIHFDVMDGHFVPNISFGLPVLKALRKETKLPISVHLMITNPEDYIDRFIEEGADMVAIHYESTFHLHRLVHRVKDLGARAFVAINPHTPINLLSEIITDVDGVLVMSVNPGFSGQRFIARSLEKIRNLRKMVKELGLETEIMVDGGVNEENASILVKNGATILVMGYGIFRNDNYVELIKSIKQEREEFAD

SEQ ID NO: 11628 - protein, 528 aa, Brassica napus
MERTNSIEMDQERLTAEMAFKDSSSAVIRIRRRLPDFLTSVKPKYVKLGLHNSFNFTTFLFLLIILPLTGTVLVQLTGLTFETFSELWYNHAVQLDGVTRLACLVSLCFVLIIYVTNRSKPVYLVDFSCYKPEDERKMSVDSFLKMTEQNGAFTDDTVQFQQRISNRAGLGDETYFPRGITSNPPKLNMSEARAEAEAVMFGALDSLFEKTGIKPAEIGILIVNCSLFSPTPSLSAMIVNRYKMRQDIKSYNLGGMGCSAGLISIDLANNLLKANPNSYAVVVSTENITLNWYFGNDRSMLLCNCIFRMGGAAILLSNRRQDRSKSKYELVNVVRTHKGSDDKNYNCVYQKEDERGTIGVSLARELMSVAGDALKTNITTLGPMVLPLSEQLMFLVSLVKRKLLKLKVKPYIPDFKLAFEHFCIHAGGRAVLDEVQKNLDLKDWHMEPSRMTLHRFGNTSSSSLWYEMAYTEAKGRVKAGDRLWQIAFGSGFKCNSAVWKALRVVSTEELTGNAWAGSIENYPVKIVQ

SEQ ID NO: 11629 - protein, 449 aa, Clostridium symbiosum
SKYVDRVIAEVEKKYADEPEFVQTVEEVLSSLGPVVDAHPEYEEVALLERMVIPERVIEFRVPWEDDNGKVHVNTGYRVQFNGAIGPYLGGLRFAPSVNLSIMKFLGFEQAFKDSLTTLPMGGAKGGSDFDPNGKSDREVMRFCQAFMTELYRHIGPDIDVPAGDLGVGARELGYMYGQYRKIVGGFYNGVLTGKARSFGGSLVRPEATGYGSVYYVEAVMKHENDTLVGKTVALAGFGNVAWGAAKKLAELGAKAVTLSGPDGYIYDPEGITTEEKINYMLEMRASGRNKVQDYADKFGVQFFPGEKPWGQKVDIIMPCATQNDVDLEQAKKIVANNVKYYIEVANMPTTNEALRFLMQQPNMVVAPSKAVNAGGVLVSGFEMSQNSERLSWTAEEVDSKLHQVMTDIHDGSAAAAERYGLGYNLVAGANIVGFQKIADAMMAQGIAW

SEQ ID NO: 11630 - protein, 410 aa, Arabidopsis thaliana
  misc_feature (379)..(379): Xaa can be any naturally occurring amino acid
MASIRRTLSPMYHDRSHENGGSHKGFTIGGSSSKHNSSQFLSYLTKLLGVTSDPKSSRRGPWRRPFYQFLVFFLLGYVLGLTPFGKMEDVNGSDRFSFEIKQPYVEERLENRKREEAAVDAVSFVAETENGKKEVNFVPKKLLIVVTPTYNRAMQAYYLNRVAQTLRLVESPVLWIVVEGNVASFETSEILRKTGVMYRHLVCKRNMTSIKDRGVHQRNTALEHIELHKLDGIVYFADDDNIYSLELFQSLRQISRFGTWPVAMLAQSKNKAILEGPVCNGSQVIGWHTNEKSKRLRRFHVDMSGFAFNSTILWDPKRWRRPFSHPTRQLDTVKEGFQETSFIEQVVADESEMEGVPPACSSILNWHLHLDALDIVLTXVSTYPMCCAHYWIYIKEAYEEWKKTSEGSLG

SEQ ID NO: 11631 - protein, 104 aa, Rhodospirillum rubrum ATCC 11170
MKQVSDASFEEDVLKADGPVLVDFWAEWCGPCRQIAPALEELATALGDKVTVAKINIDENPQTPSKYGVRGIPTLMIFKDGQVAATKIGALPKTKLFEWVEASV

SEQ ID NO: 11632 - protein, 610 aa, Pseudomonas aeruginosa PAO1
MCGITGWTDWSRDLGEQRSILERMTRTLAPRGPDAEGLWLSRHALLGHRRLAIIDLENGAQPMLAEAGGRVALTYSGEVYNFRELRAELETLGQVFRTRSDTEVVLRAYLQWGEASFVRLRGIYGFALWDEREQSLWLVRDRFGVKPLYYYPTAGGVLFASEPKAIFANPEANPVLDASGIAELFALTTAPTPGHGLYKGLRQVRPGQALRFDRNGVRELVYWALRAERHEEGAEDSAERAGQLLREAVAEQLVADVPLGSLLSGGLDSSAISAFAVAALDGDARRLPTFSVDFPGEGRGFVPTPWQSSWDEPYAQLAANFLGTPHRTVLVAPEEVLEQDEAVLQARDLPGWGELDASLYLLFRQVREHTTVALSGESADEVFGGYPFFHDPSALAHDGFPWLAGKSGPWQLLRREVAERVAAPEYIRARYREALAEVPRLDGEDAAQRRQREVAYLALSRWLPAMLERKDRMSMAVGLEVRVPFCDHRLVEYVWNLPWALKSVAGESKSLLRRALRGHLPQAILERRKSGFPANPDPRYLALLRERVGRLLDDGRSPLFELVDAGRVRQALEQGTPLPSPRASASPTAGLAYLLNLDRWLTRHGVDISL

SEQ ID NO: 11633 - protein, 436 aa, Brassica napus
MKGVRKNYDNCCTLSFLLVFLVLILLRPVFSINILSSTEYLTISGNGTLVSPGDVFELGFFRTTSSSRWYLGIWYKKVYFRTYVWVANRDNPLSRSIGTLRISNMNLVLLDHSNKSVWSTNLTRGNERSPVVAELLANGNFVMRDSNNNDASGFLWQCFDFPTDTLLPEMKLGYDLKTGLNRFLTAWRNSDDPSSGDYSYKLENRELPELYLLKSGFQVHRSGPWNGVRFSGIPENQKLSYMVYNFTENSEEVAYTFRMTNNSFYSRLKVSSDGYLQRLTLIPISIAWNLFWSSPVDIRCDMFRVCGPYAYCDGNTSPLCNCIQGFDPWNLQQWDIGEPAGGCVRRTLLSCSDDGFTKMKKMKLPDTRLAIVDRSIGLKECEKRCLSDCNCTAFANADIRNGGTGCVIWTGHLQDIRTYYDEGQDLYVRLAAADIG

SEQ ID NO: 11634 - protein, 453 aa, Synechococcus sp. WH 7805
MAVENLVIVGSGPAGYTAAIYAARANLNPLLITGFQRGGIPGGQLMTTTHVENFPGFPDGVLGPDLMDLMKAQAERWGTRLLEADADSIDLSQRPYRIEADGNTIETQALIIATGASANRLSLPNEERFWSHGISACAICDGATPQFRNEELAVVGGGDSACEEAVYLTKYGSHVHLLVRSDRLRASAAMADRVQANPQITVHWNTQVADAEGEAWLSGLRLQRRDSGLEEHLPVKGMFYAIGHTPNTELVRDQLNCDGTGYLITQPGRPETSKEGVFAAGDVADAEWRQGITAAGSGCQAALAAERWLSHNDLAQLVKRDQAEPAKADTPKATAETTESSYDPDALWQKGSYALRKLYHDSRRPLLVVYTSPSCGPCHVLKPQLKRVLDELGGSAQGIEIDIETDQAIAEQAGVNGTPTVQLFYDKQLKQQWRGVKQRSEFMASIRSLLQES

SEQ ID NO: 11635 - protein, 365 aa, Gentiana triflora
MGSLLPSRVESLAISGIKTIPKEYIRPKEELASIGNIFEEAKNNNKTSQIVPTIDLKDMDSLDNNKDVQTQCHDELKNAAMEWGVMNLVNHGISQELINRVKSAGQAFFDLPIEEKEKYANDQASGNVQGYGSRLANNASGQLEWEDYFFHCIYPERKRDMSIWPKTPHDYIPATIEYAKQLRDLATKVLAVLSVGLGLEPDRLENEVGGMEEMILQKKINYYPKCPQPELALGVEAHTDVSALTFILHNMVPGLQLFYQGKWITAKCVPDSIIMHVGDTLEILSNGKYKSILHRGLVNKEKVRISWAVFCEPPKDKIILKPLPETVSEIEPARFPPRTFAEHIKHKIFRKTEEAIKDNNIANGN

SEQ ID NO: 11636 - protein, 970 aa, Zea mays
MASTKAPGPGEKHHSIDAQLRQLVPGKVSEDDKLIEYDALLVDRFLNILQDLHGPSLREFVQECYEVSADYEGKGDTTKLGELGAKLTGLAPADAILVASSILHMLNLANLAEEVQIAHRRRNSKLKKGGFADEGSATTESDIEETLKRLVSEVGKSPEEVFEALKNQTVDLVFTAHPTQSARRSLLQKNARIRNCLTQLNAKDITDDDKQELDEALQREIQAAFRTDEIRRAQPTPQDEMRYGMSYIHETVWKGVPKFLRRVDTALKNIGINERLPYNVSLIRFSSWMGGDRDGNPRVTPEVTRDVCLLARMMAANLYIDQIEELMFELSMWRCNDELRVRAEELHSSSGSKVTKYYIEFWKQIPPNEPYRVILGHVRDKLYNTRERARHLLASGVSEISAESSFTSIEEFLEPLELCYKSLCDCGDKAIADGSLLDLLRQVFTFGLSLVKLDIRQESERHTDVIDAITTHLGIGSYREWSEDKRQEWLLSELRGKRPLLPPDLPQTEEIADVIGAFHVLAELPPDSFGPYIISMATAPSDVLAVELLQRECGVRQPLPVVPLFERLADLQSAPASVERLFSVDWYMDRIKGKQQVMVGYSDSGKDAGRLSAAWQLYRAQEEMAQVAKRYGVKLTLFHGRGGTVGRGGGPTHLAILSQPPDTINGSIRVTVQGEVIEFCFGEEHLCFQTLQRFTAATLEHGMHPPVSPKPEWRKLMDEMAVVATEEYRSVVVKEARFVEYFRSATPETEYGRMNIGSRPAKRRPGGGITTLRAIPWIFSWTQTRFHLPVWLGVGAAFKFAIDKDVRNFQVLKEMYNEWPFFRVTLDLLEMVFAKGDPGIAGLYDELLVAEELKPFGKQLRDKYVETQQLLLQIAGHKDILEGDPFLKQGLVLRNPYITTLNVFQAYTLKRIRDPNFKVTPQPPLSKEFADENKPAGLVKLNPASEYPPGLEDTLILTMKGIAAGMQNTG

SEQ ID NO: 11637 - protein, 109 aa, Escherichia coli K12
MSDKIIHLTDDSFDTDVLKADGAILVDFWAEWCGPCKMIAPILDEIADEYQGKLTVAKLNIDQNPGTAPKYGIRGIPTLLLFKNGEVAATKVGALSKGQLKEFLDANLA

SEQ ID NO: 11638 - protein, 1489 aa, Candida glabrata CBS 138
MSVLIPHQQQRLRASSAAKKAAWNAMNKTVNIVSPHNNVNYVKKPSPKTNSNHLDRVIKSVNDATKRLSEAESINSNNTKSSKRKSRDTVGPWKLGKTLGKGSSGRVRLAKNIENGTLAAIKIVPKRTYNRRMRDQKMKTAGGVSSGTDSKDSSNREDPIKNGTDSALNPYGIEREIVIMKLISHPNVMGLLEVWENKSELYLVLEYVDGGELFDYLVSKGKLSEPEAVHYFTQIIQGVSYCHSFNICHRDLKPENLLLDKKNKVIKIADFGMAALELPNKLLETSCGSPHYASPEIVMGKPYHGGPSDVWSCGIILFALLTGHLPFNDDNIKKLLLKVQAGRFQLPPYLTNDAKDLITRILVTNPEKRLTINEILNHPLIKKYRNPPAHIRKLNLLGRGKSNSDLHVLEYNTPATVCLNSEEDIDQSILKSLQILWHGTPRQRLVERLLVEGATEEKLFYSLLFQYKLKHSKPISATKLQKKIEDVVLENESTKTESKDSSNEPGIDNNNDTSDFTQDGNSSEMVNELHTSAPMLEQKSQFSQHSLKSKETVPISDLPPLPPVIPTFAASSSKAFRRSKSNLSSYLKRPKLENARSRTSLFNSSSNTSITSSSISELNTRPRGNIPLSPSNITLTSLVSSRSLHNSASKKSLKNLQKRTLQNSESKRSLYSQTSISKRSLNLNDYLIGGPSNSAELPPLPKLDSNNEFEMLCDKILNTSALDNILEEEEEDITPSKNTTQTNDVHNEDTIIRKEMHDFEINVNNHQPEFKRQPSDFSVNGPDTSIFSIEPMPEGLGISKKPVRVQPTFNFIIDEDKVDDSIKVKQVSGTGPSNNVLKDISNQINNGKGIENSKLHPTSNNNYKNIRNVTAPEGNFTSKTFSLDPRRNVSQPPKESLFHSLLNNKSSKNAEENTQFESKSKQYNFMNKTAHSEFEKERLNAHRDADRSNDQNVYNETSVLAQSSTIHESPLLSIPSTLLNTSMTFKNLVDMLQENKLDDINETVAKESSAPLRKKSTKLSLAPHSNLVSDLNKRTSGYNTLASVDRSSSDLSYAIDLPTNTNIAEIVYLSGNNKQSSEKNIFMLSNDNNETELFHTDENKTSIKSAVNIFEDPPSDSTSLQTSSSESDSIPKVQRKAVSIETLNASNIITPAADVRVSLYGNNVSNSNTMPRETTEELISRFKLTPEKPQHQVQKRFSSLTQTGRNTDSIALSQSMISMFKDAEENGNNKSVKVLDQVEEENASKLTPTSPKNRVTMLFDDYEAQQNITSDQSNKSSKVIEIPNDSPIKVKVQKASTIFEKEIISAAEADENDHLRIPYESKSKKEIAQVHQQEQKEQQVRKPTESQEKAVQKTTKPSWFSKLIHGFKTTGGSGHTKLIREHSTKMTFEEVHMITVKEFGNNGIDYQLRTLDKKGDREKVEYDCKFVKGNFEFKIKIFNSGFPHQNTIITVKKKGKINSKETTDLFQRFNANIENLIKSAERNIESNPK

SEQ ID NO: 11639 - protein, 277 aa, Brassica oleracea
MNTFPASTEMVGSENESPVTTVVGGDYYPMLAASCPKKPAGRKKFQETRHPIYRGVRLRKSGKWVCEVREPNKKSRIWLGTFKTAEMAARAHDVAALALRGRGACLNYADSAWRLRIPETTCHKDIQKAAAEAALAFEAEKSDVTMEETMAVASQAEVNDTTTDHGMNMEEATAVASQAEVNDTTTDHGVDMEETMVEAVFTEEQSEGFNMAEESTVEAAVVTDELSKGFYMDEEWTYEMPTLLADMAAGMLLPPPSVQWGHNDDLEGDADMNLWSY

SEQ ID NO: 11640 - protein, 430 aa, Bacillus halodurans C-125
MTILKEPQRTQVDEIKEITELSLLQSTQSVIKEALDLLGYSEATYELLKEPIRMLTVRIPVRMDDGNVNIFTGYRAQHNDAVGPTKGGVRFHPDVNENEVKALSLWMSLKCGIADLPYGGGKGGIICDPRTMSFGELERLSRGYVRAISQIVGPTKDIPAPDVFTNSQVMAWMMDEYSRIREFDSPGFITGKPIVLGGSLGRESATAKGVIICIEEAAKRNQLDLKGARVIIQGFGNAGSFLAKFLHDAGALIVGISDAYGALYDQAGLDIEYLLDKRDSFGTVTNLFKKTISNQELLISDCDILVPAAISNQITKENAHDIKAKVVVEAANGPTTLEATRILTERGIFLVPDVLASSGGVTVSYFEWVQNNQGYYWNEEEIDQKFRNMIVGSFEKVCTFSNQHQVDMRLAAYTVGVKRMAEASHFRGWV

SEQ ID NO: 11641 - protein, 204 aa, Zea mays
MSSLGITSMAAAAVYYRFAWQMEGGGAIPVTEMVGTFALSVGAAVGMEFWARWAHRALWHASLWHMHESHHRARDDGPFELNDVFAIVNAVPAMSLLAYGFFNRGLVPGLCFGAGLGITLFGMAYMFVHDGLVHRRFPVGPIENVPYFRRVAAAHQIHHMDKFQGVPYGLFLGPKELKEVGGTEELEKEIKRRIRRREALDATQ

SEQ ID NO: 11642 - protein, 250 aa, Brassica oleracea
MNSVSTFSELLGSENESPVGGDYCPMLAASCPKKPAGRKKFRETRHPIYRGVRLRKSGKWVCEVREPNKKSRIWLGTFKTAEIAARAHDVAALALRGRGACLNFADSAWRLRIPETTCAKDIQKAAAEAALAFEAEKSDTTTNDHGMNMASQAEVNDTTDHGLDMEETMVEAVFTEEQRDGFYMAEETTVEGVVPEEQMSKGFYMDEEWMFGMPTLLADMAAGMLLPPPSVQWGHNDDFEGDADMNLWNY

SEQ ID NO: 11643 - protein, 117 aa, Retama raetam
MASIKVACVVLICMVMVGAAPIAQAITCGQVVSNLTPCITYLQRGGAVPGQCCNGVKTLVSSAQTTADKQTACNCLKSTAATIPNINFGNAGSLPGKCGVNLPYKISPSTNCASIKF

SEQ ID NO: 11644 - protein, 609 aa, Kluyveromyces lactis NRRL Y-1140
MIFRNTVVRLAQAGKKAIPPVKLAYKNMLKDPSTKYRPYPQINLENRQWPSKTITKAPRWLSTDLRDGNQSLPDPMSVEQKKEYFHKLIEIGFKEIEVSFPSASQTDFDFTRYAVENAPEDVSIQCLVQSREHLIRRTVEALHGAKKATIHTYLATSDMFRDIVFNMSQEEAIAKAVEATKLVRKLTKDDPSQSATQWTYQFSPECFSDTPVEFAVEICEAVKAAWEPTEENPIIFNLPATVEVATPNIYADQIEYFSTHISEREKVCISTHAHNDRGCGVAASELGILAGADRVEGCLFGNGERTGNVDLVTVALNMYTQGVSPELDLSDINSVIEVVERCNKIAVSPRAPYGGDLVVCAFSGSHQDAIKKGFNLQEKRRSQGDTLWKIPYLPLDPKDIGRDYEAVIRVNSQSGKGGAAWVVLRSLGLDLPRNLQIEFSTQVQEKADALGKELKANEIVSTFKSLYNLDGSASNISLLEYNVSKVQGDQKSFVGQVQIDNEVVGIEGLGNGPISSLIDALSNLLGVKLGVANYTEHSLGSGSSTKAASYVHIAYRREIDNEKAYQWGIGMSEDVGEASAKAILSAVNNLIKKGELTIPAHRDSASASA

SEQ ID NO: 11645 - protein, 419 aa, Brassica oxyrrhina
YHHSYTFFFVILVLFPHAFSTNNLSSNETLTISSNRTLVSPGDVFELGFFKTTTRNSQDGGDRWYLGIWYKTTSDQRTYVWVANRDNPLHNSIGTLKISHSNLVLLDQSDTPVWSTNCTGVVQSPVTAELLANGNFVLRDSKTKDLNRFIWQSFDFPDDTLLPEMKLGRKLNSPENKKILTSWKSPTDPSSGDYSFILETEGFLHEFYLLQNEFKVYRTGPWNGVRFNGIPKLQNWSYITNNFIDNKEEVAYTFHVNKNHNIHSRFRMSSTGYLQVITWTKTVPQRNMFWSFPEDSCDPYKVCGPYAYCDMHTTPTCNCIKGFVPKNEAAWALRDMSGGCVRSSGLSCGEGDGFLRLGQMKMPETSEAFVDKRIGLNECKEKCVRDCNCTGFANMDIMNGGSGCVTWTGELVDMRNYDA

SEQ ID NO: 11646 - protein, 130 aa, Bdellovibrio bacteriovorus
MKIRFAVVDDAAFLRELIKNIVVSDGGICVGEASNGDEAVELVQSTLPDLVFLDMVMPLRNGIETAKILKELHPSIKIIGCSTIDQEELVQKAYEAGFDSYLTKPFNKDQILKEISKVLPHLGESTHGRT

SEQ ID NO: 11647 - protein, 418 aa, Bartonella henselae str. Houston-1
MARIVMKFGGTSVANIERIYNVAQHVKREVDAGNEVAVVVSAMAGKTNELVQWTCDASPIHKDAYEYDVVVASGEQVTAGLLALTLQEMGVNARSWLGWQIPIHTDSAHGSARITDIDGSFLIQRFQEGQVAVIAGFQGLAPDNRISTLGRGGSDTSAVAMAAAIQADRCDIYTDVDGVYTTDPRVEPKARRLPKVAFEEMLEMASLGAKVLQVRSVELAMVHNVRTFVRSSFEDPNALGMGDPMNSSGTLICDEDEIVEQQNVTGIAFAKDEAQISLRRLADRPGISAAIFGPLAEARINVDMIVQNISEDGSKTDMTFTVPSADVDKAVALLEKNRKEIGFDVIQSESGLAKISVIGVGMRSHAGVAATAFRALAEKGINIQAITTSEIKISILIDSVYTELAVRTLHAVYGLDKG

SEQ ID NO: 11648 - protein, 412 aa, Archaeoglobus fulgidus
MQYEKVKPPENGEKIRYENGKLIVPDNPIIPYFEGDGIGKDVVPAAIRVLDAAADKIGKEVVWFQVYAGEDAYKLYGNYLPDDTLNAIKEFRVALKGPLTTPVGGGYRSLNVTIRQVLDLYANVRPVYYLKGVPSPIKHPEKVNFVIFRENTEDVYAGIEWPRGSEEALKLIRFLKNEFGVTIREDSGIGIKPISEFATKRLVRMAIRYAIENNRKSVTLVHKGNIMKYTEGAFRDWGYEVAKQEFGEYCITEDELWDKYGGKQPEGKIVVKDRIADNMFQQILTRTDEYDVIALPNLNGDYLSDAAAALIGGLGIAPGSNIGDGIGVFEPVHGSAPKYAGQNKVNPTAEILTGALMFEYIGWKDASEMIKKAVEMTISSGIVTYDIHRHMGGTKVGTREFAEAVVENLQSL

SEQ ID NO: 11649 - protein, 422 aa, Brassica tournefortii
FYHSCTIFFVVLLQFHHVFSTNTLSSNEALTISSNRTLVSPGDVFELGFFKTTTRNSQDGADRWYLGIWYKTTSDQIQRTYVWVANRDNPLHNSTGTLKISHANLVLLDQSDTPVWSTNLTGVAHLPVTAELLANGNFVLRDSKTKDLNRFMWQSFDFPVDTLLPEMKLGRKFNSSEKEKILTSWKSPTDPSSGDYSFILETKGFLHEFYLFKNEFKVYRTGLWNGVRFNGIPKKMQNWSYIVNDFIDNKEEVAYSFQVNNKNHNIHSRFRMSSTGYLQVITWTKTVPQRNMFWTFPEDTCDLYQVCGPYAYCDMHTTPRCNCIKGFVPKNAGRWDLRDMSGGCVRSSRLTCGEGDGFLRLGQMKMPETSEAVVDKMIGLKECREKCVRDCNCTGYANMDIMNGGGCVMWTGELVDMRKYDA

SEQ ID NO: 11650 - protein, 326 aa, Synechococcus elongatus PCC 7942
MAATDFKDYYATLGVGRAASADEIKKAFRKLARQYHPDMNPGDKVAEARFKEINEAYEVLSDTDKRRKYDQFGQYWSRVGGPTGGPGPGVGFEDFEFGRYGSFDDFINELLGRFGGGATASASAGYRSPGFQDFAGGFGSQATAGARAVNLDAEASISLSLSDAFRGTQKQLRINSEMVEVKVPAGIKAGSKLRLRGKGNIMPNTGKRGDLYLKIEVKPHEFFQLEGDQLSCEVPIAPDEAALGATIAVPTPDGLVNVTIPAGVRTGQSLRLRGKGWPTRTGRGDLLVKVAIAVPKSLTEAERQAYEQLQRSRSTDLRSALMQYSL

SEQ ID NO: 11651 - protein, 467 aa, Bacillus thuringiensis serovar konkukian str. 97-27
MKSLLRKKALSTESPRQLQRTLTALDLTFLGIGAVIGTGIFVLTGIVAAKHSGPGIMLSFLIAAFTCACVAFCYAEFASSIPVSGSVYTYAYMTVGEVVAFIVGWCLMLEYLLAVAAVAVGWSGYLQSLLQGFNIHLPAIIASAPGVGKDGLIDLPAVCILLIITGLLSFGIRESARINNIMVLIKLAVIIAFIVAGAKYVKPENWTPFIPFGYDGIITGAATVFFAFLGFDAIATAAEETKKPQRDLPIGIIGSLLICTVLYMIVSFVLTGMVPYTQLDVSDPVAFALHFVGEDTIAGLLAVGAMTGMTTVLLVVMYGQVRVSYAMSRDGLLPKALARVNKRVKIPLLNTWITGVVAALLAGLLDLHVLANLVNIGTLTAFTFVCCAVLILRKTHPDLKRGFRTPFVPVLPVVAILCCLYLMINLSKTTWISFAVWLIVGLCFYFFYSRKHSHLATEKTNDEQKKA

SEQ ID NO: 11652 - protein, 420 aa, Brassica villosa
YHHSYTLFFFVILVLFPHVFSTNTLSPNEALTISSNKTLVSPGDVFELGFFKTTTRNSPDGTDRWYLGIWYKTTSGHRTYVWVANRDNALHNSMGTLKISHASLVLLDHSNTPVWSTNFTGVAHLPVTAELLANGNFVLRDSKTNDLDRFMWQSFDYPVDTLLPEMKLGRNLIGSENEKILTSWKSPTDPSSGDYSFILETEGLLHEFYLLKNEFKVYRTGPWNGVRFNGIPKMQNWSYIDNSFIDNNEEVAYSFQVNNNHNIHTRFRMSSTGYLQVITWTKTVPQRNMFWSFPEDTCDLYKVCGPYAYCDMHTSPTCNCIKGFVPKNAGRWDLRDMSGGCVRSSKLSCGEGDGFLRMSQMKLPETSEAVVDKRIGLKECREKCVRDCNCTGYANMDIMNGGSGCVMWTGELDDMRKYDA

SEQ ID NO: 11653 - protein, 412 aa, Crambe kralikii
YHHSCTLFFILLLQFHHVFSTNTLSSNETLTISSNKTLVSPGDVFELGFFKTTQDGHDRWYLGTWYKTTSERTYVWIANRDNPLHNSMGTLKVSHANLVLLDQSDTPVWSSNLTGTAQLPVTAELLSNGNFVLRDSKTNDLNQSMWQSFDFPVDTLLPEMKLGRNLKTGHDRVLTSWKSPTDPSSGDYSFKLETQGLHEFYLLKNEFKVYRTGPWNGVRFNGIPKMQNWSYIVNNFIDTKEEVAYTFHVNNRNIHTRFRISSSGVLQVITWTSTVPQRNMFWSFPEDDCDMYQMCGPYAYCDMNTTPRCNCIKGFVHKNASAWDLRDMSGGCVRSSKLSCGGEGDGFLRMSQMKLPETSEAVVDERIGLEECKEKCVRDCNCTGFANVDNRNGGSGCVIWTGELVDMRNYVA

SEQ ID NO: 11654 - protein, 420 aa, Diplotaxis erucoides
YHHHSYTFFFVILVLFPHAFSTNTLSSNEALTISSNRTLVSPGDVFELGFFKTTTRNSRDGTDRWYLGIWYKTTSDQRTYVWIANRDNPLHSSMGTLKISQENLVLFDQSATPVWSTNLTGVAHLPVTAELLANGNFVLRDSKTKDLDRFMWQSFDFPVDTLLPEMKLGRKRNSSEKEKILTSWKSPTDPSSGDFSLILETEGFLHEFYLFNNEFKVYRTGPWNGVRFNGIPKIQNWSYIDNSFIDNHEGLAYSFQVNNNHNIHSRFRMSSTGYLEVITWTKTVPQRNMFWSFPEDSCDLYKVCGPYAYCDMHTTPRCNCIQGFVPKNAAQWELRDMSSGCVRSSKLSCGEGDVFLRLGQMKLPETPEAVVEERIGLKECKEKCLRDCQCSGFANIDNMKGGSGCVTWTGELDDMRKYDA

SEQ ID NO: 11655 - protein, 419 aa, Pasteurella multocida subsp. multocida str. Pm70
MDSIPLSTLFITLIILLIISAYFSGSETGLLSANRYRLRHLAEKGHRGAKKAEKLLKKTDVLLSLILICNNLVNITASAITTIIGMRLYGDAGVAIATGALTFVMLIFAEILPKTIAARYPEKVAFTSSHLLSVFLRLFTPLVYLMNLIIQGILALLRLKSDNKSTSLSPEELRSIVNESGKFIPSAHQEMLLSILDLEGVTVDDIMVPRNDIGGIDIDDDWKAIMRQLNHAAHGRVVLYKGNMDENILGMLRVREAYRLMLDKNEFNKETLIRAADEVYFIPEGTPLNSQLLNFRNNKERIGLVVDEYGDIKGLVTLEDILEEIVGEFTTSTAPSINDEVIPQSDGSLIIEGSANLRDLNKLFDWNLDTEDARTFNGLILEHLEEIPEEGTVCEINGLQITILEVNDNMIKQAKVIKL

SEQ ID NO: 11656 - protein, 622 aa, Candida albicans SC5314
MSTKGKGKTKNGRGDTHAKNERIAIVSADRCKPKKCKQECRKSCPVVKTGKLCIEVTPASKIAFISETLCIGCGICVKKCPFDAITIINLPTNLEGETTHRYSANSFKLHRLPTPRPGQVLGLVGTNGIGKSTALKILAGKQKPNLGRYDDPPDWEEILRHFRGSELQNYFTKVLEDNIKAIIKPQYVDNIPRALAKSKVKQVGAILESKNEKNDDYNYILNVLELKNVLNREVENLSGGELQRFALGMTCVQDANVYMFDEPSSYLDVKQRLRAAEIIRSLLNPTTYIICVEHDLSVLDYLSDFVCILYGAPSVYGVVTLPASVREGINIFLDGHIPTENLRFRTESLQFRLADAADDLILDKSNSLEYPSLQKTQGDFKLRVEAGDFTNSEILVMMGENGTGKTTFCKLLAGAIAPDGGQEIPKLNVSMKPQKIAPKFTGTVRQLFFKKIRAAFLHPQFQTDVVKPLKIEDIVDQEVQTLSGGELQRVAIVLALGIPADIYLIDEPSAYLDSEQRIICSKVIRRFILHAKKTAFIVEHDFIMATYLADRVIVFEGQPSKDAVARSPESLLTGCNRFLKNLNVTFRRDPNSYRPRINKLDSQMDKEQKASGNYFFLENTEL

SEQ ID NO: 11657 - protein, 123 aa, Fagus sylvatica
LMSLLLLSGRLVRERIGPAMLSAVQSQMGAVETNFDEIPNIFDTGSAKGLPGDSVEKIPKIIITTNNNVDASGDRVSCSVCLQDFQLGETVRSLPHCHHIFHLPCIDKWLLRHGSCPLCRRDL

SEQ ID NO: 11658 - protein, 458 aa, Oceanicola granulosus HTCC2516
MPARSPASGQPIGTLPRSSREDAQRAVAAARDAQAGWAEVSVWERADACLRIAAELEARRERVADMLVLEQGKPRAEAEGEVGAAVAGFRLAAEEVRQLGGETIPTEDGGKLALTIRQPRGVFAVVTPWNFPINIPVEYLGPAIASGCAVVWTPAPTTAFCAIELAEAIEAAGLPAGVVNLVIGEGPVVGDEIVSHPGTDGIGFTGSTATGQRIAERGAGKQMLLELGGNGPVIVFDDADLDRAAEAAAAAAFLNAGQVCSATERVLVHRDVVDAFADKVARIAKAKVLGDPAARETQMGPLNNAQVAQKTREHVEDALNHGATLLAGGRSRDDLGSELFYEPTVLTGVTADMRINREETFGPVVPILAFDSDDEALALALDNDYGLTSSVFTRDLGRALRFGKSLRSGIVNVNEAPSYWELHLPFGGGAGRKSGTGRIGGRHTLEAMTVIKTIVLQA

SEQ ID NO: 11659 - protein, 532 aa, Erythrobacter sp. NAP1
MSINIGPAATEDLRPRIMVVGIGGAGGNAIANMISTEIDGVDFIVANTDAQALSQSPAEKRIQLGPDITGGLGAGARPEVGKAAAEETVSEIEEALEGVNMVFIAAGMGGGTGTGAAPVIAEAARRKGVLTVGVVTKPFLFEGTRRMRAAEAGINELQAHVDTLIVIPNQNLFLVAKPETTFKEAFQLADEVLQQGVRSITDLIVNPGLINLDFADIRAVMSEMGKAMMGTGEGEGENRALNAAEQAIANPLLDGVSMQGAKGVIISIIGGEDMTLMELDEAANYIRDLVDEDANIIWGSAFNPDLSNKIRISVVATGIEAGASGEAPMPRPAALMESRAPKRPVLELSEETDVEDDIAEEEADDEALAIPEGMSDETNETCEAEADESEPFDLTGMQAGDDMGDEGDDVDEIVDPLAGLRGAEEDEQDDLLESADRLAEENQPVQPGFGRTGEGGGFGGGAGGGGGGPAGGSTLFERMANLSRSSGSDDDLDDEDEEGEDMEGESSEGSEGDDDDAPALSIPRFLGRQNNQ

SEQ ID NO: 11660 - protein, 352 aa, Debaryomyces hansenii CBS767
MSKTEFDTKSPVLVTGATGYVAGWIVKKLLEAGVTVHAAVRDPSNHDKLNHLEELKNSTNGDLKFFAADLLKEGSYAEGMAGCKVVFHTASPFTSKITDPQKDLVDPAKLGTRNVLETANKTESVSRVVLTSSCAAIYGDNKDLVSLPNGTLDESVWNNSSSLSHNAYSYSKTVAEKEAWSICENQSKWDLVVLNPSLVFGPGLNSNATSESFSIMKSFGNGLMNRGTPDIGIGIIDVRDLADAHLRAAFIKNAHGRYIISAHNTSFLEIGKLLSPEYDSYPIPKSAAPKFLIWLVGPFVDKNLTRRYIRDNVNYKWKADNSKSIKELEIRYRPLKDTVSDFFQLIIDAKQI

SEQ ID NO: 11661 - protein, 321 aa, Brassica oleracea
MESFPIINLEKLNGEERGLTMEKIKDACENWGFFECVNHGIPHELLDRVEKMTKEHYKKCMEDRFKESIKNRGLDSVRSEVNDVDWESTFYLKHLPASNISHVPDLDDDYRTLMKEFAGKIEKLSEELLDLLCENLGLEKGYLKKVFYGSKSPTFGTKVSNYPPCPKPDLIKGLRAHTDAGGIILLFQDDKVSGLQLLKDGEWVDVPPVKHSIVVNLGDQLEVITNGKYKSVEHRVIAQTDGEGRMSIASFYNPGSDSVIFPAPELIGKENEKKDNYPKFVFEDYMRLYSAVKFQAKEPRFETMKAMETTVANNVGPLATA

SEQ ID NO: 11662 - protein, 567 aa, Dioscorea tokoro
  misc_feature (238)..(238): Xaa can be any naturally occurring amino acid
  misc_feature (303)..(303): Xaa can be any naturally occurring amino acid
MATSTLICETPQWKDLNDHVEEIKKTHLRDLMQDSDRCKSMITEFDGIILDYSRQRVLPATVEKLFQLAEVACLKQKIDRMYNGEKINCTENRSVLHIALRAARDKAIKSDGKNVVPDVWHVLDKIKEFSERIRSGSWVGATGKALTDVVAVGIGGSFLGPLFVHTALQTDPEAAECAKGRQLRFLANVDPIDVARSITGLNPETTLVVVVSKTFTTAETMLNARTLREWISAALGPXAVSKHMVAVSTNLTLVEKFGIDPANAFAFWDWVGGRYSVCSAVGVLPLSLQYGFSVVHKFLNGAXSIDDHFHSTPFEKNIPVLLGLLSVWNVSFLRYPARAILPYSQALEKFAPHIQQVSMESNGKGVSIDGVPLPFETGEIDFGEPGTNGQHSFYQLIHQGRVIPCDFIGVMRSQQPIYLKGEVVSNHDELMSNFFAQPDALAYGKVAEQLLNEKVPBHLIPHKTFPGNRPSLSLLLPSLNAYNVGQLLAIYEHRIAVEGFVWGINSFDQWGVELGKSLASQVRKQLHLSRTKAEPVEGFNFSTTTLLTRYLEAETGVPSDQSQLPKL

SEQ ID NO: 11663 - protein, 396 aa, Cryptococcus neoformans var. neoformans JEC21
MAGVNVGDDKLVFESSEAVTVAPTFEALNLKEDLLRGIYAYNFEKPSAIQQRAIIPIIRGRDVIAQAQSGTGKTATFSISMLQSIDTNLRETQALVLSPTRELAVQIQTVVLALGDYMNVSCHACIGGTSVGEDIRKLEAGQQVVSGTPGRVFDMIRRRNLRTKDIKMLILDESDELLNKGFKDQIYDIYRYLPPATQVVVVSATLPHDVLEMTTKFMTDPVRILVKRDELTLEGIKQFFVAVEKEDWKFDTLCDLYDTLTITQAVIFCNTRRKVDWLTEKMREANFTVSSMHGEMVQKERDAIMAEFRGGQSRVLITTDVWARGIDVQQVSLVINYDLPTSRENYLHRIGRSGRFGRKGVAINFVTVDDVRILRDIEQYYSTQIDEMPMNVAELT

SEQ ID NO: 11664 - protein, 402 aa, Salmonella typhimurium LT2
MSSVDILVPDLPESVADATVATWHKKPGDAVVRDEVLVEIETDKVVLEVPASADGILDAVLEEEGTTVTSRQILGRLREGNSAGKETSAKSEEKASTPAQRQQASLEEQNNDALSPAIRRLLAEHNLEASAIKGTGVGGRLTREDVEKHLAKGESKAPAVEPAAQPALGARGEKRVPMTRLRKRVAERLLEAKNSTAMLTTFNEVNMKPIMDLRKQYGEVFEKRHGIRLGFMSFYVKAVVEALKRYPEVNASIDGDDVVYHNYFDVSMAVSTPRGLVTPVLRDVDTLGMADIEKKIKELAVKGRDGKLTVEDLTGGNFTITNGGVFGSLMSTPIINPPQSAILGMHAIKDRPMAVDGKVEILPMMYLALSYDHRLIDGRESVGFLVTIKELLEDPTRLLLDV

SEQ ID NO: 11665 - protein, 289 aa, Salmonella typhimurium LT2
MSVLINKDTKVICQGFTGSQGTFHSEQAIAYGTQMVGGVTPGKGGTTHLGLPVFNTVREAVEATGATASVIYVPAPFCKDSILEAIDAGIKLIITITEGIPTLDMLTVKVKLDEAGVRMIGPNCPGVITPGECKIGIMPGHIHKPGKVGIVSRSGTLTYEAVKQTTDYGFGQSTCVGIGGDPIPGSNFIDILKLFQEDPQTEAIVMIGEIGGSAEEEAAAYIKDHVTKPVVGYIAGVTAPKGKRMGHAGAIIAGGKGTADEKFAALEAAGVKTVRSLADIGEALKAIIK

SEQ ID NO: 11666 - protein, 405 aa, Streptomyces avermitilis MA-4680
MKRILVVGASAAGLTAAETLRREGYDGTITLVGDECHAPYDRPPLSKQLLAAEWEPERLALRTPGDLEALDLDLRLGVAATGLDVTDRTVRLADGSSVPYDGLIVATGVRPRRLPGEGAHVLRTVDDALALRDRLGPGTRLVVVGAGFLGAEAAAVARRLGADVTLLEPAPVPLAHAVGAEVGEVLSRAHLEHGVELRTGVTVTEVTDEGVRLADGEVVEADEILVAIGCLPNTEWLKGSGLTLGDGLVCDAYGEAARSVYGAGDVARWHNPLFGVSMRIEHRTNAAEHGMAAARNLLRPEARRPFAPVPYFWSDQYDMKIQAYGYFRAHDETVVVEGDLAERRFVAAYRTGDRLTGALAAGLPPRAIRRWRQAIAAGATWREAVRDNISPATAPWGSVLPEKIT

SEQ ID NO: 11667 - protein, 492 aa, Aspergillus nidulans FGSC A4
MSLASLKRKDLFQQHGLIGDKWVSSSGGGTFTVTNPATLETLATLPEMNGADTESAITAAHTAFQSFRKTTARQRATWLRKWHALCVENIDDLALILTVENGKTLAEAKGEVLYAASFLEWFAGEAERVHGEVVPASNANQRILTVKQPLGVAACLAPWNFPIAMITRKVGAALAAGCTTVWKPAGETPLSALAQAVLAREAGFPSGTINVITTLNSVAEVGAALCNSKLVRKLSFTGSTRIGKLLASQCSQNLTKLSLELGGNSPFIVFDDAKVETAVEACILAKFRNSGQTCVTANRIFVQEGIYDRFSAALVEKVKALKVGNGVEEGVIIGPLTHERAVEKAVAHIKDAQEKGASLLLGGSPCQPNNLPGYFLEPTVLGKMSTEALTTREEVFAPVVALYPFKTEEEVLAKANDCDVGLGSYVITESMPRMWRVAESLEVGMVGINMGTLSAAESPFGGVKESGYGREGGRQGIEEYMTVKSILMNVAA

SEQ ID NO: 11668 - protein, 551 aa, Chlamydophila caviae GPIC
MHPNSSDLNGVIIPGTPPLPRELQKFPSLVATSDQRFSPKFDADVAKLFPNTYDSPYLKFTSGTLPTLQPLKVGVMLSGGPAPGGHNVIWGLLHSLKKIHPDSSLIGFLDNGQGILNNNTVEITEEFMECFRNSGGFNCIGTGRTNIITEENKAACLKTVKALNLDGLVIIGGDGSNTATAILAEYFSQHHPKTCVVGVPKTIDGDLQHLFLDLTFGFDSATKFYSSIISNISRDTLSCKAHYHFIKLMGRSASHIALECTLQTHPNITLIGEEIAEKNVPLKTIIHKVCSIIADRAAMGKYYGIILIPEGIIEFIPEINNLVKEIERLPENADKFSSLSRESQKLLNSFPEAIANQLLNDRDAHGNVYVSKISVDKLLIHLVDNHLKKHFKNVPFNAISHFLGYEGRSCLPTKFDNTYSYALGYGAGVLTLNRCNGYLTVIESLINIVDKWRLRAMPIVKMFTTKKNSDGTIRPLIKKSLIDISSPAFVKFKLYRKIWALEDSYRFLGPLQIDTPPNAHSDHFPPLTLLLNHNEWQKRCSICMEIPDCDY

SEQ ID NO: 11669 - protein, 501 aa, Catharanthus roseus
MALASIEKVATGLICFILLIFSLKRIGHPRDWALVGILSVWFPSLGHIYEKLAKSLAKNDKTFVLKGSFLSKQDVIFTCDPANMHHVMSTNFSNYPKGPENRNVFDVYGEMLFTADHEKWKSHRKVTNAYFHDQRFNGFSQKVNKEVIEKELFPFLDHAAEEALVFDLQDVFQRLMLDSSSILTTGQNHRSLRVGLPYDETLEAINIANYQIFVRHILPAKIWKFQKWLGIMGEKKIKKAWRILDDISVEYMNRRKKEISSTISSQEDMDVVKFSEEDHVVLKSVDASDNLLRDTVKGILLAGTDTTATVLSWFFWLILKNPRVEQKIREEIELYLKQKNGEHGLYTNPEELNELMYLHAAIYETMRLYPAAPFTSRKSIQADVFPTGHQVNPNTTIVMAYYAVGRMKSIWGEDCLEFKPERWLSDKGKLIPVQTNKFLAFGTGPRICPGKELGLNRVKAVAAAIIPKYSFKIMRNKPVMPAACATLYLKDGLIVRVNKII

SEQ ID NO: 11670 - protein, 711 aa, Gibberella zeae PH-1
MAPRGFEDEELTISLSSSHVRRPQQTQPQSQSQQQDDSHDAPQAASRPADAPLKERIKTEQRIGAYKVLRTLGEGSFGKVKLAIHNGTGQQVALKIIARKKLISRDMAGRVEREIEYLQLLRHPHIIKLFTVIKTPNEIIMVLEYAGGELFDYIVQHGRMKEPEARRFFQQMLCAVEYCHRHKIVHRDLKPENLLLDENLNVKIADFGLSNIMTDGNFLKTSCGSPNYAAPEVIGGKLYAGPEVDVWSCGVILYVLLVGRLPFDDEHIPSLFAKIAKGTYSIPQWMPTGAANLIKKMLVVNPVHRATIEDIRADPWFTTELPVYLQLPVEEFFNTGVDPNKAIKKNDIAPNASEKVQERLHNEVTEKISKTMGYGKSDVEEALQAAEPSAIKDAYMIVRENKMMQVNHNSEALLAEPEGSSPMLSMSSARSTISQATTTPRPYVSKVGILPSSLPAYHKDYMEREKAGSVENSPPKVLINDEPQLNRTDAEKEETARRLRPHSRSQLRIDEANTRPQGMTPINPPKKTKPVRWQFGIRSRNSPWEALLCIHKALYKLGATYIPDEDYESRTAEERAEASGDSSFVDSHDGYRGSTSSIDPKKRYNLPADPWHINVRWDTSAIKKKAGNTPSAPSTPSSPSTPDGHHAKEPFVALHLDIQIYEMEHGVYLVDFKCSGYETAHGRLLEEKDVTSPFPFLDMAAKLIMQLAEAD

SEQ ID NO: 11671 - protein, 646 aa, Xanthomonas axonopodis pv. citri str. 306
MCGLAGMLLASPRLHGEQLDALVRPMGAALRHRGPDDAGTWCDAQAGVALAHQRLSILDLSPLGHQPMRSADGRYVLAYNGEVYNFAQLRAALSALGHRFRGHSDTEVLLAAVVEWGLDETLTRCNGMFAIALWDERDNCLFLARDRVGKKPLYYGWAGDTLVFGSELKALWQHPDFDNGVDRDALTLLLRLGYIPAPACIHEHTFKLMPGRVLRIDAQAVAAGAAAHRPDQAQQPFWNAREAMQRALATPFTGTDAQAEEQLDRVLRDAVALRMVADVPVGVFLSGGTDSSIVTAMMQAQSAQPVHTFSIGFEGSHHDEAPLAREVATHLCTDHTELYVSGADALAVVPNLPDMFDEPFADASQVPTALVARLARGGVTVALSGDGGDELFFGYGRYQRALRNWRMHGLVPGPLRRLMAVAARRNGESSRTGGLAALVAEAGARGIGDIYRNRISRWRDPAAVVLGATEPDSFYSLADPLHGSGTPADAMMLADFAAYLPDDLLCKVDRTTMAVGLEARAPLLDWRVAEFAWSLPLSLKYRDGVSKYLLKRVLCRYLPDAMVYRGKRGFGAPVSAWLRGDLHGWADDLLAHGALQREGVFAADSVARLWRDFNGGERKWHTHLWTVLMFQAWQAHWREQRAAVVR

SEQ ID NO: 11672 - protein, 539 aa, Chlamydophila caviae GPIC
MELLSVNKSYFELQRLHYRPETLSFLNGITSLHIVDSTEPPAIPKNLQEHIPNLCSIPEVTIEKGEATPSQPLKIGVLLSGGQAPGGHNVVIGLFEGLRAFNPKTKLYGFIQGPLGLTRGLYKDLDISVIYDYYNVGGFDMLSSSKEKIKTKEQKSTILTTVKKLKLDGLLIIGGNNSNTDTAMLAEYFLKHNCTIPIVGVPKTIDGDLKNFWIETPLGFHTSCRIYSEMIGNLEKDTLSIKKYHHFVRLMGQKASYTTLECGLQTLPNVTLISEHIAMRKISLQKLSEHIAMGLVNRYRSGKNYSTILIPEGLIEHVFDTRKLVNELNVLLLDNNLNLDNVQSKLSPESLKTLSSLPIEIAHQLLIARDSYGNVRVSKIATEELLAALIKKEIQKIEPKMEFQPVNHFFGYESRAGFPSNFDANYGLALGIVSALFLVRQRTGYMVTINNLARSYSEWIGGATPLYKMMQLEHRLGEDTPVIKTDSVNPHAPEVQYLLNQSDACLMKDLYCFPGPLQYFGEERLLDQRPLTLLWGNRE

SEQ ID NO: 11673 - protein, 328 aa, Hordeum vulgare
MCGGAILAQLIPPSAGRPSKQAAAGGRAPPTSSKKGGVSKSRHSSTPDADDDVFEAAFEDFDDHFDLRAEEDGGDDHVVFASKPAFSPRPAYDGGRAAHAASRKKRTGHLHGIRQRPWGKWAAEIRDPHKGTRVWLGTFDTADDAARAYDVAARRLRGSKAKVNFPDAARTGARPRRASRRTAQKPQCPPARTTAYSATAAARAQPEQDAMMVKPELMEFFNVDAIVHLTTAVAALPPVTASTFADTMPRVDEDSSVGSGGGAMLGFADELGFDPFMMFQLPCSDMYESADSIFAGDAVIPDALSVDSGMDAVSLWSFDEFPMDSAIF

SEQ ID NO: 11674 - protein, 349 aa, Blastopirellula marina DSM 3645
MAEKVLIIGSGPAGWTAAIYAARAELQPLVYEGAPLQEHYDVGRGPLGQLAMTTEVENFPGFPSGDMTAYLDGSIDNSIRQYMAPHMKHGVSGPELMELMRQQAKNFGTRIVGDDIVEVDFESRPFRLKSREGEWIEAHSVIVATGARANYLGLPSEAMYKNRGVSACAVCDGALPRFRDQPCIVVGGGDSAVEEADYMAKFSSKVYLVHRRDELRASKIMAERAEKNPKIEIVWNSVVDEVIGDDDNGVSGAKLTNVVDNTSKVYEASGFFLGIGHTPNTDFLVGKLDMTDKNYLKWTVPFRTNTSVEGVFAAGDVADDNYRQAVTAAGTGCMAALDAERYLAAQGHH

SEQ ID NO: 11675 - protein, 478 aa, Nocardia farcinica IFM 10152
MLDPGAYSANNLINGELVAAESGRLLDVLEPATGEVLARVPASGKEDVDAAVTAATQAFRSFRRTTPGERAEMLLTLAAKIEEHAEHIAMLESRNVGKPLPVARDEVAFAVDNLRFFAGAARTMEGRAGGEYLRGYESYIRREPIGVVAGIAPWNYPLLMATWKIGPALAAGNCSILKPSRQTPLTALYIAALAQDVFPAGAFNVLSGSAADIGDHLVADRRIGLVSLTGDTSTGRHIAEVAAAHVAQTHLELGGKAPVIVLDDADLGAVVAGIATAGFANSGQDCTAACRVIATPGIYDRLLEALVPAVQAIRVGDPQAGDDIDMGPLISAAHRQSILDVLAKTDGTILAGGKALPGNGFFLEPTVVANPSQADVLVQTEQFGPVVTVQRADDIDQAFEWANDVEFGLASSIWTQNLNHAARAVRDLDFGCVWVNDHMPVLSEMPHGGFKQSGYGKDMSIYALEEYTRIKHVMTKTN

SEQ ID NO: 11676 - protein, 519 aa, Wolinella succinogenes
MSAEMIKIFDTTLRDGEQSPGASMNTEEKIRIAKQLERLGVDVIEAGFAAASPGDFDAISKIASAVSESTICSLARAVEKDIKAAADSLAPAKLKRIHTFIATSPIHMEYKLRMTPSEVIKRAVEAIAYAKSFMEDVEFSCEDAGRSDVGFLKEILAAVIEAGAGTLNIPDTVGYRLPHEMGAIIKELHEFVGNRAILSVHCHNDLGLAVANSLYCIQSGARQVECTVNGLGERAGNAALEEIVMAIKTRRDIFGGLDTRINTKEIYASSQLVANITGIRPQPNKAIVGKNAFAHESGIHQDGVLKHKETYEIMHASDIGLGEQESIVLGKHSGRHAFKDKIKALGFEVSYEELNAAFDRFKALCDQKKEIYDEDIRAILAEETSHIPKVYELVGIQLSDCSMGRPYAAITLKKEGSEEIVDAAIGNGSVDALFKTIDRISQIKGELKDYKVEAVTQGKDALAKVVVKVEFEENKPAIIGHGLHIDTMLATAKAYVGALNSYLSMRELMGKKKCEEERI

SEQ ID NO: 11677 - protein, 262 aa, Bacillus cereus G9241
MLQLQNISVDYVTPHVVKISLDRERQANSLSLALLEELQNILTQINEESNTRVVILTGAGEKAFCAGADLKERAGMNEEQVRHAVSMIRTTMEMVEQLPQPVIAAINGIALGGGTELSLACDFRIAAESASLGLTETTLAIIPGAGGTQRLPRLIGVGRAKELIYTGRRISAQEAKEYGLVEFVVPPHLLEEKAIEIAEKIASNGPIAVRLAKEAISNGIQVDLHTGLQMEKQAYEGVIHTKDRLEGLQAFKEKRTPMYKGE

SEQ ID NO: 11678 - protein, 1037 aa, Coccidioides immitis RS
MHRRPSSLLIKRRLPFLPRHEYPLAHHRTITCYNLRANGSRNSIATTNPANERSLGLNSSSTFSESLGTYSRPQLSLTPPLYSTPLCAQRFFASSSVNMAGTKIDGTAIAKGIRERLNAEIRKTQESNPRFNPSLVIFQVGDRSDSSTYVRMKLKAAEEANILCRLAKFPEEITETELIQEITNANNDPSVHGILVQLPLPNHLSEHTVTSAVSNEKDVDGFGAINIGELAKRGGKPLFVPCTPQGIMELLRSSGVNPAGKNAVVLGRSDIVGSPVSYLLKNADATVTVCHSKTKNLPEVIKEADILVAAIGKAEFVKGEWLKPGAVVIDVGTNFVPDASKKSGQRLVGDVEFGSAVEVASQITPVPGGVGPMTVAMLLQNVVNSANASFERLKDRRISPLPIKLQNPVPSDIAISRAQRPKAISQVAAEIGIAPHELEPYGHTKAKVSLDVLSRLSHRRNGRYVLVCGITPTPLGEGKSTTTMGLTQALGAHLNRIVFANVRQPSQGPTFGIKGGAAGGGYSQVIPMDEFNLHLTGDIHAITAANNLLAAALETRMFHESTQSDAALYRRLVPTKKGKREFQPIMFRRLKKLGIDKTDPNELTGEEVHRFARLDIDPDTITWRRVLDVNDRHLRTITVGQAATEKGHTRQTGFDISVASECMAILALSNDLGDMRERLGRMVVATSKNGDPVTCDDIGVGGALTALMKDAIKPNLMQSLEGTPVFVHAGPFANISIGANSVVADKLALKLAGTEPDEDHEAKTGFVVTEAGFDFTMGGERFFNIKCRSSGLVPDTVVIVATVRALKVHGGGPDITPGAPLPEAYRNEDIELLRRGCINLKKHIENAKQYGIPVVVAINKFETDTEAEMAVIREEAIAAGAEDAIPANHWAEGGAGAVELAKGVIMASSKPKDFKLLYSLEGTIQERIEKIGQLMYGADKVEFSELAQKKVDTYTKQGFGNLPICIAKTQYSLSHDPSLKGAPTGFTVPIRDVRLAVGAGYLYALAADIQTIPGLPTAPGYLNVDVDAETGEIDGLF

SEQ ID NO: 11679 - protein, 420 aa, Diplotaxis siifolia
YHYSCTFFFVILVLFPHAFSTNTLSSNESLTISSNKTLVSPGDVFELGFFKTTTRNSRNGTDRWYLGIWYKTTSDQRTYVWVANRDNPLHNSIGTLKISHANLVLLDQSNTSVWSTNLAGVVQSPVTAELLANGNFVLRGSYSTEDEFMWQSFDFPVDTLLPEMKLGWKLNSSEKEKILKSWKSPTDPSSGDYSFRLETEEFLYEFYLMKNEFKVHRTGPWNRVRFNGVPKMQNWSYISNNFIDNEDEVAYSFLVNNNNHNIHTRFRMSSTGYLQVITWTKTVPQRNMFWSFPEDTCDLYKVCGPYAYCDMNTTPMCNCIKGFVPKNAGQWELRDASGGCMRSSQLSCGEGDGFLRMSQMKLPETSEAVAVLVDNGLKECKERCVRDCNCTGFANMDSMNGGPSCVIWSGELEDMRNYVA

SEQ ID NO: 11680 - protein, 590 aa, Zea mays
MGTRPRGVVLAPWAVVLVLVLALRLAGASHVIHRSLEAEAAPSVPASIVSPLLRTGYHFQPPMNWINDPNAPLYYKGWYHLFYQYNPKGAVWGNIVWAHSVSRDLINWVALEPAIYPSIPSDKYGCWSGSATILEDGTPAILYTGIDRADINYQVQVLALPKDASDPLLREWEKPEEYNPVATPAAGGINATQFRDPTTAWRHAGHWRMLVGSVRGARGMALVYRSRDFRKWTKAKHPLHSAALTGMWECPDFFPVSGPGLQAGLDTSAPGTKYVLKSSLDLTRYDYYTIGSYDGGKDRYYPDDPAGDYHHRRRYDYGNYYASKTFYDPVERRRVLLGWANESDSVPDDKAKGWAGIHAIPRKIWLDPTGKQLLQWPIHEVEKLRGKAVSVDAKLVKPGDHFEVTGIATYQADVEVSFELELEAGTSLLEKAEAFDPAYDDDAQKLCGVKGADARGGVGPFGLWVLASADLQERTAVFFRVFRDGHGKPKVLMCTDPTKSSLSPDLYKPTFAGFVDADISSGKITLRSLIDRSVVESFGAGGKTCILSRVYPSIAVGKDAHLYVFNNGEVDVTVSGLTAWEMKKPLMNGA

SEQ ID NO: 11681 - protein, 427 aa, Clostridium thermocellum ATCC 27405
MNDAIVKSTMENFDKDVLKSDIPVAVLFYTESCPVCDAFMPIFERTAQKYGKYMKFVKIYRQQNRQLVEDLKIKSSPTVLFYKEGNEVCTRLNGYISNAEFVEAIERVIGDVCKGEKREKVHCDFLILGGGPAGLTAAIYAARAKLHTVVVDEGLIGGQVATTFQVANYPGTNGVVRGIDLMENMKKQALDFGAYIDDLKEISDVNLEGKEKLVTAKDTDYYAKAVLIATGATPRRLPAEGEKEFRGRGVHYCATCDGAMYFDANILVVGGGESAAEEAVFLTRYAKHVTIINRHDYLKASKTAQDEVFRNPNISVVWNSEVRKINGDSFVKSVTIENLKTGKIEEIETDGLFVYIGTQPKTELFAGKVGMNEEGYILTNEDMATNIPGVFAAGDVRAKKVRQIATAVGDGAVAGIMAERYINGKFY

SEQ ID NO: 11682 - protein, 421 aa, Oryza sativa
  misc_feature (186)..(186): Xaa can be any naturally occurring amino acid
MAVEYHCCGAAFFEHVVIIVVLVLFAGLMSGLTLGLMSLSLVDLEVLAKSGTDQDRKHAAKILPVVKNQHLLLCTLLICNAAAMEALPIFLDSLVTAWGAILISVTLILLFGEILPQSICSRYGLAIGASVAPLVRVLVWVCFPVAYPISKLLDHLLGKGHTALFRRAELKTLVTLHGNEAGKGGXELTHDETTIIAGALELTEKKAKDAMTPLCQTFAIDINAKLDRDLMQKVLDKGHSRVPVYYEKKTNIIGLILVKNLLSINPDDEIPIKSVTIRKIPRVSEDMPLYDILNEFQKGHSHMAVVIRQTNANYAAEPPANDGGTLEVAISIDDKHGEKVVKNLPPLRRWKSCPNSQNSNRGNRNRKWSKDQSDVLQIHEEPLPTLNEDEEAVGIITMEDVIEELLQEEIYDETDVHVEEQ

SEQ ID NO: 11683 - protein, 419 aa, Eruca sativa
YHHSYTLFFLVLLQFHHVFSTNTLSSNETLTISSNKTLVSPGDVFELGFLKTNTKNSQDGTDRWYLGIWYKTTSERTYVWVANRDNPLHNSIGTLKISHANLVLLNQFNTPVWSTNLTESVTSPVTAELLANGNFVLRDSKTKDLNHFMWQSFDFPVDTLLPEMKLSRNIKPGNDRILTSWKSPTDPSSGDFTFVLEPHNHGLHEFYLLKNEIEVYRTGPWNQNRFNGIPKIQNWSYIANNFIDNNNEEVAYTFHVNNSNIHSRFRMSSLGYLQVITWTKTIPQRDMFWSFPEDACDLYQVCGSYAYCDINTTPNKCNCIKGFVPKNPDAWTLRDATGGCVRSSRLSCGEGDGFVRMSKMKLPETSEARVDKGIGLEECKERCVRDCDCTGFANMDIGSGGSGCVMWIDELVGMRNYVA

SEQ ID NO: 11684 - protein, 297 aa, Clostridium thermocellum ATCC 27405
MYDVIIIGKGPAGISASLYTVRANLKTLVIGKGDSALKKAERIENYYGFSEAINGERLLAEGEKQAARLGVEIIESEVISIEKNEFFEVLTSDDRYMAKAVLIATGQPQKKLRIENLEAFEGRGVSYCTTCDGFFYNNLKVGVVGAGDYVVHEAMELLAFTKDITIYTNGNELQVSEKFVEAAKRFRISKKPIYKIDGSEFLQKIFFKDGTSEDIDGLFIAYESPSSVDFARKLGIIVEGNAIVVDKNQQTNLEGLFAAGDCTGGFKQIATAVGQGALAGRKMIEYVRSLETANSPV

SEQ ID NO: 11685 - protein, 274 aa, Nicotiana benthamiana
MAQTMLLTANAKVDLRNKEPLVERLKPKPLSSFFLPSLPLKYPSASSSSSSHFTSTTVALFKSKAKAPAKKVVPKPKEKVEDGIFGTSGGIGFTKQNELFVGRVAMIGFAASLLGEAITGKGILAQLNLETGIPIYEAEPLLLFFILFNLLGAIGALGDRGKFIDDPVPATGLDKAVIPPGKGFKSALGLSEGGPLFGFTKANELFVGRLAQLGIAFSIIGEIITGKGALAQLNFETGVPINEIEPLLLFNIVFFFVAAINPGTGKFVTDEEEE

SEQ ID NO: 11686 - protein, 653 aa, Nocardioides sp. JS614
MPLHYPFSAVLGCDVRADLDDMGLALVLTTISPEIGGVLVRGEKGTAKSTAVRALGALLPPLVELPIGATEDRVVGSIQLESALSEGKVEVEKGLLARANGGLLYVDEVNLLHDHLVDLLLDAAAMGRVSVERDGISVEHDARFVLIGTMNPEEGELRPQLLDRFGLTVEVAAPRAPEPRAEVVRRRMAYDADPVSFIETYAAAEKDLDQRIHGARASLADVVLSDAALLKIAEVCAAFEVDGLRADIVTARAAVAHAAWEGRDAVTRADIRRAATLALPHRRRRNPFDAPGLDEDLLDRILGDDELPPEPPPGTDHEEGPEAAPGTPGTPRTDGAAPSPGADAEGGSDSDGGGTDPSGPDPALGPPEPQHRPEAADTDDRASTVAAGSPYRPKLLTVRGVGAGASGRRSRARTSTGRRVGASRPADGRGSLHLLETIRAAAPRQGSRGRTGGRLALRRDDLRVATREGRESNLILFCVDSSGSMAARKRMIQVKTAILSLLLDAYRRRDKVGLVTFRGDSADLVLPPTHSVDVAAARLDELPAGGRTPLAEGLWEAAKVLRRERLRDPRLRPLLVVVTDGRATAGRDAVRRSLQAAEHVAGLAIASVVIDGEAGPLRLGLAIGLARSLNAEHVPVAEVSAEALTRTVTRKVA

SEQ ID NO: 11687 - protein, 419 aa, Eruca vesicaria
YHYSYTLFFVILLQFHHVFSTNTLSSNETLTISSNKTLVSRGDVFELGFFKTTTKNSQDGTDRWYLGIWYKTTSERTYVWVANRDNPLHNSIGTLKISHNNLVLLNQFNTPVWSTNLTESVTSPVTAELLANGNFVLRDSKTKDLNRFMWQSFDFPVDTLLPEMKLSRNFKPGNDRILTSWKSPTDPSSGDFSFKLEPQNHGLHEFYLLKNEIEVYRTGPWNQNRFNGIPKIQNWSYIVNNFIDNNNEDVAYTFHVNNSNIHSRFRMSSTGYLQVITWTKTIPQRNMFWSFPEDACDLYQVCGSYAYCDINTTSNKCNCIKGFVPKNPEAWDLRDATGGCVRSSRLSCGEGDGFMRMSKMKLPETSEARVDKGIGLEECKERCVRDCDCTGFANMDILNGGSGCVMWIDELVDMRNYVA

SEQ ID NO: 11688 - protein, 192 aa, Triticum aestivum
  misc_feature (157)..(157): Xaa can be any naturally occurring amino acid
  misc_feature (176)..(176): Xaa can be any naturally occurring amino acid
PFLDKEFINVAMSMDPEWKMYDKNLGRIEKWVMRKAFDDEENPYLPKHILYRQKEQFSDGVGYNWIDGLKAFTEQQVTDEMMSNAAQTFPYNTPVNKEAYYYRMIFERLFPQDSARETVPWGPSIACSTPAAIEWVEQWKASNDPSGRFISSHDSAXTTPAAVSWRWWPTAATAPXNGTVNGGNDVAVAIAV

SEQ ID NO: 11689 - protein, 277 aa, Nicotiana benthamiana
MAQTMLLTANAKVDLRSKESLVERLKPKPLSSFFLPSLSLKYPSASSSSSSSSSHFTSTTVALFKSKAKAPAKKVVPKPKEKVEDGIFGTSGGIGFTKQNELFVGRVAMIGFAASLLGEAITGKGILAQLNLETGIPIYEAEPLLLFFILFNLLGAIGALGDRGKFIDDPTPPTGLDKAVIPPGKGFKSALGLSEGGPLFGFTKANELFVGRLAQLGIAFSIIGEIITGKGALAQLNFETGVPINEIEPLLLFNIVFFFVAAINPGTGKFVTDEEEE

SEQ ID NO: 11690 - protein, 346 aa, Crocosphaera watsonii WH 8501
MANIIFVVLIVLTGSAVCACAETALFSVSPVRVKQLAQSKKRTAIVLQSIRSKMNRPIATIVILNNIFNIVGSIVIGSLAATVLGDAWLGLFSSVLTFLIIVCGEIVPKTIGERYSEPIALAVAIPVQFLTVIFTPLVWLMEQITSPFNRRGNLPTTNETEIRFLTMIGHKEGVIEDDEAEMIQRVFQLNDLTANELMTPRVIVTFLPGDSTLLESQEEIIISEHSRILVIEESIDKVIGYCLKDELLAAIIKGKGEQKINQLLRQVYYVPESIKADKLLKTFQDTREHLMVVLDEYGGVAGVVTLEDVLEVLIGEIVDETDRIIDLQEIARKKRKVLLNSRGIKP

SEQ ID NO: 11691 - protein, 365 aa, Hordeum vulgare
MWRCILLSAVVVALALAPAPALGVPLTEKDLASEESLRGLYERWRSHYTVSRRGLGADAGERRFNVFKQNARYVHEGNKRDMPFRLALNKFADMTTDEFRRTYAGSRVRHHLSLSGGRRGDGGFRYGDADNLPPAVDWRQKGAVTAIKDQGQCGSCWAFSTIVAVEGINKIRTGKLVSLSEQELMDCDNVNNQGCDGGLMDYAFQFIQKNGITTESNYPYQGEQGSCDQAKENAQAVTIDGYEDVPANDESALQKAVAGQPVSVAIDASGQDFQFYSEGVFTGECSTDLDHGVAAVGYGATRDGTKYWIVKNSWGEDWGEKGYIRMQRGVSQTEGLCGIAMQASYPTKSAPHASTVREESHTDEL

SEQ ID NO: 11692 - protein, 476 aa, Aquifex aeolicus VF5
MIEKKMLIGGEWVDKEEKIEVIYPYTRKPIGRVPKGDEKDVEKAIERAKEGFKEIFSLTAYERYEILMRAAQLLKERAEEFAKTLVLEVGKTIREARTEVQRAIQTLIFSAEEAKRVNGETFPIDAHPNGKGKLGFYIRVPVGIVSAITPFNFPLNLSMHKVAPALAAGNAVILKPSERTPLTPLMLGEILLEAGVPPKALSVIPGYGDVGKAMTTHPDVRVVSFTGSRKVGDIIARQVGIKKLVLELGSNSAIILHKDGNLEKAVEKTVQGGYAIAGQVCISVQRVFVHEDLYDEFIKRLKERVSKLKVGDPMNEDTDLGPMIAPSELERIQEWISEAVQKGAKIEAGGLRCAEDETIFSPTIVSLVPEDSKLFKEEAFAPVVAVNPYKDIEEAIRWVNSSDYGLQVGVFTNDVKLAWKCIKEIEAGGVLINEGPTFRADHMPYGGVKYSGIGREGPKFAIEDYTEIKTVIFDLT

SEQ ID NO: 11693 - protein, 420 aa, Erucastrum abyssinicum
YHQSCTIFFLVLIQFHHVFSTNTLSPNDALTISSNKTLVSPGDVFELGFFKTTTRNSRDGTDRWYLGIWYKTTSDQRTYVWIANRDNPLHNSMGSLKISHANLVLLDQSDTPVWSTNLTGVAHLPVTAELLANGNFVLRDSKTNDLDRFMWQSFDFPVDTLLPEMKLGRKVNSSEKEKILTSWKSPTDPSSGDYSFILETEGFLHEFYLFKNEFKVYRTAPWNGVRFNGVPKMQNWSYIDNSFIDNKEEVAYTFRVNNNHNIHSRFRMSSTGYLQVITWTKTVPQRNMFWSFPEDTCDPYKVCGPYAYCDMHTTPMCNCIKGFVPKNAAQWDLRDASGGCVRSSKLSCGERDGFLRLGQLKLPETSEALVEKGIGLKECKEKCLRDCHCTGFANMDIMNGGGSGCVTWTGELVDMRDYDA

SEQ ID NO: 11694 - protein, 281 aa, Magnaporthe grisea 70-15
MPLTAVQKTLSAQFVHMTATNDKVAQKFLKNANWKLDIAADAYFNSNPNMATSSSSKPKLDKMFSDLQDTQEDSPDELGAGSAIEYASSLGVDPESVGIFVLMELVKAPAFGVITRSGFVEGWQATNAPASKSGQKDYIQSVIRNLPQDHELFKRVYRHAFIAGRETPEQRALPLENALVYWQCFFGPEMPHSKPWVAKSSQSGGTTDFLDLWTEYLKNNWSRTVSKDMWNQTLDFAVKSTADSTLSFWTPEGSWPSVIDGFVEWLRNKGIGVASGMEVDS

SEQ ID NO: 11695 - protein, 77 aa, Glycine max
VSNLASFPQLSLQQSRNAILSNGQLDGWNEVPSGNGLGVAELLRNERLGFNKFYRGYDDSKYRMPNSMDLFNRTFGI

SEQ ID NO: 11696 - protein, 419 aa, Erucastrum gallicum
YHHSCTIFFLVLIQFHHVFSTNTLSPNDALTISSNKTLVSPGDVFELGFFKTTTRNSRDGTDRWYLGIWYKTTSDQRTYVWIANRDNPLHNSMGTLKISHANLVLLDQSDTPVWSTNLTGVAHLPVTAELLANGNFVLRDSKTNDLDQFMWQSFDFPVDTLLPEMKLGRKVNSSEKEKILTSWKSPTDPSSGDYSFILETEGFLHEFYLFKNEFKVYRTGPWNGVRFNGIPKMQNWSYIDNSFIDNKEEVAYTFRVNNNHNIHSRFRMSSTGYLQVITWTKTVPHRNMFWSFPEDTCDVYRVCGPYAYCDMHTTPMCNCIKGFVPKNAAQWDLRDASGGCVRSSKLSCGEGDGFLRLGQMKLPETSEALVEKGIGLKECKDKCLRDCHCTGFANIDIMNGGSGCVTWTGELVDMRNYDA

SEQ ID NO: 11697 - protein, 472 aa, Geobacter metallireducens GS-15
MHRIAFGTSGWRGILCEDFTFENVKVVTQAIADHVTSIGEKEKGIIVAYDTRFMGERFAKETARVLAGAGIKAYVCKRDTPTPVVSHEILRRKAAGAINFTASHNPPEYNGIKFSPSWAGPALPETTKDIERRANEMLGEVCYREVALDEAARAGLVEEIDPRETYLADIETKVDFTAIASLGTIAVNVLYGTARGYLDEPLMKHGAKIKTLNMHPDPYFGGFPPEPSEKYIQDFIGLVKSDPAVKLGIATDGDADRFGIVDADGSFIEPNYIIALLFDYLVRVRKMTGAVARSVATSHLIDAVAKKHGIEVIETPVGFKYVGELISQDRIIIGGEESAGLSIKGHVPEKDGILACFLVAEMVAREGLSVKALLERLYGEVGRFLTKRENITLSPVLEAGYADKQRQAPAEFAGLKVKDMVTVDGSKFILEDGSWLLFRKSGTEPVVRLYGEASSEEKLAAVMAAGKAFILG

SEQ ID NO: 11698 - protein, 469 aa, Erwinia carotovora subsp. atroseptica SCRI1043
MKEVHLVKRMAHALMSGHSRKQEDPYRPEWHLSPCVGLLNDPNGFIHHNGRYHLFYQWNPLACAHGAKFWGHWSSADLVNWKHEPVALVPSESYESHGCYSGSAVVDHGAITLIYTGNVKYDDGSRTAFQCLARENPNGEYDKLGAVLTLPDGYTGHVRDPKVWRHGDHWYMVLGAQDLDLQGKVVLYRSADLLAWEKIAEIAGSRLGGLGDFGYMWECPDLFPLDGEDILICCPQGVPAEDERYLNTFQAGYFIGSLDYENGDYSHQGFHELDLGFEFYAPQTTLSEDGRRLLFGWMSIPDDNEFFEPTIEHGWIHTMTCARELTLHDDRVYQRPARELQQLRRQHYTWRGAADYASPLPISSAEVLITVQGEFQLNLASQLVLCWDGERVTISRRNRRTGEPEHRYWRGDLRQLQILCDRSSVEIFINDGEAVMSARTFPESEATMTFSGSGQLTLQHWLLAPCVIE

SEQ ID NO: 11699 - protein, 964 aa, Solanum tuberosum
MATRNLEKLASIDAQLRLLVPTKVSEDDKLVEYDALLLDRFLDILEGLHGEGIKETVQECYELSAEYENTRDKKKLEELGSVLTSLDPGDSIVVAKSISHMLNMANLAEEVQIANSGREKSKKGDFSDESNLMTESDIEETLKRLVVDLKKSPREVFEALKNQTVDLVFTAHPTQATRRSLLQKHARIRNCLAQLYAKDITPDDKEELDEALQREIQAAFRTDEIRRTPPTPQDEMRAGMNYFHETIWNGVPKFLRRVDTALKNIGINERIPYNAPLIQFSSWMGGDRDGNPRVTPEVTRDVCLLARMMAANLYYSQIDDLMFELSMWRCNDELRDRADEQHRSLKRDEKHYIEFWKQVPPSEPYRVIIGDVRDKLYHTRERTRQLLSNGFSEIPEEATYTNIEQFLEPLELCYRSLCACGDRPIADGSLLDFLRQVSTFGLSLVRLDIRQESDRHTDVLDAITQHLEIGSYRQWSEERRQEWLLSELSGKRPLFGPDLPKTEEIADVLNTFHVISELPSDCFGAYIISMATAPSDVLAVELLQRECHVKQPLRVVPLFEKLDDLEAAPAAIARLFSIEWYKNRINGKQEVMIGYSDSGKDAGRLSAAWQLYKAQEELIKVSKQYGVKLIMFHGRGGTVGRGGGPSHLAILSQPPDTIQGSLRVTVQGEVIEQSFGEEHLCFRTLQRFTSATLEHGMYPPFPPKPEWRALLDEISVVATEKYRSIVFKEPRFVEYFRLATPELEYGRMNIGSRPSKRKPSGGIETLRAIPWIFAWTQTRFHLPVWLGFGAAFKYALNKDKKNLNMLQDMHKKWPFFRVTADLIEMVFAKGDPGIAALYDKLLVSEDLWSFGELLRSDYEETKSLLLQVAGHKELLEGDPCLKQRLRLRDSYITTLNVCQAYTLKRIRDPTYNVTLRPHITKEYIESKPAAELVCLNPESEYAPGLEDTLILTMKGIAAGMQNTG

SEQ ID NO: 11700 - protein, 337 aa, Cochliobolus heterostrophus
MVVKVGINGFGRIGRIVFRNAIEHNDVDIVAVNDPFIEPHYAAYMLKYDSTHGQFKGDIKVDGNNLTVNGKTIRFHMEKDPANIPWSETGAYYVVESTGVFTTTEKAKAHLKGGAKKVVISAPSPDAPMFVMGVNHETYKPDIEALSNASCTTNCLAPLAKVIHDKYTIIEGLMTTIHSYTATQKVVDGPSAKDWRGGRTAAQNIIPSSTGAAKAVGKVIPELNGKLTGMAMRVPTANVSVVDLTVRIEKGASYDEIKQAVKEASEGSLNGILGYTEDDIVSTDLNGDNRSSIFDAKAGISLNKNFVKLVSWYDNEWGYSRRVLDLLVYIAKIDGNA

SEQ ID NO: 11701 - protein, 145 aa, Novosphingobium aromaticivorans DSM 12444
MTKFLHTMIRVTDPDATIAFFELIGLKETRRFDSEKGRFTLIFLAAPGEEGIAEVELTYNWPPEDGSPAEGYSGGRNFGHLAYRVDNIYDTCRRIMDAGHIVHRPPRDGHMAFVKTPDGISIELLQDGHLPPQEPWASMENTGTW

SEQ ID NO: 11702 - protein, 408 aa, Photobacterium sp. SKA34
MNRRVVVTGMSGVTAFGNDWKHIEPKLRACENATIYMQDYELYDGLNTKLAAPIENFTLPKHYTRKKIRAMGRVSKLSTLATENALAQAGLLESDVLTNGQTGIAYGSSTGSTPAISAFGVMLNEKSTRAITATTYVQMMPHTTAVNVGLFFELRGRVIPTSSACTSGSQAIGYAYEAIKHGYQTIMVAGGAEELCPTESAVFDTLFATSLKNDTPKATPRPYDTERDGLVIGEGAGTLVLEEYEHAVARGAKIYAEVVGFASNCDAAHVTQPQKETMQLCMEMALQQANLSPSDIDYISAHGTATEKGDIAESQATANIFGNDTPISSLKSYLGHTLGACGAIEAWLSLEMMHDGWFNPTLNLDNLDPECGDLDYIRGEGRNLDCHYIMSNNFAFGGINTSIIFKRL

SEQ ID NO: 11703 - protein, 440 aa, Acidobacteria bacterium Ellin345
MGSAVATVVGESIAIGIFLTPAGMAKALGSPFWLLAVWMLMAAMALSGALCFGELSTRYPEDGGLYVYLREGFGKRIAFLYGWMSLLVMDPGITAAMAVGMATYGSYIFGWGGVGTKIVAVSSVLALGLLNIVNLRVSAGLLRIVTWLKFAVLGALVLRGLLFHLGSSHNFTPFVQQRTGSMPLGPALAVATVAAFFSFGGWWDVSKIAGEMKNPERILPRALVAGVLGVTAAYVIITGVFVYLVPLEKVVSDKGFVAQAGEVLFGGPGAQLLSAAVVICVLGSLAVLIMVSPRVYFAMARDGLFFSAVAETHPKFGTPSRAIAVQVVMASLLIVLGSFGQILSYFMFPAVIFLGLALSTVFVFRRKGIPDGVVKTAGYPITPVFFLVLVVVVLALIVGHDPVQAFTGLGVVLLGLPVYALVHRKTSPAALEPIADQKAS

SEQ ID NO: 11704 - protein, 590 aa, Saccharomyces castellii
MRDFISRNKTAIIATVAAGTAAVGAYMYYAQLQQQHEKKPAKKTKKSKKSVTEEEKKKEEPPIYPIDANGEPVLGDVDLLNDKTKEEWAGALKEKGNALFKKKDFENAIKYYTFALSLKEDPVYYSNISACYSSLLNYEKVIEMATKALALRPDYSKVLVRRANAYEKLGNFGDAMFDLSVCSLNTDMSDASIEPILERNLNQQAMFVLNTKLGVTDKKSQLPSNTALTSFFGIFKPELSFANYDDTCEGDKELLNGLKNLYRCTAEGYETADLSFTKATEYFLKQLSETPDDETVKEKTAIALEHQGIFKFLKNNPLEAHEDIKKALELHPRINSYIYMALILADKGDTDNYFANYEKAMKLDDKNAALYYHRGQMYFITQQYEKAGEDFDKAKELDPENIFPYIQLACLSYRENKFDDCETLFSEARRKFPNSSEVPNFYAEILADKGDFDAALKEYERAIELEKKQDAVHVGIAPLVGKATLLVRTPTVENFVEATSLLEEAVKEDPRSEQAKISLGQLKLQQEDIDEAIELFESAATLARTFEEKLQATTFAEAAKIQKRIRADPKMSAKIQETIAALRASDFANL

SEQ ID NO: 11705 - protein, 482 aa, Mycobacterium sp. KMS
MDTTALLKSVPTGLWIGGEEREAKSTFNVLDPSSDEVLVAVGDATAEDAVAALDAACAVQAEWAATPARKRGEILRSVFETLTDRADDIAALMTLEMGKVLAESKGEVTYGAEFFRWFAEEAVRIGGRYTPSPAGTGRIIVTKQPVGPCYAITPWNFPLAMGTRKMGPAFAAGCTMIVKPAQETPLTMLYLAKLMAEAGLPKGVLSVLPTSSPGPVTEALVDDGRLRKLTFTGSTGVGKSLVKQSADKLLRTSMELGGNAPFIVFDDADVDAAVDGAMLAKMRNGGEACTAANRFHVANSVREEFTEKLVKRMSEVTLGNGLDESATLGPLINNKQLQKVTELVSDAVSRGATVAVGGVAPGGPGNFYPATVLADVPADARILKEEVFGPVAPITGFDSEEEGVAAANDTEYGLAAYVYTRSLDRALRVAEAIESGMVGINRGVISDAAAPFGGIKESGFGREGGTEGIEEYLDTKYIALTK

SEQ ID NO: 11706 - protein, 237 aa, Leifsonia xyli subsp. xyli str. CTCB07
MQQLTAAGFLFDMDGTLVDSTPVVEAVWTEFSRANGLDPAEVLGYAHGRQAIDTLARFLPQRSPAERGELLSALVAEEVARTEGIVEVPGAGALLTALIGAGAPVAVVTSAPRELAVARMTAAGVPVPPVLVAAEDVERGKPDPQAYLLAAERLGVPAASCFAFEDAPAGLAAAVASGACVVVVGVYESAVSEGLGRVLDYVGELSVTEAGGEWSTGLVAASTTPAARTAAGQPSAR

SEQ ID NO: 11707 - protein, 89 aa, Thermotoga maritima MSB8
MEVKIEKPTPEKLKELSVEKWPIWEKEVSEFDWYYDTNETCYILEGKVEVTTEDGKKYVIEKGDLVTFPKGLRCRWKVLEPVRKHYNLF

SEQ ID NO: 11708 - protein, 184 aa, Ashbya gossypii ATCC 10895
MARYGATSTNPAKSASARGSYLRVSFKNTRETAQAISGWDLTKAQTYLEQVLDHKRAIPFRRYNSSIGRTAQGKEFGVTKARWPAKSVKFVQGLLQNAAANAEAKGLDSTKLFVSHIQVNHAPKQRRRTYRAHGRINKCESSPSHIELVLTEKEEAVEKATEKKVVRLSSRQRGRLAAQKRINA

SEQ ID NO: 11709 - protein, 506 aa, Arabidopsis thaliana
MASSLLTSSGMIPTTGSTVVGRSVLPFQSSLHSLRLTHSYKNPALFISCCSSVSKNAATSSTDLKPVVERWPEYIPNKLPDENYVHVFDTTLRDGEQAPGGSLTPPQKLEIARQLAKLRVDIMEVGFPGSSEEELETVKTIAKTVGNEVDEETGYVPVICAIARSKHRDIEAAWEAVKYAKRPRILIFTSTSDIHMKYKLKKTQEEVIEMAVSSIRFAKSLGFNDIQLGCEDGGRSDKDFLCKILGEAIKAGVTVVNVADTVGINMPHEYAELVTYLKANTPGIDDVVFSVHCHNDLGLATANSIAGIRAGARQVEVTINGIGERSGNASLEEVVMALKCRGAYVINGVYTRIDTRQIMATSKMVQEYTGLYVQAHKPIVGANCFVHESGIHQDGILKNRSTYEILSPEDIGIVKSQNSGLVLGKLSGRHAVKDRLKELGYELDDEKLNVVFSLFRDLTKNKKRITDADLKALVTSSDEISLEKLNGANGLKSNGYIPVLQVSSNV

SEQ ID NO: 11710 - protein, 453 aa, Pediococcus pentosaceus ATCC 25745
MTEKIIVVGCTHAGIAAVNEILKYHPQADVTVFERHDTISYLSCATYLTLGKTISNLDEAMYADPDYYRAQGIDMRLRHDVIDINVEEHTVFAQDLETKEFTTESFDKLIMATGSLTSIPTIQGVENPKVKLCKTYEEARDLCDEAQNDERIAIIGGGYIGVELAEGYNKSNHEVILFHKKETPLDRHIEPEIADKITNLLEDKGIQVKTGTIVKSFEDGANDTLIVKTADEAFEVDMAVICTGLLPQADLLQGKVDQLTNGAIVVNDYMETSNPDIFAAGDAASVKHNGLQTDVYMPLASQAVRQGALAGINVLDKRLRSIGTQSTTGMLIFGRTLACSGVTLAMALDAGINATKVAYKGSYRPDFMPNAHKVEIELVYDRNSRKVLGVQLWSKHDVSQAADTISALMHYHGTIDELSFIDMLFSPNFDQPFNYLNLVGQLAVKQENGYLRT

SEQ ID NO: 11711 - protein, 207 aa, Bradyrhizobium japonicum USDA 110
MSERLLVLVRHGQSEWNLKNLFTGWKDPDLTEQGVAEAREAGRKLKAQGLVFDVAYTSVLTRAQHTLDLILGELGQKGLPTEKNLALNERDYGDLSGLNKDDARKKWGEDQVLIWRRSYDVPPPGGESLKDTLARALPYYVQEILPSVLNGKRTLVAAHGNSLRALIMVLEKLSPEGILKRELATGVPIIYRLNADSTVASKLDLAG

SEQ ID NO: 11712 - protein, 439 aa, Bacillus cereus G9241
MAVENITMPQLGESVTEGTISKWLVNVGDHVNKYDPLAEVMTDKVNAEVPSSFTGIVKELIAGEGDTLAVGEVVCVIQVEGADEVAATAVEEKTKEEPKAEVATPEKAPKAKQPTDGKPRFSPAVLKLAGEHNVDLDLVEGTGANGRITRKDILKLVESGNIPQAGAAKKEEAVAAVVEARPEAPKAAPVAQKVEAVKPVSVPTMPGDIEIPVTGVRKAIAANMLRSKHEAPHAWMMIEVDVTNLVSYRNSIKGDFKKREGFNLTFFAFFVKAVAQALKEYPQINSMWAGDKIVQKKDINLSIAVATEDELFVPVIKHADEKTIKGIAREITELAGKVRTKSLKADEMQGGTFTINNTGSFGSVQSMGIINYPQAAILQVESIVKRPVIMENGMFGARDMVNLCLSLDHRVLDGLICGKFLGRVKEILENTSENNTSVY

SEQ ID NO: 11713 - protein, 506 aa, Arabidopsis thaliana
MASSLLTSSGMIPTTGSTVVGRSVLPFQSSLHSLRLTHSYKNPALFISCCSSVSKNAATSSTDLKPAVERWPEYLPNKLPDENYVRVFDTTLRDGEQAPGGSLTPPQKQEIARQLAKLRVDIMEVGFPGSSEEELETVKTIAKTVGNEVDEETGYVPVICAIARSKHRDIEAAWEAVKYAKRPRILIFTSTSDIHMKYKLKKTQEEVIEMAVSSIRFAKSLGFNDIQLGCEDGGRSDKDFLCKILGEAIKAGVTVVNVADTVGINMPHEYAELVTYLKANTPGIDDVVFSVHCHNDLGLATANSIAGIRAGARQVEVTINGIGERSGNASLEEVVMALKCRGAYVINGVYTRIDTRQIMATSKMVQEYTGLYVQAHKPIVGANCFVHESGIHQDGILKNRSTYEILSPEDIGIVKSQNSGLVLGKLSGRHAVKDRLKELGYELDDEKLNAVFSLFRDLTKNKKRITDADMKALVTSSDGISLEKSNGANGLKSNGYIPVLQVSSNV

SEQ ID NO: 11714 - protein, 484 aa, Xanthomonas axonopodis pv. citri str. 306
MLRSLIVCCRVRMSYAIVWFRRDLRLEDNPALRAALDAGHHPIPLYIDAPHEEGEWTPGAASRTWRHRSLAALDGALRALGSGLVIRVGNSAQVLDEVIAQTGAVAVYWNRKYEPATQPRDAQIKRDLRERGIEVQSCNCALLFEPWQLSTQQGGPYKVFTPFWRNALTQLQLPAAIGAPRSLPPLPASLKTDALDTLQLVPGLQWDQGFWEHWQPGEAGAHEMLEIFIDGALSGYRENRDRPDRVGTSQLSPHLHFGEIAPWRIANTLETHRTARNGAEIDAYIRQLGWRDFAYHLLHHFPDTTNQNLNPRFAGFDWATVDPVALQAWQRGRTGIPIVDAGMRQLWHTGWMHNRVRMIVASFLCKHLRIHWIEGARWFWDTLVDADLANNTLGWQWVAGTGADAAPYFRVFNPVTQAEKFDPQAAYITRWVPELGKLAVKERFAPWLHPLSLARLAPEYPRTPIIGLAEGRDAALAAYAKTRG

SEQ ID NO: 11715 - protein, 730 aa, Kluyveromyces lactis NRRL Y-1140
MSSDVSSPISEVPFVEKFLGEVECEEYLPTFEKFRLFDEDRLYYLDREILEELGVKKIGDKIKILKQSRQLRRDASGFNPKKELVEITAKINALNSNPLSINEELVTDKHSVIFILNDGSAKKVNVNGCFNAHSIKKKLIKRLPSEFISIDPVTKEATHSSQDYDVFVVDYVKNVLHLLYDVELVTICHSSDRLEKNRLIFVSKDQTPSEKAIFTSKKVYLKTLSVMQQMGSQPGAGRPLLSGPGTNALRIENRSDNIREIFTQRPPTELISTNLPEYFPHTDINRLKKTLRNSMRQSIRASMIRGKNGSLVSLAGSNKIGDILVNQSHAVDRALLESIQNDGSASNSADHAVPMHNTSTNGSDASTASLTPLMKRTSISSNSRNSKSSVRGRSGSESGTSESNDKIELYSTDTDTEGEEDDAEDTISLPTKVEAPKSWLKGARIGSGSFGSVYLGMNAETGELMAVKQVELKPTAVTAGVVSIADESKKAHSPGGGNTAVKNTSQIHRKMIDALQHEMNILKELHHENIVTYYGSSQEGGNLNIFLEYVPGGSVSSMLNNYGPFDEPLVKNFTRQILIGLAYLHKRNIIHRDIKGANILIDIKGGVKITDFGISKKLSPLNKQQNKRASLQGSVYWMAPEVVKQVVTTEKADIWSVGCVIVEMFTGKHPFPDFSQMQAIFKIGTNIIPEIPSWVSEEAKAFLFKSFELDYRKRPSSLGLLQEPWLNTVL

SEQ ID NO: 11716 - protein, 228 aa, Schizosaccharomyces pombe
DRCGLLLERHAKIATDGQKPFLKKDSDFKEVPSGDIDLETAISLIKPTVLLGCSGQPGKFTEKAIREMSKHVKHPIIFPISNPTTLMEAKPVQIDEWSNGKALMATGSPLPPLTRNGKEYVISQCNNALLYPALGVACVLSRCKLLSDGMLKAASDALATVPRSLFVADEALLPDLDNAREISRHIVFAVLKQAISEGMSTVDLPKDDAKLKEWIIEREWNPEYRNFV

SEQ ID NO: 11717 - protein, 321 aa, Magnaporthe grisea 70-15
MFGRSAPKFDPAKDIPNQAGRIAFVTGGNGGLGLETVIQLAKAGMERIFIGARNEEKALKAIKEISTNLNCSTTFTFVKMDLTSFDSVCRAADQVISQTDKLHLLINNAGVVGTAPGLTPEGYETQWGTNHMGHALFTRLLLPLLKQTAEGGRVDVRIVNVSSLSERMCALHGCGDLEVFKRAEAKGPLWGAGLFWGYGASKLATILHARMLAKKHPSVKAVAVHPGTVKTTITGSFSKTSPFIGGYVMPFITALFFVDVSEGARNQLWAATSDQANTGEYYAPVGRPNMGSGKSRNMKEAERVWEWTERELDAYLRKTGR

SEQ ID NO: 11718 - protein, 118 aa, Triticum aestivum
  misc_feature (59)..(59): Xaa can be any naturally occurring amino acid
  misc_feature (67)..(67): Xaa can be any naturally occurring amino acid
MARVALVAVFAVLAALAVAEMASGAVTCGDVTSAVAPCMSYARGQASAPSGACCSGVRXLNAKASTXADRKAACNCLKNLAGSGISMGNAANIPGKCGVSVSFPINTKTNCNKYILKS

SEQ ID NO: 11719 - protein, 413 aa, Wolinella succinogenes
MRRVVVTGIGMINALGNNRGDSFKAIVEGKCGIKRISCFDVEDFPVKIAAEITDFDPSLVMDPKEVKKADRFIQLGIKAANEAMHDSGLLGSDHRLLPEIDGDRFGISSASGIGGLQNIEKNSVINAERGPKRISPFFIPSSLVNMLGGFVSIDYGVKGPNLSSVTACAAGTHAIIEAAKTIMLDGADRMLVVASEAAICAVGIGGFAAMKALSDLNDEPLKASRPFDANRNGFVMGEGAASLVLEEYEAAKKRGATIYGELIGFGESGDANHITTPAPEGEGALRAMRAALRMANTSIDYVNAHGTSTKYNDMYETMALKSAFGSKEAVPPVSSTKGQTGHCLGAAGAIEAVISLMSMQEGILPPTINYETPDPDCDLDYIPNTAREAKPTTVMSNSFGFGGTNGVVIFKKL

SEQ ID NO: 11720 - protein, 398 aa, Ashbya gossypii ATCC 10895
MSFDRNQDGKLKVKTSSKLPVSPTFESMKLQENLLRGIYGYGFEAPSAIQSRAITQIIRGKDVIAQAQSGTGKTATFTIGMLQVIDSSSKDLQALVLSPTRELAAQISQVVRNLGDYMNVVALACTGGKALQQDISKVNKGCHVMSGTPGRVLDMIKRRIINTRHVKMLVLDEADELLSETLGFKQQLYDIFTKLPSSVQVVVVSATMSKVVLEVTKKFMSDPVKILVKRDEVSLEGIKQYHINVDKEEWKFDTLCDLYDSLTITQCVIFCNTKKKVDWLSHKLIQNNFAVASIHGDMKQDDRDKVMSDFRSGSSRVLISTDVWARGIDVQQVSLVINYDLPELLENYIHRIGRSGRFGRKGVAINFITREEVTKLKSIEKHYSIKIKPMPADIDSLS

SEQ ID NO: 11721 - protein, 459 aa, Clostridium thermocellum ATCC 27405
MIEFNKKTNTLEQVQYKYTLQDVSEPNLYRDIFSYDEIPKCTFNHRKVPMAPPDEIWITDTTFRDGQQSRAPYTVEQIVHLYDLLHKLGGPKGIIRQCEFFLYSDRDKQAVYKCLERGYKYPEVTSWIRATKSDFQLAKDMGMKESGILVSCSDYHIFKKLNMTRKQALEHYMSIVKSAIEVGIRPRCHFEDITRADFYGFVVPFAIELRKLMEESGVPIKIRACDTLGYGVSYPGAALPRSVPGIIYGLRHYAGFPSELIEWHGHNDFYKAVCNAATAWLYGASAVNCSLLGIGERTGNTPLEAMVIEYAQLRGTTDSMDTTVITEIAEYYEKELGYQIPPRTPFVGKHFNVTQAGIHADGLLKDEEIYNIFDTAKLLNRPVGVAINQTSGLAGIAHWINSHFGLEGAKRIDKRDERIVKIKEWVDEQYKAGRVTSIGDDELEEVIRKLAPEIFDLAL

SEQ ID NO: 11722 - protein, 112 aa, Blastopirellula marina DSM 3645
MKKVEAIIRHHKMEDVKMALNDMGVHGMTVSEVQGYGRQKGHTENYRGAEYSVDFVPKHKIEIICSDGNLQLVIDTILKSAQTGQIGDGKLFIYDVKQAIRIRTGEMGEDAV

SEQ ID NO: 11723 - protein, 409 aa, Sinorhizobium meliloti
MMPERIVIVGGGQAGGRVAQILAGSPANLDIALIGLEPHPPYNRPPLSKGVLLGKSELKDCVIWPQGDATAGRVRFYPGRRAESLDIHARHVITDDGARLDYDKLVLATGSRVRRLSVPGAECDGVFTLRTFDDAVAIARRFHRSKRLLVVGGGFVGLEIAAAARSRGLETVVVEATNRLLSRIVPQEIGAALARYHEAAGVSFRVGSMVEKLVANRSGKLKSAVLSNGETVPCDLAVIGVGVTANTELAKEAGLEVQVGIRTDSALRASADGVYACGDAVSFWHPLFERYVRVEAWQNAEDHARVVASQLLGQDMVCDTVPFFWSDQYEWSMQIAGIPYFGSQLVTNTVEEAKILYHLDARGRLVAATGLGHDRLIGRKIAEARRLIKRRARPNPQMLKTGQIQLEDG

SEQ ID NO: 11724 - protein, 340 aa, Ginkgo biloba
MAPTRVQYVAESRPQTIPLEFVRPVEERPINTTFNDDIGLGRQIPVIDMCSLEAPELRVKTFKEIARASKEWGIFQVINHAISPLLFESLETVGKQFFQLPQEEKEAYACTGEDGSSTGYGTKLACTTDGRQGWSDFFFHMLWPPSLRDFSKWPQKPSSYIEVTEEYSKGILGVLNKLLSALSISLELQESALKDALGGENLEMELKINYYPTCPQPEVAFGVVPHTDMSALTILKPNDVPGLQVWKDEKWITAHYVPNALIIHIGDQIQILSNGKFKSVLHRSLVNKEKVRMSWPVFCSPPLDTVIGPLKELIDDSNPPLYNARTYREYKHRKINKLGQ

SEQ ID NO: 11725 - protein, 118 aa, Shewanella sp. MR-7
MLKITSKQLEVTAPIRERIESRFDKLSRHDVQLINPHVIITEEKPGFKIEASVGIPNGELFAQAKHDNLYAAITAMGQKLEKQLNRLTHKPEAQRFASIAHPEDAVNVEDDYEEEDAA

SEQ ID NO: 11726 - protein, 574 aa, Lotus japonicus
MEGKGYTLDGTVDLAGRPVLSSLTGKQKACTYILVYRVLERFAYYGVGANLVNFMTTQLNKDVVSSITSFNNWSGLATLTPILGAYIADTYTGRFWTITFSLLIYAIGLVLLVLTTTLKSLRPACENGICREASNLQVALFYTSLYTIAVGSGAVKPNMSTFGADQFDDFRHEEKEQKVSFFNWWAFNGACGSLMATLFVVYIQEKNGWGLAYSLSAIGFLLSSIIFFWGSPVYRHKSRQARSPSMNFIRVPLVAFRNRKLQLPCNPSELHEFQLNYYISSGARKIHHTSHFSFLDRAAIRESNTDLSNPPCTVTQVEGTKLVLGMFQIWLLMLIPTNCWALESTIFVRQGTTMDRTLGPKFRLPAASLWCFIVLTTLICLPIYDHYFIPFMRRRTGNHRGIKLLQRVGIGMAIQVIAMAVTYAVETQRMSVIKKHHIAGPEETVPMSIFWLLPQNIILGVSFAFLATGMLEFFYDQSPEEMKGLGTTLCTSCVAAGSYINTFLVTMIDKLNWIGNNLNDSQSRITIMPFFSVISALNFGVFLWVSSGYIYKKENTSTTEVHDIEMSAEKTVKY

SEQ ID NO: 11727 - protein, 356 aa, Xanthomonas campestris pv. vesicatoria str. 85-10
MDELTHVPADTSQHASAPYNAAATRGEIAMSSPITLIEAITQALAWELEHDPAVLVLGEDVGVNGGVFRATAGLQQRFGSDRVLDTPLDETTIAGLSVGLAAQGMKPVAEAQFDGFVYPMVDHLICHAARLRNRTRGRLHCPMVLRVPWGGGIRAPEHHSEANEAIFTNVPGLRVVLPSSPQRAYGLLLAAIRDPDPVIYMEPKRIYRQYKEVVANDGQALPLDVCFVLRDGTDVTLVTWGAQVKEALEAADKLAGEGISAEVIDVATLRPLDFDTIAESVAKTGRCVIVQEAPRTAGFGAEIAARLAEQSMYDLVAPVERVTGYDTHIPLFRLEMKFLPSVERIVAAARRAVAAG

SEQ ID NO: 11728 - protein, 415 aa, Lunaria annua
YPHSYTFFFFFMFVVLVLFRHVFSINTLSSTETLTISSNRTIVSPGDVFELGFFKTTTTSRDSDRWYLGIWYKSSSERIYVWVANRDNPLSNSIGTFKISYANLILLDQSDTPVWSTNLTKAVNSPVVAELLANGNLVLRDSKTKNKDLNRFLWQSFDFPVDTLLPEMKIGWDLKTGHNRFLSSWKSSDDPSSGDFSFKLETQVLPEFYLWNKESRVYRTGPWNGIWFNGIPKMQEWSYIVNSFIKNKDEVAYTFKVTNPIIHTRFTLSYNGLLQGITTINEPNMFWFLPEDKCDVYKRCGPYSYCDMETTPVCNCIRGFEPKNAKAWALGETFDGCVRKKRLSYGGYGFLLMKMMKLPETSKVIVDERIGLKECEDKCGKDCNCTGFANLDIRNGGSGCVVWTEELVDMRNYIA

SEQ ID NO: 11729 - protein, 576 aa, Bordetella pertussis Tohama I
MRASKYHLNTLKEAPAEAEIASHQLMTRAGMIRKLAGGIYTYMPLGLKVIRKIEGIVREEMNAAGAIELLMPVVQPAELWMESGRWEQYGAELLRIKDRHQRDFVLQPTSEEVITDIARNEIQSYRQLPLNFYHIQTKFRDERRPRFGLMRGREFTMKDAYSFDRDEAGAQRSYDIMYAAYQRIFQRLGLEFRAVAADTGSIGGSRSHEFQVIADTGEDLIVYNPESDYAANIELAEAPALLATRAAPGQDLEAVPTPGAAKCEDVAKLLDLPLARTIKSIVLAVDQPEGPAQVWLLLLRGDHELNEIKAGKLPGLAGFRFATETEILDHFGCKPGYLGPIKTARPVHVVADRTVANMADFVCGANREDYHYQGANWGRDLPEPELVADLRNVVEGDPSPDGKGALSIQRGIEVGHVFFLGTKYSEALKATFLDDNGKPAVLQMGCYGIGVTRIVGAAIEQNHDARGIIWPRAIAPYEVVICPVGWGKSETVRDTALALYEALRARGVDVMLDDRDSRPGVMFAEWELIGVPLRVTVGERGLNEGVVELQARREAEAAKVPVDQALAQTLAKLDLL

SEQ ID NO: 11730 - protein, 416 aa, Moricandia arvensis
YHHSNTLFFVMLVLFPHVLSTNTLSSNEALTISSNKTLVSPGDVFELGFFKTTTRNSTDRWYLGIWYQTTSERTYVWVANRDNPLHNSNGTLKVSHANLVLLDQSDTPVWSTNITRPVTSPVTAELLANGNFVVRGSYTIDQSHFMWQSFDFPVDTLLPEMKLGWNNKTEHGRFLTSWKSPTDPSSGDFSFGLETHEGLHEFYLLKDEYEMYRTGPWNGARFSGIPKMQNWSYIVNSFIDNKEEVSYSFHVNNNHNNIHSRFRMSSTGSLQVITWTSTTPQRNMFWSFPEDACDAYQMCGPYAYCDMNTTPTCNCIKGFVPKDADAWALRDASGGCVRSSRLSCGEGNGFLRMGQMKLPETSTGAVGDKRIGLKECKERCVRDCRCTGFANMDIRNGGSGCVIWTGELMDMRNYGA

SEQ ID NO: 11731 - protein, 439 aa, Aquifex aeolicus VF5
MSYIPHSEEETKEILSKLGLESLEDLFSHIPKELFAKDFSFPEPKSEEELRRIFERACEDTELPLYFIGAGAYDRIIPSVIWQILSRGEFLTPYTPYQAEASQGTLQAIFEYQSLICELTGMDVANASMYDGASALAEAVLMARAIKGKGDTVVLSKALNPLYRRTVKTYLRGYEDKIVEVPYTEEGTTDLNNLEEVLKESEVHALAVQYPNFFGFVEPLKEIGELCKKYEVPFVVFVDPIALSILKPPAEFGADIVVGEGQQMGIPLSFGGPYVGFFATKKEHVRKMPGRLVGMGEDIEGKRAFTLVLQTREQHIRRERATSNICTNQNLMALANLLYMVLLGKEGMKKVAVQSLSKALYFKKELMKKGFEEVFTGKHLWEFPLRHESLKAIYRKLLKEKIVLGLPLDRFYEDLKNTTLIAVTEKRTKEEIDSVLALL

SEQ ID NO: 11732 - protein, 420 aa, Sinapis alba
YHHSCTIFFVVLLQFHHHVFSINTLSSNEALTITSNKTLVSPGDVFELGFFKTPTSNSQDGTDRWYLGLWYKTTSDQRTYVWVANRDNPLHSSTGTLKISHANLVLLDQSDTPVWSTNLTGVVQLPVTAELLDNGNFVLRDSKTKDLNQFMWQSFDFPVDTLLPEMKLGRKLNSPENEKILTSWKSPTDPSSGDYSFILETEGFIHEFYLLKNEFTVYRSGPWNGVRFNGIPKMQNWSYIVNSFTDNKEEVAYTFRVNNHNIHTRFRMSSTGYLQVITWTKTVPQRNMFWSFPEDTCDVYKMCGPYAYCDMHTTPMCNCIKGFVPKNAGRWDLRDTSGGCVRSSRLSCGEGDGFLRMSQMKLPETSEAAVDKMIGLKECKEKCVRDCNCTGFANMDIMNGGGSGCVTWTGELVDMRNYVA

SEQ ID NO: 11733 - protein, 419 aa, Dehalococcoides sp. BAV1
MYELSVLPSGLRVISYHMPASRSVTICVYIGVGSRYEKDCEAGASHFIEHMVFRGSAKYPNSQLISSAIEGVGGILNAATDRESTLYYAKVGSDKFALALDVLSDMLVTPVFDPEDLEKERKVVYEEISMSMDNPSHRVGLLIDEILWPNHPLGRDIAGSRQSVAGLDRQRLLSFMHCHYNPANVVVAVAGDIKHAPAVSAISQAFSGLGGQNIVQTFEPYHSGNPCPVGVDKRDAEQINLMLAMPGMNRLDNRRYAFSILNTILGDGMSSRLFAHVRDNLGLAYSVQSGTEFLHDTGAFSIFAAVDPANLTACIEAILSEMEAAKTTITAEELTKAKEMSKGRIQLAMEDSRYMAKWIGSQELLCRRVNTHEDVIRLIDGVTLTSVMELAGEYFRKPEMRLALVGQIDKEKVSCLLKD

SEQ ID NO: 11734 - protein, 420 aa, Sinapis arvensis
YHHSNTFFFVVLVLFPHVFSTNTLSSNDALTISSNKTLVSPGNVFELGFFRTTTRNSQDGADRWYLGIWYKTTSDQRTYVWVANRDNPLHNSIGTLKISNANLLLLDHSDSPVWSTNLTGVVEPPVTAELLANGNFVLRGSYSTEDEFMWQSFDFPVDTLLPEMKLGWNRKPGPERILTSWKSPTDPSSGDFSFMLETHTIGLHEFYLRKNEFIMYRTGPWNGVRFSGIPKMQNWSYIVNSFVDNHKEVAYTFHVDNHKINSRFRMSSTGYLQVITWTMTVPQRNMFWSFPEDTCDLYQVCGPYAYCDMNTAPTCNCIKGFVPKNAAQWELRDASGGCVRSSRLSCGEGDGFLRMSQMKLPETSEAVAVLVDKRNGFKECKERCIRDCNCTGFANMDSMNGESRCVIWSDELLDMRKYVA

SEQ ID NO: 11735 - protein, 210 aa, Triticum aestivum
  misc_feature (137)..(138): Xaa can be any naturally occurring amino acid
  misc_feature (155)..(155): Xaa can be any naturally occurring amino acid
MTSVWKTKVLPGLNKIFDKDGKKAAAAEFLKSFNKEEIDKEIEDKKTELEPKVVETIEASPPEIKGLIKDKKTSKIRKNSVAVTKFLDDLAKIDFPGAKLVSDAVAKSGTTPLSPAIVFILDKVAPFVPAPKEEPKXXPEVAAAAPAEETTTREXVAVEEEKKEEAEPSAAPAEAAAPAEAAAPAEVVEEKKEEKPVEAAAPAAEEPEEK

SEQ ID NO: 11736 - protein, 554 aa, Mycobacterium sp. KMS
MTADDQLTDISATSAWQALQRHHGEIAGRHLRELFAEDPSRGTELTVSVGDLYIDYSKHRVTRETLRLLVDLARAAGLEKRRDAMLSGVHINTSEDRAVLHTALRLPRDASLTVDGQDVVADVHEVLDRMGDFTDRLRSGEWTGATGERIRTVVNIGIGGSDLGPAMVYESLRHYADAGISARFVSNVDPADLVAKLDGLDPATTLFIVASKTFSTLETLTNATAARRWLTNTLGDAAVARHFVAVSTNQKLVDEFGIDTANMFGFWDWVGGRYSVDSAIGLSVMAAIGRERFAEFLAGFHLVDEHFRTAPLEANAPALLGLIGLWYSNFFGAQSRAVLPYSNDLSRFAAYLQQLTMESNGKSVRADGTPVSTDTGEIFWGEPGTNGQHAFYQLLHQGTRLVPADFIGFSQPTDDLPTADGTGSMHDLLMSNFFAQTQVLAFGKTAEEIAAEDTPADVVPHKVMPGNRPTTSILATKLTPSVVGQLIALYEHQVFTEGVVWGVDSFDQWGVELGKTQAKALLPVITADDSPAEQSDTSTDALVRRYRAERGRSA

SEQ ID NO: 11737 - protein, 420 aa, Sinapis arvensis
YHHSYTFFFVVLVLFPHVFSTNTLSSNDALTISSNKTLVSPGDVFELGFFRTTTRNSRDGTDRWYLGIWYKTTSDQRTYVWVANRDNPLHNSIGTLKISNANLVLLDHSDTPVWSTNLTGVVEPPVTAELLANGNFVLRGSYSTDDEFMWQSFDFPVDTLLPEMKLGRNRKPGPERILTSWKSPTDPSSGDFSFMLETHTIGLHEFYLRKNDFIMYRTGPWNGVRFSGIPKMQNWSYIVNSFVDNHKEVAYTFHVDNHKINSRFRMSSTGYLQVITWTMTVPQRNMFWSFPEDTCDLYQVCGPYAYCDMNTAPTCNCIKGFVPKNAAQWELRDASGGCVRSSRLSCGEGDGFLRMSQMKLPETSEAVAVLVDKRNGFKECKERCTRDCNCTGFANMDSMNGESRCVIWSDELVDMRNYVA

SEQ ID NO: 11738 - protein, 537 aa, Crocosphaera watsonii WH 8501
MSNQTDRIIIFDTTLRDGEQSPGASLTVEEKLTIARALARLGVDIIEAGFPYASPGDFQAVQKIAETVGTENGPRICGLARASTKDIKAAGEALKPAFKSRIHTFIATSDIHLKHKLKKTRSEVLDIVPEMVAYAKTFTDDIEFSPEDAGRSDPEFMYQVLETAIAAGATTVNIPDTVGYTTPSEFGAIIKGIKDNVPNIDQAIISVHGHDDLGLAVANFLEAVKNGARQLECTINGIGERAGNAALEELVMALHVRRQYFNPFLGRAVDSTEPLTNINTQEIYKTSRLVSNLTGMIVQPNKAIVGANAFAHESGIHQDGVLKNKLTYEIMDAESIGLTNNQIVLGKLSGRNAFRTRLSELGFELSDNDLNNAFLRFKEVADKKKEITDWDLEAIVNDEIQQAPELFRLELVQVSCGDHAVSTATVTLRNPEGKELTDAAIGTGPVDAVYKAINRVVNVPNELIEFSVKSVTAGIDAMGEVTIRLRHEGRTYSGYAANTDIITASARAYISALNRLYGAIQEQSKVNSSEAVLTPQG

SEQ ID NO: 11739 - protein, 424 aa, Staphylococcus aureus subsp. aureus NCTC 8325
MEITMPKLGESVHEGTIEQWLVSVGDHIDEYEPLCEVITDKVTAEVPSTISGTITEILVEAGQTVAIDTIICKIETADEKTNETTEEIQAKVDEHTQKSTKKASATVEQTSTAKQNQPRNNGRFSPVVFKLASEHDIDLSQVVGSGFEGRVTKKDIMSVIENGGTTAQSDKQVQTKSTSVDTSSNQSSEDNSENSTIPVNGVRKAIAQNMVNSVTEIPHAWMMIEVDATNLVNTRNHYKNSFKNKEGYNLTFFAFFVKAVADALKAYPLLNSSWQGNEIVLHKDINISIAVADENKLYVPVIKHADEKSIKGIAREINTLATKARNKQLTAEDMQGGTFTVNNTGTFGSVSSMGIINHPQAAILQVESIVKKPVVINDMIAIRNMVNLCISIDHRILDGLQTGKFMNHIKQRIEQYTLENTNIY

SEQ ID NO: 11740 - protein, 229 aa, Bordetella pertussis Tohama I
MPARSHHRIFRSGWLRAAVLGANDGIVSTASLIAGVAAAQASYAAILTSGLAGLVAGALSMAAGEYVSVKSQADIEAADLRLEQSSLKRNSREELEELTGIYVERGLSPDLAGQVARQLTRHNALDAHARDELGISVHNRAQPVQAALASAASFAVGAALPLAIAMAAPLAQLMPVVIAGSVAGLGILGAVAARAGGAPVGPAAVRVVLLGAAAMALTAGVGALFGVAV

SEQ ID NO: 11741 - protein, 327 aa, Staphylococcus aureus subsp. aureus NCTC 8325
MAKLSYLEAIRQAQDLALQQNKDVFILGEDVGRKGGVFGTTQGLQQKYGEDRVIDTPLAESNIVGTAIGAAMVGKRPIAEIQFADFILPATNQIISEAAKMRYRSNNDWQCPLTIRAPFGGGVHGGLYHSQSIESIFASSPGLTIVIPSTPYDAKGLLLSSIESNDPVLYFEHKKAYRFLKEEVPEEYYTVPLGKADVKREGEDLTVFCYGLMVNYCLQAADILAADGINVEVVDLRTVYPLDKETIIDRAKHTGKVLLVTEDNLEGSIMSEVSAIIAEHCLFDLDAPIMRLAAPDVPSMPFSPVLENEIMMNPEKILNKMRELAEF

SEQ ID NO: 11742 - protein, 406 aa, Thiobacillus denitrificans ATCC 25259
MRPDRRPAVIPLHLSHFTASSCLGAGLDPTLAALRAGRSGLAPCRFETVHDLDTHIGEVAGVDETPLPADFAEHDCRNNRLAWLGLQQDGFDAAVRAAIARHGRRRVGVFLGTSTAGILQTEQAYRRRDAASGALPADFVYRTTHNTYSLAGFVRALYGIEGPAAVASTACSSGAKVFASAQRMIATGLIDAAIVGGVDSLCLTTLYGFNSLELLSPEPCRPFDAGRRGLSIGEAAAFALLEAVPASLDADAVLLLGAGESSDAHHMSSPHPEGAGARQAMAATLAAAGLAPDQIDYVNLHGTATPSNDAAEGRAVAALFGDRVACSSTKGATGHTLGAAGGLEAVIAALALQHGFMPGGVNTRTPDPAIPVRYLRTNTDVAPRRVLSNSFGFGGTNCSLVLGRAG

SEQ ID NO: 11743 - protein, 919 aa, Pseudoalteromonas tunicata D2
MFEPNAIKKRYHIVLYLILTLAYVYSGKIFSLFSGQSQVVFIWLPAGVALFGVFLWGLRFAPAIFIASCIFNFSANPNNQLIDLTSTLGIEIGLIALGATLQASIGGLILRRFIGNPLISTSTINIIAFVFGVGVLVNLTSANIGVYALSTFNAGYSDDKHWQNVLNWWLGDSFGVLLVVPFLLALHQLLSNDEANKKGCWIIIATSSIAFLSVTFTTLIFAKNSQLNALELSKKEARVIENSVYRQLNNSLVQIHSLASYIQNTSLLTKFKFEQFVSELMIHDPSIKAMSWNAAIHANELTAFETKLKKSYGEQITVRGAQLINTDPLIVIELIAPLADNKSALGFNVNSDPKRKFVLSQAAYTGIPQATSILQLVQSKEPEAGFLLYAPIYTIINNSHFDVMEQQPSKELFGYATGVFLAQKLINQAITARQQKMFKFEIYEPSKNTAFLTNIESQNQNKTLQLLGQLNVLSLTFNFAGQTWLMNLQPTEEFLAHDPNNFAQILYIFQVLVISFIILLTLLMNNRQTVLKHLVTLKTHDLQLARAQAEQANKAKSRFLANMSHEIRTPLNAVIGFSQLAKQTDDSVVLGSYIDKICLSSNTLLNIVNDILDISKIESEKLVLEQIPLDLHALLNRVSIIFEPIATQKSLQWQLDNQLPNQQWYVGDPTRIEQILINLCGNAIKFTHSGFIKLTARQICLNEQQAQLEIAVSDSGIGIKSENLKMLFDAFTQADDSTSRRFGGTGLGLTISQELSHLMQGNITITSKEDEGSTFAFHCHLPICDPQIEAEIPVTADIKGMRILVAEDNPINQIVITEMLKTLSIESTLANNGAEALELLKTNNFDLVLMDCQMPVLDGYEATKQIRAQAQWQHLPVIALTANVMPEDKAYALEVGFNAHLAKPLDLKKLTQCLAQFKV

SEQ ID NO: 11744 - protein, 412 aa, Pseudomonas aeruginosa PAO1
MALIVQKFGGTSVGTVERIEQVAEKVKKFREAGDDVVVVVSAMSGETNRLIGLANQIMEQPVPRELDVMVSTGEQVTIALLSMALIKRGVPAVSYTGNQVRILTDSAHTKARILHIDDTHIRADLKAGRVVVVAGFQGVDGNGNITTLGRGGSDTTGVALAAALKADECQIYTDVDGVYTTDPRVVPQARRLDKITFEEMLEMASLGSKVLQIRAVEFAGKYNVPLRVLHSFQEGPGTLITIDDEEESMEQPIISGIAFNRDEAKLTIRGVPDTPGVAFKILGPISAANVEVDMIVQNVAHDNTTDFTFTVHRNDYLNALEILKQTAANIGAREAIGDTNIAKVSIVGVGMRSHAGVASRMFEALAKESINIQMISTSEIKVSVVIEEKYLELAVRALHTAFELDAPARQGE

SEQ ID NO: 11745 - protein, 413 aa, Thermococcus kodakarensis KOD1
MVFKLLEQAGIKIDLDDEPKKVQTAPQFDDDDENEIRIVIVGVGGSGNNTITRLYDLGVQGAELIAMNTDAQALKHAKAHKKLLLGKDLTQGKGSGGDPEVGYRAAEASAHEIAETIGDADLVFITAGMGNGTGTGAAPVVARVIKERARHNGRFREPLVISVVTYPFKNEGKIREEKAKAGIKALLYYSDTVVIIENDKLLQLVPKLPINAAFRFADEIIARMVKGITETIKLPSMVNIDFADVYSIMHNGGAALIGIGESDSSNRAVDAVKNALQNKLLDVEYGSGEKALVHFTVGPDVSLGEINEAMNIVYEKLGEKSEIKWGARIDEDMGKMVRAMVIMTGVKSPHILGGETALQLPVKESLLPAEPKAGFNSFEDKIYKVISRKSDEKPGSDMRGYINKLLADFDDLS

SEQ ID NO: 11746 - protein, 390 aa, Triticum aestivum
MDGNKGPVVVTGASGFVGSWLVMKLLQVGYTVRATVRDPGERSLRLRLPHFLSPTHTRLTRYLTAFVICFCVFVSANVEKNKPLLELPGAKERLSIWKADLSEEGSFDDAIAGCTGVFHVATPMDFDSKDPENEVIKPTVEGMLSIMRACKEAGTVKRIVFTSSAGSVNIEERQRPAYDQDNWSDIDFCRRVKMTGWMYFVSKSLAEKAAMEYASENGLDFISIIPTLVVGPFLSAGMPPSLVTALALITGNEAHYSILKQVQLVHLDDLCDAMTFLFEHPEANGRYICSSHDATIHGLARMLRDRFPEYSIPHKFAGVGDDLQPIHFSSKKLLDHGFSFRYTAEDMFDAAIRTCREKGLIPLGDAPAPAAAGKLGALAAGKGQAIGAET

SEQ ID NO: 11747 - protein, 367 aa, Oceanicola granulosus HTCC2516
MDGFEIAVFEGDGIGPEVMRPTVELLTALARGHGRYALNFETLPAGAGHYREHGVSLPGDALARARRADAILLSAMGLPEVRYPDGTEISPQIELRMELGLYAGVRPVFQFGQSCPIARFGGDQRPVDFVIVRESTEGLFYSHGKGEVIDDSEARETLRITRATSEKLFDFAFDLARQRKADGRGAGVVHCVDKANVFQAFAFFRRIFRERAEAFPDIRAEAAYVDATAMWLVEKPQVFDVLVTENMFGDILSDLGAAMMGGLGLAPSADIGERNAVFQPCHGSAPDIAGQGRANPIAMVLSAAMMLDWLGRTRGQEAMRADALRIHEAVREVVTSGGPLTPDLGGTASTGEVVAAVRDAALAAVAA

SEQ ID NO: 11748 - protein, 403 aa, Colwellia psychrerythraea 34H
MKRVVITGLGIVSSIGNNADEVLASLKAGKSGISHSESFAEQGLRSQVWGKPDIETKDHIDRKAIRFMGDAAGYAYIAMDQAVKDAKLTEDQVSNFRTGIVAGSGGASSENIVASTDTLRNRGIRRVGPYAVPKTMGSTVSACLATPFKIKGVNYSISSACATSAHCIGNAMELIQLGKQDIVFAGGGEEVHWSLAMMFDGMGALSAGRNDTPELASRTYDADRDGFVISGGGGMVVVEELEHALARGAHIYAELVGYGATSDGYDMVAPSGEGAVRCMQQAMQGVEGKLDYLNTHGTSTPVGDVKELGAIQELFGEDSPAISATKAMTGHALGAAGVHEAIYSILMMENNFVAPSINIDNLDEKAQGLDIVTEKRDVELNLVMSNSFGFGGTNATLVMKKYK

SEQ ID NO: 11749 - protein, 364 aa, Pseudomonas syringae pv. phaseolicola 1448A
MNNKKLRIAAIAGDGIGLEVLPEGVRVVQAAAAKHGLELEFEYFEWASCDYYLKHGKMMPDDWFEQLKGFDSIFFGAVGWPEKVPDHISLWGSLLKFRREFDQYANIRPVRLFPGVPCPLANREPDDIDFIVVRENTEGEYSSLGGIMFENTENEFVLQESVFTRRGVDRILRFAFEMASKRERKHVTSATKSNGMAISMPYWDKRTEAMASQYPDISWDKQHIDILCARFVLQPERFDVVVASNLFGDILSDLGPACAGTIGIAPSANLNPERNFPSLFEPVHGSAPDIFGKNIANPIAMIWSGALMLEFLGQGDERFTAAHDEIITAIEQVIASGDVTPDLGGKHSTQEVGAAIAGRVSAAQ

SEQ ID NO: 11750 - protein, 119 aa, Brassica napus
  misc_feature (118)..(118): Xaa can be any naturally occurring amino acid
MARLNSKAVVSAVVLAAVVLMMAGREATALSCGQVDSKLAPCVSYVTGKAPSISKECCSGVQGLNGLARSSPDRKIACRCLKSLATSIKSINMDKVSGVPGKCGVSVPFPISMSTNCXN

SEQ ID NO: 11751 - protein, 418 aa, Streptomyces sp.
MNRRVVITGMGVVAPGAIGIKSFWELLLSGTTATRAITTFDATPFRSRIAAECDFDPVAAGLSAEQARRLDRAGQFALVAGQEALTDSGLRIGEDSAHRVGVCVGTAVGCTQKLESEYVALSAGGANWVVDPHRGAPELYDYFVPSSLAAEVAWLAGAEGPVNIVSAGCTSGIDSIGYACELIREGTVDVMLAGGVDAPIAPITVACFDAIRVTSDHNDTPETLAPFSRSRNGFVLGEGGAIVVLEEAEAAVRRGARIYAEIGGYASRGNAYHMTGLRADGAEMAAAITAALDEARRDPSDVDYVNAHGTATRQNDRHETSAFKRSLGDHAYRVPISSVKSMIGHSLGAAGSLEVAATALAVEYGAIPPTANLHDPDPELDLDYVPLTAREKRVRHALTVGSGFGGFQSAMLLSRPER

SEQ ID NO: 11752 - protein, 315 aa, Wolbachia endosymbiont of Trichogramma bourarachae
KKIQLGINLTKGLGAGALPDVGKGAAEESIDEIMEHIKDSHMLFITAGMGGGTGTGAAPVIAKAAREARAAVKDRAPKEKKILTVGVVTKPFGFEGVRRMRIAELGLEELQKYVDTLIVIPNQNLFRIANEKTTFSDAFKLADNVLHIGIRGVTDLMVMPGLINLDFADIETVMSEMGKAMIGTGEAEGEDRAISAAEAAISNPLLDNVSMKGAQGILINITGGGDMTLFEVDAAANRVREEVDENANIIFGATFDQAMEGRVRVSVLATGIDGRNNKSETSPISQSEDSEKEKFKWPYSQSESTQDKTLETKPA

SEQ ID NO: 11753 - protein, 420 aa, Sinorhizobium meliloti
MRPRRGPVHQENMVIVGCGHAGARAAQALRTNGWHGGITLVDGEGRTPYERPPLSKAVLKGESEAEDAPLFPADFLAKNDIHVLKGVAAAAIDRPTRQLRLSDGGSIAYHRLLLATGAEPRNLIVPGADLPGSHTLRSADDAARIFPYLRPGAEIVIVGGGLIGLEAAASATVRGCKVTVVEAGPRPMMRAVPAELSHEVRLFHESKDVRFVLGRQVSELEGDGRVRCVRLDDGTVLPCTAVVISVGVSPRTALAEAAGLEIDNGIAVDRFLRTSDPFIYAAGDACAFEQVSGPRMRLECWKNAEDQGTLAGRNMLGSDEAYVPLPWMWSDQFDRTMQIAGQAGGSAEDVRRRCPDSTLLIYHLDKDQMILGISGFGSIREVSRGVRMGQLLMERGIRPGRKALADPEFDLRSLAKAAVA

SEQ ID NO: 11754 - protein, 115 aa, Hordeum vulgare
MARAAASQLVLVALVAAMLLVATDAAISCGQVSSALSPCISYARGNGAKPPAACCSGVKRLAGAAQSTADKQAACKCIKSAAGGLNSGKAAGIPSMCGVSVPYAISASVDCSKIR

SEQ ID NO: 11755 - protein, 554 aa, Shewanella sp. MR-7
MCSIFSILDIQSDAKELRQVALEMSKLMRHRGPDWSGIYASDKAILAHERLAIVDIEHGAQPLLTEDGSLILAVNGEIYNHKELKAQLGDKYSYQTNSDCEVILALYQEYGTEFLDKLNGIFAFVLYDKAKDAYLIGRDHMGIIPLYTGRDAAGNFYVASEMKALMPVCKTVAEFQPGQYLYSTTGEPVQYYTRDWQSFDAVKDNAASQEELREALEAAVKRQLMSDVPYGVLLSGGLDSSVISAITQTFAKRRIEDDDQSGAWWPQLHSFAVGLKGAPDLAAAKKVADAIGTIHHEINFTFQEGLDAIKEVIYHLETYDVTTIRAATPMYLMARKIKAMGIKMVLSGEGADELFGGYLYFHKAPNAQAFHEELVRKLDKLHLFDCLRANKAMAAWGLEARVPFLDKEFMDVAMRINPEAKMSKDGRIEKHILRQAFEHKLPKEVAWRQKEQFSDGVGYSWIDGLKAHAAEQVDDLQLANAKFRFPYNTPETKEAYFYRCFFEEHYPLASAAETVPGGKSVACSTPEALAWDESLRGIIDPSGRAVRSVHAASY

SEQ ID NO: 11756 - protein, 115 aa, Hordeum vulgare
MARSAATQLVLVAMVTAMLLIAADAAISCGQVSSALSPCISYARGKGAKPPAACCSGVRSLAGAARSTADKQAACRCIKRAAGALNAGKAAGIPNKCGVRVPYAISASVDCSKIR

SEQ ID NO: 11757 - protein, 844 aa, Photobacterium profundum SS9
MDKQRIVVVGNGMVGHMFIDTLVQDASADKFDIVTFSEEARLAYDRVKLSAYFSGTTADELALTDEGYYQQHGVNFVLSDKVVALDTVNNHVVTESGRQEPYDKLILATGSYPFVPPIPGNDQPHCLVYRTIEDLEAITKSGKDSQVGVVIGGGLLGLEAANALKHLGVETHVVEFAPRLMAVQLDDGGARLLQRKIEQLDVQVHTEKATTEIVAGETCRYRMNFADGSFLETDMIVFSAGIRPQDELARQYGLEVGERGGIVINDNCQTSVDNVYAVGECALWQGRIFGLVAPGYSMAKAAVSHIRGGTGSFTGADMSTKLKLLGVDVASIGDAHGQTAGAQSYTFNDEVEQIYKRLIISEDGKKILGAVLVGDVDAYGTLLQMMLNDMELPENPAALILPAVDGEATTGFGVDALPDSAQVCSCFDVTKGQIKEAVANGCTDMASIKGTTKASSGCGGCTGLAKQVLDAELASLGFEVKNDICEHFAYSRKELADIIRIKEIKTFDELLTSHGEGLGCEVCKPTIGSILASFWNDYVLDNQHIGLQDTNDIFLGNMQKDGTYSVVPRIAGGEITPEKLIALGQVAQEFNLYTKITGGQRIDLFGAQLHELPVIWKKLIDVGFETGHAYGKSVRTVKSCVGSTWCRYGIKDSVGFAIDIENRYKGLRAPHKLKFAVSGCTRECAEAQSKDVGIIATENGWNLYVCGNGGMRPRHADLFASDLDDKTLQQYVDRFLMFYIRTADRLQRTSVWLENLDGGLDYLKEVIIDDKLGLAEELENEMARNIRNYQCEWKTTIESSEKLKRFQHFINSSDPDNKLSYVTEREQRRPATKSERIDIVEVTD

SEQ ID NO: 11758 - protein, 633 aa, Synechococcus sp. WH 5701
MAGATVFLASATALVFTERMASRALLQQARIDLIGFAGISAASIDARLHGRIIDAHRIGTPEYRVASEPLLALRAAVPEAYYAYTLVASAKGQAPRFGLDSSYYIKNAGDDTPVAQPGQPYPDASPAVLRALSTGLADASRDTYTDSWGTFLSAYAPFRTADGRVAGLVGVDLSLEALNARLQPLRLALALGFLASSVLSVLVGLRRFRAVRVRVEALALQERGRILAEQANRAKSVFLASVSHEIRTPLHGILGMSAMALDGDLSKDQREFLETIQCSGENLLRLLNDILEFTTIEAGRLRVQPRPFQLCSLLVRAIEAHAADARGKGLELTFQLPQASARPDRLSNDLWIVSDPERLLQILSHLLGNAVKFSEHGRVQLVVALVPVTAPEFVRLEFTVSDTGIGMEPEVVQRLFQPFSQADGSSTRLHGGTGLGLVIAQRLVAALGGNLAVESHLGRGTRFSFALEVPIAPSAAPLTNEEADPESAGDGIADASLTKEFRPPLRILVAEDSAVNRRVCALMFAKLGHSVSFAVDGEEAVSLHASLDPDLIVMDVQMPRLDGLGATRRIRRNSADQQRPWIVALTAGATVADRAEALEAGMNDFLTKPLQLTQLSEALDRARRALSATRVKC

SEQ ID NO: 11759 - protein, 383 aa, Allium cepa
MMKEIGAAGGAVVVTGAGGYVGSWLVMKLLHYGYTVRATLRDSSDEAKTKPLLELPGADTRLSLWEADLLQDGSFDHVISGSIAVFHVATPMDFDSIDPENEVIKPAVNGMLSIMKSCKKAGTVKRVIFTSSAGTVNVEEHQKPEYDENSWSDIDFCRRVKMTGWMYFVSKSLAEKAAWEFAKANGIDLVTIIPTLVVGAFITTAMPPSMITALSLITGNEAHYSIIKQAQLVHLDDLCEAHILLLNHPKAEGRYICSSHDVTIYDMAKMIRQNYPQYYIPQQFEGIDKGIQPVRFSSKKLVDLGFRYKYSMESMFDEAIKTCVERKFIPLQTAVELQLKPYELLEHNNKNGVVTNTIKIVGQMVNTKAMITEHEENEPIATH

SEQ ID NO: 11760 - protein, 412 aa, Shewanella sp. MR-7
MSKRRVVVTGLGLVTPVGNTVDTTWKALLSGKSGIAPITKFDASEFTTRFSGSVKDFDVEQYLTKKDARKMDLFIQYGMAAGIQAVQDSGLDMSKLNPGRVGTAIGAGMGGMWLIEQNHSALLSGGPRKISPFFVPSTIINMIAGHLSIMYGMTGPNFAVTTACTTGVHNIGFAARTIAYGDADVMVAGGAEDVTCPLGVGGFGAAKALSTRNDDPTAASRPWDKDRDGFVIGDGAGVMVMEEYEHAKARGATIYGELVGFGMSGDAFHMTSPPSDGAGAAAAMVNAVNDAKLPFEKIGYINAHGTSTPAGDKAEAAAVKSVFGDHAYNLLVSSTKSMTGHLLGAAGAVEAIFTLLALRDQAVPPTINLDNPDEGCDLDFVAHTARDVKLEYALCNSFGFGGTNGSLLFKKV

SEQ ID NO: 11761 - protein, 368 aa, Bartonella henselae str. Houston-1
MTYDQKKIVSALRAFERGEIVVVTDDDDRENEGDLIVAAVHCTEEKMAFIIRHTTGIVCAPMPKEEAQRFNLTPMVLDNNSVHRTQFTVTVDFKHGTTTGISAHDRTLAVRNLANSNAGANDFIRPGHIFPLIAHEGGVLMRSGHTEAAVDLCKLAGLPPVGVIGELVNDDGSVKHGDEVTRFAQENQFHIITVADLIAYRQRKEMLIQHVGEMHIETLVGPAVVQSYQLPWEAVQHVAIIFGDIRDGEDIPVRLHRENIVNDVFGQTSDILEIMRRMMKKEKRGVFVYLREGSVGVKSAVSIQALAMRGGESHTQAIEREEEWRQIGLGSQILKHLGISSVILYASKERHYVGLEGFGIRISRTDIL

SEQ ID NO: 11762 - protein, 369 aa, Nocardioides sp. JS614
MSRMTPDPSPYDAVLLVSFGGPERPEDVVPFLENVTRGRGIPRERLEEVGQHYYEFGGRSPINDQNRAFLAALRDDLAGAGLDLPVYWGNRNWDPLLADTIREMAADGITRAACFVTSAYASYSSCRQYRENLYDAVAALGEDLEDAPVLDKLRHPFNHPGFVEPMVDATLAALADLPEQVREEAHLVFVTHSLPEAMNAASGPEGGAYVDQHLSVADEIVERVRQETGHRHRHALVYCSRSGAPHVPWLEPDVNDHLERLHQDGAPAVVLVPIGFVSDHMEVVYDLDVEAMRTAARLGLPTTRAATVGIDPRFVAAVRDLVLERAAVERGEDVVRASVGRWPACWDRCPAGCCANPRAERPALAGADS

SEQ ID NO: 11763 - protein, 288 aa, Streptococcus thermophilus LMG 18311
MENTMAIIMDGKALAVNMQEQLQEKVARLKEKEWIVPGLVVIMVGENPASQVYVRNKERAAKKAGFHSKTVNLSESISEEELIEVIEKYNQDPLFHGILVQLPLPNHISEMRILLAIDPKKDVDGFHPMNTGNLWNGRPQMVPCTPAGIMEILREYNVELEGKTAVIIGRSNIVGKPMAQLLLEKNATVTLTHSRTPHLAKVCNKADVLIVAIGRAKFVTEEFVKEGAVVIDVGINRDEEGKLCGDVDFDQVKEKVSMITPVPGGVGPMTITMLMEQTYQAALRSLKG

SEQ ID NO: 11764 - protein, 554 aa, Bacillus thuringiensis serovar konkukian str. 97-27
MSRKIIVVGGVAGGASVAARLRRLSEEDEIIMVERGEYISFANCGLPYYIGGVITERQKLLVQTVERMSKRFNLDIRVLSEVVKINKEEKTITIKNVTTNETYNEAYDVLILSPGAKPIVPSIPGIEEAKALFTLRNVPDTDRIKAYIDEKKPRHATVIGGGFIGVEMVENLRERGIDVTLVEMANQVMPPIDYEMAAYVHEHMKNHDVELIFEDGVDALEESGAVVRLKSGSVIQTDMLILAIGVQPESSLAKDAGLALGVRGTIKVNEKFQTSDPHIYAIGDAIEVKDFVTETETMIPLAWPANRQGRMLADIIHGHTDSLYKGTLGTSVAKVFDLTVASTGVNEKILKRLNIPYEVVHVQANSHAGYYPNATPVLIKLIFNKDSGKIYGAQALGRDGVDKRMDVIATAIKANLTVLDLPDLELSYAPPYSSAKDPVNMVGYAASNIVDGFVDTVQWHEIDRIVENGGYLIDVREPNELKQGMIKGSINIPLDELRDRLDEVPVDKDIYITCQLGMRGYVAARMLMEKGYKVKNVDGGFKLYGTVLPERIAY

SEQ ID NO: 11765 - protein, 1002 aa, Aquifex aeolicus VF5
MKVVIVGNGIAGTALVEEILRLSSGKDIRIQVFGDEKFIGYNRVLITEVLAGRKTLSEIYIKRWQWYEEKGVRLEIGKKVERLFPNKKILVTKDGEFYRYDKAIIATGSKPFIPPSIKGVNKKGVFTYRTAKDVFEILDYARVSKRAVVIGGGLLGIEVTKALRDIGLEVFLVHILDTLMEQQLDKTASELLRKDLEDMGIKVLLKKVTEEILGEKKAEGVRFSDGDELLADFVIIATGIRPNVEVGVNSGLKVNKGIVVNDYLETSASDIYAVGECIEHRGKTYGLVAPIMEQVKVCAHNVVHGNEKKYTGSLTYAMLKVAGVNLFSAGEINEKDGDEVVAFLDNGRSLYRKAVIRNNKIVGTILYGDVRGNNYLLDLIKSGKDISEERPYFLIKHILPKGTTGVEELKDNDIVCNCNAVTKGEIVKCIKEGCKTLEEIQERTKASTSCGSCIELVEEILKHYVKEKPKRVNKIEVIKKELHPFDLEFKKRLEKYFSEGELENIPEEDRDVRLKWYGIFYRKATPGYFMVRIRVPNGRLSYEQAKVVSHISEKFCRGEVEITSRQQLQIRWIKLKDLPEILEALNRVGLSTLQTGMDNVRNVTGDPLTGLAEDSLIDTLRLSQEITNIFLGKKKYADLPRKLNVAVLGSQTDCINALFNDVCFYLSEKDGKLGFNLYLGGKIGSGGPKKAIDMDMFVEPYEVPEVFKATLDIYSTFGNRENRSKNRLYFLLQEWGVERFREELEKRLYKAIPSKGKDLVNKTGEREGIINLRNGTYAVCVVVPAGKIKAKDFRQIAELARKYGSRELRLSVYQNIYIPNIPEENLNPLLGEEIFEKFSTVSSPFTMHLIACAGSDTCSFGVIPNKSDAVRVAKYLSERLKLDIPVRMHWSACAKGCGQHGSGDIGFVGTKTKLNGKAVLAVDVFVGGSPTKEGFKVIQGLPLDKVEEASYLLLNYYLENRLEGESFADFAHRVGVDKLKVVLTSLLQEGECKLLKPESISK

SEQ ID NO: 11766 - protein, 194 aa, Triticum aestivum
MAPTVMASSATSVAPFQGLKSTVGLPVSRRSNGASLGSVSNGGRIRCMQVWPIEGIKKFETLSYLPPLSTEALLKQVDYLIRSKWVPCLEFSKVGFIFREHNASPGYYNGRYWTMCKLPMFGCTDATQVINEVEEVKKEYPDAYVRIIGFDNMRQVQCVSFIAFKPPGCQESGKAYTAHSRQAIYKVPLQYGQL

SEQ ID NO: 11767 - protein, 139 aa, Aquifex aeolicus VF5
MLSEETIRVIKSTVPLLKEHGTEITARMYELLFSKYPKTKELFAGASEEQPKKLANAIIAYATYIDRLEELDNAISTIARSHVRRNVKPEHYPLVKECLLQAIEEVLNPGEEVLKAWEEAYDFLAKTLITLEKKLYSQP

SEQ ID NO: 11768 - protein, 184 aa, Griffithsia japonica
MGKSVYSREPTNPAKAVKARGSDLRVSFKNTYETGSAIKGMKLERAQKYLQNVIDKKEIVPFRRYKIGVKGKPQCRTHKVAVGRWPRKSCEFILGLLKNAESNAELRGIDTDALVVTHMQVNKARRGRRRTFRAHGRINAFMSQPCHVEMFLAEPEEPVEGAGNGGARAPAKLTRSHLRSGVRA

SEQ ID NO: 11769 - protein, 236 aa, Medicago truncatula
MVSMASSTTFFTPLHNFNQARTNSIPSISLPFVKSSIPSSKSPFFQHGFSQPTSFDFPKAVLKSRSFSVNARAVTDKSIYDFTVKDIDKKDVPLSKFKGKVLLIVNVASRCGLTSSNYTELSHLYENFKDKGLEVLAFPCNQFGMQEPGSNEEIKKFACTRFKAEFPIFDKVDVNGPFTAPVYQFLKSSSGGFFGDLVKWNFEKFLVDKNGKVVERYPPTTSPFQIEKDIQKLLAA

SEQ ID NO: 11770 - protein, 300 aa, Oceanobacillus iheyensis HTE831
MRSLPSYVQLKEVGPRDGLQNEKSWITTEDKVNWINMLSTSGIKEIEYSSFVNPKMIPALSDAREVGKRIIRNPDVKYSALVPNIKGLEYALEAGIDGASVFMSASETHNQKNINKSIQDTYPVLDKVIVEAKQAGKHVTGYISTVFDCPYEGKISPEKVLDVCDKLIESGVDDLSLGDTIGTAVPTQVEQLLELLLQHYPKEKLILHFHDTRGMAIANIMTAMHYGIYRFDSTIGGLGGCPYAPGAAGNVATNDVLYLLEGLGINTGIDEKKLQEAGVFIQNKLNKTLPSRSLAYLKNA

SEQ ID NO: 11771 - protein, 532 aa, Oryza sativa
MAAVSAAAARLHHLLSLCVAVAGLLLMLLGGGEASVHEYRGLGFLNKGNAFILHAGSEGLYAPSSPANATTAEDDEDAAAAAVADAFIRFDKITFRRPKDAAKETGSAMVQILVFEIEDREMIGGSAYGGQKAICCTSDLAKLGACTEGSVIYRPSQVNPGWPQLLFSSFDGSDTIATLPSRIIPITKTGMYNMYFIHCDPSLAGLEIEGQTVWKNPTGYLPGRMAPLKNFFGIMSFAFVVLGIYWFYQYMKFWREVLPLQNCITLVITLGMLEMSLWYFEYAEFNETGVRPKGITFWAVTFGTVKRTVARVIILIVSMGYGVVRPSLGGLTSKVVMLGGTFFLATEILELVENLGAVNDLSGKARLFLVYPVAILDAAFVVWIFISLAKTLDKLQARRSMAKLDIYRKFTIALAVTVLVSIGWIGYEIYFKSTDVFNERWQYAWIIPAFWHVLSFSLLCVISYLWAPSQNSMRFTYDASENFDREDSLSLIRPGPIASKNGWSLSSSPDTKATKNVTVTSFDGDDEENKRE

SEQ ID NO: 11772 - protein, 247 aa, Griffithsia japonica
MKINIADPQSGAQKMFEIDDEKKLQYLYDMRLAQEVTGVHLGDEFKGYIFRVMGGQDKQGFAMKQGVLTADRVRLLMSKNTQGCRGYGMRKGERKRKSVRGCIISHHISVLHLLVVKNGEQPIDGLTNRQIPRRLGPKRASNIRKLFNLTKEDDVPKYVIRREIPVKDDAQRGAKLGSKARRFSDLLPRSGLHRKRRRIALKKASVAASRKAMAEYEKMIAKRNLEARQSRKTSLSKRRSAKAAAEK

SEQ ID NO: 11773 - protein, 121 aa, Vibrio cholerae O1 biovar eltor str. N16961
MDDCFREEEMKLINAIIKPFKLDDVREALADVGIEGMTVSEVKGFGRQKGHTELYRGAEYQVDFLPKVKIEIATQSDNVDRVVEAIIKAAHTGKIGDGKIFVYDLSQAVRIRTGEMDSEAL

SEQ ID NO: 11774 - protein, 467 aa, Burkholderia xenovorans LB400
MKSESKNQHVGKVTHHELKQTLGTWQLWGIAVGLVISGEYFGWSYGWASAGTLGFVITAIFIAAMYTTFIFSFTELTTSIPHAGGPFAYARHAFGPTGGYLAGAATLVEFVFAPPAIALAIGAYLHVQFPGLEPKHAAMGAYLVFMALNIVGVQIAAAFELCVTLLAIFELFVFMGVVSPGFQWSNFTKGGWSGADTFSMGSFHGMFAAIPFAIWFFLAIEGVAMAAEEAKNPKRSIPIAYVTGILTLVVLAIGVMVFAGAAGDWTKLSNINDPLPQAMKFIVGEHSGWMHMLVWLGLFGLVASFHGIILGYSRQIFALARAGYLPEWLSRVHPRFKTPHRAIIAGGVVGIAAIYSDELIQFGGQTLTANIVTMSVFGAIVMYIISMLSLFKLRRAEPNMERPFRAPLFPVFPAFALVAAVICLATMVYFNFLVAIVFAIFLALGYVYFLMTRHQREAAPADALLEE

SEQ ID NO: 11775 - protein, 510 aa, Streptococcus mutans UA159
MALDAEIKEQLGQYLQLLESEIVLQAQLKDDANSQKVKEFLQEIVAMSPMISLEEKELPRTPSFRIAKKGQESGVEFAGLPLGHEFTSFILALLQVSGRPPKVETDIVKRIQAVDEPMHFETYVSLTCHNCPDVVQAFNIMSVVNPNISHTMVEGGMFKDEIEAKGIMSVPTVYKDGTEFTSGRASIEQLLDLIAGPLKEDAFDDKGVFDVLVIGGGPAGNSAAIYAARKGVKTGLLAETMGGQVMETVGIENMIGTPYVEGPQLMAQVEEHTKSYSVDIMKAPRAKSIQKTDLVEVELDNGAHLKAKTAVLALGAKWRKINVPGEKEFFNKGVTYCPHCDGPLFTDKKVAVIGGGNSGLEAAIDLAGLASHVYILEFLPELKADKILQDRAEALDNITILTNVATKEIIGNDHVEGLRYSDRTTNEEYLLDLEGVFVQIGLVPSTDWLKDSGLALNEKGEIIVAKDGATNIPAIFAAGDCTDSAYKQIIISMGSGATAALGAFDYLIRN

SEQ ID NO: 11776 - protein, 313 aa, Wolbachia sp. wCer1
QLGINLTKGLGAGALPDVGKGAAEESIDEIMEHIKDSHMLFITAGMGGGTGTGAAPVIAKAAREARAAVKDRAPKEKKILTVGVVTKPFGFEGVRRMRIAELGLEELQKYVDTLIVIPNQNLFRIANEKTTFSDAFKLADNVLHIGIRGVTDLMVMPGLINLDFADIETVMSEMGKAMIGTGEAEGEDRAISAAEAAISNPLLDNVSMKGAQGILINITGGGDMTLFEVDAAANRVREEVDENANIIFGATFDQAMEGRVRVSVLATGIDSRDNKSETSPISQSEDSEKEKFKWPYSQSESMQDKTLETKPDE

SEQ ID NO: 11777 - protein, 353 aa, Staphylococcus aureus subsp. aureus NCTC 8325
MSRITQVHRILEQKHLDAIIILSDYNRRYLSGFTGTSGALIISKDKQYLITDFRYIDQATKQAPNYEIINRKSTIIGEIKELLHQENFENVGFEGHHVSYDTYLELNKSRISLISISNTVDKIRDVKDADEIALIQKAANIVDETYEYILTVVKAGMTEKELKAILESKMLELGADGPSFDTIVASGHRGALPHGVASDKIIEKGDMITLDFGAYYNGYCSDITRTFAIGEPDPKLKEIYQIVLESQMKAINEIRPGMTGAEADAISRNYLESKGYGKEFGHSLGHGIGLEIHEGPMLARTIQDKLQVNNCVTVEPGVYIEGLGGIRIEDDILITENGCQVFTKCTKDLIVLT

SEQ ID NO: 11778 - protein, 466 aa, Lactobacillus brevis
MENTRMKQMRRSNQSSGPALNCHDLPKYKLAKHALEPRPREADRLVRDQLLDEGNSRLNLATFCQTYMEPEAVELMKDTLEKNAIDKSEYPRTAEIENRCVNIIANLWHAPEAESFTGTSTIGSSEACMLAGLAMKFAWRKRAKANGLDLTAHQPNIVISAGYQVCWEKFCVYWDIDMHVVPMDDDHMSLNVDHVLDYVDDYTIGIVGIMGITYTGQYDDLARLDAVVERYNRTTKFPVYIHVDAASGGFYTPFIEPELKWDFRLNNVISINASGHKYGLVYPGVGWVIWRDQQYLPKELVFKVSYLGGELPTMAINFSHSASQLIGQYYNFIRFGFDGYREIQEKTHDVARYLAKSLTKLGGFSLINDGHELPLICYELTADSDREWTLYDLSDRLLMKGWQVPTYPLPKNMTDRVIQRIVVRADFGMSMAHDFIDDLTQAIHDLDQAHIVFHSDPQPKKYGFTH

SEQ ID NO: 11779 - protein, 582 aa, Pisum sativum
MAISSIFLLSLFSLIYVIPIEATHHVYQTLETLSSHHSSKSNHQPYRTAYHFQPLKNWINDPNGPMRYGGFYHLFYQYNPKGAVWGNIVWAHSVSKDLVNWTPLDHAIHPSQPSDIKGCWSGSATILPGGKPAILYTGIDPNNHQVQNIAIPKNMSDPLLREWKKSPKNPLMEPTIANKINSSSFRDPTTSWLGKDGFWRVLIGSKIDTKGMAILYKSKNFVDWVEAKHPLHSAEGTGMWECPDFYPVLDKNLLRTGVDTSRNGDDDVRHVLKVSLDDTKHDHYLIGSYDVVKDVFVPENGFEDNGFVLRYDYGKYYASKTFFDDGKNRRILLGWVNESSSVADDVKKGWSGIHTIPREIWLHESGKQLVQWPVKEIENLRMNPVNWPTKVIKGGERISITGVDSVQADVEISFEISDLGKVESLRKWIDPQLLCSQKGAGVKGGVGPFGLLVFASQGLKEYTAVFFRIFKYQDKNLVLMCSDQSRSSLNKDNDMTSYGTFVDVDPLHEKLSLRTLIDHSVVESFGGEGRACVTARVYPTLAIHDKAMLYAFNNGTSAVKITSLSAWSMKKAKDQLKLTSEY

SEQ ID NO: 11780 - protein, 250 aa, Salmonella typhimurium LT2
MAVTKLVLVRHGESQWNKENRFTGWYDVDLSEKGVSEAKAAGKLLKEEGFSFDFAYTSVLKRAIHTLWNVLDELDQAWLPVEKSWKLNERHYGALQGLNKAETAEKYGDEQVKQWRRGFAVTPPELTKDDERYPGHDPRYAKLSEKELPLTESLALTIDRVIPYWNDTILPRMKSGERVIIAAHGNSLRALVKYLDNMSEDEILELNIPTGVPLVYEFDENFKPLKHYYLGNADEIAAKAAAVANQGKAK

SEQ ID NO: 11781 - protein, 182 aa, Gossypium hirsutum
MASSMISSATIATVNCSSPAQANMVAPFTGLKSASAFPVTRKANNDITSLASNGGRVQCMQVWPPLGKKKFETLSYLPDLTPVQLAKEVDYLLRSKWIPCLEFELEEGFVHRKYSSLPTYYDGRYWTMWKLPMFGCTDSAQVLEELENCKKEYPNAFIRIIGFDNVRQVQCISFIAYKPKGY

SEQ ID NO: 11782 - protein, 135 aa, Aspergillus oryzae
MVAHADNLRSRIPTQPDLFRRVYRYTFPLCRMQGQRNLQFEIAAEQWKLFFTPDKGGVQWETETTPWLDWWIEFMEERGKKPVNKDLWEQVEVFMRKTLDDERFGWWSADGAWPGALDDFVVWVQKKRGDNMEVE

SEQ ID NO: 11783 - protein, 119 aa, Triticum aestivum
  misc_feature (58)..(58): Xaa can be any naturally occurring amino acid
  misc_feature (71)..(71): Xaa can be any naturally occurring amino acid
  misc_feature (84)..(84): Xaa can be any naturally occurring amino acid
  misc_feature (106)..(106): Xaa can be any naturally occurring amino acid
MARAQVMLMAVALVLMLAAVPRAAVAIDCGHVDSLVRPCLSYVQGGPSPSGQCCGGVXKSLHNQAQSKSDXRQAACNCLKGIAXRGIHNLNEDNARNLAPKCGVNXPIHISLDIDCNSV

SEQ ID NO: 11784 - protein, 549 aa, Synechococcus sp. WH 5701
MGRLEAALSSVEDALVLTDFNGRVEWTNRAFNLFVGQSRLLSLGRLLDDLLPPHFIDGIQETPRDLLDGARLGPGSLLWDLTPTPPRRVVEVKWSPVNLKPDPSLVFVFRDLTEITRAQDQITKARDTLEQDVAARTLELQLARDEALAATGAMGQFLSTISHEIRTPLNAVIGMSDLLLDTSLDGQQQELVHTINSSAELLLRLINDILDLSKIEARKMKISSETFSLRSLVLDCCRMMDAAVRAKRLELRCSFSDDPPDALIGDGLRIRQIVLNLLNNAIKFTSHGSVDVKIGWRPLTSSAIELDLVVADTGTGISEDFLSKIFQDFTQEHNQAHASHHHGTGLGLAICDRLCRLMGGSIEAVSQLGQGSRFHVRLPLKRSEPEALSASGLDQPLELDLSSVRLLAVEDNRINQRVLELLLAKLSLQAEFADCGEDAVERLGQGGFNLVLMDLQMPGIDGLEATRQLRALPIPQPYVVALTAFAFEDQQQECLAAGMQDFLTKPVRVPALQGCLQRFLHWQSLHQGRSALSAGTPPSAVLAPFDSPQ

SEQ ID NO: 11785 - protein, 111 aa, Glycine max
  misc_feature (92)..(92): Xaa can be any naturally occurring amino acid
  misc_feature (106)..(106): Xaa can be any naturally occurring amino acid
  misc_feature (110)..(110): Xaa can be any naturally occurring amino acid
MVLVLALGDLHIPHRAPDLPAKFKSMLVPGKIQHIICTGNLCIKEIHDYLKTLCPDLHITRGEYDEETKYPETKTLTIGQFKLGLCHGHQVXPWGDLDSLAMLQRXLDVXI

SEQ ID NO: 11786 - protein, 185 aa, Aspergillus oryzae
MRQLTEQETKTLFEKLANYTGRSLNNLITTSDDPNDRYVFRLHGNRVYYMKLSLANLSTAIPRANLLSLGTCIGKFTKSGQFRLHITALDVIAPHARYKVWIKQNGEMPFLYGGNVVKAHVNRWSDDCPEHAGVVVFNSNDTPLGFGVTARSSAEARKLEPTAITVFRQGDIGEYLREEDTLFTT

SEQ ID NO: 11787 - protein, 230 aa, Bacillus halodurans C-125
MAKEPLIRVLLIEDDPMVQEVNRMFVEKLSGFTIVGTTATGEEGMVKTRELQPDLILLDIFMPKQDGLSFIKQIREQYIDVDIIAVTAANDTKTIKTLLRYGVMDYLVKPFTFERLKAALTQYEEMFRKMQKEAELSQDSLDEMIKQKQAQANMDDLPKGLHAHTLQQVIERLEELDEPKSAEEIGRDVGLARVTVRRYLNYLESVGQVEMDLTYGSIGRPIQTYKLKQG

SEQ ID NO: 11788 - protein, 212 aa, Zea mays
VTRSTTSAPPLARFCSLPPGSRLLLHATVNAPLPDPASSPLRPSMAASSTATSVHDFIVKDASGKDVDLSTYKGKVLLIVNVASQCGLTNSNYTELAQLYEKYKDQGFEILAFPCNQFGGQEPGTNEEIVQFACTRFKAEYPIFDKVDVNGNNAAPIYKFLKSSKGGLFGDSIKWNFSKFLVDKEGRVVDRYAPTTSPLSIEKDIKKLLGSS

SEQ ID NO: 11789 - protein, 368 aa, Campylobacter lari RM2100
MSEYLVEEMQHTKGAKIKVIGCGGGGGNMIDHMVNMGLHDLDLISANTDAQAIAKSLAKTRIQLGEKKTKGLGAGMQPEIGAESARESFEEVKAALSQSDIVFISAGLGGGTGTGAAPVVAQAAKEVGALTVSVVTMPFAFEGKQRKKLAEAGLAELKKESDSIIVIQNEKLLSILPKKAGIKEAFKLVDDILARAVRGMVSILLEDGDINVDFADVRTVMSHRGLALMGVGHGEGENAIMDALSSAIESPLLDGMTMKGVKGVIIHYKIGPECSLIEISQATQSISDIADENAKVIFGATTDESMGDRVEVTIIATGFEDKAEIESAKEQEESKKNSYMNLRKASGGFDEEVISQLDVPAFLRRQMD

SEQ ID NO: 11790 - protein, 234 aa, Haemophilus influenzae Rd KW20
MHSFSQRRTFMKPYLIAPSILSADLARLGDDVQNVLNAGADVIHFDVMDNHYVPNLTFGPAVCQALRDYGITAPIDVHLMVKPVDRIIPDFAKAGANYITFHPESSEHIDRSLQLIRDCGCKSGLVFNPAMPLSYLDYVLDKVDVVLLMSVNPGFGGQSFIPATLKKLQQARKIIDESGYDIRLEVDGGVKVDNIAEIAAAGADMFVAGSAIFGKPDYKQVIDQIRTQLASVSA

SEQ ID NO: 11791 - protein, 483 aa, Pseudomonas sp. ND6
MTVQLVIDNQKQSASDGKTFERIDPLSSHAVSVGAACSVEDALRAAQSSERAFQTWSGTGPTERRRILLAAADALEAKMADFCSAMAEEIGASQLWAQFNVGASANLLREAAAMTTQIKGETIPTDKPGALSMTLRQPVGTVLSIVPWNGPVILGARAIAYPLACGNTVIFKGSESSPRTHALLAEAFYEAGLPAGVLNFLISAPEDAAAVTEALVAHDTVRRVNFTGSTKVGRMIAQTCASHLKRCLLELGGKAPFIVLDDADIEGAVNAAVFGAFLYQGQICMSTERFVVDEAVADAFVARFAERVNALETGLPAKSPGCVIGPMIGQGSVQRINHLLDDAVNKGAKIVTGGLAETALMGPTLVDCVTREMAIYDEETFGPVTTIVRVKGAEQALAVANDTAYGLSSSIFSRDVTKALGLASRLDAGCVHINGATVQNEPQAPYGGMKKSGYGRFDGNAVIEEFTEVKWVTVEPSGQPYPF

SEQ ID NO: 11792 - protein, 164 aa, Shewanella sp. MR-7
MLDLLPDLFDHYPSKLTLLPLDFRSFGGKRLFWGEVVTVKCFEDNSKVKEVLAQPGHGKVLVVDGGSSSRRALLGDLIAQSALDNGWQGVVINGYVRDAARLSTFNLGVYALGAMPIKTEKLNQGQIDVPIEFGTVVIKPGMMLYADENGIAVSEESLNFAFLN

SEQ ID NO: 11793 - protein, 486 aa, Rhodopirellula baltica SH 1
MTHLAACSAPLRRSDAHHTSCCLAVAYRERFHRATFLFSATAKYSFHFFSMTTTSTLTFDAAGFEAFLASRKDEPQWLTDLRRESFSHADAMDWPARRSEEWIRTDIRTFQINKFAPPVEATAGDVPAVHQLRDGVEPGGVLETYDSQVVSESLDEELAAKGVIFGSLERLCREQPDKVRPFLYTVVDPDYDKFAALHAAFWSGGQFLYVPRGVVIEKPIYLGSTLSDGGTDTAHTLIVLEDGAEATVLHECNSANPEAAGLHMGAVELIQKPGSHLRYVNVQEWGHKTYHFAHQQANIDRDSQLQWTIAAMGSGLSKVNQSVDMVGAGANCQVNGVMFTEGRQHLAYHTQQYHRAPNCHSDFLYKSAQQDKSRTVWRGMIKVDKVAQKTDGYQRNDNLVLSNHSRADSIPGLEIEADDVRCTHGSTTAKVDEEQIFYARCRGFTQKEATRMIVSGFFQQIFDRITIESVRDALAAAIARQVREYE

SEQ ID NO: 11794 - protein, 468 aa, Rhodopirellula baltica SH 1
MATDVTENDQIGEINKYNFRTETTGVFKAQKGLSAEVVNQISDIKNEPDWMREFRLKSLAEFESRPMPKWGGALDLDFQDIYYYLKPTGQSEKSWDDVPQEIKDTFDKLGIPEAEKKFLAGVKAQFESEVVYGSLQEDLAKQGVLFTDTDTAVREHPELLREYFGKVIPPTDNKFAALNSAVWSGGSFIYVPPGVQIEFPLQAYFRINAESMGQFERTLIIVDEGASIHYVEGCTAPMYTTESLHSAVVEVIVKKDARCRYTTIQNWANNIYNLVTKRAYAYQDATMEWVDGNLGSKLTMKYPAVHMMEPGARGEILSIAFSSAGQHQDAGAKLVHAAPNTTGQIISKSISKNGGRSSYRGLVRVEPGAHNSKNNVVCDALILDPESRSDTYPYIEIAEQDVQIGHEASVSRIGEEQMFYLLSRGLTESEASTMIVNGFIEPLVKELPMEYAVEMNRLIQLQMEGSVG

SEQ ID NO: 11795 - protein, 530 aa, Oryza sativa
MAAQRRLLAEAPPHQPHPSRHQQGAPSSVWSAGYLNGWLSQRTAVFGLRLWVLIGIAVGAAIVLVLVLVFVCLSRRRRRRDDLASNLYPADTKILKQHLQQPTPPKDIQEIVRRQQRQQQTPTPTPPQPPPPAAQHGVQLAKAETPPPPQRTQPPVLPAGSTRSTAASGMSATTSGGSERDGATPRSTASGSAGPEVSHLGWGHWFTLRELEEATDGLAEENVIGEGGYGIVYKGTLQNSAMVAVKNLLNNRGQAEKEFKVEVEAIGRVRHKNLVRLLGYCVEGAYRMLVYEYVDNGNLDQWLHGDVGEVSPLTWEVRMNIILGTAKGLAYLHEGLEPKVVHRDIKSSNILLDQQWNAKVSDFGLAKLLCSERSYVTTRVMGTFGYVAPEYASTGMLNERSDVYSFGVLIMEIITGRSPVDYTRAPGEVNLVEWLKTMVAERKAEEVVDPKLPEKPSPKALKRALLVALRCVDPDGHKRPKMGHVIHMLEMDDLLCRDDKKPGRDAPQTSDRHSSRDGGNFSKRENQRYR

SEQ ID NO: 11796 - protein, 493 aa, Pseudomonas syringae pv. tomato str. DC3000
MSNPMSPALERAHHALEEGLSQVIHDYRPGYHLAPPAGWMNDPNGVVYFRGEYHVFYQHHPFDAKWGPMYWGHAKSADLVHWQHLPIALAPGDDFDRDGCFSGSAVVCGDTLALIYTGHTWLGEVGDERFIRQVQCLATSLDGINFVKHGAVIDSPPQDTIIHFRDPKVWQQDEHWYLIAGARLGDKPLLPLYRSADLHAWELVSYVSSGNEGDGYMWECPDLFRLDGRDVLLYSPQGMPAQGYERLNKFHTGYRVGQIDSQWQFSGGPFIELDNGHDFYAAQTLVAADGRRLVWAWLDMWESPTPTTAHHWRGMLGLPRELEVRDERLCVHPARELTGLRHASVPGTPWWSEPGTRWVTEVRGDLLEIHVHLDLLDCLEGHLGVALRCSADGKEQTLLYYDASLKRLILDRDPSGSHVSGQRSVAIDPKQGQLELRVFLDRSSIEVFDKNGSFSLSSRLYPQADSLGVKLIANGTGGRVCIANAWTLASGYR

SEQ ID NO: 11797 - protein, 424 aa, Burkholderia sp. 383
MPSHVDSPAAHHAGSLTIFQGAALYIGAVLGTGVIALPALAAEVAGPASLLAWAALVVLSGPLAATFAALGARYPDAGGVSTYARRAFGPKAAAIVGWCFYFAVPAGAPAAAMFGGAYVAAVTGGGHTTIIVTAAALIATVSAANAFGVTVSGRMQLVLSALLVTLLLAAVLASAPHARTANLHPFAPHGWLAVGQAAALLVWSFAGWEAITHLAAEFRRPAHDMPRSAGIAVVVVGFLYLSVAAASVTVLGPTAGGSGAPLAELIAGGIGGHAQVLAAVAALLLTLGTMNAYFAGAAKLGAALGRDGALPAWLAQGSQVGGVPRRSLGVIALLAVVALAATTLSDVGPKPLVLVTSGCFVMVYGLGAAAALKLLPRGGIAYRCAWISLVAVAGLFLTTGWYILCPLLLAGGALLYLQVAGPRQ

SEQ ID NO: 11798 - protein, 312 aa, Vibrio sp. Ex25
MTQSTPIRIATRKSPLALWQAYFVKDALQAAHPGLEVELVTMVTKGDVILDTPLAKVGGKGLFVKELEVAMLEGRADLAVHSMKDVPVDFPEGLGLVTICEREDPRDAFVSNTYSNIDELPQGAVVGTCSLRRQCQLKEYRPDIIIKELRGNVGTRLGKLDAGEYDAIILAAAGLKRLKLEERIRSFIEPEQSLPAVGQGAVGIECRLDDERLLKLLEPLNHQDTVDRVLCERAMNLTLEGGCQVPIGSYALLDGDNIWLRALVGEPDGSEIVRGEIRGHRKDGEALGVQLANELLDNGAREILTKLYADHE

SEQ ID NO: 11799 - protein, 426 aa, Bartonella henselae str. Houston-1
MGVDISRLRNGLTIATHTMQQIDSVALGIWVKVGSRNETFTQHGIAHLLEHMAFKGTENRTAFQIASDIEDVGGEINATTSTETTAYFARVLKNDIPLAIDILADILMHSKFDEDELEREKQVVFQEIGAARDVPDDVVFDYFTETAFRHQSLGRSILGTPKTVQSFTSADLHSFMNKHYSADRMIVVAAGAVQHENFLQEVESRLSTFRPHSTEPLTNLANYVGGDFREYRDLMDTQVVLGFEGRPYHARDFYAAQILSIILGGGMSSRLFQEVREKRGLCYSIYAFHWGFSDIGLFGLHAATGQEKLKELLPVILDELSKVSKNIHTNELQRARAQYRATLTMAQENPSSQANFIARQILLYGREIPLSETIERLELITPARLTDLAGRLFINATPTLAAVGPVGSLMNFDNLTSTLSSNIKQV

SEQ ID NO: 11800 - protein, 448 aa, Yersinia pestis biovar Medievalis str. 91001
MMNGLVSLESFLESLQRRDANQPEYLQAVREVFTSLWPFLEQNPHYREQSLLERLVEPERVIQFRVAWTDDKGHVQVNRAWRVQFSSAIGPYKGGMRFHPSVNLSILKFLGFEQTFKNALTTLPMGGGKGGSDFNPKGKSQAEVMRFCQALMTELYRHLGPDTDVPAGDIGVGGREVAFMAGMMKKLSNNTACVFTGKGLSFGGSLIRPEATGYGLVYFTDAMLKRHGLGFEGRKVSVSGAGNVAQYTIEKAMELGAKVVTASDSGGTVVDEVGFTPEKLAHLAEIKNKRYGTIEDYARERNLVYLAGQQPWSVPVDIALPCATQNELDLPAALQLIANGVKAVAEGANMPTTIQATDAFLEAGVLFAPGKAANAGGVATSGLEMAQNAARMSWKSEKVDVRLHHIMLDIHQSCVEYGGEGKQTHYVHGANIAGFVKVADAMLAQGVL

SEQ ID NO: 11801 - protein, 470 aa, Vibrio cholerae O1 biovar eltor str. N16961
MIKFGTGGWRAFIGEEFTKDNVRLVAQALANIIHHEQAANEGFVIGYDRRFLSDKAGRWFAEVLAANGVVVSFIDKFVPTPVVMFKAKAMDCAYSACITASHNPADYNGIKVFIRGGRDADEVITQKIEQQIATLTLQDVKSIDFDQAVNDKLIDIINPMNEFVDSIINFIDIEAIKKANLRVLIDPMFGVAKNALQTVLINGRCDVDVINDGKNPDFGGLMPSPSAATLYRLKHLVKHEGYDIGIGTDGDADRLGIIDEKGNFIHPNEVLILLYYYLLEYKGWKGSVVRNIATTHLLDKIAADHGERCFEVPVGFKHISSQMEADDSLIGGESSGGLTIRGHIKGKDGVFASSLLVEMISVTGKKLSELLTEIYDRYGYAYTAEGDCKFKPAQRDEIYNKVYIEKKLPEFEFDIDKVSYEDGAKVYFKNGGWVIARFSGTEPLLRIFAEMADKDTAERVLQQMKAFLAL

SEQ ID NO: 11802 - protein, 318 aa, Ehrlichia ruminantium str. Welgevonden
MTQIYKTQVLILGSGAAGCTAAIYAARANLQPILITGMCPGGQLTITTDVENFPGFAHAVQGPNLMEQMQQQAYNSGAKIISDEIKEIRTDMYPFECIGIFDDHYIANSIIIATGAQAKWLNIESEEAFKGKGVSACATCDGVFFSGSDVAVVGGGNTAVEEALYLTRHATKVFLIHRRDKLRAEPILQKRLFSNDKIQVIWNSSVKEILGNKENGTVEKVILESTNTGNTTTLPVKGVFIAIGHAPNTKILKKPDNTNIVSLDDEGYIITNPNSTVTSCPGIFAAGDVQDKIYRQAVVAAGSGCMAAIEAAKFLSDN

SEQ ID NO: 11803 - protein, 279 aa, Pseudomonas fluorescens PfO-1
MSEDRSSNGQKSWLGKLTQAFAHEPKNRQELLELLRDAHQNKLLDSEALAIVEGAIQVADLQVRDIMVPRSQMISIKATQTPREFLPAVVDSAHSRYPVIGESHDDVMGVLLAKDLLPLILKENGDSFNIKDLLRPATFVPESKRLNVLLREFRANHNHMAIVIDEYGGVAGLVTIEDVLEQIVGDIEDEHDVEEDSYIKPLPSGDFLIKALTPIENFNEFFDSEFSDDEFDTVGGLVMSAFGHLPKRNEITEIGAYRFRILNADSRRIHLLRLTPIAR

SEQ ID NO: 11804 - protein, 606 aa, Vibrio vulnificus CMCP6
MSSATLQQINVYPVKSVGGIALTSAWVEKQGLAFDRRFMVATALGDMVTARKYPQMVTIRSALVADGIVFTYPDKPALMLKYQDFKRQETPAQVWKDNFTAYTTTDEADDWFSDILGIRVELLFSGEQSNRVREKIGHNVSFADGYPLLVISDASLKELNRRSPETHSMDQFRTNLVVSNCDAFAEDGWKKIRIGEVIFEAVKPCERCILTTVDVEKGQFRANKEPLNTLLTFRANEQGGVFFGQNLVALNEGMIQVGDRVEVLEVKEKEVYPDSACHDIRLTCVEKETIARDFVTFWLEPEHGQLPAYLPGQHLPVEITVDGDTISRRYTLSSSPSRPGRYAISVKRIDGGRVSNWLIDHLEVGDELFAQSPQGQFHIQEDKHQPLLLLSAGSGVTPMLSMLRYLADHDLVEDVVFYHQCRSVEDIPCKEELDALKSRYPGLTVKISLTQAPIDWFGLKGRLSLSHLKQIKAVESRQVFVCGPEGFMQKAKNLLLKKGLPESHYHQEAFGVSTSPNSERKTVELEFNGETFTADNQQTLLEHVENHGLTIAHSCRAGFCGACKVNVISGQVHQPDVPALTEQEKREGKALACCCVPLTDVRFQSL

SEQ ID NO: 11805 - protein, 448 aa, Staphylococcus aureus subsp. aureus NCTC 8325
MSHRYIPLTEKDKQEMLQTIGAKSIGELFGDVPSDILLNRDLNIAEGEAETTLLRRLNRIASKNITKETHTSFLGAGVYDHYAPSVVDAMISRSEFYTAYTPYQPEISQGELQAIFEFQTLICELTDMDVANSSMYDGMTSFAEACILAFSQTKKNKIVVSKGLHYQALQVLHTYAKTRKEFEVVEIDLDGTVTDLKKLEAAVDDETAAVAVQYPNFYGSIEDLEKIHSFIEDKKALFIVYANPLALGLLTPPGSFGADIVVGDTQPFGIPAQFGGPHCGYFATTKKLMRKVPGRLVGQTQDDEGNRGFVLTLQAREQHIRRDKATSNICSNQALNALASSIAMSALGKQGIYDIAVQNIEHANYAKQQFIKKGFEVLDGTSFNEFVVKFDKPIQQVNEELVKYNIIGGFDLGVVSDDFKNHMLIAVTELRTKDEIDTFVEKAGELND

SEQ ID NO: 11806 - protein, 607 aa, Bacillus thuringiensis serovar konkukian str. 97-27
MCGITGWVDWKEDLSNQHVILKKMANRIQHRGPDAEGFWFSPRAAFAHRRLIVIDPEGGTQPKTFRAGDYTYALTYNGEIYNFRELREQLRKCGHLFETHSDTEVLLHAYLEWKEDCVQHLNGIFAFALWDDQKQRLFLARDHLGVKPLFYTERNNSIIFGSEIKALLAHPSVPAEIDADGINEIFGLGLFRTPGCGVFKHIQEVRAGHSITFTRDKKVVTKYWNLESKIHTDSIEDTSSRILSILQDTVKRQLIADVPLVCMLSGGLDSSGITALAGKEFAAENKTLHTYSVDFVNSAKDFELTFARTGLDAPWVKRVSEHVGTSHHDIIVNAEELANHLFVPLRAKDLPSAGEMETSLYLLFCEMKKDATVALSGESADEVFGGYPWFHQEELLYVDKFPWLTNWKTTSPLLLHEVSNQCNLENYIDTRFQEAILEVPTLEGESKKSAKQRQMFYLFLTRFLPFLLDRKDRMSMAVGFEVRVPFCDYRLVEYLWNVPFNIKSIDNIEKGILRRALKPALPDDVRNRRKSAYPTSQDPHYLQTIRNLTLEMCSNKNSPIFSLINHSTLLAIADGSNKEINNFEARSAMEYMLQVNEWLKTYHIHIA

SEQ ID NO: 11807 - protein, 932 aa, Acinetobacter sp. ADP1
MNTIPAVQLQSTTDNQLEYSVQTTNTTCPYCGVGCGVSATVEKTVSGQRISVTGDQEHPSNFGRLCIKGSRLADTLGLETRLLQPMIGRGDLRKVTTWDDVTEQIATRFQQCIDTYGAESIAFYVSGQLLTEDYYVVNKFVKGYLGTANIDTNSRLCMSSAVAAHKRSFGEDLVPASYKDFEHTDMVVLVGSNTAWCHPVLYQRIMQAKTERDLTVVVIDPRFTATCEQADLHLPILPGQDVTLFNGLLQYLYQQGYTDHSFVTAYTENLDSALLASDAEADIKVVSEKTGIALEKLQQFYQMFAQTDKVMSLFSMGVNQSSQGVNKANAIINCHLLTGKIGQLGAAPFSMTGQPNAMGGREVGGLANMLAAHMELDQPLHQEIVQSFWHSPRIASKAGLKAVDLFQAVETGKIKAVWIMATNPLVSLPDADQVKRALNKCEFVVVSDICQDTDTTAFADVLLPALGWGEKDGTVTNSERRISRQRAFLDTPEHTKADWWAVCQVAKKMGFSGFEFEHAHQIFQEHAELSSYQNAAMSHRDEAKAFRYFNLSGLTQISQSDYDQLKPIQWPVLKSIDELNDTDSERLFVQGQYSHSSKKAKFIATDAIAPVHATTHQYPLILNTGRIRDQWHTMTRTGLSSNLTTHRAEPYCEIHPQDALKYGVREHGLVEVTSNWGKCVLRVHLSEGIRRGQVFAPIHWNDQFASDARIGKVVNPVVDSISGEPEFKHTPVMLNPFYVHWQGVLYIREGMEQLIQTCLKNVVWWTKVKMTKVNRFEIAGRNKLDEVQYALKDFLPFDDASFEWMNLSDTSMQMSHSIILKDGILIASLYIAPAEMLPDRDWVATLFKRERLSALHRKALLAGMPMSMSSHDGPLVCSCFKVGKNKIIETIKTQNITHEKQVTACLKAGGNCGSCLPEIRGLIKACQQEIDA

SEQ ID NO: 11808 - protein, 545 aa, Acinetobacter sp. ADP1
MSNLKQLNQIAENEWIDVCALSDITPNTGVTALIDDQQIALFRVGHEQRIYALSNQDPFSGANVMSRGIMGDLQGERVIASPIYKQHFSLATGRCLEDKEQKLLVFPCKVQSGRVWVSPVPQKTYITNNGLAQDKLKLVLVGNGLAGMRCLEDLLDMNPERYEITVIGEEPWGNYNRIMLSPVLSGEKTIEDIMLHPHQWYQDKAIRFVAGDPAIKIDRNRKQVHTQNGECVEYDRLILATGSKPFIPPIQGADLKGVISFRDIYDVNTMVDYASQKKHAVVIGGGLLGLEAAYGLKQRGMNVTVLHLMDRIMDRQLDAQASVMLRHSIEQKGIEIITEANTEALLGNDQGHVTHLRLKDGRVLDADLVVFAVGIRPNIRLAQSAGLRCNRGVLVNDTMQTFDPSIYAVGECIEHRGQTFGLVEPLWGQAFICASHLAEHGSLTFKAPTVPTQLKVSGVDVFSAGQIDIDVRQSEDGYEDIIMNDEKRQIYKRIIIQHDRVIGAVLFGDTEDGTWYAELIADQTPISSIRSKLLFGRDFALRKAG

SEQ ID NO: 11809 - protein, 459 aa, Amycolatopsis methanolica
MTLHLDDLRVRLLGECRYDSPFAEVLSTKRTSPHYVAEGDRVLLEDTVAMLAEHSLPSVQAPSFEAAGPRRKIYFDPARVTAGIVTCGGLCPGLNNVIRGLVQELSVHYRVKRIVGFRNGPGLTAAHRDDTVELTPEVVRDIHNLGGTILGSSRGGQDADEMVETLALHGVDVMFVIGGDGGMRAATFLSGAIRARGLDIAVIGVPKTIDNDLPFTDQSFGFQSAFARATDFISAVSVEAAASPNGVGIVKLMGRHSGFIAAYAALAANSADVVLIPEVPFALDGDDGLLAHVERLVRAKGFAVVVVAEGAGQDLFDAHGLPQLNGRGTDASGNVKLGNIGELLRTSIEAHLTAAGLAPTMRYIDPSYAIRSIPANAYDSVYCLRLAHAAVHAAMAGRTEAAVARWRRRFVHVPFSLMTRRRNQVDPDGDLWMSVLETTCQPAEFGAVAARERISSGFC

SEQ ID NO: 11810 - protein, 855 aa, Acinetobacter sp. ADP1
MHDLRRNPMKLVMIGHGMVGHKFIESLLEKADDELEVTIIAEEPRIAYDRVHLTEYFSGKTAKDLSLARADFADAYGIDLRLNTKAIAIDPILKTVTTSAGDVIGYDKLVLATGSYAFVPPISGNDRNNCFVYRTLEDLDAIRAASKNAKSGVVIGGGLLGLEAAKALRDLNLETHVVEFAPRLMAVQIDDLGGKVLRRKIEDLGVKVHTQKATQCIEDGSTHHHIMKFADGSVLETDIVLFSAGIRPRDELAKISGLATGERGGIVINDYCQTSQPDVYAIGECALWNNKIYGLVAPGYDMARIAAKHILEEETHCFTGADMSTKLKLMGVDVASIGDAHAMTPNALSYFYADEDALIYKKIVVNAEKTQLLGAVLVGDAKEYSDLLQMMLNGMALPEQPESLIMPGFSEAGAAKSGGSGVDLLPDSATICSCNNVSKADICQAIEDGSTSLGALKKCTKAATACGGCAPLVTQVLKSELQRQGVTVNNHLCEHFAYSRQELYHLVRVNEIKTFDDLIEQHGHGLGCDICKPTVANILASCWNDFVLKPSHAGLQDSNDYYLGNIQKDGSYSVVPRMAGGEVTPDGLIAVGQIAKKYNLYTKITGGQRVDMFGAQLHELPLIWEELIAAGFESGHAYGKSLRTVKSCVGSTWCRYGVDDSVGLAIFLENRYKGLRSPHKLKMAVSGCTRECAEAQGKDVGVIATEKGWNLYVCGNGGMKPRHAELLASDLDTNTLIRYIDRFFMFYIQTADRLQRTSVWRDNMEGGLDYLKAVIVEDSLGLAHELERRMSHVVNTYQDEWRTAVEDPDVRKRFQTFINQKEQRDPHIQFTEERGQIRPLKASERDESRIPLVEA

SEQ ID NO: 11811 - protein, 458 aa, Bacillus halodurans C-125
MTTLVREKQTYDVQYYVQHVYETVKRRNPNEHEFHQAVKEVFDSLLPVLVKHPQYVKQAILERIVEPERVISFRVPWVDDQGNVQVNRGFRVQFNSALGPYKGGLRFHPSVNASIIKFLGFEQIFKNALTGQPIGGGKGGSDFDPKGKSDGEIMRFSQSFMSELSNYIGPDIDVPAGDIGVGAKEIGYMFGQYKKMRGGFEAGVLTGKGIGYGGSLARKEATGYGTVYFVEEMIKDHGFSFAGSTVVVSGSGNVSIYAMEKAMQLGAKVVACSDSGGYVYDKNGIDLQTVKRLKEVERKRISEYVNEHPHAHYVQGCSGIWSVPCDIALPCATQNELDEAAATMLIANGVKAVGEGANMPSTLQAVHTFQEHGVLFAPAKAANAGGVSVSALEMAQNSTRLAWTFEEVDAKLYEIMKNIYRESIKAAELYEASGNLVVGANIAGFVKVADAMISHGVV

SEQ ID NO: 11812 - protein, 445 aa, Pyrobaculum aerophilum str. IM2
MVFSEEWRIRIAKALSDIGVAMIEAGDPNVAPDIKSAIKKIIALKKNGDIKSEIVVHSRAVRQDLENAASLEPDRIAVFYGVSDLHLKYKHKKTREEALQIIAEMVSLAKSHGVSVRFTAEDGSRADLDYLIQVVKTAYEAGADRVSIADTVGVFTPERAREVFSKVKAAVPGVGLDIHAHNDFGMAVANSLAAVEGGADVVHTTVNGLGERAGITPLQVFAAAYYYHYGVKLIKLEKLPEITAMVEAATGITIMPTFPIVGENAFTHKAGVHQAGVLSNPETYEPIPPETVGRNRDFSLDKYSGRKAIQHRLEKLGISVPQDVVEKVVEEVKRINLPRLRDEDLLEILEKVSNMKFKAIVNRHIEAYVWLKVANNVYTTSVARRVATLKNVVSVSEITGDYDIVVKIIAENTEELNRVIENIREIKGVASTLTSIVLKELPTNH

SEQ ID NO: 11813 - protein, 499 aa, Bifidobacterium longum DJO10A
MVTENTAPNAAADVEMSQYVADRTRVNEDKIKKDDEIISQFGDYNYGWHDSDAAGEAAKRGIDENVVRAISADKGEPQWMLDMRLRGFKAFLEKPMPDWGVDLSGFNADDFKYYVKPIDKQAKSWDELPDDIRNTYDRLGIPEAEKNRLVSGVAAQYESEVIYNSIQEDLKKQGVIFVDTDTAVREYPELVKKYFGTVVPPEDNKFGALNTAAWSGGSFVYVPKGVHVDIPLQAYFRINTPAMGQFERTLIIADEGSYVHYVEGCTAPIWSEDSLHAAIVEIIVEKHARVRYTTVQNWSNNVYNLVTQRAYVREGGTMEWVDGNIGSKATMKYPACILAEPYAKASTMSLGFAGKGQYQDTGAKMIHLAPHTSSTIVAKSISRGGGRSAYRGLVKIVKGAYGSSNSTVCDALLVDDFSRSDTYPHVDVREDDVSMAHEATVSKISEDQLFYLMSRGLTEEEARGMIVRGFVEPISRELPMEYALELNRLVELQMEGSVG

SEQ ID NO: 11814 - protein, 721 aa, Mycobacterium sp. JLS
MADTSREGVDEHFTTSISQLTAISSRASGPGDRELLALFDVALASRHLDLAARWLRAQGRGYYTIGSSGHEGNAAVAAALRPTDPALLHYRSGGFFLARAQQVDGGLARGIRDVLLGLVAATDEPISGGRHKVFGRADLNIIPQTSTIASHLPRAVGVAFSTARAGKLGVPCRWPEDAVTVCSFGDASVNHSTAVGALNTAMHTAYQGMPMPLLFVCEDNGIGISTRTPRGWVARTYSQREGLQYFAADGTDLAATIETTRAAAEFVRTHRRPAFLHLSTVRLMGHAGSDYEPGYRRPDEIVADFDRDPVLCAAKALVAQGILSPVEVLERYEATRRQVLDMAAEVMDAPQLDSAAAVERPLRETLAEAVAASSAPPPGGSSAASVTVAQAVNRALADALAHHPEALVFGEDVARKGGVYGVTRGLQQKAGPARVFDTLLDEQAILGLALGAGVSGLLPIPEIQYLAYFHNAADQIRGEAATLQFFADRQYRNPMVVRVAGYGYQKGFGGHFHNDNSIAAMRDIPGVVIASPARPDDAAAMMHACVAAAKTAGAVCLYLEPIALYHTKDLYADGDGQWLAPLTGTPAPIGRARIHGDGADLTILTFGNGLWMSLRVARRLERLHIGARIVDLRWLAPLPVEDMLREAQATGRVLIVDETRETGGVGEGILAALLAHGYTGPVERVAGRDSFIPLGDAALAVLLSEDTIEAAAIKLARTAGS

SEQ ID NO: 11815 - protein, 116 aa, Zea mays
  misc_feature (90)..(90): Xaa can be any naturally occurring amino acid
MARTAATKLVLVALVAAMILAASDAAISCGQVSSALTPCVAYAKGSGTSPSGACCSGVRKLAGLARSTADKQATCRCLKSVAGGLNPNKXAAGIPSKCGVSVPYTISASVDCSKIH

SEQ ID NO: 11816 - protein, 937 aa, Rhodopirellula baltica SH 1
MQLDCRRSLPFSTQRTVTMVSANILALDVDQLNRDWQWMLSALQSVLQRGGDEKLAELLPVPGCKLDPAKAPADSVQLTQAYSIAFQLLSMAEQSSAAQFRDRIESESGMADLPALWGESLQQLIDRGWTADMIAAELPSMRVELVLTAHPTEAKRATVLAHHRRLFRRFQLRHQTDLPPWRRSENEEAIESVLSILWRTGEIYLDKPDLQSERRNVMDYLTVVFPKALQPLDQRLRQAWREVGLSEKAIADPLALPRLTFGTWVGGDRDGHPLVTPEVTEETLMQLRRGAVELMREELIQLARLTSVSAYWLPPTSDFLTRIAERAHAMGPAGAAAIARNPNEPWRQFINLMLASLPSEKTMMSGKEQHTYQRSRELLADLRCLHESLVAVDLGDVATSAVAPTMRIAQTFGFHLAVLDIRQNSAKHDTAIEQLLRAAGMADWKFASWDEDKRMKFLNEELANSRPLTHPDSSAGEEADAVLGALRVVTQYRSKHGADGLGALIVSMTRKTSDLLAVYLLAREVGLLQRTESGAVCPLPVVPLFETIDDLERSPEIYDGFLQHPITRNSLTAIAQREGATAPVGQVMIGYSDSNKDGGILASLVGLRHAQRKLTQVARSHGVRARFFHGRGGTISRGAGPTHRFIKSLPDHTIAGDMRLTEQGETIAQKYAHEPTAIYNLELFLAGVTRKSLADSRSEEPDHPLEPTLVKLAAWARTTYHELLHSDGFVEFFREATPIDAIEQSRIGSRPARRTGQQTLDDLRAIPWVFSWGQARCYLSGWYGVGTALKKLQTECPDEFDAVKEALRDWAPLHYLISNVATSVTAVDIEVMKQYAALVENPALRERFVTDIETQWKLACEMVEAVYGGPMESQRPNVQRMIALRSEGLRLLHRQQISLLQRWRSYNKMGEHTQADALLPALLLSVNAIASGLGTTG

SEQ ID NO: 11817 - protein, 426 aa, Bacillus halodurans C-125
MATEITMPQLGESVTEGTISRWLVKPGDKVNKYDPLAEVLTDKVNAEIPSSFSGTIQELLVEEDETVAVGHVICTMNVEGEAVEAETNDTSVSSAETTESPTETQEQSTSAKKRYSPAVLRLAEEHDIDLTHVTGSGKGGRITRKDLQAIIEGGDIPKAAPMTEQKTAPVHETMPLTEKVQEPVQVPTVSGDVEIPVSGVRKAIAQNMVKSKHEAPHAWTMVEVDVTNLVQLRNQLKEGFKKKEGFNLTFLPFFIKAVVEALKAYPQLNSMWAGDKIIQKKDINISLAVATDDALFVPVIKHADEKTIKGLAREVNELAHKVRTGKVTSSDMQGGTFTVNNTGSFGSVLSTPIINHPQAAILSVESIVKRPVVIESEAGDMIAIRSMVNLCLSLDHRVLDGLICGRFLAKVKNILENMTIENTSIY

SEQ ID NO: 11818 - protein, 131 aa, Coccidioides immitis RS
MVAAKKHVAIVKKHPKRFNRHQSDMFKCVPTSWRKPKGIDNRVRRRFKGQAAMPKIGYGSNKKTRHMIPSGHKVFLVKNPKDVELLLMHNRTYAAEIAHAVSSSKRVDIIAKAKQLGVKITNPKGRVTTES

SEQ ID NO: 11819 - protein, 598 aa, Haemophilus influenzae R2846
MKNFKYFAQSYVDWVIRLGRLRFSLLGVMILAVLALCTQILFSLFIVHQISWVDIFRSVTFGLLTAPFVIYFFTLLVEKLEHSRLDLSSSVNRLENEIAERIAAQKKLSQALEKLEKNSRDKSTLLATISHEFRTPLNGIVGLSQILLDDELDDLQRNYLKTINISAVSLGYIFSDIIDLEKIDASRIELNRQPTDFPALLNDIYNFASFLAKQKNLIFSLELEPNLPNWLNLDRVRLSQILWNLISNAVKFTDQGNIILKIMRNQDCYHFIVKDTGMGISPEEQKHIFEMYYQVKESRQQSAGSGIGLAISKNLAQLMEGDLTVESERGKGATFHLTLHAQEISEKESVKKNILFLNILLVEDVDLNIMVAKTILEKLGHHVDVATNGKQAITLFEKNVYDILLLDIKLPDMSGFEIAQYLRENYENGIYDFLPPMIAFTANVMQSEQEYLEMGMDGVLRKPISIKDLHHCLQQFFADESESIIEMNDDNELSEQFDLALIETLGKKQILENLSLFKQTMPNYLAQLSKDNMKETEDTAHKIKGAAASVGLNHLRQLADTLESAAKNSDVFNCGELIDEIGNLWLEDVEDLLKFCKF

SEQ ID NO: 11820 - protein, 97 aa, Brassica napus
MFNRWLCYACGRRFICKYAMGYFPISLHVEDYNAFDSSRAYVFGYEPHSVLPIGVAALANHVGFMPLPKLKVLASSAVFHTPFLRQIWTWIGLIAAT

SEQ ID NO: 11821 - protein, 153 aa, Photorhabdus luminescens
MLPAWLGAGAALQKVVNDGKQDVLAEMCRNWPFFTTRIGMLEMVFAKADLWLAEYYDHRLVDKNLWPLGQKLREQLSADIKTVLTISKDEHLMADLPWIAESIALRNVYTDPLNVLQAELLLRSRQQQHPDPQVEQALMVTIAGIAAGMRNTG

SEQ ID NO: 11822 - protein, 209 aa, Photorhabdus luminescens
IPHNWQPSTETQEVFATCKVIAKSPQDAIAAYVISMAKVPSDVLAVHLLLKEAGCPFTLPVAPLFETLDDLNNAENVIQQLMDIKWYRKLIQDKQMVMIGYSDSAKDAGVMAAAWAQYRAQDALIKVCEKEGVTLTLFHGRGGTIGRGGAPAHAALLSQPPGSLKGGLRVTEQGEMIRFKFGLPQVTISSLALYASAILEANLLPPPEA

SEQ ID NO: 11823 - protein, 459 aa, Sulfolobus tokodaii str. 7
MVKRLDNAEVIRLHILATIIGALGGFLFGYDTGIIGSVLVYVTPLFHLTPPEVAILTSGTSLLAGIGALAAGPITDKYGRKSLLVTDGIMYAVFALLSAIAINSFLLILWRSLVGFAIGADTAIATAYISEFSPKRWRGRLAITQQLMIFSGITASFWAGYLLSFSANWRLMLGLGVIPAVILVALRAFLPESPRWLLLNGMEEKAKNILRKFGVNIAENEHIAAPSKELSFKEMFNNKAIRTAIILVGLWLAFQQITGINVILYYGPTIYKYLGLTGPRAILNTAISESLGAIEYAISFYLIDKWGRRKLGIFGYAGLVGSLAIMLIGLRAFTSGIVFAGVALVFTAMTLFLLFFHVGVGGVGWVLQGETIPTEVRGRGAGLLAAIDWFANFVIIFIFPYWKAAFGVYSFFALELVLSILAIAIVYLFMPETKGVSLEDMLKVFERGLSVQRQKQYAK

SEQ ID NO: 11824 - protein, 407 aa, Brucella melitensis 16M
MRRVVVTGMGIVSSIGSNTEEVTASVREAKSGISRAEEYAKLGFRCQVHGAPDIDIESLVDRRAMRFHGRGTAWNHIAMDQAIADAGLTEEEVSNERTGIIMGSGGPSTRTIVDSADITREKGPKRVGPFAVPKAMSSTASATLATFFKIKGINYSISSACATSNHCIGNAYEMIQYGKQDRMFAGGCEDLDWTLSVLFDAMGAMSSKYNDTPSTASRAYDKNRDGFVIAGGAGVLVLEDLETALARGAKIYGEIVGYGATSDGYDMVAPSGEGAIRCMKMALSTVTSKIDYINPHATSTPAGDAPEIEAIRQIFGAGDVCPPIAATKSLTGHSLGATGVQEAIYSLLMMQNNFICESAHIEELDPAFADMPIVRKRIDNVQLNTVLSNSFGFGGTNATLVFQRYQG

SEQ ID NO: 11825 - protein, 290 aa, Xylella fastidiosa Temecula1
MSVLVNKNTKVIVQGFTGQQGTFHATQMVEYGTQVVGGVTPGKGGNTHIDLPVFNTVREAVQNTGADASVIYVPPPFAADAILEAAAAGIKVIVAITEGIPVLDMLRVKNVLKASPEITLIGPNCPGVITPGECKIGIMPGHIHKPGHIGIVSRSGTLTYEAVKQTTDVGLGQSTCIGIGGDPINGLNFVDALKLFNNDPQTKGIIMVGEIGGDAEEAGAEYIKHHVKKPVVGFIAGASAPKGKRMGHAGAIASGGSGTAEGKFAAMEKAGIKTVRSPGDLGAAIALLVR

SEQ ID NO: 11826 - protein, 577 aa, Oryza sativa
MGTRLLALAPWLLLLLLQLAGASHVVHRSLEAEQAPSSVPASIVSPLLRTGYHFQPPMNWINDPNGPLYYKGWYHLFYQYNPKGAVWGNIVWAHSVSQDLINWIALEPAIKPDIPSDQYGCWSGSATILPDGTPAILYTGIDRPNINYQVQNIAFPKNASDPLLREWVKPAYNPVATPEPGMNATQFRDPTTAWYADGHWRMLVGGLKGARLGLAYLYRSRDFKTWVRAKHPLHSALTGMWECPDFFPLQAPGLQAGLDTSVPSSKYVLKNSLDLTRYDYYTVGIYNKVTERYVPDNPAGDYHRLRYDYGNFYASKTFFDPVKHRRILLGWANESDSVTYDKAKGWAGIHAIPRKVWLDPSGKQLLQWPIEELETLRGKSVSVFDKVVKPGEHFQVTGLGTYQADVEVSLEVSGLEKAEALDPAFGDDAERLCGAKGADVRGGVVFGLWVLASAGLEEKTAVFFRVFKPAGHGAKPVVLMCTDPTKSSLSPDLYKPTFAGFVDTDISSGKISLRSLIDRSVVESFGAGGKTCILSRVYPSMAIGDKAHLYVFNNGEADIKISHLKAWEMKKPLMNGA

SEQ ID NO: 11827 - protein, 237 aa, Triticum aestivum
  misc_feature (133)..(133): Xaa can be any naturally occurring amino acid
  misc_feature (155)..(155): Xaa can be any naturally occurring amino acid
  misc_feature (187)..(187): Xaa can be any naturally occurring amino acid
  misc_feature (210)..(210): Xaa can be any naturally occurring amino acid
  misc_feature (212)..(212): Xaa can be any naturally occurring amino acid
  misc_feature (217)..(217): Xaa can be any naturally occurring amino acid
  misc_feature (224)..(224): Xaa can be any naturally occurring amino acid
MASVTSRCSGLLLPDLRPGLAGLRSRSPPPSSPRVRLRGGRRRPRTLSCVAPPDSAEPKTDEQNVKAELGEEKPQPSSSSSSSTPQEAAAEPPVPDRGLNRRIAVLTTLAAVGLFGSQRLQLGGFSLKDLAVXCWPYEEVSQWQPCCQFTQRVNXGCDVCRELAPDIYKIEQQYKDGINFVMLNVDXTKWEQELDEFGVEGIPHFAFLDXEXNEEGXVVGKLPXTYFLGHVVALSSG

SEQ ID NO: 11828 - protein, 494 aa, Staphylococcus aureus subsp. aureus MSSA476
MTEWTREERYQRIEDVDTEYFKTLKQQVDQSKFRQQFHIQPETGLLNDPNGLIFYKGKYYVSHQWFPLGAVHGLKYWYNYTSDDLINFKAEGPILNPDTKYDSHGVYSGSAFEYNGHLYYMYTGNHRDNHWQRHASQMIARLKEDGSVEKFPKPVISQQPEGYTSHFRDPKVFKYSEKYYAIIGAQNNDQQGRLLLYNTEDIINWHYLGEINTELDDFGYMWECPDYFNVDNQDVILICPQGIEPKGDQFKNIYQSGYILGKFDIEKLTYEHENFVELDNGFDFYAPQTFLDEKGRRVLIGWMGLPEIEYPTDNEGWAHCLTIPRVLNVENGQLKQRPYPALEKLRHNKETALGYANKFTRKLHPYEGKQYELIIDILDNDATEVYFELRTSKTSSTLIAYNKRENKITLDRSDSGLLPTNVEGTTRSTILDTPLKQLQIFVDTSSIEIFCNDGERVLTSRIFPTEDALGIKTSTESGQVYLQFTKYDLKDEHK

SEQ ID NO: 11829 - protein, 184 aa, Barbula unguiculata
VRDTTPGVAVVNGFPCKPAAMVTADDFKFAGLKNPGNTNNVNKANVTAATVIQWAGLNTLGISAVRIDYAKGGINPPHIHPRATELLILLKGELYVGFVSTANVLFATTIYPGEAFVFPKGLIHFQLNVGKEHALAFAGLSSQNPGVQQVAPALFTPDIKDEVLEKGFRIDTKTVDMIQAQFRV

SEQ ID NO: 11830 - protein, 364 aa, Aquifex aeolicus VF5
MKKYKIAVLKGDGIGPEIVEQALRVLDKIGEIYGVEFEYREGLIGGEAIDKTGDPLPEETLKICKESDAILLGAVGGPKWDNLPTDKRPEKGLLRIRKELDLYANLRPAKVWDALISSSPLKEEVVKGTDMIVIRELTSGIYYGEPRGIFEENGKRYAINTMKYTEDEIRRIVRKGFEIARKRRKKLTSVDKANVLEVSALWRQIVEEEKENYPDVELEHLYIDNCAMQLVRRPTSFDVIVTGNIFGDILSDEAGVVVGSLGMLPSASIGDRYALYEPVHGSAPDIAGKGIANPIATILSAAMMLKYSFNMDKAHDLIEKAIEETLNQGYRTPDIYSEGCIKVGTKEITDKILENLERLKDAYT

SEQ ID NO: 11831 - protein, 925 aa, Pseudomonas aeruginosa PAO1
MFKDLGIKGRVLLLTLLPTSLLAMVLGGYFTWVQLSDMRAQLIERGQLIAEQLAPLAATALARKDTAVLNRIANEALDQPDVRAVTFLDARQERLAHAGPSMLTVAPAGDASHLSMSTELDTTHFLLPVLGRHHSLSGATEPDDERVLGWVELELSHHGTLLRGYRSLFTSLLLIAAGLGVTALLALRMSRAINAPLELISQGVAQLKEGRMETRLPPMGSNELDELASGINRMAETLQSAQEEMQHNIDQATEDVRQNLETIEIQNIELDLARKEALEASRIKSEFLANMSHEIRTPLNGILGFTNLLQKSELSPRQQDYLTTIQKSAESLLGIINEILDFSKIEAGKLVLENLPFNLRDLIQDALTMLAPAAHEKQLELVSLVYRDTPIQLQGDPQRLKQILTNLVGNAIKFTQGGTVAVRAMLEDESDDRAQLRISVQDTGIGLSEEDQQALFKAFSQADNSLSRQAGGTGLGLVISKRLIEQMGGEIGVDSTPGEGAEFWISLSLPKSRDDNEEPGASWAAGQRVALLEPQELTRRSLHHQLTDFGLEVSEFADLDSLQESLRNPPPGQLPISLAVLGVSAAIHPPEELSQSFWEFERLGCKTLVLCPTTEQAQYHATLPDEQVEAKPACTRKLQRKLQELLQVRPTRSDKPHAMVSGRPPRLLCVDDNPANLLLVQTLLSDLGAQVTAVDSGYAALEVVQRERFDLVFMDVQMPGMDGRQATEAIRRWEAEREVSPVPVIALTAHALSNEKRALLQAGMDDYLTKPIDEQQLAQVVLKWTGLSLGQSLASMSRAPQLGQLSVLDPEEGLRLAAGKADLAADMLAMLLASLAADRQAIRQARDNDDRTALLERVHRLHGATRYCGVPQLRAACQTSETLLKQNDPAAAAALDELDKAIEALADTASATTHLSSTSLDSSEL

SEQ ID NO: 11832 - protein, 342 aa, Rhodopirellula baltica SH 1
MAIKVAINGFGRIGRLTFRNLMERSDEFEVVAINDLTDNRTLAMLLKYDSIHGRFDGTVEYDNTSLTVNGKKIVALAERDPRNLPWKDHNVDIAIESTGFFTARSTADKPGYDSHLAAGAKKVVLSAPAKDGADLTCVLGVNDDKLSADLNCVSNASCTTNCLAPVAKVLNDSFGIESGLMTTVHAYTNDQNVQDQPHADLYRARGAAQNIIPTSTGAAKAVGLVIPELQGKLTGIAMRVPVPTGSVVDLTVNLSKEVTKEDINLAIQTAAEGPMKGILFYAVDPIVSSDIVHDPHSSIFAADFTQVLGDKGKMAKVVSWYDNEWGYSSRTADLCSKLGKML

SEQ ID NO: 11833 - protein, 364 aa, Pyrobaculum aerophilum str. IM2
MPGVALSISEKLEIAMALDDAGVDMIEAGFAAVSDDEKEAIKLISKEVSRAKVVSLARMTKSDVDAAAEADVDMIHLFIATSDIHLKYKLGITREEALRRIEEVVSYAKSYGVEILFSAEDATRSDLEFLAKAYKTAIEAGADEINVPDTVGVMTPSRMAYLIKYLRERLPPIPMHVHCHDDFGMAVANTVTAIENGADVAQVVVNNFGERAGNAALEEVVAAVHYLLGLRTNIKLEKLYSLSQLVSKLFGVPVPPNKAVVGENAFSHEAGIHVHGVLNNPFTYEPMRPEDVGNRRRIVLGKHSGRHSVIWALKNLGVEPSEDLVNYVLDAVKKLAVKKVKVDEAVLREIVNRYNKGLSMSYAV

SEQ ID NO: 11834 - protein, 290 aa, Pyrobaculum aerophilum str. IM2
MEIKMAEAGDVALRKYGTAMPQEALRLADAADVIFKGPIGESAYDVTSLIRMRYTLYANIRPVKNLPGVPAVREIDCVFVRENVEDVYVGAEYKVGDVAIALKVITEKGTRRVARMARKYAEMRRRRVTIVHKANVLRVVDGFFRDIALEELKGLEVDQMYVDAAAMELVRNPKRFDVVLTMNQYGDILTDLAAQVAGGIGLAPSGNIGDAKAMFEPVHGAAFDIAGKGVANPIATILSAAMMFEWMGRGDVAEKIRGAVEKSIEAGVKTPDIGGDKSTIEVGKFIASIL

SEQ ID NO: 11835 - protein, 422 aa, Streptomyces chartreusis
MDYCVAITGIGVRAPGGIGTNAFWELLTSGRTATRTISFFDPSPFRSRVAAECDFDARAEGFTPKELRRMDRAAQLGVAAAREALADSGLGGGGLDPADVSVTVGSAVGCTMGLEQEYSTVSDGGRQWLVDHTYAVPHLYGHFVPSSLAAEVAWAVAAEGPVSVVSTGCTSGLDAIGHACGLLREGAGKVAVAGATDAPISPITVACFDAIKATTARNDDPEHASRPFDRSRDGFVLGEGSAFFVLEPLEDARRRGAHVYATIRGFASRSNAYHMTGLRPDGREMAEAITAALGQARLRPDDIDYVNAHGSGTRQNDRHETAAVKRSLGAHAFDVPVSSIKSMIGHSLGAIGAIEIAACALAIEHDVIPPTANLEEPDPDCDLDYVPKTAREQRTDAVLTVGSGFGGFQSAMVLAAPGAAAR

SEQ ID NO: 11836 - protein, 415 aa, Pyrobaculum aerophilum str. IM2
MQSESGFLAYVLAQLKRSVELGGFPEDFYAMISRPKRILHVYIPVKMDSGRIEVFEGYRVQHNDALGPFKGGIRFHPEVTLADDVALAILMTLKNSLAGLPYGGAKGAVRVDPKRLSQRELEELSRGYARAIAPLIGDLVDIPAPDVGTNSQIMAWMVDEYSKIAGRNAPAVFTSKPPELWGNPVREYATGFGVAVVAREMAKRLWDGIEGKTAAIHGAGNTGAWAAYWLEKMGVKIVAVSSTKGTVYNKAGIPAAEILRYYKREIPFEKIPGEFIKDPEASLNVEADLLVPAAIENVIRSDNAGQVKARLVVEGANGPTTPEAERVLYQRGVVVVPDILANAGGVIMSYLEWVENLQWLSWDEEETRKRLEAIMVNNVARVYQRWQKEKWTMRDAAIVTALERIYKAMKLRGWI

SEQ ID NO: 11837 - protein, 185 aa, Yarrowia lipolytica CLIB122
MSIDPSTGLVSGWEVRHSRTRNLPYYFHPATSNSSWEPPAGTDSDLLKQYMATNYSQKNTAVPNTAPGTGNGSGQKIRVSHLLIKHRDSRRPSSWKDANIERTKEEARAILEGHQAKIKAGETTIGDLAVSESDCSSARKRGDLGFFGKGEMQAEFEQASFALENGQVSDIVETASGLHLIERTG

SEQ ID NO: 11838 - protein, 233 aa, Escherichia coli CFT073
MNMKISPSLMCMDLLKFKEQIEFIDSHADYFHIDIMDGHFVPNLTLSPFFVSQVKKLASKPLDCHLMVTRPQDYIAQLARAGADFITLHPETINGQAFRLIDEIRRHGMKVGLILNPETPVEAMKYYIHKADKITVMTVDPGFAGQPFIPEMLDKVAELKAWREREGLEYEIEVDGSCNQATYEKLMAAGADVFIVGTSGLFNHAENIDEAWRIMTAQILAAKSEVQPHAKTA

SEQ ID NO: 11839 - protein, 616 aa, Triticum aestivum
MDSDYGVPRELSEVQQNRTLYQPELPPCLQGTTVRVEYGDVAIAADPAGAHVISHAYPHTYGQPLAHFLRKAANVPDAKVISEHPAVRVGIVFCGRQSPGGHNVIWGLHEAIKAHNVNSKLIGFLGGTDGLLAQKTLEITNEVLSSYKNQGGYDMLGRTKDQIRTTEQVNGAMATCQALKLDALVIIGGVTSNTDAAQLAETFAEAKCATKVVGVPVTLNGDLKNQFVETTVGFDTICKVNSQLISNMCTDALSAEKYYYFIRMMGRKASHVALECALQSHPNMVILGEEVAASKLTIFDITKQICDAVQARAEKDKNHGVILIPEGLVESIPELYALLQEINGLHGKGVSVENISSQLSPWASALFEFLPQFIRQQLLLRPESDDSAQLSQIETEKLLAQLVETEMNKRLKEGTYKGKKFNAICHFFGYQARGAMPSKFDCDYAYVLGHVCYHILAAGLNGYMATVTNLKSPLNKWRCGAAPISSMMTVKRWSRGPATTQIGKPAVHMASVDLRGKAYEMLRQNSSSCLLEDIYRNPGPLQFEGPGADAKPISLCVEDQDYMGRIKKLQEYLEKVKSIVKPGCSQDVLKAALSAMSSVTETLAIMTSSSTGQPPL

SEQ ID NO: 11840 - protein, 238 aa, Kluyveromyces lactis NRRL Y-1140
MPRSKRSKLVTLAQTDKKGRENKERIFDEVREALDSFRYAWVLHLEDVRTPVLQEIRSSWVGSKLIMGKRKVLVKALGEKPEEEYKENLAKLCKHCSGVTGLLFTNEPVDVVEDYFKAYVRADFSRPKSKAPLSFTIPAGIVYSRGGQIPEEEDVPMIHSLEPTLRNKFKIPTKIKNGKITIESPYLVCEKGKTLDVTQALILKQFGIAAAEFRVKVAAYYDNETSSVEQININMDSK

SEQ ID NO: 11841 - protein, 485 aa, Ustilago maydis 521
MAKKQLCLPFSPLACTLDTNNAHKQQALYASLGCALEPLRSRRSATATATAKMDASDFVEDEAAIAQQKLSNEEYKIWKKNSPFLYDLVVTHALEWPSLTCQWLPDKESPAGQSYTQHRLLLGTHTSGQDQNYLQFAQVQLPTTGADGASNSAESRLDLKQYDEDKGEIGSYSATTARLSIVQKINHDGEINRARYCPQNCDLIATRSVTGKTYIFDRTKHSNTPSADGVCRPDIILEGQHKEGYGLSWSPLKQGHILAASEDTTVCHWDINNYTKPNNTLQPSATYTGHTAIVEDVAWHNHHESLFGSVGDDRQLLIWDIREPASAPKYRVEAHTGEVNALAFSPENENILVTGSSDKSVGVWDLRNLKVKLHSLESHTDEILSVCWSPHHATVLASASADRRVNLWDLSKIGQEQTPDDAEDGPPELIFVHGGHTSRPTDLAWSPHMEWALTSAAEDNIVMVWRPSKAVIDTGNEELTPDDLE

SEQ ID NO: 11842 - protein, 327 aa, Candida glabrata CBS 138
MTWDPSELPYYNPQVDDRVAVVTGGNSGIGWFTVLHLYMHGFRVYVCGRNSHKVSRAMDDIIEEAVRRHNLYLKGLHDQKPTRYLGSLQYLHTDLTDLKCVDRAAAKILRMENHLDVLVNNAGVMAVPYEITKDGFEIQMQTNYIAHFLLTMRLLPLLRCSHGRVVTLSSLGHHIIFKYSKLDETWNYFPNFVFTWFRYAMTKVASIQYTKMLAIKNPDILFVSVHPGLVMNTNLFSFWTRLPLVGIFFWLLFQVVGFMFGVSNEQGAYSTLRCSLSQELTTTNDNGKYFTTGGKESRSSYVANNLDDAASTWIWTMKQLRNRGFDI

SEQ ID NO: 11843 - protein, 290 aa, Colwellia psychrerythraea 34H
MSVLINKDTKVICQGFTGGQGTFHSEQAIDYGTQMVGGVSPGKGGQTHLGLPVFNTVRDAVEATGATATVIYVPAPFCKDAILEAIDAGIELIVTITEGIPTLDMVDVKAKLTQTGVRMIGPNCPGVITPGETKIGIMPGHIHLPGKVGIVSRSGTLTYEAVKQTTDAGFGQSTCVGIGGDPIPGTNFIDVLEMFQNDPQTEAIVMIGEIGGTAEEEAAEYIKANVTKPVVSYIAGVTAPEGKRMGHAGAIIAGGKGTADEKFAALEAAGVKTVRSLADIGVALKEKTGW

SEQ ID NO: 11844 - protein, 284 aa, Leptospira interrogans serovar Lai str. 56601
MINRVLGLFLIIGILIFVLNFFSTSGQSEDQYQAEGPSRIQSVVILIREFLWGKASHSNAAASVTTAENPQEIFKRAYRANEKKAYLNAVEEYSKYLKLVPNDASAYYNRGLVHYTLKRYNDAVRDFEKAVEIDPSKTYAFLYKGYAYEMISDCKQAIEDFEKAISLGENKNAELYGHKARCENRSKNYDEGFQDALKALNIDKKNAYAFFELAYAQYGLKKYSDSVESYTKVLQFSPNDGVAFHNRGLALVFLNKIPSACKDFQRSSEIGYFDSKKKLDEYCK

SEQ ID NO: 11845 - protein, 609 aa, Ashbya gossypii ATCC 10895
MLKGVPGLLFKETQRHLKPRLVRIMENTSQDESRKRQVASNLSSDADEGSPAVTRPVKITKRLRKKNLGTGELRDKAGFKLKVQDVSKNRHRQVDPEYEVVVDGPMRKIKPYFFTYKTFCKERWRDRKLLDVFVDEFRDRDRPYYEKVIGSGGVLLNGKSSTLDSVLRNGDLISHELHRHEPPVSSRPIRTVYEDDDILVIDKPSGIPAHPTGRYRFNSITKILEKQLGYTVHPCNRLDRLTSGLMFLAKTPKGADEMGDQMKAREVKKEYVDRVVGEFPIGEIVVDMPLKTIEPKLALNMVCDPEDEAGKGAKTQFKRISYDGQTSIVKCQPYTGRTHQIRVHLQYLGFPIANDPIYSNPHIWGPSLGKECKADYKEVIQKLNEIGKTKSAESWYHSDSQGEVLKGEQCDECGTELYTDPGPNDLDLWLHAYRYESTELDENGAKKWSYSTAFPEWALEQHGDFMRLAIEQAKKCPPAKTSFSVGALLVNGTEILATGYSRELEGNTHAEQCALQKYFEQHKTDKVPIGTVIYTTMEPCSLRLSGNKPCVERIICQQGNITAVFVGVLEPDNFVKNNTSRALLEQHGIDYILVPGFQEECTEAALKGH

SEQ ID NO: 11846 - protein, 415 aa, Thermotoga maritima
PEKSLYEMAVEQFNRAASLMDLESDLAEVLRRPKRVLIVEFPVRMDDGHVEVFTGYRVQHNVARGPAKGGIRYHPDVTLDEVKALAFWMTWKTAVMDLPFGGGKGGVRVDPKKLSRNELERLSRRFFSEIQVIIGPYNDIPAPDVNTNADVIAWYMDTYSMNVGHTVLGIVTGKPVELGGSKGREEATGRGVKVCAGLAMDVLGIDPKKATVAVQGFGNVGQFAALLISQELGSKVVAVSDSRGGIYNPEGFDVEELIRYKKEHGTVVTYPKGERITNEELLELDVDILVPAALEGAIHAGNAERIKAKAVVEGANGPTTPEADEILSRRGILVVPDILANAGGVTVSYFEWVQDLQSFFWDLDQVRNALEKMMKKAFNDVMKVKEKYNVDMRTAAYILAIDRVAYATKKRGIYP

SEQ ID NO: 11847 - protein, 257 aa, Shewanella sp. MR-7
MEYLVERIEGHTAILTMNNPPANTWTAQSLQALKAKVLELNANKDIYALVLTGEGNKFFSAGADLKLFSDGDKGNAASMAKHFGEAFETLSQFRGVSIAAINGYAMGGGLEVALACDIRIAETQAVMALPEATVGLLPCAGGTQNLTALVGEGWAKRMILCGERVNAAQALNLRLVEEVVETGEALNAAIALAAKVANQSPSSVTACKTLIQAGRQMPRSQALPLERELFVGLFDTEDQAEGVNAFLEKRKADWKNR

SEQ ID NO: 11848 - protein, 377 aa, Crocosphaera watsonii WH 8501
MTNIHINDTTLRDGEQAAGIVFSAAEKIAIASMMDSMGIPELEVGIPAMGGSEAQAITTIVQKGLKAKLLGWNRAVRSDIEASIACGLKRVHISVPVSEIQIKAKFKGKTNLVWQRLKDSLNFALDQDLFVSVGAEDASRADESFLLEVAQFAQSLGASRFRFCDTVGILEPLTTAQKVGKLVECLKIPIEMHTHNDFGLATANALAGLQAGATAVNTTVNGLGERAGNAALEEMIMALKRLYQVDLAIETSRLRELSQQVIAASGIALPPWKAIVGDNVFAHESGIHAHGVLENPQTYEPFSPDEVGWKRRLVVGKHSGRHLLTNVLSQHGIRLNHEESQVVLDSVRHLSVQMKRSLTVEELLYVVSNRSMSHGIV

SEQ ID NO: 11849 - protein, 435 aa, Halobacterium salinarum
MTMASKSDSTHDESGDEAADSTEPESALETARRQLYHAASYLDIDQNIVERLKYPKKVHEVTIPIERDDGTVEVFTGYRAQHDSVRGPYKGGLRYHPDVTRDECVGLGMWMTWKCAVMDLPFGGAKGGVAVNPKELSPEEKERLTRRFTQEIRDVIGPNQDIPAPDMGTDPQTMAWLMDAYSMQEGETTPGVVTGKPPVVGGSEGREEAPGRSVAIITQLVCEYYDQPLDETTVAVQGYGSVGANAARLLDKWGATIVAISDVNGAMYEPDGIDTASVPSHDEEPEAVTTYADTVISNEELLTLDVDVLIPAALGNVITKENAEAIAADLVVEGANGPTTSTADSILADRDVAVIPDILANAGGVTVSYFEWLQDINRRAWSLERVNDELEAEMQAAWRAVKDEYENRDVTWRDAAYIVALSRIAEAHEARGLWP

SEQ ID NO: 11850 - protein, 401 aa, Mallomonas splendens
MRITGANRILSLSRIRHFSDGASLNKAFLRSVKPGVKPEQYDSRSGNSSQAQSTEHVKDKFVEPGNLRFRTGEYITEFLPKICVFGVGGGGCNAVNNMIARKLSGVEFVCANTDAQHLSTCLTENKLQLGKESTQGLGCGANPESGRRAAEESKEEIARYIADANMVFITAGMGGGTGTGAAPVVAEVCMEKDILTVAVVTKPFSFEGKHRARLANEGIRSLEDRVDTLIIIPNQNIFKLINASTSMADAFGLADDILLAGVKSITDLMVRPGLINLDFADVRTVMSGMGHAIMGTGQAEGEDRAIRAANDALNNPLLGGDFSVRSAKGMLVNITGGKDLTLVEVDAAAQRITSEIEDEDANVIFGSSFDESLQGSIRVSIVATGIEAPGAAAATAAPVIR

SEQ ID NO: 11851 - protein, 880 aa, Mycobacterium sp. JLS
MGPSHEATSRQYPIPSLAPMSTSISNGPARNVVVVGHGMVGHRFVEALRARDDAGAWRITVLAEETDAAYDRVGLTGYTEHWDRALLALAGNDYAGDDLVDLRLGQRVTSIDRAARTVKTADGTAFAYDALVLATGSYAFVPPVPGRDLPACHVYRTFDDLDAIRADAARARETSRAPVGVVIGGGLLGLEAANALRGFGLTAHVVERSPRLMSQQLDDAGGALLSRMIADLGIEVHLDVSTDAITPAQRNRPLRRSEEDDSLRVMLGDGSFIDAGVVVFAAGVRPRDELARDAGLAIAERGGVLTDLGCKTSDPSIYAVGEVAAIEGRCYGLVGPGYTSAEVVADRLLGGAAEFPEADMSTKLKLLGVDVASFGDAMGRTPDCLEVVVNDAVNQTYAKLVLSDDAKTLLGGVLVGDASAYGVLRPMVGEQLPGDPMALIAPAGSGGAEGGLGVGALPAAAQICSCNNVTKGDVTDAIAGGCCDVPGLKACTKAGTSCGSCVPLLKQLLEAEGVEQSKALCEHFSHSRAELFEIVSATEIRTFSGLLERFGTGKGCDICKPTVASILASTSSEHILDGEQAALQDSNDHFLANIQRNGSYSVVPRVPGGDITPEQLILIGEIARDFDLYTKITGGQRIDLFGARVEQLPEIWRRLVEGGMESGHAYGKALRTVKSCVGSDWCRYGQQDSVQMAINLELRYRGLRAPHKIKMGVSGCARECAEARGKDVGVIATEHGWNLYVGGNGGMTPKHAQLLAGDLDDETLIRYIDRFLMFYIRTADRLQRTAPWVEQLGLDHLREVVCDDSLGLASEFEAAMARHVEGYSCEWKGVLEDPDKLSRFVSFVNAPDVPDPTVTFTENAGRKVPVPIGMPSIRPLQETP

SEQ ID NO: 11852 - protein, 368 aa, Mallomonas splendens
GVELWVVNTDAQALSRSSAKRRLNIGKVLSRGLGAGGNPAIGAKAAEESREEIMAVVKNADLVFVTAGMGGGTGSGAAPVVAECAKEAGALTVGVVTKPFGFEGRKRMQQARNAILEMKDKVDTLIVVSNDKLLKIVPDNTPLTEAFLVADDILRQGVVGITEIIVKPGLVNVDFADVRTIMGNAGTALMGIGHGKGKNRAKDAALSAISSPLLDFPITRAKGIVFNIVGGSDMSLQEINAAAEVIYENVDQDANIIFGAMVDDKMTSGEVSITVLATGFSTDYFSNDGSGLENLPPNRLSPPKTVGSAKSYSEYEPPSTPKAEERDSEYLSADDLTDESKERDQDGKKDEEKPKGGGFRGFIKRLFS

SEQ ID NO: 11853 - protein, 319 aa, Haemophilus somnus 129PT
MKKIGIILANLGTPDEPTPKALSRYLWQFLTDPRVVDLPKWRWYPLLKSIILPRRSARVAKIYQTVWTDKGSPLLVISNQQKQALQSHFDEHRINATVEIAMTYGNPSMESAVEKLLKKHVNEIILLPLFPQYSSTTTGAVFDAFAQALKKQRNIVPFQFIHSYHLHEDYIEALVNSINAQHKPDEYLIFSFHGIPLRYENEGDYYRKHCHETVLAVVERLGLRENQWQMTFQSRFGKEEWLQPYTDKVLENIYQRNIQKVAVVCPGFSADCLETIEEINEENRRIFLSHGGASFQYIPALNAEMQHIEMMYKLISSRL

SEQ ID NO: 11854 - protein, 493 aa, Bordetella pertussis Tohama I
MSLSVGNAALLPGRNLIGSEWREAALGARFAVADPATGKVIAHVPDSGARDAGAAVTAAHQAFADWRRTPAKVRAQIIKRWNALLHENAEDLARLISSEQGKPLAEARGEVSYAASYVEWFAEEATRADGDLIPSPAQGRRMFALREPVGVVAAITPWNFPAAMIARKIAPALAAGCTVVCKPAEDTPLTSLALTALAQQAGVPPGVLNIVTASRGRAAEVADAWLDDPRVRKITFTGSTPVGKHLARRSADTLKRVSLELGGNAPFIVFDDADLDAAVEGLMVSKFRNGGQTCVCPNRIFVQAGVHDAFVRKLAARVEGLVVGPASDPASQIGPMINARAVEKIEHHVADALERGARLAVGGKRIHSARCAGDHYYAPTVLTGVDETMACFREETFGPVAPITVFASEAEVVAAANATAFGLAAYFYSTDVRRIWRLADALETGIVGVNEGALAAEAAPFGGVKDSGYGREGSRHGLAEYMQIKYVCQGQLD

SEQ ID NO: 11855 - protein, 363 aa, Salmonella typhimurium LT2
MSKNYHIAVLPGDGIGPEVMAQALKVMDAVRSRFDMRITTSHYDVGGIAIDNHGHPLPKATVEGCEQADAILFGSVGGPKWENLPPESQPERGALLPLRKHFKLFSNLRPAKLYQGLEAFCPLRADIAANGFDILCVRELTGGIYFGQPKGREGSGQYEKAFDTEVYHRFEIERIARIAFESARKRRRKVTSIDKANVLQSSILWREIVNDVAKTYPDVELAHMYIDNATMQLIKDPSQFDVLLCSNLFGDILSDECAMITGSMGMLPSASLNEQGFGLYEPAGGSAPDIAGKNIANPIAQILSLALLLRYSLDANDAATAIEQAINRALEEGVRTGDLARGAAAVSTDEMGDIIARYVAEGV

SEQ ID NO: 11856 - protein, 146 aa, Glycine max
MGSDRERESCNSRHFAWLMKSCFPNPNDAVAKLASPPQSHRNSPVPATTISSLPDDIVLDCLSRVPTSSLPALSLVCRRWSRLLSSPDFSDLRRHRLLLRHTAVAIAGTNLGLSSATLLDGAWHPSLFVPCYDAHSLDNFHSLLAH

SEQ ID NO: 11857 - protein, 127 aa, Sandersonia aurantiaca
LEFWARWAHRALWHASLWHMHESHHRAREGPFELNDVFAITNAVPAIALLSYGFFHRGLLPGLCFGAGLGITLFGMAYMFVHDGLVHRRFPVGPIANVPYFQRVAAAHQIHHMDKFEGVPYGLFMGP

SEQ ID NO: 11858 - protein, 523 aa, Salmonella typhimurium LT2
MSQQVIIFDTTLRDGEQALQASLSAKEKLQIALALERMGVDVMEVGFPVSSPGDFESVQTIARTIKNSRVCALARCVEKDIDVAAQALKVADAFRIHTFIATSPMHIATKLRSTLDEVIERAVYMVKRARNYTDDVEFSCEDAGRTPVDDLARVVEAAINAGARTINIPDTVGYTMPFEFAGIISGLYERVPNIDKAIISVHTHDDLGIAVGNSLAAVHAGARQVEGAMNGIGERAGNCALEEVIMAIKVRKDIMNVHTNINHHEIWRTSQTVSQICNMPIPANKAIVGSGAFAHSSGIHQDGVLKNRENYEIMTPESIGLNQIQLNLTSRSGRAAVKHRMEEMGYKDTDYNMDHLYDAFLKLADKKGQVFDYDLEALAFINKQQEEPEHFRLDYFSVQSGSSDIATASVKLACGEEIKAEAANGNGPVDAIYQAINRITGYDVELVKYDLNAKGQGKDALGQVDIVVNHHGRRFHGVGLATDIVESSAKAMVHVLNNIWRAAEVEKELQRKAQNKENNKETV

SEQ ID NO: 11859 - protein, 415 aa, uncultured bacterium 560
MESLSTFWLSVLLFALILASAFFSGTETSMMAMNRYRLKALSAKNNPQAKRVEKLLKNVDYLIGAILLGNNFVNILAASIATILALKLWGEGSVIIASLVLTLVILIFAETTPKTFAAKNPEKIALPASATIELLIKLFRPVIWLISYISQTILKPFGLKHSSKDNLNSEELRMAVVDSKSIVSKNYQKMLLNIIDLEKVKVEDIMVPHNELVSVDINNEVELFDQLKRIQHTRLLIFEGSENNIIGTIHMRDVVNLYAKNEITMTTIKELIREPYFIPEGTSLSMQLEHFKNQKRRLGLVVDEYGEVKGMAVLEDILEEIVGQFTSNQGETIEEINQQEDGSYLVDPRISIRELNKTLKIKLPYDSAKTLNGLILENLQSFPQHSVSLKIEPLIIEIVQVSKQGIRLVRIKKIY

SEQ ID NO: 11860 - protein, 365 aa, Cryptococcus neoformans var. neoformans JEC21
MADFVKLSIFGTVFEVTTRYVDLQPVGMGAFGLVCSAKDQLSGTSVAIKKIMKPFSTPVLSKRTYRELKLLKHLRHENIISLSDIFISPLEDIYFVTELLGTDLHRLLTSRPLEKQFIQYFLYQILRGLKYVHSAGVVHRDLKPSNILVNENCDLKICDFGLARIQDPQMTGYVSTRYYRAPEIMLTWQKYDVAVDIWSTGCIFAEMLEGKPLFPGKDHVNQFSIITELLGTPPDDVIQTIASENTLRFVQSLPKREKVPFSTKFPNADPVSLDLLEKMLVFDPRTRISAAEGLAHEYLAPYHDPTDEPVAAEVFDWSFNDADLPVDTWKVMMYSEILDFHNLGDISQNEAEGPVTGEVPAAPAS

SEQ ID NO: 11861 - protein, 349 aa, Oryza sativa
MGVDYYKLLQVERGATEEELKKAYRKLAMKWHPDKNPNSKKEAEAKFKQISEAYEVLSDSQKRAVYDQYGEEGLKGQVPPPGAGGPGGSSYYGGDGSTFRFNPRSADDIFAEFFGFSSPFSSMGGMGGMGGGVDRGMRGSKFGMYDNDIFGSFSQFPGEASMHAPQRPQKAAPIENRLPCNLADLYKGTTKKMKISREILDSSGRTMVVEEILTIDIKPGWKKGTKITFPEKGNESPHVIPADIVFVIDEKPHDLFTREGNDLVMTQKISLAEALTGCTVQVTALDGRNLTVPINNVVYPGYEEVVLREGMPIPKDPSKKGNLRIKFNIKFPSRLTSEQKSEIKRLLAS

SEQ ID NO: 11862 - protein, 460 aa, Glycine max
EELLPIVYTPVVGEACQKYGSIFKRPQGLFISLKEKGKVLEVLKNWPERSIQVIVVTDGERILGLGDLGCQGMGIPVGKLALYTALGGVRPSACLPITIDVGTNNEKLLNDEFYIGLRQKRATGQEYSELLQEFMTAVKQNYGEKVLIQFEDFANHNAFELLAKYGTTHLVFNDDIQGTASVVLAGVVAALKLIGGNLADHTFLFLGAGEAGTGIAELIALEMSKQTKTPIEETRKKIWLVDSKGLIVGSRKASLQHFKQPWAHEHEPVGSLLEAVKVIKPTVLIGSSGVGKTFTKEVIEAVTSINEKPLVLALSNPTSQSECTAEEAYEWSEGRAIFASGSPFDPVEYKGKVYYSGQANNAYIFPGFGLGLVISGAIRVHDDMLLAASEALAKLVTEENYEKGLIYPPFSNIRKISANIAASVAAKAYELGLATRLPRPQNLVKYAESCMYTPVYRNYR

SEQ ID NO: 11863 - protein, 467 aa, Methanococcoides burtonii DSM 6242
MTSRLNRSLFVFRRDMRVDDNSALLAALDMSDVVIPCFILDPRLCDPKGKAFNSNALQFLLESLYDLKGQLEKVNGRLYLFSGLPEGVIGQLLENLEIDAVFVNHDYTPFSIKRDMQIASICTDKGVDMLQFHDCLLHEPGSIRTKKGTPYKVFTQFFREASKRDVAVPSMFSGGSFFTGDCGVDEVDEGSFLKRSLPERNEQIFVHGGRANGLSVLQSLSQFVNYDTERDLPSVKGTTGLSAHNKLGTISIREFYYSVIDELGRGHTLINELYWRDFFTQISFEFPDVFKHAFKKKFDHLSWDNDRIFFDAWCLGKTGFPIVDAGMRELNTTGYMHNRVRMIVASFLVKDLHIDWKRGERYFASKLVDYDPCVNNGNWQWAASTGADSQPYFRIFNPWLQQKKFDKDCKYIKKWIPELEDIEPQRIHKLEKGDMDIPGYPAPIVDHSKEREVALFMFKAASQIMDV

SEQ ID NO: 11864 - protein, 674 aa, Cryptococcus neoformans var. neoformans JEC21
MFRLPSALLSTLLFFSSIFLRSHAFRVPISDTDSLREVCSGMYGGKDAYIEVDFDQTSSGQVALIIYEWNDVQYLGAQTGDETRTYICTTSAVRSGLCSNAQLGSFLTSFPDDVSAESSSIFTTPLKFSNDYTPTPTTDEDDNNTLPTENEDQEETSTEVAEEPVQETDSVDADMDEDEADQEQAEQVEGLAEALGDGWQKRQVGDIVNRIVTGVAISDDESAEDSEDWTETGSSTADSDSTSTAPVSVPVFSAPITYAVPKTGYYCVGIVPVTLVNSRDSVRERQATHAEYSGMVLFRNNFAGELPAVEYPKIHFYFALSIVYFVLGCGWAYLCSKHHRELLPMQYYISGTIVFLIIEMLAQFAYYRYINKHGGGTASLAFLFVIAVLNAARNSLSFFLLLIVCMGLSVVTHSLGSVMNKVRLLTILHFIFGVLYSVGTVEVELDDASLFTVLLLIFPLSITLTAFLMWIIVSLNGTIMHLQARKQRHKLQMFQRLWRILVVSVIAVAAFFVVSSMSLSNRMNEDYTPNSWRYRWILLDGSLATIYLCAFTAIAYLWRPTRDNVRFSMSQELAQDEAEADAEDYEIEALENGHGRGLGGHQQLSQHDDEDYNEDERKGLVRNGVGEENVVFAMGDDSDEEEDHVHGHGRTEYRDSEEVGRSSEAKSKDRGKDD

SEQ ID NO: 11865 - protein, 118 aa, Panax ginseng
LCEGGELFDRIVARGHYTERAAAAVVRTIVGVVQLRHRHGVIHRDLKPENFLVANKKENSPLKAIDFGLSTFFKPGEKFSEIVGSPYYMAPEVLKRNYGPEIDIWSAGVILYILLCGV

SEQ ID NO: 11866 - protein, 118 aa, Panax ginseng
LCSGGELFDRIIQRGHYSERKAAELTKIIVGVVESCHSLGVMHRDLKPENFLLVNKDDDFSLKAIDFGLSVFFKPGQVFTDVVGSPYYVAPEVLLKHYGPEADVWTAGVILYILLSGV

SEQ ID NO: 11867 - protein, 444 aa, Bacillus cereus ATCC 14579
MNYVIIGGDAAGMSATMQIVTNDENANVVTLEKGEIYSYAQCGLPYVISGAIASTEKLIAHNVKTFRDKYGIDAKVRHEVTKVDTEKKMVYAEHTKTKDVFEFPYDRLLIATGVRPVMPEWEGRELQGVHLLKTIPDAERILKTLETNKVEDVTIIGGGAIGLEMAETFVELGKKVRMIERNDHIGTIYDADMAEYIHKEADKHHIEILTNENVKAFKGNERVEAIETDKGTYKADLVLVSVGVKPNTDFLEGTNIRKNHKGAIEVNAYMQTNVQDVYAAGDCATHYHVIKEIHDHIPLGTTANKQGRLAGLNMLDKRRAFKGTLGTGIIKFMDLTLARTGLNEKEAKGLHIPYKTVKVDSTNMAGYYPNAKPLYLKLLYRSDTKQLLGGQVIGEEGVDKRIDVIAMALFNKMSIHDLEDVDLSYAPPYNSVWDPIQQAARRAE

SEQ ID NO: 11868 - protein, 212 aa, Ashbya gossypii ATCC 10895
MTSPCTDIGTAIEQFKQNKMIIVMDHISRENEADLICAAAHMTAEQMAFMIRYSSGYVCAPMTNAIADKLDLPLMNTLKCKAFSDDRHSTAYTITCDYAHGTTTGISARDRALTCNQLANPESKATDFTKPGHIVPLRARDGGVLERDGHTEAALDLCRLAGVPEVAAICELVSERDVGLMMTLDECIEFSKKHGLALITVDDLKAAVAAKQ

SEQ ID NO: 11869 - protein, 340 aa, Zea mays
QQQQQGGEEQGEREFEEMLLREHSVSTDMGSLDWKRMKIPPVLTSSQSARLFKTMQPMKAIFEAQESLREELQRDPTDAEVAEATGMTVHQLRRRLDVGRAARNKLIKHNLRLVPYALNKYYPDMGGDERFDELCQAGANGLITAIDRFEPRGGFRISTYALFWIRHSIVRAMTLSSFTRFPFAMESDRQEIGRAREELAFDRGRPPTDEEVRARVGLSPQRYRDVLRMARPTYSLHARNRVTQEELIGEVTDAEAVGVDAGGKHDALLRLAIDDLLDSLKPKESLVIRQRFGLDGRGRRTLSEVAGNLSISREMVRKYELKALMKLKHPTRVEYLRRYM

SEQ ID NO: 11870 - protein, 499 aa, Shewanella sp. MR-7
MTTQVKHYIDGEFTTGTGTSQIVVTNPANNEPIALINSATADEVHAAIASAKAAFKTWKEVPVSERARVMLRYQHLLKEHHDELATILAKETGKTFEDAKGDVWRGIEVAEHACNIASLLMGETVENVARSIDTYSYTQPLGVCAGITPFNFPAMIPLWMFPLAIACGNTFILKPSEQDPMTPQRLVELFVEAGAPKGVLQLVHGDKTAVDILLADPAVKAISFVGSVAVGQYIYKTGTDNLKRVQAFAGAKNHCVIMPDANKQQVINNLVGASVGAAGQRCMAISVAVFVGAAKEWIPELKEALAKVRPGLWDDKEAGYGPLISPAAKARVLKLIAQGKEEGAECLLDGSDFSVAGFESGNWVGPTMFTKVTTDMSIYKEEIFGPVLCCMESDSLEDAIELVNASPYGNGTSIFTASGGAARKYQHEIEVGQVGINVPIPVPLPFFSFTGWKGSFYGDQHAYGKQAVRFYTETKTITSRWFESDIAVAAGPNMSINLR

SEQ ID NO: 11871 - protein, 120 aa, Zea mays
MARMQKLAVATAAVVALVLLAAATSEAAISCGQVASAIAPCISYARGQGSGPSAGCCSGVRSLNNAARTTADRRAACNCLKNAAAGVSGLNAGNAASIPSKCGVSIPYTISTSTDCSRVN

SEQ ID NO: 11872 - protein, 419 aa, Bacillus cereus ATCC 14579
MIEIKVPELAESITEGTISQWLINVGDKVEKGGSVVELETDKVNVEIIAEDSGIVSKLLGEPGDTVEVGATIAILDANGAPVAVSTPAPAAEQPKQETAETPKAAAPSAEQTATLQGLPNTNRPIASPAARKMARELGIDLNDVRSTDPLGRVRPHDVQAHAAAPKEAPAAPKSPAPAPVAKTEFEKPVERVKMSRRRQTIAKRLVEVQQTSAMLTTFNEVDMSAIMELRKERKDAFEKKHDVRLGFMSFFTKAVVAALKQFPLLNAEIQGDELIIKKFYDIGIAVAAPDGLVVPVVRDANQLNFAEIESEIRELGKKARDNKLSLKELQGGTFTITNGGVFGSLMSTPILNSPQVGILGMHKIQVRPVAIDNERMENRPMMYIALSYDHRIVDGKEAVSFLVAVKDMLEDPKSLLLEG

SEQ ID NO: 11873 - protein, 121 aa, Photobacterium profundum SS9
MLRVGNLDRAVNFYTNVMGMDLLRKRKNEAYKYTLAFVGYGDESQGAVIELTYNWGTTEYEMGDAFGHIAIGTEDIYATCDAIKAAGGNVTREPGPVKGGNTHIAFVTDPDGYKIELIQRA

SEQ ID NO: 11874 - protein, 216 aa, Nicotiana tabacum
MNSFSAFSEMFGSDYESSVSSGGDYIPTLASSCPKKPAGRKKFRETRHPIYRGVRRRNSGKWVCEVREPNKKTRIWLGTFQTAEMAARAHDVAALALRGRSACLNFADSAWRLRIPESTCAKDIQKAAAEAALAFQDEMCDATTDHGSDMEETLVEAIYTAEQSENAFYMHDEAMFEMPSLLANMAEGMLLPLPSVQWNHNHEVDGDDDDVSLWSY

SEQ ID NO: 11875 - protein, 272 aa, Vibrio sp. Ex25
MDSQMNSQLFVGNVRHRRFTPIKHELNYSLFMPAIDVDELKKLEEKVWGFGSRWWHWARFKRSDYVGEGCLKVAVHDKIEELTGVRCTGKVIAVCHLRYLGLYFSPVNFYYVYNKEGEWKYLLAEVSNTPWNERHYYAVAAEQNDENFGWEQEKAFHVSPFNPIDQQYHWKIKPLTDKLRIHLECHKSEKHFDATMTMKAQVFSIKSLLKCLIVTPIQTVKVMVGIYWHALKLWVKGAPFYSHPKYSTHDEIEADTKKTDKKNKKHKENSAC

SEQ ID NO: 11876 - protein, 552 aa, Magnetospirillum magnetotacticum MS-1
MMPAASTKYRAYPAIRLSHRRWPDATITRPPMWCSVDLRDGNQALIDPMGSDRKMALWQTLVGMGFKEIEVGFPAASQTDFDFIRLLIEGGHIPDDVTIQVLVQSREDLIRRTFEALAGAKRCILHMYNSTSEAQRRIVFGIDRQGCIDLALGGVKLVRELSAQRPEGEVVFQYSAESFTGTEPDFAVEIVEKVAEAWGATPERRMICNLPATVEMSTPNIYADVIEWFCATVKNRDSLIVSVHPHNDRGTGVAAAELAVMAGADRVEGTLFGNGERTGNVDVVTLALNLYTQGVDPALDLSDIDTVRRTAEHCTGLPVHPRHPYAGELVYTAFSGSHQDAIKKGFAARKKANDPVWEVPYLPIDPADVGRSYEAVIRINSQSGKGGIAAVLERDHGLEIPRPLQIDFARVVQAMADKAGRELDSGEIMAAFSQTYFKDWPLELVEYETHSEGRGASRTISATIRDRGVEKRIEGQGNGPLDAFIHALETGLGRKVKVRDYHEHAIGSGSEAQAACYVEIAGEGGGSVHGAALDSSITMASLKAVVSALNRA

SEQ ID NO: 11877 - protein, 471 aa, Aeropyrum pernix K1
MLVYPQLEHPWIPNSHKAILDEMLEAIGVSSVDDLYRDIPPTILLSPEEWDSLPIGEGRPLSEAEVLARINDILSRNKYFTDPPPFVGGGVWPRYVPSVVKALITRGEFLTAYTPYQAEISQGLMQALFEYQSLVAELLEMEVVNASLYDWSSAVGEAMLMARRVTRRNRVLVPETMNPLHLETATTYAYGGGIRVEKVRVDRETGFIDLEDLESRLSQGDTAALYMEYPSSYTGVIDENVEAAGEAVHKAGGLFILGVEPVSMAILKPPGRLGADIAVGDGQPLGLGLNYGGPYLGVFAVRWDGRLVRQMPGRLIGMTVDAEGRRAFAMILQTREQHIRRAKATSNITTNEALMAIAAAVYLSLLGPQGLREVAEASWYMSHYAAKRLSELRGVEAPLLEGEFIMDFTVRLPMDAGVARRRLLEKGVLAGIPLGGFSFFSDNDMLLTVTEAHTRRHVDLLVNLLDSVLGG

SEQ ID NO: 11878 - protein, 509 aa, Staphylococcus aureus subsp. aureus MSSA476
MSSHIQIFDTTLRDGEQTPGVNFTFDERLRIALQLEKWGVDVIEAGFPASSTGSFKSVQAIAQTLTTTAVCGLARCKKSDIDAVYEATKDAAKPVVHVFIATSPIHLEHKLKMSQEDVLASIKEHVTYAKQLFDVVQFSPEDATRTELPFLVKCVQTAVDAGATVINIPDTVGYSYHDEYAHIFKTLTESVTSSNEIIYSAHCHDDLGMAVSNSLAAIEGGARRIEGTVNGIGERAGNAALEEVALALYVRNDHYGAQTALNLEETKKTSDLISRYAGIRVPRNKAIVGQNAFSHESGIHQDGVLKHRETYEIMTPQLVGVSTTELPLGKLSGKHAFSEKLKALGYGIDKEAQIDLFKQFKAIADKKKSVSDRDIHAIIQGSEHEHQALYKLETLQLQYVSSGLQSAVVVVKDKEGHIYQDSSIGTGSIVAIYNAVDRIFQKETELIDYRINSVTEGTDAQAEVHVNLLIEGKTVNGFGIDHDILQASCKAYVEAHAKFAAENVEKVGN

SEQ ID NO: 11879 - protein, 348 aa, Staphylococcus aureus subsp. aureus MSSA476
MTYNIVALPGDGIGPEILNGSLSLLEIISNKYNFNYQIEHHEFGGASIDTFGEPLTEKTLNACKRADAILLGAIGGPKWTDPNNRPEQGLLKLRKSLNLFANIRPTTVVKGASSLSPLKEERVEGTDLVIVRELTSGIYFGEPRHFNNHEALDSLTYTREEIERIVHVAFKLAASRRGKLTSVDKENVLASSKLWRKVVNEVSQLYPEVTVNHLLVDACSMHLITNPKQFDVIVCENLFGDILSDEASVIPGSLGLSPSASFSNDGPRLYEPIHGSAPDIAGKNVANPFGMILSLAMCLRESLNQPDAADELEQHIYNMIEHGQTTADLGGKLNTTDIFEILSQKLNH

SEQ ID NO: 11880 - protein, 424 aa, Burkholderia mallei ATCC 23344
MAIVEVKVPQLSESVSEATMLQWKKKPGEAVAQDEILIELETDKVVLEVPAPAAGVLAQVLQNDGDTVVADQVIATIDTEAKAGAAAAAAGAADVQSAAAPVAAPAPAAQPAAAASSTAATSPAASKLMAEKGIGAGDVAGSGRDGRITKGDVLSAGSAPKAAPAAAPAKAAAKPALPEVKVPASATTWLNDRPEQRVPMSRLRARIAERLLESQQTNAILTTFNEVNMQPVMDLRAKYKDKFEKEHGVKLGFMSFFVKAAVHALKKFPLVNASIDGNDIVYHGYFDIGIAVGSPRGLVVPILRNADQLSLAEIEKKIAEFGQKAKDGKLSIEEMTGGTFSISNGGVFGSMLSTPIINPPQSAILGVHATKERPVVENGQIVIRPINYLALSYDHRIIDGREAVLSLVAMKDALEDPARLLLDL

SEQ ID NO: 11881 - protein, 117 aa, Triticum aestivum
MARVALLAVFTVLAALAVAEMASGAVTCSDVTSAIAPCMSYATGQASSPSAGCCSGVRTLNGKASTSADRQAACRCLKNLAGSFNGISMGNAANIPGKCGVSVSFPINNNVNCDNLH

SEQ ID NO: 11882 - protein, 299 aa, Ehrlichia ruminantium str. Welgevonden
MNSMNVYVGTRGSILAIAQAMEVKKLLYNYFPDINVQIVHIVTSGDINDKISLSEIGGKGLFLKELEEALLTGTIDLAVHSMKDVPAFYCDSLVIPCILKRSSPYDVFISSKYQSLRSLPDNAVIGTSSIRRKVQLMRLLSSVQVVPIRGNVDTRILKLEAGQYDGIILAKAGLMRINKTHVIKEVLDPQVMLSAVGQGAIGIQCRANDYKMIDMIKILNCKKSYISVAAERSFMKTVNGSCDTPLAALAKYVNSDTLYMSCMLSNEEKTVFSDCYFNECDAEISGINMGNDLMDQLNN

SEQ ID NO: 11883 - protein, 220 aa, Pinus sylvestris
MATCCRAFVGILLVSLMVMNSVHADPEALQDFCVADTKSTIFLNGRPCLNPMEASPEHFMTSALRKPGNLSANPLGFSVIVTTPANMPGLNTLGLSMGRIDMAPGSAIPPHIHPRGSETIFVVRGALNVGFVDTSSRLFSHKLVAGDVFVFPKGTVHYLQNTGKITAFIVSAFNSQNPGTVIVSMATFASTPAIPYEVLSKAFAISVQELSQIRKSLGGN

SEQ ID NO: 11884 - protein, 411 aa, Dechloromonas aromatica RCB
MARRRVVITGLGLISPVGNSVEEGWQNIIAGRSGIAPVTRFDTSTFPVQFAGEVKNFDITQYISAKDARRMDRFIHYGLAAGIQAVRDAGLDKEGAADPERVGVAIGSGIGGLPLIEETKDEYIAGGVRKVSPFFVPGSIINMISGNLSIEYGFKGPNLAIVTACTTGTHSIGEAARIIEYGDADVMVAGGAESTVSPLGMGGFSAARALSTRNDDPTTASRPWDKDRDGFVLGEGAGVLVLEEYEHAKARGAKIYAEVAGYGRSADAYHITAPNMDGPRRSMVNALKNAGIAPSDVQYVNAHGTSTPLGDKNESDAIKAAFGDAAYKIVVNSTKSMTGHLLGGAGGVESLFTVLAIHHQISPPTINIFNQDPECDLDYCANKARPMKIDIALKNNFGFGGTNGSLVFKRV

SEQ ID NO: 11885 - protein, 116 aa, Triticum aestivum
  misc_feature (110)..(110): Xaa can be any naturally occurring amino acid
MARGAATQLVLVAMVAAMLLVASDAAISCGQVTSALSPCISYARGNGANPPAACCSGVRSLAGAFRSTADKQAACKCIKSAAGGLNAGKAAGIPSKCSVSVPYAISSSVXDCSKIS

SEQ ID NO: 11886 - protein, 210 aa, Brassica napus
  misc_feature (158)..(158): Xaa can be any naturally occurring amino acid
  misc_feature (166)..(166): Xaa can be any naturally occurring amino acid
  misc_feature (168)..(168): Xaa can be any naturally occurring amino acid
  misc_feature (177)..(177): Xaa can be any naturally occurring amino acid
  misc_feature (183)..(183): Xaa can be any naturally occurring amino acid
RPTRPGTIGLLSNFMVYLTRVFHLEQVDASNVINIWSGFSNLTPLVGAFISDAYVGRFKTIAFASFATLLGLVTLTLTASLPQLHPETCNSKDPVSCGGPNKLQFGILLLGLGFLSIGSGGIRPCSIPFGVDQFDQRTEEGIKGVASFFTWYYMTFTXVLLITQTXVXVYIQDQVSXWIIGFXSVPTGTMAWCRLCFFARNESFTFYVKT

SEQ ID NO: 11887 - protein, 323 aa, Aquifex aeolicus VF5
MYPVWGTEGSNPSPSAIPAMKIRIGTRKSKLALWQANYVKDFLEKHWGVEVELVKITTTGDKITDVPLAKIGGKGLFVKEIEKALLEGSIDLAVHSLKDVPMVIPKGLKLGAITKRENPYDVLISRSGKKLYELPSGSVIGTSSLRRQVQIKKRRRDLKVEVLRGNVDTRMRKLKEGLYDAVILAYAGVKRMGYESEITEVLEDFIPAVGQGSLAIEIREGDKRIEELIKPLNNEESFLCAIAERTFLRRLEGGCQVPVGAFAKIENGTLKMKAFISDIEAERYIEGYREGNPEEAEKLGLSLAEELLKKGGEEILKEIYSSQ

SEQ ID NO: 11888 - protein, 1423 aa, Streptococcus mutans UA159
MEEETVCKNWFMRKSGKSWIFGCAVFFVLGLATALPVAAEEISQTTAADTAVTEVRTEDSSQTSSQETAVTETTQSEGTASKQLTTPAVADQTTEPTDNEPISSSDGASSPYQVTDTTEPQQTLTPADSEPQAKADVQQAAAPKKEEINPVTNLEDMSHDTNGTWEVREDGIHSNAIGKGDSFLYSQSSGKNFVYATDVTFKQNSGAAALVFRSNNDSNNKNMYAVNVDIGGHKAKFWRWVDNKDIQLIDERDVVPTADNRYTLKVVAVNNWISYYVNDILMASTGDYVLQKADKGQNTVIPEGHFGLLNWNGDMVFQNTKFALLDDTTAPLIDNITVRSDRGNVEKQGQFFSEEPLHIQYVSNDASQVSLDIAKHNPAATVTVEDKTGRVYTDPSHLPVNVGANYFTVKSTVIDSFGRTVTLTYRINVHRRQNDEVYYNELYRDQYHYSVKDGWANDPNGLVYYNGVYHLFHQFYDDTKWGPMHWAHATSTDLIHWKEEPIAFYPDSNGYMFSGCVVVDEHNSSGLFKTAKGGLVAIITANGNGQRMELAYSEDEGKTWQKYDRIVADWSNDPLQNQDFRDPKVFHWNNQWFMVLAGGPLRIYSSNNLKDWKVESTYPDLHTECPDMYPIVANDGVLKWVLSRGGRFYKVGDFKQVDGKWTFIADDAYKDKDQVMNFGKDSYAAMTYYVHDFGTETRPTIPKLTEVNWMNTWEDYCNLVADTVGQDFNGTFNLNLDLGLINENGQYILTQTPVKAYDSLRDVNTALHFKDVTVDANNTLLKDFKGDSYEIVSHFRPDEKTTKVGFNLRVGNGQATKVIYDLQTETLSIDRSQSGTILSAAFAKVNSQHVTKNADGSIDLHIYVDRASVEVFSKNNTVAGANQIFPNPEAVGASIIVEGGKAQADISVYQMKTIWTDKKDTAKPVAMNTTTAKELALQVGQSQDLQVYLAPASVRQDVEWTISDPSLVRTSQKGNVLHLTAVKKGKLTITAISKENPSLSKTFTISITLNNFKTNLKGLQSVTGKWYVDDETLYDSNTSSNDYYMASQKPGFKEYDYDIDLKYQRGLINLFVASGNIDPSQAYSVQFGDSETVRLYRFAGDTIAEANMGKRINDDQYHHIKVTKTKNSIIISVDGQEVMSHNFDQVDSYFNDAYVGLGLWDGAVEFQNFFVTDHATTPKPDSDPTPQPDAPEALAQERELIDPATGVRVILQKGELASIVRVKVSHIETNDAHTPAVLNAKDYDLFNITPIDKNEKVVAITKPATVLLPIDAGKVVDKVVYLPNTDKEENLPFTIVSLTDSNGKKQSYVRFTAEHFSEYGLVYQAENQTNLKSKEKQDNVAISYPLNLEQEVKVSSISRKYAANKTADVNSVQQTEPSVMSSSPKATLPDTGDHKTDLSQLGVLAMIGSFLVEIAGYFKKRKD

SEQ ID NO: 11889 - protein, 260 aa, Anaplasma marginale str. St. Maries
MTGLHLERRDLRAIMRESRVCWLVVLLAKKEDFLKTPNGGPEAAKGVVVSASILSADFANLSASVAAVEAAGVDWLHVDVMDGCFVPNLTVGPVVIAGIKKCTRLVLDVHLMVQTPALHLRSVIDAGADIITVHAESDVHLYRFVREVKSHGKKVGVSLVPKTHHSALEYVIHELDLVLVMSVDPGFAGQEFLTSQLRKIEKIRTMVEKYSLPTKISVDGGVTTENVGSIVNAGADVVVVGTSLFKSANMYKVVQALKSF

SEQ ID NO: 11890 - protein, 39 aa, Zea mays
IHPQALSNGRPTVVEFYADWCEVCRELAPDIYKVEQQYK

SEQ ID NO: 11891 - protein, 519 aa, Streptococcus mutans UA159
MLKKKLVCLLIGLIAFLGSLKIYAGSSESAEYQQTNHYNTPKGFMNDIQTIFKGSDGYYHMYYLLNSNYKLANDGTEWYHVRTKDWEHFENLGVAIPKFVNGWSAVATGSIFQNSNQFFKDLPTSAIVAYFTSYTDTGQHQYVAYSLDNGSSYQPYNNGKPVMISQTKEQNARDPYIWYDSNSKRLMMYLAEGDKIGIYASSDGKNWAYQGATVLNQYTLGGKDLGLVECPNLKTFYDSATNTTKHVLFFGANGYQYGSTTGTYYMIGHLDTQGNFVPEQNAERLDQGSDYYGANFYQESDCVVKSIAWMGNWDYLQGQILDDQGQESKHLGSVSSARDITMVKRDDKYVLESYLKNNNSRTNTVSYQSNADTAKLADDGYHKTLLSVSRWHSQELSLKFQANAATLNGHIRLIFKQADAQVSLDYNTDNGYYEVKRTSSKIIGSQKVNYERSYVVDSHWNGQKELNIYLVADKSSLEFALPNGQTYSMVKLSTASDMDIVIETSGSNRLQADLANLET

SEQ ID NO: 11892 - protein, 156 aa, Haemophilus influenzae
NRANTPVLVDGKDVMPEVNTVLAKMKDFCQRIISGKWKGYTGKAITDVVNIGIGGSDLGPYMVTEALRPYKNHLNMHFISNVDGTHIAETLKKINPETTLFLVASKTFTTQETMRNAQSARDWLLKAAKDESAVAKHFAALSTNAKDVEKFGIDTN

SEQ ID NO: 11893 - protein, 169 aa, Nicotiana tabacum
MSHYDNQFSAGQALQTDEYGNPIRQTDEYGNPVHHTGGTMGDYGTTGTGGAYGTHAGGGAGHTTGILGGEHRPGHEHGTLGGMLHRSGSSSSSSSSSEDDGQGGRRKKKGMKEKIKEKLPGGHKDDQTHSTATTTTTGYGMEGEHHHEKKGIMDKIKEKLPGHHGPGHH

SEQ ID NO: 11894 - protein, 482 aa, Clostridium perfringens str. 13
MNTKENIFYNFMGGNFYENKSDKLIDIKSPLDGSLVGRIQSLSKEDVDKIIDNAEKAQKSWNEVPLNERAHVLYKTADLLEEHKEELANIMIREVAKDKKSALSEVSRTADYIRFTADAAKSMDGESIPSDNFPGFNRSKISVVTREPLGVVLAISPFNYPVNLSASKIAPAIVAGNSVVLKPATQGSLSALFLAKMFHDAGLPGGVLNTVTGRGSEIGDYCVTHDKIDFINFTGSTEVGRRISEITVMKPLLMELGGKDAAIVLEDADLDLTVNNIIAGGYSYSGQRCTAVKRILVMNSVADKLVEKLKEKISKLKMGNPLEVEDVTIVPLIDNKAADFVMELIDDAKEKGATLVCGGHREGNLIEATLFDNVTTDMRLAWEEPFGPVLPIIRINDKDEAIKIANASKYGLQSSVFTRDINEAFYIANKLEVGTVHVNNKTERGPDHFPFLGVKSSGMGTQGIRYSIEAMSRPKATVITIR

SEQ ID NO: 11895 - protein, 334 aa, Coxiella burnetii RSA 493
MSFNIAINGYGRIGRNILRALYESGKNKDLKIVGINDLGDIKTNAHLTKYDSVHGRFSGEVGVSGNSLVINGDKIEVCAIRNPEELPWRNLEVDLVLECTGLFTSKEKAEAHLKAGAKKVLISAPAGNDVKTIVFGVNENIISSDDEIISNASCTTNCLAPLVKVLNDEIGIERGLMVTVHAYTNDQNLTDSYHKDLHRARAATQSMIPTKTGAAAAVGLVLPELDGKLDGYAIRVPTINVSVIDFTFDAKKLVSASDVNAMMKKAAQGKMKGVLGYNDEPLVSIDFNHDPHSSVFDAGQTRVIDQLVKVVSWYDNEWGFSNRMLDTALAFLKA

SEQ ID NO: 11896 - protein, 312 aa, Clostridium perfringens str. 13
MDKEIKELDLIIIGAGPAGLTSAIYASRAKLSTLVLEDNLVGGQVRSTYTVENYPGFTEITGNDLADRIQAQAEACGAIIDEFDFIENVSLKDDEKIIETGDYIYKPKAVIIATGATPKKLPIPSESKYLGKGVHYCAVCDGAVYQDEVVAVVGGGNAALEEALYLSNIVKKVIVIRRYDYFRAEAKTLEAASNKENIEIMYNWDLVDVLGGEFVEAARIKNTKTGEEKEIAINGVFGYIGTEPKTSMFREYINVKENGYIEGDENMRTNVKGVYVAGDVREKMFRQITTAVSDGTIAALHAEKYISEIKER

SEQ ID NO: 11897 - protein, 161 aa, Yarrowia lipolytica CLIB122
MLSRSLRQLSQPSVRSFATSARLLQKKDVPEVGVNLDNVPAHEIVSGAPAELSRNRVVRIYQQAKPATQSGEYGTFAWRLDWDIVDVANRWENDLIGWQSSGDYMQATQMKFTSKESAIKFANKQGWDFYIQEPHHRKFRVKQYANNFVHSYGKLKHIRTK

SEQ ID NO: 11898 - protein, 444 aa, delta proteobacterium MLMS-1
MEKVTEFMKVVTDKNPGESEFHQAVLEVVETLMPFIEDNPKYQETKILERMVEPERVIIFRVPWVDDKGEVQINRGYRIQMNSAIGPYKGGLRFHPSVNLSILKFLAFEQVFKNSLTTLPMGGGKGGSDFDPKGKSDNEVMRFCQSFMTELYRHIGAETDVPAGDIGVGGREIGFMFGQYRKITNEFTGVLTGKSRNWGGSLIRPEATGYGAVFFAEEMFKVRGDSLAGKTCIVSGSGNVAQYTIEKVNQLGGKCVTLSDSAGFIHDPEGIDDEKLAYVMELKNVKRGRISEYAEKYGCKYYPGERPWKIPGDVAFPSATQNEIDAQDAETLVAGGCTCVSEGANMPSTSEAVRIFLKAKIMYGPGKAANAGGVATSGLEMSQNSLKLSWPREEVEERLRQIMEGIHEACYKYGKEGDFVNYVKGANIAGFVKVADAMIEQGVI

SEQ ID NO: 11899 - protein, 232 aa, Triticum aestivum
MAVSELEVDGVVFPPFARPPGSEHAHFLAGAGVRGMEIGGNFIKFTAIGVYLQADAAVSALAAKWAGKPAADLASDAAFFRDVVTGEFEKFTRVTMILPLTGAQYSDKVTENCVAYWKATGVYTDAEAAAVDKFKEAFGPHSFAPGASILFTHSPAGLLTVAFSKDSSVPESGGVAIDNARLCEAVLESIIGEHGVSPAAKLSLGHQGRRAAGGGPPSPGGEPAPEAVSVSV

SEQ ID NO: 11900 - protein, 323 aa, Pyrobaculum aerophilum str. IM2
MIIATTTVNFAYLTGVWLETYERFKAVVKCGDYIAVVVPALDAERVGGRVYSYRDGEDPAVVLKDAARGCESQVVYVDGGTTLRHFEIIKRAFPGAELRLADDLFRQMRAIKREEEVEKIKRAVEEIRRVLEALELAPGVSEREAAFFIYKALYEAGLEPGPILVQFGQNTSLPHQEPTGKKLQRGEAVVLDVTASYRGYFGDLTKSFYYGEPPAHYAEVYRLVEEAQLSALKAARPGALASDVDKAARSVIETRGYGRYFIHRTGHGLGLELHEAPDISPGSGDLLQPGMVFTIEPGVYIPGKYGVRLEIDVVVREKGAEIL

SEQ ID NO: 11901 - protein, 449 aa, Haemophilus influenzae R2846
MSKVASLDAFLTKVAQRDGYQPEFLQAVREVFTSIWPFLEANPKYRSEALLERLVEPERAFQFRVAWTDDKGQVQVNRAFRVQFNSAIGPFKGGMRFHPSVNLSILKFLGFEQIFKNALTTLPMGGAKGGSDFDPKGKSDAEVMRFCQALMTELYRHVGADTDVPAGDIGVGGREVGYLAGYMKKLSNQSACVFTGRGLSFGGSLIRPEATGYGLVYFAQAMLAEKGDSFAGKVVSVSGSGNVAQYAIEKALSLGAKVVTCSDSSGYVYDPNGFTTEKLAALFDIKNTKRGRVKDYAEQFGLQYFEGKRPWEVQVDIALPCATQNELELSDAQRLIKNGVKLVAEGANMPTTIEATEALLAADVLFGPGKAANAGGVATSGLEMAQSSQRLYWTAEEVDAQLHRIMLDIHANCKKYGTIEGQENINYVVGANVAGFVKVADAMLAQGVY

SEQ ID NO: 11902 - protein, 530 aa, Synechococcus sp. WH 5701
MIVVVDDENRENEGDLICAAQFATPEQINFMATEARGLICLAMEGERLDALELPLMVDRNTDSNQTAFTVSVDAGPENGVSTGISADDRARTIQVAIHPASRPADLRRPGHIFPLRARQGGVLKRAGHTEAAVDLARLSGLYPAGVICEIQNPDGSMARLPQLASYARRHGLRLINIADLISYRLETERFVRRQAEAEMPSAFGQFRAIGYRNELDDSEHVAIVKGHPELASGPVLVRVHSECLTGDAFGSLRCDCRPQLEAALRMIEAAGEGVVVYLRQEGRGIGLINKLKAYSLQDGGLDTVEANERLGFPADLRNYGVGAQILSDLGVHHLRLITNNPRKIAGLGGYGLRVEDRVPLVMDPGQHNAAYLLTKQTKLGHLMHSGPAREHTGAGGPTAVISWSATTMAPEQAEAEHWPQLRQWASQRGLELLREEHPRLLALLGQPQLALLLAQQAGGDQRLAEADLLSALTLMAGWAGTRAVSLLLSPDAQRSAHPSSTLEPERRPLQELTQVSPQLVTTPGAFVRWG

SEQ ID NO: 11903 - protein, 1049 aa, delta proteobacterium MLMS-1
MISQLFQWRSLKTRVTVFTLIIFVIGIWSLYFYASRILRSDMEKLLGENQLSTVSILAAGINEELRARLTGLEQLAKQIDAPLIANPVALQAFLEPRLFLQDLFNGGVLVTGSDGVSLASVPISIDGVSRIGVSYMDREFFISALREGKSVIGKPVMGKVLKLPIVVMAVPILDAQGKVVGALAGVINLGLPNFLDKITDSDYGKTGGFLLIAPQHQLFVTATDRSRIMQPLPAPGLNAMHDRYMQGYTGFGLSISSRGVLELSAAKDIPAAGWFIVAVLPAQEAFAPIREMQQRILWATLLLTLLAGGITWWMLRRELAPMLETAKILGEMAASNKPLQALTITRQDETGQLIGGFNRLLEALAQRDVALRKSEASFRAVFDSMEEGIYIADPESYELLHINENFKQIFGKDAIGQKCYRVLQNRESPCPFCTNDKIFGDHLGQSYVWEFQNEVNKEWYRCSDKAIRWPDGRMVRLEVAVNITKRKQAEEELLQANEQLENATARANELAVQAEAANHAKSEFLANMSHEIRTPMNGFIGMTMLLLDTELTEEQRQYAGIVKSSGESLLVLINDILDFSKIEAGKLEIETLDFDLQSLLDDFAATTAFKTHDKGLELLCAAEPDVPVQLSGDPGRLRQILTNLVGNALKFTEKGEVAIRVKTVGEACQTGQTSLNDDASLLLRFSVRDTGIGIPADKIGMLFQQFTQVDASTTRKYGGTGLGLAISKHLAEMMGGEIGVESVEGQGSEFWFTARLGLRSQAASGQTPPIATCHTAREALPDFTHRKARILLAEDNITNQQVAQGILKKLGLSADAVANGREAIEALKTLPYDLVLMDVQMPEMDGLEATRQIRNPKSPIPNRNIPIIAMTAHAMQGDREKFLAAGMNDYVAKPVSPQDLAEALEKWLPELEERGQGSEVRSQGAEVRSQGSEDGKRASLPIWDKVGMLSRIMDDEELAAKIIRVFLDDLPRQILALEAFLASGDVEGIQRQAHTIKGASANMGGEALRAVAFEMEKAGKAGDLDTVRKQMEELIAAFDRLRQEMEKTI

SEQ ID NO: 11904 - protein, 294 aa, Zea mays
SARARVFTQKIHDLIGTHTDVPAPDMGTNAQTMAWMLDEYSKFHGHSPAVVTGKPIDLGGSLGRDAATGRGVMYATEALLAEYGKCISGSTFVIQGFGNVGSWAARLIHEKGGKIIAIGDVTGSIRNTAGIDIPALVKHRNEGHAMKDFDGAEVLDSTELLVHDCDVLVPCALGGVLNKDNAPDVKAKFVIEAANHPTDPDADEILAKKGVVVLPDIYANSGGVVVSYFEWVQNIQGFMWDEEKVNDELEKYMSSAFQHLKAMCKSLDCDLRMGAFTLGVNRVARATLLRGWEA

SEQ ID NO: 11905 - protein, 244 aa, Nicotiana tabacum
MESITIENYVFPSTMVNPPGSTNTFFLAGAGNRGLEIEGKFVKFTAIGVYLEESALPFLAAKWKSKSSEELANSLDFFRDIVTGPFEKFTRVTMILPLTGKQYSEKVAENCVAHWKAIGTYTDAESQAIEKLLNIFQNETFPPGASILFTQSPVGALTISFIKDDSITGTGNAVIENKQLSEAVLESIIGKHGVSPAAKCSIAERVSGLFKKSYADASVFEKPGIEKSSDPVIEEKPTIPEIGV

SEQ ID NO: 11906 - protein, 491 aa, Synechococcus elongatus PCC 7942
MPRGVAPAFAGRKPKGWAWASTAVPDFQGGFKRLINRFQGSKLWLACVPLAATIAVFWGVAANAQGSADPVPSAQFLVNNLWLMVATVLVIFMNAGFAMVETGLCRQKNAVNVLAKNLIVFTLAATAYWFIGYSLMYGSPVVDGFLYFGKGGPLGFFFDPTVSAETIKNDGLISSLDFLFQAAFAGTAATIVSGSVAERIKFVDFIIFSLILTAVIYPIAGSWQWNVGSGWLNKAGFIDFAGSTVVHSVGGWAALIGAITLGPRMGKFQDGPPGALTGHNLAIATLGALILWIGWYGFNGGSVLAFNTAVPYVAVTTTLGGAAGGISATITSWSTSGKPDLSMVINGILAGLVGVTAGCDGFGMGGSFIVGLIAGVLVVFSVYTFENLKIDDPVGACSVHLVCGIWGTLAVGLFNLEKGLFYGGGFGQLGSQILGIISYGVWTVVASVIIWNILKALLGLRVSLKKSYKAWILANTGWKPTLALPRMHLTP

SEQ ID NO: 11907 - protein, 498 aa, Mesorhizobium loti MAFF303099
MIEYGHFIGGKRVAGTSGRKQDVMQPMDGSVRGTVALASQAELRAAVENAKAAQPKWAATNPQRRVRVLMKFLELVARDYDELADILAREHGKTIADAKGDIQRGLEVVEVCIGAPHMMKGEFTDGAGPGIDVYSMRQPLGVVAGITPFNFPAMIPLWKIAPAIACGNAFILKPSERDPGVPIRIAELFLEAGLPAGILNVVNGDKEVVDAILDDPDIKAVGFVGSTPIAHYIYSRGTAAGKRVQCFGGAKNHMIIMPDADMDQTVDALIGAGYGSAGERCMAISVAVPVGNDTANRLMEKLIPRVESLKVGPSTDSAADFGPLVTAQALERVKGYVDTGVKEGATLVVDGRGFKMQGYEDGYYMGGCLFDNVTADMRIYKEEIFGPVLSVVRAPTYESAIKLANDHEMGNGVAIFTRDGDAARDFASRVQVGMVGVNVPIPVPIAYYTFGGWKASSFGDLNQHGPDAFRFYTKTKTVTSRWPSGIKDGAEFVIPTMN

SEQ ID NO: 11908 - protein, 327 aa, Crocosphaera watsonii WH 8501
MAETLLFNALRQAIDEEMGRDETVFVLGEDVGHYGGSYKVTKDLAKKYGDLRVLDTPIAENSFTGMAVGAAMTGLRPIIEGMNMGFLLLAFNQIANNAGMLRYTSGGNFKIPMVIRGPGGVGRQLGAEHSQRLEAYFHAVPGLKIVACSTPYNSKGLLKAAIRDENPVLFFEHVLLYNLKENLPDGEYIVPLDKAEIVRKGKDVTILTYSRMRHHCLQALKEMEAQGYDPEIIDLISLKPFDLQTIGESIRKTHRVIIVEECMKTGGIAAELIALINDNFFDELDAPVIRLSSQDIPTPYNGMLERLTIVQPPQIAEAVDKLMTLHI

SEQ ID NO: 11909 - protein, 485 aa, Pseudomonas syringae pv. tomato str. DC3000
MLKNQLKDPSLLVDRAYVDGQWISADDGATLAISDPATGEVIAQVPALQGAETRRAIEAADRAWPAWRARPAAERAALLERWHQAMLDNVEDLALIMTLEQGKPLNESRGEIRYGASFVKWFAEEARRSYGETIPTPSADRRLMTLKQPVGVCAAITPWNFPNAMITRKCAPALAAGCTIIVKPSDLTPLSALALAVLAERAGIPVGVFSVVTGMPTAIGEELTGNPVVRKISFTGSTPIGRLLMRQSAEHIKRLSLELGGNAPFIVFDDADLEQAVAGIMLSKFRNAGQTCVCANRILVQSGIYDRFAARLVEEVAKLKVGNGLEEGVTIGPLINPAAVSKIARHIDDALSQGAKLLYGGLPNGDGQFVQPTVLGDTHAGMLLANEETFGPVAPLMRFTDEAEALALANATPYGLAAYYFTQDLRRSWRFGEALEFGMVGLNTGIISMEIAPFGGIKQSGLGREGSSYGLDEYLEVKAFHVGGL

SEQ ID NO: 11910 - protein, 897 aa, Haemophilus somnus 129PT
MGISTPSNKFVIFLSEDLMPQKYSTLKNNINMLGHFLGETISDAQGSDILDLIENIRVLSRDSRSGDEKAREKLLDTLSTISNENIIPVARAFSQFLNLTNIAEQYQTISRKHIDQVASDRSLEALFERLKAQNVPAEKVISTVEKLLIELVLTAHPTEVTRRSLLHKYVEINRCLSRLEHDDLTQSESTKLKRRLMQLIALAWHTNEIRTQRPTPVDEAKWGIAVIENSLWKAVPDFCRQLNLHLEKNFGVQHSVNLAPVKFSSWIGGDRDGNPFVTAETTRQVLIMNRWKAAELFLADIQVLSEELSVVHCTEEFRAKYGDHLEPYRVVVKNLRAKLVKTVAYYGEILENKPSTINTNDILTDDQQLWEPLYDCYQSLHQCGMRIIANGILLDCLRRIRCFGLSLSHLDIRQESLRHTKALSEITRYIGLGDYSQWMEDDKQAFLIRELSSRRPLLPRNWTPSLETQEILETCRVIAQQPEGVISCYIISMARTASDVLAVHLLLKEAGVTYYLPVVPLFETLDDLNASKEVMTQLFNVGWYRGVINNKQMVMIGYSDSAKDAGMMAASWAQYRAQEQLVNLCEKMGVELTLFHGRGGTIGRGGAPAHAALLSQPPRSLKNGLRVTEQGEMIRFKLGLPAVAVNSFDLYASAILEANLLPPPEPKESWRAIMNELSDSSCNIYRSVVRGDKDFVPYFRSATPEQELSKLPLGSRPSKRNPNGGVESLRAIPWIFAWMQNRLMLPAWLGASASIRQSIEKGNKETIEEMCKNWPFFSTRIGMLEMVFSKTDTWLSEHYDLNLVKKELWYLGQSLREQLQADIKTILSLSHEDELMSDLPWIAESIALRNIYTDPLNLLQVELLRRLRENPENPNPDVEQALMITITGIAAGMRNTG

SEQ ID NO: 11911 - protein, 262 aa, Bordetella pertussis Tohama I
MTYQDILFELAGGVARLTLNRPDKLNSFTARMHCEVADALGRIEREGARVLVLTGAGRGFCAGQDLSERRPTADGAPLDLGETVEKFYGPLVRRLAALPLPVVVGVNGVAAGAGANLALAGDIVIARESASFIQSFCRLGLIPDTGGTFALPRLVGRARAAGLALLGNKLSARQAQDWGLIWQCVADDEFDSALDGLAAHFAQAPTKGLAFTKRALQASLGNDLSTQLDLERDMMRELGRSADYAEGVAAFLDKREPQFKGK

SEQ ID NO: 11912 - protein, 590 aa, Cryptococcus neoformans var. neoformans B-3501A
MSSTPSQLDKDTGLSKFVENAHEIETIEDTGVPPIKPSGFGGHLIDENLVKVEGEDKVTPYLCFLISASAIAGFLFGYDTGVVGVALPLVGTDLGGSVLSSSQQEIITAGTTIGAIFGSAILGGWGDRLGRKVAILIADFFFTVGAVLIAASYSVPQMIVGRIVLGVGVGGAAAIAPLFITETAPTAVRGRCIGVNAFFIPFGQVVSEAIGAGVQDMKNGWRLLFALGAVPSLVQLVLFHYLPESPRILILRGQTDRARHVFSSIYPNATPEMIDYKFRVAQEYVAATTALQSGTTYWQRAKTLFTKGSYRRSIVTVSLIQMAGQLSGFNTLLYYAGTLFGLLGLTNPALGGLIPAGTNAFFVLVGMTLVDKVGRRGLLMFGVPIMLAGLVWNIVAFHYLCIPTGGLLDTSYTYDTKLVGIVIGGIVFFTTGFGLTYSHLAWYQSEFLALEVRSVGSGIATTANWVANLVVSVSYLTELETLTPSGTYGLYLGFSVVFFIFAIFCYPETKQLSIDETSLLFEEDWGVKRSRQMRRERREAQRRLADSEMTEVVTAHVQAQKQKGSAVTRSELDNFMARLKNGGRRLSVPQ

SEQ ID NO: 11913 - protein, 156 aa, Haemophilus influenzae
NRTNTPVLVDGKDVMPEVNTVLAKMKDFCQRIISGEWKGYTGKAITDVVNIGIGGSDLGPYMVTEALRPYKNHLNMHFVSNVDGTHIAETLKKVNPETTLFLVASKTFTTQETMTNAQSARDWLLKAAKDESAVAKHFAALSTNAKDVEKFGIDTN

SEQ ID NO: 11914 - protein, 357 aa, Burkholderia vietnamiensis G4
MDGAALYEALAAAEPDPSRRDVFMQLAEAEHEHAEIWHAKLQQRGVDVATTRPTFKTRALRMLIRSFGPRFVLPALAAAEFADRDKYATQTDAGALSADESTHAAVVAAVARSNPSGGVKGSDIARAESWHRGWSGNDLRAAVLGANDGLVSNFCLVMGVAGAGASNKTILLTGLAGLIAGASSMALGEWLSVTNARELAQTQIARESEELERTPKAELRELALIYQAKGLDRDDAHRVAEEMMRNRDKALDTLTREELGLDPEELGGNPWRAAGTSFGLFALGAIFPAVPFFWSHGLVGIGISVSFSVLCLTVIGVVTSLFNGRSPWFSVIRQIVIGCVAAAFTYGAGALLGVSMS

SEQ ID NO: 11915 - protein, 322 aa, Yarrowia lipolytica CLIB122
MTNMEPITYPSEVFSRLVPDLYLHRHLNQGLRPATNRAFTQHRKINHFLGGLKKPVGSDEKSASLVWGSSLIQADGMSIVCGVTGSVSEEEGGIFVNVEVLRGANGSSAAMGGPPSDEEQVVSRKTTDLLKKGIFSCKANKQFFELQNFLKEGQEDEAVFDAGQHQKRYLCLHANVTVLSRNGPVQDYVWAAVLAALKDTEIPLMEIDEDTGRITLTHDFTTIPVDDLDIHSSRSFGFIKPKPETDAYEDDEMDTSEDAASVLLADVQGEVEQAATSSTREGSRLQIVRGREDTLIGFSFVGKGTGVGLNEIKNALDLSKQE

SEQ ID NO: 11916 - protein, 383 aa, Salmonella typhimurium LT2
MFEPMELTNDAVIKVIGVGGGGGNAVEHMVRERIEGVEFFAVNTDAQALRKTAVGQTIQIGSGITKGLGAGANPEVGRNAADEDREALRAALEGADMVFIAAGMGGGTGTGAAPVVAEVAKDLGILTVAVVTKPFNFEGKKRMAFAEQGITELSKHVDSLITIPNDKLLKVLGRGISLLDAFGAANDVLKGAVQGIAELITRPGLMNVDFADVRTVMSEMGYAMMGSGVASGEDRAEEAAEMAISSPLLEDIDLSGARGVLVNITAGFDLRLDEFETVGNTIRAFASDNATVVIGTSLDPDMNDELRVTVVATGIGMDKRPEITLVTNKQVQQPVLDRYQQHGMAPLTQEQKTVAKVVNDNTPQAAKEPDYLDIPAFLRKQAD

SEQ ID NO: 11917 - protein, 485 aa, Cryptococcus neoformans var. neoformans B-3501A
MMHASKHKMGFSDFRDAILIQPPSFKKKKEYVLEELLGRGGFGKVVKALWTPPEREPKEVALKIINKKLVKGNEQAVLDEISVLKHLDHPNIVHVWDDFESRDKYYIAFELAVGGELFDRISERGKFTERDAVECIRQVLQATAYLHEHNVAHRDLKPENILYKTRDADSPLVIADFGIAKHLETPDQECSEAAGSFGYAAPEVLLGKPHGMKVDCWSIGIIAYTLLCGYPPFRSDDRNGLLQEMTRGRIMFHDRYWSKVSRTAKDFVKDMLETDPKKRSTAADALNHPWLTSGQATETDLSAAIRDNFDAKRKWKSALRIIQASNRIRSASRSRSPSLSTSPPSTANTANPSPNSALFVPEVPHVLTPLSMTDEDPMSDEHYYFSADDQGHTEEEEEAKVMTRGGKKKAGSMPVGSGSGVTTGTVTPYTTGNEGSNTPKPTIKVIDGNGELRPEETDMQTPPATAPVGAGMMGSIRGMMGKLSL

SEQ ID NO: 11918 - protein, 592 aa, Daucus carota
MGVTIRNRNYDHGSLPFLQSLLAILLVTTTTLHINGVEAFHEIHYNLQSVGAENVKQVHRTGYHFQPKQNWINDPNGPMYYKGVYHLFYQYNPKGAVWGNIVWAHSVSTDLINWTPLEPAIFPSKPFDKYGCWSGSATILPGNKPVILYTGIVEGPPKNVQVQNYAIPANLSDPYLRKWIKPDNNPLVVANNGENATAFRDPTTAWLDKSGHWKMLVGSKRNRRGIAYLYRSKDFIKWTKAKHPIHSQANTGMWECPDFFPVSLKGLNGLDTSVTGESVKHVLKVSLDLTRYEYYTVGTYLTDKDRYIPDNTSVDGWAGLRYDYGNFYASKTFFDPSKNRRILWGWANESDSTAHDVAKGWAGIQLIPRTLWLDPSGKQLMQWPIEELETLRGSKVKFSRKQDLSKGILVEVKGITAAQADVEVTFSFKSLAKREPFDPKWLEYDAEKICSLKGSTVQGGVGPFGLLTLASEKLEEYTPVFFRVFKVQNTHKVLMCSDATRSSLKEGLYRPSFAGFVDVDLATDKKISLRSLIDNSVVESFGAKGKTCISSRVYPTLAVYENAHLYVFNNGSETITVENLDAWSMKKPLRMN

SEQ ID NO: 11919 - protein, 559 aa, Acidobacteria bacterium Ellin345
MSTWPIPSNPDATTDIFPTLAESEIDRLRAFGKIRQGRSGDILFEPNTPNIPFFVVLSGEMEIVQPTSEGERSIVVHTPGHFTGELNMISGQRSLVRARISKPGEILEITPDALRSIINSDAKLSEVFMRAFILRRVALVRAGYGNVVVLGSRYSATTLHIREFLGRNGYPYTYMDLDTDKGAQEMLDAFKVTTKCIPVVICNGRTVMRNPSTTALANCLGFNSSVDTKQLRDVVVIGGGPSGLAAAVYGASEGLDTLVIESEAPGGQAGSSSKIENYLGFPTGVSGQELASRALTQAQKFGAKMLIANQVVGVRCDERPYEVLLEDGSRIATRAIVIASGAHYNKPNIPNLKQFEGNGVYYGATFLESQLCGEEEVIVVGGGNSAGQAAVYLSQTARKVHMLVRSGNLSDTMSRYLIQRIEENPRIDLRIRTEIAAMHGENHLESVEWINRESNTVESHDIRHVFIMAGASPRTEWLQGCLEMDDKGFILTGRDLDPVNGNGHLSKWPLRREPYMLETSLPGVFAVGDVRANNVKRVASAVGEGSIAISLVHRVLPEL

SEQ ID NO: 11920 - protein, 119 aa, Vibrio sp. S14
YTKMKNKEQRFHSIMDIYAFRVLVSDLDTCYRVLGQVHNLYKPRPSRMKDYIAIPKANGYQSLTTSLVGPHGVPVEVQIRTEDMDQMADKAVAAHWTYKDGESSGTTAQVKAQPLDAKL

SEQ ID NO: 11921 - protein, 184 aa, Oryza sativa
MSSQETGLPQGWEVRRSNTKNLPYYFHADTKDSRWEPPAGTNPEQLKQYMAQHHSSKGVAPANFAHSGDKIRVAHLLVKHRESRRPASWREPNITRTKDRANEMIKEYQAQIQDFEEGKGGKSLSELATTESDCSSARKGGDLGFFGRGDMQKEFENAAFALQKGEISQPVHTASGVHLIQRLE

SEQ ID NO: 11922 - protein, 136 aa, Glycine max
DESVQIEVQPNGTLADDTGLTSNVFSMDNNEFDSDSPSAGFASIPEAIEDIRQGKMVVVVDDEDRENEGDLIMAAQLATPDAMAFIVKHGTGIVCVSMKEEDLDRLELPLMVNSKDNDEKLCTAFTVTVVCTTFLP

SEQ ID NO: 11923 - protein, 426 aa, Colwellia psychrerythraea 34H
MEQNIFQLQYALDTFYFLICGALVMWMAAGFSMLEAGLVRAKNTTEILTKNVALYAIACIMYLVVGYDIMYGGGVFLNGIALDGASDAEALVGAVLAESAEAGFDGGAVYSNASDFFFQVVFVATAMSIVSGAVAERMKLWAFLAFTVVLTGFIYPMEGSWTWNGDAVFGLYTLGDLGFSDFAGSGIVHMAGASAALAGVLLLGARKGKYSKDGKVNAIPGANLPMATLGTFILWMGWFGFNGGSVLKLADINSANSVAMVFLNTNAAAAAGAISALIFAKILFKKADLTMTLNGALAGLVAITAEPSTPSPLQATIFGAIAGVIVVMSILALDKVKIDDPVGAISVHGVVGFFGLMIVPITNSSSSFSGQLIGAATIFVWVFVTSFIVWFALKKVIGIRVSAEEEYEGVDISDCGMEAYPEFTRG

SEQ ID NO: 11924 - protein, 577 aa, Bacillus anthracis str. 'Ames Ancestor'
MNRGRDVMSKFTVASNGSLETTLRGVEVLSTPLLNKGVAFTQEEREELGLKGLLPPAVLTLEEQARRAYEQFCSQPDDLLKNVYLTALHDRNEVLFYRILTDHLREMLPIVYTPTVGVAIQRYSHEYRKPRGVYLSINDPSGIEEAFANIGATAENIDLVVVTDGEGILGIGDWGVGGINIAIGKLAVYTAAVGIDPSRVLPVILDVGTNREELLNNPFYIGNRHPRITGEAYDEFIDTFVQAVNKQFPKALLHWEDFSSRNARKILDKYRHDICTFNDDIQGTGAVSLAAVLSAVKASGVPLSEHRVVVFGAGTAGIGIADQVRDAMVRVGVSEEESYKRFWCIDRNGLVTDNMEDLLDFQIPYARKEAEVSEWKENGVIGLAEVVKHVKPTILIGTSTVAGAFKEEIIKEMASHVERPIILPMSNPTPLAEAKPADLIEWTEGRALVATGSPFEPVTYNGVTYVIGQSNNALIFPGLGLGTIVVRASVMTDGMFAAAAEAVASMVDTSQPGAPILPEVEELRNISEMVAIEVAKVAVAEGVARENFSDNDIKIAVKEAIWEPEYRQIKAVEKVTI

SEQ ID NO: 11925 - protein, 581 aa, Zea mays
MADEAKAKGNAAFSAGRFEEAARHFTDAIALAPGNHVLYSNRSAALASLHRYSDALADAQKTVELKPDWAKGYSRLGAAHLGLGDAASAVAAYEKGLALDPSNEGLKAGLEDAKKAAAAPPRRGPSGPDAIGQMFQGPELWSKIASDPTTRAYLNEPDFMQMLREVQRNPSSISMYLSDPRMMQVLSLMLNVKIQRPEASEPSQSTPPPPPQQQQQQTSPLQTKAREVEPEPEPEPMDFTDEEKERKERKAAAQKEKELGNTAYKKKDFEAAIQHYTKALELDDEDISYLTNRAAVYIEMGKYDECIKDCDKAVERGRELRADFKMISRALTRKGTALVKLAKTSKDFDIAIETYQKALTEHRNPDTLKKLNEAERAKKELEQQEYYDPKLADEEREKGNEFFKEQKYPEAIKHYTEALKRNPKDPRVYSNRAACYTKLGAMPEGLKDAEKCLELDPTFTKGYTRKGAIQFFMKEYDKAMETYQAGLKHDPKNQELLDGVRRCIEQINKANRGEISQDELQERQNKAMQDPEIQNILTDPIMRQVLNDFQENPRAAQEHLKNPGVMQKIQKLVSAGIVQMR

SEQ ID NO: 11926 - protein, 314 aa, Streptomyces avermitilis MA-4680
MSGMSALELIRIVSRDSPMALAQVARVRAELAALHPRTRTEVVAVKTTGDKWMGDLSKVDGKGAFTKEVDAALLAGEADLAVHCVKDVPADRPLPAGTMFAAFLKRDDIRDALVHPGGLTLDELPPGTRIGTSSVRRVAQLAAAYPHLECVPFRGNANRRLEKLAAGEADALLLAVSGLERIGREDVITEVLEPETMMPPIGAGILALQCREGDTGLIETISELGDPGTHREATAERMFLHVLQGHCNSPIAGYARTERNGELSLRASVFTLDGKTVLNAHEWAGRLDPATLGTSVAVALLRQGARELIDDIPH

SEQ ID NO: 11927 - protein, 403 aa, Blastopirellula marina DSM 3645
MASKAKRIGILTSGGDCPGLNAVIRGAVKTANRLGFDTIGFLKGYEGLVDPVQYVPLNDENTRGILGRGGTILGSTNKGRFAATVGINDRVELCPQLMKKVKGTFDQLSLSGLICIGGDGSLAVAQQFHEYGLPVVGVPKTIDNDLSATAFTFGFDSAVECGTEALDRLQTTAASHERIMVMEVMGRHAGWIALHSGIGGGADVILIPEIQWNFDIVCEKILERYKAGKKFTLIVVAEGAHLPDKGMVTQESEKSDRQTRLGGIGQIIAAEIERRLHFEARTVVLGHLQRGGAPTTFDRVLATQFGAHAVRTIVERRFGHMVCYSPPNIESVPILEAVHQLRTVHPDSSAVQAAQAMGISFGNCALHETPFQRYVTQHEHELATDDTTALLESALQSLVGAEA

SEQ ID NO: 11928 - protein, 292 aa, Kluyveromyces lactis NRRL Y-1140
METKDVLEAVKGLEKNKNNNDVVFKILQSLDKDLKDVNEKLLRETKVGVVVNQFKKSSNPDIVKLVKKMILSWKDAVAREKKSKLSSNSSSTSNNNGTSGGEAVKKEKYVSKAPRNAKNDGVKTDIYGVKIRDMAIRALYDALAKESEHPPVAILDTVMSIETEMANLFNPESDEKGYRDKYRIIYSNIISKNNPDLKHRITNGEVSAKHLVTADPKDLAPEHLKKKIEEIEKQNLFNAQGATVERSVTDRFQCGKCKQRKVSYYQLQTRSADEPLTTFCTCENCGNRWKFS

SEQ ID NO: 11929 - protein, 344 aa, Cicer arietinum
GFREFKDDSDFDEDEEDDDDDEGLLVGGKGFTFSSNNTKSFKTFSRGSTAAKSVSPKSNEQAEKACKRKRKNQYRGIRQRPWGKWAAEIRDPRKGVRVWLGTFNTAEEAARAYDAEARRIRGKKAKVNFPEEAPVTSSKRFKPNLENKLVNKNLNSFNPNGNKMFNFGENVENYYSPMDQVEQKPLVNNNNQYANMGPFSGNGVQHSQISPSADVTAYFSSEHSSNSFDYSDLGWGEQGPKTPEISSMLSAAAPLESESQYVQNNMQSNNNQNMLPVEDNSAKTLSEELADIESQLKFFETPYDDNWGDASLASFLGGDATQDGGNPMNLWSFDDLPSISGGVF

SEQ ID NO: 11930 - protein, 566 aa, Oryza sativa
MHSANLLRASSKAINTPSVRCLSTSSTARLAQPAAAAAASSGAAKAQLSPLALSRAKDVGSKWQGTSMLGGTTKNYVDGKFVDSSTSSWLDVNDPSTQALLSKVPLTTPSEFDAAVANAHAAFPAWRETSLLSRQQVMFKLQALLRDHMDDIANAIVLEQGKTFADAKGDVLRGLQVVEVACGITSTLMEERVEVSKDMDTYARREPLGVTAAIAPFNFPAMIPLWSIPMATVTGNTLVLKPSERVPGASMIIAELCERAGMPKGVLNVVNGAVDVVNGICDDPRIKAISFVGSDRAGAHIYHRGTANGKRVQANLGAKNHAILMPDANKNFALNSIAGAAFGAAGQRCMALSVVVAVGEAQSWVPELVERAKQLKVSGGFEEGADLGPLISPQARERVRSLTGSVEQEGGRILLDGRDFVCADYPNGNFVGPSVVEAGPGMKAYDQEIFGPTLVVVKADSLDQAVDYINKNKYGNGAAIFTTNGATARKFEKNVNAGQLGVNVPVPVPLPMFAWSGNKGSVLGDIGFYGKSALNFYTSFKTSTSLWRSDDAQMSERASVNMPTMS

SEQ ID NO: 11931 - protein, 293 aa, Triticum aestivum
  misc_feature (213)..(213): Xaa can be any naturally occurring amino acid
  misc_feature (274)..(274): Xaa can be any naturally occurring amino acid
MAQIIDGKAIAAEIRREIGAEVAVLSSAHNIVPGLAVVIVGSRKDSQTYVQMKRKACAEVGIRSFDVDLPEDISEAALVAEVHRLNADPAVHGILVQLPLPKHINEENILNQISIEKDVDGFHPLNIGKLAMKGRDPLFVPCTPKGCMELLSRSGVTVKGKHAVVVGRSNIVGLPVSLLLLKADATVSIVHSRTPNPETIVRQADIVIAAAGXAMMIKGDWIKPGAAVIDVGTNSIDDPTRKSGYRLVGDVDFSEASKVAGHLTPVPGGVGPMXTVAMLLKNTVDGAKRGIVS

SEQ ID NO: 11932 - protein, 331 aa, Anabaena sp.
MQNLQNFRDYYEILGVTKDATNEDIKKNYRRLARQYHPDLNPGNKDAEEKFKIIGEAYEMLSDATKRAQYDQFSRYWKQKGFPKQTPKSKAWGDSRNGERNGNENVDPSQFTNFEDFLNQVIGVGSRRDSKNGASTNTTTDPFRSPKSRVEYTVPKNPSRPARRDIEARLTLPFEKAYSGGNERIRLEDGRSLEVTMPPGMVTGQTIRLRNQGISGGDLYLKITVEPHPLFKLEGTNIFCQVPVTPSEPFLGGQVEAPTLDGPVKMTIPPGVRSGQRFRLANKGYPSDNGKRGDQLVEIQILTPKTISQEEKELYEKLRQIETFKPRADLI

SEQ ID NO: 11933 - protein, 258 aa, Kluyveromyces lactis NRRL Y-1140
MNRGNPSRTVYLGSIPYDQTEQQILDLCQTIGPVTAMKMMFDPTTGKSKGYAFIEFKDLATSASAVRNLNGYTLGSRSLKCGYTTGSGINGSGSGPGDEEENGNMVEDVKFPWLPVGVDVNINMTTPAMCISSELGKLQKDQQMALLKVIQHFCKDDKETFVALLEEAPQLSYAIAELLLSNGVCSVDQLTQLAMASKQRPEEQTDNTVEDGLDEEKVDLLRQVLQLQDSDIAMLPQDEKMAVWELKQRAMKGEFGHL

SEQ ID NO: 11934 - protein, 296 aa, Nocardioides sp. JS614
MDRKATVIDGKLAAQHVKDSLRTRVAALEAIGQRPGLGTILVGDDAGSQSYVAGKHRDCAEVGIDSFRIDMSAEASQERVLDAVGRLNEDERCSGFIVQLPLPAHIDMHLVLNAIDPEKDADGLHPVNLGRLVLNQEGTLPCTPRGILELLRGNDVPITGSQFCVIGCGTTVGRPLGLMLTRPSEHATVTMVNEATIDVAAHTRVADVVIAAAGVANLVKPYWIKPGATVLSVGITRTVEGILGDVDPGVENVAGKWTRAAGGVGPMTRAMLLKNVVELAERAAGITSEASTKIAS

SEQ ID NO: 11935 - protein, 298 aa, Haematococcus pluvialis
SFAATTMLSKLQSISVKARRIELARDITRPKVCLHARRSLVRLRVAAPQTEEAVGTVQAAGVGDEHSADVALQQLDRAIAERRARRKREQLSYQAAAIAASIGVSGIAIFATYLRFAMHMTVGGAVPWGEVAGTLLLVVGGALGMEMYARYAHKAIWHESPLGWLLHKSHHTPRTGPFEANDLFAIINGLPAMLLCTFGFWLPNVLGAACFGAGLGITLYGMAYMFVHDGLVHRRFPTGPIAGLPYMKRLTVAHQLHHSGKYGGAPWGMFLGPQELQHIPGAAEEVERLVLELDWSKR

SEQ ID NO: 11936 - protein, 550 aa, Chromobacterium violaceum ATCC 12472
MAAQRHIDINSTQVWAKLHQHQRATRHMHMRELFELDPQRFQRFSLELDGLLLDYSKNRVTERTLELLFDLARKADLRGWMDRMRSGERINVSENRSVLHTALRLPAGARLDLEGHNVAADVHQVLARLKDFSEQVREGRWLGFAGQPIRDVVNLGIGGSDLGPLVAADALAAYAHPDLKVHFVSNVDGQHLARTLERLNPATTLFIVASKSFTTPETLLNAQAARAWFLQAAGEAQIAKHFVAVSTNEPAVRAFGIDPQHMFGFWDWVGGRYSVWSAIGLPVMLSIGYDNFRAFLDGGHAMDRHFFESPFDANMPVLLALIGIWYNTFYRAHTHAIMPYDHGLRRLPAHIQQLDMESNGKRVGRLGEALDFDTGPVIWGEEGANSQHAFFQLLHQGTRLVPCDFILPLNSHYPLGNQHDVLVANCLAQTEALMRGKNEAEVMRELSHLSGEQLDMLLPQKLFPGNQPSNTLALDRVTPYSMGMLMALYEHKVFVQGVIWGINSFDQWGVEYGKQLARRILPELSGDTGALGHDSSTNGLIRHYRERHGK

SEQ ID NO: 11937 - protein, 733 aa, Flavobacteria bacterium BBFL7
MTEVETLEENKRIAQGYKDLLKISYQTLTDEDKKLIRKAFDIAVEAHAPQRRKSGEAYIFHPIAVAKIVAKQIGLDASAIAAALLHDVVEDTAYTLDDIERLFGTTIAKIVDGLTKIAHLKKDADISQQAENFRKMLLTLNEDIRVIIIKIADRLHNMQTMDSMPDYKQVKIASETLYIYAPIAHRLGLYNIKTELEDLGLKYTEPEVFNDIQQSIKESKEEQDQFISDFAAVIDDSLDKEGLEYSIKGRPKSVFSIRRKMLKQNVTFDEVYDKFAVRIVFRSDRANEKFLAWKIYSIVTDHFRPNPVRLRDWISSPKSTGYEALHITVMGPDGRWVEVQIRSERMHEIAEKGYAAHYKYKQGNQEDGLDVWLNRLQDALENADSSAIDFVEEFKLNLYSKEIFVFTPKGELKSLPKGATPLDFAFSIHTEVGLKTRGARVNGKLVPLSHELKSGDQVDIITSENQKPTKNWLDYATTARARQKIKSALKDDQKDIALEGKAVLNRKLRSLKIPLDEKSINQMVNFFKLKTSHDLFYRVGLGTIDNKMIKEYANSRSNALYSFIKNKIRKPKESPDLHKEEVTENYDQLVFGKDQQKLDYSFSKCCSPLPGDAVFGFITVAEGIKVHKNNCPNAISMQSKFAYRIMSAKWIDSSQQEYRADVILTGIDRMGLVQEVTRVISENMHVNIRNISFTSNDGIFKGEITVVVPHKNMLVKLMENLNKLNGIDKVTRV

SEQ ID NO: 11938 - protein, 545 aa, Cryptococcus neoformans var. neoformans B-3501A
MKSSIIFCFFAAFGGWVFGYDIGYISGCLIMPNFIQYMGEQDPTTGEWILSSQRQSIITSLLSAGTFFGALLQSFTSDRLGRRGSIIFWSIIFSVGIIIQVSSFGLAQITVGRFVAGLGVGALSAIVPLYVGEAAPKKLRGALLVLYQVQIASGLFLAYIVDLGTHHLKSSASWRIPVGLQLVWGAFLIVGGLLLPESPRLLLGRGDEKGALKAIARLNDCEVDDPLTRDVIKDLEEAIREENEGGKAGWLECFSTRSMILSVWKRTLNGCMVQFLQQLNGQNFYYYYGPVFFESADVPLSAYSIQAILGGISLATVIPAMWTIEHLGRRKSLLFGAAIQAACALIAGLVGHYYTDVAGVTDSMVKTGGNVLIAFAVIHVSMYSLFWGPTPWVILGETYPLRVRPKAIALAAAVNWLWNFLLSYFSPLIADDIGPLILLIFFGCLIFAFVYVFFMLPETRGITLEEVDELYRSKIPAWKSNSWKPSSHHAALDALEGESRKPVEVPAQAPGTLDETKPADEHLENAPAAKARIEGERGAREKSIV

SEQ ID NO: 11939 - protein, 467 aa, Cryptococcus neoformans var. neoformans B-3501A
MKSSIIFCFFAAFGGWVFGYDIGYISGCLIMPNFIQYMGEQDPTTGEWILSSQRQSIITSLLSAGTFFGALLQSFTSDRLGRRGSIIFWSIIFSVGIIIQVSSFGLAQITVGRFVAGLGVGALSAIVPLYVGEAAPKKLRGALLVLYQVQIASGLFLAYIVDLGTHHLKSSASWRIPVGLQLVWGAFLIVGGLLLPESPRLLLGRGDEKGALKAIARLNDCEVDDPLTRDVIKDLEEAIREENEGGKAGWLECFSTRSMMWKRTLNGCMVQFLQQLNGQNFYYYYGPVFFESADVPLSAYSIQAILGGISLATVIPAMWTIEHLGRRKSLLFGAAIQAACALIAGLVGHYYTDVAGVTDSMVKTGGNVLIAFAVIHVSMYSLFWGPTPWVILGETYPLRVRPKAIALAAAVNWLWNFLLSYFSPLIADDIGPLILLIFFGCLIFAFVYVFFMLPEVSNLRDTFRFTR

SEQ ID NO: 11940 - protein, 426 aa, Acinetobacter sp. ADP1
MALIVQKYGGTSMGTPERILNVARRVKRWHDHGHKVVVVVSAMSGETNRLLALAKAITDTPDPRELDQMVSTGEQVTISMLAMALNSIGVEAKSYTGRQVGIKTDSAYNKARIEAIDTDVMTKDLDAGRVLVVAGFQGVDEEGNTTTLGRGGSDTTGVALAAALKADECQIYTDVDGVYTTDPRVAPKAKKVDRISFEEMLEMASLGSKVLQIRSVEFAGKYQVPLRVLSSFDNDNDGAFDEEFKQNVGTLITTEAEDTMEQPIISGIAFNRDEAKLTILGVPDEPGIAAKILVPISAANIEVDMIVQNVEEDGTTDFTFTVNRGDLAKAKKILEETASNIGAREVSTRDDIVKVSIVGVGMRSHAGVASKMFMALAEESINILMISTSEIKVSVLIEENYLELAVRTLHTAFGLDREHGESSARA

SEQ ID NO: 11941 - protein, 479 aa, Aspergillus oryzae
MASRRLAFNFNQALRSRAALKSIQPVKRGFSSPVTLPSTTQSTTLSNGFTIATEYSPWAQTSTVGVWIDAGSRAETDKTNGTAHFLEHLAFKGTNKRSQHQLELEIENMGAHLNAYTSRENTVYYAKSFNNDVPKAVDILADILQNSKLEPGAIERERDVILREQEEVDKQFEEVVFDHLHATAYQNQPLGRTILGPKENIQTISRDNLVDYIKTNYTADRMVLVGAGGIPHEQLVRLAEEHFGSLPSKPPTSAALALTAEQKRTPEFIGSEVRLRDDTIPTAHIALAVEGVSWKDDDYFTALVAQAIVGNWDRAMGNSPYLGSKLSSLVEHHGLANSFMSFSTSYSDTGLWGIYLVSENLTALDDLTHFAMREWSRLCFNVTSAEVERAKAQLKASILLSLDGTTAVAEDIGRQIITTGRRLSPEDIERTIGQISEKDVMDFANRRIWDQDVAVSAFGSVEGLLDYNRIRADTSRNTL

SEQ ID NO: 11942 - protein, 314 aa, Mycobacterium sp. JLS
MSNADTPIRIGTRASLLATTQAGTIRDALIGRGHAAELVLISTEGDRNQGPIADIGVGVFTAALREAIHDGRVDAAVHSYKDLPTAADERFTIPAIPRREDPRDALVARDGLVLGELPAGSTVGTSSPRRAAQLRALGLGLEIRPLRGNLDTRLNRVGNGELDGIVVARAGLARIGRLGDVTETLEPVQMLPAPAQGALAVECRAGDTGLIALLAELDDADTRAAVTAERVLLAELEAGCSAPVGAIAEVVESIDEDGRVFEEVSLRGCVAALDGSDVIRASGIGTPGRAADLGVSVAAELFELGARELIADHH

SEQ ID NO: 11943 - protein, 104 aa, Porphyromonas gingivalis W83
MALQITDATFDGLVAEGKPMVVDFWATWCGPCRMVGPIIDELAAEYEGRAIIGKVDVDANTELPMKYGVRNIPTILFIKNGEVVKKLVGAQSKDVFKKELDALF

SEQ ID NO: 11944 - protein, 219 aa, delta proteobacterium MLMS-1
MLKDGEKGAVLQRDKESYAIVPHLPLGLITPEQLRKVAEVAEKYQCAAIKITSAARIAIVGLKEDDIDAAWRDLGMSPGAAVGMCVRSIKTCPGNTLCRLGQQDAMGLARELDSRYHGLELPGKAKLGVSGCPNQCGESSVKDIGYIGKAKGWSIVVGGNAASRPQLAQPLLDGLDDEQALAVTSNIFEFFKTEAKKGERLGRLIDRVGMEAFKEKVCS

SEQ ID NO: 11945 - protein, 327 aa, Synechococcus sp. WH 7805
MAGTLLFNALREAIDEEMARDPHVCVMGEDVGQYGGSYKVTKDLYEKYGELRVLDTPIAENSFTGMAVGAAMTGLRPIVEGMNMGFLLLAFNQISNNMGMLRYTSGGNFTIPTVVRGPGGVGRQLGAEHSQRLEAYFHAVPGIKIVACSTPTNAKGLMKAAIRDNNPVLFFEHVLLYNLSEELPEGDFTCALDQADLVKEGADVTILTYSRMRHHCLKAVEQLEEDGIDVELIDLISLKPFDMETIARSIRKTHRVIVVEECMKTGGIGAELIALITEHCFDDLDARPIRLSSQDIPTPYNGNLENLTIIQPHQIVEAAQTIVRQGL

SEQ ID NO: 11946 - protein, 503 aa, Arabidopsis thaliana
MASLLLTSSSMITTSCPSMVLRSGLPIGSSFPSLRLTRPYDKATLSVSCCSAESKKVATSATDLKPIMERRPEYIPNKLPHKNYVRVLDTTLRDGEQSPGAALTPPQKLEIARQLAKLRVDIMEVGFPVSSEEEFEAIKTIAKTVGNEVDEETGYVPVICGIARCKKRDIEATWEALKYAKRPRVMLFTSTSEIHMKYKLKKTKEEVIEMAVNSVKYAKSLGFKDIQFGCEDGGRTEKDFICKILGESIKAGATTVGFADTVGINMPQEFGELVAYVIENTPGADDIVFAIHCHNDLGVATANTISGICAGARQVEVTINGIGERSGNAPLEEVVMALKCRGESLMDGVYTKIDSRQIMATSKMVQEHTGMYVQPHKPIVGDNCFVHESGIHQDGILKNRSTYEILSPEDVGIVKSENSGIVLGKLSGRHAVKDRLKELGYEISDEKFNDIFSRYRELTKDKKRITDADLKALVVNGAEISSEKLNSKGINDLMSSPQISAVV

SEQ ID NO: 11947 - protein, 117 aa, Rickettsiella grylli
MNNSSIVTLNDASFESEVLQFNATPILVDFWAEWCGPCKAISPILDKLSEKYRGKIKIGKLNVDENPKTPAKYGVRGIPTLILFKDGKAVETKVGALLESQLESFLEKHLTNPGTST

SEQ ID NO: 11948 - protein, 278 aa, Zea mays
MGNSSGRAEDLADADMDDGNNVRRASSSSAGYVRGGGSSSSPPVSPPRPHSPRMFVPQSPVTPLQRAAEVPPPVFNQILMNQQQEDSDGPPQKKIPTLLMWTLGGRNIYVEGSWDNWTSKKLVEKSGKDHTILLMLSSGVHRYRFIVDGERRFIPDLPCETDNMGQIVNLVDVHDFVPDSVESVSELMAPPSPDSSYGFHVPGEKEFSKEPPQLPSQLYLGVLNSRSTEEGCARPRHVVLDHLYIEKGWGAQPLVALGYTHRFRSKYVTCVLYKAIER

SEQ ID NO: 11949 - protein, 392 aa, Deinococcus radiodurans R1
MTEVTSVRPSSIKNAAVNLPYGGGKGGIRIDPRKYSQGELERVTRRYTTEIGLIIGPEKDIPAPDVNTGPQTMAWMMDTYSMNVGRTATGVVTGKPVSLGGSLGRADATGRGVFVTGAEAMKKLGMPLEGARIAVQGFGNVGEAAARIFHQHGAKIVAIQDVTGTIHSAAGIDPGKALAHLRQTGKITGLEGSEEMQKDDFWSVDCDVLIPAALEKQITLQNADKIRARLVVEGANGPTIPAADDLLAQKGVTVVPDVLANAGGVSVSYFEWVQDFSSFFWTEDEINERLDRIMREAFQSLWDVKEQHGVTLRTAVYIVACTRVLEARACAGCIRKSTREKGRFLDGAALFVGCWGAFRTFDRKRHPPPLFARPSPIKVKGQRQNRSFCQML

SEQ ID NO: 11950 - protein, 409 aa, Bacillus anthracis str. 'Ames Ancestor'
METIVQKFGGTSVGSVERIQHVANLIIEEYERGHSIVSVVSAMGKSTDELVALANAITENPSKREMDMLLSTGEQVTISLLTMALQAKGYNAISLTGWQAGITTESVHSSARITEINTDRIQSYLTKGTIVIVAGFQGVSEDLEITTLGRGGSDTTAVALAAALNAKKCDIYTDVTGVYTTDPRVVKDAYKLDEISYDEMLELANLGAGVLHPRAVEFAKNHNVILEVRSSMEQENGTIVKGECNMEQQSIVKGIAFEDNITRITVKGLEQGSLSTVFSTLAAAHINVDIIIQSITNEGTVHLSFSIHSNDLRETLAVLEQNQEALHYESVEYENHLAKVSIVGSGMVSNPGVAANMFTTLKEEDIHIKMVSTSEIKVSVVIDRLHLVTGVEALHQSFMAKIEPLVQMS

SEQ ID NO: 11951 - protein, 300 aa, Synechococcus sp. WH 5701
MALRLDGRQLAAELENRLRGVISGRLERAGRPPGLAVLRVGDDPASGVYVANKAKACARVGIHSLVKHLGADIAPAELLAAITELNNDPAVDGILLQLPLPAGLKEAPLLAAIDPAKDADGLHTLNLGRLLKGEPGPRSCTPAGVMALLARHGIDPAGRRAVVVGRSILVGQPMALMLQAADATVSVAHSRTRELAALTRQAEILVVAAGRPRLVGAEHVSPGAVVVDVGIHRLDGGLCGDVRFEEVEPLASAITPVPGGVGPMTVTMLLVNTVVSWWTHTEGGDPGPGSVDNPLADLLP

SEQ ID NO: 11952 - protein, 454 aa, Burkholderia mallei ATCC 23344
MKNLQRHLSARHIRFLALGSAIGTGLFYGSASAIRLAGPAVILAYIVGGAAVYMVMRALGEMAVREPVPGSFGHYATENLGPFAGFVTGWTYTLEMVIVAIADITAFGIYMGFWFPHVPQWIWVLAIVAIICGLNLCHVKVFGELEFWLSIVKVGAIVAMIGGGAAILFTGMRLGSGGAPSLANLWSHGGFLPNGVGGLVASLSVVIFAYGGIEVIGMSAGEAKEPERVIPRAINAVPMRILLFYVLTMIVLMSIFPWTGVGANGSPFVQIFSALGVRSAAEILNLVVISAAISAINSDIFGAGRMMYAMALQGQAPRALAAMSARGVPWVTVLVMAGALLVGVVLNYLMPKDVFLMVAASATFATVWVWLMILLSQVAMRRRLGAAEVAALKFKVPFWPVGPALTIAFMAFVIAMLGYFDDTRVALFVGAAWLAILALVFYTRIRPRLAAVAR

SEQ ID NO: 11953 - protein, 459 aa, Nocardioides sp. JS614
MTTFGVEDPASLEIIAQVPDQGPDEARVAVDRAAAAFADWSRTSPRHRSDVLRRAFDLMMRDSEELTGLITSENGKSLVDAAAEVGYAAEFFRWFSEEAVRPSGEYGEAPTGGVRTIVTHRPVGVAALVTPWNFPAAMVTRKIAPALAAGCTVVLKPAAETPLTALAVGRILSEAGVPDGAVEIVTTTDAPGVVTAWLSDDRVRKVSFTGSTGVGRALLHQAADRVLNASMELGGNAPVVVTDDADLGAAVAGTMIAKFRNSGQACTAANRIFVHNDVAFDFVARLGAAVEKLSVGPAIDGAAIGPLITQAALQRVTEAVDFAVREGARISHQAQLPEAPGYFFPPTVLAGLAPDATILREEIFGPVAPVVVWHDEDELLELVNDTEYGLAAYVFAGDIGRAVRLGERIDAGMVGINRGLVSDPSAPFGGVKQSGLGREGAREGLREFQETQYLSVDWS

SEQ ID NO: 11954 - protein, 236 aa, Deinococcus radiodurans R1
MTSPTLIPHPEKHNTERIGWLRAAVLGANDGVVSVSSIVVGVAAASGVTPGTILLAGVAALVAGATSMAAGEYVSVQSQADTEHANLALEARELREQPELELQELADIYVARGVDPVLARQVAEQLTAADALGTHAREELGITEELRARPFQAALASALAFVTGGIIPVIAAVLLPHHLVSVGVTVVTLLALLVLGALAAYAGGANLWKGALRVTLWGAAAMALSALVGSLFGIKA

SEQ ID NO: 11955 - protein, 915 aa, Magnaporthe grisea 70-15
MAMLASKSPFPAPLATSGSGMMAGTAQASYPPSRRAPAVPPASQSFSPTESEFSDSDDHDSPKHWDEDKVCEYLRSVRCGEYEKLFRKNHINGENLLEMDKDVLKEMGIEKVGDRVRLFLSIKKLRTKAIAGQKKRNRDSFAGHESMYTPVSESPSKPFHSSSRVMPNPSVNKRYSRQIDLSGMAYDPSRPTTSSRPTSPLPSADFRTARTRNPYVGQQPTPTGSLRGLGSPPDSQANSRPVLTHTRTDSGMDGSLMAALPQNQDVIRVISTGGVTKVVKIADCNTCEEVMRVTLRKFALREDHERNYCFWVLSGLDPDPKQCRRLGDTELWRVIKDQKRPERNRLILRRVPAGEPGQSELERAAAIAMEEAQQSHSRAMDNVGARSQIKVQKVLGENWDNLQPPLSPVLYQDRERNVYNAARDLERPEPLDSGRLQPRRKVLRSFGGLRPPSELIASDLTTYFPDHPREDIDRTARLSMRRSARLSKVNSRLSVASSFSMASSIQDAPPIPTIADSWLQSTPLPKARPRDLQSRLQHGYRDSVASSMLDTLQEEGSPIEPNRKSYVSFADSGSDSAAVSVTDPDGNIVRHSYFDEGSTIGSGSGSGSFGDVSKALNEDGEDADEDLQSFLSGESWDDSKWMKGALIGQGSFGCVYLALHAITGELLAVKQVEAPSPGANSQNDARKKSMIEALKREISLLRDLRHPNIVQYLGCGSSAEYLNIFLEYVPGGSVQTMLNSYGALPEPLVRSFVRQILNGLSYLHEREIIHRDIKGANILVDNKGTIKISDFGISKKIEATNLLNGANNNKHRPSLQGSVFWMAPEVVKQTSYTRKADIWSLGCLVVEMMTGTHPFPDCTQLQAIFKIGGGKATPTIPEDASTEAKAFLAQTFEMDHNKRPSADDLMLSPFLTPIT

SEQ ID NO: 11956 - protein, 333 aa, Anabaena variabilis ATCC 29413
MNMQNLQNFRDYYEILGVTKDATNEDIKKNYRRLARQYHPDLNPGNKDAEEKFKIIGEAYEMLSDATKRAQYDQFSRYWKQKGFPKQTPKSKAWGDSRNGERNGNENVDPSQFTNFEDFLNQVIGVGSRRDSKNGASTNTTTDPFRSPKSRVEYTVPKNPARPARRDIEARLTLPFEKAYSGGNERIRLEDGRSLEVTMPPGMVTGQTIRLRNQGISGGDLYLKITVEPHPLFKLEGTNIFCQVPVTPSEVSLGGQVEAPTLDGPVKMTIPPGVRSGQRFRLANKGYPSDNGKRGDQLVEIQILTPKTISQEERELYEKLRQIETFKPRADLI

SEQ ID NO: 11957 - protein, 460 aa, Bdellovibrio bacteriovorus HD100
MAKLVVSKFGGTSMGDADCMLRSAEVSFRQGSGLVVVSATSGTTNDLIALGKTAESQAWSESEKILSKIQDKHNKIAQDLKLPADAKAKLETLFEEMSSLAKGMHLLKDCSVKAMDTLMSLGERMSSVLFTEAMSQVLKKHGSAKSAELLDVRTVLRTDDQFGKAKPLTNDVANLCQKNLSFLREGKKVMCTQGYIGMTEEGITTTLGRGGSDYSAAILAEGVSADVLEIWTDVAGIATTDPRLCPKAQPISEISFKEASELATFGAKVLHPATLLPAIRKNIPVFVGSSFDVEARGTWVRMDVEDHPLIRAMALRKKQVLVTLSTPEMLYAHGFLFQIFKIFNDHKVSIDAITTSEISVSVTLDDSTLLNKNLIKDLSQIADVQVEENLALISLIGNNINHTPGLGKRIFETIPDINVRMICLGASKHNFCFLVADEQGPEVIKRLHACFIEAGIEEMA

SEQ ID NO: 11958 - protein, 169 aa, Oryza sativa
MGAAESVPETSIHEFTVKDCNGKEVSLEMYKGKVLIVVNVASKCGFTETNYTQLTELYQKHRDKDFEILAFPCNQFLRQEPGSDQQIKDFACTRFKAEYPVFQKVRVNGPDAAPLYKFLKASKPGLFGSRIKWNFTKFLIDKNGKVINRYSTATSPLSFEKDILKALED

SEQ ID NO: 11959 - protein, 334 aa, Flavobacteria bacterium BBFL7
MSKKLKLAINGFGRIGRIVFRATLERANVEVVAINDLVDVEQLAYLLEYDSVHGRYGGSIEIKDGNLIIDGVQVRVTSERDPKNLKWDEVDVDVVADCTGIFTDLDSAQAHIDAGAKKVVISAPSKTAPMFVMGVNDNELTADHKIVSNASCTTNCLAPMAKILDDNFGIAEALMTTVHATTATQATVDGPSKKNYRLGRSAMNNIIPATTGAAVAVTKVIPALKGKLTGMAFRVPTVDVSVVDLTVKLSKETSLEEINKAFKDASTGAMAGVVGYTDEAVVSQDFVSDARTSIYDAGAAIELNSTFFKLVSWYDNEFGYSNKLVDLAEKVHSL

SEQ ID NO: 11960 - protein, 112 aa, Bordetella pertussis Tohama I
MKQVTAIIKPFKLDEVREALAEVGVSGLTVTEVKGFGRQKGHTELYRGAEYVVDFLPKIRVEVVLADDMVDPAIEAIVKAARTGKIGDGKIFVTPVEQAIRIRTGESDEEAL

SEQ ID NO: 11961 - protein, 328 aa, Flavobacteria bacterium BBFL7
MNQTIKKIGVMTSGGDSPGMNAALRSVVRTCAFHGVECLGIYRGYQGLIEGDFKEMTARSVNNIINKGGTILKSARSQEFRTVEGRKKAFEKVKASGMDALVVIGGDGSFTGGMVFNEEFNFPVMGIPGTIDNDIYGTSSTLGFDTALNTVVECIDKIRDTASSHNRLFFVEVMGRDVGHIALNAGVGAGAEEILIPEEDMGKDRLVESLKRSRESGKSSSIVVVAEGDKTGDNVFELKDYVEKNMPEYEVRVSVLGHMQRGGSPSCWDRVLASRMGVKAVESLLEGKTNYMVGINNNKIELCPLDKAVKGKTEIDQELLRVSDIMTV

SEQ ID NO: 11962 - protein, 384 aa, Geobacter metallireducens GS-15
MFEFDESIDQCAKIKVIGVGGSGGNAVNTMIESQVGGVDFAVANTDVQALRISKAPIKIQIGRQLTKGLGAGADPCRGREAALEDREQLAETLKGADMIFIAAGMGGGTGTGAAPIIAEVAKEAGALTVGVVTKPFSREGKQRLAKADDGIKELKKHVDSLIVIPNDRLIGLAGKSMSILDAFKPSDDVLRQAVQGISDLITTSGFINVDFADVKAIMSERGMAMMGIGIAAGENRAVEAALRAISSPLLEDVDISGAKGVLVNISGSASMTMDEFEAVNRTIHEKVHEDANIIIGVTIDETLGDQLKVTAIATGFGDRFDVEKQRQELKTVTPLGGRQEVNREIPTFIREKQQREPSYNRQKGFFSDEEDQYDIPTFLRKSVD

SEQ ID NO: 11963 - protein, 499 aa, Citrus jambhiri
MNASMMMINSMSVSPDMPSSSPFQSQSISTPTSSPPSTSLPLRTIPGSYGWPLLGPISDRLDYFWFQGPETFFRKRIEKHKSTVFRTNIPPTWPLFLNVNPNVIAVLDCKSFAHLFDMEIVEKKNILVGDFMPSVKFTGGLRVSAYLDTSEPKHAQLKGFAMDTLKRSSKLWVSEVVSSLDTLFDTVEKELSEKNSISYMVPLQKCVFNFLSKSIVGADPKADAEIAENGFSMLDKWLALQIVPTVSINILQPLEEIFLHSFAYPFALVSGDYSKLHNFVEKEGKEVVQRGQDEFGLTKEEAIHNLLFILGFNAFGGFSIFVPKLINAIASDTTGLQAKLRSEVKERCGTSALTFESVKSLELVQSVVYETLRLNPPVPLQFARARKDFQLSSYDSVYDIKKGELLCGYQPLVMRDSKVFDDAESFKAERFMGKKGSELLSYLYWSNGPQTGTPNDMNKQCAGKDYVTLVACLIVAYVFQRYESITGNSSSITAVEKAK

SEQ ID NO: 11964 - protein, 469 aa, Burkholderia xenovorans LB400
MNDFSLLIDGQLVAGDHTIPVLNPATGKVAASAPAASVQQLERAITAANRAFAGWRDTPFAERRAIVLKIIDIIAANQGELSRLLTLEQGKPLAAAAGEVSATIDYFRYFTTLSLAPEVRQDNETRYVEVRRDPLGVVAAIIPWNFPLLLAAFKLPAALLAGNTVVLKPAPTTPLATLHLGRLIAGAVPAGVVNIVSGGDELGPVLTSHPGIRKVSFTGSTETGKKVMASAATHLARVTLELGGNDPAILLDKVDLEHTATAIFASAFGNSGQVCRAIKRVYVPRPIYEPFCAALAERARAAVVGDGLTDGVQFGPVQNAAQFERLKELHADAQQRGTVMPGGGPVKGPGYFFRPTIVKDIASDSRLVVEEQFGPILPVIAYDELEEAVEMANNSQYGLAASVWSTDSQAAFAVADRIVAGTVWINKHTDRMPDLPIAGARQSGMGVELGEEGLHEFTQIKIVNLSKAA

SEQ ID NO: 11965 - protein, 228 aa, Acinetobacter sp. ADP1
MSKPYLIAPSILSADFARLGEDVERVLEAGADVVHFDVMDNHYVPNLTFGAGVCKALKNYGIQAPIDVHLMVSPVDRMIGDFLDAGADIITFHPEATDHIDRSLQLIKAGGAKAGLVFNPATPLHYLDYVLDKVDQILLMSVNPGFGGQKFIPMTLEKLRQARKMIDASGLDIRLEVDGGVGPANIREIAEAGADMFVAGSAIFGKPDYKAVIDEMRVELAKVGSHTA

SEQ ID NO: 11966 - protein, 392 aa, Glycine max
MESSEEETDGVSGNHAPKELIRLASNGAKFIDEVLNGQNECCLDNFRMDKHVFYKLCDILQAKGLLRHTNRIKIEEQLGIFMFIIGHNLRTRAVQELFRYSGETISRHFNNVLNAIMSISLDLFQPPGSGVPSEIIEDPRFYPYFKDCVGVIDGIHVPVTVGVDEQGPFRNKNGLLSQNILAACSFDLKFHYVLAGWEGSATDLLVFNSAITRRNKLQVPEGKYYIVDSKYPNVPGFIAPYSSTPYYSKEFLSDYHPQDASELFNQRHSLLRHVTDRTFGILKARFPILMSAPSYPLQTQVKLVVAACALHNYIRREKPDDWLFKMYEEGSFPMEEPQPPLEMEVPPKMDVETQTQPSVHTFDSEEIGLASQLRDSIATEMWNDFIHDFPPM

SEQ ID NO: 11967 - protein, 318 aa, Glycine max
MEIFYLLCSIVSTSLTSLLLSLVLPFHTLLQRWNSSRAASSFSDDEAEPISLYEGTVWHQRRHPVNHSFQYQVRYALIDLDRAPHAPHDHLSLDEARQITDTNGPILLLTIPPSVGYEQNPLSVYYCYAVEGSTKRLKKCIAEVTNTPWGERVSFVFNPHSDLVAKALHVSPFMDMLGSWNIKANDPGENLTISISVHHPEHGNYFTASLKAKKLYSSPESDHAVFFWLMPHKVAVWIYWHAIKLWWKNVRFVQHPRYSIPTYKDEALMRDKKLQCCGLSDDNRQHLQQRGSDPGCCLAELSPQNRWFRWRDAKWPWS

SEQ ID NO: 11968 - protein, 427 aa, Oceanobacillus iheyensis HTE831
MAFNFKLPDIGEGIHEGEIVKWFVKEGDEVKEDDVLCEVQNDKSVVEIPSQVDGKVTKIHVAEGDVAVVGDTLISFEAEGYDDEEGDSADDSSSDSKEEKSTDSKEEEKEASKEESSEQSDDTRVIAMPSVRKFARDNDVNIKDVNGTGKNGRILKEDVESYLSGDQPSSEVAEDKAEASSEDKQETKAAPQGQYPETREKMTAIRKSIAKSMVNSKSKAPHVTLMDEIDVTELVAHRKKFKAVAAEQDIKLTYLPYVVKALVSASKKFPILNSYIDENTDEIVEKHYYNIGIAADTDRGLLVPVVKDSDKKSIFQISQEINELAGKARDGKLKPDEMKGASNTISNIGSAGGQWFTPVLNYPEAVILGIGRIADKPVVRDGEIVVAPVLSVSLSFDHRIVDGATAQLALNQIKRLLNDPQLIMMEA

SEQ ID NO: 11969 - protein, 629 aa, Salmonella typhimurium LT2
MAIEIKVPDIGTDEVEITEILVKVGDKVEAEQSLITVEGDKASMEVPSPQAGVVKEIKVSVGDKTETGALIMIFDSAEGAADAAPAKAEEKKEAAPAAAPAAAAAKDVHVPDIGSDEVEVTEVMVKVGDTVEAEQSLITVEGDKASMEVPAPFAGTVKEIKVNTGDKVSTGSLIMVFEVAGEAGAAAPAKAEAAPAAAAPAAATGVKDVNVPDIGGDEVEVTEVMVKVGDKVTAEQSLITVEGDKASMEVPAPFAGTVKEIKISTGDKVKTGSLIMVFEVEGAAPAAAPAKQEAAAPAPAAKAEKPAAPAAKAEGKSEFAENDAYVHATPLIRRLAREFGVNLAKVKGTGRKGRILREDVQAYVKDAIKRAERAPAAAGGGIPGMLPWPKVDFSKFGEVEEVELGRIQKISGANLSRNWVMIPHVTHFDKTDITDLEAFRKQQNAEAEKRKLDVKYTPVVFIMKAVAAALEQMPRFNSSLSEDGQRLTLKKYINIGVAVDTPNGLVVPVFKDVNKKSVTELSRELTTISKKARDGKLTAGEMQGGCFTISSIGGLGTTHFAPIVNAPEVAILGVSKSAMEPVWNGKEFVPRLMMPISLSFDHRVIDGADGARFITIINNMLSDIRRLVM

SEQ ID NO: 11970 - protein, 417 aa, Anaplasma marginale str. St. Maries
MFHMPMSLNVYLPDHQSVSAVRPRITVLGVGGAGGNAVNNMIQSCLQGVNFIVANTDAQALDCSLSEKKIQLGINLTKGLGAGSLPEVGRGAAEESIDEIMGEIADSNMLFITAGMGGGTGTGAAPVIAKAAKENKILTVGVVTKPFHFEGAHRMKTADLGLEELQRYVDTLIIIPNQNLFRIANENTTFADAFKLADTVLHTGVRGITDLMVMPGLINLDFADIKVVMSEMGKAMMGTGEAEGEHRAVIAAEAAISNPLLDNISMKGARGILINITGGLDLTLFEVDAAANRIREEVDDNANIIFGSTFNEESSGKIRVSVLATGIDSVRPAQRPHSVEQQQPQRISDFDFDSELSSLNPENGSTMAYYKPSLPEEDAMADAHAAAEKQQPPQKSGTFNWGESFDVPAFLRKKEKL

SEQ ID NO: 11971 - protein, 462 aa, Arabidopsis thaliana
MASNGVDEQIKLVEGPAGYVLEDVPHLSDYILDLPTYPNPLQSNAAYSVVRQYFVDEDDTVQEKIVVHKDSPRGTHFRRAGPRQKVYFKPSDVRACIVTCGGLCPGLNTVIREIVCGLHFMYGVTEVIGVDCGFRGFYSKNTVALTPKTVSDIHKRGGTILGTSRGGHDTSKIVDNIQDREINQVYIIGGDGTQKGANAIYKEIRRRGLKVAVAGIPKTIDNDIPVIDKSFGFDTAVEEAQRAINAAHVEATSVENGIGIVKLMGRYSGFIAMYATLASRDADCCLIPESPFYLEGKGGLYEFIAKRLRENGHMVIVIAEGAGQDLVAESIEQQDASGNKLLKDVGLWMSLKIKEYFAKHNVMDITLKYIDPTYMIRAIPANASDNVYSTLLAQSAVHGAMAGYTGFVSGLVNGRHTYIPFNRITERQNKVVITDRMWARMLSSTNQPSFMNPPKGTTEFTD

SEQ ID NO: 11972 - protein, 285 aa, Photobacterium phosphoreum
MSAQIIDGKIISQTVRQEVAARVKARTDAGLRAPGLAVVLVGQDPASQIYVGSKRKACEEVGFISKSFDLPSSASEQQLLDLIDELNQDPTMDGILVQLPLPAGMDCTRILERIDPEKDVDGFHPYNVGRLSQRIPKLRSCTPKGIITLLERYNIEVRGKHAVIVGASNIVGRPMTLELLLAGATTTTCHRFTQDLEGHIRQADILVVAVGKPNFIPGGWIKEGATVIDVGINRLENGKLCGDVEFDVACQRAKYITPVPGGVGPMTVASLIENTLLACEQYHSA

SEQ ID NO: 11973 - protein, 252 aa, Cryptococcus neoformans var. neoformans JEC21
MSVYVGESRGELLAWLNDLLAPTVVTKLEQCGTGSVYCQIIDSIYGDLPMSRVKFNARMEYEYLDNFKILQKAFTRHKIEKPIPVDRLIKCKMQDNLEFLQWIKKYWDMHSRGEGYDAQARAGGHIAGVRASTSRPTAARTRPAPAVTGSRTVSSASQQANSAQVAAMQARVAEIEAHSEGLLKERDFYFDKLRNIELIVQERLAVEGITPEESDVMTKIQDILYATIEGFEVPQEEDFIEEQPVEGEEETF

SEQ ID NO: 11974 - protein, 473 aa, Photobacterium sp. SKA34
MATVITEERSNGTLSLEKSDLNKNVFIACLIAALAGLLFGLDIGVISGALPFIAKEFGLATHTQEWVVSSMMFGAAFGAIGSGPLSNKFGRKYSLVVASILFTIGSLGCALANNTEILIIFRIFLGLAVGVASFTAPLYLSEIAPQKLRGSLISMYQLMITIGIVVAFLSDTAFSYEGQWRWMLGVITVPALILLIGVLMLPRSPRWLALKGRHTEAKEVLELLRGSDETAKHELDAIRESLKVKQSGWSLFKTNRNCRRAVYLGVTLQVMQQFTGMNVIMYYAPKIFKIAGFASTEQQMWGTVIVGLVNVFATFIAIGLVDKLGRKPILKLGFLVMSASMATLGFLLNQGVTTSFEQYFAAFVLLIFIVGFAMSAGPLIWVLCSEIQPLKARDFGITVSTATNWIANMIVGATFLTFLQVLGNSQTFWLYAVLNIIFLFVTLILIPETKGISLEKIEQNLMTGVPLSKLGKK

SEQ ID NO: 11975 - protein, 537 aa, delta proteobacterium MLMS-1
MADLQKYFNDFNKLPAFSRLTELALQPVELRAAVDPARIADYRCRGGGVELIYFGQRVNGQVLEALGELAAQAGVLEQYDLMRQGAVLNQIAGYASENRQVLHCSNRDIFAESPRQPEATARTANELAKLREFLEDLEAGRLANPAGEPFETMLQVGIGGSDLGPRALYLALRAYAKPGRQVRFISNVDPDDAAAVLQELDLSRTLVKVVSKSGTTLETLANEELVRRAYQDAGLDPKDFFIAVTGQGSPMDNPEHYLRSFYMFDYIGGRYSATSMVGLVMLGFALGYEQVLEILRGAYEMDEAATQPDPTRNPPLLLALLGIWNRNFLGSQDVAILPYSQALSRFAAHLQQLDMESNGKGVSRAGEPLGWDSGPVVWGEPGTNGQHAFYQLLHQGTAVVPIEFIGFKESQYRRDLTVKGTTAQEKLLANLLAQSLALAVGQEEENPNRRFPGNRPSSILLADRLTPATMGALLALYEAKVVFQGFLWNINSFDQEGVQLGKRLADGLLAQYEARRRGTTPPQDPLGRALLALASSE

SEQ ID NO: 11976 - protein, 834 aa, Pseudomonas aeruginosa UCBPP-PA14
MNLTRREFAKANAAAIAAAAAGLPILVRASNLVTEADVTSLVWNKAPCRFCGTGCSVMVATRDGQVVATHGDIKAEVNRGINCVKGYFLSKIMYGSDRLTRPLLRMKDGKFDKQGEFQPISWEQAFDIMAEKFKAALKAKGPESVGMFGSGQWTVWEGYAANKLFKAGLRSNNIDPNARHCMASAVMGFMRSFGMDEPMGCYDDIEATDSFVLWGSNMAEMHPVLWSRVTDRRLSAPQVKVAVLSTFEHRSFELADLPMVFKPQTDLIILNYIANHIIESGAVNRDFVERHVRFAHGAEDIGYGLRPDDPLEKKAKNADKANTWSDIDFKAFAEFVKPYTLERTARESGVPAERLKALAELYADPKRKVVSFWTMGFNQHTRGVWANNLIYNIHLLTGKISEPGNSPFSLTGQPSACGTAREVGTFSHRLPADLVVTNPKHRETAEKIWKVPAGTIQEKVGFHAVQQSRMLNDGVLNVYWTQVSNNMQAGPNVMQEVLPGWRNPDNFVIVSDVYPTVSAQAADLILPSAMWVEKEGAFGNAERRTQFWHQLVKAPGEAKSDLWQLVEFSKRFTTDEVWPAELLAKAPELKGKTLYDVLFRNGQVDRFPASDLAKGYANDEVDAFGFYIQKGLFEEYAAFGRGHGHDLAPFDAYHEARGLRWPVVDGKETRWRYREGYDPYVSKGSGVQFYGYPDKKAIVFALPYEPPAEAPDQDYPFWLATGRVLEHWHTGSMTARVPELYKAVPDALVYMHPEDARQLKLRRGSEVKVVSRRGEIRARVETRGRNKPPQGLVFVPFFDANKLINKVTLDATDPISKQTDYKKCAVRIELLNLA

SEQ ID NO: 11977 - protein, 564 aa, Arabidopsis thaliana
  misc_feature (127)..(127): Xaa can be any naturally occurring amino acid
  misc_feature (146)..(146): Xaa can be any naturally occurring amino acid
  misc_feature (228)..(228): Xaa can be any naturally occurring amino acid
MDFDEYEYLEKTVENPHLENEVGNGGGDEKVKSEGKERSRSSRHRGDKKKERDEDEDGRRSKRSRSHHRSRSRDRERDRHRSSREHRDRDREKDVDKEERDGKDRERDRDKDRDSKGRDHEKDRSRXRSRSRSERHRSQEREKSLXEIEPKERETKDRDRDRRRRHKDKKEDKVEPEADPERDQRTVFAYQIALRATERDVYEFFSRAGKVRDVRIIMGRISRRSRGXGYVEFYDTMSVPMAIALSGQPLLGQPVMVKPSEAEKNLVQSTTAAAGAGGMLGPYSGGARRLYVGNLHINMSEDDLRKVFESFGSVELVQVPRDETGLCKGFGFVQFARLEDARNALNLNGQLEIAGRAIKVSAVTDQTEVPEAGQTQTTGDLDDDDGGGLSLNAQSRALLMQKLDRSGTASSTGLTTAASFNGGVSTISSLAAPALVQGSFPAVAGLAGSGIIPGVIPAGFDPIGVPSECLLLKNMFDPSTETEDDFDEDIKEDVKEECSKFGKLNHIFVDKNSVGFVYLRFENAQAAIGAQRALHGRWFAGKMITATYMTTEAYEAKFPESKVV

SEQ ID NO: 11978 - protein, 419 aa, Lactococcus lactis subsp. cremoris
MEFSFDTDLTSGAVIKVIGVGGGGGNAINRMIEEGVSGVEFIAANTDVQALRSSKADTVIQLGPKLTRGLGAGAKPEVGKRAAEESAETVSQALEGSDMIFIHRGMGGGTGTGAAPVIAQIAKELGALTVGVVTRPFGFEGSKRSYFATEGIEALRANVDTLLIISNNNLLEIVDKKTPLTEALREADNVLRQGVQGVTDLITNPGMINLDFADVKTVMENKGDALMGIGVATGEERVIEATRKAIYSPLLETTIEGAENVLLNVTGGMDMSLIEAQDASEIVIQAAGNDVNIILGTAIDPNLKDEIRVTVVATGVAKEDADEALGLQPESRRQPNLTHNSNMQHAQTSRPMQSQQQPQATQQGQNQSSAFGDWDIRRETSTRQNVSNTRDTSSVTSFGGVPTTDEDLDTPPFFRKINL

SEQ ID NO: 11979 - protein, 527 aa, Hordeum lechleri
MALEAAYHYLQIAVGHGTSTPAALLTVLLLLIIRLAWVRTTTASTRLSKQQQLPPSPPGKLPIIGHLHLLGSQTHISIRDLDAKHGRNGLLLLRIGAVPTLFVSSPSAAEAVLRTHDQIFASRPPSMAAAIIRYGLTDIAFAPYGEYWRQARKLLTTHMLSAKVVHSFRHGRQEEVRLVINKTREAATRGTAVDMSELLSGYTNDVVCRAVLGESHRKEGRNRLFSELTEINVSLLGGFSLENYIPPNMIMADVLLRLVSVKAQRLNKRWDDLFNEIIEEHLHPSKPSSGEQQAADFIDLLLSLKEEYGLTTDNIKAILVDMFEAGIETSYLTLEYGMAELMNNRHILTKLQEEVRSQGKKLDMITEEDVSSMAYLRATIKETSRLHPPAPFLLPHFSTADCNIDGYVVPSNTRVLVNAWALGRDLSSWERPDDFLPERFLQDQAGDVDTQMRGKDLRFLPFGFGRRICPGMNFGFATMEIMLANLMYHFDWDVPNMMGTGAGVDMAESFGLTLRRKEKLQLVPQIP

SEQ ID NO: 11980 - protein, 482 aa, Methanothermobacter thermautotrophicus str. Delta H
MNEIIGKFAREGILIEDNAYFRLREMDDPASVSSELIVKIKSNGGKFTVLTSEMLDEFFEIDNPAEIKARGPLMVPAERDFDFEVISDTSNRSYTSGEIGDMIAYFNSRYSSLKNLLSKRPELKGHIPIADLRGGEDVVSIIGMVNDVRNTKNNHRIIELEDDTGEISVVVHNENHKLFEKSEKIVRDEVVGVHGTKKGRFVVASEIFHPGVPRIQEKEMDFSVAFISDVHIGSQTFLEDAFMKFVKWINGDFGSEEQRSLAADVKYLVVAGDIVDGIGIYPGQEKELLIRDIHEQYEEAARLFGDIRSDIKIVMIPGNHDSSRIAEPQPAIPEEYAKSLYSIRNIEFLSNPSLVSLDGVRTLIYHGRSFDDMAMSVNGLSHERSDLIMEELLEKRHLAPIYGERTPLASEIEDHLVIDEVPHVLHTGHVHINAYKKYKGVHLINSGTFQSQTEFQKIYNIVPTCGQVPVLNRGVMKLLEFS

SEQ ID NO: 11981 - protein, 82 aa, Oryza sativa
MAAEKGSPLPKFGEWDVNDPASAEGFTVIFNKARDEKKTGGNSQGQDLAAKSEQPSGQGLYPAKPNSSKKWFCCMQPTAAES

SEQ ID NO: 11982 - protein, 98 aa, Arabidopsis thaliana
  misc_feature (50)..(50): Xaa can be any naturally occurring amino acid
  misc_feature (53)..(53): Xaa can be any naturally occurring amino acid
  misc_feature (61)..(61): Xaa can be any naturally occurring amino acid
  misc_feature (71)..(71): Xaa can be any naturally occurring amino acid
  misc_feature (74)..(74): Xaa can be any naturally occurring amino acid
  misc_feature (79)..(79): Xaa can be any naturally occurring amino acid
  misc_feature (83)..(83): Xaa can be any naturally occurring amino acid
MAFVTTAEVCDANQELIRSGQLRALQPIFQIYGRRQIFSGPVVTVKVFEXNGXIRQFHRGXGNGRVLLVDXGGXTVVNXGEPXVQAQTPDGRIVLPVH

SEQ ID NO: 11983 - protein, 117 aa, Nicotiana glauca
MAKVALLVVVCMAAVAVMLTPQADAAISCGQVVSSLTPCISYVTKGGAIPAPCCSGIKSLNNQATSTPDRQTACNCIKSAVGSISGINFGLASSLPGKCGVNLPYKISPSIDCSTVQ

SEQ ID NO: 11984 - protein, 309 aa, Triticum aestivum
  misc_feature (62)..(62): Xaa can be any naturally occurring amino acid
  misc_feature (66)..(66): Xaa can be any naturally occurring amino acid
  misc_feature (125)..(125): Xaa can be any naturally occurring amino acid
  misc_feature (135)..(135): Xaa can be any naturally occurring amino acid
  misc_feature (285)..(285): Xaa can be any naturally occurring amino acid
  misc_feature (296)..(296): Xaa can be any naturally occurring amino acid
MSASPSMSGGAGERTRTRTVVWFRRDLRVEDNPALAAAARTAGEVVPAYVWAPEEDGPYYPXGCPXWWLTQSLKHLDASLRRLGATRLVTRRSTDTVAALLELVRSTGAPRLRFNHLYDPLSLVXRNHRVKQVLXAQGITRQSFNSHLLYEPWEVLDDHGCPFTMFTPFWNTCLCMVDPPAPMLPPKRINSGELSRCCSSDDLIFEDESERGSNALLARAWSPGWQNADKAFTAFINGPLIDYSVNRKKADSANTSLLSPYLHFGELSVRKVFHQVRMKQLTWSXESNGDGEEGCXLFLRSIGLREYSR

SEQ ID NO: 11985 - protein, 398 aa, Klebsiella oxytoca
MTRQLVIIGNGMAATPGEALVERDARRFSITIIGDEPRQAYNRIQLSPVLGAEKTAGATRLLPAEWYSQHNVTVRAGETVTAVDMAARTLQTTAGELGWDELVFATGSLPFLPPLPGITLPHVFAFRTLADVEGILAIDGPAVVIGGGVLGVEAAAALRRHGDSVTLLHRGSWLMEQQTDAFVGEQLQMLLAERGIGCVMESRIAAIDEHQVLLEDGRAFAASRVVLATGVQPNKRLAERSGLACGRGILVDRRLATAQPGVSALGECCEIDGQTWGLVAPCLRQAEVLADRLCAIPGEDFRWQDSGTRLKVTDIELFSAGELRADEQDDVYTSWDPLDRHYRRLLLRDGKLRGVLLLGDCSSAAPLTALLGRHGPRRQSGFSTHLQRCSRALWDKLR

SEQ ID NO: 11986 - protein, 411 aa, Lycopersicon esculentum
MNALAATNRNFKLAARLLGLDSKLELSLLIPFREIKVECTIPKDDGTLASFVGFRVQHDNARGPMKGGIRYHREVDPDEVNALAQLMTWKTAVANIPYGGAKGGIGCSPSDLSISELERLTRVFTQKIHDLIGIHTDVPAPDMGTNPQTMAWILDEYSKFHGYSPAVVTGKPVDLGGSLGRDAATGRGALFATEALLNEHGKSVAGQRFVIQGFGNVGSWAAKLIHEQGGKVVAVSDITGAIKNEKGIDIESLFKHVKETRGVKGFHDAQPIDANSILVEDCDVLMPAALGGVINKDNANEIKAKYIIEAANHPTDPEADEILSKKGVTILPDIYANSGGVTVSYFEWVQNIQGFMWDEKKVNDELKTYMTRGFKDVKDMCKTHNCDLRMGAFTLGVNRVARATVLRGWEA

SEQ ID NO: 11987 - protein, 354 aa, Kluyveromyces lactis NRRL Y-1140
MMMLSNTFKRAVPSVVQSMRFASTKTMTVREALNSAMAEEMDRDDDVFIIGEEVAQYNGAYKVTKGLLDRFGERRVVDTPITEMGFTGLAVGAALKGLKPIVEFMSFNFSMQAMDQVINSAAKTYYMSGGTQKCQIVFRGPNGSAVGVAAQHSQDYSAWYGSVPGMKVLVPYSAEDARGLLKAAIRDPNPVVFLENELLYGQSFEVSEESLSTDFTLPYKAKVEREGSDISIISYTRNVQFSLEAAEILSKQYGVSAEVINLRAIRPLDVEAIINTVKKTNHLITVESTFPAFGVGAEIIAQIMESEAFDYLDAPIQRVTGAEVPTPYAKELEDFAFPDPDTIVRAAKSVLSIE

SEQ ID NO: 11988 - protein, 429 aa, Bifidobacterium longum DJO10A
MFSGTELALVSLRGSQIEQMEQEDARGAKVAKIARDPNTFLSTVQIGVTLSGFLSASFGASSIAPYLIPAVESWGVHPGIAGGLVNIILTLIISYCSIVISEMVPKRIAMQRTEQIARAVVPAIDAFAAVCRPIIWLIGKNTNGIVRLLGFDPQQTESEVSDDELRVLVSSNTNLSKDERTILDDVFDASETIVAEVMRPRADVVFIEGDQPLAEAAAFVRDQPYSRYPVTGKDFDDVIGFVHVRDLLDVRDPNAKIVRDVVREGISLPGTSKLLPSLELLRKRGIHLAVVIDEYGGTDGIVTLEDMTEELVGDIRDEYDLPSEKGGERTTRTAFVNGVATIEASMTIEDFADLTGIELEDGPYETVAGYFLSKTGKMGAVGDVLHSDDGYNMVVTKVDGRRIETIEVRKAGAPDHAPLPAESQSDDAK

SEQ ID NO: 11989 - protein, 501 aa, Zea mays
MGLFTVTKKATTPFDGQKPGTSGLRKKVTVFQQPHYLQNFVQSTFNALPADQVKGATIVVSGDGRYFSKDAVQIITKMAAANGVRRVWVGQNSLMSTPAVSAVIRERIGADGSKATGAFILTASHNPGGPTEDFGIKYNMGNGGPAPESVTDKIFSNTTTISEYLISEDLPDVDISVVGVTSFSGPEGPFDVDVFDSSVNYIKLMNYDVLHGVAGAYAKHIFVEELGADESSLLNCVPKEDFGGGHPDPNLTYAKELVERMGLGKSSSNVEPPEFGAAADGDADRNMILGKRFFVTPSDSVAIIAANAVQSIPYFASGLKGVARSMPTSAALDVVANNLNLKFFEVPTGWKFFGNLMDAGMCSICGEESFGTGSDHIREKDGIWAVLAWLSIIAFKNKDNLGGDKLVTVEDIVRQHWATYGRHYYSRYDYENVDAGAAKELMANLVSMQSSLSDVNKLIKEIWSDVSEVVAADEFEYKDPVDGSVSKHQGIRYLFGDGSRL

SEQ ID NO: 11990 - protein, 284 aa, Pseudomonas fluorescens PfO-1
MTAQLIDGKSIAASLRQQIAQRVAERRQQGLRTPGLAVILVGSDPASQVYVSHKRKDCEEVGFLSQAYDLPSETTQEALTDLIDRLNDDPAIDGVLLQLPLPEHLDASKLLERIRPDKDVDGFHPYNVGRLAQRIPLLRPCTPKGIMTLLESTGADLYGMDAVVVGASNIVGRPMAMELLLAGCTVTVTHRFTKDLAGHVGRADLVVVAAGKPGLVKGEWIKEGAIVIDVGINRQEDGKLVGDVVYETALPRAGWITPVPGGVGPMTRACLLENTLYAAETLHA

SEQ ID NO: 11991 - protein, 320 aa, Trichodesmium erythraeum IMS101
MTISASTPTIRIGSRKSQLALIQTYWVQEKLEKNFPNITFEVHKMSTQGDKILDVALAKIGDKGLFTKELELGMLQNETDLAVHSLKDLPTNLPEGLILGCVTERENPADALVLHEKLKDKQLETLPEGAVIGTSSLRRLAQLRYHFPHLEFKDVRGNLNTRLAKLDAGEYDALILAFAGLHRLGMSDRIHQIIPPEISLHAVGQGALGIECRAGDNNILNLLKSLEHTATAQRCYAERAFLRELEGGCQVPIGVNTQIEGEQLTLTGLVASLDGKKLVKDIVTGATADAEQIGIELAQKLRKQGAQEILDQILAEINRS

SEQ ID NO: 11992 - protein, 331 aa, Fusobacterium nucleatum subsp. nucleatum ATCC 25586
MEDDSEDKIDENEDENDETEEHFTEFDDEFNPEYIEDVSEDELSNEKLLNLGNSAKVDEPIKMYLREIGQVPLLTHEEEIDYAKKAYEGDEEASKKLIESNLRLVVSIAKKHTNRGLKLLDLIQEGNIGLMKAVEKFEYTKGYKFSTYATWWIRQAITRAIADQGRTIRIPVHMIETINKIKKESRIYLQETGKDASPEILAERLGMEVDKIKAIQEMNQEPISLETPVGSEEDSELGDFVEDQKTTSPYEATNRAILREELDAVLKTLSPREEKVLRYRYGLDDSSPKTLEEVGKIFNVTRERIRQIEVKALRKLRHPSRKKKLEDFKVD

SEQ ID NO: 11993 - protein, 638 aa, Bifidobacterium longum DJO10A
MTQTNNLYDVVVIGGGPAGLTAGLYLARARYRVLILEKDDFGGQITITNEVVNYPGVGRTTGRALTQTMRQQAQDFGAEFLSAEATGLDVDGDIKTVHTSRGDLKTFGILIATGASPRKLGFEGEAEYAGRGVAYCATCDGEFFTGKEVLVVGGGFAAAEESVFLTKYASKVTVLVREPDFTCDAAVAAEAKNNPKIDVRYQVELKGVTAGQGGLREASILNLATGQTETWKPADAGTFGVFVFAGYVPATDLVRGVVELDDHGYVVTHDYLRTSVPGVYAAGDLRVKNLRQVVTATADGAIAAVELERYAKQMSEKTGLVPPRPTASAYEESEAKAASAASAAGTTPAPAPAKRSADAAAAASAAKKPGELFSAAVKQQLGVVFGRMTRPVTLALELDGTPLSAELQGFIGEMVALSGGKLNSVAVDAAGLITAVDGASVPTSLVVGEPLSVTLPDGTELPTYGSLDDSGRATFDVAGVLPLARPTVRICVPAEGDGKAGKDGNGSLVFTGLAFHGVPSGHEFNSFVLGLYNVAGPGQPLGDDLIERAKSITDPLNIMILVSLTCTMCPETVLASQRIASLSPAVRAEAYDVSHFPELKDQYGAMSVPCIVITHADGTQQVEFGKKSIPQMLELVGA

SEQ ID NO: 11994 - protein, 467 aa, Burkholderia mallei ATCC 23344
MSLFRKKNVDRMIAGAQAAGLKKALGAVDLTFLGIGAIIGTGIFVLSGTGAVQAGPALMLSFVIAAIACGLAALSYAEFASTIPVAGSIYTYSYATLGELVAWIIGWDLMLEYGLAASAVSVGWSGYLQSLLQGFGVSLPTALTAAPGALPGVVTYFNLPAFVVMLVITTLLSIGIRESTRVNNIMVFIKVAVVLLVIAVGVFHVTPVNWKPFMPHGWNGVFGAAAVMFFAFIGFDAVSSAAEEVKNPKRDLPVGIIASLGVCAFLYVAVAAIATGIVPWAQYANVSHPISYALQVAGEKWVAGFIDLGAVIGMLTVILVMSYGQTRIIFAMSRDGLLPAALSRVHPRFATPFLTTWLVGLFFGLIAALIPLNVLAELINIGTLAAFSMVSIAVLVLRRTHPDLPRAFRCPGVPLVPILAVAACLFLMLNLQPVTWIAFLTWLVIGLFVYFAYSRSRSKLAHGAQQH

SEQ ID NO: 11995 - protein, 401 aa, Staphylococcus aureus subsp. aureus MSSA476
MVTRSVLKYGGSSVSDFTKIKRIAEMLKERVNQDEQLIVVVSAMGNTTDQLMTNVSTLTKAPKQQELALLLTTGEQQTVSYLSMVLNDIGVNAKAMTGYQAGIKTIGHHLKSKIAQINPQTFEQAFQENDILVVAGFQGINEHQELTTLGRGGSDTTAVALAVSNQIPCEIYTDVDGVYATDPRLLPKAKRLDIVSYEEMMEMSALGAGVLETRSVELAKNYNIPLYLGKTLSNVKGTWIMSNEEILEKKAVAGVALDKHMMHVTISYPLPDNQLLTQLFTELEEGAVNVDMISQIVNLDGLQLSFTIKDSDFHQISMILETLKNQYEALAYKINEHYVKISLIGSGMRDMSGVASKAFLTLIENNIPFYQTTTSEISISYVIDDFNGQQAVEKLYDAFNI

SEQ ID NO: 11996 - protein, 353 aa, Staphylococcus aureus subsp. aureus Mu50
MSRITQVHRILEQKHLDAIIILSDYNRRYLSGFTGTSGALIISKDKQYLITDFRYIDQATKQAPNYEIINRKSTIIGEIKELLHQENFENIGFEGHHVSYDTYLELNKSRISLISISNTVDKIRDVKDVDEIALIQKAANIVDETYEYILTVVKAGMTEKELKAILESKMLELGADGPSFDTIVASGHRGALPHGVASDKIIEKGDMITLDFGAYYNGYCSDITRTFAIGEPDPKLKEIYQIVLESQMKAINEIRPGMTGAEADAISRNYLESKGYGKEFGHSLGHGIGLEIHEGPMLARTIQDKLQVNNCVTVEPGVYIEGLGGIRIEDDILITENGCQVFTKCTKDLIVLT

SEQ ID NO: 11997 - protein, 917 aa, Bifidobacterium longum DJO10A
MATPEEQITPADAAIVTTGTGRKGPEEHDLPESLKYDMDLCLEILRNVLGEYNPELLSTFDTVRHYAVEASAEHFAELKDPNPDQDGLKEAVNVIDNMTLHDAQLLARAFATYFHLANLSEENYRVSVLHERENNVPVDQAVDPINELTVAYHQLINETGPAKAKELLNQLEFHPVFTAHPTEARRKAVEGKIRRVSELLEEYKRLGGSDKKECLRRLYNEIDALFRTSPIALKKPTPVEEADTILDIFDNTLFNTIPKVYRRFDDWVLGDKAGLVEPACPAFFHPGSWIGSDRDGNPNVTAKVSRAVARKFSDHVIAALEEATRTVGRNLTMEAETTPPSAELKSLWSHQKEMSERLTDKAALISTKEMHRAVMLVMADRLHYTIERDADLMYHSCDDFLADLKVVQRSLAAAGAKRSAYGPLQDLIWQTETFGFHMVEMEFRQHSVVHARALADIREHGLHGERGELQPMTHEVLDTFRALGAIQKRNGLKAARRYIISFTKSAQNIKDVYELNRLAFSHPEDVPTIDVIPLFEQLEDLQNSVDVLEEMIKIPEVQARLKATGNKLEVMLGYSDSSKDAGPTSATLALHSAQERIAKWAESHDIDLTLFHGRGGAVGRGGGPANRAVLAQPVGSVKCRFKLTEQGEVIFARYGNPVLAIRHVESVAAATLLQSAPSVEKRNTEMTEKYADMAAQLDEAAHNRFLDLLNTDGFAPWFSIVTPLTEIGLLPIGSRPAKRGLGAKSLDDLRTIPWIFSWAQARINLAAWYGLGTACEKFGDLETMRQAYEEWPLFSTFIDNIEMSIAKTDERIARMYLALGDREDLNEKVLNEMELTRKWVLAIVGDKWPLQHRHVLGQAIRIRSPYVDALSVTQVLALKSLRKKVDKEELSQSQQAGFIYLILCTVSGVAAGLQNTG

SEQ ID NO: 11998 - protein, 372 aa, Camellia sinensis
MKRMSPYPEQDSHLQNPMFVFDGLYCEEEHFEDDLGEYGLEQGSDNCDENVKGPLVFLEHDWDWDDDELVSLISKEKETHLGLSVLNSDESLMVARRESVDWILRVIAHYGFTVLTTVLAVNYFDRFISSLSFQREKPWMSQLVAVACLSLAAKVEETQVPLLLDFQVEESKFVFEAKTIQRMELLVLSTLQWKMNPVTPLSFVDHIVRRFGFKTNLHLEFLWRCERLLLSAITDSRFGCYLPSVLAAATMLHVIKEVEPSNVLDCQNELMDVLKMSKDKVDDCYKLILELPGNNSQMQCQTHKRKYQSIPNSPNGVIDVNFSCDSSNDSWAVTSSVSSSPEPLFKKSRVHGQQMRLAPLRHMSVGVVGSPR

SEQ ID NO: 11999 - protein, 374 aa, Chromobacterium violaceum ATCC 12472
MTISPIQDIIADIQAGKMVVLMDAEDRENEGDLVMAAEFVTPEAINFMAKYGRGLICLTLTEERCKLLNLPMMATNNGTSFGTNFTVSVEAAEGVTTGISAADRAHTIKTAVARLAKASDLVQPGHVFPLKAQNGGVLIRAGHTEAGCDLAMLAGVEPAGVICEIMNDDGTMARLPELLEFAKQHGLKIGTISDLIQHRSRTESLVEKVGERPVETPFGSFDLHVFRDITTSATHLALSKGKIRPDKEILVRVHEPLSVIDVLAPLCSHHSWTLPNALETMEEEGCGVMVLLYRDETGADLAQRALDQEPPRQKWDSKTFGIGAQMLKALGVGKMKLMSSPVSLPSMAGFELEVTGFCQPGHFHVDRDGGPGVA

SEQ ID NO: 12000 - protein, 337 aa, Streptococcus mutans UA159
MRRKRYMSETKVVALREAINLAMSEEMRKDEKIILMGEDVGIYGGDFGTSVGMLAEFGEKRVKDTPISEAAIAGSAVGAAQTGLRPIVDLTFMDFVTIAMDAIVNQGAKANYMFGGGLKTPVTFRVASGSGIGSAAQHSQSLEAWLTHIPGIKVVAPGTVNDAKALLKSAIRDNNIVIFMEPKALYGKKEEVNLDPDFYIPLGKGEIKREGTDVTIVSYGRMLERVLKAAEEVAAEDISVEVVDPRTLIPLDKDLIINSVKKTGKVILVNDAYKTGGFIGEIASVITESEAFDYLDAPVLRLASEDVPVPYSHVLETAILPDVAKIKEAIYKQVRKR

SEQ ID NO: 12001 - protein, 248 aa, Mycobacterium sp. JLS
MGDSTLILLRHGESEWNAKNLFTGWVDVDLTDKGRAEATRAGELIADLDRLPDELYTSLLRRAITTANIALDKADRHWIPVHRDWRLNERHYGALQGLNKAETKEKYGEEQFMAWRRSYDTPPPPIEAGSEYSQDRDPRYADIDGGPLTECLADVVARFVPYFEQTIVPDLREGKTVLIAAHGNSLRALVKYLDGMSDEDVVGLNIPTGIPLRYDLDSDLKPTVAGGTYLDPEAAAAGAAAVASQGAK

SEQ ID NO: 12002 - protein, 455 aa, Streptococcus mutans UA159
MAVEIIMPKLGVDMQEGEIIEWKKQEGDEVKEGEILLEIMSDKTNMEIEAEDSGVLLKIVKGNGQVVPVTEVIGYIGQAGEVLEIADVPASTVPKENSAAPAEKTKAMSSPTVAAAPQGKIRATPAARKAARDLGVNLNQVSGTGAKGRVHKEDVESFKAAQPKATPLARKIAIDKGIDLASVSGTGFGGKIIKEDILNLFEAAQPVNDVSDPAKEAAALPEGVEVIKMSAMRKAVAKSMVNSYLTAPTFTLNYDIDMTEMIALRKKLIDPIMEKTGFKVSFTDLIGLAVVKTLMKPEHRYLNASLINDATEIELHQFVNLGIAVGLDEGLLVPVVHGADKMSLSDFVIASKDVIKKAQTGKLKATEMSGSTFSITNLGMFGTKTFNPIINQPNSAILGVGATIQTPTVVDGEIKIRPIMALCLTIDHRLVDGMNGAKFMVDLKKLMENPFTLLI

SEQ ID NO: 12003 - protein, 362 aa, Dehalococcoides ethenogenes 195
MKQLNTRLALLRKLMAENELDGLLVSKPENIFYLSGFTGGEGHLLITQTHAFIAVDFRYYEQAENESPEYTLCKVTNGMSRWLPELLSSEHIRRLGFESFYITFEEYSKLKTALSKGGLDILLTETADLAGKLRQIKSEKEIDAIKQAAAIGDAAFSALPSLLKPGITEQQLAWELEKFMRNHGSQSMPFEVIAATGANSALPHARTRPAAVVYGQPLLMDYGAKVNWYASDMTRTVLQGKADSQFKKIYDIVLAAQQKAIDQITSGMTGQEADTIARDVIEKAGYGANFGHSLGHGVGLEVHEAPRLSPRSTDILEDGMVFSIEPGIYLPGWGGIRIEDTCTLKNGKIELLSKSDKQNPYI

SEQ ID NO: 12004 - protein, 186 aa, Brassica napus
  misc_feature (42)..(42): Xaa can be any naturally occurring amino acid
LDPRVRTGAKLSRSEHSMGASSEPKSIYDFTVKDAKGNDVDXSTYKGKVLLIVNVASQCGLTNSNYTELAQLYQKYKDHGFEILAFPCNQFGNQEPGSNEEIVQFACTRFKAEYPIFDKVDVNGDSAAPIYKFLKSSKGGLFGDGIKWNFAKFLVDKDGNVVDRYAPTTSPLSIEKDLKKLLGVTA

SEQ ID NO: 12005 - protein, 319 aa, Vibrio parahaemolyticus RIMD 2210633
MSDVKHCKLLILGSGPAGYTAAVYAARANLNPVLVTGMQQGGQLTTTTEVENWPGDAEGLTGPALMERMKEHAERFETEIVFDHINEVELSQRPFRLKGDSGEYTCDALIISTGASAKYLGLESEETFKGRGVSACATCDGFFYRNQKVAVVGGGNTAVEEALYLSNIASEVHLIHRRDSFRAEKILINRLMDKVENGNIILHTDRTLDEVLGDDMGVTGVRIKDVNTGTTEDLEVMGAFIAIGHQPNTQIFEGQLEMKDGYIVVKSGLEGNATQTSIEGVFAAGDVMDHNYRQAITSAGTGCMAALDAERFLDALSDK

SEQ ID NO: 12006 - protein, 193 aa, Escherichia coli
GIDTANMFEFWDWVGGRYSLWSAIGLSIVLSIGFDNFVELLSGAHAMDKHFSTTPAEKNLPVLLALVGIWYNNFFGAETEAILPYDQYMHRFAAYFQQGNMESNGKYVDRNGNVVDYQTGPIIWGEPGTNGQHAFYQLIHQGTKMVPCDFIAPAITHNPLSDHHQKLLSNFFAQTEALAFGKSREVVEQEYRD

SEQ ID NO: 12007 - protein, 494 aa, Acinetobacter sp. ADP1
MKNPVTFSQRLLRRKPINFLVQETQQGGKTLKRSLTLFQLTMFGVGATIGTGIFFVLSEQVPVAGPAVLISFILAGITAGLTALCYAELSSMIPASGSSYSYAYATLGEGVAFLVAACLILEYGVSAAAVAIGWSEYLNNLIHNVFGVHLPNWLLSAPFVADGYKLHLGGTGLINLPAAILVFLCCMLLMRGVTESARINAVMVLIKLCVLILFISIAATAFNAEHLTPFSPHGFAGISAAAGSIFFTFIGLDAVSTAGEEVENPRRNLPLAIISALFVVIIFYILVALTALGAQEQGLFKGQQAGLAVILQEITGSTWPAIILAAGAVISVFSITLVVLYGQTRILFAMSRDGLAPKIFHRVSTQTLTPNANTLIVAVIVSIIAGFVPADVLWDLTSMGTLIAFTVVSIGVLVLRYRMPDAPRGFKVPFFPALPVLSICACLYLISSLSAIVYVIAAIWAVIAATYYFSCASKNSVLEAGSEAYSHQNGDDHQ

SEQ ID NO: 12008 - protein, 487 aa, Bacillus licheniformis ATCC 14580
MTITFQDFQLSSDLTKAIKRMGFEEATPIQAQTIPLGLANKDVIGQAQTGTGKTAAFGIPLVEKINPESPNIQAIVIAPTRELAIQVSEELYKIGQDKRARVLPIYGGQDIGRQIRALKKNPHIIVGTPGRLLDHINRRTMRLQTVNTVVLDEADEMLNMGFIEDIESILSNVPAEHQTLLFSATMPAPIKRIAERFMTNPEHVKVKAKEMTVSNIQQFYLEVHERKKFDTLTRLLDIQSPELAIVFGRTKRRVDELTEALNLRGYTAEGIHGDLTQAKRMVALRKFKQGAIEVLVATDVAARGLDISGVTHVYNFDVPQDPESYVHRIGRTGRAGKTGMAMTFITPREKDMLRAIEQTTKRKMDRMKAPTLDEAIEGQQQVTVDRIRTIIEENNLNFYMTAAAELLEDHDSVTVVAAAIKMMTKEPDNTPVRLTEEAPLRTKRNKNHHHRSSKRRDGGGYRGKNNRSSYDKKRSSNDRRQKKSYNS

SEQ ID NO: 12009 - protein, 193 aa, Escherichia coli
GIDTANMFEFWDWVGGRYSLWSAIGLSIVLSIGFDNFVELLSGAHAMDKHFSTTPAEKNLPVLLALIGIWYNNFFGAETEAILPYDQYMHRFAAYFQQGNMESNGKYVDRNGNVVDYQTGPIIWGEPGTNGQHAFYQLIHQGTKMVPCDFIAPAITHNPLSDHHQKLLSNFFAQTEALAFGKSREVVEQEYRD

SEQ ID NO: 12010 - protein, 141 aa, Glycine max
  misc_feature (62)..(62): Xaa can be any naturally occurring amino acid
RDRIWVTKASVAVEQQTKVALIRIGTRGSPLALAQAYETRDKLMASHPDLAEEGAIEIVIIXTTGDKILTQPLADIGGKGLFTKEIDEALLNSEIDIAVHSMKDVPTYLPDKTILPLELPVEVMTIKWQNTLIHLIMKKQG

SEQ ID NO: 12011 - protein, 80 aa, Penicillium dipodomyicola
LFYAVGHDPANALVKGQVELNDEGYIVTKPGTSFTNVEGVFACGDVQDKRYRQAITSAGSGCVAALEAEKFLSETETHQE

SEQ ID NO: 12012 - protein, 94 aa, Zea mays
KEQFSDGVGYGWIDALKDTAEKQVTDEMMKNPKPEWGNDIPDTKEAYWYRCMFDEHFPPHCASTVMRWTPTWSKQTDPSGRAIATHNAKYDSAA

SEQ ID NO: 12013 - protein, 367 aa, Vibrio sp. Ex25
PADYNGIKVFIESGRDADEIITEKIETQISTLTAQDVKSVDFDQAVEDKLIEIINPMNEFVDSIIDFIDIEAIKKANLRVLIDPMFGVAKNALQTVLINGRCEVDVINDGKNPDFGGLMPSPSAATLYRLMHLVEQEGYDIGIGTDGDADRLGIIDEKGNFIHPNEVLILLYYYLLKYKGWKGSVVRNIATTHLLDKIAEDHGEKCFEVPVGFKHISSQMEADDSLIGGESSGGLTIRGHIKGKDGVFASSLLVEMISVTGKKLSELLDEIYGKYGYAYMAEGDCKFKPAQKEVLFNKIYVEKQLPEFEFDIEKVSYEDGAKVYFKNGGWIIARFSGTEPLLRIFAEMQDKDTAERVLQQFKEFLSL

SEQ ID NO: 12014 - protein, 295 aa, Arabidopsis thaliana; identical to SEQ ID NO: 444

SEQ ID NO: 12015 - protein, 80 aa, Penicillium nalgiovense
LFYAVGHDPASGLVKGQVELDDEQYIITKPGTSFTNVEGVFACGDVQDKRYRQAITSAGSGCVAALEAEKFLAETETHQE

SEQ ID NO: 12016 - protein, 318 aa, Zea mays
  misc_feature (104)..(104): Xaa can be any naturally occurring amino acid
MACYNNTASLAATLLAFALMFQACVAGRRRLTALVQEPAITMKYHKAALLSGPIAVNFIWYGDFTAPQRAVITDFVSSLSAAPRAAAQSQPEPSVATWFKTARXYYASSKVPFPALRLGSHAVDRNCSLGRRLTERDLLRLAARGAPSRAINLVLTAADVAVDGFCESRCGTHGASPRSRSGRFAYAWVGNPASQCPGQCAWPFHQPVYGPQAAPLTPPNGDVGVDGMVISLASMLVGTVTNPFGNGFYYQEGSADAPLEAATACAGVYGKGAYPGYAGALLVDPASGASFNANGAHGRKYLVPALVDPDTSSCATLG

SEQ ID NO: 12017 - protein, 397 aa, Glycine max
MAGAALSPPTSSKSVTQTVNGSHKFVIEGYSLAKGMGVGKHIASDVFTVGGFHWAIYFYPDGKNPEDNSAYVSVFIALASEGTDVRALFELTLLDQSGQGKHKVHSHFDRSLETGPYTLKYKGSMWGGYKRFFRRSLLETSEFLKNDCLKINCTVGVVVSAIDCPQLHSINIPESDIGSHFGALLDNMEGSDITFDVAGDKFPAHKLVLAARSPEFRSKFFNGLDEEKNEIIVTDLEPKVFKAMLHFIYKDTLTEEVDTVSSTTTSDFPVSEILTAKLLAAADKYDLGRLRLMCESRLCKDICVNSVANILTLADHCHATELKAVCLKFAAQNLAAVMRSDGFEHMKEKGPWLQSEILKTIAGCEGDGCSAVEKSQSVWGQLSDGGDMNGRRVRQRI

SEQ ID NO: 12018 - protein, 423 aa, Streptomyces maritimus
MSRHVVITGLSVLAPGSTDTEGFWKMITAGRSAIRRITAFDPTPFRSQVAGEVDLDPLACGFSRREVRRLDRASLLAVACARRAVAEAGITSGTSIDPGRIGVSVGNAVGSATSIENEYVVLSDEGRQWLVDQKYQSPHLFDYFVPGSLARETAWAAGAEGPVSVISAGCTSGIDALGHACQLIQEGSADVMVAGATDAPVTPIAVACFDAIKATTRRNDDPEHAPRPFDRTRDGFAIAEGAAMLVLEDSEHARRRGADIYGTITGYAAHSNAYHMTGLSRDGNEMARAITTALDEARTDPTAVGYINAHGSGTKQNDLHETEAFKKALGEHAYNVPVSSIKSMIGHSLGAIGAIEVATCALAIRNGVVPPTANLHEPDPDCDLDYVPLEARDVDLDVVLTVGSGFGGFQSAMIVEKWRGGHV

SEQ ID NO: 12019 - protein, 455 aa, Streptococcus equi subsp. zooepidemicus
MSKIVVVGANHAGTACIKTMLTNYGDANEIVVFDQNSNISFLGCGMALWIGEQISGPEGLFYSNKEELESLGAKVYMESPVQSIDYDAKTVTALVDGKEHVESYDKLIFATGSQPILPPIKGAEIKEGSLEFEATLENLQFVKLYQNSADVISKLENKDIKRVAVVGAGYIGVELAEAFQRKGKEVVLIDVADTCLAGYYDRDLTDVMSKNLEEHGIQLAFGETVQEVAGDGKVEKLITDKNEYDVDMVILAVGFRPNTALGAGKIELFRNGAFLVNKHQETSIPGIYAIGDCATIYDNATRDTNYIALASNAVRTGIVAAHNACGTALEGIGVQGSNGISIYGLHMVSTGLTLEKAKCLGFDAAVTEYTDNQKPEFIEHGNFQVTIKIVYDKESRRILGAQMASHEDISMGIHMFSLAIQEEVTIEKLALTDIFFLPHFNKPYNYITMAALGAE

SEQ ID NO: 12020 - protein, 480 aa, Pseudomonas syringae pv. tomato str. DC3000
MQLKDSTLFRQQAYINGQWLDADGGQSIKVNNPATNEILGTVPKMGAAETRRAIEAADKALPAWRALTAKERGNKLRRWFELMIENQDDLGLLMTLEQGKPLAEAKGEITYAASFIEWFAEEAKRVYGDVIPGHQPDKRLIVLKQPIGVTAAITPWNFPAAMITRKAGPALAAGCTMVLKPASQTPFSALALAELAERAGIPAGVFSVVTGSAGDIGSELTGNPIVRKLSFTGSTEIGRQLMAECAKDIKKVSLELGGNAPFIVFDDADLDKAVEGAMISKYRNNGQTCVCANRIYVQDGVYDAFAEKLKVAVGKLKIGNGLEDGITTGPLIDEKAVAKVKEHIADAVSKGATVLTGGNSLEGSFFEPTILVNVSKDAAVAREETFGPLAPLFRFKDEAEAIALANDTEFGLASYFYAQNMSRVFRVAEALEYGMVGINTGLISNELAPFGGIKSSGLGREGSKYGIEDYLEIKYLCLSV

SEQ ID NO: 12021 - protein, 346 aa, Streptomyces cinnamonensis
MTTRPDTKTALSQKTALSQLLTEIEHRNPAQPEFHQAAREVLETLAPVIAARPEYAEAGLIERLCEPERQIVFRVPWQDDHGRVRVNRGFRVEFNSALGPYKGGLRFHPSVNLGVIKFLGFEQIFKNALTGLGIGGGKGGSDFDPRGRSDAEVMRFCQSFMTELYRHIGEHTDVPAGDIGVGGREIGYLFGQYRRITNRWEAGVLTGKGRNWGGSLIRPEATGYGNVLFAAAMLRERGETLEGRTAVVSGSGNVAIYTIQKLAALGANAVTCSDSSGYVVDEKGIDLDLLKQVKEVERARVDTYAQRRGASARFVPGRRVWEVPADIALPSATQNELDADDATALI

SEQ ID NO: 12022 - protein, 427 aa, Anaplasma marginale str. St. Maries
MFRFCMADRARVVVTGMGLVTPLGFQIPDVWDRLVNGKSGISAISGFDTHDLECRVGGQVISEGQSGENVFDPTQWVEEKDVKKADRFIIFGVAAADMALSDAGLLGTEFDPDRIGVLVGSGVGGLPCIERNVIAVHERGPRRVSPFFIPGSLVNLLPGHISIRHGLTGYCNASVSACATGAAAIADAARVIASGEADVMLAGGAEGALCRAAVAGFCIIKALSTKFNDTPELASRPWDRDRDGFVIGEGAGILVLESYEHAKMRGANIYAELVGYGITSDAYHVTAPHPEGRGGADAMKRALQMSGIAPESVGYINAHGTSTPVGDSVEISAIKSVFGDHAYRMPISSTKSSIGHLLGAAGGVEAIFSILSIRNGVVPPTLNLQNSSEDSNLNLVPLNAQEHKVSSAMSNSFGFGGVNASLVFGAV

SEQ ID NO: 12023 - protein, 597 aa, Vibrio cholerae O1 biovar eltor str. N16961
MSNLHSQRLADFRHWLHTQQLDAFIVPHEDEYLGEYVPEHNERLHWLTGFTGSAGAAIVTLSGAAIFVDGRYTVQVRKQVSSELFEYCHLIEQPYLNWLVTQLPAGAKVGYDPRMHRGSWLTQAQKQLAGKINLCAVSSNPIDLLWQDRPVPAASEMRLIPLDRVGQSSLEKRQSIASTLRDKNADCVVLTELDSIAWLLNIRGLDVSRLPVLLSHAIVHNDSSVDFFFDPARLATDFDAHVAGTVRVHHPDQLEAQLHQLSGRRVMLDSATSNAWFTLTLQNAGAELLNEADPCLLPKAAKNNTEIAGMRACHIRDGAAMVQFLAWLDNEVANGRLHNEAELADRLEAFRRQDPTLVDLSFDTISAAGTNAAMCHYNHQNQPEPGQLSMDSLYLVDSGGQYLDGTTDITRTVAIGQVSAEMKQQFTLVLKGHIALARARFPKGTTGSQLDVLARQHLWAQGYDYDHGTGHGVGHFLSVHEGPQRIAKVHNSVALRPGMVLSNEPGYYRADAFGIRIENLELVTEFATQGDFSVLGFESLTRCPIDKRAIEVNLLTKPELHWLNQYHQKVWDEVSPLIKEAHVREWLQQATSPLSHV

SEQ ID NO: 12024 - protein, 425 aa, Actinomadura hibisca
MSRPQGGGPRRVAITGMGVVAPGGSGRKAFWNLLTDGRTATRKISLFDPAGFRSRIAAECDFDPAAEGLTPREVRRMDRAAQLAVVSAREALADSGLVAGEGDPARFAVSLGSAVGCTMGLEDEYVVVSDQGRDWLVDHSYGVPHLYRHLVPSSLAAEVAWAGGAEGPVTLISTGCTSGLDAVGHGARVIAEGSADVALAGATDAPISPITVACFDAIRATSPNNDDPEHASRPFDRERNGFVLGEGAAVFVLEELEHARRRGAHVYCEVAGYATRGNAYHMTGLKPDGREMAEAIRVAMDAARVAPADLDYINAHGSGTKQNDRHETAAFKRSLGERAYELPVSSIKSMVGHSLGAIGSIELAACALAIEHGVVPPTANLHNADPECDLDYVPLVAREGRIRTVLSVGSGFGGFQSATVLREAA

SEQ ID NO: 12025 - protein, 449 aa, Salmonella enterica subsp. enterica serovar Typhi str. CT18
MTEIVVSKFGGTSVADFDAMNRSADIVLSDANVRLVVLSASAGITNLLVALAEGMEPGERFATLDAIRKIQFDILDRLRHPNVIREEIERLLENITILAEAASLATSAALTDELVSHGELMSTLLFVEILRERDVQAHWFDVRKVMRTSDRFGRAEPDVAALAELAAQQLLPRLSETLVITQGFIGSESKGRTTTLGRGGSDYTAALLAEALHAARVDIWTDVPGIYTTDPRVVPVAQRIDEIDFEEAAEMATFGAKVLHPATLLPAVRSDIPVFVGSSKDPQAGGTLVCNKTQNPPLFRALALRRNQTLLTLHSLNMLHSRGFLAEVFGILARHNISVDLITTSEVSVALTLDTTGSTSTGDTLLTQSLLMELSALCRVEVEEGLALVALIGNNLSKACGVGKEVFGVLEPFNIRMICYGASSHNLCFLVPGDDAEKVVQKLHQNLFE

SEQ ID NO: 12026 - protein, 549 aa, Salmonella enterica subsp. enterica serovar Typhi str. CT18
MKNINPTQTSAWQALQKHYDEMKDVTIAELFANDSDRFAKFSATFDDLMLVDFSKNRITEETLAKLQDLAKETDLAGAIKSMFSGEKINRTEDRAVLHVALRNRSNTPIIVDGKDVMPEVNAVLEKMKTFSQAIISGQWKGYTGKAITDVVNIGIGGSDLGPFMVTEALRPYKNHLTMHFVSNVDGTHIAEVLKKVNPETTLFLVASKTFTTQETMTNAHSARDWFLKSAGDEKHVAKHFAALSTNAKAVGEFGIDTANMFEFWDWVGGRYSLWSAIGLSIILSVGFDNFVELLSGAHAMDKHFSTTPAEKNLPILLALIGIWYNNFFGAETEAILPYDQYMHRFAAYFQQGNMESNGKYVDRNGNAVDYQTGPIIWGEPGTNGQHAFYQLIHQGTKMVPCDFIAPAITHNPLSDHHQKLLSNFFAQTEALAFGKSREVVEQEYRDQGKDPAQLEHVVPFKVFEGNRPTNSILLREITPFSLGALIALYEHKIFTQGVILNIFTFDQWGVELGKQLANRILPELGDDKAISSHDSSTNGLINRYKAWRA

SEQ ID NO: 12027 - protein, 540 aa, Streptococcus mutans UA159
MYAHDILNDPFLNKGTAFTMEERKKFGLIGLLPPHIQTLKEQAEQTYAQMQTKANNLEKRLFLMEIFNTNRTLFYYLFSQHLEELNPIVYDPTIADTIEGYSDLFVDPQYAGYLDINHPENIEATLKNAAGDRDIRLIVVTDAEGILGIGDWGTNGVDISVGKLMVYTGAAGIDPVTVLPLVIDAGTNREELRNNPNYLGNRHERVRGERYYDFVDQFVQTAERLFPKLYLHWEDFGRSNAANILEKYRKEIPTFNDDIQGTGIVTLGGIFAAMDITGEKLTDQVYLCYGGGTAGAGIASRVLREMVSEGLPEDEAYKRFFMVDKQGLLFDDMDDLTPEQKPFAKKRADFPNADQLTDLLQVVKTVKPTILVGTSTNPGAFTKEVVEAMCENTERPVIFPISNPTKLAEASAQDLITWSDGKAFVATGIPADTVSYKGVDYVIGQANNALIYPGLGLGMLASEASLLTDEMIGAAAHSLSGIIDITKPGAPVLPPFKYVGDVSIKVAEAVAKKAQEQGLARAEETDMAKAVRDFKWYPEY

SEQ ID NO: 12028 - protein, 153 aa, Brassica napus
ITKGEKKRMCKLMDCRKLSVEACMHAVQNDRLPLRVVVQVLFFEQVRASASSGSSTPDFPKGIRELRSCGTYGSSRSVPTVMEDEWDAVATEEEMRALKSEIAALKLQEESGRKSTDKAAVTAISRVKSLIMSRKMFGKKLQGKAVVGEKNYG

SEQ ID NO: 12029 - protein, 392 aa, Neisseria gonorrhoeae FA 1090
MEFVYDVAESAVSPAVIKVIGLGGGGCNAINNMVANNVRSVEFISANTDAQSLAKNHAAKRIQLGTNLTRGLGAGANPDIGRAAAQEDREAIEEAIRGANMLFITTGMGGGTGTGSAPVVAEIAKSLGILTVAVVTRPFSYEGKRVHVAQAGLEQLKEYVDSLIIIPNDKLMTALGEDVTMREAFRAADNVLRDAVAGISEVVTCPSEIINLDFADVKTVMSNRGIAMMGSGYAQGIDRARMATDQAISSPLLDDVTLDGARGVLVNITTAPGCLKMSELSEVMKIVNQSAHPDLECKFGAAEDETMSEDAIRITIIATGLKEKGAVDPTPAREVEAVAPSKQEQSHNVEGMIRTNRGIRTMNLTAADFDNQSVLDDFEIPAILRRQHNSDK

SEQ ID NO: 12030 - protein, 562 aa, Vibrio parahaemolyticus RIMD 2210633
MNNDKRPLYIPYAGPALMATPLLNKGSAFSAEERSSFNLEGLLPETTETIQEQVERAYQQYKSFESDMDKHIYLRNIQDTNETLFYRLVQNHISEMMPIIYTPTVGAACENFSNIYRRGRGLFISYPNRDRIDDLLNNAANHNVKVIVVTDGERILGLGDQGIGGMGIPIGKLSLYTACGGISPAYTLPIVLDVGTNNPQRLADPMYMGWRHPRITGPDYDAFVEEFIQAVQRRWPDALIQFEDFAQKNAMPLLERYKDRICCFNDDIQGTAAVTVGSLLAACKAAGTQLSKQRITFLGAGSAGCGIAEAIIAQMVSEGISDEKARSQVYMVDRWGLLQEGMPNLLDFQQRLVQKHSNTKEWENEGNGFSLLDVMRNAKPTVLIGVSGAPGLFSQEVIEEMHKHCKRPIVFPLSNPTSRVEATPNDIIRWTNGEALVATGSPFDPVVHEGRTYPIAQCNNSYIFPGIGLGVLAVNAKRVTDEMLMESSRALATCSPLAINGRGALLPPLEEIHLVSKKIAFAVAKKAIEQGVALEITDEALNDAIDQAFWQPVYRRYKRTAF

SEQ ID NO: 12031 - protein, 126 aa, Triticum aestivum
  misc_feature (109)..(109): Xaa can be any naturally occurring amino acid
  misc_feature (120)..(120): Xaa can be any naturally occurring amino acid
MAASMITSPIVAPTSVPSLSRRGSSFAVVCSGGKKIKVDKPLGLGGGLTVDIDANGRKVGKKGVYQFVDKYGANVDGYSPIYTPEEWSESGDRYAGGTTGLLIWAVTSXLLGGGVLLVYXTKRSRR

SEQ ID NO: 12032 - protein, 227 aa, Ralstonia solanacearum
MPSGDASADPIEARFDPAAMPARMAAALDAMRLGIPVVVLDDADRENEADLIIAADRLTHAGMAMLIRECSGIVCLCLTAEKAAVLGLRPMVEHNRSQYGTAFTVSIEARVGVSTGVSAADRITTIRAAVAPDADAQSVVSPGHVFPLVAQAGGVLARRGHTEGSVDLARLAGLSPAGVLCELMLPDGTMARRDDAVRFADQHGLPVLTIEDIARYREQMARAVSFA

SEQ ID NO: 12033 - protein, 450 aa, Rickettsiella grylli
MLFKHILVYLSLLSFAPFAWAQNVHEYHLKNGITLLVKEDHRSPIVLSEIWYKVGSSYEPHGITGISHALEHMMFRGTHQFGPGKLEKMVAENGGEQNAFTDLDFTAYYQKFSADKLALSFELEADRMKNLLLRSEDFAKEIQVIMEERRMRIDDNPQEILLERLNAAAFVANPYHHPVIGWNNDLQTMTIDDLRKWYKTWYVPNNAILVVVGDVKPKRVFQLAKTYFSTVSFLPLPRLKREKSIPPLGEKRLTIRTPAQLPWLAMAYPVPVIKKDSNNQDPYVLDLIATLLSGGNSARFAKNLIRGQQIAAEANASYNPISRLNNLFLLQATPTAGHSLSELESSLLQQIKQLQTFRVTSEELKRAKIQMTADKIYQNDSLAAQAYDIGSLAAINLPWQISRDYLKHINPITPRQVQKVANKYFLNTHLTIAYLLPLPLYSIHTHSLSG

SEQ ID NO: 12034 - protein, 370 aa, Listeria monocytogenes str. 4b H7858
MDKRRVVVTGIGAVTPIGNDAETSWENAKKGVNGVAKMTRLNPDDFPVKIAAELKDFDVEKYLEKKEARKMDRFTHYAIASAEMAVQDSGLVIDDSNANRVGVWIGSGIGGMETFETQYEIFLNRGHRRVSPFFVPMMIPDMGSGQVSIRFGAKGINSTTVTACATATNSIGDAFKVIERGDADAMITGGAEAPITKMSLAGFTANKALSLNPDPETACRPFDKDRDGFIIGEGAGIVILEEYEHAKARGAKIYAEIVGYGATGDAYHITAPAPNGEGAARAMKMAIDDAGLTPDKVDYINAHGTSTPYNDEYETQAIKTVFGDHAKKLAISSTKSMTGHTLGASGGIEAIFALLTIRDNIIAPTIHLKN

SEQ ID NO: 12035 - protein, 463 aa, Burkholderia xenovorans LB400
MSLFRKKSVEHMIAASAQNAGLKKALGALDLTFLGVGAIIGTGIFVLTGTGAVQAGPALMISFLIAALACGFAALAYAEFASTIPVAGSIYTYSYATLGELAAWIIGWDLMLEYGLATSAVSVGWSGYLQSLLSGFGVSLPVALTAAPGALPGHDTLFNLPAFLVMMAITALLSFGVRESARINNIMVAIKVIVVLLVICVGVFHVTPANWHPFMPNGWNGVFGAAAVMFFAFIGFDSVSSAAEEVKNPKRDLPIGIIASLGVCAVLYVAVAAVVTGIVPSAQFANISHPVSYALQVAGQKWVAGFIDLGAVLGMLTVILVMAYGQTRVIFAMSRDGLLPARLSRVHPRFATPFFTTWLVGIFFGLIGAVVPLNVLAELINIGTLAAFSMVSIAVLVLRKTHPELPRAFRCPGVPVVPVLAVASCLFLMINLQAVTWVAFVVWLLVGMVVYFGYSRRHSRLSS

SEQ ID NO: 12036 - protein, 69 aa, Oryza sativa
MADWGPVVIATVLFVLLTPGLLFQLPAHGRIVGFGTMHTSGVAVLVHAVIYFALITIFLIAIGVHIYAG

SEQ ID NO: 12037 - protein, 124 aa, Triticum aestivum
MAVVSRKTSTMVAAVAVVVALLLASASSASAAITCGQVGTALAPCIPYATGRASALPSSCCSGVRSLNGQARSISDRQAACRCLKSLANSVKSVNMGTVATIPGKCGVSVPFPISMSTDCNKVS

SEQ ID NO: 12038 - protein, 488 aa, Listeria monocytogenes
MADVRKLKNYIDGEWVESKTDKYEDVINPATGEVLCQVPISTRAELDQAAVIAEQAFEKWSQVAVPRRARVLFGFQQLLIQHKEELARLITLENGKNLSEARGEVQRGIENVEFAAGAPTLMMGDSLASIATDVEAANYRYPVGVVGGIAPFNFPMMVPCWMFPMAIALGNSFILKPSERTPLLMEKLVELFSEAGLPKGVFNVVYGAHDVVNGILENEIIKAVSFVGSKPVGEYVYKTGSANLKRVQALTGAKNHTIVLNDADLEDTVTNVISAAFGSAGERCMACAVVTVEEGIADEFLEALRTAAQNVKIGNGLDDGVFLGPVIREENQKRTIAYIEKGIEEGAKLTVDGRETGLSEGHFVGPTILEDVTTDMTIWKDEIFAPVLSVIRVKNLQEAVRVANQSEFANGACIFTNNAKAIRYFREKIDAGMLGVNLGVPAPMAFFPFSGWKSSFYGTLHANGKDSVDFYTHKKVVTARYSLKGYEE

SEQ ID NO: 12039 - protein, 493 aa, Prochlorococcus marinus
MQTNFLFMTTALQTPQRRSRSKLQDASLVNGPMLLLRSIRGFSSNRSMLWLATVPLALFGLGIFNLSAHAADLPELNAAFLANNLWLLIATILVIFMNAGFAMVEAGMCRSKNAVNILAKNLFVFALAVTSYWFIGYSLMYGGSVADGWLYFGGLFFDPTVTADMVTDAGLVPTVDFLFQSAFAGTAATIVSGLVAERVKFGEFVVFAIVLTAFIYPIAGSWKWNGGWLDSLGFVDFAGSSIVHSVGAWAGLVGAMLLGPRIGKYSDGKPQAMPGHNMAIATLGALILWIGWYGFNPGSQLAMDQWVPYVAVTTTLAAAAGAIGATIVSTLTSGKPDLTMIINGILAGLVSITAGCGDMTLAGAWFAGLVGGIIVVFSVAALDAAEIDDPVGAFSVHGVCGVWGTLVIGLWGTAVQGDGAGMGLFNGGGINLLLVQALGAAAYAIWTLVTCWIAWSIIGGLFGGIRVSEEEETQGLDISEHGMESYPDFASAK

SEQ ID NO: 12040 - protein, 94 aa, Methanosarcina barkeri str. fusaro
MAKKFTKKGRISRSAGRFGARYGRKDRKLVADLEERMRAPHVCTKCARPTVKRIGTGIWKCSKCGHTFAGGTYIPYTSVGQTLLRTMKNVAEAK

SEQ ID NO: 12041 - protein, 414 aa, Staphylococcus epidermidis RP62A
MTENNNLVTSTQGIIKEALHKLGFDDGMYDLIKEPIRFLQVRIPVRMDDGTVKTFTGYRAQHNDAVGPTKGGVRFHPEVDEEEVKALSMWMTLKCGIVNLPYGGGKGGIVCDPRQMSIHEVERLSRGYVRAISQFVGPNKDIPAPDVFTNSQIMAWMMDEYSALDKFNSPGFITGKPIVLGGSQGRDRSTALGVVIAIEQAAKRRGMDIKDAKIVIQGFGNAGSFLAKFLYDLGAKVVGISDAYGALHDPNGLDIDYLLDRRDSFGTVTNLFEDTISNKELFELDCDILVPAAISNQITEDNAHDIKASIVVEAANGPTTPEATRILTERDILLVPDVLASAGGVTVSYFEWVQNNQGYYWTEEEVNDKLREKLVTAFDTIYELSQNRKIDMRLAAYIVGIKRTAEAARYRGWA

SEQ ID NO: 12042 - protein, 128 aa, Glycine max
KPAPFPVEKSSVRGLPSPPRNSSSFKVVARGGKKIQPAHPYGINGGLPFREGVFASARKGKGKGVSPFVAQTGANVDGSRPFFAPQGWSPPGDVSPGGTPGLAIWAGPPLGFLAGGALLVSPPRALAP

SEQ ID NO: 12043 - protein, 369 aa, Thorea hispida
  misc_feature (365)..(365): Xaa can be any naturally occurring amino acid
KKPHVNIGTIGHVDHGKTTLTAAISATLALSGNTQLKKFDEIDAAPEEKARGITINTAHVEYETEFRHYAHVDCPGHADYVKNMITGAAQMDGAILVVSAADGPMPQTREHILLARQVGVPNLVVFLNKEDQVDDTELLELVELEVRELLSQYEFPGDDLPFVAGSALLALNYVTEYPDTIKGENKWVDKIHDLMKAIDNYIPTPERDIDKTFLMAVEDVFSITGRGTVATGRIERGIIKVGDTIEIVGLRETRTTTITGLEMFQKTLDEGLAGDNIGILLRGIQKKDIERGMVLAKPGTITPHTQFEAEVYILTQDEGGRHTPFFSGYRPQFYVRTTDVTGTITQFTADDGSAAEMVMPGDRIXMSAE

SEQ ID NO: 12044 - protein, 452 aa, Zea mays
MASAAVLRNAGSRRLFSYPTLRAAAIYVPSALPDAPAAAAAPAQPPPTAGTLWARSMATFTRTKPHVTVGTIGHVDHGKTTLTAAITKVLAEAGKAKAVAFDEIDKAPEEKARGITIATAHVEYETAKRHYAHVDCPGHADYVKNMITGAAQMDGGILVVSAPDGPMPQTKEHILLARQVGVPSLVCFLNKVDAVDDPELLELVEMELRELLSFYKFPGDEIPIIRGSALSALQGNNDEIGKNAILKLMDAVDEYIPDPVRQLDKPFLMPIEDVFSIQGRGTVVTGRVEQGTIKTGEDVEILGLAQTGPLKTTVTGVEMFKKILDHGKAGDNVGLLLRGLKRGDVERGQVVCRPGYSEDCKKFEAEIYVLTKDEGGRHTAFVTNYSPQFYFRTADVTGRVELLGEMKMVLPGDNVTANFDLISPVPLEPGQRFAIREGGRTVGAGVVSKVLS

SEQ ID NO: 12045 - protein, 369 aa, Thorea hispida
KKPHVNIGTIGHVDHGKTTLTAAISATLALSGNTQLKKFDEIDAAPEEKARGITINTAHVEYETEFRHYAHVDCPGHADYVKNMITGAAQMDGAILVVSAADGPMPQTREHILLARQVGVPNLVVFLNKEDQVDDTELLELVELEVRELLSQYEFPGDDLPFVAGSALLALNYVTEYPDTIKGENKWVDKIHDLMKAIDNYIPTPERDIDKTFLMAVEDVFSITGRGTVATGRIERGIIKVGDTIEIVGLRETRTTTITGLEMFQKTLDEGLAGDNIGILLRGIQKKDIERGMVLAKPGTITPHTQFEAEVYILTQDEGGRHTPFFSGYRPQFYVRTTDVTGTITQFTADDGSAAEMVMPGDRIKMSAE

SEQ ID NO: 12046 - protein, 368 aa, Candida albicans
MATLKNKNNHLKACSTYTDNENHFLVDSRYEIVRVLGKGSYGVVCSAIDTKSSVSAMEHKIAIKKVTKIFNKDILLIRAIRELKFMMFFRGHKNLDVVYVKPYEGLYCFQELADLDLARVLYSNVQFSEFHIQSFMYQVLCGLKYIHSADVIHRDLKPGNILVTTQGTLKICDFGLARGINPVYFRNRSAVITNYVATRWYRAPELIMSTKNYTKAVDIWAVGCILGELFGRRPLFPGKNSHEQIHELFKIIGNPPIETIKKYNWKVEGLLWVKYRPVKWKSLYPFAPLNALELLDSLLQWDYKARLGVEQILEPEFFKNLRNVHGEPSSKAIFDFSFEEKGKSIPQLKEILETEVRVFKEISKTGIE

SEQ ID NO: 12047 - protein, 372 aa, Candida albicans
MKKFTGPTQTRQVVFNISQNFKVLKILGEGAYGIVALAVHLPTETKVAIKKIEPFERPLFCLRTLREIKLLTKFKNHDNIVRLYDVQKPMNYDSFNEVYLIQGYMPSDLHNLIHTHLLSDQHVQYFIYQILKGLKMIHSARVIHRDLKPSNILVNEKCDLKICDFGLARLDTKHYNFDEAPRISMLTEYVATRWYRAPEIMLSASNYSTAIDLWSVGCILAELLTYRALFPGSDYINQLKLIFEVLGTPTDEDLQIIKSERAQKFIRSLPTKVKIDLSEFINNHPYRNIKHRGRDQVNPLAIDLLEKLLVFDPAKRITVQDALEHPYLNSYHEQLDEPVTSPIPIEEFDFDIDKKNLDTNDLKKQIFEIVMS

SEQ ID NO: 12048 - protein, 131 aa, Methanococcoides burtonii DSM 6242
MDDLEKIRQQRLEQIKKGLEAKAFPDAPIHVTDADFNEFIAKYPITVIDCWAEWCGPCRKLIPIIDALAKEYQGKIVFGKLNTDENQMVARNFNITAIPTILVFKNGNAATQIVGALQKEQLVEHLNKFIQ

SEQ ID NO: 12049 - protein, 108 aa, Escherichia coli B
SDKIIHLTDDSFDTDLVKADGAILVDFWAEWCGPCKMIAPILDEIADEYQGKLTVAKLNIDQNPGTAPKYIERGIPTLLLFKNGEVAATKVGALSKGQLKEFLDANLA

SEQ ID NO: 12050 - protein, 336 aa, Antirrhinum majus
APIKIGINGFGRIGRLVARVALQRDDVELVAVNDPFISTDYMTYMFKYDSVHGAWKHHELKVKDEKTLLFGEKPVVVFGRRNPEEIPRASTGAEYIVESTGVFTDKDKAAAHLKGGAKKVIISAPSKDAPMFVVGVNEKEYKSDLHIVSNASCTTNCLAPLAKVINDRFGIVEGLMTTVHSITATQKTVDGPSAKDWRGGRAASFNIIPSSTGAAKAVGKVLPQLNGKLTGMSFRVPTVDVSVVDLTVRLEKKATYEQIKAAIKEESEGKLKGILGYTEDDVVSTDFVGDSRSSIFDAKAGIALNDNFVKLVSWYDNEWGYSTRVVDLIVHMASVQ

SEQ ID NO: 12051 - protein, 334 aa, Zea mays
  misc_feature (115)..(115): Xaa can be any naturally occurring amino acid
  misc_feature (147)..(147): Xaa can be any naturally occurring amino acid
  misc_feature (197)..(197): Xaa can be any naturally occurring amino acid
MDGGGGAGGAEGELTAQETALYDRQIRVWGVDAQKRLSKAHVLVCGMNGTTIEFCKNIVLAGVGSLSLMDDNVVTEEDLNANFLIPPDESIYGGRSRAQVCCESLIDFNPMVRVXVEKGDPSLIDGEFLDKFDIVVLSRASLKTKKXLEEQLNNRTQCIVLLEELCLICFRKSASYHFGCFNLEMHYSFVELNTIAXSILFIQEAISVPWNSLPKKTAKLYFAMRVLEDYELSEGRSPGETTLSDIDAVLARRKDMCDKMSLNESRIPTTLVERLLAAGKKEHPPVCAILGGILGQEVIKSISCKGDPVKNFFYFDVADGKGVIEDIPPPPPAK

SEQ ID NO: 12052 - protein, 969 aa, Arabidopsis thaliana
  misc_feature (852)..(852): Xaa can be any naturally occurring amino acid
MAGRNIEKMASIDAQLRQLVPAKVSEDDKLVEYDALLLDRFLDILQDLHGEDLRETVQELYELSAEYEGKREPSKLEELGSVLTSLDPGDSIVISKAFSHMLNLANLAEEVQIAHRRRIKKLKKGDFVDESSATTESDIEETFKRLVSDLGKSPEEIFDALKNQTVDLVLTAHPTQSVRRSLLQKHGRIRDCLAQLYAKDITPDDKQELDESLQREIQAAFRTDEIRRTPPTPQDEMRAGMSYFHETIWKGVPKFLRRVDTALKNIGIDERVPYNAPLIQFSSWMGGDRDGNPRVTPEVTRDVCLLARMMAANLYYNQIENLMFELSMWRCTDEFRVRADELHRNSRKDAAKHYIEFWKTIPPTEPYRVILGDVRDKLYHTRERSRQLLSNGISDIPEEATFTNVEQFLEPLELCYRSLCSCGDSPIADGSLLDFLRQVSTFGLSLVRLDIRQESDRHTDVLDAITTHLDIGSYYREWSEEGRQEWLLSELSGKRPLFGPDLPKTEEIADVLDTFKVISELPSDCFGAYIISMATSPSDVLAVELLQRECHVKNPLRVVPLFEKLADLEAAPAAVARLFSIDWYKNRINGKQEVMIGYSDSGKDAGRLSAAWELYKAQEELVKVAKKYGVKLTMFHGRGGTVGRGGGPTHLAILSQPPDTVNGSLRVTVQGEVIEQSFGEAHLCFRTLQRFTAATLEHGMNPPISPKPEWRALLDEMAVVATEEYRSVVFQEPRFVEYFRLATPELEYGRMNIGSRPSKRKPSGGIESLRAIPWIFAWTQTRFHLPVWLGFGAAFRYAIKKDVRNLHMLQDMYKQWPFFRVTIDLIEMVFAKGDPGIAALYDKLLVTDLLWXFEQRLRLRDFYITTLNVCQAYTLKRIRDPSYHVTLRPHISKEIAESSKPAKELIELNPTSEYAPGLEDTLILTMMESSKSAKEHLKLNPRSEFTPVLKHSFTLNIRVLLQDCKRTVK

SEQ ID NO: 12053 - protein, 472 aa, Coxiella burnetii RSA 493
MTTIFWFRQDLRLSDNPALVEAAKSADHLIPLYILDDQLKMLGDAQRWWLHHSLSSLQTALSKKGTSLILKKGDTKRVLLELIKKYKVEKIYWNRSYEPPYREIDTYLENRLPPLSVEIYHSTLLTEPQKIKNKSGGYYKIFTPFWKHINASLQPRKTLAAPKKFSQHRAIKSDNLETWNLLPKHPDWSQGFDQWKPGEKNAQIVLKKFIKENLKNYPAHRDRPDISSTSHLSPYLHFGEISIRQVWTAITQATIQDKNLQKAADVFLRQLIWREFAYYLLWHFPQMGRSNFRNQFDNFKWKKNKNWLRAWQKGLTGYPIVDAGMRELWCTGYMHNRVRMIVASFLVKDLMIDWREGEKWFWNTLLDADLANNALGWQWIAGCGPDAAPYFRIFNPILQSKKFDPDGTYIKRWIPELAKVPSKYIHYPADMPDNISESSKVNLGVDYPFPIVNHHKAKELALKAYKDSTYRL

SEQ ID NO: 12054 - protein, 216 aa, Pisum sativum
MAEENQNKYEETTSATNSETEIKDRGVFDFLGGKKKDEEHKPAQDEAIAHEFGHKVTLYEAPSETKVEEEGEKKHTSLLEKLHRSDSSSSSSSEEEGEDGEKRKKKKEKKKKEDTSVPVEKVEVVEGTTGTEEEKGFLDKIKEKLPGGHKKTEEVTTPPPVVAAHVPTETTATTTIHEGEKKGILEKIKEKLPGYHAKTATDGEDKDHHKDETTSH

SEQ ID NO: 12055 - protein, 442 aa, Rhodopirellula baltica SH 1
MNTDSRPNNPSEPAKLRRDVGLFGAMMMGLGSIVGTGVFVSIGIAAGITGPSVVLAILVAGLVATFNGLSSAQLAAAHPVSGGTYEYGYRWLTPSMGFTAGWMFLCAKSASAATAALGFAGYALQLFQFDHDDWIVPLAIGAVVATTLLLLGGIRRSNWTNIAIVSMTLIALASFVIAGLPFAWREGSSNLTPFFASDSPAIATRQFLEACALMFVAYTGYGRIATLGEEVHNPRRTIPRAIIVILLVSSLLYAIVGGIAVAAAGIDVWSSTSQQTAPLQLVANHLNSPLVAKLVAIGAVTAMLGVLLNLILGLSRVVFAMGRRGDLPRGLATVSTQNSNPSGAVIAVGIGVGTLALIGDVETTWSFSAFTVLVYYALTNLAATRLTADERLFSPIVPWLGLASCLGLAFWVQPKIWIIGLSLIAVGLVFQQCMKRSDTSAS

SEQ ID NO: 12056 - protein, 309 aa, Listeria monocytogenes str. 4b H7858
MTKKVGLLVMAYGTPYKDEDIERYYTDIRHGHKPSEEMIADLRGRYHAIGGLSPLAKITEAQAYGLEKALNESQDEVEFKAYIGLKHIEPFIEDAVEAMHKDGIEEAISIVLAPHYSSFSVEAYNKRAKDAADKLGGLRIKAINDWYKQPKFIQMWADRINETAKQIPADELLDTVLIVSAHSLPEKIKQHNDPYPDQLQETADFIFEKVVVPHYALGWQSEGKTGEPWLGPDVQDLTRELYGREKYKHFIYTPVGFVAEHLEVLYDNDYECKVVTDEVGAIYHRPPMPNSDPEFLEVLRTVVWEKYSN

SEQ ID NO: 12057 - protein, 302 aa, Schizosaccharomyces pombe
MRKEYLVSHIEENAHQADIYSLNVVAGNLWSASGDSKIKKWSIGDAEHSLVEEIDTPHKLGVHHLATSLDENVVVSCGFGQDVYVWNPETNEFRDLGNNAQHPSECWSSCISPDGQTIAFTSVDGRIAVWDNPSDCKISELDTKGKFGLCIDYSPNGRFIVSGHQTGQLFLISTETGRLFHVLSGHTSPVRSVAFSPGSTLLAAAGDSKMITIYDVLSGDQVGQLRGHAAWIFAVAFNPVGDLLLSADVEGKIKIWDIDTMECISTQSETDGAIWAVAWYKNGFIVAGADKSIRWYRAAATE

SEQ ID NO: 12058 - protein, 158 aa, Schizosaccharomyces pombe
MSHFYDLAPKDKDGNPFPFSNLKGKVVLVVNTASKCGFTPQYKGLEALYQKYKDRGFIILGFPCNQFGNQEPGSDEEIAQFCQKNYGVTFPVLAKINVNGDNVDPVYQFLKSQKKQLGLERIKWNFEKFLVNRQGQVIERYSSISKPEHLENDIESVL

SEQ ID NO: 12059 - protein, 405 aa, Porphyromonas gingivalis W83
MDYQLYTLPSGLHVVYKPHAGEVTYAGFAIGVGTRHESSRHHGLAHLTEHMLFKGTSLRNSLQIIRRMEEVGAELNAFTEKESTYVYCIFPKAHFNRATNLLFDIVQHSRFPEEELTKEKTVVIDEIDSYRDNPSELIFDEFENILFRHHPLGHNILGTEASVSRITGQIGRNFLRRHYRPDNMIFFLAGEADLSDWPLNPAEKVSIRNTDGTPLHTLREGFLPRTIRRHKDTYQHHILMGGPAYSLHDDRRIPLSLLNNILGGPGMNSRLNLSLREEHGYVYNVESNYTPYSDTGVFNIYLGCAPRYAEAAMELVRKELRYLIEHPLSPIELESAKRQFKGQLIVSADNKESTFLSLGKSMLLYGKYDPLSDIFHRIDAITSDRLREIAAEVLNPDSMLTLIYC

SEQ ID NO: 12060 - protein, 418 aa, Azoarcus sp. EbN1
MNKANLLYAQSGGVTAVINATAASVIEAARARADAVGRVLAARHGILGALDEDLIDTAPLSVVDLRRLAGTPGGAFGSCRFDLDPPEANRDQYDRLFAVLAAHDIGYFLYNGGNGSMDTVAKVSRAAAERGYPLVCVGVPKTVDNDLEGTDCSPGFGSAAKYAATSMLEAGLDLAAMTSRVGRAFVLEVMGRNAGWLAAATALAARNDDEPPHVILMPEVPFDEEAFLAVVRSTVSRLGYCAVTVSEGIRRADGSLLMEQDEDAKGHVQLGGAGQCIARLIHSRLGYKHHWAIPDYLQRAAGHLVSATDHAQARAVGQAAVEYALAGRDGVMAAIRRLADAPYRWDVAPVAVAAIANLERQVPRAFIRPDGLHVTDAARTYLRPLIEGEMPACFAGGLPDYPRFPLPGVPRKLAPYRP

SEQ ID NO: 12061 - protein, 423 aa, Kibdelosporangium aridum
MNERRVVITGIGVIAPGGIGAKSFWSLLSEGRTSTRGITFFDPSAFRSRVAAEADFDPYEHGLGPQEIRRMDRAAQFAVVTAAEAMADSGLDLSGVAPHRTGVTVGSTVGATMGLDQEYRVVSDGGRLDLVDHEYAVPHLYNYFVPSSFAAEVAWSVGAEGPATVVSTGCTSGLDSVGYAAELIRDNSADVMIAGAADAPISPITVACFDAIKATTPRNDDPEHASRPFDRTRNGFVLGEGAAMFVLEELESARRPGAHVYAEIAGYASRCNAFHMTGLRPDGKEMAEAIRAALDGAKMGPQDVDYVNAHGSGTKQNDRHETAAFKRSLAEHAYRTPVSSIKSMVGHSLGAIGSIEIAASVLAMENNVVPPTANLHEADPECDLDYVPLTARDWKTDTVLTVGSGFGGFQSAMVLTRPDRSAV

SEQ ID NO: 12062 - protein, 254 aa, Zea mays
  misc_feature (59)..(59): Xaa can be any naturally occurring amino acid
VLRKKHTVSTRTVVQALEGWHWISDILTPLSWAGIQQFLLLWDAVRRVVLTQEADTHIXLHTSSGQFSSKSCYKAFFMGSITFEPWKRLWKSWAPPKCKFFLWLAIRNKCWTSDRLERRGLDHPESCLLCDQSQETIQHLLCTCVFARHFWHSVLLALGVGNLSPSGDETSFADWWRKSSKKIHKSKRKGMNNIIILGAWCLWIHRNKAVFNGETPSLSSIRCVFLDEMGCWITTGAKHLQSFDIEITRNLHRA

SEQ ID NO: 12063 - protein, 570 aa, Bacillus anthracis str. 'Ames Ancestor'
MKQYTTYEKLQCEEVTGAGHVIQCLKKLGVTTVFGYPGGAILPVYDALYESGLKHILTRHEQAAIHAAEGYARASGKVGVVFATSGPGATNLVTGLADAYMDSIPLVVITGQVATPLIGKDGFQEADVVGITVPVTKHNYQVRDVNQLSRIVQEAFYIAESGRPGPVLIDIPKDVQIEKVTSFYNEVIEIPGYKLEPRPDSMKLREVAKAISEAKRPLLYIGGGIIHADGSEELIQFARKKGIPVVSTLMGLGAYPPGDPLFLGMLGMHGTYAANMAVTECDLLLALGVRFDDRVTGKLELFSPHSKKVHIDIDPSEFQKNVAVEYPVVGDVKKALHMLLHMSIHTQTDEWLQKVKTWKEEYQLSYKQKESELKPQHVINLVSELTNGEAIVTTEVGQHQMWAAHFYKAKNPRTFLTSGGLGTMGFGFPAAIGAQLAKEEELVICIAGDASFQMNIQELQTIAENNIPVKVFIINNKFLGMVRQWQEMFYENRLSESKIGSPDFVKVAEAYGVKGLRATNATEAKQVMLEAFAHKGPVVVDFCVEEGENVFPMVPPNKGNNEMIMKRWEE

SEQ ID NO: 12064 - protein, 647 aa, Zea mays
MATMSAASHRCCASSLRALTVLFVLAALVSDVGGRHHHHVCPHYFSCGGLSNISYPFRRQGDPSGCGVQSYELVCTDTDATIRIGSGTYKVLSINSTYSHFWVVDADLDIQSSCPLPRWDYHARWINLNLHRWWIVSSQYYFYSSSFYMDSWRWAIFVNCSQPIENNDTDKYHIYEPVSCLSNSSFIYLVPDYWYAGLVPAGSLEPSCGYLAMTPLGGPGMQVPSNTSYPDVVKFMRSGFALGFPSYGDNIRECLAKDMRTFHKEPRNSTGIRQQILDILTVVDIFWACVIYQLQSTNYNGVTTVVIGIIETIQYVSGVLDYTAGVCRFVLMPLAVFVFLVYKYWKTRITVDAVEKFLRTQQMLVPMRYAYTNIIAITGHFRDKLGQGGYGSVYKGVLQPGEVHVAIKMLGNSNCNGDEFISEVATIGKIHHVNIVRLIGFCSEENSRALIYEFMPHGSLDKYIFSSEKSFSWVKLNEIALGIASGLNYLHHGCDMQIVHFDIKPHNILLDSNFVPKVADFGLAKLFPRGDSFVPLSAMRGTIGYIAPEMVSRSFGVISSKSDVYSFGMLLLEMTGGRRNADPHAGSSSQAYYPSLVYNQLSQGDANGISEGVNMHDLEKKLCTIGLWCIQMKPADRPTMSEVIEMA

SEQ ID NO: 12065 - protein, 379 aa, Thorea violacea
  misc_feature (365)..(365): Xaa can be any naturally occurring amino acid
KKPHVNIGTIGHVDHGKTTLTAAISAILSLSGNTKLKKFDEIDAAPEEKARGITINTAHVEYETTDRHYAHVDCPGHADYVKNMITGAAQMDGAILVVSAADGPMPQTREHILLAKQVGVPNIVVFLNKEDQVDDAELLELVELEVRELLHQYDFPGDAIPFVAGSALLGLNYVTENPETQKGENKWVDKIYKLMDAIDSYIPTPERDIDKTFLMAVEDVFSITGRGTVATGRIERGVIKVGDTIEIVGLKETRTTTITGLEMFQKTLDEGIAGDNIGILLRGIQKKDIERGMVLAKPGTITPHTQFEAEVYILTQEEGGRHTPFFSGYRPQFYVRTTDVTGTIRQFTADDGSSAEMVMPGDRIXMSAELINPIAIEQG

SEQ ID NO: 12066 - protein, 112 aa, Bordetella pertussis Tohama I
MKLVIAIIKPFKLDEVRMALSDIGVQGLTVTEVKGFGRQKGHTELYRGAEYAVDFLPKLRVEAAVPDHLVDQVIEAIEQSARTGKIGDGKIFTAPLEEVIRIRTGESGEAAL

SEQ ID NO: 12067 - protein, 415 aa, Magnetospirillum magnetotacticum MS-1
MPALSPTMTEGNLAKWLKNEGDAVKSGDILCEIETDKATMEFEAVDEGVLGKILVAGGTSGVAVNTPIAVLLEEGEDASAISAAPAPKAVAAPASVAAAPIAAAPAAAPAAAHGGDRVVASPLAKRIAKDGNVDLKAVKGSGPHGRIVKADVEAAIKAGPAKPAAATPAAAAAAPKPAPAPASASPFEPAFEEIPNSSMRKVIARRLTEAKSTIPHFYLSIDCELDSLLKVRADLNGRSDAYKLSVNDFVVRAVALALKKVPAANASWGEDAIKRYKDVDISVAVATPSGLITPIVHHADHKGLAEISNEMKALAGKARDNKLKPEEFQGGGFTISNLGMFGIKDFAAIINPPQGCILAVGAGEQRPVVKAGALAVATVMTCTLSVDHRVVDGAVGAEFLAAFKKLIEDPLSMLL

SEQ ID NO: 12068 - protein, 379 aa, Nemalionopsis shawii
KKPHVNIGTIGHVDHGKTTLTAAISATLALSGNTKLKKFDEIDAAPEEKARGITINTAHVEYETSERHYAHVDCPGHADYVKNMITGAAQMDGAILVVSAADGPMPQTREHILLAKQVGVPNIVVFLNKEDQVDDKELLELVELEVRELLTQYDFPGDDIPFVAGSALLALDYVTNYPETKQGQNKWIDKIHDLMNAIDSYIPTPKRDIDKTFLMAVEDVFSITGRGTVATGRIERGIIKVGDTIEIVGLRETKTTTITGLEMFQKTLDEGIAGDNIGILLRGVQKKDIERGMVLAKPGTITPHTQFEAEVYILTQEEGGRHTPFFSGYRPQFYVRTTDVTGTITKFTADDGSAAEMVMPGDRIKMSAQLINPIAIEQG

SEQ ID NO: 12069 - protein, 340 aa, Magnetospirillum magnetotacticum MS-1
MVSEYHQYLSSIEDIIEEARQGRMFILVDDEDRENEGDLVIPADMANADAINFMARFGRGLICLSLTRGRCEHLGLKPMSSDNGTRMETAFTVSIEAREGVTTGISAADRATTIKAAIDVDKNRYDIVSPGHVFPLMAREGGVLVRAGHTEAAVDISRLAGLNPSGVICEIMNDDGTMARMPDLVKFAQHHGLKIATIADLIAYRRRNDKIVAREVETPFHSKWGGDWTMVVYTNTVAYAEHIALVKGDLNAAGPVMVRVHAVNILDDVLGDQGVGQGGRASFRHGNDCGSRQWRGGSNPRAAPHQPVGHGARPSGTPPGGSGFARLRRRRSDPAGSWGP

SEQ ID NO: 12070 - protein, 132 aa, Triticum aestivum
  misc_feature (108)..(108): Xaa can be any naturally occurring amino acid
MAASMITSPIVAPTSLPSLSRRGSSFAVVCSGGKKIKVDKPLGLGGGLTVDIDANGRKVGKKGVYQFVDKYGANVDGYSPIYTPEEWSESGDRYAGGTTGLLIWAVTXAGLLGGGVLLVYNTTLSPAKRHLL

SEQ ID NO: 12071 - protein, 375 aa, Nemalionopsis tortuosa
KKPHVNIGTIGHVDHGKTTLTAAISATLALSGNTKLKKFDEIDAAPEEKARGITINTAHVEYETNERHYAHVDCPGHADYVKNMITGAAQMDGAILVVSAADGPMPQTREHILLAKQVGVPNIVVFLNKEDQVDDKELLELVELEVRELLTQYDFPGDDIPFVAGSALLALDYVTSNPETKQGENKWIDKIYDLMDAIDHYIPTPERDIDKTFLMAVEDVFSITGRGTVATGRIERGIIKVGDTIEIVGLKETRTTTITGLEMFQKTLDEGIAGDNIGILLRGVQKKDIERGMVLAKPGTITPHTQFEAEVYILTQEEGGRHTPFFSGYRPQFYVRTTDVTGTITKFTADDGSAAEMVMPGDRIKMSAQLINPIA

SEQ ID NO: 12072 - protein, 317 aa, Cryptococcus neoformans var. neoformans B-3501A
MRSSTVLILSLRSLAHETIKNLVLAGIGRLIVADSDVVTEEDLGSGFLFREEDNAVGKLRTDAALEQIQSLNPLVTLSKIGMDSFEGEEDKVAEILKKEAVDVVVTCDLSVKENERIDAAARKASSLFYAAGTYGFTGYVFADLGESYEYVVNSIDGLSKKVLSYPSFSTVLDRSNWAKPGGSPFKGLSRNATRSAAPATILGITALWEYESQNGHLPAEESSLSALTSSAESIRTALGVNSTAVPSVDSSLLTHLASHATHFFPPTLAILGGLLAQDVLRALSRKDKPVANLLAVDSMSGVGTVGRWSMMDAKDTQ

SEQ ID NO: 12073 - protein, 224 aa, Oryza sativa
VTLSKTKKKPGLERKGKVVTDIKDAVEHYANAYVFTYDNMRNQKLKDLREQLKSSSRIFLAGKKVMQIALGRSSADEAKTGLHKLSKFLQGDTGLFFTNLPRDDVERLFREFEEHDFARTGSIATETVELKEGPLEQFTHEMEPFLRKQGMPVRLNKGAVELVADHIVCEEGKPISPEAAQTLRLLGMQMATFRLYLVCRWSSDDFEVYKEGLAQLRAEADDSS

SEQ ID NO: 12074 - protein, 878 aa, Zea mays
MRRRRCPLLAAVLFLLPLFHRHHAASGTDTDTVTLAAPLMGNRTLVSAGSAKYVLGFFAPDPDATGSGRAYLGIWFNGIPARTVVWVANRESPVLGSVGAAALRVLANGSLAIVVVDETDYDHDQQPVVWATPPPATSSGSNATAQLLDNGNLVLRVPGAGVVWQSFDHPTDTLLPGMKLGIDFRTGLDRRMVSWRAAGDPSPGEYSFRLDPSGSPELFLYRGSARVYGSGPWNGYQFTGVPNLKSNSLLTFRFVSAADEAYYSYGVVDSAAVLTRFVLDSSGQIQRLMWIDMTRSWSLFWSYPLDECDGYRACGPYGVCSVERSPICGCAPGFDPRFPKEWALRDGSGGCRRRTDLACAGDGFAALTNMKLPESANATVDMSLTLDQCREACLRNCACRAYAGANVSAPGATGCFLWTGDLLDMRQFGKGGQNLFVRLAASDLPLSSSSPADTDGRTKRLVEIIVPSVAAPALLLLAGLCICAVRTRRRRTKEKEAIPLALLRDAQRQSAPFGRRNQIAASTDAQDESLHDGQQGGSQDCDLPSFDVETIQAATGNFSAHSKIGQGGFGPVYMGKLDSGQDIAVKRLSRRSTQGLREFKNEVKLIAKLQHRNLVRLLGCCIDGSERMLVYEYMHNRSLNTFLFNEEKQPMLSWEKRFSIINGIARGILYLHQDSALRIIHRDLKASNILLDKDMNPKISDFGVARIFGTDQTAAYTKKVVGTYGYMSPEYAMDGVFSTKSDVFSFGVLVLEIVSGKKNRGFYHTELDLNLLRYAWRLWKDGESLEFMDQSIADTSNAAEVLKCIQIGLLCVQEQPKRRPTMSAVTTMLTCENPTLPEPCEPAFSTGRNHDDDDEDPEAKACRSNSASSWTCTVVEGR

SEQ ID NO: 12075 - protein, 488 aa, Listeria monocytogenes
MSIKETALPKVQTKLFINGKWTDGDNKETKDIVNPANGDVIAKIAQAGPSETKKAIKAAKDAFPDWAKMELADRVKLLHKIADLMEEKADTLAKIMTLEQGKPLKESKGEVLTGVENFRFAAEEARRLYGETIPAPNNHAFIVKKQPIGVVAAITPWNFPGGMVTRKLAPALATGNTIVLKPSGDTPLSALAIFEIFEEAGLPKGVANIVMGSSKEIGETLTDSDDVRKLTFTGSTKVGQTLFKQSADTLKKISLELGGHAPFIVFDDANLDAAVNDLVAAKFRNNGQVCVSPNRIFVAKEIKEKFTKALVAKVEQLKVGNGLDDVNVGPLIREDAIDKIDKQLKNATEKGAKVLTGGGRLTGSDYDKGNFYKPTVLDNVTRKMDIFYEETFGPVIPLITFETEDEAIEMANDSEFGLASYFYTKDLARVEKVGAALEYGMVGANEIAISNPETPFGGVKHSGFGRENGHYGMEEYIQVKFINLKYRD

SEQ ID NO: 12076 - protein, 485 aa, Bdellovibrio bacteriovorus HD100
MDNNKSSSNPLESYEYKYGFTTDIETDQVQLGLNEDIIRLISAKKNEPEWMLEYRLKAFRHWLTMVEPEWAHVSYPKIDFQAIRYYSAPKKATDEADKPKSLDDLDPELIKTFEKLGIPLTEQKRISGIAVDVVFDSVSVGTTHTEVLDKAGVIFCSISEAIHKHPDLVKKYLGSVVPHTDNYYAALNAAVFTDGSFCYIPKGVRCPIDLSTYFRINAKDTGQFERTLLVCDEGGYVNYLEGCTAPQRDENQLHAAVVELVALDNAEIKYSTVQNWYTGDKEGRGGIYNFVTKRGKALGKYSKISWTQVESGSAITWKYPSCILQGEGSEGAFYSVALTHDLMQADTGTKMIHIGKNTKSTIISKGISTDKSSNAYRGQVKILPSAENARNYSQCDSMLVGDQSSAHTYPYIEVKNKTATIEHEATTSRISEDQIFYLQSRGLDMEKTISMLVNGFCKEVFKELPLEFSVEAVKLIEMKLENSVG

SEQ ID NO: 12077 - protein, 469 aa, Lactobacillus plantarum WCFS1
MAMLYGKHNHEAEEYLEPVFGAPSEQHDLPKYRLPKHSLSPREADRLVRDELLDEGNSRLNLATFCQTYMEPEAVELMKDTLAKNAIDKSEYPRTAEIENRCVNIIANLWHAPDDEHFTGTSTIGSSEACMLGGLAMKFAWRKRAQAAGLDLNAHRPNLVISAGYQVCWEKFCVYWDVDMHVVPMDEQHMALDVNHVLDYVDEYTIGIVGIMGITYTGQYDDLAALDKVVTHYNHQHPKLPVYIHVDAASGGFYTPFIEPQLIWDFRLANVVSINASGHKYGLVYPGVGWVVWRDRQFLPPELVFKVSYLGGELPTMAINFSHSAAQLIGQYYNFIRFGMDGYREIQTKTHDVARYLAAALDKVGEFKMINNGHQLPLICYQLASREDREWTLYDLSDRLLMNGWQVPTYPLPANLEQQVIQRIVVRADFGMNMAHDFMDDLTKAVHDLNHAHIVYHHDAAPKKYGFTH

SEQ ID NO: 12078 - protein, 92 aa, Cryptococcus neoformans var. neoformans JEC21
MTKRTKKVGVTGKYGTRYGASLRKTVKKMEITQHARYSCPNCGKIAVKRTNVGIWACKACNKSYAGGAYTFGTPSAATVRSTIRRLREVAEV

SEQ ID NO: 12079 - protein, 412 aa, Rhodococcus ruber
MIIIGAGQGGLQAAMSLRDHGYTGRLTIVGDEPGLPYQRPPLSKAYLINDDAMSEELLLLRPHSVFERLDIDLITGDGVTRIDRVRSTVSLSSGRELAFDHLILATGARPRELSVPGADLAGVEALRTCDDAKAIRAGLTGPARVVVIGGGFVGTEVAAAATKRGHSVTIVDMEARLLNRAVSPEISALVTAAHRRRGTAVVLNAGVSRLCGSDGTVEAVELTDGQRIPADFVVVGIGVVPNTEIAHDAGLAVDNGILVDDRLRTNDHRISAIGDCARFPCAHADGQMLRLESVQNAVDHARHVAARLMGDAGPYDAVPWFWTDQCGLKIQIAGIGAQGAESVVIGDEAAERCSVLRFRSGELSCVESVNSSGEHMAARKILRGGPRPVAPVDGSPAAFDLKHIAREVATAR

SEQ ID NO: 12080 - protein, 320 aa, Brassica juncea
MEKNIKFPVVDLSKLIGEERDQTMALINDACENWGFFEIVNHGLPHDLMDNAEKMTKEHYKISMEQKFNDMLKSKGLENLEREVEDVDWESTFYLRHLPQSNLYDIPDMSDEYRTAMKDFGKRLENLAEDLLDLLCENLGLEKGYLKKVFHGTKGPTFGTKVSNYPACPKPEMIKGLRAHTDAGGIILLFQDDKVTGLQLLKDGDWIDVPPLNHSIVINLGDQLEVITNGRYKSMMHRVVTQKEGNRMSIASFYNPGSDAEISPASSLACKETEYPSFVFDDYMKLYAGVKFQPKEPRFEAMKNANAVTELNPTAAVETF

SEQ ID NO: 12081 - protein, 103 aa, Coxiella burnetii RSA 493
MSQNKIYVGSLSYDVTADELQSFFGQYGEIEEAKLIMDRETGRSKGFAFITYGTQDAAQEAVSKANGIDLQGRKIRVNIARENTGDRRRDGGSGGRGGRGGRF

SEQ ID NO: 12082 - protein, 101 aa, Arabidopsis thaliana
  misc_feature (10)..(10): Xaa can be any naturally occurring amino acid
  misc_feature (18)..(18): Xaa can be any naturally occurring amino acid
  misc_feature (37)..(37): Xaa can be any naturally occurring amino acid
  misc_feature (46)..(46): Xaa can be any naturally occurring amino acid
  misc_feature (55)..(55): Xaa can be any naturally occurring amino acid
  misc_feature (58)..(58): Xaa can be any naturally occurring amino acid
  misc_feature (63)..(63): Xaa can be any naturally occurring amino acid
  misc_feature (69)..(69): Xaa can be any naturally occurring amino acid
  misc_feature (72)..(72): Xaa can be any naturally occurring amino acid
MASSMLSSTXVVTSPAQXTMVAPFTGLKSSASFPGTXKANNDLTSXTSNGGRVSXMKXVWPPXLVKKKXGTXFLTDLGGGWKTLKFAEFGLWPLLCSHLKL

SEQ ID NO: 12083 - protein, 554 aa, Schizosaccharomyces pombe
MIETIPTKPYEGQRPGTSGLRKKVTVFEQPNYVENFVQATMDVVEPSAKGAHLVVGGDGRYFNFHAIQVIAAIAAGNGVEKIIVGTNGYLSTPAASHIIRKYKLTGGIILTASHNAGGPKNDFGIKYNLGNGGPAPESVTEKIYSITKTISEYKMVKIPPLDLTTTGVRRYGPLTVEVIDPVKDYVQLMKEIFDFDLIRSFLSKNPDFTFVFDALHGITGPYGEALFCKELGMPSSVCQNCKPLPDFGGGHPDPNLTYAKSLVARVDRDNIVMGAASDGDGDRNMIYGANAFVTPSDSVAIIAHHAELIPYFRDGGVHGFARSMPTSGAIDRVGKYKGKNVYEVPTGWKFFCNLFDAKRLSICGEESFGTGSDHIREKDGVWGILCWLNILAGLNAQNPKIKTLIDVKKDFYNIYGRTFYSRYDYEELENEAAGKVMDRMRAIADDKSKVGEAVLPGFVVSEAGDFEYHDPIDGSESKHQGLYIKFENGSRIVTRLSGTGSSGATLRLYMEKHESDSSKFDLDAQVALKPVVHAALEILALEELTGRKEPTVIT

SEQ ID NO: 12084 - protein, 284 aa, Listeria monocytogenes str. 4b H7858
MGEIIDGKKLAKEIQEKVTREVAELVKEGKKPGLAVVLVGDNQASRTYVRNKQKRTEEAGMKSVLIELPENVTEEKLLSVVEELNEDKTIHGILVQLPLPEHISEEKVIDTISYDKDVDGFHPVNVGNLFIGKDSFVPCTPAGIIELIKSTGTQIEGKRAVVIGRSNIVGKPVAQLLLNENATVTIAHSRTKDLPQVAKEADILVVATGLAKFVKKDYIKPGAIVIDVGMDRDENNKLCGDVDFDDVVEEAGFITPVPGGVGPMTITMLLANTLKAAKRIWKMN

SEQ ID NO: 12085 - protein, 338 aa, Rickettsiella grylli
MTIRVAINGYGRIGRNILRAFFENPTLHDIQIVAINDLGNIDINAYLTSYDTTHGKFAGSITIDKDCLIINHQPIKIFSERDPKNLPWKALDIDVVHECTGLFTSAEKAGKHIKAGAKKVIISAPAGKEVDATIVYGVNHHILKKSHTIISNASCTTNCLAPLAKALHENLGIVHGLMTTIHAYTNDQVLIDTYHSDLYRSRSATHSMIPTKTGAASALGLVYPELDGKLDGLAIRVPTLNVSLVDLSFQAERKTTSDEVNALLKKASEHNPLKGLLNYSELPLVSIDYNHNPASATVDAVQTRVIGNFVKVLAWYDNEWGFSNRMLDVTTALMNVST

SEQ ID NO: 12086 - protein, 628 aa, Rickettsiella grylli
MCGIVGILSNLDKSFHISNLLNSMSGTLTHRGPDGSGVYLDDNIAMAHRRLSIIDLSSNANQPFSSYDKSLVLIFNGEIYNYSKIKNLVYNYPFKSTSDGEIILPLYQKFGPDFIKHLEGMFAFALYDKKQKLLFLVRDRVGEKPLYYTWYKNCLFFSSELKSFWEITDFRPPLSKIAILNYLAYTQSPAPYSMYENIYKVIPGHYLIIDCKNKVTQKNYWNIDFTNKTKITAYEATEQLDTLLRDTMKKTLVSDVSIGITLSGGIDSSVLLGHMSGIYSEAINSFTLGSNHQPNSIDPELDRAKIVAKLYQTHEHFCDFKDISFKDFLKANSYYDEPVGILDTVHSMFLSQYISQYHKVVITGNGADEVFGGYKSYSNFLRKNFLKQCLIQASRKYAIKNIQSFFTKTVLKTISNYSLKFLTNDMILFSNNPYLIEYLDVYYKMSNFDNLLDGKLFFELLVTLNHCASMSDTLGMTHSLEIRSPFLNHHIVEFAASLPVYYKVKFFSPSNRNKYILKRLALKYMPKELIFIKKYGCGSFINYHGKFKTSWRADIEQILFHSAAGIYEFFSKEKTRCLWIKFLSGVLSPNEKMLLNKLIILFAWYNSVFLKRKSSFQLASNQIQPNLH

SEQ ID NO: 12087 - protein, 327 aa, Synechococcus sp. WH 5701
MAETLLFNALRDAIDEEMARDPYVCVFGEDVGQYGGSYKVTKDLYEKYGELRVLDTPIAENSFTGMAVGAAMTGLRPIVEGMNMGFLLLAFNQISNNMGMLRYTSGGNYTIPTVVRGPGGVGRQLGAEHSQRLEAYFHAVPGIKIVAVSTPTNAKGLMKAAIRDNNPVLFFEHVLLYNLSEEIPEGDYICSLDQAEVVREGKDITILTYSRMRYHCLKAVEQLEADGVSVELIDLISLKPFDLETITRSIRKTHKVMVVEECMKTGGIGAELLALITEHCFDDLDARPVRLSSQDIPTPYNGALENLTIIQPRQIVEAARQLKAGTI

SEQ ID NO: 12088 - protein, 605 aa, Sinorhizobium meliloti 1021
MPNTSDILIDTLIEWKFDVVFGLPGDGINGIMEALRRRQDRIRFVSVRHEQSAAFMACAYAKFTGRLGVCLATSGPGGTNLLTGLYDAKLDQMPVLAITGMQYHDLIETFSQQDVDLTRVFENVAVYNAQVNDAAHMENLANLACRSALSKRGVAHLSIANDVQERMADGGRSRRNRPGHMPSRYFAGKLVPLESDLSRAADLLNAGRKVAILAGRGALEAKEALRETAELLGAPVAKALLGKAVLPDDDPLTTGGIGILGTAPSQEIMQQCDTLLIIGSTFPYIEYYPRPNTAAGIQIDHDPQRIGLRYPVEVGLVGEAGETLRMLNKRLKRKQDRSFLERAQEQTRNWRRELRAMEGDRSSPLKPQAAVAAFGRRIAKKGIVVTDSGQNTELAARHLDLGADHMFAVSGALASMASGLPYAIAAGIAMPDRPVYAVVGDGGFAMQLGEFATAVGYRLPLKLLVIRNDMLNQIAWEQMMFLGNPQFACELPPIDFAAAAEAMGGRGFTVRSFGELDGIMDQAFAVDGPVVIQALVDRYEPLMPPKMPADYARNFRAALPETPGHEKIEEILRNSSVGRKVTDEEPQPPHEAAPDENTGELPGIP

SEQ ID NO: 12089 - protein, 632 aa, Desulfovibrio desulfuricans G20
MCGIAGYIGRRCLPDDAVRRCHAAMRHRGPDGSGTFRRCTADGRHVLLLHARLSILDPDPRSGQPMQRGGGVLAFNGELYNFSEVRERLERGGLAFDTTGDTEVLLRALDPQGRSLLCGGHAAEDLLHGMAGALDACEGMWAFAYFDASRGTLVLGRDRFGEKPLYYLRDDDGGLYFGSEPKLLAALTGRPLRPDTEHLRRYLVNGYKSLYKTRQTFFAGLRQVPAGTMLAADAGGLRGLCYWERPHAAHDPVQEDMSFADAVRGTRERLIRSVELRLRADVPLAFCMSGGIDSNSLICIARRVFGYDVHGFTVMNTDARYEERECVEHVVRELGLRHTSVSPSVAGFLDGLRTLVRAHDAPVLTISYYVHWLLMQRIRQQGYAISISGTAADELFTGYYDHHNLYLAAMYGSGALYDKALENWRRHVAPVVRNPYLQDPEVFVHAPQERGHIYLHNDRFAGALRQPFDEPFTEHAYHAVPLRNRMLNELFHEAVPVILHEDDLNAMYHSVENRSPFLDRDLFDFSLRIPVRHLVRDGMAKAVLREAMRGIVPDMILDNRRKVGFNAPVLDFLDVRDSAVRAQVLADSPVWDFVRRDAVAQLLDGRSLGNSESKFLFNILCCKMFLEDCADA

SEQ ID NO: 12090 - protein, 146 aa, Oryza sativa
  misc_feature (29)..(29): Xaa can be any naturally occurring amino acid
  misc_feature (128)..(128): Xaa can be any naturally occurring amino acid
PVPLAPYPTPPVPFTPPNGAQSQLVCSGXVILLMYPAGATSVCCAVCSTVTAVPAPGTEMAQLVCGGCHTLLMYIRGATSVQCSCCHTVNLAMEANQVAHVNCGNCRMLLMYQYGARSVKCAVCNFCXTQLGPHPGTDQKPSSLNC

SEQ ID NO: 12091 - protein, 411 aa, Karlodinium micrum
GTRPRAEFGTRIQKASEQEDPAETLATFLLALGPSVGVSSMGNSRPSAAVQMSTNPDAPIKLGVNGFGRIGRQVVRIAMDKDDFVVKHINSPMSPEYMKYLLEHDTVHGRFKGTVQLSDDGLIINGLPVSLSATRDPTEIPWKDAGVEYVCESTGAFTTTEGCMKHIEGGAKKVIISAPAKDADTPTIVVGVNTDDYETSMKVVSCASCTTNGLAPIVKVINEKFGIKQGLMTTVHAATASQLTVDGSMKGADWRAGRAASANIIPSSTGAAKAVAKAYPVMKGKLTGMAFRVPTVDVSVVDLTCELETETTYDDIKAEVKLASETYAKGIVGYTEDQVVSSDFVGETCSTVFDAGAGIMLTPTFVKLVSWYDNEWGYSTRLVDLVGTMAKVDGIEVKDESAVYFTARKVE

SEQ ID NO: 12092 - protein, 112 aa, Prochlorococcus marinus str. MIT 9211
MKKIEAIIRPFKLEDVKVALVNSGIVGMTVSEVRGFGRQKGQVERYRGSEFTVEFLQKLKIEIVVADESVPTVLTAIAEAAKTGEIGDGKIFISPVESVVRIRTGELDGSAL

SEQ ID NO: 12093 - protein, 567 aa, Ustilago maydis 521
MADRDPSLTPDEDKPHSLQSDDKFSPKASNDHAQLHQLHLATRSVVSTEGIIDAAELDQVLDEAAIEAAGQGESNSLYLWTLTFFATIGGLLFGYDTGAISSVLVQVGTDLDNKELTDGNKEFITSALTVGAIISALCAGVVADKFGRKWTLVICDIMFIVGAVIQAAAHKKWDVVGGRFVLGLGIGAAAQIVPVYIQELAPARARGRLTCLNSIAVTFGQVVATAIGAGFEHVSSGWRWIIALGAFPPIIQLIGIHFFMSESPRYLVKQRREDEAARALTRIYPLATPEQINAKLGVLKKHIQTEDAPLRYRIVKVWTDVPTRRAVFLTSMVLASQQLSGFNSLMYFSGTLFKSAGLKQPIATSLIVSGANFLCTFIPLKYIDRFGRRRFLLATMPCVIIFLVCTAGIFAKMLQPTNQRLVEGYPYPTSYTSAMLVFMVLYVCSYATGLGNVPWQQGEFFSTETRMIGTSISTAVNWAANLVISSTFLSLMNAITPSGAFGFYAGLTFVFLLIVYFLYPETSLLSLEEVRTTLNGGFNVKKSLKVRKEKIALWNTQKQAAKAETAA

SEQ ID NO: 12094 - protein, 411 aa, Oceanospirillum sp. MED92
MALYVQKYGGTSVGTVDRIEAVADKVAGFKAEGHDIVVVVSAMSGETNRLIGLAKDIQSAPNPREMDVLVSTGEQVTIALLSMALDKRGISARSYTGSQVKILTDTAHMKARIQDIEVSSMQSDLEAGRVVVVAGFQGVDDQGNITTLGRGGSDTTGVALAAALKADECQIYTDVDGVYTTDPRVVEGAQRLEQITFEEMLEMASLGSKVLQIRAVEFAGKYKVPLRVLSSFEDGPGTLITTEDDSTMEKPVISGIAFNRDEAKLTVVGVPDVPGVASRILGSISRENIEVDVIVQNVAADNTTDFTFTVHRNDYDAAEKVLQKVAEELGAREVAGDNKIAKVSIVGVGMRSHAGVASKMFDALAAENINIQMISTSEIKVSVVIAEKYLELAVRALHSAFELDADDTVSE

SEQ ID NO: 12095 - protein, 245 aa, Antirrhinum majus
WVLVQFGAFIVLCGATHFISLWTFQLHTRTVAVVMTTAKICTAVVSCATALMLVHIIPDLLSVKTRELFLKNKAAELDREMGLIRTQEETGRHVRMLTHEIRSTLDRHTILKTTLVELGRTLGLEECALWMPTRTGLELQLSYTLRHQNPVGFTVPIQLPVINQVFNTNNAVKISPNSPVARLRPAGKYMPGEVVAVRVPLLHLSNFQIHDWPELSTRRYALMVLMLPSDSARQWHMHELELVEV

SEQ ID NO: 12096 - protein, 209 aa, Chromobacterium violaceum ATCC 12472
MGACPRFERASARGMIARNPIKQDPAMRNTQDDHSRFLSLVLRHQPETIGLQLDDQGWADIGELLARLAAKGRNLGRKQLEKIVLDNDKQRFAISEDGLRIRANQGHSIKIDLGLAACEPPDRLYHGTASRFLDAILAEGLRPGQRQHVHLSADGQTARKVGARHGKPVVLEIDARAMRQAGLAFYRSDNGVWLIDGVPPVFIRQTEAR

SEQ ID NO: 12097 - protein, 379 aa, Emericella nidulans
MAEFVRAQIFGTTFEITSRYTDLQPVGMGAFGLVCSARDQLTAQPVAVKKIMKPFSTPVLSKRTYRELKLLKHLRHENIISLSDIFISPLEDIYFVTELLGTDLHRLISSRPLEKQFIQYFLYQIMRGLKYCHSAGVVHRDLKPSNILINENCDLKICDFGLARIQDPQMTGYVSTRYYRAPEIMLTWQKYDAKVDVWSAACIFAEMLLGAPLFPGKDHVNQFSIITELLGTPPDDVIQTICSENTLRFVKSLPKREPQDLAKLPKFLALVHPDKKPEEDEDYKNTINLLKAMLVYNPKDRISAEAALAAPYLAPYHDETDEPVAEEKFDWSFNDADLPVDTWKIMMYSEILDFHNIDQGGDINPALVEGAGLNQQGFQ

SEQ ID NO: 12098 - protein, 439 aa, Thermobifida fusca YX
MNGAAGTGSVFGLAVLLICGAAFFVAAETAFSRTVRLGGKAPSRDHSATRRLRRVAADPAYHLNTALLLRVCCEVGATLALAVGFLTWLGLTWGAVALTAVVTVLVDYVLVGVIPRILARRFPGPTAEVAAAVVGPATVVLGPVARLLVRAGQLLLPRGGTDREGPFATEEELRHLVDLAERGHVIDPEERQMIHSVFQLDDTTVREVMIPRPDIVFLEGNVSIEEALEKALSSGYSRIPVIGESLDDVIGIVYLKDLVARLYDAWRANGGAPAPGRTIRDVMREPTYVPDSKPVDELLREMQQQRIHLAVVIDEYGGTAGIVTIEDIVEEIVGEITDEYDDEVPPIEWLDDNRARVTARLPLGELAELFGVEIDAPDVDTVGGLLAYALGRVPVPGSQAEYAGLRLVAEDPARRRRKTATVLVERLPAAVESTDPDQS

SEQ ID NO: 12099 - protein, 344 aa, Gossypium hirsutum
MALLQIFLFVALVLSFCFSIQLAGLSRPLLDEDSMRHEEWMSQHGRVYADEQEDHKNKRFNVFKENVERIEEFNDGKTFKLAINQFADLTNEEFRASYNGFKGPMVLSSQITKPTPFRYENVSSALPVSVDWRKKGAVTPVKNQGQCGCCWAFSAVAAIEGITQISTGKLISLSEQELVDCDTKGIDHGCEGGLMDTAFEFIINNGGLTTESNYPYKGEDGTCNFNKTNPIAVSITGYEDVPANDEQALMKAVAHQPVSVAIEAGGSDFQFYSSGVFTGECGTELDHAVTAVGYGESEDGSKYWIVKNSWGTKWGESGYIEMQKDIKVKQGLCGIAMQASYPTA

SEQ ID NO: 12100 - protein, 374 aa, Arabidopsis thaliana
MTMAANLARRLIGNRSTQILGAVNSSSGAASSVARAFCSSTTPITATLFPGDGIGPEIAESVKKVFTTAGVPIEWEEHYVGTEIDPRTQSFLTWESLESVRRNKVGLKGPMATPIGKGHRSLNLTLRKELNLYANVRPCYSLPGYKTRYDDVDLITIRENTEGEYSGLEHQVVRGVVESLKIITRQASLRVAEYAFLYAKTHGRERVSAIHKANIMQKTDGLFLKCCREVAEKYPEITYEEVVIDNCCMMLVKNPALFDVLVMPNLYGDIISDLCAGLVGGLGLTPSCNIGEDGVALAEAVHGSAPDIAGKNLANPTALLLSGVMMLRHLKFNEQAEQIHSAIINTIAEGKYRTADLGGSSTTTEFTKAICDHL

SEQ ID NO: 12101 - protein, 568 aa, Thermobifida fusca YX
MIPQQQPSGMPFHRYQPFKPVDLPDRTWPSKTITKAPRWLSTDLRDGNQALIEPMDTERKREIFDLLVRMGYKEIEVGFPAASQTDYDFVRYLIEEDRIPDDVQISVLTQAREELIERTVQSLVGAKRATVHLYNATSPEFRRIVFGVNREECKGIAVEGTRTVLKFAEQYLKDTEYFGYEYSPEIFIDTELEFALEVCEAVMDVYQPGPDREIILNLPATVERATPNVYADQIEWMSRNLSRREYVCLSVHPHNDRGTAVAAAELAVMAGADRVEGCLFGHGERTGNVCLVTLGLNLFSQGIDPMIDFSNIDEIRRTVEHCTQLPVNPRHPYGGDLVYTAFSGSHQDAIKKGFHALEADAAAAGVPVDEYRWNMPYLPIDPKDVGRTYEAVIRVNSQSGKGGVSYVLQRDYSIDLPRRLQIEFSRVVQQFADAEGGEFSGERIWEIFTDTYLSEGVVGVMAYRSETSEDGEYCISADVRLRGEIREITGTGNGPISAFVDALAGVGFKLRVLDYSEHALSEGGDARAAAYVEAEVDGNVLWGVGISSNITTASLKAVCSAVNRAQQS

SEQ ID NO: 12102 - protein, 169 aa, Nicotiana tabacum
MASQSSKPQSIYDFTVKDAKGNDVDLSIYKGKVLIIVNVASQCGLTNSNYTDMTEIYKKYKDQGLEILAFPCNQFGGQEPGSIEEIQNMVCTRFKAEYPIFDKVDVNGDNAAPLYKFLKSSKGGFFGDSIKWNFSKFLVDKEGNVVDRYSPTTTPASMEKDIKKLLGVA

SEQ ID NO: 12103 - protein, 430 aa, Staphylococcus aureus subsp. aureus NCTC 8325
MAFEFRLPDIGEGIHEGEIVKWFVKAGDTIEEDDVLAEVQNDKSVVEIPSPASGTVEEVMVEEGTVAVVGDVIVKIDAPDAEDMQFKGHDDDSSSKEEPAKEEAPAEQAPVATQTEEVDENRTVKAMPSVRKYAREKGVNIKAVSGSGKNGRITKEDVDAYLNGGAPTASNESAASATSEEVAETPAAPAAVTLEGDFPETTEKIPAMRRAIAKAMVNSKHTAPHVTLMDEIDVQALWDHRKKFKEIAAEQGTKLTFLPYVVKALVSALKKYPALNTSFNEEAGEIVHKHYWNIGIAADTDRGLLVPVVKHADRKSIFQISDEINELAVKARDGKLTADEMKGATCTISNIGSAGGQWFTPVINHPEVAILGIGRIAQKPIVKDGEIVAAPVLALSLSFDHRQIDGATGQNAMNHIKRLLNNPELLLMEG

SEQ ID NO: 12104 - protein, 465 aa, uncultured bacterium 105
MVTKETKAHSHTATSYTSDVLASVLERNTAEPEFHQAVEEVFTSLGPVLERRSDYRNARILERIVEPERVIMFRIPWQDDQGGIHVNRGFRIEMNSAIGPYKGGLRFHPSVNLGILKFLAFEQVFKNALTTLPMGGGKGGSDFDPKGKSDSEVMRFCQSFMTELARHIGPNTDIPAGDIGVGGREIGYMFGQYKRLRNEFTGVITGKGLNWGGSLIRPEATGYGSVYFAAEMLATKGKSLEDKVCLVSGSGNVAQYTVEKLIQLGAKVVTLSDSSGYVYDEAGIDKEKLEFIFDLKNVRRGRIKEYADKYKNVEYTASNPALDHNPLWNHQAQCAFPSATQNEINEKDAMAMLKNGVELVSEGANMPVTINGINQFLDAGIFYGPGKAANAGGVATSGLEMTQNAQRLVWTRAQVDERLQHIMKAVHKACYETAEHFGMPNNYLVGANIAGFVKVADSMLDQGIV

SEQ ID NO: 12105 - protein, 320 aa, Coxiella burnetii RSA 493
MNKPQHHSLIILGSGPAGYTAAIYAARANLKPIMITGMEQGGQLMTTTDVDNWPGEAPGLQGPQLMERMQKHAERLDTQFIFDHINEADLNQRPFLLKGDNATYSCDALIIATGASARYLGLPSEKAYMGKGVSACATCDGFFYRGKKVAVVGGGNTAVEEALYLSHIASHVTLIHRRDKLRAEKMLSAQLIKKVEEGKVAIVWSHVIEEVLGDDQGVTGVHLKHVKEEKTQDLTIDGLFIAIGHDPNTKIFKEQLEMDEAGYLRAKSGLQGNATATNIPGVFAAGDVTDHVYRQAITAAGMGCMAALDAERYLDSLNQA

SEQ ID NO: 12106 - protein, 705 aa, Rickettsiella grylli
MHMFSDLKQELQTYLSPAHIKQVYSAYQFAARAHSGQKRHSGDPYISHPLAVAKILAQMRMDVQTLIVAILHDVIEDTAIEKTVLTATFGHEIAELVDGMSKLTQIQFQSRAEAQAENFRKMLLAMSKDIRIIIIKLADRLHNMRTLSAVSLEKRHRIAKETLDIYAPIAQRLGVHMVRIELEDLCFLNLYPWRYRILQETVQKNRRKHKTSIHKIEFALKECLDKHHLRFHAIWHKKKHLYQIYKKMHENHLAFNEIIDIPIFSIIVDTIDNCYRVLGAVHSLYKPLPDHFHDYIALPKANGYRALHTTLFGPEATSIHIQIRTTTMDNGADHGIVSYWLEEKTKAHELRPHLRAREWLKRLLDIQQTTPSSLEFLETVKIDLFPTDIYIFTPKGDIIELPHKATLIDFAYAIHSDVGNHCIAAKIDKHLAPLSTHLKSGQTVEIITDSKTFPDAHWLEFVATGRARSHIRQFFKNKQHNEAVQLGQRLLDNNLTPLGQDSTHIHPKNLNKTLQKFQYNSLENLLEAIGLGYIHPALVAHSLCNLKLSAKNPINALPLFLKNSDNSLIHFAECCRPIPGDEMRGLLNAGHGLTVHLQRCKYAARLIKKNPERAILCQWEKQTHGFFKTDIYVETINQHGVLALLTHNIAKADANIENIKVESRDRQHSIIQFTLSVINRKHLAKVIRFLRAVHSTVKITRHLFL

SEQ ID NO: 12107 - protein, 217 aa, Helicobacter pylori 26695
MKVAPSLLSADFMHLAKEIESVSNADFLHVDVMDGHYVPNLTMGPVVLENVTQMSQVPLDVHLMVENASFFAELFAPLKPQIISIHAENEKHPHRVLQLIKNLGITPGIVLNPHTHEESIKYLLESVGLVLLMSVNPGFGGQKFLDLVLEKCLKVKELIKRYNPSCLLEVDGGVNDKNIFELQQAGVDVVVSGSYIFKSKDRKLAIEGLQNVRQSLA

SEQ ID NO: 12108 - protein, 540 aa, Corynebacterium glutamicum ATCC 13032
MADISTTQVWQDLTDHYSNFQATTLRELFKEENRAEKYTFSAAGLHVDLSKNLLDDATLTKLLALTEESGLRERIDAMFAGEHLNNTEDRAVLHTALRLPAEADLSVDGQDVAADVHEVLGRMRDFATALRSGNWLGHTGHTIKKIVNIGIGGSDLGPAMATKALRAYATAGISAEFVSNVDPADLVSVLEDLDAESTLFVIASKTFTTQETLSNARAARAWLVEKLGEEAVAKHFVAVSTNAEKVAEFGIDTDNMFGFWDWVGGRYSVDSAVGLSLMAVIGPRDFMRFLGGFHAMDEHFRTTKFEENVPILMALLGVWYSDFYGAETHAVLPYSEDLSRFAAYLQQLTMESNGKSVHRDGSPVSTGTGEIYWGEPGTNGQHAFFQLIHQGTRLVPADFIGFARPKQDLPAGERTMHDLLMSNFFAQTKVLAFGKNAEEIAAEGVAPELVNHKVMPGNRPTTTILAEELTPSILGALIALYEHIVMVQGVIWDINSFDQWGVELGKQQANDLAPAVSGEEDVDSGDSSTDSLIKWYRANR

SEQ ID NO: 12109 - protein, 108 aa, Shewanella oneidensis MR-1
MSDKIIYLSDDSFENDVLKADLPVLVDFWAEWCGPCKMIAPILDDVAEEYAGRVTIAKLNVDQNNVSPAKYGVRGIPTLLLFKNGELAATKVGALSKTQLKEFIDAQI

SEQ ID NO: 12110 - protein, 409 aa, Ralstonia solanacearum
MSRAARPKLVVIGNGMAGMRTVEELLKLAPDLYDITVFGEEPHGNYNRILLSPVLAGEKRVDDIMLNTREWYEEHGITLHAGDPVVAIDRPRRTVRSRGGVEVRYDRLLMATGSRPFILPVPGHMLPGVIAFRDIQDVETMLDAARNHRHAVVIGGGLLGLEAANGLMRQGMEATVVHISDTLMERQLDKPAAALLKVALEAKGLRFLLGAQTTELIGTDRVTAVRFKDGTEIPADLVVMTAGVRPNIELARSAGLHCERAIVVDDTLQTYDPRIYAVGECVQHRSATFGLVAPIWDQARVCAAHLAGAGHRRYVQQATATKLKVTGVDLYSAGDFIGGDGTEDIVLRDPRRGVYKRLVLKDDRIVGAVLYGDVADGPWYFELIQRQAPIAAMRQRLLFGRALCEAEAA

SEQ ID NO: 12111 - protein, 272 aa, Brassica napus
  misc_feature (88)..(88): Xaa can be any naturally occurring amino acid
VDPRVRNWLGIGLERKMKSSLVTVNRMFAKIISTRREEISRGEGEQLMDALTYYIKAAPASDRLLKPSNDTFIRDVAFSLLLAGRDTXTSSVLTWFFWLLSKHPHVLTKIRQEINTKFDPTYLEKLVYLHAALYETMRLYPPVPFNHKSPLKSDVLPSGHKVKAESKIVICIYALGRMRSVWGEDALDFKPERWISESGELKHEPSYKFMAFNAGPRACLGKHLALQQMKIVAVELIQNYDFKFTEGHKIEAVPSIVLRIKHGLSVTVTKKM

SEQ ID NO: 12112 - protein, 1211 aa, delta proteobacterium MLMS-1
MAHYLKEQLYQEIRQSPELFDFIQEAALDGLWFWDLEQPEHEWMSPKFWQILGYDPSTKQHLSSEWQDIINQDDLKATTENLEKHLANPDHPFDQVVRYRHLKGHTVWVRCRGLAIRDKQGRPIRILGAHNDITEYKQQQLALEETQATLRQSEDKYRTLVENLPVLIYRSEVDAPWAMLHASQNAEQLCGYSSDEFLSGQLTWVDVIVAEDLPLVEAAVQQAIKAREKYTVEYRIRHQKGHVIWVSETGSAQDYDQNGHPAYLDGVIADITDRVQAQKEISAQEAKFRGLFELSPVGIAMNDFATGEFLEFNAAVNEPAGYTPEEFKQLSYFDVTPMEYMEDEKRQLESMEKIGRYGPFEKEYIRKDGSRYPVLLNGFKTTTPEGKAVIWSIIQDISEIKKAQEAAEAANRSKSEFLANMSHEIRTPMNAIIGLGQLALKSQPPPPPRLYDYLEKITGSAATLLTLINDILDFSKIEAGKLAIDQVPFDLSEILNQLDHLMAGQAAEKGLELLFAVDSGAPRQLVGDPHRLGQVLINLTSNAIKFTQQGEVTISFEVADPTADPLILRVAVRDTGIGMSPEQIERIFQPFTQADGATTRKHGGTGLGLSIAGRLVKLLGGEIRVESTPGAGSTFSFTCLLGRHEPHKALCPLPPVDLRGLRVLVVDDNATARQVLRQTLASFSFRVEEADSGRRALSLLARAAEEGQPYELVILDWVMPEFDGLECAAAIAADPLIDPQPLLILLTAHGREEIREEAAGRGLRHFLTKPVLPSTLYDTIMECFGQEGISRESDRGRRSDELESAAREKLAGSRLLVAEDNALNQQVAAELLAAVGIHCDLANNGREAVEQYRRQTYDGVLMDIQMPEMDGYQATGAIRALPAGQQVPIIAMTAHALAGEREKCLAAGMDEHIPKPVEANLLYRTLLRLLPPRTATATGNETATGTTTRAETKAGSLIATEAEPPAASPAPNTANTPTPYPSSSIKAEAAVDNTSWPPLPGIDSRPALLRLNRNFGLYSRLLHEFHEQYGQGDGFQQMAATLAAGDLPRLVLLAHSLKGAATTIGAEKLAELAADLERQAKARADRQTLEELLAAIKQQAEPTLAALDKLPGGNPMTAESAPATEDVPKAPKISGTDSPDSPASVPTDLIALKDNLAQLLAAHDLGALEQFTALRRTLGSQATDPRWLELERMVKKLDFAKAAALLAKLKL

SEQ ID NO: 12113 - protein, 852 aa, Ralstonia solanacearum
MTMKIVVIGHGMVGHKFLESLLHAPGHDLHVTVLCEEPRPAYDRVHLSEFFSGKTAEDLSLVAPGFFDRDDVVLRLNARAVSIDRAAKQVTASTGEVLAYDKLIMATGSSPFVPPIPGKDRTDCFVYRTIEDLEAMLECGRRARTGVVVGGGLLGLECAKALRDMDLQTHVVEFAGRLMAMQVDDGGGRMLRRKIEDLGVTVHTQKNTVEIVDGEDGTHRMRFADGTHLDADMIVFSAGIRPRDELARQCGLAVGERGGIVIDSECRTSDPDVYAIGECALWGGKVYGLVAPGYEMARITARQILAAEEEAAAFNGADMSTKLKLMGVDVASLGDAQGSTPGSRSVQFVDERKQIYKKLVLSSDGKFLLGGVLVGDASEYGTLLQMMLNRIELPEAPEFLILPQADGNARPALGVDALPDAAQICSCNDVSKGALCQAVCAGATTVGALKDATRAGTSCGGCVPLMTQVMKAEMKKQGLAVNNHICEHFPYSRQELYHLVRVGRIQSFEALLAAHGHGMGCDICKPAAANILASCWNDFVLKKEHAGLQDSNDYFLANIQKDGTYSVVPRMPGGEVTPEGLIAVGQVAKKYGLYTKITGGQRVDLFGARLEQLPLIWEELIAAGFESGHAYGKSLRTVKSCVGSTWCRYGVGDSVGLAIRLENRYKGLRSPHKLKFGVSGCTRECAEAQGKDVGVIATEKGWNLYVCGNGGMKPRHAELLAADLDEATLVKLVDRFLMFYVRTADRLQRTSTWRDNLEGGLDYLKDVIVGDKLGFAAELEAEMQHVVDTYQDEWKTAVTNPEVRKRFRHFVNSETADANVVFVEERGQIRPATPEERRGTRPVRIPVVAEAA

SEQ ID NO: 12114 - protein, 1095 aa, delta proteobacterium MLMS-1
MIVDERNVDMLTNKRLELYDFAARHSMDELMTKVLDDAEAFVDSSIGFFHFVEKDQKTLSLQRWSTRSLRELCHMPGNKTHYDIDQAGVWVQAAREKRAVIHNDYESMPDRKGLPQGHARVIREIVVPVIRDNKVVAIMGLGNKPVDYDDEDLEVISFFADITWNLVEQKRTQEALQNSQARLKTITDAAQDAIIMMDTRGIVSFWNPAAETILGYTRDEAMGRDLHELIMPSRYRKNFQAAFPEFKKTGHGNAVGMTTELYAQTKDGREIPVELALSSVLIDDQWNAVGVVRDITEKKEAQEELQRHGRNLERKNVELNAARLEAEEATRAKSEFLANMSHEIRTPMNAIIGLSYLCLQTDLNNKQHDYLTKVHSSAQSLLGIINDILDLSKVEAGKLEIEHIPFALQDVTDHLTSIIHVKAQEKQLHFHVETAIDIPPFLVGDPLRLGQILINLCGNAIKFTSQGQVMLQIVLAEQTEQTEQTARIHFAIKDTGTGMTPEQISRLFQAFSQADSSTTRQFGGTGLGLVISKQLVETMGGEISVESEPGKGSTFMFTINLEKADPSRFEQPAVPSSDLGPRKIMVVDDNPTALELLESYLSDCNSTVDFAQSGAIALQKLQQTGSDEEPYDLVMLDLRMPNFSGVETAREIRRILPHRPPWLLLFSSFGRTEMHPHLDSGLFDAILAKPFSQQQLLLAIHKIFHDSKTPTPDQPDSTGIAADGRQLAGATLLLAEDNEINQQVACELLQPYGVTLAIAANGQQALDMLATDTYDGILMDIQMPVMDGVEATELIRQNPKYRDLPIIAMTANAFKSDQEKYLAAGMNDCITKPIRVKEMLATLGRWVKPAATSTAAPATVPEIVALTSPADQTGETAPAVCGNHFQSALTTAGIDVVAALESVGGDRELYGTILQKFCRGQRGTADKIRQALVAGQLKDGEIMAHTLKGLCLTIGARETGWLAAPVEEALAQKLPVTEVLPLLAPLEIALEKLLAGIEGALNPASVPAEPRSDEGEFDCVKARAMIIKAAIQIAEYDTEAAQTVAELRDLIGVGRQPEAEKLLASLTTMLERYDFDGSGAELEKLDRLIEDDDGC

SEQ ID NO: 12115 - protein, 336 aa, Vibrio vulnificus YJ016
MSLPFRKTTFSHYRRESMNNTKKRGVLLVNLGTPEEATAPAVKRFLSQFLHDQRVVDMTRWLWCPILHGIILPIRSPKVAKLYQTVWMKEGSPLMVYSKRQQVELQAKLNCPVEIGMTYGTPSVLDGVNKLQAQGVDEICVLPLYPQYSGTTTGAAYDALAHALRKVAVVPSIQFIRDYHDHPLYIKALAESVRQSWQAQGKGDYLLCSYHGIPQRYADNGDIYPLHCEMTTELLRLELGLDKSQIGTTYQSRFGREEWLQPYTDKTLESLPAKGIKSLDVITPAFSVDCLETLEEISEQGQESFLHAGGEQYRFIPCLNDAPSHIEMMARLVTER

SEQ ID NO: 12116 - protein, 418 aa, Karlodinium micrum
MNAIASVLVCLAYIGHARKPQKSSEQEDPAKTLATFLLALNGGIPSSSGTSISRPAVQMSTNPDAPIKLGVNGFGRIGRQVVRIAMDKDDFVVKHINSPMSPEYMKYLLEHDTVHGRFPGTVALSDNGLIINGLPVSLSATRDPTEIPWKDAGVEYVCESTGAFTTTEGCMKHIEGGAKKVIISAPAKDADTPTIVVGVNTDDYETSMKVVSCASCTTNGLAPIVKVINEKFGIKQGLMTTVHAATASQLTVDGSMKGADWRAGRAASANIIPSSTGAAKAVAKAYPVMKGKLTGMAFRVPTVDVSVVDLTCELEKETTYDDIKAEVKLASETYAKGIVGYTEDQVVSSDFVGETCSTVFDAGAGIMLTPTFVKLVSWYDNEWGYSTRLVDLVGTMAKVDGLEIKDESAVYFTARKVD

SEQ ID NO: 12117 - protein, 114 aa, Vibrio vulnificus CMCP6
MNMKKIEAIIKPFKLDDVREALAEVGITGMTVSEVKGFGRQKGHTELYRGAEYMVDFLPKVKLEIVVTEDVADKCVETIIETAQTGKIGDGKIFVTNVERVVRIRTGEEDEDAI

SEQ ID NO: 12118 - protein, 238 aa, Ralstonia solanacearum
MPVRLYLIWGATTTGKTAQSVALARSAGAPVISLDRVQCCHELAVGSGRPSPSELLGTRREYLCEREVSRGVVSAAEANQLLLDKVARYATQERALILEGGSVSLINAMIRDARWSERGEWILRRIPVPGRAAFMAAARKRVREMLDPPPGQAGILDELQGLWGYPRNHAVLEDIDGYRQIIRYANALQVPICRITSIDPNAKALLIERIAQEYWEHALWQEQEFLGIPASWMRADDA

SEQ ID NO: 12119 - protein, 994 aa, Candida albicans SC5314
MSTIPSQVEINFNKIHQRSNSSSSTSSYRIPSGNSCIPRTVEMPSLPPTSTHHQHQQMPSSSSHAHIAKKIHREVRFGAYILGSTLGEGEFGKVKLGWRKDGKHPSQVAIKLIKRSTITKDSDSEIKIHREINSLKLLNHPNIVNLVEVMKSGKYIGIVLEYASGGELFDYILQHKYLKENVAKKLFAQLVSGVDYMHAKGLIHRDLKLENLLLDKHRNVIISDFGFVNSYNRDKNDLMKTSCGSPCYAAPELVLSQTAYEGRKVDIWSLGVILYAMLAGYLPFDDDPENEDGSDIIKLYHYICKTPLTFPEYVSPLARDLLRKIIVSDPKKRISIDDIRNHPWLSSHANLLSIRQPEWDKVHSEKQQPIAVEPPQPNKRYSMINERTNSSSLMSPAPRVTHTQPLSSHARSYSSTSISLLYSSPSATPSMANAVTNGEGATTTTTNGSINESNDTLQLSGTPSPKKPSTVSPVRGHQKSASISNSYSSASIALKAVVHEENRLHNHQQSQQYIPRSSTISTIVESPTKANTATETETTDGHKILLPPPSKDAQKLPHAAKKPRPTSYHPSSMSSALIHNNQNPTDVLKMPSPINFPMTQFISTSPPKSNGSLNDSGNFTNCSPKATSRRNSVVTHVHVNGVLSKENLIHSSSSPDNKRNSVLSYLEDKIDTLELTESHSPSKNTFEEIVDAAIATPEINQVPVFDSQTSPNGIGLDIKHKEFDETSLVVEKKSKETVSDSKSEESTKETQQQENVVMYEPIVPVEEYIKKPEEVNSVEAKQPEEVKSEDKSLQGQKSQQQQQQPEKHSADIGKTKVDLKKSASQKKKVKEESIKKQKDVDSKPIERRHTIAARRHHNDENKENKDVKKRNRFSLLSFYSSYNSSNSNVSLATSKVPSNSENNTTVLKPTSMNTTRKVLEPSNETNIMRKETKQTNSNGSTTSKSTTSSSSSSAPAASSSSSSSTSKRASTATKETSAARKVMDFFKRRSVRVG

SEQ ID NO: 12120 - protein, 296 aa, Erythrobacter sp. NAP1
MSILVNKDTKVITQGMTGNTGTFHTQQALDYGTKMVAGVTPGKGGTEHIGLPQFNTVREAKEATGATASCIYVPPPFAADAICEAIDAEMELIICITEGIPVLDMVRAKAALTGSKSRLIGPNCPGVLTPEECKIGIMPGSIFKKGSVGVVSRSGTLTYEAVHQTTQVGLGQTTAVGIGGDPVNGTNFIDVLDLFLDDPETKSIIMIGEIGGSAEEEAAEFIKQEAAKGRSKPTVGFIAGRTAPPGRRMGHAGAIVSGGQGGADDKIAAMEDAGIRVSPSPSELGTTLDAMLKEMA

SEQ ID NO: 12121 - protein, 883 aa, Escherichia coli K12
MNEQYSALRSNVSMLGKVLGETIKDALGEHILERVETIRKLSKSSRAGNDANRQELLTTLQNLSNDELLPVARAFSQFLNLANTAEQYHSISPKGEAASNPEVIARTLRKLKNQPELSEDTIKKAVESLSLELVLTAHPTEITRRTLIHKMVEVNACLKQLDNKDIADYEHNQLMRRLRQLIAQSWHTDEIRKLRPSPVDEAKWGFAVVENSLWQGVPNYLRELNEQLEENLGYKLPVEFVPVRFTSWMGGDRDGNPNVTADITRHVLLLSRWKATDLFLKDIQVLVSELSMVEATPELLALVGEEGAAEPYRYLMKNLRSRLMATQAWLEARLKGEELPKPEGLLTQNEELWEPLYACYQSLQACGMGIIANGDLLDTLRRVKCFGVPLVRIDIRQESTRHTEALGELTRYLGIGDYESWSEADKQAFLIRELNSKRPLLPRNWQPSAETREVLDTCQVIAEAPQGSIAAYVISMAKTPSDVLAVHLLLKEAGIGFAMPVAPLFETLDDLNNANDVMTQLLNIDWYRGLIQGKQMVMIGYSDSAKDAGVMAASWAQYQAQDALIKTCEKAGIELTLFHGRGGSIGRGGAPAHAALLSQPPGSLKGGLRVTEQGEMIRFKYGLPEITVSSLSLYTGAILEANLLPPPEPKESWRRIMDELSVISCDVYRGYVRENKDFVPYFRSATPEQELGKLPLGSRPAKRRPTGGVESLRAIPWIFAWTQNRLMLPAWLGAGTALQKVVEDGKQSELEAMCRDWPFFSTRLGMLEMVFAKADLWLAEYYDQRLVDKALWPLGKELRNLQEEDIKVVLAIANDSHLMADLPWIAESIQLRNIYTDPLNVLQAELLHRSRQAEKEGQEPDPRVEQALMVTIAGIAAGMRNTG

SEQ ID NO: 12122 - protein, 174 aa, Fortunella crassifolia
YHLFYQYNPKGAVWGNIVWAHSTSRDLINWFPHPPTIFPSQKSDVNGCWSGSATILPGEKPVILYTGIDPDKKQVQNIAYPKDLSDPYLKEWVKSDKNPLMAPDNVNNINASSFRDPTTAWQGPDNIWRMAIGSKINDLGFAILYKSKDFLKWVKAKRPLHAARHTGMWECPDF

SEQ ID NO: 12123 - protein, 408 aa, Erythrobacter sp. NAP1
MATEITVPQLGESVTEGSIGEWLKQPGDAVAVDEPIASLETDKVAVDVPSPVAGVLSEHRAEVGDTVEVGAVIAVIEEGATGAATKGEEPARAQEKREEGEEKREDQEVTQTLSPAVRRAVLEHGVDPSTIKGTGKDGRLTKEDVIAAAKAKGDSPAPSPTPTPAPAPTATATGEGRNEERVKMTRMRQTIAKRLKGAQDNAALLTTFNDVDMTAVIEARTKYKDLFAKKHDIRLGFMGFFAKAACLALKDVPSVNAYIEGDEIVYHDYVDISVAVSAPNGLVVPVVRDCDKKGFAQIEKDIADYGKRAKDGTLTMADMTGGTFTISNGGVFGSLMSTPIINPPQSAVLGLHRIEDRPVAINGEVKIRPMMYIALSYDHRLIDGREAVTALKIIKEAIEDPTRMLIDL

SEQ ID NO: 12124 - protein, 172 aa, Citrus aurantium
YHLFYQYNPNGAIWGDIVWGHAVSKDLIHWYHLPLAMVADQWYDIMGVWTGSATILPDGKLMMLYTGSTNESVQVQNLAYPADPSDPLLIKWVKYPGNPVLVPPPGIGAKDFRDPTTAWLTSEGKWRIAIGSRINRTGITFVYDTKDFINYELLRGVLHGVPNTGMWECPDF

SEQ ID NO: 12125 - protein, 444 aa, Coccidioides immitis RS
MSHLPIEPEFEQAYKELAFSLENSTLFEKHPEYRKALQVASIPERTIQFRVTWENDKGESRKSLINFPFFLGGWEQQLEVNRGYRVQFNSALVNMGGGKGGADFDPKGKSDNEIRKFCSAFMMELSKHIGADIDVPAGDIGVGGREIGFLFGAYKRQRHIWEGVLTGKGLSWGGSLIRPEATGYGLVYYVQHMIEYATNGQESFKGKRVAISGSGNVAQYAALKVIEFGGTVISLSDSKGALVIRNEGDSITPQEIYEIQQLKDQRKQLSALADAPHFKDRCVYIEGARPWLHVGQVDVALPCATQNEVSGPEALGLIQSGCKYIAEGSNMGCTLAAIEHFEAHRQLHKKGGAVWYAPGKAANAGGVAVSGLEMAQNSQRLTWTAEEVDQKLKNIMKVCFETGVRTSETYTALSEGQLPSLVIGSNIAGFIKVAEAMRDHGDWF

SEQ ID NO: 12126 - protein, 325 aa, Zea mays
MEALYLLASLAATVVTSAFHSLLLFLRLLLRYPRRAAPTDDGPAAAARLYEGRVRHARRRPAAHTFEYPARYALVDLDRLPLPGHLSADDARRVASTSGPVHLLTVPESVGYEQNPLSIYYCYDSAGQGQDGELRTCIAEVTNTPWAERVMFTFQPGSDLIAKPLHVSPFMDMLSNWSIRADAPGDRLYVGISVQHPTLGDYFTAVLDAKLVEQTSNSLRLATFFWLMPHKVAAWIYWEALKLWLKNVKFLDHPRYLNPRYRDEALARDLELRTSCCHLQRQEQNDRRSRTAEKTAEITDHVDGKGDADIAKRWCVWRDARWPWS

SEQ ID NO: 12127 - protein, 334 aa, Arabidopsis thaliana
MSDAPSSSPDATASHWCYHCNKRVVVETLDDFVVCCECNKGFVESIQPTPAAYSSPAPPQPLSPDLNVEDSSIGSHFLQMLRLLAHAPSQRSPPRHLDVLSYEDDFFRLELNSRNEIDDDEDEDEDDGDEEEEDEEENLTVNDEEDEEDDLRRRNRFPLTTTQSRTGRNRILDWAEILMGIEDNSIEFRMESDRYAGNPADYIDDAAGYEALLQNLAEGDGGGGGGRRGAPPAAKSAIEALETFEVSSSEGEMVMVCAVCKDGMVMGETGKKLPCGHCYHGDCIVPWLGTRNSCPVCRFQLETDDAEYEEERKKRTSTVSDSAAASSSSSTSRY

SEQ ID NO: 12128 - protein, 490 aa, Brucella melitensis 16M
MWGRAAIAGMALRPDATKRELHSSSQRAENRGRICAPPFPSLNRAGTKGNQGENAGSNLLMGVEVTRLPNGLTIATDTMPHVESVALGIWVKAGARNEAPDRHGIAHLLEHMAFKGTENRTAWQIASDIENVGGEINATTSVETTSYYARVLRNDMPLAIDILSDILTASKFDEGELEREKQVIMQEIGAAHDTPDDIVFDRFTETAYRHQPIGRAILGEPETVMSFTSDDLRQYMQEQYSADRMVVTAAGGIDHDEFVREVEKRLGSFRPHNTAPTLDLAHYVGGDFRENRELMDAQVLIGFEGRAYHVRDFYASQLLSMILGGGMSSRLFQEVREKRGLCYSVYAFHWGFSDTGLFGIHAATGRDELVELVPVIIDELHKAANSIGIEEVDRARAQYRASLLMSQESAASRAGQIARQFLLYGRPVENSELLDRLSLITPERLTDLAGRLFLNNKPTIAGVGPVGRLMSFDRLTDALSTNAHTRTIAV

SEQ ID NO: 12129 - protein, 120 aa, Triticum aestivum
MAAPRGAALVLAMVLAAMVVAPPATVHAISCSTVYSTLMPCLQYVQQGGSPARGCCTGIQNLLAEANNSPDRRTICGCLKNVANGASGGPYITRAAALPSKCNVALPYKISPSVDCNSIH

SEQ ID NO: 12130 - protein, 373 aa, Glycine max
WPHIKKPPKKTKKNSTHNREKVVVSVHPLFKPPQLRRPPPTQTSLRHKNNTISHCSQFSTLSSSTMAAGLSAAITMKPLLRFHQPRLPKPIPTTLPFSPLRIFHHTASPIPQNFSTFTVCVLMQDPKQGTQMEIQAQEPPPSPPQQVLSQKLAEKLARKESESFTYLIAAVMSSFGITSMAVFAVYYRFAWQMEGGEVPLSEIFGTFALSVGAAVGMEFWARWAHRALWHASLWHMHESHHRPREGPFELNDVFAIINAVPAIALLSYGFFNKGLVPGLCFGAGLGITVFGMAYMFVHDGLVHKRFPVGPIANVPYLRRVASAHQLHHSEKFDGVPYGLFMGPKEVEEVGGLEELEKEISRRARSYKIAREKS

SEQ ID NO: 12131 - protein, 201 aa, Zea mays
MASPSRKVLLGVTFERRLRSRTRQLFWAADLPVATTSRSLAAAAATTLPSGGSPAALLFSLRTISSTRLSKLSAFSDAPGPSVVDHKSIMQEDEFHKLADETIHDLLETLEEYGDSIQMDGFDIDYGNQVLTLRLGDLGTYVVNKQSPNRQIWLSSPVSGPSRFDWDAATNGWIYKRTGSNLVQLLEKEIGELCGTPVQLS

SEQ ID NO: 12132 - protein, 345 aa, Thermoplasma acidophilum DSM 1728
METVAVKLTGTKFFDTGLSTGTYFLFETAFASVTLALVSVVVLRKMKMSAFMLFSIIYFIFIWTIPAAWIWNPTGWLYKLGVRDFAGGLVVHVASGFAALAIMVRIWQEEKKMGLKESKKENLNLNSGWLTLSIILLWVGWFGFNPGSELAFTTETVIVVITTFLAAASAMVSTMLTKFLVSKQDPGLIYAVNGVLMGLIVITPLAGYVSPGSAIILGLISGPIFVSAESIFSKHKWYSDPIGVLPGHMVGGIFGLLMIAFFTQTPFADASGASNLPNGILFGGGIMALHQLGLEAMAVVVVGAFVFTVSYASVYAISLLLNGILRDSEYSPARPANRLAKDTGA

SEQ ID NO: 12133 - protein, 486 aa, Oceanobacillus iheyensis HTE831
MISSETKHMQNYINGKWVDAKSGKQEVIPNPATGETIATVTISDVEDVDMAVAAAKEVFPEWSDIPVPNRTRYLLDYWKLLQDNKEELAKIITLENGKSLRDAQGEVQRGIEVVELATSTPSMMMGDALPSIAKGIDGSIWRYPLGVVAGITPFNFPMMVPLWMFPLAIACGNTFVLKTSERTPILAERLVELFYEAGFPKGVLNLVHGGKEVVNRFLTHPDIEAVSFVGSEPVAKHVYQTGTAHGKRVQALAGAKNHAVVMPDCDVEKTIQGVLGAAFGSSGERCMACSVVAVVDDIADEFLEKLVKETKKLRVGDGMDDSNFIGPVIRESHKERVLSYIDSGVDEGAHLLVDGRKIKEETPDGYYVGATIFDHVTQDMKIWQDEIFAPVLSVVRVSDLEEGIRVTNQSKFANGAVIYTNSGKSAQQFRNRIDAGMIGVNVNVPAPMAFFSFAGNKASFYGDLGTNGKDGVQFYTRKKVVTERWF

SEQ ID NO: 12134 - protein, 356 aa, Saussurea medusa
MVAVSGNTRVESLATSGIHQIPKEYIRPQHELQTITNIFDEQNDQNAPQLPTIDLNDIHSHDPMTRQRCRDELTKAATEWGVMHLVNHGISGELIDRVKAAGESFFNQPVEEKERYCNDIGSGKIQGYGSKLANNACGQLEWEDYFFSSRLPRGERDLNVWPTTPDDYIPATTEYAKQLRALATKILSVLSLGLGLEEGRLEKEVGGMEELLLQLKINYYPKCPQPELALGVEAHTDVSALTFILHNMVPGLRLFYGGQWVTAKCVPDSIIVHIGDTIEILSNGKYKSILHRGLVNKEKVRISWAVFCEPPKEKIVLKPLPETVFEKEPPLFPPRTFHQHMEHKLFRKNNDIVDPK

SEQ ID NO: 12135 - protein, 610 aa, Pseudomonas aeruginosa UCBPP-PA14
MCGLAGWVDYTRKLDDEFPAIFAMTDTLALRGPDAEGIWKHRNALLGHRRLAVIDLSGGVQPMSYRFPTGQEVTLVYTGEVYNHDALRERLRRAGHEFRTRSDTEVVLHAYLQWGERCCEYLTGMFAFAVFDGRDGHLLLVRDRLGIKPLYYARHREGLLFGSEIKSILAHPEFAARLDAVGLVDLLTLSRGTSQTPFREVQELLPGHLLSWRPNSQAKLRRYWEVRRQEHADDLQSTVQRTRELVTRALGSQLHADVPVCSLLSGGLDSTALTGIAQRIAKAEHGGDINSFSVDFVGQAEQFRSDDLRPDQDQPFALLAAQYIGSRHRTVLIDNAELVCERAREEVFRAKDVPFTFGDMDTSLHLMFGEIRRHSTVAISGEGADELFGGYGWFRDPQAVAAARFPWASRVRLPAGFIDAGFNRRCDLLQYQQASYDDGLRQVEHLAGDSPEERRMREFSHLHLKRWMVLLLERKDRLSMCNGLEVRVPYTDHELVEYVYNVPWSIKSRDGEEKWLLKRACADYVPEAVLKRRKSPYPTSANLGYERFLRGSVRRLLEDAANPVFGIVSREFLAAELEHPEGYFNTQVSRHNLETALALEGWLRLYGLSA

SEQ ID NO: 12136 - protein, 554 aa, Vibrio vulnificus YJ016
MCSVFGILDIKSDAAALRPIALEMSKKLRHRGPDWSGIYASDRAILAHERLAIVGLNSGAQPLYSPDKKLILAVNGEIYNHKEIRARYEGKYDFQTDSDCEVILALYQEMGADLLEELNGIFAFVLYDEEKDQYLVGRDHIGIIPLYQGYDEHGNYYVASEMKALVPVCKTISEFPPGSYYSSTDAGPQRYYIRDWNEYAAVQGNTSSKEELTAALEAAVKRQLMTDVPYGVLLSGGLDSSITSAVAKRYAAMRIEDDEQTEAWWPQLHSFAIGLDGAPDLKAAREVAAKIGTVHHEMTYTIQEGLDAIRDVIYHIETYDVTTIRASTPMYLMGRKIKAMGIKMVLSGEGADEIFGGYLYFHKAPNAQEFHEETVRKLLALNMFDCARANKSLAAWGVEGRVPFLDKEFIDVAMRLNPADKMCGNGKMEKHILRECFEHYLPDSIAWRQKEQFSDGVGYGWIDTLKAVAEEKVTDQQMEAAKFRFPYNTPTTKEGYVYREIFEELFPLPSAAECVPGGPSVACSSAKAIEWDESFKNCIDPSGRAVKAVHNEAY

SEQ ID NO: 12137 - protein, 127 aa, Listeria monocytogenes str. 4b H7858
MPVISYIDAITMALKEEMERDDKVFILGEDVGKKGGVFKATAGLYDEFGEDRVLDTPLAESAIAGVGIGAAMYGYRPVAEMQFADFIMPAVNQIISEASRIRYRSNNDWSCPIVIRAPFGGGVHGAL

SEQ ID NO: 12138 - protein, 275 aa, Enterococcus cecorum
GAILVVSAADGPMPQTREHILLSRNVGVPYIVVFLNKVDMVDDEELLELVEMEVRDLLTEYDFPGDDVPVIAGSALKALEGDPSYEEKILELMAAVDEYIPTPERDNDKPFMMPVEDVFSITGRGTVATGRVERGQVRVGDEVEIVGIHDEISKTTVTGVEMFRKLLDYAEAGDNIGALLRGVAREDIQRGQVLAKPGSITPHTKFTAEVYVLTKEEGGRHTPFFTNYRPQFYFRTTDVTGVVNLPEGTEMVMPGDNVTMEVELIHPIAIEDGTR

SEQ ID NO: 12139 - protein, 991 aa, Synechococcus sp. WH 7805
MSSSSARSPESEQPRVAVAEAPVGGQLLQQRLALVEDLWQTVLRSECPAEQAERLLRMKQLSDPVLPDGNAVSSDALVSLIRDMDLSEAIAAARAFSLYFQLVNILEQRIEEDGYLESIVRSQDTAEQINPFAPPLATQTEPATFRELFERLRRLNVPPAQLENLLQELDIRLVFTAHPTEIVRHTIRHKQRRVASLLQQLETKSDSSAVEAGTIRLQLEEEIRLWWRTDELHQFKPSVLDEVDYALHYFQQVLFGAMPQLRRRLSSALACSYPDVQLPPSSFCTFGSWVGSDRDGNPSVTTDITWRTACYQRQLMLDRYVSAVHGLRDQLSISMQWSQVSAPLLESLEMDRLRFPEVYEERATRYRLEPYRLKLSFVLERLRLTQIRNQQLADAGWRAPADAQVAATPETPQSESLHYGSVAEFRSDLELIRTSLVSTDLTCEPLDTLLTQVHIFGFCLAGLDIRQESTRHSDALDEVSRYLNPDEAYGDLNEQERVNWLLQELQTRRPLIPPSVQWSSTTEETVDVFRTLHRLQDEFGSRICRTYVISMSHSVSDLLEVLLLAKEAGLVEPSAGHADLLVVPLFETVEDLQRAPEVMEQLFQTPLYRNLLPRVGSQGQPLQELMLGYSDSNKDSGFLSSNWEIHKAQIALQDLAARNGLALRLFHGRGGSVGRGGGPAYQAILAQPSGTLQGRIKITEQGEVLASKYSLPELALYNLETVTTAVVQNSLVTNQLDATPSWNDLMARLARCSRRHYRALVHDNPDLVAFFEQVTPIEEISKLQISSRPARRKTGTRDLSSLRAIPWVFGWTQSRFLLPSWFGVGTALHEELENDPDQMSLLRTLHQRWPFFRMLISKVEITLSKVDLDLARHYVTSLGSADHREAFDGIYKTIAEEYSLTHRLVLEITGQERLLDADPALQLSVDLRNRTIVPLGFLQVALLRRLRDQNRQPPMSESPSDGDGRTYSRSELLRGALLTINGIAAGMRNTG

SEQ ID NO: 12140 - protein, 263 aa, Burkholderia xenovorans LB400
MTETETLVQCERRGAVGLITIDRPKALNALNIATLLQLETALTDLENDPAIRVIVVTGSGERAFVAGGDIGDLDSRRGLAHYQEFAEVIHRVFRRFELTDKPTIAAVNGWALGGGTELLLALDIRLVAKEARVGVPEITLGLFPGAGGSQRLIRQIPLCRAKELMFVGEQIDADEAVSIGLCNRAVPRADLLDEALGMAARIAQKSPLTLKLLKRTLRDGLEMPLASALSHEQAMIGLVLDSEDAHEGCRAFLDKRPPNFTGR

SEQ ID NO: 12141 - protein, 236 aa, Haemophilus somnus 129PT
MSKLSLIQQLKQQKLSVGILSANWLQLNEEVTTLLENQINVLHFDIADGQFSSLFTVGAIGIKYFPTHCFKDVHLMVRNQLEVAKAVVANGANLVTLQLEQYHDFALTIEWLAKQKTTYANQVYPVLIGACLCPETPISELEPYLDQIDVIQLLTLDPRNGTKYPSELILDRVIQVEKRLGNRRVEKLINIDGSMTLELAKYFKQGTHQIDWLVSGSALFSGELKTNLKVWKSSIM

SEQ ID NO: 12142 - protein, 324 aa, Burkholderia xenovorans LB400
MSAPEIRYAQAVAQALHDSLRDDESVMVMGEDIAAAGGSFKATRGLLDAFGPQRVRDTPISEASIVSAAVGAALTGMRPVVEIMFMDFITLAMDALVNQASKARFMFGGQGSVPMVLRTPHGGGMNAGPQHSQCLEAWLAHVPGLKVVCPSTPQDAYSLLRAAIADPDPVIVVEHKGLYARKGVVEPVVGRIGEASIVRAGRDLTLVSYGATVAACLDAARTLGAEGVEAEVIDLRSIQPWDKAAVLASLARTHRAVIVHEAVSAFGVGAEIAATLSDEGFDDLDAPVRRVGAPFMPVPFASSLEKGYAVDAEKIVAVARETLN

SEQ ID NO: 12143 - protein, 278 aa, Enterococcus dispar
GAILVVSAADGPMPQTREHILLSRNVGVPYIVVFLNKMDMVDDEELLELVEMEVRDLLSEYDFPGDDTPVIAGSALKALEGDASYEEKILELMAAVDEYIPTPVRDTDKPFMMPVEDVFSITGRGTVATGRVERGQVRVGDEVEIVGIAEETAKTTVTGVEMFRKLLDYAEAGDNIGALLRGVAREDIQRGQVLSKPGSITPHTKFAAEVYVLTKEEGGRHTPFFTNYRPQFYFRTTDVTGVVELPEGTEMVMPGDNVTMDVELIHPIAIEDGTRFSI

SEQ ID NO: 12144 - protein, 148 aa, Brassica napus
  misc_feature (6)..(6): Xaa can be any naturally occurring amino acid
  misc_feature (12)..(12): Xaa can be any naturally occurring amino acid
  misc_feature (14)..(14): Xaa can be any naturally occurring amino acid
  misc_feature (17)..(20): Xaa can be any naturally occurring amino acid
  misc_feature (32)..(32): Xaa can be any naturally occurring amino acid
  misc_feature (37)..(37): Xaa can be any naturally occurring amino acid
  misc_feature (39)..(39): Xaa can be any naturally occurring amino acid
  misc_feature (42)..(42): Xaa can be any naturally occurring amino acid
  misc_feature (47)..(48): Xaa can be any naturally occurring amino acid
  misc_feature (53)..(56): Xaa can be any naturally occurring amino acid
  misc_feature (59)..(59): Xaa can be any naturally occurring amino acid
  misc_feature (68)..(68): Xaa can be any naturally occurring amino acid
  misc_feature (71)..(71): Xaa can be any naturally occurring amino acid
  misc_feature (73)..(73): Xaa can be any naturally occurring amino acid
  misc_feature (77)..(77): Xaa can be any naturally occurring amino acid
  misc_feature (99)..(99): Xaa can be any naturally occurring amino acid
  misc_feature (102)..(102): Xaa can be any naturally occurring amino acid
  misc_feature (105)..(105): Xaa can be any naturally occurring amino acid
  misc_feature (107)..(107): Xaa can be any naturally occurring amino acid
  misc_feature (109)..(109): Xaa can be any naturally occurring amino acid
  misc_feature (111)..(112): Xaa can be any naturally occurring amino acid
  misc_feature (114)..(114): Xaa can be any naturally occurring amino acid
  misc_feature (116)..(116): Xaa can be any naturally occurring amino acid
  misc_feature (119)..(119): Xaa can be any naturally occurring amino acid
  misc_feature (126)..(126): Xaa can be any naturally occurring amino acid
  misc_feature (128)..(128): Xaa can be any naturally occurring amino acid
  misc_feature (131)..(131): Xaa can be any naturally occurring amino acid
  misc_feature (139)..(139): Xaa can be any naturally occurring amino acid
  misc_feature (144)..(144): Xaa can be any naturally occurring amino acid
KREQVXASSMFXSXAVXXXXAQATMVAPFTGXLKSSXAXPVXRKANXXITSIXXXXGRXSCMKVWPPXGKXKXESLXYLPDLTEVELGKEVDYLLRNKXIPXVEXEXEXGXXYXEXGSXPGYYDGXYXTMXNLPLVGCXDSAQXLEGS

SEQ ID NO: 12145 - protein, 168 aa, Zea mays
MAAWSTATSVHDFIVKDASGKDVALSTYKGKVLLIVNVASQCGLTNSNYTELAQLYEKYKAQGFEILAFPCNQFGGQEPGTNEEIVQFACTRFKAEYPIFDKVDVNGNNAAPIYKFLKSSKGGLFGDSIKWNFSKFLVDKEGRVVDRYAPTPSPLSIEKDIKKLLGSS

SEQ ID NO: 12146 - protein, 278 aa, Enterococcus dispar
GAILVVSATDGPMPQTREHILLARQVGVKYLIVFLNKTDLVDDEELLELVEMEVRELLNEYNFPGDDIPVIRGSALKALEGDPEQEEVIMNLMDTVDEYIPTPERDNDKPFLLPVEDVFTITGRGTVASGRIDRGKVNVGDEIEIIGIKPETQKAVVTGLEMFRKTLDYGEAGDNVGVLLRGITRDEVERGQVLAKPGSITPHTKFKGEVYILTKEEGGRHTPFFNNYRPQFYFRTTDVTGNIALPEGTEMVMPGDNVTIEVELIHPIAVEKGTTFSI

SEQ ID NO: 12147 - protein, 473 aa, Bacillus licheniformis ATCC 14580
MNEQGNQKSFLRTIILVSTFGGLLFGYDTGVINGALPYMSEGDQLNLTAFTEGLVASSLLLGAALGAVFGGRLSDYIGRRKNIIFLAVLFFFSTLGCTLAPDVTVMVISRFLLGVAVGGASVTVPTYLAEMSPSEKRGRMVTQNELMIVSGQLLAFTFNAILGTTMGDSSHVWRYMLAIAAVPAVFLFFGMLRMPESPRWLVSKGKNEAALGVLKRIRKEKRAHSEVAEIEAAVMKESEMKKANYKDLAVPWVRRIVFLGIGIAVVQQITGVNSIMYYGTEILKNAGFETKAALIGNIANGVISVLATFVGIWLLGKVGRRPMLLTGLIGTTSALLLIGIFSNVLQGSAALPYVVLTLTVTFLAFQQGAISPVTWLMLSEIFPLRVRGLGMGVTVFCLWIANFFVGFSFPILLESIGLSSTFYIFVGLGLLSIAFVKKFLPETKGLTLEQLEHNFRNYKSETAQSGASAKISG

SEQ ID NO: 12148 - protein, 334 aa, Arabidopsis thaliana
MVKKGGTKRKIAIETIQKRDSLRVTCTKRREGLYSKASQLCLLSDAQIAILATPPSSESNVSFYSFGHSSVDAVVSAFLSGQRPVPKDNKETREDVGICLTRNNLGLGFWWNDESLARSENPQEISEAIDSMRTLLRNLKELRADEALACNQAFVNDREDLKNNDKCDFVSDHETHDQTLILQSASPICCIPENLNEITQEPNQTLNIQSSTSAICCVPDNSPENFNEITEEQDQIRSICETFCVMDNNAALPEMNLDYDQDIGFDTPFESALNDWFSDNTTHQEISASILNAVVDDQVSVDLTPFSYFQRCLDGDNLRFSDCFKDFANTISAL

SEQ ID NO: 12149 - protein, 278 aa, Enterococcus durans
  misc_feature (168)..(168): Xaa can be any naturally occurring amino acid
GAILVVSAADGPMPQTREHILLSRQVGVPYIVVFLNKVDMVDDEELLELVEMEVRDLLTEYEFPGDDVPVIAGSALKALEGDASYEEKILELMAAVDEYIPTPERDNDKPFMMPVEDVFSITGRGTVATGRVERGQVRVGDVVDIVGIAEETAQTTVTGVEMFRKLLXYAEAGDNIGALLRGVAREDIQRGQVLAKPGTITPHTKFSAEVYVLTKEEGGRHTPFFTNYRPQFYFRTTDVTGVVELPEGTEMVMPGDNVTMEVELIHPIAIENGTKFSI

SEQ ID NO: 12150 - protein, 394 aa, Mesoplasma florum L1
MAKEAFDRSLPHVNIGTIGHVDHGKTTLTAAITKVLADKGGAEFKDYANIDNAPEERERGITINTSHVEYKTENRHYAHVDCPGHADYVKNMITGAAQMDGGILVVAATDGPMPQTREHILLSRQVGVPKIVVFLNKCDMVDDEEMIDLVEMEVRDLLSAYDFDGDGAPVIRGSALGALNGEAKWVAAIEELMAAVDEYIPTPTRDSDKTFLMPVEDVFTITGRGTVATGRVERGTIKVNEEVEIVGLVEEAKKTVVTGLEMFRKLLDFAEAGDNVGALLRGVDRESIERGQVLAKPGTIKPHTKLQASVYALTTEEGGRQKPFFNKYRPQFYFRTTDVTGEVILPAGTDMVMPGDNVEMTVELIKPIAVEDGTKFSIREGGRTIGAGTVISVQ

SEQ ID NO: 12151 - protein, 425 aa, Synechococcus sp. WH 5701
MPLPSRPPLEAADSFEDPCLLRLANGVDVVSLKQEQAPLVCIDFWCQAGSAGEGPGQEGMAHFLEHMVFKGSEHLEAGQFDHRIESLGGSSNAATGFDDVHYHVLVPAEAVAEALELLLDLVLKPRLDPGDFRMERQVVLEELAQSEDQPEEVAFQSLLHLACPQHPYGRPILGNRGALKAQTPEGMASFHSGAYRPRRCSLALAGALDQLPIESLLEASALASLEPLASADPPGPTLELRPGVHELRLPRLEAARLLMAWQLPAADDLEAVAGADLLTSLLAEGRRSRLVQRLREELRLVESIDLDLNVLEAGSLALLEAVCAPEQVAAVEEQIAVVWQQICCTLPPESELERARRLVANGYRFGLESASSVAGLIGHQCLWGRLRPLRHPLELLERWSVERLGAELLPLLAPERACRLLALPA

SEQ ID NO: 12152 - protein, 357 aa, Synechocystis sp. PCC 6803
MTATLAAPSKTRRVVFPFTAIVGQDEMKLALLLNVIDPKIGGVMIMGDRGTGKSTTIRALADLLPEIEVVANDPFNSSPSDPEMMSEEVRIRVDSQEPLSIVKKKVTMVDLPLGATEDRVCGTIDIEKALSEGVKAFEPGLLAKANRGILYVDEVNLLDDHLVDVLLDSAAGGWNTVEREGISIRHPARFVLVGSGNPEEGELRPQLLDRFGMHAEIRTVREPELRVKIVEQRTEFDQNPHPFCDQYQTEQEALQAKIVNAQNLLPQVTIDYDYRVKVSEVCAELDVDGLRGDIVTNRAAKALAAFEGRTEVTVDDISRVIVLCLRHRLRKDPLESIDSGSKVEKVFKRVFGVVDEA

SEQ ID NO: 12153 - protein, 461 aa, Brucella melitensis 16M
MPIEILMPALSPTMEEGKLSKWLKKEGDKVTSGDVIAEIETDKATMEVEAVDEGTIGKLLVDEGTEGVKVNTPIAVLLGDGESAADIGSAPAAKAEAAKEEPKAEENKADAVPAAPKAPAVEVASDPDIPAGTEMVSLTVREALRDAMAEEMRRDPDVFIMGEEVAQYQGAYKITQGLLDEFGPKRVVDTPITEHGFAGVGVGAAFAGLKPIVEFMTFNFAMQAIDQIVNSAAKTLYMSGGQMGAPMVFRGPSGAAARVAAQHSQCYAAWYSHIPGLKVVMPYTAADAKGLLKAAIRDPNPVIFLENEILYGHHFDVPKLDDFVLPIGKARIHKQGKDATIVSFGIGMTYAVKAAEELAGQGIDVEIIDLRTIRPMDIATVVESVKKTGRLVTVEEGFPQSSVGTEIATRVMQQAFDYLDAPILTIAGKDVPMPYAANLEKLALPSVAEVVEAVKAVTYTA

SEQ ID NO: 12154 - protein, 370 aa, Prochlorococcus marinus str. MIT 9211
MENNLVTHKKVFIISYLGWQDIELSGKIKFIRLFIITEDPQGMSPDLLFLAILVVVVIIGSALCSGVEAAFLAVNPLRVHELAAKKRPVNGARRLEKLRHRLGRTLTVLTITNNGFNIFGSLMLGSYATFVFKSGMVLPLFSIGLTILVLLLGEIVPKSIGTRFSLKVSLASAPILTLLSLIMRPVIIPLERLLPVITTENEISTDEEEITQMARLGSQKGYIEADEAAMISKVFQLNDLTARDLMTPRVAAPTLDGSISLEEVRPNLITNHSQWWVVLGKEVDKVIGVVNREQLLTALLQGQNQLTPKDLAEKVEFVPEMIRVDRLLNNFTEDKNGVRVVVDEFGGFVGLIGAEAVLAVLAGWWRKSKI

SEQ ID NO: 12155 - protein, 234 aa, Antirrhinum majus
VLVQFGAFIILCGATHLISLWTFSLHSKTVAIVMTVAKIATALVSCVTALVLVHIIPDLLSVKTRESFLRKKAEELDREMGNIIKQEETSRHVRMLTHEIRSTLDRHTILRTTLVELGRTLELEECALWMPGQRGPNLQLSHTLNNLIPVGSTVPINLPIVNGVFNSEEAIKIPHTCPLAKIRPLGGGYVPPEVVAVRVPLLHLSNFHINNWPEQSSKSYAVMVLILEWHKNMA

SEQ ID NO: 12156 - protein, 569 aa, Gibberella zeae PH-1
MDSSNQNQDQPQAAPEAQQLPDTSAQQGMPPMDVGASMNGNGIPHVPNHVLNPMNPEALTMLGDPSLMADPSLLGMQMPMADPSFMMQPGMNLSNGQTQGFSLPVVPPPTTVSAEEVALYDRQIRLWGMAAQAKIQSANILLITIKALANEIAKNLVLAGVGSLTLLDSATVTEADRGAQFLLPDDEDVIGKNRAQVASVALRKLNPRVHVHVDEEGVKTKGPSYFAAYDIVIATDLDPESFNIINTATRLNCKAFYAAGCHGLYGFIFSDLIEHDYVIKRDLGNVSTTTGPETRTRSIVDVQTRKEGPKTIESVTKRELYSTWFLASDVAVLPAEYTQSKRRLKSVTPALSCLRALWEFMQLQNGRVPSNREDLKMFTQIATQKHKALGLPSETLRPEFLRSFLQNLVSEISPVSAILGGQLAQDVINVLGQTQQPIQNMVVFDGNTMEALMYPLHPEGPLGASLLTDHTVPNGGAPMLMGGGMDGLPLGIDPTAMGALPHHNNPIMLAGGMPQTGNFIAMPGGSLADPTQLNGAPAPQRPIQEQAAQATAEQPVQEAQANLNASETN

SEQ ID NO: 12157 - protein, 161 aa, Zea mays
MVSGSISEEIAVAVPAERMWKVAFAETKSALLPKACAGYVDAVEVDGDGGPGSVTTMKLNPSLGENKTLKSRVVALDAAARVVRTEVLQGGTVSAQLRTHFAEIRVEAAGEGACVAKVKVDYERLDGAPLAPEDEARLAQGYVRLVRMVEAYLVAHPDEFA

SEQ ID NO: 12158 - protein, 147 aa, Triticum aestivum
  misc_feature (115)..(115): Xaa can be any naturally occurring amino acid
ASPPPQGPQLQLTRSRWLALQATKLVLVALVAAMILAASDAAISCGQVSSALTPCVAYAKGSGTSPSGACCSGVRKLAGLARSTADKQATCRCLKSVAGGLNPNKAAGIPSKCGXSSVPYTISASVDCSKITDRFLAAIIADYSSSD

SEQ ID NO: 12159 - protein, 351 aa, Pseudomonas syringae pv. phaseolicola 1448A
MNSYNIAAVPGDGIGVEVIAAGVEVLQALSKKSGFDLTFKHFDWNSDNYLKNGHYIPEGGLAELKTFDAIFFGAVGALNVPDHISLWGLRLPICQGFDQYANVRPARVLPGVKSPLHNGHEIDWVVVRENSEGEYSGNGGRVHRGLPEEVATEVSVFTRAGVERIHRFAFELARTRPRKHLTMVTKSNAQRHGMVLWDEIFYEVAKDFPDVRIDKELVDAVTTRMVLKPSSLDVIVATNLHADILSDLAAALSGSLGIAPTANLNPGRNFPSMFEPIHGSAFDITGKGVANPIATFWTAAMMLEHLGESAAAKTLMSAIEAVTESGLHTPDLGGTATTRQVTDAVLQLINR

SEQ ID NO: 12160 - protein, 180 aa, Medicago sativa
MALISSAAVTTVNRASSAQANLVAPFTGLKSSAGFPVTKKTNNDITSIASNGGRVNCMQVWPPVGKKKFETLSYLPPLTEEQLAKEVEYLIRKGWIPCLEFELEKGFVYRENHRSPGYYDGRYWTMWRLPLFGATDSSQVLKELADCKAEYPDSFIRIIGFDNVRQVQCISFIAHTPKNY

SEQ ID NO: 12161 - protein, 284 aa, Legionella pneumophila str. Paris
MPASLIDGREISALRRNELKQRVQHHVGLGQRPPGLAVVLIGNDPASVIYVSNKRKACEEVGITSHSYDLPAETTQEKLIQLINELNQSDKIDGILIQLPLPKHINERTIIEHIKPEKDVDGFHPYNLGRLAQRNPFLRPCTPLGIMNLLHHYELNVKRKHAVVIGASNIVGRPMSLELLLAGATVTICHKFTQQLQKFVEIADFLIVATGKMDVIATDWLREHQVVIDVGMHRLPDGSIRGDIDFKKAVEKVAWITPVPGGVGPMTIVTLLENTMMSAARLRE

SEQ ID NO: 12162 - protein, 533 aa, Triticum aestivum
MLRAVLLRSASGLRRSPMAAPLSTAAASWLAEGTSSPPRVRLLIGGDFVESKATEHVDVTNPATQEVVSRIPLTTADEFRAAVDAARTAFPGWRNTPVTARQRIMFKYQELIRANMDKLAENITTEQGKTLKDAWGDVFRGLEVVEHACGMGSLQMGEYVSNVSHGIDTFSIREPLGVCAGICPFNFPAMIPLWMFPIAVTCGNTFVLKPSEKDPGAAMMLAELAMEAGLPKGVLNIVHGTHDVVNNICDDEAIKAVSFVGSNTAGMHIYSRASASGKRVQCNMGAKNHAIILPDADRDATLNALIAAGFGAAGQRCMALSTAVFVGGSEPWEDELVKRASNLVVNSGTANDADLGPVISTQAKDRICKLVQSGADSGARLVLDGREIVVPQFEDGNFIGPTVLADVKSDMECYQEEIFGPVLLLMKAESLDDAIQIVNRNKYGNGASIFTTSGVSARKFQTDIEAGQVGINVPIPVPLPFFSFTGSKASFAGDLNFYGKAGVQFFTQIKTITQQWKESSPQRVSLSMPTSQK

SEQ ID NO: 12163 - protein, 370 aa, Clostridium tetani E88
MTNFKELGLSNDLIQNLKTQGINSPTPIQRESILLIKEGNDVIAEAQTGTGKTLAFLLPMFENMSPNINTIQGLIVTPTRELAIQITEEAMKLNESKDLNILSAYGGKDIGSQLNKLKGNIHLVIATPGRLLDHLDRNTIDLKNLKTLVLDEADQMLLMGFKNEVETIIKHTSKNRQTLCFSATMNSSVKKLAYKYMDDPKLITIQKEEITLKNIKQVLIETTDRNKLDDLCKVLNETNPFMAIIFCRTKRRVDKLEMDLYQRGYNCKKLHGDLTQSKREKVMKDFKNTKIQYLIATDVAARGLDITGVTHIYNYDIPENTENYIHRIGRTGRAGEKGYAYLFIDLKDKETLNIIEKGIKTKIERIKNHK

SEQ ID NO: 12164 - protein, 145 aa, Oryza sativa
  misc_feature (60)..(60): Xaa can be any naturally occurring amino acid
MASPTTMVGVATSCASPHPPPPACLSCACAPPTRGTRRRRLAVAVRVRVRVRASASEAMXNPPESRLSELGVREWPKWGCEKSKFPWTYSAKETCYLLQGKVKVFPDGAGEDFVEIAAGDLVVFPKGMSCTWDVAEAVDKHYKFE

SEQ ID NO: 12165 - protein, 181 aa, Lactuca sativa
MASISSSAIATVNRTTSTQASLAAPFTGLKSNVAFPVTKKANNDFSSLPSNGGRVQCMKVWPPIGLKKYETLSYLPPLSDEALSKEIDYLIRNKWIPCLEFELEHGFVYREHHHSPGYYDGRYWTMWKLPMFGCTDSAQVMKEVGECKKEYPNAFIRVIGFDNIRQVQCISFIVAKPPGVL

SEQ ID NO: 12166 - protein, 567 aa, Hordeum vulgare
MASPALISDTDQWKALQAHVGAIHKTHLRDLMADADRCKAMTAEFEGVFLDYARQQATTETVDKLFKLAEAAKLKEKIDKMFKGEKINSTENRSVLHVALRAPRDAVINSDGLNVVPEVWAVKDKIKQFSETFRSGSWVGATGKPLTNVVSVGIGGSFLGPLFVHTALQTDPEAAECAKGRQLRFLANVDPVDVARSIKDLDPATTLVVVVSKTFTTAETMLNARTIKEWIVSSLGPDAVSKHMIAVSTNLKLVKEFGIDPNNAFAFWDWVGGRYSVCSAVGVLPLSLQYGFPIVQKFLEGASSIDNHFHTSSFEKNIPVLLGLLSVWNVSFLGYPARAILPYSQALEKLAPHIQQLSMESNGKGVSIDGVRLPYEAGEIDFGEPGTNGQHSFYQLIHQGRVIPCDFIGVIKSQQPVYLKGETVSNHDELMSNFFAQPDALAYGKTPEQLHSEKVPENLIPHKTFQGNRPSLSFLLSSLSAYEIGQLLSIYEHRIAVQGFIWGINSFDQWGVELGKSLASTVRKQLHASRMEGKPVEGFNPSSASLLTRFLAVKPSTPYDTTVLPKV

SEQ ID NO: 12167 - protein, 326 aa, Cytophaga hutchinsonii
MREIQFREALREAMNEEMRRDPNVLLLGEEVAEYNGAYKVSQGMLDEFGAKRIIDTPISELGFAGIGVGAAMNGLRPIIEFMTFNFSLVAIDQIINGAAKIMSMSGGQYTAPIVFRGPTGNAGQLSSQHSQNFENWFANTPGLKVVVPANPYDAKGLLKSAIRDNDPVIFMESEVMYGDKGPVPEGEYLLPIGVADVKREGTDVTLVSYGKILKVALQAAEDLAKEGVSAEVIDLRTVRPIDFEAIVHSVKKTNRLVIVEETWPLASISSEISYHVQRYAFDHLDSPILRVTSRDLPLPYAPTLIQEILPNVKRTIDAVKTVMYQK

SEQ ID NO: 12168 - protein, 180 aa, Stellaria longipes
MASSIMSSAAVATRSNGAQASMVAPFTGLKSNASFPVSRKTNLDITSIASNGGRVRCMQVWPPINMKKYETLSYLPDLSSEQLLSEIEYLLKNGWVPCLEFETEHGFVYREHTSSPGYYDGRYWTMWKLPMFGCTDATQVAAEVQEAKKAYPDAHIRIIGFDNVRQVQCISFIAYKPEAF

SEQ ID NO: 12169 - protein, 567 aa, Triticum aestivum
MASPALISDTDQWKALQAHVGAIHKTHLRDLMTDADRCKAMTAEFEGVFLDYSRQQATTETVDKLFKLAEAAKLKEKIDKMFKGEKINTTENRSVLHVALRAPRDAVINSDGVNVVPEVWAVKDKIKQFSETFRSGSWVGATGKPLTNVVSVGIGGSFLGPLFVHTALQTDPEAAESAKGRQLRFLANVDPVDVARSIKDLDPATTLVVVVSKTFTTAETMLNARTIKEWIVSSLGPQAVSKHMIAVSTNLKLVKEFGIDPNNAFAFWDWVGGRYSVCSAVGVLPLSLQYGFPIVQKFLEGASSIDNHFHTSSFEKNIPVLLGLLSVWNVSFLGYPARAILPYSQALEKLAPHIQQLSMESNGKGVSIDGVRLPYEAGEIDFGEPGTNGQHSFYQLIHQGRVIPCDFIGVIKSQQPVYLKGETVSNHDELMSNFFAQPDALAYGKTPEQLHSEKVPENLISHKTFQGNRPSLSFLLSSLSAYEIGQLLSIYEHRIAVQGFIWGINSFDQWGVELGKSLASTVRKQLHASRMEGKPVEGFNPSSASLLTRFLAVKPSTPYDTTVLPKV

SEQ ID NO: 12170 - protein, 677 aa, Shewanella oneidensis MR-1
MAELKEVFVPDIGGDEVQVIEICAAVGDTLAAEESILTVESDKATMDIPAPFAGVLAELKVAVGDKVSEGTLIALIQAAGASAQAAAPVAQAAAPAPAPVQAAPAPVVAAPATGATKLVEAKVVEISVPDIGGDTDVSVIEVLVAAGDKIEVDAGLITLETDKATMDVPSPFAGVVKEVKVAVGDKVSQGSLVIMLEVGGAAPAAAPQANAPAASAPVAQAAPAAAVAPVAAVPVVAVKEIQVPDIGDASNVDVIEVLVSVGDMISADQGLITLETDKATMEVPAPFAGKLLSLTVKVGDKVSQGSVIATIETTSVATVSAGAATAPVAQAAAPAPVAQEAAPAPVAAAPSRPPVPHHPSAGAPVSTGAVHASPAVRRLAREFGVDLTQVTGSGRKGRIMKEDVQAYVKYELSRPKATAATSVATGNGGGLQVIAAPKVDFSKFGEVEEIPLSRIQKISGPNLHRNWVTIPHVTQFDEADITEMEEFRKQQNDAAAKKKADYKITPLVFMMKAVAKTLQQFPVFNSSLSSDGESLIQKKYFHIGVAVDTPNGLVVPVVRDVDKKGIIELSRELADISIRARDGKLKSADMQGSCFTISSLGGIGGTAFTPIVNYPDVAILGVSKSEIKPKWNGKEFEPKLMLPLSLSYDHRVIDGAMAARFSVTLSGILSDIRTLIL

SEQ ID NO: 12171 - protein, 125 aa, Pyrococcus horikoshii OT3
MTTFKLVISDPKSGIAKQIEISGANAEKLIGKKIGDQIPVKELGLDLKALFGKDFPEDVKMEIRGGTDKDGFPMRPDIHGPRRVRILLSKGPGFRPKEKGERRKKTVRGNTISPEIVQVNVKLVY

SEQ ID NO: 12172 - protein, 275 aa, Enterococcus durans
ILVVSATDGPMPQTREHILLSRQVGVKYLIVFLNKIDLVDDEELIDLVEMEVRELLSEYGFPGDDTPVIKGSALKALQGDPDAEAAIMELMDTVDEYIPTPERDTDKPLLLPVEDVFSITGRGTVASGRIDRGAVRVGDEIEIVGIKPETQKAVVTGVEMFRKTLDYGEAGDNVGVLLRGIQREDIERGQVIAKPGSITPHTKFKAEVYVLTKEEGGRHTPFFNNYRPQFYFRTTDVTGTIVLPGGTEMVMPGDNVTIDVELIHPVAIENGTTFS

SEQ ID NO: 12173 - protein, 250 aa, Enterococcus faecium
GAILVVSATDGPMPQTREHILLSRQVGVKYLIVFLNKVDLVDDEELIDLVEMEVRELLSEYGFPGDDTPVIKGSALKALQGDPDAEAAIMELMDTVDEYIPTPERDTDKPLLLPVEDVFSITGRGTVASGRIDRGAVRVGDEVEIVGIKPETQKAVVTGVEMFRKTLDYGEAGDNVGVLLRGIQRDDIERGQVLAKPGSITPHTKFKAEVYVLTKEEGGRHTPFFNNYRPQFYFRTTDVTGTITLPEDTE

SEQ ID NO: 12174 - protein, 376 aa, Dehalococcoides ethenogenes 195
MSKKVYVPSGAKIKVIGCGGAGSNAVTRMVRDNIQGVEFIAVNTDAQHLAITEAATRIQIGERCTRGLGAGGNHTMGKAAAEESMSELKENVIGADMVFVTAGMGGGTGTGSAPVVAKIAKESGALTIAVCTKPFCFEGAHRMQTAEEGINNIVDSVDTLIIIPNDRLLDMVDQKTGVDGAFKLADEVLCNGVKAIAEVITVPGIINLDFADVKAVMKDAGPAWMSIGKGAGQNRASDAARAALASPLLDIAVDGAKGVIYNVCGGEDLSLMEVNSAADVIRQAVDPEANIIFGVSTDPRMGKEVQITLIATGFATKESMLSNNHEKEMTRMMKGLRSKTQEELEVPSFMRYRSAQPSIRKPAPPAHQAPPRFLSR

SEQ ID NO: 12175 - protein, 250 aa, Enterococcus gallinarum
GAILVVSATDGPMPQTREHILLSRQVGVKHLIVFLNKIDLVDDEELIDLVEMEVRELLSEYNFPGDDIPVIKGSALKALEGDPDAEAAIMELMDTVDSYIPTPERDTDKPLLLPVEDVFSITGRGTVASGRIDRGTVRVGDEVEIVGIKPETQKAVVTGVEMFRKTMDFGEAGDNVGVLLRGITRDEIERGQVLAKPGSITPHTKFQAEVYVLTKEEGGRHTPFFNNYRPQFYFRTTDVTGNITLPEGTE

SEQ ID NO: 12176 - protein, 576 aa, Listeria monocytogenes str. 4b H7858
MQFGFRRLSIIDVENGHQPLTYENERYWIIFNGEVYNYVELREQLVAEGMTFETESDTEVIIATYAKYKEKTAERLRGMFGFVIWDKQEELVYGARDPFGIKPFFYAEEDGKLFMGSEKKSILHALKEKELDEVSLQNYMTYQFVPEPDSLTKNVKRLEPGHQFTKKIGQPMEITTYWKASFAPVTKSEDAWIKEVRDVMYDSVKMHMRSDVPVGSFLSGGIDSSIIAAIAKEYHPAIKTFSVGFERDGFSEIDVAKETADKLGVENISYVISPEEYMKELPKIVWHMDDPLADPAAIPLYFLSREARKQVTVALSGEGADELFGGYNIYNEPNSLAMFNKMPSVFKSMLNSVARIMPEGMRGKSFLERGTTPMEERYIGNAKMFTEKEKQILLPKYQAGHDYTNITDPFYAETTNYHPVERMQYIDIHTWLRGDILLKADRMTMANSLEVRVPFLDKEVYNVARNIPDTMKTTNGTTKYILRKAAATFVPEHVLNRRKLGFPVPIRHWLKDEMNAWVKNIIKESPTDHLINKQYVLGLLDDHCAGKFDYSRKIWTVVIFMIWYDVYVADKYDFGK

SEQ ID NO: 12177 - protein, 345 aa, Porphyromonas gingivalis W83
MADRRRTDDNKGAREVVLLLNIGSPDSPEEKDVARYLNSFLTDRRIITLPFLLRQLLVRGIITPFRKKSSAQKYRTVWDESTRSFPLISHTKAIARALAHTGREVHVAMRYGKPAVADVLKELPHGRSLVVLPLFPHYAMSSYETAVEHCKAEIRRLCPNLSFRVVQPFYAHEAYIRVLADNIRPYLTKPFDKLILSYHGIPRDHLDKTTRQALNLRHPEGCCTEEDPTANVCYRYQTYRTTALIREALGLAEEQVEQVFQSRVGHTEWLRPYLIERLSAWPQEETKRILIACPSFVCDCLESLEEVADHGQSIFKKAGGADFTYIPCLNSGANWIDALRNILEE

SEQ ID NO: 12178 - protein, 111 aa, Rickettsiella grylli
MQITITDDGIKVTDALKQYILDKFKRLERITHKTSTLHITLSLEHLDQVAKALMHTHGNEFYARAKNENLYTAIDELIDKIEQQINKHKLKSKEKRHDRSEKYDPEGSEEL

SEQ ID NO: 12179 - protein, 278 aa, Enterococcus hirae
  misc_feature (74)..(74): Xaa can be any naturally occurring amino acid
GAILVVSAADGPMPQTREHILLSRQVGVPYIVVFLNKVDMVDDEELLELVEMEVRDLLTEYEFPGDDVPVVAGXALKALEGDASYEEKILELMAAVDEYIPTPERDNDKPFMMPVEDVFSITGRGTVATGRVERGQVRVGDVVDIVGIAEETAQTTVTGVEMFRKLLDYAEAGDNIGALLRGVAREDIQRGQVLAKPGTITPHTKFSAEVYVLTKEEGGRHTPFFTNYRPQFYFRTTDVTGVVELPEGTEMVMPGDNVTMEVELIHPIAIENGTKFSI

SEQ ID NO: 12180 - protein, 134 aa, Arabidopsis thaliana
  misc_feature (26)..(26): Xaa can be any naturally occurring amino acid
  misc_feature (90)..(90): Xaa can be any naturally occurring amino acid
  misc_feature (97)..(97): Xaa can be any naturally occurring amino acid
  misc_feature (99)..(99): Xaa can be any naturally occurring amino acid
  misc_feature (106)..(106): Xaa can be any naturally occurring amino acid
  misc_feature (108)..(108): Xaa can be any naturally occurring amino acid
  misc_feature (111)..(112): Xaa can be any naturally occurring amino acid
  misc_feature (120)..(120): Xaa can be any naturally occurring amino acid
MASSMLSSAAVVTSPAQATMVAPFTXLKSSAAFPVTRKTNKDITSIASNGGRVSCMKVWPPIGKKKFETLSYLPDLSDVELAKEVDYLLXNKWVPCXEXFELEHGXFXTRXXRETIPGYXGWPVLGFKFIFGLS

SEQ ID NO: 12181 - protein, 248 aa, Porphyromonas gingivalis W83
MKRIVLIRHGESLWNKENRFTGWTDVDLSEKGIEEAKKAGELMKKEGFQFTKAYTSYLKRAVKTLNGVLDVMDLDWIPVEKTWRLNEKHYGMLQGLNKAETAEKYGDEQVLIWRRSYDVPPTPMEKEDPRSPFMDPRYKGVCEKDLPLTEALCDTVNRILPYWNETIFPTLKEHDEVLVAAHGNSLRGIIKVLKNISDEDIISLNLPTAVPYVFEFDDNLRLVKDYFLGDPEEIKKLMEAVANQGKKK

SEQ ID NO: 12182 - protein, 277 aa, Enterococcus hirae
RTILVVSATDGPMPQTREHILLSRQVGVKYLIVFLNKTDLVDDEELIDLVEMEVRELLSEYGFPGDDTPVIKGSALKALQGDPDAEAAIMELMDTVDEYIPTPERDTDKPLLLPAEDVFSITGRGTVASGRIDRGAVRVGDEIEIVGIKPETQRAVVTGVEMFRKTLDYGEAGDNVGVLLRGIQREDIERGQVIAKPGSITPHTKFKAEVYVLTKEEGGRHTPFFNNYRPQFYFRTTDVTGTIVLPEGTEMVMPGDNVTIDVELIHPVAIENGTTFS

SEQ ID NO: 12183 - protein, 291 aa, Triticum aestivum
LAWSRPRWALNVIFNIYNKKVLNAFPYPWLTSTLSLACGSAMMLFSWVTCLVEAPKTDLDFWKALFPVAVAHTIGHVAATVSMSKVAVSFTHIIKSAEPAFSVLVSRFILGESFPMPVYLSLLPIIGGCGLAAATELNFNMIGFMGAMISNLAFVFRNIFSKRGMKGKSVSGMNYYACLSIMSLVILTPFAIAMEGPQMWATGWQKALADVGPNVLWWIGAQSVFYHLYNQVSYMSLDQISPLTFSIGNTMKRISVIVSSIIIFRTPVRPVNALGAAIAIFGTFLYSQAKQ

SEQ ID NO: 12184 - protein, 122 aa, Oryza sativa
  misc_feature (78)..(78): Xaa can be any naturally occurring amino acid
  misc_feature (99)..(99): Xaa can be any naturally occurring amino acid
  misc_feature (115)..(115): Xaa can be any naturally occurring amino acid
LRVLTLRKVTPAAAASSLARAVAGAGRVAFPRVGRVEFAATRATGSATPPDIFDKMSESIDKVYEVCAEDSVRRECPXSSDQARRLTVLSSHARFQLRXDSDPPQAYCSDNPQTXECRTYDN

SEQ ID NO: 12185 - protein, 337 aa, Ustilago maydis 521
MSQVNIGINGFGRIGRIVFRNSVVHNTANVVAINDPFIDLEYMVYMLKYDSTHGVFNGDISTKDGKLIVNGKSIAVFAEKDPSNIPWGQAGAHYVVESTGVFTTIDKASAHIKGGAKKVVISAPSADAPMYVCGVNLDAYDPKAQVVSNASCTTNCLAPLAKVIHDKFGIVEGLMTTVHATTATQKTVDGPSAKDWRGGRAAAANIIPSSTGAAKAVGKVIPSLNGKLTGMAFRVPTTNVSVVDLTARLEKGASYDEIKAEVKRASENELKGILGYTEDAVVSQDFIGNSHSSIFDAAAGISLNNNFVKLVSWYDNEWGYSNRCLDLLVFMAQKDSA

SEQ ID NO: 12186 - protein, 516 aa, Aspergillus niger
MLNPKVAYMVWMTCLGLTLPSQAQSNDYRPSYHFTPDQYWMNEPNGLIKIGSTWHLFFQHNPTANVWGNICWGHATSTDLMHWAHKPTAIADENGVEAFTGTAYYDPNNASGLGDSANPPYLAWFTGYTVSSQTQDQRLAFSVDNGATWTKFQGNPIISTSQEAPHDITGGLESRDPKVFFHRQSGNWIMVLAHGGQDKLSFWTSADTINWTWQSDLKSTSINGLSSDITGWEVPDMFELPVEGTEETTWVVMMTPAEGSPAGGNGVLAITGSFDGKSFTADPVDASTMWLNNGRDFDGALSWVNVPASDGRRIIAAVMNSYGSNPPTTTWKGMLSFPRTLSLKKVGTQQHFVQQPITELDTISTSLQTLENQTITPGQTLLSSIRGTALDVRVAFYPDAGSVLSLAVRKGASEQTVIKYTQSDATLSVDRTESGDTSYDPAAGGVHTAKLEEDDTGLVSIRVLVDTCSVEVFGGQGEAVISDLIFPSDSSDGLALEVTGGNAVLQSVDVRSVSLE

SEQ ID NO: 12187 - protein, 74 aa, Methanothermus fervidus
MSRLAILDKDRCQPKKCGYLCLEYCPGVRMGEDTIVIHKKTKKPIISEKLCSGCGICVKKCPFDAINIINLPEA

SEQ ID NO: 12188 - protein, 431 aa, Legionella pneumophila str. Paris
MDMDIKHKPLKRELSLFGATMMGLGSIVGTGVFVSIGIAAGVTGPSVILAIALAALVATCNAFSSAQLAANHAVSGGTYEYGYRYLHPAFGFTAGWMFLCAKSASAATAALGFAGYFIHLSGLETVPVIPIALAVSITLILLVLSGLRRTNTVNIIIVMITLITLTVFIISGLPDFMQRGTANLRPFFPVSKQEGLSHFFYATALMFVAYTGYGRIATLAEEVKNPGKFIPAAIIITLMVSAVLYILVGLVAIGAVGVEKLAQVTETNATPLESAAQAIGIPGLSVLVSIGACTAMLGVLLNLILGLSRVALAMGRKGDLPKIFCYVSETRHVPVSSVIGVGVVIIALVLTGSVETTWTFSAFTVLIYYAITNLAALHLPKEEQLYPPLFAIGGLLSCLFLAFWVPIGVWITGISLLVLGLLWKVVANRFL

SEQ ID NO: 12189 - protein, 361 aa, uncultured bacterium
MKHRIAVIAGDGIGQEVMPEGLRVLDAACRQFGLDLEFVSFDWAHCDYYLQHGQMMPDDWFAQLKDFDAIYFGAVGWPATVPDYISLWGSLLKFRREFDQYANVRPVRLMPGIPCPLAGKQVGDIDFYVIRENTEGEYSAVGGRMFEGTERETVIQESIFTRQGTDRILKFAFDLAQRRPKKHLTSATKSNGIAISMPYWDERVEAMAGHYPEVRWDKYHIDILTARFVLSPERFDVVVASNLFGDILSDLGPACTGTIGIAPSANLNPDRTFPSLFEPVHGSAPDIAGQGIANPVAMIWSGAMMLDFLGQGDSRYQAAHDAIMAAIEQVLVGGPRTPDMGGTASTVELGRAIAAALEGRD

SEQ ID NO: 12190 - protein, 366 aa, Arabidopsis thaliana
MALSAIGFEGYEKRLEVTFFEPSIFQDSKGLGLRALTKSQLDEILTPAACTIVSSLSNDQLDSYVLSESSFFVYPYKVIIKTCGTTKLLLSIPPLLKLAGELSLSVKSVKYTRGSFLCPGGQPFPHRSFSEEVSVLDGHFTQLGLNSVAYLMGNDDETKKWHVYAASAQDSSNCNNNVYTLEMCMTGLDREKAAVFYKDEADKTGSMTDNSGIRKILPKSEICDFEFEPCGYSMNSIEGDAISTIHVTPEDGFSYASFEAVGYDFNTLDLSQLVTRVLSCFEPKQFSVAVHSSVGANSYKPEITVDLEDYGCRERTFESLGEESGTVMYQTFEKLGKYCGSPRSTLKCEWSSNNSCSSEDEKDEGI

SEQ ID NO: 12191 - protein, 376 aa, Nostoc sp. PCC 7120
MNKVLINDTTLRDGEQAAGVAFSVEEKIAIAKFLDAIGVHEIEVGIPAMGKAEQEAIANIVKLDLSANLLGWNRAVIADIQASIACGLQRVHISIPVSAIQIAVKFHGQWQVVLQKLHDSISFAVDQGLFVSIGGEDSSRAEESFLLDVVLAAQEWGASRFRFCDTVGILDPFTTHAKVKQLVASLTIPVEMHTHNDFGLATANALAGTKAGALSVNTTVNGLGERAGNAALEEVVMALKHLYHHDLGIDTRRLLEISQLVASASGHPVPPWKAIVGENTFAHESGIHAHGVLQNPQTYEPFAPEEVGRERRLVVGKHSGRHLLSSILQQHDIILNHEETQFVLDAVRQESVEKKRSLTDQELLHLVQTKQHFRAC

SEQ ID NO: 12192 - protein, 555 aa, Coccidioides immitis RS
MWLREYGESVRHRGPDWSGNFVSNNTILAHERLSIVGVESGAQPLVNDDETLALAVNGEIYNHRILRKGLKTQYKFKTHSDCEVIIPLYMEHDIDAPKFLDGMFSWVLFDKKQNRVIAARDPIGITSFYQGWSSQTPGAVYFASELKSLHPVCDKIISFPPGHVYDSKTDTMTRYFQPKWWDPTNVPSTPIDYKLIRESLVRSVRKRLMAEVPYGVLLSGGLDSSLVASIAQRETQRMMVAQNGTVTNGESGAGLVGIDDSNELSTVTSFPQLHSFSIGLPGAPDTKAALEVANFLGTKHYAFTFTVDDGLNALSDVIYHLETYDVTTIRASTPMYLLSRKIKAMGVKMVLSGEGSDEIFGGYLYFHAAPDKKAFHEETVRRVKNLHLADCLRANKSTSAWGLEARVPFLDKQFLEVSMGVDPQEKMITKERIEKYVLRKAFDTSDEPETKPFLPDNILWRQKEQFSDGVGYSWIDALRDNAELQVTDEMMKNPKPEWGDDIPDTKEAYWYRMMFDEHFPPCCASTVMRWTPTWSKQTDPSGRAISTHVAKYDHA

SEQ ID NO: 12193 - protein, 420 aa, Brucella melitensis 16M
MRRVVITGLGLVSPLASGVEETWKRLLAGESGARRVTEFEVDDLACQIACRIPVGDGTNGTFNPDLHMDPKEQRKVDPFIVYAVGAADQALDDAGWHPENDEDQVRTGVLIGSGIGGIEGIVEAGYTLRDKGPRRISPFFIPGRLINLASGHVSIKHKLRGPNHSVVTACATGTHAIGDAARLIAFGDADVMVAGGTESPVSRISLAGFAACKALSTERNDDPTAASRPYDEDRDGFVMGEGAGIVVLEELEHALARGAKIYAEVIGYGMSGDAFHITAPTESGEGAQRCMVAALKRAGIVPDEIDYINAHGTSTMADTIELGAVERVVGEAAAKISMSSTKSSIGHLLGAAGAAEAVFSTLAIRDNIAPATLNLDNPAAQTRIDLVPHKPRERKIDVALSNSFGFGGTNASLVLRRYTA

SEQ ID NO: 12194 - protein, 311 aa, Vibrio cholerae
MTETPIRIATRQSPLALWQANYVKDALMAAHPGLQVELVTMVTRGDVILDTPLAKVGGKGLFVKELEIAMLEGRADLAVHSMKDVPVDFPDGLGLVTICEREDPRDAFVSNTYAKIEDLPSGAIVGTCSLRRQCQLKAARPDLVIKELRGNVGTRLSKLDAGEYDAIILAAAGLKRLELESRIRSFIEPEQSLPAVGQGAVGIECRVNDQRVRALLAPLNHADTADRVRCERAMNLTLQGGCQVPIGSYALLEGDTIWLRALVGEPDGSQIVRGEIRGPRTQAEQLGITLAEQLLSQGAKEILERLYCDHE

SEQ ID NO: 12195 - protein, 552 aa, Zea mays
STRRAPRSFSITISTSVEATSSPFRHAAMGNRASRHHRHATEQQPETPTLPKPQIQPPPPPTQTQQYQQAPPPPKPKPAADARAVGRVLGRPMEDVKATYTFGRELGRGQFGVTYLVTHRETGQRFACKSIATRKLVHRDDIEDVRREVQIMHHLTGHRNIVELRGAYEDRRSVNLAMELCEGGELFDRIIARGHYTERAAAALCREIVAVVHSCHSMGVFHRDLKPENFLFLNNKEDSPLKATDFGLSVFFKPGDTFKDLVGSAYYVAPEVLKRHYGAEADIWSAGVILYILLSGVPPFWAENEDGIFDAVLHSHIDFSSDPWPSISNGAKDLVKKMLRQDPKERLTAAEILNHPWIREDGEAPDKPLDITVISRMKQFRAMNKLKKVALKVVAENLSDEEIMGLKEMFRSLDTDNSGTITLEELRSGLPKLGTKISESEIKQLMEAADVDGNGTIDYAEFISATMHLNRLEKEDRILKAFEYFDKDHSGYITVDELEEALKKYDMGDDKTIKEIIAEVDTDHDGRINYQEFVAMMRNNTPEIVPNRRRMF

SEQ ID NO: 12196 - protein, 238 aa, Methanococcoides burtonii DSM 6242
MTNENYTDNIKKAIKAAQNGEMFFIYDSDSREGETDFVITASSVTPDDVRWMRRDGGGLICVAIDSENSKKLGLPFISDVLRDEAKANPALGNTVEKGGDLAYDTRSSFSIWVNHRKTRTGIPDNDRALTINELSNITEKCMKGEDVIFGSEFRTPGHVALLRAADHLVHDRKGQTELSIAIAKMADVTPAMVVCEMLDDSNGRALSKKDAKEYAELHGLVFLEGQEIVDAYEQWEQA

SEQ ID NO: 12197 - protein, 213 aa, Agrobacterium tumefaciens str. C58
MTIAKIEDAIEAISRGEMVIVVDDEDRENEGDIIAASDSITPQQIAFMMNHARGLVCVAMPGERLDALDIPLMVSRNTESLKTAFTVSVDYIPGTTTGISAADRAKTVRALVSEGSRPEDFARPGHIFPLRANPEGVLGRTGHTEAAVDLCRLAGKFPSGTICEVANDDGTMARLPQLEIFAERHGLLVVTIKDLVSYLKGEVVEEMVQKQVA

SEQ ID NO: 12198 - protein, 205 aa, Fucus distichus
MSRNDSPFDMQIKLLMIGDTGVGKTCLLLRYANDSFSQTFITTIGIDFKIKNIDLDSKRIKLQIWDTAGQERFRTITTSYFRGAQGILLVYDVTDKKSFNSIRNWVAQIQQHADVAVNKILIGNKCDMDEDREVSKEEGANLAAEYGIQFFETSAKNDINVEKGFITIAREVKDRLMADGPGGGGGHGRTVDINGQASKKKTGCC

SEQ ID NO: 12199 - protein, 907 aa, Medicago truncatula
MRITMNTHFLSCERSTMLLHQNSSPLLRRFRFRYVKFKPHRSRFRCLLPQIAVQSSANVIAAAAKAASVHGAVYSAINHVAVTAVAIASGACLSTKVDFLWPKPDEQPGTIMQDGVDVTGYPIFTDAKVQKAIAFATKAHLGQIRKTGDPYLAHCIHTGRILAALVPSSGKRAVETIVAGILHDVVDDTCQSLQDIEAEFGDDVAELVAGVSRLSYINQLLRRHRRVNVNQGVLGQEEASNLRGMLLGMIDDPRVVLIKLADRLHNMRTIYALPMHKAQAVAEETLIIWCSLASRLGLWALKAELEDLCFAVLQPQIFQSMRADLASMWSPSARIGSSGRLYLKGNLIPLAEKSSTSFYNKSLAFNEGLCSMKDLLEAVVPFDVLLDRRKRANFLYSIANNVETCTKPKVVQDAGLALASLVICEEALERELIISASYVPGMEVTLSSRLKSLYSIYSKMKRKDTSIDKVYDARALRVVVGDKNGALHGPAVQCCYSLLDIVHRLWTPIDGEFDDYIINPKPSGYQSLHTAVEGPDNSPLEVQIRTQRMHEYAEHGLAAHWLYKETGNPFSSVDRMDTPETDASSSIDKMDAPETEASSSIDRMDTPETEASSYFSKDTEAENSSDILLSKNKSLKAGHPVLRVEGSHLLAAVIISVENEARELLVAVSFQLAASDAVADRRSFFQDKRWEAYARLYKKVSDEWWFEPGHGDWCTCLEKYTLCRDGMYHKQDQFGRLLPTFVQVINFTEQEESEYWDVVSAVFEGKQVDCIASQSKLDLVPSTSMDASINNKVHLLRTMLSWEEQLRSEVNINQTKHDAKFDGPRGPLNLGEVVVICWPNGEIMRLKAGSSAVDAAQRTGLEGKLVLINGHLALPNTKLKDGDVLEGLGFEPRTPHLFILKVNFSSH

SEQ ID NO: 12200 - protein, 373 aa, Cryptococcus neoformans var. neoformans JEC21
MHSFCGDRRLRKGFGPMMTCVDRGKMAATYSLCTADCLVMTFIDGQLCLWPDQEHYIVAYPQRCKVYHGQQDRSSRPHHSRSSVHPFLASGSLSSLLAHPRHPSALFKEIIYCLLFDPRWCHLLRTWKCENVLLDVEVHFEGESGELDAKLLRGKDGEEEYQLIKVEGDQIIPSPFTSLSLPYATLSSHQSEPYILEERQSPGFPVVALGGTFDRLHAAHKLLLHLGYFLAREKLIVGVMADDLLHTKTRADLVQPLNQRLDGVNAFLGRLGDGSIKLNVVEIHDALGPTRSDPNVQALVVSRETLSGGEYVNSTRKEGGLQELELFVVDVIAENGDVNLKEEMDEGKLKKMKMGSTGVRNWIAERGTGEQDR

SEQ ID NO: 12201 - protein, 177 aa, Pyrococcus horikoshii OT3
MEIHLLLVIVFNFITVLNLMKRFKKVVVGGTFDRLHLGHKALLRKAFEVGKIVYIGLTSDEMVKEKPYAEKILPYERRLKDLIEFLEVNNFKGYRIIKINNAIGFTTEIRSLEAIVVSEETYKGALIVNRAREEVGLKPLEIIVIPIIKSKLGCKISSSLIRAGLIDPFGNPMKPRS

SEQ ID NO: 12202 - protein, 470 aa, Pseudomonas fluorescens Pf-5
MADAGTVLQRGLSTRHIRFIALGSAIGTGLFYGSAAAIQRAGPSVLLAYLIGGAAIYLTMRALGEMAVRTPVSGSFGHYASSYLGRFAGFLTGWSYAFSMLMVCLADVTAFGVYMGLWFPDTPRWIWVLSIVLGIGALNLCSVKVFGELEFWLSLLKVGAIVAMIVGGFTLLFFGIQLGEEQSRGGLANLWEYGGFFPNGVEGMIASFTIVMFAFGGIEVIGITAGEAKDPQRMIPKAINSVPLRILIFYVLTLLILLTLAPWSSIGSHGSPFVQIFSSLGISSAATVLNIVVISAVVSAINSDIFSAGRMMYGMAAIGQAPAVFARTSRFGVPWMTVLVMSVALLLGVLLNYWIPQELFLIFASLVTFSVVWVWLMILLSQMAMRRGMSAREIHELKFPLPLGTAGQACAVVFMLFIFGVLGAFADTRLALYVGLGWLALLSLAYWIWIKPDTTGSAAAESGIGTQEKG

SEQ ID NO: 12203 - protein, 511 aa, Nicotiana tabacum
MDGSTVQGGSSVESFLRNYKLGKTLGIGSFGKVKIAEHTLTGHKVAVKILNRRKIKNMEMEEKVRREIKILRLFMHPHIIRLYEVVETPSDIYVVMEYVKSGELFDYIVEKGRLQEDEARKFFQQIISGVEYCHRNMVVHRDLKPENLLLDSKWNVKIADFGLSNIMRDGHFLKTSCGSPNYAAPEVISGKLYAGPEVDVWSCGVILYALLCGTLPFDDENIPNLFKKIKGGMISLPSHLSAGARDLIPRMLIVDPMKRMTIPEIRMHPWFQAHLPRYLAVPPPDTMQQAKKIDEDILQEVVKRGFDRNSLVASLCNRVQNEGTVAYYLLLENQFRASSGYMGAEFQETMEYGYHQINSSEVLLPCWQHLPGIMDFQQVGARQFPVERKWALGLQSRAHPREIMTEVLKALQGLNVRWKKIGPYNMKCQWVPGVPGHHEGMSNNSIHIQFFGDDSTVIENGGVTIPNAVKFEVQLYKTREEKYLLDLQRVQGPQFLFLDLCAAFLAQLRVL

SEQ ID NO: 12204 - protein, 160 aa, Bacillus thuringiensis serovar konkukian str. 97-27
MTVYDFSAKTIIGEEKSLKDYEGKVLLIVNVASKCGFTPQYKGLQEVYDKYKEQGLEILGFPCNQFGGQEPGTEVDITSFCELNYGVNFPMFAKIDVKGDKAHPLYTYMTEQAPGLLGMKAVKWNFTKFLIGKDGKVVGRFAPQTKPVDLEVEIEKVLGE

SEQ ID NO: 12205 - protein, 144 aa, Glycine max
THIALAFEVPGGWRQEKTAMIVTVLQMLMGGGGSFSVGGPGKGVHSRLYLRVLNKYDQIESFSAFNSIYNDSGLFGIHAATSPDFASTAVDLAAGELLEVATPGKVTQDQLDRAKEATKAAVLMNLESRIVASEDIGRQVLTYG

SEQ ID NO: 12206 - protein, 278 aa, Enterococcus mundtii
  misc_feature (84)..(84): Xaa can be any naturally occurring amino acid
  misc_feature (137)..(137): Xaa can be any naturally occurring amino acid
  misc_feature (235)..(235): Xaa can be any naturally occurring amino acid
  misc_feature (241)..(241): Xaa can be any naturally occurring amino acid
GAILVVSAADGPMPQTREHILLSRQVGVPYIVVFLNKVDMVDDEELLELVEMEVRDLLTEYEFPGDDVPVIAGSALRALEGDAXYEEKILELMAAVDEYIPTPERDNDKPFMMPVEDVFSITGRGTVATGRVERGQXRVGDVIDIVGIAEETAQTTVTGVEMFRKLLDYAEAGDNIGALLRGVSREDIQRGQVLAKPGTITPHTKFSAEVYVLTKEEGGRHTPFFTNYRPQFYFXTTDVTXVVELPEGTEMVMPGDNVTMEVELIHPIAIENGTKFSI

SEQ ID NO: 12207 - protein, 413 aa, Campylobacter coli RM2228
MIDYSKITLKNKLDVYTFPVNKNSDVISVDIFYKVGSRNEIMGKSGIAHMLEHLNFKSTKNLKAGEFDEIVKGFGGVDNASTGFDYTHYYIKCSKKNLDKTLELFAELMENLSLKDEEFQPERSVVLEERRWRTDNNPLGYLYFRLFNHAFMYHPYHWTPIGFFKDIENWSIEDIKEFHSTYYQPKNAILIVSGDIDSEEVFSGAKKHFEKIKNTKPIPKIHTKEPKQDGAKRIEIKKPTQTELLAIGFKIPNFKHKDIPALNALAELLGNGKSSMMNEILVDELNLVNEFYSFANDCIDENLFIFICNCNVGVKAEKVEQELWKIIDRLKKGDFSSKDLQKVKNNVKSDFIFSLDTASAVSNTYGSYLARGDLKPLLEYESNIAHLCEQDLVKSAKKYFDRSNSTTLILRKD

SEQ ID NO: 12208 - protein, 379 aa, Burkholderia thailandensis E264
MMRDAANFEPADSRVTRPAFWQALPERWTSDVEETLVCCHVRQETHDVKSFFFRSPQGRAFSFEPGQFVTLELDIDGETINRCYTISSSPARPHTISITVKRVPGGKVSNWLHDNLRPGAPLRVLGPAGEFTCARHPARKYLFLSAGSGVTPLMSMSRAHHDLAEDRDIVFVHSARTPDDIIFARELDLIASTHANFRTAFVCERLGARTNWHGVTGFLSLLLLKLIAPDFLEREIFTCGPAPYMKAVRDLLAEAGFDRGRYHEESFSFETLAQSDVRTEAPAGDAASDAQARRHTVAFAKSNREIACGADEHVLDAARRAGVRLPASCTQGMCGTCKVKLVSGQVDMKHNGGIRQREIDQGMVLLCCSKPLSDLVVDK

SEQ ID NO: 12209 - protein, 278 aa, Enterococcus mundtii
GAILVVSATDGPMPQTREHILLSRQVGVKYLIVFLNKVDLVDDEELIDLVEMEVRELLNEYGFPGDDTPVIKGSALKALQGDPEAEAAINELMETVDDYIPTPERDTDKPLLLPVEDVFSITGRGTVASGRIDRGAVRVGDEIEIIGIKPETKKAVVTGVEMFRKTLDYGEAGDNVGILLRGIQREDIERGQVIAKPGSITPHTKFKAEVYVLTKEEGGRHTPFFNNYRPQFYFRTTDVTGTIVLPEGTEMVMPGDNVTIEVELIHPVAIEQGTTFSI

SEQ ID NO: 12210 - protein, 449 aa, Solibacter usitatus Ellin6076
MRYLPKSESERRQMLEACGVSTPEELFAHLPDAVRLNRPLNLAPGISEYEIVQYFRERAEQNANGYASFLGAGVYNHYRPVLVDTVVSRGEFLTSYTPYQAEIAQGTLTTIFEFQTMICQLTGMDVANASMYDGSTAVPEAAMMAVRATGKGRVLISRTVHPEYREVLGTYAKHQGMPVQEFGYVAESGGLDLEDLERKMDDLTGAVIIQTPNFFGIVEQVKAAAEIAHKRGALLVVIFTEAVSLGLLEPPADADIVAGELQSFAISPSYGGPYAGIIAVKEKYIRQVPGRLVGQSLDSRGNRAFCLTLSTREQHIRREKATSNICTNQALIALMATVFMTVYGKQGLRELAEQNLAKAHYLASKLKPRFTGKFFNEFVVRAEGQTPEELNKQLLKKKIIGGLPLGRFYPELADSYLVCATEMTRRADMDALVAATTAQPATETVEVTA

SEQ ID NO: 12211 - protein, 278 aa, Enterococcus pseudoavium
  misc_feature (32)..(32): Xaa can be any naturally occurring amino acid
  misc_feature (69)..(69): Xaa can be any naturally occurring amino acid
  misc_feature (86)..(86): Xaa can be any naturally occurring amino acid
  misc_feature (94)..(94): Xaa can be any naturally occurring amino acid
GAILVVSAADGPMPQTREHILLSRNVGVPYIXVFLNKMDMVDDEELLELVEMEVRDLLSEYDFPGDDTXVIAGSALKALEGDPSYXEKILELMXAVDEYIPTPVRDTDKPFMMPVEDVFSITGRGTVATGRVERGQVRVGDEVEIVGIAEETAKTTVTGVEMFRKLLDYAEAGDNIGALLRGVAREDIQRGQVLAKPASITPHTKFSAEVYVLTKEEGGRHTPFFTNYRPQFYFRTTDVTGVVDLPEGTEMVMPGDNVTMEVELIHPIAIEDGTRFSI

SEQ ID NO: 12212 - protein, 220 aa, Edwardsiella tarda
AETLQRLNPETTLFLVASKTFTTQETMTNAHSARDWFLQAAGDERHVAKHFAALSTNAQAVAAFGIDTANMFEFWDWVGGRYSLWSAIGLSIALSIGYDNFEQLLAGAHAMDRHFASAPLQQNLPVLLALIGIWYNNFFGAETEAILPYDQYMHRFPAYFQQGNMESNGKYVDRNGQAVDYQTGPIIWGEPGTNGQHAFYQLIHQGTKLIPCDFIAPAIS

SEQ ID NO: 12213 - protein, 457 aa, Synechococcus sp. WH 8102
MSVDASGHIENIVILGSGPAGYTAAIYAARANLQPLLITGFQRGGIPGGQLMTTTHVENFPGFPDGILGPDLMDLMKAQAVRWGTHLIEADADRIDLSQRPFRIEAEGQTIQAHAVVIATGASANRLGLPSEDRYWSSGISACAICDGATPQFRNEELAVVGGGDSACEEAVYLTKYGSHVHLIVRSDQFRASAAMADRVMANPAITVHWNSEIEDVAGGTWMESLTLRDRVTSETRALAVRGLFYAIGHTPNTDLLKDQIDLDGKGYLLTASGRPETSVDGVFSAGDVADAEWRQGITAAGSGCKAALAAERWLTHHNLATRVPRASVDPAKAEQPVNVAVTTEESYDPQGLWQKGSFALRKLYHDSDKPLLVVYTSPTCGPCHVLKPQLQRVINELDGHAQAVVIDIEADQAIAEQAGVSGTPTVQLFHNKEMVKQWRGVKPRSEFKAAIESLAA

SEQ ID NO: 12214 - protein, 552 aa, Sulfolobus solfataricus P2
MAKTVADIIVEALVKAGIKRIYGIPGDSIDPLMDAIRRNKEIKYIQVRHEEGAAFAASVESKLTSNVTACMGTSGPGSIHLLNGLYDAKMDHASVVALTGQIESDMIGHDYFQEVNMIKLFDDVAVFNQIIINPKNAGYLIWRAVYEAKSKKGVAHLNLPVDILRMEGEEYEGEFYYPKISYDYPDLDKAIELIDKSKSPVIMIGGGARDKSKIVNDFSEKIGAPIIYALNGKGILSDYDDKVMGGIGLLGTKPSVDALNKTDLLILLGTSFPYVNFLPKDVDVIQVDNNPANIGKRIKVSLPIVSDVGEFLLKITPKIKEKDDKFYLKMKDSKEKWFKELSKAENDSSKPMKPQRVAFELSKVFTEGVVVVDTGNVTMWGARNFRASGKQKFVFSAWLGSMGIGIPGAVGASFVSDEVLALVGDGGFAMTMMELITAKKYSRPIKVVIFNNSKLGMIKFEQEVMGYPEWGVELYNPDFSRLAESIGVRSVTVEDPNELSSAIKEMKESEEPFVLNTVVDPNERPMPPKLTFTQAKNYILSVFREKLEPSEE

SEQ ID NO: 12215 - protein, 1320 aa, Candida albicans SC5314
MKSQSTDTLQPRISSDSLVYSSSSSSSNVYSQPKLPFARSYSSIPEQVHDPGSRQSSKNSNTNFSFSEHDDSIQEFLISPIQSDIFPYSKKPVISPVLESPEAGGDSTIVETSSPSPTKSGTVSLNSNAIGSIIGSYDYSKSSLELEKPKPVEEPVFQKDHARDHARQGSDASTISNGSEQVSKDKRFVRYAMNTQSPLVNASNKWQISNVIKWLDKNQFNNSWKETFRRNEISGNRFLELENFDKESMIWKQFSKFLQLDDDLNSVDRFIELLRKESSHELQTRKSLGGGEISPINVKHENRKSTPIYTKHMSTSSVSSSNSSSSISRPLSYVDSKPKEQLSSPSHHSFFRKHSRSTSNESKDAKKRYSSFDDNRVKSVPKNDKKSNGILSTLRKYGGDKIAKNTKQRSSTYFPSLDLPPPLESDPPAYNERKISVDSELSPKSIKSFSDDLSIDPKYLPTQHQELDLRKFHDCEPITILASKDNISFVPIVITELSNAKSHIIKALGLIDIGSITLHLTDFFHKEGEAIPDFLIPKVLKLDGLLKFYVRQELKSPEGTTTTFSTTSSDSKSYIADGNKTYPETPQYLLQAQHDSRVDYWNFKDLTSISEDPSKSLAGAKQNIDSKRNDTKQKPKEFPLKFPFANAPKKGNTVPQLQIDTSGVNNISKPPTSTGSTFQVLRKKGHEIDFDKRRKSPYESKTPKIIANIYSSSVANTKKSPISASTVMALKDDVVVQRPETISRSNSIIAKRTAPPPPGDRRVQIQRQNSILRRKPGLKSTNNVTSGSSEGSKKNISDSTDDNDSEDAFFVKPLKKKENELGNNSDNNSENDEDNDSDDDFFVKPIKKEVADVSAGKVELDDSEEDFFVKPIHKKPSHMNVRPPVEEVYNNLEKYFPYTNLDKPIIDDSPASPSPQRRPTISRTFSSANKSPVAPTSADSKNTNDEQPSLRVRRMKTIRGVANEARRKVLQMKQASPPNTFANITRENSAKLTRSNTKMWGQRVVEVTSQEIEKGFVSKLRNKNGLYQEYAWIKGELIGRGSFGDVYLGLNVTTGEMLAVKQVVCGRNNKEGIEALHKEVETMKDLNHMNIVQYLGYDQQKNIYSLFLEYVAGGSIALCLKSYGKFDETLIRFITKQILLGLEYLHSNNIIHRDLKADNLLLEVDGTCKISDFGISKRSNDIYANNANMSMQGTIFWMAPEVIDSMVEGYSAKIDIWSLGCVVLEMFAGKRPWSNEAAISVIYKTGKEKLAPPIPDDIAHLVSPVAESFINRCFTIDPKDRPTAGELLNDPFVNTLDHDFNFANTKLAEMIRYNSKRLFT

SEQ ID NO: 12216 - protein, 505 aa, Methanothermobacter thermautotrophicus str. Delta H
MYIEEVKGEMNLPENVRIFDTTLRDGEQTPGVALTVEEKTGIARKLDALGVDTIEAGFPAASPGEMNSIRRIVELGLEANICGLARVLREDIDAAIDCGVDYIHTFIGTSPLHREYKLKMSPDEIIDRAVFGVEYAAEHGLKVEFSAEDATRTEFDYLVEVYRAAEDAGAEIINVPDTVGVMIPRAMNHLVSRLKEELRVPISVHCHNDFGLAVANSLAAVEAGASQVHATVNGLGERAGNAALEEVVMALITRYDLPVDIRTVELVNISEFVSKITGVRMPPNKAIVGENAFAHEAGIHVHGVLEKAETYEPITPEMVGHKRRIVLGKHTGANALRSKLQEYGIEMKEEQFCTLYEQVKRLGDKGKRITDADLRAMAVTILGKASREIVKLEGIAVMTGESVMPTATVKLRIGDEVKTTSMTGVGPVDAAINAIQSLVSETADIELDEYNIEAITGGTNALAEVFVVMSDGEGNKATGRSTREDIVMASVEAVLDAINKILSLK

SEQ ID NO: 12217 - protein, 134 aa, Arabidopsis thaliana
AAGYVTKCSGEGIYFAAKSGRMCAEAIVEGSQNGKKMIDEGDLRKYLEKWDKTYLPTYRVLDVLQKVFYRSNPAREAFVEMCNDEYVQKMTFDSYLYKRVAPGSPLEDIKLAVNTIGSLVRANALRREIEKLSV

SEQ ID NO: 12218 - protein, 154 aa, Triticum aestivum
  misc_feature (21)..(21): Xaa can be any naturally occurring amino acid
  misc_feature (43)..(43): Xaa can be any naturally occurring amino acid
  misc_feature (74)..(74): Xaa can be any naturally occurring amino acid
MPKSKRNRPVTLSKTKKKPGXERKGKVVAEIKDAVDKYSSAYXFTYDNMRNQEAQGPQGSSSSLPARIFPAGEXRFCQIPLGRSPADEAKTGLHKLSKFLQGNSGLLFTNLQMMLDFRESGHDLKDRSMLSYVTKKPLDINMRWHSPSRLPYKF

SEQ ID NO: 12219 - protein, 487 aa, Brevibacterium linens
MSTSGEDLTLVWFRDDLRVADHEALTAARADGRVIAVWIRETRDEEGLGPRPLGGACRWWAHESLTVLHEELSDLGIPLLFAAGRAEKIIVQLASSLGVTAVRWTRRYASASRALDGQIKTVLNDQGFTVHSHTGALLVEPWTAAPQSSDHYKVFTPFWKAVAGRDVGDVLPKPQAQSPLSQTLLSRAHECPAVMELDGLGLLDGTETGAGEAAAASGPRWWQDTIAGHWSPGLRAAEDQLDDLSAIIDGYTTSKDVPSDAASTSRLSPRLRHGELSPRQLLQAARTTSSLTQDDRAAWIRQLYWREFSWHLTYHYPHIDSAPIRPEFHNFPYEDDDDALTHWRAGTTGYPLIDAGMAQLWQTGWMHNRVRMVTASFLTKNLLQHWWFGEQWFWDTLVDADEANNPVSWQWVAGSGADAAPYFRVFNPERQRERFDPDDAYIEDWLPYTPATAPPPLVDLRQSRQAALSAYDHMKNRSTTRDNPGES

SEQ ID NO: 12220 - protein, 59 aa, Onobrychis viciifolia
PENEVIKPTINGLLDIMKACEKAKTVRRLVFTSSAGTVDVAEHPKPVLDETCWSDIGLF

SEQ ID NO: 12221 - protein, 109 aa, uncultured Prochlorococcus sp.
SDLDGVTYRVLNTDAQALIQSSATHRVQLGQSLTRGLGAGGNPSIGQKAAEESRADLQQALEGVDLVFIAAGMGGGTGTGAAPVVAQVAKESGALTVGIVTKPFSSEGK

SEQ ID NO: 12222 - protein, 145 aa, Nostoc sp. PCC 7120
MRLLHTMLRVGNLEESLKFYCDVLGMKLLRKKDYPGGEFTLAFIGYGDESDNTVIELTYNWGVEKYELGNAYGHIALGVDDIYATCESIKTQGGKVVREPGPMKHGSTVIAFVEDPDGYKIELIQLSNQGATVKQDSSEQLVKQG

SEQ ID NO: 12223 - protein, 315 aa, Magnetospirillum magnetotacticum MS-1
MRAAGAKVEAGADPCALPRACKNSVEMAGTRAAHHRDAIAMVRFLSWLEDATRRGTVDEMAAADAPGGLSQPGRAFSRPVLSHHLGGGPQRGHRPLPFDAQDQPALAAGDLYLVDSGGQYLDGTTDITRTVLIGGPAPMEARRRFTLVLKGHIALARAVFPTGTTGSQLDVLARQALWSEGLDYDHGTGHGVGSFLSVHEGPQRISKLGNTVPLKAGMILSNEPGYYKPDDYGIRIENLVLVTQSPAPAGAERELMGFETLTLVPIDRALVDAELLDAGEREWLNAYHARVRGALMPRLDDAAERDWLERATAEL

SEQ ID NO: 12224 - protein, 229 aa, Chlamydophila pneumoniae J138
MKKQESVLVGPSIMGADLTCLGVEAKKLEQAGSDFIHIDIMDGHFVPNLTFGPGIIAAINRSTDLFLEVHAMIYNPFEFIESFVRSGADRIIVHFEASEDIKELLSYIKKCGVQAGLAFSPDTSIEFLPSFLPFCDVVVLMSVYQGFTVQSFLPHTIEKIAFARHAIKTLGLKDSCLIEVDGGIDQQSAPLCRDAGADILVTASYLFEADSLAMEDKILLLRGENYGVK

SEQ ID NO: 12225 - protein, 180 aa, Zea mays
  misc_feature (32)..(32): Xaa can be any naturally occurring amino acid
  misc_feature (34)..(34): Xaa can be any naturally occurring amino acid
  misc_feature (42)..(42): Xaa can be any naturally occurring amino acid
  misc_feature (50)..(50): Xaa can be any naturally occurring amino acid
  misc_feature (62)..(62): Xaa can be any naturally occurring amino acid
  misc_feature (66)..(66): Xaa can be any naturally occurring amino acid
  misc_feature (73)..(73): Xaa can be any naturally occurring amino acid
  misc_feature (98)..(98): Xaa can be any naturally occurring amino acid
  misc_feature (104)..(104): Xaa can be any naturally occurring amino acid
  misc_feature (111)..(111): Xaa can be any naturally occurring amino acid
  misc_feature (113)..(113): Xaa can be any naturally occurring amino acid
  misc_feature (115)..(115): Xaa can be any naturally occurring amino acid
  misc_feature (118)..(119): Xaa can be any naturally occurring amino acid
  misc_feature (122)..(122): Xaa can be any naturally occurring amino acid
  misc_feature (127)..(127): Xaa can be any naturally occurring amino acid
FILLLLAGPLRRLPVSRAPAPVVGQQEAIKWXKXPCRFCGTXCGVLAGTXQGRVVACQGDPXHRLXRGLNCIXGYFLPKIMYGKDRFDATPLLSMKNXGNMTKXGEFTPIXWXQXLSXXMEXKIQKXPLRKKGRRSVMFRWSLPIGFQACIKSRVFPRFRTSRALLLVPNPWLLWLNPSC

SEQ ID NO: 12226 - protein, 100 aa, Brassica napus
  misc_feature (36)..(36): Xaa can be any naturally occurring amino acid
  misc_feature (39)..(39): Xaa can be any naturally occurring amino acid
MALGPTAEGWDANKDLIRSGQFQALKPFFQINRRRXFFXGPGVTVKGFEAMGWTRQFLEKKGNGRVFGVDGGGSLRFALLGGNPVVQAQNNGWGGTIGNG

SEQ ID NO: 12227 - protein, 483 aa, Xylella fastidiosa Ann-1
MLKKHLFIVKPIEPTNHTGTGKGETQLKRSLTARQLVMLGIGAVIGAGIFVLSGHAAAEYAGPAVVLSYILAGIACALAGLCYAEFAAMLPVSGSAYSYAYATLGEFTAWFIGWNLVLEYMFSASTVAVGWSGYLNSFLSSFGYGLPASLSSAPLDVVDGRLIYSGGLINLPAVAIVAAISGLCYVGITQSAFVNSITVAIKVSVIVLFIAFATRYVNTDNWVPFVPDNVAPGKYGIEGVIRGAAVVFFSYIGFDAVSTTAGEAKNPQRDMPIGILGSLAICTVIYIVFSGVLTGLMHYSQLDTPKPVATALETYPTLSWLKHVVEIGAIAGLSSTMLMMLMAQPRIFYAMSQDGLLPKLLSKVHPKFQTPHVGTLIVGACACTLAGLFPISLLGDLVSMGTLLAFATVCIGIVVLRRTRPDLPRPFRVPIYWVIAPAGAAACLYLFWQPFTEHWPLMVGWTVLGLVMYGLYGYHHSKLRHGG

SEQ ID NO: 12228 - protein, 309 aa, Deinococcus radiodurans
MRTVTVGTRGSTLALAQTRWVVARLKEEWPETDFRIQTISTKGDRNRESLEQLAQKGDKGFWVKEIEEALLAKKIDIAVHSLKDLPTEQPEGLEISSIPKRVDGRDALIGREGMKKLAELPEGARIGTSSVRRKAFLRAYRPDLIVKDLRGNIDTRLAALGSGEYDAIILAAAGLIRTEQRHRIDEFVDPDILLPAPGQGALALETRTEDDLTIEVAYAIHDHATDDRITAEREFLAGLGAGCMAPVGAHAVIKNGLLTLEGWVGALDGTQVIRATSQGDVAECADIGAELAADMLERGAAELIEAVRE

SEQ ID NO: 12229 - protein, 585 aa, Lactobacillus plantarum WCFS1
MAKMIEASVAMLKVIEAWDVKQIYGYAGGSFNSTMHALDVEQERLQYVQVRHEQVGALAAAADAKLTGKIGVAFGSAGPGAVNLLNGLYDAKEDHVPVLALVGQVAHTNMNYDYFQEFAEEPIFSDVAVFNRTVMTPESLPYVVDKAIRTAYRENGVAVVTIPNDFGYVEIPDLNYDSASVPAKLTGIPTIDDEQVKTVLTMIKNAKYPVFHVGQGTRGATEDMMALAERLQVPIIITGLAKGVIPDSFDGNMGSAYRAASKAADELMGITDLVVSVGADYSFAQIMYTTHDFKYVQIELDPGKFGRHHHLDFGVNGDAKVFIKRALALSEPASPSPYYQAAKADMADWKQYLKKLSERTTDPLEYEQVYQEINRVAADDAVFSMDVGDNTINSFRFLKMNPKQKLLTSALFATMGAGVPGAIAAKMSYPDRQAFNIAGDGAFSMVMQDLLTEVKYHLPIFNIVTSTQTLNFIKSEQEDVPQPYYGIDLIDADFAKIAEGMGVKGIRVEHFDQLHAAFETAMTELKAGRPVLIDAKITDKRGLPVEILDVDPTKTSDASVSAFKEKYDANELKPLTSYFKEFNVE

SEQ ID NO: 12230 - protein, 464 aa, Xylella fastidiosa Ann-1
MFKQLWATKLSQPSQDSAEGLSLQRVLGVWGLTALGIGAVIGGGIFVITGQAAANHAGPAIMLSFALAAICCTFCALAYAEFAAMVPVSGSAYTYTYATFGELAAWFIGWMLVLEYGVSAAAVAVSWSGYFLSLLQHLGIHLSAALVNAPLDGTLHATGAIANLPAATIVLLLTWLCYFGIRKSSKINIAMVALKSGLILLIIGVGWKYVNPDYWQPFIPTNQGPGKYGWNGVLHGASMVFFAYIGFEAVSVAAQESHRPQRDLPISMMAAVMTGLVPYTQLGTDEPVVTAVAAHPQLGWLRVVVEIGALVGLSSVVLVMLIGQPRIFMIMAGDGLLPPIFSTIHSKHRTPHINTVITGLGIALLAAVFPLDVLGELTSMGTLIAFTAVCAGVLILRCTRPDLPRPFRMPAAWLFCSAGVLSCITLLSAMTRHNWMLMSVWTVLGFSLYFSYGYRHSKLHREST

SEQ ID NO: 12231 - protein, 95 aa, Zea mays
  misc_feature (37)..(37): Xaa can be any naturally occurring amino acid
RRMLHAVYRGGYLDRTIQQYTECFGMRMLKKRCERCXKYTNCFLGFWAKNTNFGGGLTYNYVVVKYDIGTRFGHFSIANDGVYKLPEKIKSRGAR

SEQ ID NO: 12232 - protein, 321 aa, Xylella fastidiosa Ann-1
MSDYPASAKHSRLLILGSGPAGWTAAVYAARANLQPVLITGLQQGGQLMTTTEVDNWPGDAHGLMGPDLMERMQAHAERFETEVIFDQIYKADLSTRPFTLFGDSGLYTCDGLIIATGANAKYLGIPSEEAFKGRGVSACATCDGFFYRDQDVAVIGGGNTAVEEALYLSNIARKVYLIHRRDKLRAEKIMQNKLFSKAATGKIELIWNNAVEEVLGNDAGVTGVRIRSTQDSSTRDIDVQGLFVAIGHHPNTDLFAGQLAMNNGYLQIHSGTAGNVTQTSVEGVFAAGDVADQHYRQAITSAGFGCMAALDAERFLDKGN

SEQ ID NO: 12233 - protein, 98 aa, Lactobacillus acidophilus NCFM
MVKAHVECDTIIMDDMSSSDTIPTNSIENSNVAMEHEATVSKISEEELYYLQSRGIPERKATEMIIMGFVEPFTKQLPMEYAVELNRLISFQMEGAIG

SEQ ID NO: 12234 - protein, 491 aa, Solibacter usitatus Ellin6076
MIEKVSQHLSQNEPLIFERSSPGKKAYQLPELDVPPVDAAEALGAENVRREIDGFPEVSEVEAIRHFTRLSTWNYAIDYGMYPLGSCTMKYNPRINEQVARTEGLAWAHPYQPEALSQGCMEIMWSLEQALAEICGMDAVTLQPAAGAHGELTGILLIRALLEKRGNPRKKILIPDSAHGTNPATAAIAGYAVENIKSSETGGVDLATLEQLVTDDVAALMVTNPNTLGVFENNIARVAEILHQKGAMLYMDGANMNALVGIARPGDFGVDVMHLNLHKTFSTPHGGGGPGAGPVAVKKVLEPFLPTPRLKRSGKKLAFDYKRKQSIGRVKAYYGNFGVLIRALAYTLAHGGPGLKNATMDAVLNAIYIRKALEPYFDLPYTSPSMHEVVFSDDRQAKLGVRTGEIAKRLIDYGFHPYTVSFPMIVHGALMIEPTETESKDEIDLFINAMISIAKEIETDPQMVKGAPYNTRTSKVDEVTAARKPVLRWKP

SEQ ID NO: 12235 - protein, 127 aa, Arabidopsis thaliana
MESYQNQSGAQQTHQQLDQFGNPFPATTGAYGTAGGAPAVAEGGGLSGMLHRSGSSSSSSSDDGLGGRRRKKKGITEKIKEKLPGHHDSNKTSSLGSTTTAYDTGTVHHEKKGMMEKIKEKLPGGHH

SEQ ID NO: 12236 - protein, 162 aa, Zea mays
MKEGGEKKNILSKTLQRCRTSLAQRRRPPPPAAPKRAASSPSLGVPPPPPVPAAGYFTVLVGPEKERFGVRARCANHPLFRALLDAAEAEYGFAGCDGPLELPCAVDDFMEVMWEMELGDPSASPGCGRFAAGSTRGYHHVHQLAGYQLVVSPPARFLVAGR

SEQ ID NO: 12237 - protein, 394 aa, Vibrio parahaemolyticus
MLSNQTIEIVKATAPLIAETGPKLTAHFYDRMFTHNPELKDIFNMSNQRNGDQREALFNAICAYAANIENLPALLGAVEKIAHKHTSFLITKDQYQIVGKHLIATIDELFNPGQEVLGAWAEAYGVLANVFIQREEQIYQANASQEGGWRGLREFELVGKQLESEHICSFVFKPTDGSKVTKYKPGQYLGIYINSDKFENQEIRQYSLSSSVQENTYRISVKREQGGKVSNYLHDELNIGDKVKLAAPAGDFFMDVDTNTPVVLISAGVGLTPTLSMLESLTEHHAPVTWVHATENSKHHAFKEHVNQLVTAKENMNALIWYNQPTAEDKIGEDFHFTGFVNLHEIEAALKQDNVQVYFCGPVGFMQHVAKQLQELGVPQEQFHYECFGPHKVV

SEQ ID NO: 12238 - protein, 373 aa, Zea mays
SAAIWQEFSSDFRPAPGAVQKAFRDAGLQFSKQGVAITQENSLLDNTARIEGWLARFPMFDWVGGRTSEMSAVGLLPAALQGIDIKEMLAGAALMDEETRNTVVKENPAALLALCRYWASEGIGNKDMVVLPYKDSLLLLSRYLQQLVMESLGKEFDLDGNRVNQGLSVYGNKGSTDQHAYIQQLREGVHNFFVTFIEVLRDRPAGHDWELEPGVTCGDYLFGMLQGTRSALYANDRESISVTVQEVTPRAVGALVALYERAVGLYASLVNINAYHQPGVEAGKKAAGEVLALQKRVLTVLNEATCKDPCEPLTIDEIADRCHCPEDIEMIYKIVQHMAANDRAIIAEGSCGSPRSVKVYLGECNVDEDLQAA

SEQ ID NO: 12239 - protein, 278 aa, Enterococcus raffinosus
  misc_feature (3)..(3): Xaa can be any naturally occurring amino acid
  misc_feature (115)..(115): Xaa can be any naturally occurring amino acid
  misc_feature (119)..(119): Xaa can be any naturally occurring amino acid
GAXLVVSAADGPMPQTREHILLSRNVGVPYIVVFLNKMDMVDDEELLELVEMEVRDLLTEYDFPGDDTPVIAGSALKALEGDASYEEKILELMAAVDEYIPTPVRDTDKPFMMPXEDVXSITGRGTVATGRVERGQVRVGDEVEIVGIAEETAKTTVTGVEMFRKLLDYAEAGDNIGALLRGVAREDIQRGQVLAKPASITPHTKFSAEVYVLTKEEGGRHTPFFTNYRPQFYFRTTDVTGVVDLPEGTEMVMPGDNVTMEVELIHPIAIEDGTRFSI

SEQ ID NO: 12240 - protein, 154 aa, Triticum aestivum
MAQRDHKQEEPTELRAPEITLCANSCGFPGNPATHNLCQNCFLAGPASTSPSSSSSSSLPGVSVSTPVVDRPRPAPVEVELAVDLAPARTSVNRCSSCRKRVGLTGFRCRCGDMFCGEHRYSDRHGCSYDYKAAARDAIARDNPVVRAAKIVRF

SEQ ID NO: 12241 - protein, 224 aa, Oryza sativa
MDAGDAWGRSSSSSSSAAAAARRLQARYDLYMGFDDADAAGVEEVEARGGGEAYNCPFCGEDFDFVAFCCHVDDEHAVEAKSGVCPICATRVGVDLIGHLTMQHGSYFKMQRRRRVRKISSGSHSLLSLLRKDLRDGSLQSFLGGSSYVSNPPAAAPDPFLSSLICSLPVAEPSKDLHSDSSDNNFLLNKFPDDKTAERYVTSSFALSAASLRSLFATIPLYLS

SEQ ID NO: 12242 - protein, 370 aa, Iris x hollandica
MAPGASTPPFLPTCSNGTTLPVTFVRDEEERPKVAYNAFSDEIPVISLEGIDEAGDGGRREEIRRKIAAACEDWGIFQVVDHGVDAGLVADMARLAREFFALPPEEKLRFDMTGGKKGGFIVSSHLQGEVVQDWREIVTYFTYPIISRDFSRWPDKPNEWRSVTEKYSEKLMELACKLLGVLSEAMGLEKEALTKACVDMDQKVVVNFYPKCPQPDLTLGLKRHTDPGTITLLLQDQVGGLQATKDGGKTWITVQPIQGSFVVNLGDHAHFLSNGRFKNADHQAVVNSNSSRLSIATFQNPAPDADVYPLAIREGETPVLDEPIKFTEMYRRKMSRDLELAKLKKLAKVTENAKVEEAVAQPKGLNGIFA

SEQ ID NO: 12243 - protein, 277 aa, Enterococcus raffinosus
AILVVSTTDGPMPQTREHILLSRQVGVKYLIVFLNKVDLVDDEELIDLVEMEVRELLSEYGFPGDDIPVLKGSALKALEGDPEQEQVIMDLMDTVDEYIPTPERDTDKPFLLPVEDVFSITGRGTVASGRIDRGEVKVGDEVEIIGIKPEVQKAVVTGLEMFRKTLDYGEAGDNVGVLLRGITRDEIERGQVLAKPGSITPHTKFSAEVYVLTKEEGGRHTPFFNNYRPQFYFRTTDVTGNIVLPEGTEMVMPGDNVTIDVELIHPIAVEKGTTFSI

SEQ ID NO: 12244 - protein, 198 aa, Platanus x acerifolia
LGALLEEREGRLSDEEIVDYLVALLVGGYETTSTTMTLAVKFLTDTPLALAQLKKEHDEIMARKQNEALQWSDYKSMPFTQCVINETLRVANIVSGVFRRAIKDVNIKGYTIPKGWKVFASFRAVHMDQHHYKEARTFNPWRWQQEASPTTPAENVFTPFGGGPRLCPGYELAGVEISIFLHHLVTMFSWVPAGEDRL

SEQ ID NO: 12245 - protein, 140 aa, Shewanella oneidensis MR-1
MIIACPHCDTLNRVPNERLTEQPTCGKCKQSLFAAAPIELTSANFINHAHKSELPIVVDFWASWCGPCKSFAPIFSDAAKAWEPRFRFGKINTEEQQSLAAQFNIRSIPTLMIFKQGHIIAQQSGALPRTALDQWLKGYR

SEQ ID NO: 12246 - protein, 278 aa, Enterococcus saccharolyticus
GAILVVSAADGPMPQTREHILLSRNVGVPYIVVFLNKMDMVDDEELLELVEMEVRDLLSEYDFPGDDTPVIAGSALKALEGDPVYEEKIFELMAAVDEYIPTPERDTEKPFMMPVEDVFSITGRGTVATGRVERGQVRVGDVVEIVGIDEETAQTTVTGVEMFRKLLDYAEAGDNIGALLRGVAREDIQRGQVLAKPGTITPHTKFVAEVYVLTKEEGGRHTPFFTNYRPQFYFRTTDVTGVVELREGTEMVMPGDNVTIDVELIHPIAIEDGTRFSI

SEQ ID NO: 12247 - protein, 418 aa, Bacillus anthracis str. 'Ames Ancestor'
MIEIKVPELAESITEGTISQWLLNVGDKVEKGGSVVELETDKVNVEIIAEDSGIVSKLLGEPGDTVEVGATIAILDANGAPVAVSTPAPAEQSKQETAEAPKAAAPSAEQTATLQGLPNTNRPIASPAARKMARELGIDLNDVRSTDPLGRVRPHDVQAHAAAPKEAPAAPKSPAPAPVAKTEFEKPVERVKMSRRRQTIAKRLVEVQQTSAMLTTFNEVDMTAIMELRKERKDAFEKKHDVRLGFMSFFTKAVVAALKQFPLLNAEIQGDELIIKKFYDIGIAVAAPDGLVVPVVRDANQLNFAEIESEIRELGKKARDNKLSLKELQGGTFTITNGGVFGSLMSTPILNSPQVGILGMHKIQVRPVAIDNERMENRPMMYIALSYDHRIVDGKEAVSFLVAVKDMLEDPKSLLLEG

SEQ ID NO: 12248 - protein, 230 aa, Edwardsiella tarda
HNMRIPGSLRPDKRRRIARETLEIYSPLAHRLGIHHLKTELEELGFEALYPNRYRVIKEVVKAARGNRKEMIQKILAEIDGRLTEAGMACQVNGREKHLYSIYRKMHLKEQRFHSIMDIYAFRVIVKDVDTCYRVLGQVHSLYKPRPGRVKDYIAIPKANGYQSLHTSLIGPHGVPVEVQIRTEDMDQMAEMGVAAHWAYKEGESSTTAQIRAQRWMQSLLELQQSAGNS

SEQ ID NO: 12249 - protein, 274 aa, Tetragenococcus solitarius
AILVVSAADGPMPQTREHILLSRNVGVPYIVVFLNKMDMVDDEELLELVEMEVRDLLSEYDFPGDDTPVISGSALKALEGDEEYEQKIMDLMDAVDDYIPTPERDHDKPFMMPIEDVFSITGRGTVATGRVERGTIKVGDEVDIIGIHEDVKKTTVTGVEMFRKLLDYAEAGDNIGTLLRGVSRDDIERGQVLAKPGSITPHTRFSAEVYVLTKEEGGRHTPFFSNYRPQFYFRTTDITGVIELPEGTEMVMPGDNVTMDVELIHPVAIEEGTR

SEQ ID NO: 12250 - protein, 118 aa, Oryza sativa
MAALNGKVVVVVMVVAMVVAAPGASAAITCGQVGSAIAPCISYVTGRGGLTQGCCNGVKGLNNAARTTADRQAACRCLKTLAGTIKSLNLGAAAGIPGKCGVNVGFPISLSTDCSKVS

SEQ ID NO: 12251 - protein, 138 aa, Glycine max
  misc_feature (24)..(24): Xaa can be any naturally occurring amino acid
  misc_feature (37)..(37): Xaa can be any naturally occurring amino acid
  misc_feature (85)..(85): Xaa can be any naturally occurring amino acid
  misc_feature (93)..(93): Xaa can be any naturally occurring amino acid
AQLASSGMASVALTPAPFTVDNSXPRGLPSLSRNSSXFKSVASGGKKIKTDNPYGINGGLALREGPHASGKKGKGKGDYHSADNXGANVDGYXPIYDTKDCSPTGDVYSRGTTGLAIWAVTLLALLAGGALLVYNTSA

SEQ ID NO: 12252 - protein, 313 aa, Streptomyces coelicolor A3(2)
MRMSAPELIRIVSRDSPMALAQVERVRAELAALHPGVRTEVVPVRTTGDKWLGDLSQVEGKGAFTKEVDAALLSGEADLAVHCVKDVPADRPLPAGTVFAAFLKRDDVRDALVHPDGLTLDELPDGTRVGTSSVRRVAQLAATHPHLRCVPFRGNANRRLAKLAAGEADALLLAVSGLERIGRTDVISEVLSTETMMPPIGAGILALQCREGDRALIEAVSALGDPRTHREATAERMFLHVLQGHCNSPIAGHAQVDRSGELSLRACVFTPDGKVRLNAHEWAGRLDPATLGTSVAVALLRQGAREIIDGIAH

SEQ ID NO: 12253 - protein, 123 aa, Lotus japonicus
GNSVLFYTLILEKAPAAKDMFSFLKASGPTHSPQLQAHAEKVFGLTRDAAAQLLAKGEVTLADAGLGAVHVQKAVADPHFAVVKEALLKTVQAAVGDKWSEDLSTAWGVAYDGLAAAIKKAMS

SEQ ID NO: 12254 - protein, 109 aa, uncultured Prochlorococcus sp.
SDLEGVTYRVLNTDAQALIQSSATHRVQLGQSLARGLGAGGNPSIGQKAAEESRADLQQALEGVDLVFIAAGMGGGTGTGAAPVVAQVAKESGALTVGIVTKPFSFEGK

SEQ ID NO: 12255 - protein, 109 aa, uncultured Prochlorococcus sp.
SDLEGVSFRVLNTDAQALLQSSAERRVQLGQNLTRGLGAGGNPSIGQKAAEESRDELQQSLDGSDLVFIAAGMGGGTGTGAAPVVAEVAKQSGALTIGIVTKPFSFEGK

SEQ ID NO: 12256 - protein, 316 aa, Oryza sativa
MGNASGRLDDIADAEMDDGGGGGNRAGAGDYSSSLRPMDRAGLPPYGGAGGSGGLVRPPSSAAGYSGGGGSSSPPGTPPRPHSPRMFVPQSPVTPLHRAVDGPPPVFNQILTSEQEEDHDGPPDKLIPTLLVWTLGGKNVYIEGSWDNWKSKQLVHKCGKDHCVMLGLASGVYRYRFIVDGERRFQPDRPREADIMGTISNLIDVHDYVPDSVDSVSELMAPPSPDSSYGFLAPDDKEFTKEPPALPPQLHLGVLNSRGGSGGKEGECAMPKHNVLGHVFIGKGTPPMVAALGTTFRFQSKFVTKVLYKAIQREDR

SEQ ID NO: 12257 - protein, 109 aa, uncultured Prochlorococcus sp.
SDLDGVTYRVLNTDAQALIQSSATHRVQLGQSLTRGLGAGGNPSIGQKAAEESRADLQQALEGVDLVFIAAGMGGGTGTGAAPVVAQVAKESGALTVGIVTKPFSLRRE

SEQ ID NO: 12258 - protein, 515 aa, Glycine max
MGNCSSGAGAPTTYSDDHPHHNGITVLPPNSNPSPQLPKPPPTSSSSSSLGRVLGRPMEDVRSIYIFGRELGRGQFGVTYLVTHKATKEQFACKSIATRKLVNRDDIDDIRREVQIMHHLTGHRNIVELKGAYEDRHSVNLVMELCAGGELFDRIITKGHYSERAAANSCRQIVTVVHNCHSMGVMHRDLKPENFLFLSKDEDSPLKATDFGLSVFFKPGDVFKDLVGSAYYVAPEVLRRSYGPEADIWSAGVILFILLSGVPPFWSEKEQGIFDAILRGHIDFASDPWPSISSSAKDLVKKMLRADPKQRLSAVEVLNHPWMREDGASDKPLDVAVLSRMKQFRAMNKLKKVALKVIAENLSEEEIIGLKEMFKSMDTDNSGTITLEELKAGLPKLGTKVSESEVRQLMEAADVDGNGTIDYIEFITATMHMNRMEREDHLYKAFEYFDKDRSGYITMEELESTLKKYNMGDEKTIKEIIVEVDTDNDGRINYDEFVAMMRKGKPDLVTNRRRK

SEQ ID NO: 12259 - protein, 334 aa, Neisseria meningitidis Z2491
MSIKVAINGFGRIGRLALRQIEKAHGIEVVAVNDLTPAEMLLHLFKYDSTQGRFQGTAELKDDAIVVNGKEIKVFANPNPEELPWGELGVDVVLECTGFFTNKTKAEAHIRAGARKVVISAPGGNDVKTVVYGVNQDILDGSETVISAASCTTNCLAPMAAVLQKEFGVVEGLMTTIHAYTGDQNTLDAPHRKGDLRRARAAALNIVPNSTGAAKAIGLVIPELNGKLDGSAQRVPVATGSLTELVSVLERPVTKEEINAAMKAAASESYGYNEDQIVSSDVVGIEYGSLFDATQTRVMTVGGKQLVKTVAWYDNEMSYTCQLVRTLEYFAGKI

SEQ ID NO: 12260 - protein, 109 aa, uncultured Prochlorococcus sp.
SDLQGVSYRVLNTDAQALLQSSAENRVQLGQTLTRGLGAGGNPSIGEKAAEESRADLQQALEGSDLVFIAAGMGGGTGTGAAPVVAEVAKQCGALTVAIVTKPFSFEGR

SEQ ID NO: 12261 - protein, 286 aa, Staphylococcus epidermidis RP62A
MVAKILDGKQIAKEYRQRLKNQVNDLKEYGFTPKLSVILVGNDGASQSYVKSKKKAAEKIGMISEIIHLDESTSEEVVLSELNRLNNDDTVSGILVQVPLPKQVSEQKVLEAINPEKDVDGFHPINIGKLYIDEQTFVPCTPLGIMEILKHADINLEGKNAVVIGRSHIVGQPVSKLLLQANATVTILHSRTKNMNAHLKQADVIVSAVGQPGLVTKENVKKGAVIIDVGNTPDENGKLKGDVAYDEIKEIASAITPVPGGVGPLTITMVLNNTLLAEKLRRGLTK

SEQ ID NO: 12262 - protein, 236 aa, Brassica napus
MASSSSYYTPFSALFAVSKPNPSLNPAAFLVPSLKFSTAISNFANLSNGFSLKSPVNPGFLFKSRAFNVQARAAAEKTVHDFTVKDIDGNDVSLNKYKGKVMLIVNVASRCGLTSSNYSELSHLYEKYKSQGFEILAFPCNQFGGQEPGSNPEIKQFACTRFKAEFPIFDKVDVNGPSTAPIYQFLKSNAGGFLGDLIKWNFEKFLIDKKGKVVERYPPTTSPFQIEKDIKKLLAA

SEQ ID NO: 12263 - protein, 619 aa, Oryza sativa
MADEAKAKGNAAFSAGRYEEAARHFTDAIALAPGNHVLYSNRSAALASVHRYSEALADAEKTVELKPDWAKGYSRLGAAHLGLGDAASAVAAYEKGLALDPTNEGLKAGLADAKKAAAAPPRRPPPSGVDGIGQMFQGPELWTKIASDPTTRAYLEQPDFMQMLRDVQRNPSSLNMYLSDPRMMQVLGLMLNIKIQRPEASESSQPSSSPPSQPQEQPEAKAREVEPEPEPEPMEVTDEEKERKERKSSAQKEKEAGNAAYKKKDFETAIQHYTKAMELDDEDISYLTNRAAVYIEMGKRLLKFIYVDPSSTGSSVILPPFHNYDECIKDCDKAVERGRELRADFKMISRALTRKGTALAKLAKTSKDYDIAIETFQKALTEHRNPDTLKKLNEAERAKKELEQQEYYDPKLADEEREKGNQLFKEQKYPDAVKHYTEAIRRNPKDPKVYSNRAACYTKLGAMPEGLKDAEKCIELDPTFSKGYTRKGAIQFFMKEYDKAMETYQAGLKHDPNNPELLDGVKRCIEQINKANRGDLTQEEIQERQNKAMQDPEIQNILTDPIMRQVLVDLQENPRASQEHLKNPGVMQKIQKLVSFVIAEHDLRFESLATTILDFLKGS

SEQ ID NO: 12264 - protein, 573 aa, Haemophilus influenzae R2866
MKKLSGAEMVVQSLRDEGVEYVFGYPGGAVLDIYDAIHTLGGIEHILVRHEQAAVHMADGYARSTGKVGCVLVTSGPGATNAITGILTAYTDSVPMVIISGQVMSNLIGSDAFQECDMLGISRPVVKHSFIVKKAEDIPSTLKKAFYIASTGRPGPVVVDIPKDTVNPNFKYPYEYPEYVELRSYNPTVNGHKGQIKKALKALLVAKKPILFVGGGAITAECSEQLIQFAQRLNLPVTSSLMGLGAYPSTDKQFLGMLGMHGTLEANTAMHESDLILGVGVRFDDRTTNNLEKYCPNAKVIHIDIDPTSISKNVPVAIPIVGNAKNVLEEFLGLLNEEGLKSQTDLESWWQEINQWKAKKCLEFDRTSGVIKPQQVVEAVYRLTKGQAYVASDVGQHQMFAALHYPFDEPRHWINSGGAGTMGFGFPAALGVKLAHPEGTVVCVTGDGSIQMNIQELSTATQYGIPVVIICLNNHFLGMVKQWQDLIYSGRHSQTYMNSLPDFAKLAESYGHVGIKIATPDELESKLQEAFSIKNKLVFVDINVDESEHVYPMQIRGGAMNEMILSKPQEETN

SEQ ID NO: 12265 - protein, 381 aa, Arabidopsis thaliana
MAISDLPRDLVEEVLSRVPVTSLRTVRSTCKKWNIISKDESFTKKHVGQANAAARESEFQVVIMTEYKVYLMSVNLHGIQNNVDPSIEFKCKLISLDDSDRIGISQVHICHGLFLCITNEKNYKLVVWNPYRGQTKCIEHRISYKRWNSYALGYEMKNNSCLSTQNLENCVDFHPVYETEIYNFHSDSWKNIVDSTPEGDMQYFKQGVSLKGNTYWFARKYVIYEGGQEAWVSFLICFDFTTERFGPRLTLPFDYSTKESVSLLSAREEQLVLLYHPWFTMMMEIWVSNKIELNAVSWIKFLEVNMITFPHYRFSFHHVSFFIDKKNKVVVVLDKDKETRSRNLGYFIGDDGYFKEVELGGSRDRNGYPFVFSYVPSSVQF

SEQ ID NO: 12266 - protein, 333 aa, Nostoc sp. PCC 7120
MNMQNLQNFRDYYEILGVTKDATNEDIKKNYRRLARQYHPDLNPGNKDAEEKFKIIGEAYEMLSDATKRAQYDQFSRYWKQKGFPKQTPKSKAWGDSRNGERNGNENVDPSQFTNFEDFLNQVIGVGSRRDSKNGASTNTTTDPFRSPKSRVEYTVPKNPSRPARRDIEARLTLPFEKAYSGGNERIRLEDGRSLEVTMPPGMVTGQTIRLRNQGISGGDLYLKITVEPHPLFKLEGTNIFCQVPVTPSEAVLGGQVEAPTLDGPVKMTIPPGVRSGQRFRLANKGYPSDNGKRGDQLVEIQILTPKTISQEEKELYEKLRQIETFKPRADLI

SEQ ID NO: 12267 - protein, 369 aa, Vibrio parahaemolyticus RIMD 2210633
MPISTPQEIIDDIRAGKMVILMDDEDRENEGDLIMAAEHITPEAINFMATYGRGLICLTMTKARCENLGLPPMVQDNNAQYTTNFTVSIEAAEGVTTGISAADRARTVQAAVAPNAKAADLVQPGHIFPLAAQDGGVLTRAGHTEAGCDLARLAGLEPASVIVEILNDDGTMARRPDLEIFAEKHGLKLGTIADLIEYRNNTETTIERVAECKLPTEHGEFTLVTYKDTIDSQVHYAMCKGDLAGEAPLVRVHLQDVFTDVLRSDRNAERSWTLDKAMKRIGEEGGVLVVLGNEESTELLIHRVKMFEAQDKGEAPTLAKKQGTSRRVGVGSQILADLGVHDMRLLSSTNKKYHALGGFGLNVVEYVCE

SEQ ID NO: 12268 - protein, 512 aa, Pseudomonas aeruginosa UCBPP-PA14
MKAYLEKVSQPFEIVASLDDSDKSRELLGLLQDIVGLTDKITLKTDGSDARKPSFSLNRPGADIGLRFAGIPMGHEFTSLVLALLQVGGHPSKLDADVIEQVKGIEGTFEFETYFSLSCQNCPDVVQALNLMAVLNPNIRHVAIDGALFQDEVEARQIMSVPSIYLNGEVFGQGRMGVEEILAKIDTGAAARDAEKLTARDAFDVLVVGGGPAGAAAAIYAARKGIRTGVAAERFGGQVLDTMAIENFISVQETDGPKLARALEEHVRHYEVDIMNLQRASKLVPAKNTGELHEVQFESGGSLKAKTLILATGARWREMGVPGEQEYKAKGVCFCPHCDGPLFKGKRVAVIGGGNSGVEAAIDLAGIVAHVTLLEFDSKLRADAVLQRKLYSLPNVEVITSALTSEVKGDGQKVTGLVYKDRNSEEFKSIELEGIFVQIGLLPNTEWLKGSVELSPRGEIIVDARGETSLPGIFAAGDVTTVPYKQIVIAVGEGAKASLSAFDHLIRTSAPE

SEQ ID NO: 12269 - protein, 331 aa, Wolbachia sp.
DAQALEKSLCDKKIQLGINLTKGLGAGALPDVGKGAAEESIDEIMEHIKDSHMLFITAGMGGGTGTGAAPVIAKAAREARAVVKDKGAKEKKILTVGVVTKPFGFEGVRRMRIAELGLEELQKYVDTLIVIPNQNLFRIANEKTTFADAFQLADNVLHIGIRGVTDLMIMPGLINLDFADIETVMSEMGKAMIGTGEAEGEDRAISAAEAAISNPLLDNVSMKGAQGILINITGGGDMTLFEVDSAANRVREEVDENANIIFGATFDQAMEGRVRVSVLATGIDSCNDNSSVNQNKIPAEEKNFKWPYNQIPILETKEYASTEQTNERVKW

SEQ ID NO: 12270 - protein, 249 aa, Staphylococcus aureus
  misc_feature (77)..(77): Xaa can be any naturally occurring amino acid
  misc_feature (93)..(93): Xaa can be any naturally occurring amino acid
GGILVVSAADGPMPQTREHILLSRNVGVPALVVFLNKVDMVDDEELLELVEMEVRDLLSEYDFPGDDVPVIAGSALXALEGDAQYEEKILELXEAVDTYIPTPERDSDKPFMMPVEDVFSITGRGTVATGRVERGQIKVGEEVEIIGLHDTSKTTVTGVEMFRKLLDYAEAGDNIGALLRGVAREDVQRGQVLAAPGSITPHTEFKAEVYVLSKDEGGRHTPFFSBYRPQFYFRTTDVTGVVHLPEGTE

SEQ ID NO: 12271 - protein, 123 aa, Lotus japonicus
GNSVLFYTLILEKAPAAKDMFSFLKASGPTHSPQLQAHAEKVFGLTRDAAAQLLAKGEVTLADASLGAVHVQKAVADPHFAVVKEALLKTVQAAVGDKWSEELSTAWGVAYDGLAAAIKKAMS

SEQ ID NO: 12272 - protein, 272 aa, Staphylococcus epidermidis
GGILVVSAADGPMPQTREHILLSRNVGVPALVVFLNKVDMVDDEELLELVEMEVRDLLSEYDFPGDDVPVIAGSALKALEGDAEYEQKILDLMQAVDDYIPTPERDSDKPFMMPVEDVFSITGRGTVATGRVERGQIKVGEEVEIIGMHETSKTTVTGVEMFRKLLDYAEAGDNIGALLRGVAREDVQRGQVLAAPGSITPHTKFKAEVYVLSKDEGGRHTPFFTNYRPQFYFRTTDVTGVVNLPEGTEMVMPGDNVEMTVELIAPIAIEDG

SEQ ID NO: 12273 - protein, 298 aa, Triticum aestivum
  misc_feature (80)..(80): Xaa can be any naturally occurring amino acid
MNMCEKDQNFHWAYDLFHDPFAAPNSYYGHPNGYSDNSYCDYNYARDASHPDETYLHSSALTCDMYNPQVGMYHPGNVGXQEHEAVYVDPSSSSSYPGSDDCFEMEEEVGKRFYPMVPVPHCPEIYGEIPSLDEATMDHERLSDRLRLYELTEKQVKGDGHCPFRALSDQLYQTPDHHEFVREQIISQLKSNREAYDGYVPMAYDEYLEKVSRNGEWGDHVTLQAAADKYGVKIFVMTSFKDTCYIEIQPKVQKSNKVVLLSFWAEVHYNSIFPQNDAPRLHHTAKKRRWWPFSQHHH

SEQ ID NO: 12274 - protein, 347 aa, Thermoplasma volcanium GSS1
MCMDNSNNSEEDIWTNDEKLQKIIEELNFRIKVFGFGGSGSNTINRLMRENLSGVKLIACNTDAAHLLRIRAHSKILLGKNLTRGLGAGADPSVGEMAAKESESEILKQIDETSIVFITAGLGGGTGTGAAPYVAKLAKDRGALTISFATLPFSTEGFVRMKNAYEGVRKLVKNSDAAVIIPNDKLIEKFNDVPVYKAFKFEDEVIATGIKGITDLIMSTGTINLDFNDLRKVMKDAGYSAIGMGSSSQAVNDRIVEALEKALDSPFMDVDISKAKGAIINVTGGRDLQLQEAQQAADILKKKIARDATIMWGTVVDESIRSSVKILVIVAGVKPNFKFEPGIEEVG

SEQ ID NO: 12275 - protein, 275 aa, Streptococcus mutans
PGAILVVASTDGPMPQTREHILLSRQVGVKYLIVFMNKVDLVDDEELLELVEMEIRDLLSEYDFPGDDIPVIQGSALKALEGDTAQEDIIMELMHTVDDYIPDPERDTDKPLLLPVEDVFSITGRGTVASGRIDRGTVKVNDEVEIVGIRDDIQKAVVTGVEMFRKQLDEGIAGDNVGVLLRGIQRDEIERGQVLAKPGSIHPHTKFKGEVYILTKEEGGRHTPFFNNYRPQFYFRTTDVTGSIELPAGTEMVMPGDNVTIDVELIHPIAVEQGT

SEQ ID NO: 12276 - protein, 480 aa, Rickettsiella grylli
MTQATLETLLQQDYPHGFVSDIPADTLACGLNEDVIRHISAKKNEPEFLLAWRLKAYRHWLSLTEPHWADYMDYPAIDYQAISYYSAPKLKKQLKSLDEVDPELLRIYTKLGISLKEQERLAGVAVDAVFDSISVATTFKEKLKAMGILFCSFSEAVQEYPELIKRYLGTVVPYADNFYACLNAAVFTDGSFCYIPKGIRCPMELSTYFRMNAANTGQFERTLIIADEGSYVSYLEGCTAPQRDENQLHAAVVELIALDHAEIKYSTVQNWYPGDKEGKGGIYNFVTKRGHCRGKQSKISWTQVETGSAITWKYPSVILQGDASVGEFYSVALTHHKQQADTGTKMIHIGKHTKSTILSKGISAGHGQNSYRGLVKIAETADHARNYTQCDSLLIGQHCKAHTFPSIEVKNQTAQIEHEASASKISEDQLFYCLQRGITREDALSLIVNGFCKAVFKELPMEFAVEAQKLLSLSLEGSIG

SEQ ID NO: 12277 - protein, 553 aa, Gibberella zeae PH-1
MEGAAEQSKSALKKAEKQARHAADKAAKAAKQTNLPVVGGKKADDIIGITVSKADNFPQWYQEVVLKAEMVEYYTEISGFFVLRPLSMHIWNEIRKWFQGHIEEMGVDETNFPMFLSSKSLEKEKDHVEGFAPELAWVTKAGDKDLEVPVAVRPTSEAVMYPYYSKWIRSHRDLPLRLNQWNSVVRWEAKQTTPFLRTREFLWQEGHTAHLTEELAGAEVLEILELYAGVYEKLLAVPVVRGRKTENEKFAGGYYTTTVEGYIPSNGRGIQGATSHALGQNFSKMFDITVEDPQKQGSHIHVWQNSWGLSTRVIGVMVMIHGDDKGLVLPPRVAKTQVVIVPVGINKKTTPEEKKKHEDQVEEIRANLKKAGVRVTADWREGYTPAWKFNDWELKGVPLRVEFGPKDAAKGVISTARRDTGEKGEIAIADVATKVPELLETIQSDMYNKAEKSFREHRLQITKWEDVLPALDNKNVVLIPFCGAPKCEDRIKELTTREEQPNVPDNEKLPTMGMKSLCVPFEQPEGIAAGETKCLNPECEGKADKWTMFGRSY

SEQ ID NO: 12278 - protein, 275 aa, Streptococcus pneumoniae
GAILVVASTDGPMPQTREHILLSRQVGVKHLIVFMNKVDLVDDEELLELVEMEIRDLLSEYDFPGDDLPVIQGSALKALEGDSKYEDIVMELMNTVDEYIPEPERDTDKPLLLPVEDVFSITGRGTVASGRIDRGIVKVNDEIEIVGIKEETQKAVVTGVEMFRKQLDEGLAGDNVGVLLRGVQRDEIERGQVIAKPGSINPHTKFKGEVYILTKEEGGRHTPFFNNYRPQFYFRTTDVTGSIELPAGTEMVMPGDNVTIDVELIHPIAVEQGTT

SEQ ID NO: 12279 - protein, 339 aa, Desulfovibrio desulfuricans G20
MKKVRVGINGFGRIGRQVLKTIWERHRDTVDVVAVNDLFDINTNAHLLSHDTNYRGFAPEVSVDGDIMRVGGDFVIKNYAERDPRAIPWGAMDVDIVIESTGIFTSGPKAAMHLEAGAKKVVISAPAKEEDITVVLGVNHQDYDPAKHRIISNASCTTNCLAPVVKVMHENFGIQKGVMTTVHSYTNDQRILDQPHRDMRRARAAACNMIPTSTGAAKAVALVIPEMKGRFEGYSVRVPTPTVSLVDFVAILERETTTEELRATLKNAAQGSLNGILGYSELPLVSSDFIGDPHSGIVEADFTLVQTGNLAKVYVWYDNEWGYSCRVADLVEYMRERGL

SEQ ID NO: 12280 - protein, 402 aa, Buchnera aphidicola (Schizaphis graminum)
MPDIGLEEVEVTEILVKIGEEIKLDQGLITVEGDKASMEIPSPISGIVKDITIKIGEKVKTSSIIMIFKVNNLNSIKNEKDLNYIKTEKKLNENFLEEKKDIKKIVLVHATPVVRRLARHLNVDLKNITPSGPKNRILKEDIELYIRNNTSNKSSFNIEKNNTTNFHKDLFNEIPITNIQQIIGKNLHQNWVNIPHVTQFDEVNITLLEEFRHKYNTEKKQKNNMCSKITILPFIIKSVAYGLLEFPIFNSSLSVNKKTIFLKKYVNVGIAVDVQNALFVPVLKNVDKKNIANLSSELIFLSKKAHENKLDASDMKDGCFTISNLGGIGGSWFSPIINSPEVAILGVSKALIKPLWNGKEFIPSLMLPLSLSYDHRVINGADAARFLTFIGKMLSDIRFLIM

SEQ ID NO: 12281 - protein, 391 aa, Erythrobacter sp. NAP1
MAKEKFERNKPHVNVGTIGHVDHGKTTLTAAITKVLGSAVDFANIDKAPEERERGITISTAHVEYETDARHYAHVDCPGHADYVKNMITGAAQMDGAILVVNAADGPMPQTREHILLARQVGVPALVVYMNKVDQVDDEEILELVELEVRELLSEYGFDGDNIAIVKGSALAALEGRDPEIGENSIKELMDAVDENIPQPDRPVDKDFLMPIEDVFSISGRGTVVTGRVETGVVNVGDEVEIVGIKDTTKTTVTGVEMFRKLLDSGEAGDNIGALIRGVGREEVERGQVLAKPGSVTPHTEFSAEVYVLSKDEGGRHTPFFANYRPQFYFRTTDVTGEVILPEGTEMVMPGDNVTIGVKLIAPIAMDEGLRFAIREGGRTVGSGVVSKITK

SEQ ID NO: 12282 - protein, 665 aa, Amaranthus sp. 'Iowa'
MVTLNHISSFTKPNKTYLQSSIYAIPFSNSLKPTSSSSILAALFKSHHLLLQSPKPKPPSATITQSPSSLTDDKPSSFVSRFSPEEPRKGCDVLVEALEREGVTDVFAYPGGASMEIHQALTRSNIIRNVLPRHEQGGVFAAQGYARATGRVGVCIATSGPGATNLVSGFADALLDSVPLVAITGQVPRRMIGTDAFQETPIVEVTRSITKHNYLVLDVEDIPRIVKEAFFLANSGRPGPVLIDIPKDIQQQLVVPNWEQPIKLGGYLSRLPKPTFSANEEGLLDQIVRLVGESKRPVLYTGGGCLNSSEELRKFVELTGIPVASTLMGLGAFPCTDDLSLQMLGMHGTVYANYAVDKADLLLAFGVRFDDRVTGKLEAFASRAKIVHIDIDSAEIGKNKQPHVSICGEIKVALQGLNKILESRKGKLKLDFSNWREELNEQKKKFPLSFKSFGDAIPPQYAIQVLDELTLGDAIVSTGVGQHQMWAAQFYKYRNPRQWLTSGGLGAMGFGLPACYGAAVARPDAVVVDIDGDGSFIMNVQELATIRVENLPVKIMLLNNQHLGMVVQLEDRFYKANRAHTYLGNPSNSSEIFPDMLKFAEACDIPAARVTKVSDLRAAIQTMLDTPGPYLLDVIVPHQEHVLPMIPSGAAFKDTITEGDGRRAY

SEQ ID NO: 12283 - protein, 690 aa, Prochlorococcus marinus str. MIT 9211
MKTDARAFPLAAITGHGTLKLALMLAAVDPGLGGVIIAGGRGTGKSVLARGLHELLPPIEVLDLDLQKDSEYLRPVGLNLDPHLPNEWDDVTNQIINNHKRFLDDQDNFELPTKVIKAPFIQVPLGITEDRLVGSVDVASSLASGNAVFQPGLLAEAHRGVLYIDELNLLDDGIVNLMLAAVGSGENLIEREGLSLSHPCRPLLIATYNPEEGAVRDHLLDRFAIVLSADQAISNIQRVEITQSSIAFAQSSEDFLNTWSEATEAMATQLLLARQWLPDVQITKEQIEYLVNEAIRGGVEGHRSELYAARVAKAHAALCGRDKVEAEDLQVAVRLVIAPRALQLPPTDEQMEPPPPEDQPPPPDQSQEDDLEDQDSEDEDEDDTPEDQSSPPIPEEFMLDPEACAIDPDLLLFSSAKSKSGNSGSRSAVFSDNRGRYVKPIIPRGPVSRIAVDATLRAAAPYQKARREREPSRKVIVEEGDLRAKLLQRKAGALVIFLVDASGSMALNRMQSAKGALIRLLSEAYENRDEVSLIPFRGEQADVLLPPTRSITAAKRRLETMPCGGGSPLAHGLTQAARVGANALSTGDLGQVVVVAITDGRGNVPLGVSLGQPQIEGEDPVDLKQEVLDVASRYRSLGIKLLVIDTERKFIASGMGKDLAEAAGGKYVQLPKASDQAIASIAMDAIGEVK

SEQ ID NO: 12284 - protein, 504 aa, Xanthomonas oryzae pv. oryzicola
MTQTNGFDALHAHAQRLRGAAIPALLAAEPERPTQYAWQVGPLYFNFARQKYDRAALDALFAIARERDLVGAFQRLFRGEQVNVTEQRAALHTALRGDLTDAPVASEAYATAAEVRQRMGALIQQLEATDVTDIVSVGIGGSDLGPRLVADALRPVSGARLRVHFVSNVDGAAMQRTLATLDPARTAGILISKTFGTQETLLNGSILHAWLGGSERLYAVSANPERAAKAFDIAPGRVLPMWDWVGGRYSLWSAVGFPIALAIGFERFEQLLEGAAQFDAHALNTPLEENVAVLHGLTAVWNRNLLGSATHAVMTYDQRLALLPAYLQQLVMESLGKRVKLDGSAVDSDTVSVWWGGAGTDVQHSFFQALHQGTSVVPADFIGTVHNDDPYAENHVALMANVLAQTEALANGQDSSDPHRSYPGGRPGTVILLDALTPQALGALISMYEHSVYVQSVMWGINAFDQFGVELGKQQASQLLPALKGESADVADPVTRELLSKLRG

SEQ ID NO: 12285 - protein, 109 aa, uncultured Prochlorococcus sp.
SDLDGVTYRVLNTDAQALIQSSASHRVQLGQSLTRGLGAGGNPSIGQKAAEESRTDLQQALEGVDLVFIAAGMGGGTGTGAAPVVAQVAKESGALTVGIVTKPFSFEGK

SEQ ID NO: 12286 - protein, 385 aa, Rhodococcus erythropolis
EFVAWIIGWDLILEFALASSVVAKGWSLYLGEVMGSRSPIVELGPISFDWGAVLVIAVITILLATGTKLSSRVSLVITAIKVAVVLLVIIVGLFYIDTDNYSPYIPPSEPGSTGEGIHQSLFSYVTGAGGSTFGWYGLLAAASLVFFAFIGFDVVATTAEEAKEPQKALPRGILGSLLIVTVLYVAVTLVLTGMVKYTELEGDTSNLATAFAFHDITWAKNVISFGALAGLTTVVMVLMLGQTRVLFAMARDGLMPRRLAPTGKHGTPVRITILVGVVVAVLAGVFPIGTLEEMVNIGTLFAFVLVSIGVLVLRRTRPDLPRGFRVPLVPLVPILAVLACLWLMFNLSVETWMRFVVWMALGVVIYFAYSRQHSMIGKRERGEIE

SEQ ID NO: 12287 - protein, 115 aa, Nostoc sp. PCC 7120
METAMSKGVITITDAEFESEVLKAEQPVLVYFWASWCGPCQLMSPLINLAANTYSDRLKVVKLEIDPNPTTVKKYKVEGVPALRLVKGEQILDSTEGVISKDKLLSFLDTHLNNN

SEQ ID NO: 12288 - protein, 184 aa, Arabidopsis thaliana
  misc_feature (13)..(13): Xaa can be any naturally occurring amino acid
  misc_feature (112)..(112): Xaa can be any naturally occurring amino acid
  misc_feature (134)..(134): Xaa can be any naturally occurring amino acid
  misc_feature (147)..(147): Xaa can be any naturally occurring amino acid
  misc_feature (152)..(152): Xaa can be any naturally occurring amino acid
MASSMFSSTAVVXSPAQATMVAPFTGLKSSASFPVTRKANNDITSITSNGGRVSCMKVWPPIGKKKFETLSYLPDLSDVELAKEVDYLFRNKWIPCVEFELEHGFVYREHGXNTPGYYDGRYWTMWKLPLFGCXTDSAQVLKEVERXAKREXPGAFIRIIGFDNTRQVQCISFIAYKPPRFTEA

SEQ ID NO: 12289 - protein, 429 aa, Geobacillus stearothermophilus
MELFKYMETYDYEQVLFCQDKESGLKAIIAIHDTTLGPALGGTRMWMYNSEEEALEDALRLARGMTYKNAAAGLNLGGGKTVIIGDPRKDKNEAMFRAFGRFIQGLNGRYITAEDVGTTVADMDIIYQETDYVTGISPEFGSSGNPSPATAYGVYRGMKAAAKEAFGSDSLEGKVVAVQGVGNVAYHLCRHLHEEGAKLIVTDINKEVVARAVEEFGAKAVDPNDIYGVECDIFAPCALGGIINDQTIPQLKAKVIAGSADNQLKEPRHGDIIHEMGIVYAPDYVINAGGVINVADELYGYNRERAMKKIEQIYDNIEKVFAIAKRDNIPTYVAADRMAEERIETMRKAASQFLQNGHHILSRRPRPLTAARAGLRRADDGGTTTMQEQKFRILTINPGSTSTKIGVFENERAIASKKRSATRAGASAI

SEQ ID NO: 12290 - protein, 835 aa, Xylella fastidiosa Ann-1
MSSSAVRLSTVETPVYVPRTVVHKFGGTSVADADCYRHVACLLLAREETVQVTIVSAMKGVTDTLIALAEQAANHSPDWQVLWQQTRTRHCDAAQALLGEHAATLQDWLNTRFNELHEMLVALSVIGMLPSEVLDRLQGLGEVYSAQLLGQYLQAQGEDCVVLDARQVLVVSPGEFGAEVDWATSAQHLAHWRMQHPQRRVVVTGFVASDRTGRAITLGRNGSDYSGAIFAALFEADELHIWTDVDGVMSADPRVVPDAVQLDALSYDEACELAYFGAKVVHPQTMSPVMKRGVPIIIRNTFQPGHPGTRITADSVVSGSVKGLTLSPGLAVLNLEGTGLIGVPGTAERVFAALRNARLSVVMISQGSSEHSICCLVHQTEAERARDALLYTFAHELAIGHVQRVQLTNNISVLAAVGDGMAGHLGVAARLFESLRRAHVNILAIAQGSSERNISVAIDSQQATKALRAAHAAFWLSPQTFSIGVIGPGHVGEALLDQLCTAQQQLLSKANLDLRLRAIVSRRRMLLDERGLGSDWRHAFAAAPEAVDLDAFTAHLQVAHLPHAVIIDCSGSAEVADRYADWLAAGIHVVTPNKQAGSGPLHRYHAIRAAADASGARFRYEATVGAGLPVITTLRDLMDTGDSVTSIEGIFSGTLAWLFNKYDGSVPFSQLIAQARAMGYTEPDPRDDLSGVDVARKLVILARDAGRDISLEDVAVESLVPETLCQLSVADFMERLNEIDATFAERLAAAKQRGCVLRYVAQLSPGHVPSVSLIELPSDHAFVNLRLTDNVVQFTTRRYSENPLIVQGPGAGPEVTAAGVFADLLRVAAGEGARL

SEQ ID NO: 12291 - protein, 1581 aa, Arabidopsis thaliana
MSVIRPSPIPIPRCRSQVEDTAIESTARSPEAAGGKMVVELVGAFNEVTERMNSVWLSTSSSRLLFKALKLSIPILQSLPLASDGRSPLSKALSLSIILADLQMDAEVISASILSEVVDANAISIYEVRDHIGTGTAHLLHEIFRVKNIPFKVDVLDDETAASLRKFYLTYYDIRAVIMDLVSKLDEMRHLDHLPRYRQQILSLEVLKIYSPLAHAVGANHLSLELEDISFRYLFPCSYIYLDSWLRGHENGSKPLIDVYKEQLHRSLKDDLVLAEMVNDVYIKGRYKSRYSMMKKLLRDGRKPEEVNDVLGLRVILMPNSVVNDVEVGEKACYRTSEIIRSLWKEIPHRTKDYIARPKENGYRSLHMAVDVSDSDQIRPLMEIQIRTMDMDGSANAGTASHSLYKGGLTDPKEAKRLKAIMLAAADLAAIRLKDISSNKHQSFKTTTNQRDRVFCLLDKNGDGMISIEELMEVMEELGAPGEDAEEMMQLLDSNSDGSLSSDEFDTFQKQVEFMRKWEDRDNEYKSLLDEKLHDLPHQDTTALVRSFFIPCEIAMMTLQSSPMSVLTEDLVEDILSRVPATSLVRLRSTCKQWNAILNDRRFIKKHFDTAEKEYLDMLLRSLRVSSMSVNLHGLHDNIDPSIELKRELNLKGLLCNSGKVESFEVFHCNGLLLFTNTSTIVVWNPCTGQTKWIQTESANTRYHKYALGYENKNLCRDYKILRFLDDGTNFELEIYEFNSSSWRVLDSVEIDFELDIGSQGMSVKGNTYWIVIDDHEVDGELVNCFLTSFDFTRERFGPHVCLPFQTSWYSDVISLSSVREERLSVLFHEEDSLTMEIWVTNDITDTIVTSWSKFLRVDLYTHRFYNGVTFFIDEENKAAVFSEDVPDDSDDIHSIVYIIGQDRLRIVDLEDGPFWPQMFCYVPKDLVEEILSRVPAISLKRLRYTCKQWNALFNDQRFSKKHRDKAPKTYLGLTLKDFRIYSMSSNLHGLLHNNNIDLLMEFKDSWFGTPVPVKPGGSNAGIVGCVIPLLLDMTTARQQFEYEIFEFSSNSWRVLDVNPNCIIEETFQKLPLPFHIFDYNDSRALSAFREEQLSVLHQSFDTEKMDIWVTNKIDETTDWSWSKFFTVRLINSRFLLLPRDKMMSNLPLDLVEEILSRVPATSLKRLRSTCKSWNNCYKDQRFTEKHSVIAAKQFLVLMLKDCRVSSVSVNLNEIHNNIAAPSIELKGVVGPQMQISGIFHCDGLLLCTTKDDRLEVWNPCTGQTRRVQHSIHYKTNSEFVLGYVNNNSRHSYKILRYWNFYMSNYRVSEFEIYDFSSDSWRFIDEVNPYCLTEGEVSLKGNTYWLASDEKRDIDLILRFDFSIERYQRLNLPILKSDYETEALSVVREKQLSVLLKRNDTLEREIWVTTNDKIDHTTKNLLWIKFLAIDQRTCYHWSCVSFFIDEEKKMAVFCDGYIGGINETSRRMFYIIGEDKYYRELYVGDSPIRSHRPFVFNYVPSLVQIPQATVIPKRRRQQLSLVLQRCRASKVDVWITDKIDTKEVQWSKFFTVDVDIGGRAMLSYDSFFIDKEKGMALLCGL

SEQ ID NO: 12292 - protein, 159 aa, Listeria monocytogenes
MNVHDFSEKAMNGKEIALSDYKGKVLLIVNTASKCGLTPQLEGLEAMYKKLGGDNFEILGFPCNQFLRQDPGSDEEILEFCQMNYGVTFQMFSKIKVKGKDASPLYKYLTEQTGGKKVEWNFAKFLIDENGEVIERFPSKMKPEDFEDKVEALVAKVNN

SEQ ID NO: 12293 - protein, 110 aa, Pseudomonas fluorescens
MHWQRRRSCMQVNISGHQLEVTEPLRVYIGEKLDRLERHFDKITNVQVTMAVEKLKQKIEATLHIHGGEVVANAEHDDMYAAIDLLTDKLDRQLKKHKEKQLHLLQGTGR

SEQ ID NO: 12294 - protein, 423 aa, Zea mays
  misc_feature (210)..(210): Xaa can be any naturally occurring amino acid
  misc_feature (255)..(255): Xaa can be any naturally occurring amino acid
MDDDAGDASPPPGPAPLAATGAPSLRDMAASPTSSRSVTETVNGSHRFVIQGYSLAKGMGVGKHIASETFTVGGYQWAIYFYPDGKNPEDNSAYVSVFIALASEGTDVRALFELTLQDQSGKGKHKVHSHFDRSLESGPYTLKYRGSMWGYKRFFRRTALETSDFLKDDCLRINCTVGVVVSTIDYSGPHSIQVPDSDIGYHFGSLLDSXKGVDVILNVSGERFHAHKLVLAARSTVFRSKLFDDESEGDKSGVXETDELKEFSIDDMEPNVFKAMLHFIYRDTLVDDDELGASNSDGSIFDAPAAKLLAAADKYHLARLKSLCESYLCKGISVASVASTLALADRHHAMELKAVCLKFAAENLSAVMRSEGFIYLKDNCPSLQSEILKTVAGLGKEPVVNPELTWLASSCSVNDDGNHLYVK

SEQ ID NO: 12295 - protein, 414 aa, Clostridium perfringens str. 13
MKRWTFDENTIILPNGLKVITIKKDTRLASINIGVNIGSLYEDEKELGMSHFVEHMLFKGTKNRSNEQLNRELEFLGGDYNAYTDYISTVYSITCLDEEFEKGIELLSDMVLNSSFDEKEMKKEKGVVLSEIKSDKDDIEDLSISRTHEYAFDKSALKNSIAGTEEHVKGFKRKQVYDFYKKYYTPDNCVIVTVSAFSHEQMQKIIIDLFGKWEGKSHKKAEIIKEENKELIKTTYKSQIEQGTVTYLYAFKEVCEKDKLPLKILSYKLAESSNSILFRELREERGLAYDVYSQMDLDENVNTMNIFTSVREESIDEVIEVIDKAILDIKNKDINFDEDMLCMMKKTHKTGVVSTLEDCSSLCSYVLVQSLAGKDITEFINSMEELETLTGEDIYRVCNKYLNKPTIHILKPME

SEQ ID NO: 12296 - protein, 369 aa, Burkholderia vietnamiensis G4
MARAQAAEAQYRRGRRAVAQGDRPAARRRGGRRRAVGHGCGRADRGGVVSAPTLTVRVARKWQEARDICGFEFVADDGSPLPRFDAGAHIDVHLPGGLVRQYSLCNDPRHGDRYRIAVLRDADGRGGSRAIHDEVRQGDTLRIGMPRNQFPLARDASHHLLLAGGIGVTPMLSMAEQLSAAGESFDLHYCARSLERMAFVEQINTAAFRDRTRLHVDDGDAAQRFDLPAALDAAPAGTHLYVCGPRGFMDAVLDAARARGWPDARLHYEFFGGAVVASGAERAFQVRLASSGKVVDVPADCTVVAALAAHGIDVLTSCEQGVCGTCVTRVLEGEPDHRDSYLTEAEQAAGDQFMPCCSRARSDLLVLDL

SEQ ID NO: 12297 - protein, 616 aa, Corynebacterium glutamicum ATCC 13032
MSPNDAFISAPAKIETPVGPRNEGQPAWNKQRGSSMPVNRYMPFEVEVEDISLPDRTWPDKKITVAPQWCAVDLRDGNQALIDPMSPERKRRMFELLVQMGFKEIEVGFPSASQTDFDFVREIIEKGMIPDDVTIQVLVQAREHLIRRTFEACEGAKNVIVHFYNSTSILQRNVVFRMDKVQVKKLATDAAELIKTIAQDYPDTNWRWQYSPESFTGTEVEYAKEVVDAVVEVMDPTPENPMIINLPSTVEMITPNVYADSIEWMHRNLNRRDSIILSLHPHNDRGTGVGAAELGYMAGADRIEGCLFGNGERTGNVCLVTLALNMLTQGVDPQLDFTDIRQIRSTVEYCNQLRVPERHPYGGDLVFTAFSGSHQDAVNKGLDAMAAKVQPGASSTEVSWEQLRDTEWEVPYLPIDPKDVGRDYEAVIRVNSQSGKGGVAYIMKTDHGLQIPRSMQVEFSTVVQNVTDAEGGEVNSKAMWDIFATEYLERTAPVEQIALRVENAQTENEDASITAELIHNGKDVTVDGRGNGPLAAYANALEKLGIDVEIQEYNQHARTSGDDAEAAAYVLAEVNGRKVWGVGIAGSITYASLKAVTSAVNRALDVNHEAVLAGGV

SEQ ID NO: 12298 - protein, 273 aa, Streptococcus pyogenes
SFLVVASTDGPMPQTREHILLSRQVGVKHLIVFMNKIDLVDDEELLELVEMEIRDLLSEYDFPGDDLPVIQGSALKALEGDTKFEDIIMELMDTVDSYIPEPERDTDKPLLLPVEDVFSITGRGTVASGRIDRGTVRVNDEIEIVGIKEETKKAVVTGVEMFRKQLDEGLAGDNVGILLRGVQRDEIERGQVIAKPGSINPHTKFKGEVYILSKDEGGRHTPFFNNYRPQFYFRTTDVTGSIELPAGTEMVMPGDNVTINVELIHPIAVEQGT

SEQ ID NO: 12299 - protein, 265 aa, Streptococcus suis
VVASTDGPMPQTREHILLSRQVGVKHLIVFMNKVDLVDDEELLELVEMEIRDLLSEYDFPGDDLPVIQGSALKALEGDSKYEDIVMELMNTVDEYIPEPERDTDKPLLLPVEDVFSITGRGTVASGRIDRGTVRVNDEIEIVGLQEEKSKAVVTGVEMFRKQLDEGLAGDNVGVLLRGVQRDEIERGQVISKPGSINPHTKFKGEVYILTKEEGGRHTPFFDNYRPQFYFRTTDVTGSIKLPEGTEMVMPGDNVTIDVELIHPIA

SEQ ID NO: 12300 - protein, 909 aa, Oryza sativa
VQECYEIAAEYEGKHDSQKLDELGNMLTSLDPGDSIVMAKAFSHMLNLANLAEEVQIAYRRRIKLKKGDFADENSALTESDIEETFKRLVVDLKKSPAEVFDALKSQTVDLVLTAHPTQSVRRSLLQKHSRIRNCLVQLYSKDITPDDKQELDEALQREIQAAFRTDEIRRTQPTPQDEMRAGMSYFHETIWKGVPKFLRRLDTALKNIGIDERVPYNAPLIQFSSWMGGDRDGNPRVTPEVTRDVCLLARMMASNLYCSQIEDLMFELSMWRCNDELRARADELHLSSKKDAKHYIEFWKKVPPSEPYRVVLGDVRDKLYNTRERARQLLSSGYSDIPEETTLTSVEQFLEPLELCYRSLCDCGDRVIADGTLLDFLRQVSTFGLCLVRLDIRQESDRHTDVLDAITTYLGIGSYREWSEERRQDWLLSELNGKRPLFGPDLPKTDEIADVLDTFRVIAELPADNFGAYIISMATAPSDVLAVELLQRECHVKTPLRVVPLFEKLADLESAPAAVARLFSIDWYRERINGKQEVMIGYSDSGKDAGRLSAAWQLYKSQEELINVAKEFGVKLTMFHGRGGTVGRGGGPTHLAILSQPPDTIHGSLRVTVQGEVIEQSFGEEHLCFRTLQRFTAATLEHGMHPPIAPKPEWRALLDEMAVVATKEYRSIVFQEPRFVEYFRLATPEMEYGRMNIGSRPSKRKPSGGIESLRAIPWIFAWTQTRFHLPVWLGFGSAFKHILEKDIRNLHMLQEMYNEWPFFRVTIDLVEMVFAKGDPGIAALYDKLLVSEELWPLGEKLRANCEETKQLLLQVAGHKDLLEGDLYLKQRLRLRNAYITTLNVCQAYTMKRIRDPDYHVTLRPHMSKEIMDWSKPAAELVKLNPTSEYAPGLEDTLILTMKGIAAGMQNTG

SEQ ID NO: 12301 - protein, 275 aa, Lactococcus lactis
GAILVVAATDGPMPQTREHILLSRQVGVKYLIVFLNKADLVDDEELMELVEMEVRDLLSEYDFPGDDIPVIAGSALGALNGEPQWVAKVEELMDIVDEYIPTPERDTDKPLLLPVEDVFSITGRGTVASGRIERGTVKVGDEVEIVGIKEETKKAVVTGIEMFRKTLTEGLAGDNVGALLRGIQRDEIERGQVIAKPGSITPHKLFEGEVYVLSKEEGGRHTPFFDNYRPQFYFHTTDVTGSVKLPEGTEMVMPGDNVHIDVELIHPVAIEQGTT

SEQ ID NO: 12302 - protein, 801 aa, Bacillus thuringiensis serovar konkukian str. 97-27
MKKRLVMIGNGMAGIRCMEEILKHDCDSYEITIFGDEPHPNYNRIMLSHVLQGKTNIQDIIMNEYSWYEENEITLYTNERVQSIDREEKVIITEKNRTLTYDKLIIATGSSAFILPVEGSTLPGVTGFRTIEDTQFMMDTAKEKKKAVVIGGGLLGLEAARGLIDLGMDVHVVHLMPSLMEQQLDTKAASLLREDLEAQGMKFLMEKKTVKILGTNHVEGIQFEDGEVVDCDLIVMAVGIRPNTQIARDAGLIVNRGIVVNDYMLTNDESIYAVGECAEHDGIAYGLVAPLYEQGAILAKHISNLQTDGYSGSIVGTQLKVAGCDLFSAGQIYEDDQTKAISIFNECKRSYKKVLIRDNKVVGIVLYGDTADGTRLFSMLKKEEDIQEYTPASILHKAGEESELDVATMSADDTICGCNGVTKGTIVHAILEQELTTFEEVKGCTKAAGSCGKCRPLVEQVLSHTLGDAFDASAQSAGMCGCTPLSRDEVVAAIHEKGLKSPKEVRNVLGFVHEDGCSKCRPALNYYLRMAIPEEYEDDKASRFVNERMNGNIQHDGTFSVIPRMYGGVTTADDLMKIAEVAKKYNVPLVKITGASRIGLYGVKKQDLPNVWADLNMTSGYAYSKSLRNVKSCVGSRFCRFGTKDSLGLGMLLEQSLEMVDTPHKMKMGVTGCPRNCAEVLTKDFGVVCVENGYQLYIGGNGGTEVREADFVMIVPTEDDVLHIATAYMQYYRETGIYGERTAYWTERLGFDHIKEILQDANMVTKLNERFQTARGTYKEAWGQALETKSLKAMYEVETVK

SEQ ID NO: 12303 - protein, 273 aa, Listeria seeligeri
ILVVSAADGPMPQTREHILLSRQVGVPYIVVFMNKCDMVDDEELLELVEMEIRDLLTEYEFPGDDIPVIKGSALKALQGEADWEAKIDELMEAVDSYIPTPERDTDKPFMMPVEDVFSITGRGTVATGRVERGQVKVGDEVEVIGIEEESKKVIVTGVEMFRKLLDYAEAGDNIGALLRGVAREDIQRGQVLAKPGSITPHTNFKAETYVLTKEEGGRHTPFFNNYRPQFYFRTTDVTGIVTLPEGTEMVMPGDNIELAVELIAPIAIEDGTK

SEQ ID NO: 12304 - protein, 362 aa, Synechococcus sp. WH 8102
MTAPRKRRVFPFTAVIGQEEMKLALLLNVIDPRIGGVMIMGDRGTGKSTTIRALADLLPDIEVVAGDPYNSSSTDPDLQSSEVRERMERGDSISTEPRQVPMVDLPLGATEDRLCGTIDIEKALSEGVRAFEPGLLAKANRGLLYVDEVNLLDDHLVDVLLDSAASGWNTVEREGVSVRHPARFVLIGSGNPEEGELRPQLLDRFGMSVEVSTVRDPELRVQVVDQRTAFDSDPDGFSTAVEANQDALQQRVVEAQQRLGQVSIDDDLRLRISAVCGELDVDGLRGDIVTNRAARALAAFEGRTEVSEEDVARVASCCLRHRLRKDPLEQVDSGDRVVKVFCKVFERSESSDRADFELALVA

SEQ ID NO: 12305 - protein, 347 aa, Sulfolobus solfataricus P2
MIARKLADLGVDVIEAGFPASSEGEFIATRKIFEEIGDQVEVIGLSRSNKNDIDKTISTGISSIHLFIATSELHMKYKLKMTKEEVLNKIYESVKYAKDHGMIVEFSPEDATRTEEDFLFTAIRTAIEAGADRINIPDTVGTMHPFKYYDMIKKIVNFVGERIIVSVHCHNDFGLATANSLAGVYAGARQAHVTVNGIGERAGNASLEEVVMGIKKLLNYETNVKTWKLYEVSRFVAEMTGVPVPYFKAIVGDNAFGHESGIHVHGVIENPFTYEPISPEEVGNFRRLALGKHSGIHGLRKLLEEQGIYLSDDKLKIVLAEIKKLAESGNKVTVEDAKNIALKLMNS

SEQ ID NO: 12306 - protein, 289 aa, Methanothermobacter thermautotrophicus str. Delta H
MIAGTRGSRLALVQTNHVIEMLSEVCKEKIEKKIIKTKGDRIRDSQLYSMDSRGLFTRELDMAVLNEEVDLAVHSLKDVPSDLDPDLAIAAVPPRESPAEVLVSRLDWEDLPQGSKLGTSSLRREAFCNHHQKNFKMEPLRGNIDTRIRKVMDGEVHATIMAEAGLKRLGLEEHIKRRFPVEYFTPAAGQGALAVITRADSELISSIGRITHHPSLQEVTAEKTLLRELGAGCQCPLGVIGRATGNQLTLYAVLLTREGEMLRKVTVRGPLAEAEDIGKKAAKEMEDYI

SEQ ID NO: 12307 - protein, 485 aa, Prochlorococcus marinus str. MIT 9211
MFKNSLKLQSDPIRFGTDGWRGVLGVDITLERLLSVATAATQELAYRAPKGLSNKVIIGYDQRFLAPEFAAAISCAVRGCELEPLISETPVTTPACSWAVVQHQAIGALVITASHNPPEWLGLKIKGPSGCSVDSDFTQAVEHRLLAGGITMPINGITESFNCREQHIAGLKRKFDIEKIANGLKAMGLKVIIDYMHGSAAGCIAELFGDGSQEFLQEIRVNRDPLFGGNPPEPLSQYLGQLISSVKASSAAGTQSLGLVFDGDGDRIAAIDEQGRFCSNQLLVPLFIDHLVGVKNLPGCVIKTVSGSDLIALVAEKLGREVIEVPVGFKFIASEMFNRDVLLGGEESGGIGFGSHIPERDALYAALVLLEAVTSIKMPLGERVNTLHDCFGKSYYDRIDLRLEDNNCRVRLEELLRNSPPNSISDEIVQEVIMIDGYKLKLGECHWLMFRFSGTEPLLRIYCEAPTPIQVEKNLAWARQFAVEI

SEQ ID NO: 12308 - protein, 109 aa, uncultured Prochlorococcus sp.
SNLDGVTYRVLNTDAQALIQSSATHRVQLGQSLTRGLGAGGNPSIGQKAAEESRADLQQALEGVDLVFIAAGMGGGTGTGAAPVVAQVAKESGALTVGIVTKPFSFEGK

SEQ ID NO: 12309 - protein, 421 aa, Amycolatopsis lactamdurans
MALVVQKYGGSSLESADRIKRVAERIVATKKAGNEVVVVCSAMGETTDELLDLAQQVNPVPAGAEMDMLLTAGDGISNALVAMAISAQGAQAWSFTGSQAGVVTTAVHGNARIIDVTPSRVSERLEQGYVALVAGFQGVAQDTKDITTLGRGGSDTTAVALAAALNADVCEIYSDVDGVYSADPRIVPDARKLDSVPYEEMLELAASGSKILHLRSVESARRYGVPIRVRSSYSDKPGTTVTGSIEEIPVEQALITGVAHDRSEAKITVTGVPDHAGAAARIFRVIADAEIDIDMVLQNVSNTSSGRTDITFTLSKANGPKAVASLEKIKEELGFSSVLYDDHVGKVSLVGAGMRSHPGVTATFCEALCKVGVNIEIINTSEIRISVLIRDAQLDDAVRAIHDAFELGGDEEAVVYAGSGR

SEQ ID NO: 12310 - protein, 554 aa, Mycobacterium leprae
MTSMQAIPDITATPAWDALRRHHDEIGATHLRQFFADNPNRGRELVITVGDLYIDYSKHRITHDTVQLLVDLARAANLEQRRDQMLAGVHVNTSENRSVLHTALRLPRDTELIVDGQNVVQDVHAVLDVMGDFTDRLRSGEWTGATGKRINTVVNIGIGGSDLGPVMVYQALRHYADAGISARFVSNIDPADLTAKLSDLEPGTTLFIVASKTFSTLETLTNATAARRWLTDALGEAAVSKHFVAVSTNKRLVKDFGINTANMFGFWEWVGGRYSVDSAIGLSLMAVVGRESFADFLSGFHIVDQHFQNAPLESNAPVLLGLIGLWYSDFLGAQSRAVLPYSNDLARFAAYLQQLTMESNGKSTRADGTPVTTNTGEIYWGETGTNGQHAFYQLLHQGTRLVPADFIGFSQPIDDLPTVDGIGSMHDLLMSNFFAQTQVLAFGKTAEEIAAEGTPAEVVPHKVMPGNRPTTSILANRLTPSVLGQLIALYEHQVFTEGVIWGIDSFDQWGVELGKKQAEALLPVITGNASPAQQLDSSTDTLVRRYRTERGRTS

SEQ ID NO: 12311 - protein, 109 aa, uncultured Prochlorococcus sp.
SDLEGVTYRVLNTDAQALIQSSATHRVQLGQSLTRGLGAGGNPSIGQKAAEESRADLQQALEGVDLVFIAAGMGGGTGTGAAPVVAQVAKKSGALTVGIVTKPFSFEGK

SEQ ID NO: 12312 - protein, 107 aa, Synechococcus sp. WH 8102
MSSAAAVTDASFEQDVLQSDVPVLVDFWAPWCGPCRMVAPIVEEIAKEFDGQIKVFKLNTDENPNVASQYGIRSIPTLMVFKGGQKVDTVVGAVPKATLSGTISKYL

SEQ ID NO: 12313 - protein, 348 aa, Cytophaga hutchinsonii
MSSNNQVLIEEKINETADAVTLVLKQHDSIKNYKSGQFITLLLNIGGEKVRRSYSFSSSPETDSKPSITIKKIQDGKASTYLFNTIKAGDSLEFQQPAGIFTLDKASSESLVFIGAGSGITPLISMIKTALANKKFKKICLIYSNRNEDSVIFKKKLEELKAAYSNFEVIYTYSQPHDTSLPKGRLNQSQFIKIIEHIKDLAVAKTDYFLCGPDGMLEEVKHGLEILQVASSKIHKESFVTTNENDSVFVSVPEHAGDANEVTIMYQGSEYKFTVKPGKTILQSALDEDIDLPYSCMSGLCTACMGKCLSGKVEMGDQDGLSEKEVKNGYVLTCVGRPAVAGTVIEID

SEQ ID NO: 12314 - protein, 109 aa, uncultured Prochlorococcus sp.
SDLDGVTYRVLNTDSQALIQSSATHRVQLGQSLTRGLGAGGNPSIGQKAAEESRADLQQALEGVDLVFIAAGMGGGTGTGAAPVVAQVAKESGALTVGIVTKPFSFEGK

SEQ ID NO: 12315 - protein, 352 aa, Lactococcus lactis
MRIEKLKVKMLTENIDSLLITDMKNIFYLTGFSGTAGTVFLTQKRNIFMTDSRYSEMARGLIKNFEIIETRDPISLLTELSASESVKNMAFEETVDYAFFKRLSKAATKLDLFSTSNFVLELRQIKDESEISLIKKACEIADEAFMSALRFIEPGRTEIEVANFLDFKMRDLEASGISFETIVASGKRSSLPHGVATSKMIQFGDPVTIDFGCYYEHYASDMTRTIFVGSVDDKMRTIYETVRKANEALIKQVKAGMTYAQYDNIPREVIEKADFGQYFTHGIGHGLGLDVHEIPYFNQSMTENQLRSGMVITDEPGIYLPEFGGVRIEDDLLVTENGCEVLTKAPKELIVI

SEQ ID NO: 12316 - protein, 109 aa, uncultured Prochlorococcus sp.
SDLDGVTYRVLNTDAQALIQSSATHRVQLGQSLTRGLGAGGNPSIGQKAAEESRTDLQQALEGVDLVFIAAGMGGGTGTGAAPVVAQVAKESGALTVGIVTKPLVFEGK

SEQ ID NO: 12317 - protein, 589 aa, Bifidobacterium adolescentis
MPWKIERDSTVTFRFTVMMKGPINMAINPPVDATKTPEWAALQKHYDELQSEGISLKQWFADDAERVEKLSFDAGDLHFDLSKNLIKPETLQLFADLAKAVKLDERTKAMYTGVHINNTEDRAVLHTALRRPVEDEGKYIVDGQDTVKDVREVLDRIYAFADKVRSGEWTGVTGKKIETVVNIGIGGSDLGPVMVYEALKPYADAGISARYISNIDPNDLAEKTKGLDPETTLFIIVSKTFTTLETLTNAREARTWLLEELKAKGAIDGSDAKNAEAIKKHFVAVSTNLEKVAEFGIDPNNAFGFWNWVGGRYSVDSAVGTSLAVVFGPARFEEFLHGFHEIDEYFANTPFEKNVVVLLGMLNVWYRNFFKVASHAVLPYDQYLHRFPAYLQQLTMESNGKSVRWDGTPVTSETGEIFWGEPGTNGQHAFYQLIHQGTQLIPADFIAFVNTPNPTKDGDQDVHELFLGNYFAQTKALAFGKTADEVRAEGTPEEIVPARVFTGNRPTTSIFGVALTPFALGELIALYEHITFVEGTVWGLDSYDQWGVELGKQLAKQITPAISKDDDALAAQDPSTQSLIKFYRANREF

SEQ ID NO: 12318 - protein, 470 aa, Xanthomonas campestris pv. campestris str. ATCC 33913
MSSWLRRKSIDQVTVHEAGRQLVRSLSWPHLIALGIGAIVGTGIYTLIGVGADKAGPAVLLSFVAAGIVCACAALAYAEMATMMPAAGSAYTYSYTALGESIAWVVGWSLVLEYSLVVSTVAVGWSGYFVGFLQWLGVNLPHALIAGPHAGGIVNLPAVVITFLVAGMLMAGTKESATLNAVLVVLKIIALGVFVAIALPAFNSANLQPFMPYGFSKAMGPDGVERGVMAAAIIFFAFYGFDAISTAAEETKNPGRDLSIGIVGSMIGCTLIYVLVALSAVGAMSFTVFGKSPEPLALILRELGHGKAALVIGAVAIIALPTVLLAFLYGQSRIFFVMSRDGLLPRGLSKVNARTGTPVAITLFTAVLVAALAGVARLDEIAALANAGTLAAFTAVAACLLVLRVREPTRARAFRTPLAWVVGPVAILGCLYLFWSLPSTTQGWFLVWNALGVVVYLAYGRRNSRLGKVG

SEQ ID NO: 12319 - protein, 375 aa, Zea mays
MSVAAAAALGRADELRALDDTLAGVRGLVASGAKQVPHIFRVPYPEELLQHEQPPAAATVPVIDLSGDRAAVIDAVRGAAAGWGFFQVTGHAVPEQVMSAAVAAMRAFHEADGGEGSDKARLYSREPGRAVKYHCNFDLYQSPVANWRDTVYLRMAPDPPAADELPEICRLTNKVADSQFARDALFEYAKQVKDLGHRLFGLLSESLGLNPSYLTDIECDQGQIILGHYYPPCPQPELAIGTSRHSDSGFLTILLQDKVGGLQILHDGQWVDVAPTPGAFIVNIGDLLQLVSNDKFSSVEHRVVAKNAEARVSIACFFSTHFHPASTRMYGPIKELLSEENPPLYRETLVREYVARYYSVGLDGKQKTALADFRL

SEQ ID NO: 12320 - protein, 380 aa, Zygosaccharomyces rouxii
MATHEEFIRTQVFGTVFEITNRYTDLNPVGMGAFGLVCSATDTLAGQPVAIKKIMKPFSTAVLAKRTYRELKLLKHLRHENLICLQDIFLSPLEDIYFVTELQGTDLHRLLQTRPLEKQFVQYFLYQILRGLKYVHSAGVIHRDLKPSNILINENCDLKICDFGLARIQDPQMTGYVSTRYYRAPEIMLTWQKYDVEVDIWSAGCIFSEMIEGKPLFPGKDHVHQFSIITDLLGSPPRDVINTICSENTLKFVTSLPHRDPVPFQERFKTVEPDAVDLLERMLVFDPKKRITAADALVHPYLAPYHDPTDEPTAEAQFDWDFNDADLPVDTWRVMMYSEILDFHKIGGGDGQIDTNAAFDDQVAAATAAPMAQHTNQTNQ

SEQ ID NO: 12321 - protein, 421 aa, Corynebacterium glutamicum ATCC 13032
MALVVQKYGGSSLESAERIRNVAERIVATKKAGNDVVVVCSAMGDTTDELLELAAAVNPVPPAREMDMLLTAGERISNALVAMAIESLGAEAQSFTGSQAGVLTTERHGNARIVDVTPGRVREALDEGKICIVAGFQGVNKETRDVTTLGRGGSDTTAVALAAALNADVCEIYSDVDGVYTADPRIVPNAQKLEKLSFEEMLELAAVGSKILVLRSVEYARAFNVPLRVRSSYSNDPGTLIAGSMEDIPVEEAVLTGVATDKSEAKVTVLGISDKPGEAAKVFRALADAEINIDMVLQNVSSVEDGTTDITFTCPRSDGRRAMEILKKLQVQGNWTNVLYDDQVGKVSLVGAGMKSHPGVTAEFMEALRDVNVNIELISTSEIRISVLIREDDLDAAARALHEQFQLGGEDEAVVYAGTGR

SEQ ID NO: 12322 - protein, 337 aa, Phanerochaete chrysosporium
MPVKAGINGFGRIGRIVLRNALLHGDIDVVAVNDPFIDLEYMVYMFKYDSVHGRFKGSVEAKDGKLYVEGKPIHVFAEKDPANIPWGSVGAEYIVESTGVFTTTEKASAHLKGGAKKVIISAPSADAPMFVCGVNLDAYDSKYKVISNASCTTNCLAPLAKVIHDKFGIVQGLMTTVHATTATQKTVDGPSNKDWRGGRSVGNNIIPSSTGAAKAVGKVIPSLNGKLNGLAFRVPTVDVSVVDLVVRLEKPASYDEIKQAIKEASETTHKGILGYTEEKVVSTDFTGNDNSSIFDRDAGIALNKTFVKLISWYDNEWGYSRRCCDLLGYAAKVDGAL

SEQ ID NO: 12323 - protein, 225 aa, Geobacter sulfurreducens PCA
MKKDILEKGAILQRDRETYAIAPHIPGGITDTATLRKLCDVADKYGVKELKLTSAQRIALFGVKEEDLDAIWSDLDQQPGAAIGLCVRSVKICPGTTWCKRGVQDSVSLGLKIDAIYHAMELPNKMKMGISGCMLNCAETMLKDVGVVGTPKGWRIYVGGNAGARPRIGDLLVELGPDEDKVLAVIADLVEWYRSSGSEQRLGRVVEQMGFDAFKTAVLGAKATP

SEQ ID NO: 12324 - protein, 438 aa, Arabidopsis thaliana
MSNLPLDLVEEILSRVPATSLKRLRSTCKSWNNCYKDQRFTEKHSVIAAKQFLVLMLKDCRVSSVSVNLNEIHNNIAAPSIELKGVVGPQMQISGIFHCDGLLLCTTKDDRLEVWNPCTGQTRRVQHSIHYKTNSEFVLGYVNNNSRHSYKILRYWNFYMSNYRVSEFEIYDFSSDSWRFIDEVNPYCLTEGEVSLKGNTYWLASDEKRDIDLILRFDFSIERYQRLNLPILKSDYETEALSVVREKQLSVLLKRNDTLEREIWVTTNDKIDHTTKNLLWIKFLAIDQRTCYHWSCVSFFIDEEKKMAVFCDGYIGGINETSRRMFYIIGEDKYYRELYVGDSPIRSHRPFVFNYVPSLVQIPQATVIPKRRRQQLSLVLQRCRASKVDVWITDKIDTKEVQWSKFFTVDVDIGGRAMLSYDSFFIDKEKGMALLCGL

SEQ ID NO: 12325 - protein, 527 aa, Cytophaga hutchinsonii
MYKFDLPSHHKSIIKVIGVGGGGSNAVNHMYSQGIKDVEFIVCNTDVQALSGSPIPNKLQIGIGLTDGLGAGANPERGKNAAIESKEEIRELLSNNTKMVFITAGMGGGTGTGAAPIIAKLAKELDIVTVGIVTAPFGFEGKKKILQAEQGIEELRMYCDTVLVILNDRLRDIYGNLSIREAFAKADNILTTAAKSIAEIITVTSDVNVDFEDVKTVMKDSGAAVMGSGIASGEGRGTRAVEEALSSPLLNNTDITGAKKILLSIMYGPDAELRMDELSEIADYIEARAGLDQDTIWGQGVDPELGDSIRVTVIATGFEPNKMTANNKADKEVKKFYDLETSKQITIFDAIDEKKSVDSKVELKEDSYPKNSIENTSMDTVSTTNHSSDVVEPTETYSFEFTSVQKNPVEETVSNDFTDETEFVFEIKDTKPDSVSAQTPESLMAEEQRKKLIQQSQERIKRLKSLNSNPNIPHEQFKDMLDRPAFERKNVNLKDHPHSSDRNISRFNLNDDNEILGNNKFLHDNVD

SEQ ID NO: 12326 - protein, 686 aa, Rhodopirellula baltica SH 1
MMSTPDTSPSAYNDRPQATTGMPPGIPYIIGNEAAERFSFYGMKAILTVFMVDYLHWMSSAATNQGMSNAEATEHYHTFTAAAYFFPVIGALLSDIFLGKYRTILYLSIVYCIGHGALALMGSPPMSAGMWLFAGLLLISIGSGGIKPCVSAHVGDQFGKSNSHMLTKVYQWFYFSINFGSFISTLLTPWVLEHYGPHWAFGIPGVLMAIATLLFWMGRHKFVHIRPGGYRFLQELLSWEKFSSIPKLMIIFSFVAVFWALFDQTGSSWVLQAKNLNREWLGYTWLESQIQAINPILVLTLIPLFQFLIYPTIDRVFPLTPIRKISLGLFVMIGGFAIVALLQERVDAGSQPSIGWQFLAYAVLTASEVMVSITCLEFAYTQAPKTMKSIVMAVFLFSVSMGNVFTATVNRYIQTPAAASLAADIDLEEDAKEPMDNGSFVGELKLDDPAAPKLTLLGPDNTLGTPDDATLLLNKEGKLDSIENASLTSFNAVAEKIEAYFLDQTGDDSTRAFPSVEEAQPLVAGAEDAFGNPITYKLLSRDQYQLVSAGADGENDTQWDETLTGTVDRANTSDTVNTDAPTFNWLERQKIAIESEGDPNKAETVKSKLISERGGGDETKLSRDYAIGGRTLLEGAAYFWFWTTCIFVTAILFVPVGYLYKEKTYIQDEEDAEHEAEALADEAIST

SEQ ID NO: 12327 - protein, 371 aa, Medicago truncatula
MLFHSKSTLFLFIFFSYSFLLFQANATRSLSNNVKEFEVKVDSFIQFKEAPEYRNMQKCKVVDRKIDIDQYVCDPSLVHISMTIDWDYLRGSMAAIHSVLKHTSCPKNLFFHFIASDSRLENKDEFTRIVHGSFPSLKFKVYVFNESLVENLISPSIRQALENPLNYARSYLADLLEECVERVIYLDSDVIVVDDIQDLWKVSLTDSKVIGAPEYCHANFTRYFSYEFWSSYEFSEVFKGRKNRPCYFNTGVMVMDLMKWREGEYTKKIEKWMEIQKERKVYKLGSLPPFLMVFGGDVEAIEHRWNQHGLGGDNVVDSCRSLHPGPVSLLHWSGKGKPWRRLDAMRPCSVDFLWKPYDLYMPHVGYGHSLI

SEQ ID NO: 12328 - protein, 181 aa, Prochlorococcus marinus str. MIT 9312
MQSDSREPQLNANLNLIVVLLIVFVIVSLVLFRNLFFQSTYLLKSFGELSVEPEIAFKNKKPTFLEFYAEWCEVCKEMAPKVSALKDEYEKDINFVFLNVDNQKWENYIRKFEVNGIPQVNLFDREGNLKSTFIGKQEEITIRESLASLKGETKSHEEIHSAEFSVIKQKKNYQGNPRSHG

SEQ ID NO: 12329 - protein, 523 aa, Saprolegnia parasitica
MKCNALAMALAATLLSAHGADASYEAKFLSWMKKFAVKLNPLEWVHRFEVFILNDQRIEAHNKDASSSFTMGHNEYSHLTFDEFKKLRTGLRVSPSYIQSRAKYALMAPAVNMTDVPNEMDWVEQGGVTPVKNQGMCGSCWAFSTTGAIEGAAFVSSKQLVSVSEQELVDCDHNGDMGCNGGLMDNAFKWVKTHKGLCKEEDYPYHAKEGTCALKKCKPVTKVTAFHDVPANDEQALKAAVAKQPVSVAIEADQPEFQFYKSGVFDKSCGTKLDHGVLVVGYGEEGGKKYWKVKNSWGADWGDKGYIKLAREFGPETGQCGVAMVPSYPTASIIGADNHEDDDSSDDVAVPVAHHAPAADAWLLEKSSGVTIVQCGDVTSQLATFSDLSVSPKVPKRGKPIHFVGNGNVKQAFDSAHMTIAVKLGGQLLYSHFGNMCGHTHIPLPLGIGHIDVDGFACPVKEGSFKDIKLSLNLPVIAPEGNYEINLTSEDATSKASVFCVQVKMDLSDNAAANVYQRFSALG

SEQ ID NO: 12330 - protein, 322 aa, Wolbachia endosymbiont of Asobara tabida
LCDKKIQLGINLTKGLGAGALPDVGKGAAEESVDEIMEHIKDSHMLFITAGMGGGTGTGAAPVIAKAAREARAAVKDRAPKEKKILTVGVVTKPFGFEGVRRMRIAELGLEELQKYVDTLIVIPNQNLFRIANEKTTFSDAFKLADNVLHIGIRGVTDLMVMPGLINLDFADIETVMSEMGKAMIGTGEAEGDDRAISAAEAAISNPLLDNVSMKGAQGILINITGGGDMTLFEVDAAANRVREEVDENANIIFGATFDQAMEGRVRVSVLATGIDGRNNKSETSPISQSEDSEKEKFKWPYSQSESTQDKTLETKPAEQVS

SEQ ID NO: 12331 - protein, 488 aa, Shigella flexneri 2a str. 301
MKKVNHWINGKNVAGNDYFQTTNPATGEVLADVASGGEAEINQAVAAAKEAFPKWADLPMKERARLMRRLGDLIDQNVPEIAAMETADTGLPIHQTKNVLIPRASHNFEFFAEVCQQMNGKTYPVDDKMLNYTLVQPVGVCALASPWNVPFMTATWKVAPCLALGNTAVLKMSELSPLTADRLGELALEAGIPAGVLNVVQGYGATAGDALVRHHDVRAVSFTGGTATGRNIMKNAGLKKYSMELGGKSPVLIFEDADIERALDAALFTIFSINGERCTAGSRIFIQQSIYPEFVKRFAERANRLRVGDPNDPNTQVRALISQQHWEKVSGYIRLGIEEGATLLAGGPDKPSDLPAHLKGGNFLRPTVLADVDNRMRVAQEEIFGPVACLLPFKDEAEGLRLANDVEYGLASYIWTQDVSKVLRLARGIEAGMVFVNTQNVRDLRQPFGGVKASGTGREGGEYSFEVFAEMKNVCISMGDHPIPKWGV

SEQ ID NO: 12332 - protein, 525 aa, Brassica rapa subsp. pekinensis
  misc_feature (6)..(6): Xaa can be any naturally occurring amino acid
MPLTEXIYNHLSLFDLSLALLGLFVFCCLREKLTNKHGPMLWPVFGITLEFFIHKNDVYAWVTKSLKKSRNTFLYRGFWLDGSHGAVTCSPANVEYMLKTNFKNFPKGTFFKDRFKDLLEEGIFNADDESWKEQRRVIITEMHSTRFMEHSFQTTQRLVRKKLLKVMESFARSQEAFDLQDVLLRLTFDIICIAGLGDDPETPAQDLPQVPFAKAFDEATESTLFRFMIPPFIWKPMRFLDIGYEKGLRKAIDVVHGFVNKMIMDRICMVNDDETLDNRSVLTRIIQIESHKKGNEIGPSTIRFFRQFCTSFILAGRDTSSVAISWFFWVIQRHPQVENKIIQEIREILKQRGDPSDSSLFTVRELNNMVYLQAAISETLRLYPPIPMEMKQAIEDDMFPDGTFIKKGSRVYFSIYAMGRMESVWGKDCEDFGPERWIHAGKFVSGDQSKYVVFNAGPRLCLGKTFAYLQMKMIAASVLLRYSIKVAQDHVVVPRVTTNLYMKYGLKVTITPRSLEEKILESFHM

SEQ ID NO: 12333 - protein, 322 aa, Wolbachia endosymbiont of Asobara tabida
LCDKKIQLGINLTKGLGAGALPDVGKGAAEESIDEIMEHIKDSHMLFITAGMGGGTGTGAAPVIAKAAREARAAVKDRAPKEKKILTVGVVTKPFGFEGVRRMRIAELGLEELQKYVDTLIVIPNQNLFRIANEKTTFSDAFKLADNVLHIGIRGVTDLMVMPGLINLDFADIETVMSEMGKAMIGTGEAEGEDRAISAAEAAISNLLLDNVSMKGAQGILINITGGGDMTLFEVDAAANRVREEVDENANIIFGATFDQAMEGRVRVSVLATGIDGRNNKSETSPISQSEDSEKEKFKWPYSQSESTQDKTLETKPAEQVS

SEQ ID NO: 12334 - protein, 363 aa, Geobacter metallireducens GS-15
MKRKIGILTGGGDCPGLNAVIRGVVKSAIIGRGWEVVGIEDGFDGLLYDRTPRPLGLEDVRGILPRGGTILGTSNRGNPFSYPIEVNGKTVLTDVSDRVVERVKDLGIDAIVAVGGDGSLKIALELMKRGVPVVGVPKTIDNDLMETDVTFGYNTALETATDALDKLHSTAESHHRIMIMEVMGRYAGWIALESGISGGADVILIPEIPFELKAVCNAIEGRRRRGSKFSIVVAAEGAFPRGGTRVVQKKADETMAIERLGGIGNFVAHELTSCLDMDIRVTVLGHLQRGGSPSTFDRCLGSRFGIGAVELIEREQYGEMICLKGRAIRSVPIEKAVRKLKLVDPRGQMVTAAKELGINVGRE

SEQ ID NO: 12335 - protein, 116 aa, Brassica napus
FEVEDRENIGGSAYGGQRAVCCTSDLAKLGVCSHGEIIHHPSSKDSSWPQVFGVSFVENDLSATLLTRSIQITRTGMYNLYFIHCDPALKDLVVEGKTIWKNPGGYLPGRMAPLMY

SEQ ID NO: 12336 - protein, 482 aa, Polaromonas sp. JS666
MNNFNNLINGQWLAGNSTSANRNPSNLADVIGEYAQADAAGLDAAVQAAQAAFPAWSTSGIQARSDALDRIGTEILARREELGTLLSREEGKTKPEGIGEATRAGQIFKFFAGECLRLSGETVPSVRPGIGVEITREPVGVVGLITPWNFPIAIPAWKVAPALAFGNCVVLKPADLVPGSAWALAEIISRSGIPAGVFNLVMGPGRVIGDALVNHPGINAISFTGSVGVGSRIAEACAKNLKKVQLEMGGKNPQVILDDADLTQAVELSAQSAFYSTGQRCTASSRLIVTDGIYPAFVKALQERMTRIKVGDALTTGTDMGPVSSQAQLEQDLSYIAIGKAEGATLAFGGNRVPCHTGSGAEGYFMAPALFSESTAGMRINREEIFGPVASIIRVKDYEAALAAANDTPFGLSAGIATTSLKYATHFKRHSQAGMVMVNLPTAGVDYHVPFGGRKGSSYGPREQGRYAQEFFTTVKTAYTLA

SEQ ID NO: 12337 - protein, 322 aa, Wolbachia endosymbiont of Asobara tabida
LCDKKIQLGINLTKGLGAGALPDVGKGAAEESIDEIMEHIKDSHMLFITAGMGGGTGTGAAPVIAKAAREARAAVKDRAPKEKKILTVGVVTKPFGFEGVRRMRIAELGLEELQKYVDTLIVIPNQNLSRIANEKTTFSDAFKLADNVLHIGIRGVTDLMVMPGLINLDFADIETVMSEMGKAMIGTGEAEGEDRAISAAEAAISNPLLDNVSMKGAQGILINITGGGDMTLFEVDAAANRVREEVDENANIIFGATFDQAMEGRVRVSVLATGIDGRNNKSETSPISQSEDSEKEKFKWPYSQSESTQDKTLETKPAEQVS

SEQ ID NO: 12338 - protein, 428 aa, Streptomyces coelicolor A3(2)
MSPRHAAGPAPGERAAVVTGLGLTTSLGGDVPSTWRALLDGGCGVERVDFGEPAGPAQVYLAAPAAVDPGTVLSSAKAAHCDRSAQFALVAAREAVRDAGFPDPSALAGDGSRVAVVVGVGLGGLTSVLEQDHRLRTQGAGRVSPRTIPVMLPNHAAAEVGLMVGAKAGVHAPVSACAAGAEALAQALGMIRDGRADIVVAGGTEAALHPLVLAGFARLRALSRRHDDPKGASRPFDADRDGFVMGEGAGMLVVESAAHAAARGARVHGRLTGAGITNDSHHVAQPAPGGPGCAAAVDAALRDAGLVPEQIQHVNAHATATPLGDLGEAQALHSVFAKGVDDVTVSATKGAFGHTLGAAGAIEAVLTVLALRDRTAPPACSLERVDPEIGLNVVGRDPATLPCGPLAAVSTSMGFGGHNVALAFADAS

SEQ ID NO: 12339 - protein, 323 aa, Sulfolobus solfataricus P2
MSLLPRTTSVKPGEKFDVIIVGLGPAAYGAALYSARYMLKTLVIGETPGGQLTEAGIVDDYLGLIEIQASDMIKVFNKHIEKYEVPVLLDIVEKIENRGDEFVVKTKRKGEFKADSVILGIGVKRRKLGVPGEQEFAGRGISYCSVCDAPLFKNRVVAVIGGGDSALEGAEILSSYSTKVYLIHRRDTFKAQPIYVETVKKKPNVEFVLNSVVKEIKGDKVVKQVVVENLKTGEIKELNVNGVFIEIGFDPPTDFAKSNGIETDTNGYIKVDEWMRTSVPGVFAAGDCTSAWLGFRQVITAVAQGAVAATSAYRYVTEKKGKK

SEQ ID NO: 12340 - protein, 133 aa, Arabidopsis thaliana
  misc_feature (108)..(108): Xaa can be any naturally occurring amino acid
RPKEEEIQHDEVTAYSLLSSTAVVTCAGQATMVAPLTGLNSSGSFPATRKAHNDITYITSNRRRVSCMKVRPPIGKKKGETLSYLPDLSGVESAKVVDYLLRNKWIPXVEFESEHGFVYREHRNTTRFYDGRY

SEQ ID NO: 12341 - protein, 125 aa, Triticum aestivum
NKFVQKSRLVPVRNSRDIVDPRVRVAAMLLAVTEAAVSCGQVSSGLSPCISYARGNGASPSAACCSGVRSLASSARSTADKQAACKCIKSAAAGLNAGKAAGIPTKCGVSVPYAISSSVDCSKIR

SEQ ID NO: 12342 - protein, 314 aa, Pyrus pyrifolia
MATFPVVDLSLVNGEERVATLEKINDACENWGFFELVNHGISTELLDTVEKMTKDHYKKTMEQRFKEMVAAKGLDAVQSEIHDLDWESTFFLRHLPSSNISEVPDLEEDYRKTMKEFAVELEKLAEKLLDLLCENLGLEKGYLKKVFYGSKGPNFGTKVSNYPPCPKPDLIKGLRAHSDAGGIILLFQDDKVSGLQLLKDGEWVDVPPMHHSIVINLGDQIEVITNGKYKSVMHRVIAQSDGTRMSIASFYNPGDDAFISPAPAVLEKKTEDAPTYPKFVFDDYMKLYSGLKFQAKEPRFEAMKAKESTPVATT

SEQ ID NO: 12343 - protein, 354 aa, Erythrobacter sp. NAP1
MKIAILPGDGIGPEVTREAVKVLEAVNLPGLTLFEGDVGGIAYKRHGHPLPPETLTIAKSCDAVLFGAVGDPDCDRLDRHLRPEQAILGLRKELDLFANLRPAKVYEGLEHLSPLKPEIAGQLDMMIVRELTGDVYFGDKGERVAIDGTREGWDMMSYSETEVSRIARVAFRTARAGDDKYRVTSVDKANVLETSQVWRDTVNAAAGAHPDIELSHMYVDNAAMQIISNPGSFGVILTGNLFGDILSDLASAAVGSIGLLASASMGERRTDHGIFGLYEPIHGSAPDIAGRGIANPMATILSAAMMLRHSFGLDSEAARIEAAVEKALADGFLGGDLGGEHGTEAIGAAVRERL

SEQ ID NO: 12344 - protein, 307 aa, Zea mays
  misc_feature (105)..(105): Xaa can be any naturally occurring amino acid
MAFLNMEQQTWAFTFGILGNIVSLMVFLSPLPTFYRVYRNKSTEGFQSTPYVVTLFSCMLWILYALLKPGAELLVTINGVGCVVETVYLAMYLVYAPKAARVLAXKMLLGLNVAVFGLVALVTMLLSDAGLRVHVLGWICVSVSLSVFAAPLSIMRQVIRTKSVEFMPISLSFFLVLSAVVWFAYGALKKDVFVAFPNVLGFVFGLAQMALYMAYSRNRKPAAALVILPEQSKEEAAEGKASCGGAEVHPIDIAEVHDLQAVVVDVDVEPVTYAAASGMVDGSVGRPRAPEQLVIKPDMVTVIAAEA

SEQ ID NO: 12345 - protein, 419 aa, Yarrowia lipolytica CLIB122
MDEEEHKDHQEEEDPHHFAFSDNYSEAVLGGEISATVFDVTGKVVHVAHKMTKYEFLLEHGLYPRDLRNIDPSPVSIIPSILARGRKGAGRCILVNLLHIKALILHDKVLIFDTHSKNKSDTHRLGMFLYELENKLKPTINPEKMHTDMTVLPFELRVLEAILVNVMTTLDGELQVHLKTLNEILVGLEDHVDREQLKELLIGNKNVSRFYQKAVLIRDVLEELLESDDDLQQLYLGTHPKEGLAEVELLIESYCKQADEIVQQASNVRSHIRSTEEIVNIIVDANRNALMLLELKVTIVTVGFAVGAFVAALYGMNLENFIEETNEGMVLVVGVACLGGLLVTWFNLTKLHKTQKIAMFSNAATHTASKPYMLQWIIGLLRRKRTKSRFDNIDMSRPKMKGKKSNILHQLTKMTGKRR

SEQ ID NO: 12346 - protein, 600 aa, Synechococcus sp. WH 8102
MALLVQKFGGTSVGSVERIQAVAERISRSREEGHDVVVVVSAMGHTTDELTGLAAAITDTPQQREMDMLLASGEQVSIALLAMALNQQGVAAVSMTGPQVGIVTESTHGRARILEIRTDRIRGHLADGRVVVVAGFQGTSSGIGGVAEITTLGRGGSDTSAVALAAALNADACEIYTDVPGVLSTDPRKVADAQLMDEISCDEMLELASLGASVLHPRAVEIARNYGVLMVVRSSWSEAPGTRLTSRRGRPLNQTGLELGSPVDGVEQMDHQAVIALSHIPDQPGIAARLFETLSGAGINVDLIIQSTHEGSSNDITFTVAEADLEAARSVSQTVLDSLGGELAAEGGMTKLSISGAGIMGRPGIAAGLFHCLSQQGINLRLIATSEVKVSCVIDADSGRKALQAVQEAFDVADAQVELNPDLSISDVPEVRGVALDRDQAQLSVRHVPDRPGTAAALCSALAERGISLDAIVQSERQHTDGSRDISFILRKEDRSRADVALAPLLAQWPGAALEEGESIARVSAVGAGMPATPGTAGRMFRALADAGINIALIATSEIRTSCVVAEQDGVAALQAVHAGFGLGGQEQHTAQGSASPLDS

SEQ ID NO: 12347 - protein, 674 aa, Mesorhizobium loti MAFF303099
MATKEKEEVETEREGATDGPLLDLSDDAVKKMIKAAKKRGYVTMDELNSVLPSEEVTSEQIEDTMAMLSDMGINVVEDDEQGEEAEAGDTAADAEEDANELAEQTGTAVAATTTKKEPTDRTDDPVRMYLREMGSVELLSREGEIAIAKRIEAGRETMIAGLCESPLTFQAIIIWRDELNESKILLREIIDLEATYAGPEAKQAPVVERIEEAPKAEEKPRRGRDDEDDVTNVGADTRGIGDDDEEDEDEASLSLAAMEAELRPQVMETLDVIADTYKKLRKLQDQQVENRLAAAGTLSPSQDRRLKELKDQLIKAVKSLSLNTARIEALVEQLYDINKRLVQNEGKLLRLAESYGVRREEFLKEYQGSELDPNWTRAIGNLTSRGWKEFTKNEKDAIKDLRAEIQHLATETAISILEFRKIVNQVQKGEREAAIAKKEMVEANLRLVISIAKKYTNRGLQFLDLIQEGNIGLMKAVDKFEYRRGYKFSTYATWWIRQAITRSIADQARTIRIPVHMIETINKIVRTSRQMLHEIGREPTPEELAEKLAMPLEKVRKVLKIAKEPISLETPVGDEEDSHLGDFIEDKMAILPIDAAIQANLRETTTRVLASLTPREERVLRMRFGIGMNTDHTLEEVGQQFSVTRERIRQIEAKALRKLKHPSRSRKLRSFLDS

SEQ ID NO: 12348 - protein, 540 aa, Synechococcus sp. WH 8102
MAKDPGRVLIFDTTLRDGEQSPGASLNLEEKLAIAQQLARLGVDVIEAGFPFASAGDFAAVQRIAQQVGGENGPIICGLARASQRDIKACAEAVSPAPRRRIHTFIATSDIHLEHKLRKSRADVLGIVPEMVSYARSLMDDIEFSCEDAGRSDPEFLYEVIEAAIAAGATTINIPDTVGYTTPSEFGDLIAGINRYVPNIGEAVLSVHGHNDLGLAVANFLEAVKNGARQLECTINGIGERAGNASLEELVMALHVRRRYFNPFFGRDQDSPTPLSAVRTEELTKTSRLVSNLTGMVVQPNKAIVGANAFAHESGIHQDGVLKNRLTYEIIDAKTVGLSDNRISLGKLSGRSAVRARLEELGYDLTREDLDEAFARFKDLADRKREITDRDLEAIVSEQVQQPEARYQLQLVQVSCGTRLKPTATVALSEENGPDQTVSAVGTGPVDAVCRALNQLAGVPNELIEFSVKSVTEGIDAMGEVTIRLRRDGSLYSGHAADTDVVVAAAMAFINALNRLVAAQEHQPLHPQRDAVVLDARPTL

SEQ ID NO: 12349 - protein, 159 aa, Brassica napus
MSDEEHHFESSDAGASKTYPQQAGNIRKGGHIVIKGRPCKVVEVSTSKTGKHGHAKCHFVAIDIFTAKKLEDIVPSSHNCDVPHVNRIDYQLIDISEDGFVSLLTDSGGTKDDLKLPTDDNLSALMKSGFEEGKDVVVSVMSSMGEEQICAVKEVGGGK

SEQ ID NO: 12350 - protein, 1206 aa, Oryza sativa (japonica cultivar-group)
MALLPIRARLSALDDDDDDAATVSSSRSSSAATSPSRSPSPLVPRASVLGAPRVAAQLSSTEDDNGGGEDEVFDESTDYGDDEAAGEVLDELSNGFFRIARVPPPSEDSSPISGGEPVVSVSSPTESGYFGAAEGSLKEEGFVGARNFADVFDAGSRVGFEDANGVTAGAKNTGVESSLEGSFQSSGSVVGVFDDTDVTTIGDLVSASDGSPLNVDKQGDQDSGAEVVNDEPVDAEVVNGIEPEPLVGESVDAEVVNGVVPEPLVGESGGSDGGGMHVEDELEMEGGKSDNGIAELPPVVSALEKQDTDLELRNDDSGAKDGADNHEDATNFVDSSTGYVATGDGASELLEVPANVDDLHFVTDDGHNDDAEETDGGYEASDGYVSMPTFGNNNAVEIPVNESEHNVPASKGRRFGLGDSDDEFHDDDVEEEEGEVNGKEIEFFDYAALAELLRAATPGQGMAKVFPIESSVPLQVPPTTVSVPRKNVASSPVLEVAPNPDNEMTEEERKLYRKVDVARIKYLRLIHRLGYDTEHHIAIQVLYRLSLVEGFRRIKVANHSSELESAWKKALQLEAEGTEDLEFSCNVLVLGKTGVGKSATINSIFGEDKSKTSAFLPATTAVKEISGVVGGVKFRVVDTPGLGTTHMDEKSNRKVLNSVKKYIKRCPPDVVLYVDRIDTQRQDANNLSLLQCITSVLGSSIWSKTIITLTHSAAAPPEGPSGIPLNYEMFVTQRTHAIQQSIRQATNDPRFENTSALVENHHLCRRNTEGEKVLPNGLIWRRLLLLLCYSVKTVETNSLSARVASPANLFSLRFRMPPLPHFLSSLLQSREHPRCAADQDVGDIDPDELINEDEEDDYDQLPPFKPLSKSQVAKLSKEQQKLYFDEYDYRTKLLEKKQLKEQLRRLKEMKIEGNNHDVLGDNDNPDDEYETERSVMPDWALPSSFDSDDPAYRYRCLDPKPNFLVRAITNPDGWDHDCGFDGVSLQYSLDAANAFPASLWVQVNKDKRESTIHLVSSISAKHRENVSSLAGFDIQTIMDQLAYTLRGESKFKNSKKNTTTGGLSMTFLGDTMVTGAKFEDKLSVGDRLTLLANTGAVSIRGDTAYGVNMEATLREKDYLMGQDLAILGASLVRWHKEWSMAAKLDSQFSMGRASNVAVHVDLTNKLTGRVSIKANTSEQLKIALLGVCSMTMYLWNRMHPFIDRNY

SEQ ID NO: 12351 - protein, 538 aa, Zea mays
MAPPPASPADSAPDPRPTASAPVPITVPSPRDHAHHHHLVDRRDTPRGRAWEPERNRRGEAMDGAAAVKLVPGEAGYVLEDVPHVSDYLPDLPTYSNPLQDNPAYSVVKQYFVNPDDTVCQKIVVHKDGPRGNHFRRAGPRQKVYFEPDEVHACIVTCGGLCPGLNTVIREIVCGLSDMYGVTKILGIQGGYRGFYARNTITLTPKSVNDIHKRGGTILGSSRGGHDTVKIVDSIQDRDINQVYVIGGDGTQRGAGVIFEEVRRRGLKVSVAGIPKTIDNDIPVIDKSFGFDTAVEEAQRAINAAHVEAVSAENGIGLVKLMGRHSGFIAHYATLASRDVDCCLIPESPFYLEGEGGLFRYIEKRLKDNGHMVIVVAEGAGQKLIAETMQSIGKDASGNELLLDVGLWLSQKINEHFKKNKMTINLKYIDPTYMIRAIPSNASDNVYCTLLAHSVVHGAMAGYTGFTIGQVNGRHCYIPFYRITEKQNRVSITDRMWARLLSSTNQPSFLCNKVVEEAKKEHERATRLLDGSPSHRKG

SEQ ID NO: 12352 - protein, 205 aa, Cytophaga hutchinsonii
MYTKKNKQFVLMGLTYSLMMFVSSCLGINSDVKNRPSATDSMATVDKTQSIYSIKVTTLDGQPFDLSTLKGKKILIVNTASKCGYTPQYEELQQLHALHGDSVAVLGFPCNDFGGQESGSESEIGAFCTKNYGVTFQMFEKVHIKGNEQHPLYKWLTDPALNGWNKDAPTWNFCKYLINEKGELVNFFGSGVKPMSKTVLDAIRK

SEQ ID NO: 12353 - protein, 291 aa, Xylella fastidiosa Ann-1
MLAATDLARILDGRRIADDLLDALKTRVDARVAAGKLPPTLAVVLVGSDPASVVYVRNKRRAAEKVGIKAYDFDLPEATTEAELAALIDRLNADPKIHGILIQLPLPGIPDAHRLIQRVDPRKDVDGFHPQNVGHLALREFGLRPCTPRGIVTLLGHTDRPVRGRNATIVGVSNHVGRPMGLELLMAGCTVTSCHKFTPPQMLEAAVRQADILIVAVGRPGVIPGEWVKLGAVVIDVGINRLDDGQLVGDVGFESAVKRASWITPVPGGVGPMTVATLMQNTLEAAEAADC

SEQ ID NO: 12354 - protein, 108 aa, Nostoc sp. PCC 7120
MPTDTVAYVQENEFDTVLSEDKVVVVDFTATWCGPCRLVSPLMDQLADEYKGRVKVVKVDVDNNKPLFKRFGLRSIPAVLIFKDGELTEKIVGVSPYEQFSGAVEKLI

SEQ ID NO: 12355 - protein, 482 aa, Legionella pneumophila str. Paris
MAKSSEQLNSLLDREYQHGFITDIEVETFPPGLDEDVIRRLSAIKGEPEFLLEWRLKAFRHWLTMPHPEWSSVHYPPIDYQSVSYYSAPKSKKDAPKSLDEVDPELLKTYEKLGIPLREQEMLAGVAVDAVFDSVSVATTFKAKLAEKGVIFCPLSEAVHQYPDLVKKYLGSVVPYRDNFYAALNSAVFSDGSFVYVPNGVRCPMELSTYFRINAASTGQFERTLIIADVDSYVSYLEGCTAPMRDENQLHAAVVELIALDGAQIKYSTVQNWYPGDKEGKGGIYNFVTKRGACRGKKSKISWTQIETGSAITWKYPSVILQGDDSVGEFYSVALTNNFQQADTGTKMIHLGKNTRSTIISKGISAGHAHNAYRGLVRIAPTATNARNYTQCDSMLMGSQCSAHTFPYIEVKNPTAQVEHEATTSKISEEQLFYCQQRGIDTEDAVSMIVNGFCKQVLKELPMEFAVEATKLLGISLEGAVG

SEQ ID NO: 12356 - protein, 130 aa, Arabidopsis thaliana
  misc_feature (29)..(29): Xaa can be any naturally occurring amino acid
  misc_feature (54)..(54): Xaa can be any naturally occurring amino acid
  misc_feature (68)..(68): Xaa can be any naturally occurring amino acid
  misc_feature (111)..(111): Xaa can be any naturally occurring amino acid
RVQKGSSMHSSATMVASPAHAIMVAHFNXLKSSAAFTSTRIANNNITSIRSNGXRVNCIQVWPPIWKXRTFLTHSYLRDIEESKMDMEFDDLNRLKFIPCVEIYLQHRFLXRDHGKSPRYYHGLYSIMLN

SEQ ID NO: 12357 - protein, 338 aa, Ralstonia eutropha JMP134
MARKLSIKLAINEAIDQEMTRDPSVIMLGEDIVGGAGADGEKDAWGGVLGVTKGLYAKHGDRLLDTPLSESAYVGAAIGAAACGMRPIAELMFIDFMGVCFDQIFNQAAKFRYMFGGKAETPVVIRAMVGAGFRAAAQHSQMLTPLFTHIPGLKVVCPSTPYDTKGLLIQAIRDNDPVIFCEHKNLYGLEGDVPEGAYTIPFGEANIARDGKDVTIVAYGLMVHRALDAAATLAKEGIEAEVIDLRTLSPLDMDTVLESVENTGRLVVVDEASPRCNIATDISAQVAQQAFGALKAGIEMVCPPHTPVPFSPTLEDLYIPSAAHVVEAVRKTMKGGKH

SEQ ID NO: 12358 - protein, 322 aa, Wolbachia endosymbiont of Asobara tabida
LCDKKIQLGINLTKGLGAGALPDVGKGAAEESIDEIMEHIKDSHMLFITAGMGGGTGTGAAPVIAKAAREARAAVKDRAPKEKKILTVGVVTKPFGFEGVRRMRIAELGLEELQKYVDTLIVIPNQNLFRIANEKTTFSDAFKLADNVLHIGIRGVTDLMVMPGLINLDFADIETVMSEMGKAMIGTGEAEGEDRAISAAEAAISNPLLDNVSMKGAQGILINITGGGDMTLFEVDAAANRVREEVDENANIIFGATFDQAMEGRVRVSVLATGIDGRNNKSETSPIGQSEDSEKEKFKWPYSQSESTQDKTLETKPAEQVS

SEQ ID NO: 12359 - protein, 388 aa, Arabidopsis thaliana
MMISDLPHDLESEILSRVPAKSLAKWKTTCKRWYALFRDPSFVKKNFDKAGGREMIVLMNSRVYSNSVNLQGINNRFDPSMEVTGKLIKLNDSKGVDISAIFHCDGLILCTTTESTGLVVWNPCTGEIRCIKPRIFYRCNDRYALGYGNSKSSCHSYKILRSCCYYVDQNLSLMAAEFEIYDFSTDSWRDLGDITRDMIVYSSGVSLKGNTYWVSGSKEKGFFMRYFDFSKEVFGRLPLPYQSFNANHTAALSAVGNEKIAVLQQKILAMSDEMRIWVTNKIDEAKDLSWSNFLLTVDYGKFNLPCLVNVTSFLLDEENKVAVCSDVDTKDGLRSRIYIVGKDFYKEVFKDTRGSDNNWPLLLCYVPSLVSIQENIPNKAEENEIKGG

SEQ ID NO: 12360 - protein, 954 aa, Kineococcus radiotolerans SRS30216
MSTSTSTSGGTGGSTGGTRAAVPEQPRASQDVLTVDGVSSDEGHAALRASVRRLGELLGASLTRHEGAELLDLVERVRALAREADDGAELARLLSGVDDRTAIVLARAFTAYFQLANASEQLHRGLELSKQPGGGLSATLGRVREALESGDLDRDTAQQILGRLQLRPVFTAHPTESSRRSILDLLLRITGIVEASEDPAQRATDAERGQRRLAELVDLLWQTDELRVLRPRPADEARSALHYLRNLTSTVLPDLLEDLAVGLDELGLDLPVDAQPLRFGSWVGGDRDGNPNVTPEVTMEVLGLQHDAALDVLTAVTRDLLTELAASTQVVGFSPELLASLAADAEALPEVHAARVHLNGEEPYRFKLSYVLARLEGTRTRLHTGAEHVPGRDYAGVGEFTADLLLIQDSLRRNDGQMVADGAVARALRVVRAVGFGLATLDVREHAGRHHEALAAIYDRLGELITPYAALDRSARTKLLSKEMTGHRPLIGAAVRTLTGTPAQVVQLFTTIRTALDRFGEETIETYIVSMTQGIDDLFAVVVLAREVGLVDLAETPGANDVARIGFAPLFETVTELEAAEELLEGLLSDPSYRRVVAARGDVQEIMLGYSDSSKDAGIAASRWQIHRAQRALRDVAARHGVTLRLFHGRGGSVGRGGGPTGEAILAQPYGTLDGPIKVTEQGEVISDKYVQPRLARHNLEVALSAALEASTLHRTSLQPGEVLDGWDTTMGLVAAKGQEAYRALVGDPGLVPFFLAATPVEELGNLNIGSRPSRRPGGTGGLEDLRAIPWVFGWTQSRINVPGWFGVGSGLRAAREAGRGEDLRAMFAGWSFFRSFVSNVQMTLAKTDLGIAAHYVEELVAPDQRGAFDVIRAEHARTLEEVLLLTEQDELLQSAPVLRRTLELRDAYLAPLHALQVSLLGRARASGDAVDPALRRALLLTINGIAAGMRNTG

SEQ ID NO: 12361 - protein, 483 aa, Burkholderia vietnamiensis G4
MSSGVRHDYAPLRLYIDGRFHDADGRRTQPVVDPGTTRVLGELPHATAHDIDAAVQAAHRAFVTWRHESPLVRSDLLRRAAALARERAETIGRHITMDQGKPLREAIAEVVSAAEQLEWHAEEGRRTYGRVVPARSPDVMQTVLREPIGVCAAFSPWNFPFSQAMHKIAAALASGCTLVLKGPEESPSAIVALAQLFHDAGLPPGCLNIVWGVPGDVSKQLIEAPQVRKISFTGSVPVGKQLAALAASLMKRMTMELGGHAPVLVCADADVERAAAMLAAYKFRNAGQVCVSPTRFFVQRAAFDRFVCAYLDAVGTIRVGYGLDAGVTMGPLAHARRVDEIDAFVADATAKGAQIATGGMRLPGPGHYFAPTVVLGPTRDTRLMNDEPFGPIVGIVPFDDLDDALAEANRLPFGLASYAFTTSARNAHRISRALEAGMVNINHFGMGPAEIPFGGVKDSGFGSEGGMEAFDGYLVTKFVTQMN

SEQ ID NO: 12362 - protein, 109 aa, Geobacter sulfurreducens PCA
MASDKVLTFSDDTFDSEVLKSPVPVLVDFWATWCAPCKAIAPVIDAIADEFDGKVKVGKVNVDDNPGTPGKYGVRGIPTVILFKEGKVVDQVVGAVPKAQLEALIKKAL

SEQ ID NO: 12363 - protein, 322 aa, Wolbachia endosymbiont of Asobara tabida
LCDKKIQLGINLTKGLGAGALPDVGKGAAEESIDEIMEHIKDSHMLFITAGMGGGTGTGAAPVIAKAAREARAAVKDRAPKEKKILTVGVVTKPFGFEGVRRMRIAELGLEELQKYVDTLIVIPNQNLFRIANEKTTFSDAFKLADNVLHIGIRGVTDLMVMPGLINLDFADIETVMSEMGKAMIGTGEAEGEDRAISAAEAAISNPLLDNVSMKGAQGILINITGGGDMTLFEVDAAANRVREEVDENANIIFGATFDQAMEGRVRVSVLATGIDGRNNKSETSPISQSEDSEKEKFKWPYSQSESTQDKTLETKPAEQVS

SEQ ID NO: 12364 - protein, 308 aa, Zymomonas mobilis subsp. mobilis ZM4
MRRPQTFTGQEKKQMSILANATTKVITQGITGQQGSHHTAQSLAYGTKMVGGVTPGKGGQTHLDLPIFNSVAEAKQKTGADASMIFVPPAFAGDAILEAIDAEIPLIVTVTEGIPILDMVRVKRALTGSKSRLIGPNSPGLLTPDSARIGIMPGAIFKKGSVGIVSRSGTLTYEAVFQTSQLGLGQSTAVGIGGDPVNGTNFIDILDMFLDDDETESIIMIGEIGGSDEENAAEFLKEQARKGRKKPVAGFIAGVSAPPGRHMGHAGAIVSGHSGSAAAKIEAMQSAGIAMTPDPSKIGHTLLNLLKK

SEQ ID NO: 12365 - protein, 322 aa, Wolbachia endosymbiont of Asobara tabida
LCDKKIQLGINLTKGLGAGALPDVGKGAAEESIDEIMEHIKDSHMLFITAGMGGGTGTGAAPVIAKAAREARAAVKDRAPKEKKILTVGVVTKPFGFEGVRCMRIAELGLEELQKYVDTLIVIPNQNLFRIANEKTTFSDAFKLADNVLHIGIRGVTDLMVMPGLINLDFADIETVMSEMGKAMIGTGEAEGEDRAISAAEAAISNPLLDNVSMKGAQGILINITGGGDMTLFEVDAAANRVREEVDENANIIFGATFDQAMEGRVRVSVLATGIDGRNNKSETSPISQSEDSEKEKFKWPYSQSESTQDKTLETKPAEQVS

SEQ ID NO: 12366 - protein, 247 aa, Geobacter metallireducens GS-15
MKKLVLLRHGESVWNRENRFTGWTDVGLSEKGIEEAISAGRTLKEEGFVFDVAYTSVLKRAIKTLWLVLEEMDLMWIPEYRHWRLNERHYGALQGLNKAETAERHGMEQVMIWRRSYDIPPPPLTPDDQRFPGSDPRYASLLPEELPLTESLKDTVARFLPYWHETIAPAVKEGKRVLVTAHGNSLRALVKYLDLVSDSEIVNLNIPTGIPLVYELTDNMTPIRSYYLGDPDDVARASRMVADQIKK

SEQ ID NO: 12367 - protein, 382 aa, Solanum tuberosum
MASEVHSVVDAHSPPRTPTVCVTGAAGFIGSWLVMRLLERGYNVHATVRDPENQKKVKHLLELPKADTNLTLWKADLAVEGSFDEAIKGCQGVFHVATPMDFESKDPENEVIKPTVRGMLSIIESCAKANTVKRLVFTSSAGTLDVQEDQKLFYNETSWSDLDFIYAKKMTGWMYFVSKILAEKAAMEEAKKNNINFISIIPPLAVGPFITPTFPPSLITALSLITGNEDHYGIIKQGQYVHLDDLCEAHIFLYEHPKAEGRFICSSHHAIIYDVAKMVRQKWPEYYVPTELKGIDKDLPIVSFSSKKLMDMGFQFKYTLEDMYKGAIETCRQKQLLPFSTRSTADNGKDKEAIPISTENYSSGKENAPVANCTGKFTNGEI

SEQ ID NO: 12368 - protein, 285 aa, Campylobacter coli RM2228
MTLLDGKALSAKIKQELKEKNKMLKENGVETCLAVILVGNDPASQTYVNSKAKACEECDIKSLVYRLDENTTQNELLALINTLNHDDSVHGILVQLPLPKHISKDLILESIISSKDVDGFHPINVGYLNLGLESGFLPCTPLGVMKLLKAYDINLEGLDSVVIGASNIVGRPMATMLLNAGCTVSICHIKTKDLSAYTQKADLIIVAAGCVNLLRADMVKEGAIIIDVGINRLENGKIVGDVDFEEVSKKASFITPVPGGVGPMTIAMLLENTVKSAKNSLKSGI

SEQ ID NO: 12369 - protein, 487 aa, Prochlorococcus marinus str. MIT 9211
MNSAFCSFCFFMTSALQTPSSRRVERLQEASLLRGPMLLLKSIRGFNSRSSLIWLACVPLALFGLGLFNLSAHAGDFALTTQALADNLWIMVAAVLVIFMNAGFAMVEAGMCRQKNAVNILAKNLIVFTLAVSAYWFIGYKLMYTGSWVIPGVLKLGTPFFNPAPTDPAGLVPSIDFLFQAAFAGTAATIVSGVVAERIKFGEFVVFSLVLTAVIYPIAGSWQWNGDGWLAQLGFYDFAGSSIVHSVGAWAGLIGAIALGPRIGKFVDGRSQALPGHNMAIATLGALILWIGWYGFNGGSVLAFNEAVPYVAVTTTLGAAGGGIAATLLSQLNTGKPDLTMTINGILAGLVSVTAGADGLSLWSSWLVGAIGGLLVVWSVAFVDGLQIDDPVGAVSVHGTCGVWGTLAVGLFYGGKGVFAGGTLSQLLIQAVGAASYAIFTILTCWIAWSIIGGFFGGIRVTEEEELKGLDIGEHGMEAYPDFASAQ

SEQ ID NO: 12370 - protein, 514 aa, Brassica rapa
MAQASRICQNPCVISNLPKSNHRKSPFSVSLKTHQQQRRAYQISSWGLKKSNNGSVIRPVKVMASVSTAEKASEIVLQPIRQISGLIKLPGSKSLSNRILLLAALSEGTTVVDNLLNSDDINYMLDALNKLGLNVERDSENNRAVVEGCGGIFPASLDSKGDIELYLGNAGTAMRPLTAAVTAAGGNASYVLDGVPRMRERPIGELVVGLKQLGADVECTLGTNCPPVRVNANGGLPGGKVKLSGSISSQYLTALLMAAPLALGDVEIEIIDKLISVPYVEMTLKLMERFGVSAEHSDSWDRFFVKGGQKYKSPGNAYVEGDASSASYFLAGAAITGETVTVEGCGTTSLQGDVKFAEVLEKMGCKVSWTENSVTVTGPSRDAFGMRHLRAVDVNMNKMPDVAMTLAVVALFADGPTTIRDVASWRVKETERMIAICTELRKLGATVEEGSDYCVITPPAKVKPAEIDTYDDHRMAMAFSLAACADVPVTIKDPGCTRKTFPDYFQVLESITKH

SEQ ID NO: 12371 - protein, 94 aa, Amaranthus hypochondriacus
AVTCTVVTKALGPCMTYLKGTGATPPPANCCAGVRSLKAAAQTVADRRMACNCMKSAAQKTKSLNYKVAARLASQCGVRMSYSVSPNVNCNSVQ

SEQ ID NO: 12372 - protein, 549 aa, Alkaliphilus metalliredigenes QYMF
MKNKFAKLGISEEIENVLNKSDITEPTPVQLQAIPPLLAQRDVMAQAQTGTGKTLAFILPILERVNVEKPTIQALIITPTRELAIQITAETKKLAEVKGINILAAYGGQDVEQQLRKLKGSIHIIIGTPGRLLDHLRRKTINLGKLSMLVLDEADQMLHMGFLRDVEDIMTHIPKRRQNMFFSATMPNQVRTLAEQYMKDPVQIQVQSKRVTLDEIRQVVIETTDRGKQDLLCQLFDEYNPFMAIIFCRTKRRAIALNEALINLGYNSDELHGDLTQAKREKVMKAFKKSKIQYLVATDVAARGLDIEGVTHIFNYDIPQDGESYIHRIGRTGRAGETGMAITFMTSRDRDELKIIEKVIKMDLDVQKSKSGKIDLDEEEQDTKKSPKGRGNDKSKDFKKGKYGDKKGKPGDKKGRPGDKRDRPTDKKGRPGDKRDRPSDNKGRPGDKRDRPSDNKGRPGDNKGRPGDNKGRPGDNKGRPGDNKGRPGDNKGRPGDNKGRPGDNKGRPGDNKGRPGDNKGRPGDNKESGYKGNKNTRGNQSSSNNKRSR

SEQ ID NO: 12373 - protein, 293 aa, Synechococcus sp. WH 8102
MALRLDGKALAATVERRLTSVVDAHSKTVGQPPGLAVLRVGDDPASAVYVANKEKACARVGIASYGAHLAADTPADQVLSTIQSLNADPRVDGILLQLPLPKGLDERPLLEAIDPEKDADGLHTLNLGRLLKGEPGPRSCTPAGVMALLRSNGIDPAGQRAVVIGRSILVGQPMALMLQAANATVTVAHSRTADLAAHTREADIVVVAAGRPGMVGAEHVRPGAAVVDVGIHRKPEGGLCGDVVAEEVEPIAAALSPVPGGVGPMTVTMLLVNTVVAWCRRHGIDHELDDLIG

SEQ ID NO: 12374 - protein, 109 aa, uncultured Prochlorococcus sp.
SDLDGVTYRVLNTNAQALIQSSATHRVQLGQSLTRGLGAGGNPSIGQKAAEESRADLQQALEGVDLVFIAAGMAGGTGTGAAPVVAQVAKESGALTVGIVTKPLVFEGK

SEQ ID NO: 12375 - protein, 1032 aa, Arabidopsis thaliana
MTDTTDDIAEEISFQSFEDDCKLLGSLFHDVLQREVGNPFMEKVERIRILAQSALNLRMAGIEDTANLLEKQLTSEISKMPLEEALTLARTFTHSLNLMGIADTHHRMHKVHNVTQLARSCDDIFSQLLQSGISPDELYKTVCKQEVEIVLTAHPTQINRRTLQYKHIRIAHLLEYNTRSDLSVEDRETLIEDLVREITSLWQTDELRRQKPTPVDEARAGLNIVEQSLWKAVPQYLRRVSNSLKKFTGKPLPLTCTPMKFGSWMGGDRDGNPNVTAKVTKEVSLLSRWMAIDLYIREVDSLRFELSTDRCSDRFSRLADKILEKDYDRGKSNFQKQQSSSCLPTQLPARAHLPACIDFGESRHTKFEIATTDYMPPNLQKQNEQDFSESDWEKIDNGSRSGLTSRGSFSSTSQLLLQRKLFEESQVGKTSFQKLLEPPPLKRAGSAPYRIVLGEVKEKLVKTRRLLELLIEGLPCEYDPKNSYETSDQLLEPLLLCYESLQSSGARVLADGRLADLIRRVSTFGMVLVKLDLRQEAARHSEALDAITTYLDMGTYSEWDEEKKLEFLTRELKGKRPLVPQCIKVGPDVKEVLDTFRVAAELGSESLGAYVISMASNASDVLAVELLQKDARLALTSEHGKPCPGGTLRVVPLFETVNDLRAAGPSIRKLLSIDWYREHIQKNHNGHQEVMVGYSDSGKDAGRFTAAWELYKAQENVVAACNEFGIKITLFHGRGGSIGRGGGPTYLAIQSQPPGSVMGSLRSTEQGEMVQAKFGIPQTAVRQLEVYTTAVLLATLKPPQPPREEKWRNLMEEISGISCQHYRSTVYENPEFLSYFHEATPQAELGFLNIGSRPTRRKSSSGIGHLRAIPWVFAWTQTRFVLPAWLGVGAGLKGVSEKGHADDLKEMYKEWPFFQSTLELIEMVLAKADIPMTKHYDEQLVSEKRRGLGTELRKELMTTEKYVLVISGHEKLLQDNKSLKKLIDSRLPYLNAMNMLQVEILKRLRRDEDNNKLRDALLITINGIAAGMRNTG

SEQ ID NO: 12376 - protein, 109 aa, uncultured Prochlorococcus sp.
SDLDGVTHRVLNTDAQALIQSSATHRVQLGQSLTRGLGAGGNPSIGQKAAEESRADLQQALEGVDLVFIAAGMGGGTGTGAAPVVAQVAKESGALTVGIVTKPFSFEGK

SEQ ID NO: 12377 - protein, 221 aa, Escherichia coli
MKQYLIAPSILSADFARLGEDTAKALAAGADVVHFDVMDNHYVPNLTIGPMVLKSLRNYGITAPIDVHLMVKPVDRIVPDFAAAGASIITFHPEASEHVDRTLQLIKENGCKAGLVFNPATPLSYLDYVMDKLDVILLMSVNPGFGGQSFIPQTLDKLREVRRRIDESGFDIRLEVDGGVKVNNIGEIAAAGADMFVAGSAILTSQTTKKSLMKCAVNWQR

SEQ ID NO: 12378 - protein, 253 aa, Streptococcus dysgalactiae
GPMPQTREHILLSRQVGVKHLIVFMNKVDLVDDEELLELVEMEIRDLLSEYDFPGDDLPVIQGSALKALEGDSKYEDIIMELMSTVDEYIPEPERDTDKPLLLPVEDVFSITGRGTVASGRIDRGTVRVNDEIEIVGIKEETKKAVVTGVEMFRKQLDEGLAGDNVGILLRGVQRDEIERGQVIAKPGSINPHTKFKGEVYILSKDEGGRHTPFFNNYRPQFYFRTTDVTGSIELPAGTEMVMPGDNVTINVE

SEQ ID NO: 12379 - protein, 254 aa, Thermobifida fusca YX
MADEVLYEAADGVAVITINRPQAKNAVNRAVAEQIAAALDDLDSRKDLTVGILTGAGGTFCAGMDLKAFLAGEVPIIEGRGFGGFAQRPPRKPLIAAVEGYALAGGFEAVLACDLVVAAEDAKFGIPEVKRGLVAAAGGLLRLPQRIPRNIAMEFALTGDFVDAPRAAELGLVNRITPSGKALDGARELAARIAENAPLAVAVSKQVIVESADWSAAERWQRQDELTGPVFTSRDAAEGAAAFAEKRKPVWTGE

SEQ ID NO: 12380 - protein, 107 aa, Synechococcus elongatus PCC 7942
MSAATELNDQQFESAVLKAPGLVLVDFWAPWCGPCRLIAPLMDWAAQTYADQLTVYKLEVDPNPETVARYQVQGIPTLLLFQNGELVERVEGAIGRDRIQTLINAHL

SEQ ID NO: 12381 - protein, 923 aa, Nocardia farcinica IFM 10152
MTEPRIETEQDATRPLRDDIRFLGGVLGDTIRDHEGPEVFDLIERVRIEAFRVRREEVGRSAVAEMLRGVDIAVALPLIRAFSYFVLLANLAEDIQRDRRRAVHVAAGEPPQDSSLAATYRKLDAAALDAAAVADLLSDALVSPVITAHPTETRRRTVFDAQTRITELMRARQRATDPAERAALESRIRRQVLSLWRTALIRLARLRIQDEIAVGLRYYELTLFDVIPAINAEVRAALRARWPGADLLARPILRPGSWIGGDRDGNPYVTAEVVRHAATQAAGVALRRYLAELVELAKTLSLSARLVPVTPRVAELAAAGYPDPATHGDEPYRRALHHIRVRLSATADRVLDAPVPEAVAEPDAQPYAGPREFLDDLDAIDASLRASGDGLLADDRLAALRHAVETFGFHLQGLDMRQNSEVHEQVVAELLAWAGVHPAYGDLPEDARVELLAAELRTRRPLLGPHARLSEQAAKEVGIVRAAKQVVDTFGPEAVPNYIISMCTSVSDMLEAALLLKEGGLLDPGAPEGSPSCTVNIVPLFETIEDLGAGAATLAAALEVPVYRELVAAAGMRQEVMLGYSDSNKDGGYLAANWALYRAELDLVEVARKTGIRLRLFHGRGGTVGRGGGRSYDAILAQPAGAVRGALRLTEQGEVIAAKYAEPGAAHRNLESLIAGTLESTLLDVEGLGADAEPAYELMDELAALARAAYARLVHETPGFVEYFRQSTPVAEVGDLNIGSRPASRKPTNSVSDLRAIPWVMAWSQARVMLPGWYGTGAALEEWVGGDPGRLARLTDLYRRWPFFRTVLSNLAQVMAKSDLDIAARYAELVDDAALRDQIFGMIREEHARTLRMHAAITGHDQLLADNRSLAESIHNRFPYLEPLNQMQVELLRRLRSGDDSELVKRGILLTMNGLATALRNSG

SEQ ID NO: 12382 - protein, 422 aa, Streptomyces griseoruber
MVRDTPRRAVITGIGVTAPGGIGADAFWQRLVSGRPATRTISRFDASGHRCRVAAECDFDPLEQGLTRQQARRTDRVVQLALAAAREALEDSGLTVDGERTGVALGSAVGGTTTMEQEYAVQSAEGRDWLVDPSYAVPHLYDYFVPTSLAAEVALLTGALGPASVISTGCTSGIDSVGYAAEMIREGTADVMVTGASDAPISPITLTCFDVIKATSARNDDPETACRPFDRTRTGLVLGEGASVLVLEEYEHAKRRGARIYGEIAGYASRCNAYHMTGLKADGLEMSEAIDAALDEARLNPVDIDYVNAHGSGTRQNDRHETAAVKRSLGEHAYRTPMSGIKAIVGHSLGAIGSIEIAACALSLRHGVVVPTANLDEPDPECDLDYVPHTARERRLDAVLTVGSGFGGFQSAMVLTAPGRPA

SEQ ID NO: 12383 - protein, 580 aa, Oryza sativa
MASSALICDTEQWKGLQAHVGEIQKTHLRHLMHDVERCKAMTACLLIDSEYEGIYLDYSRQRATGETMEKLFKLAEAAKLKEKIEKMFRGDKINSTENRSVLHVALRAPRDEVINSNGVNVVPEVWGVKDKIKQFSETFRSGSWVGATGKALTNVVSVGIGGSFLGPLFVHAALQTDPEAAESAKGRQLRFLANVDPVDVARSIKDLDPETTLVVVVSKTFTTAETMLNARTLKEWIVSSLGPDAVAKHMIAVSTNLELVEKFGIDPKNAFAFWDWVGGRYSVCSAVGVLPLSLQYGFPIVQKFLEGAASIDKHFRSSSFEKNIPVLLGLLSVWNVSFLGYPARAILPYSQALEKFAPHIQQLSMESNGKGVSIDGVQLSFETGEIDFGEPGTNGQHSFYQLIHQGRVIPCDFIGVVKSQQPVYLKGEIVSNHDELMSNFFAQPDALAYGKQFTGYFQTPEQLHSEKVPEHLIPHKTFQGNRPSLSLLLPSLSAYEIGQLLAIYEHRIAVQGFLWGINSFDQWGVELGKSLASQVRKSLHASRVEGKPVLGFNSSTTSLLTRYLAVEPSTPYNTTTLPKV

SEQ ID NO: 12384 - protein, 107 aa, Triticum aestivum
  misc_feature (9)..(9): Xaa can be any naturally occurring amino acid
SAAVYLGFXTQTQGISLEAQAQRAIPLATALDNGRPTLVEFYADWCTSCQAMAPDLAELKKNYGGSVNFAMLNVDNNKWLPEVLRYRVDGIPHFVYLDDTGTAIAVT

SEQ ID NO: 12385 - protein, 413 aa, Arabidopsis thaliana
MRSEITRETKLLFDLPQDVIEEIFSKVPVTCLRRIRSTCKRLYALLKDRGFIRKHFAKSARQYHALMLKNFRFYSVSFNPNGTEMDVASLFNGERSLIDPYSSSEAIISQAFHCDGLLLCTTKENRLVVLNPFSGQTKWLQPQNRCKIDEAYVLGYDNSDLCHSYKILSFPDLYEQELETIKNAGRDLDVTPEGDLELKTDDFSSNSWRRNLGVTPHGGLGLKIYDFSSNSWKKLDVITPEGCLKSYGVSLKGNAYWVYMSKRRGVNDYSLLSFDFSTESFQHLCVPFHQEADCFGTMALSVVREEHLSLLYQSCETLKVEIWMTKEIDTTFVSWKKFLTVDLEPHLPHLLMFSCRMSFFIDEEKKVAVCCDRDNKVHVVGEDEYRVSSGFYFLDFEGITCCLTVFGYVPRLV

SEQ ID NO: 12386 - protein, 381 aa, Arabidopsis thaliana
MFTDLPRDLETEILSRVPATSLQKLKPTCKRWYTLFKDPEFLKKHVGRAEREVISLMSLRVYSLSVNLSGIHSSVEMTGMLNSLKDSEDVKISDITECNGLLLCTTDDSRLVVWNPYTGETRWIPYKSNSPYEMYQKFVLGYDNTNKSRYSYKILRCYHGLIDFGYEFEIYEFNSHSWRRFYDNSPNCSFESKGVTLKGNTYWFASDTEGRHIILRFDFATERFGRLSLLYQSGGYVDNVVETGVLSAVREEKLALLYERFDELNDSSEMKIWVTNTKIVEAKDLSWSDFLVVDSSKFMVTRMTNVMSFLVDEEKKMVVVCDTDIDQHMNRFYIVGEDIYKEVYKDIAQGWFSYWPLLISYAPSLVQIQQGKVIPGGKRKR

SEQ ID NO: 12387 - protein, 286 aa, Wolinella succinogenes
MQLLDGKALSLEIEAKVKEEVMILTSSRGVTPGLAVILVGSDPASQAYVNMKAKACKRAGIYSITHEMPESTTESQLLNAISILNNDPNIDGILVQLPLPKHINTAKVLEAIAPHKDVDGFHPQNVGRLTSNLGGFAPATPMGVMRLLQKYGIDPQGKNAVIVGASNIVGKPMASLLLNANATTTLCHIYTKDLASHTQNADILCVGVGKPNLITESMVKKGAVVIDIGINRLEDGSLVGDVDFASVAPKCSYITPVPGGVGPMTIASLLENTLKAAKTRQETPQS

SEQ ID NO: 12388 - protein, 318 aa, Geobacter sulfurreducens PCA
MALNRLRIGTRASQLALWQANWVKSELEKRYPGMEVELVKIKTIGDKILDVPLAQVGGKGLFVKEIEEAMLRGEIDIAVHSMKDVPTEFPEGLGLVCITEREDPRDAFISNGVTFANLPQGAKIGTSALRRQAQLLKVRPDLEMVIIRGNVETRIRKLTEDKLDAVILAAAGLKRLGFTDVVTEYLPVDLSLPAIGQGALGLECRLDDQAVRETIDFFNHPDTAHAVRAERALLWRCEGGCQVPIAAHGQVSGDSLTLTGFIASVDGTRSVKESISGPVTDCEKLGIALAEKLLADGGHEILAEVYQREVSREKEIPV

SEQ ID NO: 12389 - protein, 521 aa, Rhodopirellula baltica SH 1
MAWTKAASHPLGGSAVYSRETTPPASYTDAVDHRTPRPPPSMTTSHHILFVATTVLACVLPASPVQSQYDPHPAGIDYREDYRNQFHFSPKSEWMNDINALIYADGKYHMLYQWGKAIRHGGYATSPDLLHWKDEGVALIPQESFLPAEAKRNVSGAQVYSGSGVLISGETAEKITGSTKEAMVMIYTGTKAGTCLAWSNDGGTTWHDYSGNPVANQTEGADPRDPCVFFHEPTGKWILALYENGTTLYGSDDLVEWKQLSNIDFGYECPDMFELPLDGNTENMKWVLHDANGSYLVGQFDGVRFTPEQETLVMDVGPDFYAGQTFFRPNLPSGDVIQIAWNDHWNGGIGESPWERNATFPVKIGLVTHDGKMKVTRTPIQAITTIYDDTTNWTNETITPEDENGGLLKDVRAEAFDLTATFDLSDSTAGQIVFRIANKEIVYDIEKQLLLGKSLKPDHDKKLTIRMLVDWSSLEVFSAGGVFSYSEQFAFTPDDESVRLFTRGGNVALEKLQLNRVKSIW

SEQ ID NO: 12390 - protein, 322 aa, Wolbachia endosymbiont of Asobara tabida
LCDKKIQLGINLTKGLGAGALPDVGKGAAEESIDEIMEHIKDSHMLFITAGMGGGTGTGAAPVIAKAAREARAAVKDRAPKEKKILTVGVVTKPFGFEGVRRMRIAELGLEELQKYVDTLIVIPSQNLFRIANEKTTFSDAFKLADNVLHIGIRGVTDLMVMPGLINLDFADIETVMSEMGKAMIGTGEAEGEDRAISAAEAAISNPLLDNVSMKGAQGILINITGGGDMTLFEVDAAANRVREEVDENANIIFGATFDQAMEGRVRVSVLATGIDGRNNKSETSPISQSEDSEKEKFKWPYSQSESTQDKTLETKPAEQVS

SEQ ID NO: 12391 - protein, 450 aa, Symbiobacterium thermophilum IAM 14863
MAYEFKLPDVGEGLHEAELLRWLVKEGDTVTEDQPIMEVQTDKATVEITSPVNGRVVKLLGQPGDILKVHSVVVIFDDGSPGALPTAGEVASGVAAAAPAGAQPQASLDVPAPAAQPAPAPAAPPAPAPAPAAGAGPADRPRRALATPATRRLARELGVDINQVPGTGPAGRVTSDDVRAFAARRTAPAPAQAPTQAPTEAAAPTPATPAPAAPAEADDERIPLRGIRKVIAERMVKSKYTAPHVTTVEEVDMTELMAFRAQAKELAARKGIKLSFMPFIIKAVVAALREFPYLNASIDDEAQEIVLHKRYHIGFALDTDAGLLVPVIKDADRKPVFAIAQEMNDLIARGREGKLAPDEMRGSTFTISNQGSIGGLFFTPVINYPEVAILGIGKTQPRPVVRDGEIVIRQMAHLALSFDHRLIDGGMATRFLNRLAELLSDPTLLMMEAM

SEQ ID NO: 12392 - protein, 440 aa, Streptomyces hygroscopicus
MTVQNPQEPEYFPEVFPQDAFPQYAWDEGMRPITLPHEVWLSETTHRDGQQGGLPLSLDTSRRIYDILCEITGDSTAIRHAEFFPYRDSDRNALIYALERHRDGAPIEPTTWIRARREDVELIKRIGVIETGLLSSSSDYHTFHKFGSGGRTQAASMYLDAVTMALDHGIRPRVHLEDTTRSSPDFVRALVEEVLKTAERYPAELQPRFRVCDTLGIGLPYDDVSLPRSIPRWIRLLRGFGLSPSQIELHPHNDTWLVVANCLAAIREGCGVISGTTLGTGERTGNAPLEAVMVHLLGMGYWSGARVNLPAVNKLVELYEGIGAGPSQKYPFFGRDAYVTRAGIHADGLNKFWWMYAPFNAPLLTGRELDVALTKDSGQAGLLFVLNKRLGLQLEKGDPRVAEVLAWMDRQWDAGRVSAVEWSELEPVVEKAFATEEGVG

SEQ ID NO: 12393 - protein, 117 aa, Medicago truncatula
MASLRVTIVVAIMCMVVASAPIAEAATCGQLIDSLIPCITYLQGGPGPSAACCGGVKKLNAAANTGPARKAACNCLKSAAGTIARLNNNQAAALPGKCGVKIPYKFSTSTNCNSIRF

SEQ ID NO: 12394 - protein, 422 aa, Polaromonas sp. JS666
MALIVHKYGGTSMGSTERIRNVAKRVAKWARAGHQMVVVPSAMSGETNRLLGLAKELAPARPGDDYHRELDALAATGEQASSALLAIALQSEGMQAVSYAGWQVTIKTNNAYTKARIESIDDERVRADLDAGKVVIITGFQGVDEGGNVTTLGRGGSDTSAVAIAAALKAHECLIYTDVDGVYTTDPRVVPEARRLHTVSFEEMLEMASMGSKVLQIRSVEFAGKYKVPLRVLSSFTDWDIDINEEARSGTLISFEEDENMEQAIVSGIAFNRDEAKISVLGVPDTPGIAYQILGAVADANIEVDVIIQNISKDGKTDFSFTVHRNDYSKAVDLLKTQVLPKLGAQEVTGDAKICKVSIVGIGMRSHVGVASKMFRVLSEEGINIQMISTSEIKTSVVIDEKYMELAVRALHKAFDLDQPAA

SEQ ID NO: 12395 - protein, 487 aa, Prochlorococcus marinus str. MIT 9312
MTTALQTPQRRSRTRLQDASLVNGPMLLLRSIRGFSSNRSMLWLATVPLALFGLGLFNVAAHATELPDLNAAFLANNLWLFVATILVIFMNAGFAMVEAGMCRSKNAVNILAKNLFVFALAVTSYWFIGFGIMYYGKEIIPGILYFNSLFFDPTVTAEMIEGAELVPTVDFLFQAAFAGTAATIVSGLVAERVKFGEFVVFAIVLTAFIYPIAGSWKWNGGWLDQLGFIDFAGSSIVHSVGAWAGLVGAMLLGPRIGKYSDGKPQAMPGHNMAIATLGALVLWIGWYGFNPGSQLAMDQWVPYVAVTTTLAAAAGAIGATIVSTLTSGKPDLTMIINGILAGLVSITAGCGDMTLVGAWFAGLVGGIIVVFSVAALDAAEIDDPVGAFSVHGVCGVWGTIVIGLWGTEMQGSGLGIGLLNGGGIKLLLVQALGAAAYAIWTLVTCWIAWSVIGGLFGGIRVSEEEETQGLDIGEHGMEAYPDFASAK

SEQ ID NO: 12396 - protein, 363 aa, Dehalococcoides sp. BAV1
MSQSNGQRLALLRKLMAENELDGLLVSKPENQYYLSGFSGGEGHLFITPTQSFIAVDFRYYEQAENESPDYTLCKIINGRSLWLPELLSSESIRRLGFESSFITFEQYSKLKNTLSKSGLNVLLVETADLAGNLRKIKSENEIDCIKQASAIGDAAFSALPSLLTPGMTERELAWELEKFMKSHGSQSMPFEVIAATGANSALPHAQTRPEAVADGQPLLMDYGAKVSWYASDMTRTVLPGKPNSQFKRIYDIVLAAQQKAIDQIHSGMTGQEADAIAREVIEKAGYGANFGHSLGHGVGLEVHEEPHLSPRSTDILENGMVFSIEPGIYLPGWGGIRIEDTCMLKNGKIELLSKSDKQNPYI

SEQ ID NO: 12397 - protein, 117 aa, Medicago truncatula
MASLRVAIVAAIMCMVVVSAPMAEAVTCGQVVGFLTPCITYLQGGPGPSAACCGGVKKLNGAANTGPARKTACNCLKRAAGNIARLNNNQAAALPGKCGVNIPYKFSTSTNCNSIRF

SEQ ID NO: 12398 - protein, 429 aa, Bacillus thuringiensis serovar konkukian str. 97-27
MAFEFKLPDIGEGIHEGEIVKWFIKPGDEVNEDDVLLEVQNDKAVVEIPSPVKGKVLEVLVEEGTVAVVGDTLIKFDAPGYENLKFKGDDHDEAPKAEEAKEEAPKAEATPAATAEVVNERVIAMPSVRKYARENGVDIHKVAGSGKNGRIVKADIDAFANGGQAVAATEAPAAVEATPAAAKEEAPKAQPIPAGEYPETREKMSGIRKAIAKAMVNSKHTAPHVTLMDEVDVTELVAHRKKFKAVAADKGIKLTYLPYVVKALTSALREYPMLNTSLDDASQEVVHKHYFNIGIAADTDKGLLVPVVKDTDRKSIFTISNEINDLAGKAREGRLAPAEMKGASCTITNIGSAGGQWFTPVINHPEVAILGIGRIAEKPVVKNGEIVAAPVLALSLSFDHRLIDGATAQKALNQIKRLLNDPQLLVMEA

SEQ ID NO: 12399 - protein, 485 aa, Pseudomonas syringae pv. syringae B728a
MLKNQLKDPSLLVDRAYVDGQWISADDGATLTISNPATGEALAQVPALQGVETRRAIEAADRAWPAWRARPAAERAALLERWHQAMLDNVEDLALIMTFEQGKPLNESRGEIRYGASFVKWFAEEARRSYGETIPAPSADRRLMTLKQPVGVCAAITPWNFPNAMITRKCAPALAAGCPIIVKPSDLTPLSALALALLAERVGIPAGVFNVITGMPTGIGEELTGNPVVRKISFTGSTPVGRLLMRQSAEHIKRLSLELGGNAPFIVFDDADLEQAVTGIMLSKFRNAGQTCVCANRILVQNGIYDRFAARLVEEVSKLKVGNGLEEGVTIGPLINPAAVSKVARHIDDALSQGAKLLHGGSPDGTSQFVQPTVLGDTHAGMLLANEETFGPVAPLMRFTDEAEALALANATPYGLGAYYFTQDLRRSWRFGEALEFGMVGLNTGIISMEVAPFGGVKQSGLGREGSSYGLDEYLEVKAFHVGGL

SEQ ID NO: 12400 - protein, 120 aa, Brassica napus
  misc_feature (2)..(2): Xaa can be any naturally occurring amino acid
  misc_feature (8)..(8): Xaa can be any naturally occurring amino acid
  misc_feature (15)..(15): Xaa can be any naturally occurring amino acid
  misc_feature (51)..(51): Xaa can be any naturally occurring amino acid
  misc_feature (53)..(53): Xaa can be any naturally occurring amino acid
  misc_feature (61)..(61): Xaa can be any naturally occurring amino acid
  misc_feature (81)..(81): Xaa can be any naturally occurring amino acid
  misc_feature (106)..(106): Xaa can be any naturally occurring amino acid
  misc_feature (112)..(112): Xaa can be any naturally occurring amino acid
SXRRGFVXIAMEHGXPLVPVFCFGQSRVYKWWKPDWNLYLKLSRAIKFTPXCXWGVFGSPXPFRHPLHVVVGKPIEVRKTXQPTDEEIAKVHGQFVEALKDLFERXKARAGXSDLQLNIL

SEQ ID NO: 12401 - protein, 431 aa, Erythrobacter sp. NAP1
MAKFTFNMPDVGEGVAEAEIVEWLVKVGDTVAEDQHLVDVMTDKATIDIESPVDGKVLEVAGEVGDVVAVGSMLLVVEVEGEVSDEVEEEAAPAPTPEPAAEPKEASAPMPDPTITPEPELEPAPAPTPSPTPASEPAATAAKVLASPAVRKRANDLGVDLSRVKPAEDGRVRHGDLDQFIAYNSGGGYSPAGRTREDEPIKVIGLRKRIAQNMSAAKRNIPHFTYVEECDVTALEAMRADLNSARGDKPKLTMLPLLITAFCKLIPHYPMINARYDDEANVVTRHGSVHMGMATQTDNGLMVPVIRDAQSRNLWQLATEIGSLANAARDGSAKSEELSGSTITVTSLGPLGGVATTPVINRPEVAIIGPNRIIERPMFVSDGQGGERIEKRKLMNISISCDHRVVDGYDAASFIQDVKKLIETPVLLLSD

SEQ ID NO: 12402 - protein, 311 aa, Nostoc sp. PCC 7120
MKNEKWNAENIPPQKGRLAIVTGSSSGIGYETARVLANKQASVIIAVRNLDKGNKALAKILQQNKDADVKLMELDLANLASVKNFAENFRKNYLRLDLLINNAGVMIPPYSKTTDGFELQFGTNHLGHFALTGQLLEFLISTEGSRIVNVSSGAHNMGKIDFDDLNWEQRSYAKWKAYGDSKLANLYFTYELDRKLKDNGIDTLVTASHPGWTATELQRTAGGIVKYLNGIVAQDITMGALPTLRAAIEAGLKGAEYFGPNGFMEMRGYPIKVESNELSKDQALAKKLWVVSEKLTDVKFEFNKKAQSAGK

SEQ ID NO: 12403 - protein, 335 aa, Propionibacterium acnes KPA171202
MTVKVGINGFGRIGRNFFRALAEQGADLEVVAVNDLTDTKTLAHLLKYDSIMGRFSGEVSYDDDSITVDGKTIKVLAERNPADLPWKELGAEIVVESTGLFTDGEKAKAHFEAGAKKVIISAPGKNVDGTFVMGVNDGDYDNAKHNIISNASCTTNCLAPLAKVLNDAFGIERGIMTTVHAYTGDQRLQDAPHKDLRRARAAALNMIPTKTGAAQAVALVLPELKGKFDGLAVRVPTPTGSLTDLTFQTSKETTVEEVQAAVKKAAEGPLKGILAYTEDPIVSKDIEGDPHSSIFDATETKVIGNLVKVLSWYDNEWGYSNRLVDLTKLVASKLA

SEQ ID NO: 12404 - protein, 408 aa, Bacillus subtilis
MGLIVQKFGGTSVGSVEKIQNAANRAIAEKQKGHQVVVVVSAMGKSTDELVSLAKAISDQPSKREMDMLLATGEQVTISLLSMALQEKGYDAVSYTGWQAGIRTEAIHGNARITDIDTSVLADQLEKGKIVIVAGFQGMTEDCEITTLGRGGSDTTAVALAAALKVDKCDIYTDVPGVFTTDPRYVKSARKLEGISYDEMLELANLGAGVLHPRAVEFAKNYQVPLEVRSSTETEAGTLIEEESSMEQNLIVRGIAFEDQITRVTIYGLTSGLTTLSTIFTTLAKRNINVDIIIQTQAEDKTGISFSVKTEDADQTVAVLEEYKDALEFEKIETESKLAKVSIVGSGMVSNPGVAAEMFAVLAQKNILIKMVSTSEIKVSTVVSENDMVKAVESLHDAFELSKHPSAV

SEQ ID NO: 12405 - protein, 580 aa, Cytophaga hutchinsonii
MLFKDLGLSPEVVEAIESIGYSEATPIQEKTIPILMTGKDLTGQAQTGTGKTAAFGIPAIEHVDISINQTQSLILCPTRELALQVCTELKKLSKFKKGLRVLAVYGGESIERQIRDLKAGAHIVVGTPGRIIDHLDRRTLNASHLSQIILDEADEMLNMGFREDIELILTRLPEERQTVLFSATLAPPILALAKRFQNNPEIIKIERKELTISTVEQFYYLVKNSQKTEIVTQIIDLNNLQLMLIFCNTKRKVEEVTDELKAYGHNPISLHGDKTQRDRTEVMSKFRKGLANILVATDVAARGIDVTGVDAVINYDVPLDIENYVHRIGRTGRAGQLGKSFTLVTSDEKYKLRDIERYTKATIEKAETPTRQELVAYKKDKLATRITTELEKPNIKIWSDLLEEYKEKGITADQIAIALLSKEMKDLAEPERRVFEDRGDRRDRGDRGDRGGRFDRGDRRDGPRRDGRSSDRFGDRPAASRDRDGGERRERTPRPRTSDASMARLFVNVGRIDRISPGDIVGAFAGEANIKGSQIGQIDIFDKYSFVELPHDLVDQVMDGMRNNKIKGKSINIEISNGKQ

SEQ ID NO: 12406 - protein, 308 aa, Campylobacter lari RM2100
MQLIIATRKSQLALWQSEYIKNKLSQTHSDLEISLEGFKTKGDVLLDSPLAKIGGKGLFTKELEESMLRGDSHLAVHSLKDVPSFFPKGLVLAAISKREEVNDAFLSEYYESLNALPKGAKVGTTSLRRRMQLLALRPDLNIISLRGNINSRLEKLKAKEFDAIILAFAGIKRLGLEKQIKFVKKFELDEMIPAASQGALGIESIDDKQILKYLECLNDKNAFVETHIERDFIKTLEGGCQVPIGINAKIIDEKIEIRAIVGLPDASKILKEKRMIDKQDYAKAGELLAKEMIAKGAKEILKEAESMI

SEQ ID NO: 12407 - protein, 535 aa, Cytophaga hutchinsonii
MSNQTIQTPTTNGMPSGIPFIVGNEAAERFSFYGMRAILAVFMTSYLHMTESTATEWAHTFNSAVYFTPILGAFLADIFIGKYRTILYLSVLYCFGHLVLALNESKDGLFWGLTLISIGAGGIKPCVSAHVGDQFGIKNKHLIERVFSIFYFAVNFGSLFSTLLIPYLLEHYGPAYAFGLPGILMFVATFIFWSGRNKFVHVPPFGKAYFKTVFGKEGLSAIGRLIFIYAFIAIFWALYDQHASTWVYQSKSAFLNKDINLFGLVEFTLLPSQIQAANPVLVLVLIPAFAFFIYPALNKIITLKPLIKILLGMFMCVLAFLVAAYIEKRISSGIETSVWWQFLAYLILTMAEVMVSITALEFSYTQAPNQMKSTVMGIFMFSISLGNILVAVISNYNNLHEEVKTVEIGTKTYISIKDYTPVKGEKIEFEDGTGLFILQQNSKTSLMDTIPLGGTYLVGDVDAVSNRFTLEDNGWHAIQTIKKSELPKGYKVVFHRFKHQSYFYMYALLMFVTAVLFIGVALKYKGKTYIQGEAV

SEQ ID NO: 12408 - protein, 89 aa, Arabidopsis thaliana
MADWGPVVVAVILFVLLTPGLLFQIPARGRVVEFGNMQTSGASILVHTIIFFGLITIFTIAIRLHIYTGTRQLALVWFIGIRVQIGIEY

SEQ ID NO: 12409 - protein, 558 aa, Mycobacterium tuberculosis H37Rv
MSPARKRRMFDLLVRMGYKEIEVGFPSASQTDFDFVREIIEQGAIPDDVTIQVLTQCRPELIERTFQACSGAPRAIVHFYNSTSILQRRVVFRANRAEVQAIATDGARKCVEQAAKYPGTQWRFEYSPESYTGTELEYAKQVCDAVGEVIAPTPERPIIFNLPATVEMTTPNVYADSIEWMSRNLANRESVILSLHPHNDRGTAVAAAELGFAAGADRIEGCLFGNGERTGNVCLVTLGLNLFSRGVDPQIDFSNIDEIRRTVEYCNQLPVHERHPYGGDLVYTAFSGSHQDAINKGLDAMKLDADAADCDVDDMLWQVPYLPIDPRDVGRTYEAVIRVNSQSGKGGVAYIMKTDHGLSLPRRLQIEFSQVIQKIAEGTAGEGGEVSPKEMWDAFAEEYLAPVRPLERIRQHVDAADDDGGTTSITATVKINGVETEISGSGNGPLAAFVHALADVGFDVAVLDYYEHAMSAGDDAQAAAYVEASVTIASPAQPGEAGRHASDPVTIASPAQPGEAGRHASDPVTSKTVWGVGIAPSINRPAAVVSAVNRRHARTALN

SEQ ID NO: 12410 - protein, 311 aa, Cytophaga hutchinsonii
MKSSIFTLTLSPAFDKSTSVESVQPEHKLRCDSPIYQPGGGGINVSRAIKKLNGSSVALYPIGGDTGNHFKALLTEEGIEQITFQIKNWTRENFIVVERSTNNQFRFGMPGSEIYKEEWEQMLAVIQDPSNDFEYFVVSGSTPKGVPDEFYTRLSQIILQKNARLILDTSGAALKHCLKEGIFLCKPNINELSEIVGKELITKEQQEAAAMEIINSGKVEILVVSLGGAGAFLASKQGIYHVTAPPVEKRSTVGAGDSMVAGMVLSLSRGNHYEDVIKFGVACGTAATMNFGTELCKLEDVERLYKQLGGK

SEQ ID NO: 12411 - protein, 240 aa, Glycine max
METKSSSSSTNLVDQSVCPGDVILDLSNMTNQTIKLGGGLRQDCDAISVMKAGRLRFSKPNKYWVENSQKRYVPHAEDSVLGIVVDSRSDNFLVDIKGPALAFLPVLAFEGGTRRNIPRFEIGTLIYARVVKANPGMNPELACTDASGKAAEFGALKDGYMFECTTGLSRMLLSSPTCPVLDALGKKLSFEIAVGLNGRVWVSAASPQTTIVVANAIMNSETLSGAQQRIMVEKLLERIH

SEQ ID NO: 12412 - protein, 332 aa, Clostridium perfringens str. 13
MVKVAINGFGRIGRLALRLMIDNPEFEVVAINDLTDAKTLAHLFKYDSAQGRFNGEIEVKEGAFVVNGKEIKVTAKSNPAELPWGELGVDVVLECTGFFASKEKASAHLTAGAKKVVISAPAGNDLPTVVYNVNHDILDGSEDVISGASCTTNCLAPMAKALNDNFGLNKGFMTTIHAYTNDQNTLDAPHKKGDLRRARAAAANIVPNSTGAAKAIGLVIPELAGKLDGNAQRVPVITGSLTELVCTLDKKVTVEEVNAAMKAASNESFGYTEDPIVSSDVIGISFGSLFDATQTKIMEVDGQQLVKVASWYDNEASYTNQLIRTLKCLVSK

SEQ ID NO: 12413 - protein, 989 aa, Pichia pastoris
MPEPSISDLSFTSFVTNDDNLFEETFNFYTKLGFHATRSYVKDNRSDFELTGISTDSIKEIWLESFPLSEVVEASGGRELRKPLQESVGYESEALLGYSPYQSGGVVIKLRLSNHDLEKNNDLPGEVTFFTASIDKLKAKLIEIGAEIIPSKIDLVEFSTRDPMGDVISFSSYPSLNSKKITSPDFFLHPKKEVRSEESIVEQVKSEEGKKKIAIITSGGDAPGMNAAVRAVTRAGIFYGCKVYACYEGYTGLVKGGDMLKELQWQDVRGLLSIGGTIIGTARCKEFRERWGRLQACYNMVSNGIDALVVCGGDGSLTGADLFRKEWPELIKELLGEDKITKEQYETHRNLTIVGLVGSIDNDMCGTDSTIGAYSSLERIIELVDYIDATAASHSRAFVVEVMGRHCGWLGLMSGIATGADYIFIPERPPSESNWKDDLKKVCLRHREKGRRKTTVIVAEGAIDDQLNPITSEEVKDVLVEIGLDTRITRLGHVQRGGAPCAFDRFLATVQGVDAVRAVLESTPAIPSPVISILENKIVRQPLVESVAQTKTVSAAIEAKDFDKALQLRDQEFATSYENFLSVSKYDDGSYLVPESSRLNIAIIHVGAPTSALNPATRVATLNSLAKGHRVFAIRNGFAGLIRHGAVRELNWIDVEDWHNTGGSEIGTNRSLPSDDMGTVAYYFQQYKFDGLIIIGGFEAFTALYELDAARAQYPIFNIPMCCLPATVSNNVPGTEYSLGSDTCLNTLSGYCDAVKQSASASRRRTFVVEVQGGYSGYLASYAGLITGALAVYTPENPINLQTVQEDIELLTRTYEEDDGKNRSGKIFIHNEKASKVYTTDLIAAIIGEAGKGRFESRTAVPGHVQQGKSPSSIDRVNACRLAIKCCNFIEDANFQVKHNANLSADERHLRFFYDDGVKTSAVSGKSSVIDDNTSVVIGIQGSEVTFTPVKQLWENETHHKWRKGKNVHWEQLNIVSDLLSGRLSIRTT

SEQ ID NO: 12414 - protein, 249 aa, Agrobacterium tumefaciens str. C58
MYSRYRKKLMDLRLIFGPTCTGKTSTAVALAQQTGLPVLSLDRVQCCPQLSTGSGRPTVEELKGTSRLYLDDRPLVKGIIAAKQAHERLMGEVYNYEAHGGLILEGGSISLLKCMAQSSYWSADFRWHIIRHELADEETFMNVAKARVKQMLRPAAGLSIIQELVDLWKEPRLRPILKEIDGYRYAMLFASQNQITSDMLLQLDADMEDKLIHGIAQEYLIHARRQEQKFPRVNAAAYDGFEGHPFGMY

SEQ ID NO: 12415 - protein, 553 aa, Chlamydia trachomatis D/UW-3/CX
MSSNKHASLCQKTPSLCRELQKAPALLLTEDIRFKALLNERIDSVAELFPCTYNSPYYKFISKSDLSAETSPLKVGVMLSGGPAPGGHNVILGLLHSIKKLHPNSQLLGFIRNGEGLLNNNTVEITDEFIEEFRNSGGFNCIGTGRTNIITEENKARCLQTANELDLDGLVIIGGDGSNTATAILAEYFAKHQAKTVLVGVPKTIDGDLQHLFLDLTFGFDTATKFYSSIISNISRDALSCKGHYHFIKLMGRSSSHITLECALQTHPNIALIGEEIAEKSISLETLIHDICETIADRAAMGKYHGVILIPEGVIEFIPEIQSLVKEIESIPEQENLYQALSLSSQQLLCQFPEDICHQLLYNRDAHGNVYVSKISVDKLLIHLVRQHLETHFRQVPFNAISHFLGYEGRSGTPTHFDNVYSYNLGYGAGVLVFNRCNGYLSTIEGLTSPIEKWRLRALPIVRMLTTKQGKDSKHYPLIKKRLVDIASPVFNKFSLYRKIWALEDSYRFVGPLQIHSPEDAHSDDFPPLILFLNHNEWQKRCSICLEIPDQDY

SEQ ID NO: 12416 - protein, 585 aa, Raphanus sativus
MCGILAVLGCSDDSQAKRVRVLELSRRLRHRGPDWSGIYQNGGNYLAHQRLAIIDPASGDQPLFNEDKSIVVTVNGEIYNHEELRKGLKNHKFHTGSDCDVIAHLYEEHGENFVDMLDGIFSFVLLDTRDNSFMVARDAVGVTSLYIGWGLDGSLWVSSEMKGLHEDCEHFEAFPPGHLYSSKSGGGFKQWYNPPWFNESVPSTPYEPLAIRRAFEDAVIKRLMTDVPFGVLLSGGLDSSLVASITARHLAGTKAAKRWGPQLHSFCVGLEGSPDLKAGKEVAEYLGTVHHEFHFTVQDGIDAIEDVIYHVETYDVTTIRASTPMFLMSRKIKSLGVKMVLSGEGSDEIFGGYLYFHKAPNKQEFHQETCRKIKALHKYDCLRANKATSAFGLEARVPFLDKEFINTAMSLDPESKMIKPEEGRIEKWVLRRAFDDEERPYLPKHILYRQKEQFSDGVGYSWIDGLKAHAAENVNDKMMSNAAYIFPHNTPLTKEAYYYRMIFERFFPQNSARLTVPGGATVACSTAKAVEWDASWSNNMDPSGRAAIGVHLSAYDGSKVALPLPPHKAIDDMPMMMGQEVVIQT

SEQ ID NO: 12417 - protein, 171 aa, Zea mays
MVKYSQEPGNPTKSAKAMGRDLRVHFKNTRETAFALRKLPLTKAKRYLEDVIAHKQAIPFRRYCGGVGRTAQAKSRHSNGQGRWPVKSARFILDLLKNAESNADVKGLDVDNLYVSHIQVNQAQKQRRRTYRAHGRINPYMSSPCHIELILSEKEEPVKKEADNIVAARKQ

SEQ ID NO: 12418 - protein, 317 aa, Capsicum annuum
INGFGRIGRNFLRCWHGRKDSPLDVVVVNDSGGVKNASHLLKYDSMLGTFKADVKVVDNETISVDGKPIKVVSNRDPLKLPWAELGIDIVIEGTGVFVDGPGAGKHIQAGAKKVIITAPAKGADIPTYVVGVNEQEYTHEVANIVSNASCTTNCLAPFAKILDEEFGIVKGTMTTTHSYTGDQRLLDASHRDLRRARAAALNIVPTSTGAAKAVSLVLPQLKGKLNGIALRVPTPNVSVVDLVINVEKKGITAEDVNAAFRKSADGPLNGILAVCDVPLVSVDFRCSDVSTTIDSSLTMVMGDDMVKIVAWYDNEWN

SEQ ID NO: 12419 - protein, 548 aa, Chlamydia trachomatis D/UW-3/CX
MELLSVNKSYFELQRLHYRPDTLSLLNSLCSMHIQEKPSSEPASDLLAKHIPHLCALPDLTLQKDAPSSSEPLRIGVLLSGGQAPGGHNVVIGLFEGLRAFNKETKLFGFIKGPLGLIRGLYKDLDISVIYDYYNAGGFDMLSSSREKIKTKEQKSAILATVKKMKLHGLLIVGGDNSNTDTAMLAEYFIEHNCPTAVIGVPKTIDGDLKNAWIETPLGFHTSCRTYSEMIGNLEKDVLSTRKYHHFVKLMGEQASHSTLECGLQTLPNITLIGEEVAVQHASLQSLSLSIAQGLIERFHRGKDYSTILIPEGLIKQIPDTKRLIQELNTLIAEGQFSVHNLDQQLSPMAIETFSSLPENIRDQLLLDRDSYGNIRVSKIAIEELLASLVSKEISKLEPTMSFSPVTHFLGYESRASFPSNFDSNYGLALGIAASLFLVRGKTGYMVTIGNLAEAYTEWTIAATPLYKMMHLEKRFNQETPVIKTDSVSPDAPMAKYLHKMKKICLLEDSYRFPGPLQYFEEQALVDQRPLTLLWEKGKLSENNATKF

SEQ ID NO: 12420 - protein, 181 aa, Brassica napus
  misc_feature (128)..(128): Xaa can be any naturally occurring amino acid
  misc_feature (136)..(136): Xaa can be any naturally occurring amino acid
  misc_feature (170)..(170): Xaa can be any naturally occurring amino acid
MAAFTCTSRPPVPLRSESRIASSPSASLSARRMFAVSPDSAGLRIRLSQSSSLLTSKVPRPRRGIVCEAQETTTDIVSIVNDTTWDSLVLKADGPVLVDFWAPWCGPCKMIDPLVNELAKEYPGKVKXYKLNTDDXPSTPSKYNVRSIPTIMIFVNGEKKDAIIGAVPRXTLASSIDKFLQ

SEQ ID NO: 12421 - protein, 585 aa, Hordeum vulgare subsp. vulgare
MCGILAVLGCADDTQGKRVRVLELSRRLKHRGPDWSGMHQVGDCYLSHQRLAIIDPASGDQPLYNEDKSIVVTVNGEIYNHEQLRAQLSSHTFRTGSDCEVIAHLYEEHGENFIDMLDGVFSFVLLDTRDNSFIAARDAIGVTPLYVGWGIDGSVWISSEMKGLNDDCEHFEIFPPGHLYSSKEGGFKRWYNPPWFSEVIPSVPYDPLALRKAFEKAVTKRLMTDVPFGVLLSGGLDSSLVAAVTVRHLAGTKAAKRWGTKLHSFCVGLEGSPDLKAAKEVANYLGTMHHEFTFTVQDGIDAIEDVIYHTETYDVTTIRASTPMFLMSRKIKSLGVKMVISGEGSDEIFGGYLYFHKAPNKEELHRETCQKIKALHQYDCLRANKATSAWGLEARVPFLDKEFINEAMSIDPEWKMIRPDLGRIEKWVLRKAFDDEEQPFLPKHILYRQKEQFSDGVGYSWIDGLKAHTESNVTDKMMSNAKFIYPHNTPTTKEAYCYRMIFERFFPQNSAILTVPGGPSVACSTAKAVEWDARWSGNLDPSGRAALGVHLSAYEQEHLPATIMAGTSKKPRMIKVAAPGVAIES

SEQ ID NO: 12422 - protein, 311 aa, Pasteurella multocida subsp. multocida str. Pm70
MTKVLTITLNSAYDLVGHLPHLTRGAVNQVDSLGLYPAGKGINVGKVLHDLGVNVALTGFLGQENQTGFQQLFSRLGLTDHFHRITGATRINVKLTESDGVVTDLNFQGYHVSKTDWQTFVDFSLQQCQTFDVIAVCGSLPRGISVDDFTAWLSQLNKNNIKLILDTSQQAFASGIQAKPWLVKPNRDELASWYGSPLATQQDIIRAATLLQRQGIPHVVVSMGEEGAIWLNENTVLHAQPPQDTPIVSTVGAGDTMVAGLIYGMLNAYSAEKTLAFATALSSLAVSQSNVGITDLTLLNPILEKIKITFI

SEQ ID NO: 12423 - protein, 136 aa, Nostoc sp. PCC 7120
MRLHIILGPTSVGKTDRSVVLAKQTKAPVIVLDRIQIYQEIATGSGRPLIDELEGTTRIYLEERQLADGNLNTLESLSLALQHIDRLSSQHKLLILEGGSISLCTALWKSRILENYQTTIEYVKVENEELYQSRMW

SEQ ID NO: 12424 - protein, 946 aa, Desulfotalea psychrophila LSv54
  misc_feature (187)..(187): Xaa can be any naturally occurring amino acid
MIKETLNNMSAKIGRRSFLKLAAIGAGMSATSALAATDTIRPATDEEIKNPFPGSKLVKTVCSICSAGCGIIAEVQNGVWVRQDVAQDNPISEGSHCCKGIDQIDLIKSKQRLKHPLKKVNGEWKRISWEQAVNEISDKMLALRKENGPDVAMFLGSAKFNLQQAFYFRKFAAMWGTNNIDHVARIXHSATVAGVANTWGYGAMTNHFGDVVEHSKAMLIIGANPAAANPIGMKHFLQAKDRNAAPLIVVDPVYTKTAAKADHYLRIRSGTDVAFVYGLLHIIFKNGWEDKSFLESRVYGIEDIKEEAAKWTPEETSNVTGIPAAQIIQVATILAKTKPTTVVWALGITQHSTGTSNTRIIPILQLVLGNMGKKGGGCNIIRGHDNVQGSTDMCCLADSLPGYYGLSTGSWKYFAKGWGVDFKWLEDRFAAPEWMPAKGFSLAKWWQGVLQEEKTYSSSPIRALWVQGNGITSMAQTAKIQEALDKLDLLVIAEPFVNEAAVITNKKDNIYILPVATQFETEGSVTATNRTSQWRSKVVEPLYESKPDHEVMFAFAKKFGFYDEYTRAMKMGIKDGVLTQVKKDFVWPDDASGEIARIVKTIGLGGWTAKRLREHQENWHMFDPLTLAGRGPMKGQYYGLPWPCWDEKHPGSPVLYDVDTPVNEGGMGFRNRFGLEHEGVSQLAGDAVTVKGSKVPGGYPEISRDNIEEVLSIQLTADEKSKMGKNWKVDFSGIIQEKCRAAGVAPYGNARARTIVWTFPDPIPKHREPIHSPRPDLVEKYPTYEDQTNNFRVDVRFKSEQQAQDWVKDFPTMLVTMRVVNLSGAGMLERTSKYLSHITPEMFANIHPDLALEYGLRDGDMMWLHAPQGTKIKVKAQYNFSVTPDRIALPYNFAGMMQGVDMSQNYPEGTKPYSIGESSNTITNYGFDIVSQIPEFNAGLCRIEKA

SEQ ID NO: 12425 - protein, 61 aa, Arabidopsis thaliana
MAVPLLTKKVVKKRSAKFIRPQSDRRITVKESWRRPKGIDSRVRRKFKGVSLFSNVGFWFC

SEQ ID NO: 12426 - protein, 590 aa, Pseudomonas aeruginosa PAO1
MSSTVADQLLERLSQWGVKRVFGYPGDGINGIMGAMGRRAEAFDYIRVRHEEMAAFMAGAHAKFTGEVGVCLATSGPGAIHLLNGLYDARMDHQPVLAIVGQQAATALGSDYQQEVDLQSLFKDVSAYVETVVSPAQLLHVLDRALRVAVGERQVATVIVPNDVQQMAAPKRQPHEHGHVMSAVGFVQPRPYARDADLEAAAAILNRGRRVAILAGAGALGAHRQLEAVAERLAAGVAKALLGKAAVSDDLPYVTGSIGLLGTRASSMLMEHCDTLLIVGSTFPYSEFLPKAGQARAVQIDLYPRNIGIRYPIDQALLGDAGETLERLLPLLEQKKHGAWRRRVERAVTASREEARRQAEEPADPINPQRVFRSLSEQLPDDAILCGDSGSHTNWYARDIRMRPGMLGSLSGKLATMGSGVPYAIAAKLAYPQRPVVAMVGDGAMQMNGNAELVTVQQYWQRWDSPTFIVLVLNNGDLNQVTWEQRALAGDPEFSPAQEVIDFPYARYADMLGFKGIRVDRPEDIDAAWAEAFAADRPVLLEVVTDPNVPPLPPHISFEQAKHLLGAMLQDDPKRWGVIRQSARQVLARH

SEQ ID NO: 12427 - protein, 114 aa, Yarrowia lipolytica CLIB122
MSTSKTGKHGHAKVHLVATDIFTNKKLEDLSPSTHNMEVPNVKREEFQLIDIDDGFLSLFTADGSTKDDVPLPEGEIGDKIQTEFDEGKDLIVTVISAMGEEAVISYKEAPKGN

SEQ ID NO: 12428 - protein, 522 aa, Clitoria ternatea
FLLREIGVSILIFMITHLVIRLVLKEKEQRKLPPGPKGWPIVGALPLMGSMPHVTLSEMAKKYGPVMYLKMGTNNMAVASTPSAARAFLKTLDLNFSNRPPNAGATHLAYDAQDMVFADYGSRWKLLRKLSNLHMLGGKALEEWSQVREIEMGHMLRAMYDCSGGGDGNNDNDGNKKKGTRHEPIVVAEMLTYAMANMIGQVILSRRVFETKGSESNEFKDMVVQLMTVAGYFNIGDFIPFLARFDLQGIERGMKTLHNKFDVLLTTMIHEHVASAHKRKGKPDFLDVLMAHHTNESHELSLTNIKALLLNLFTAGTDTSSSIIEWALAEMLINPKIMKKVHEEMDKVIGKDRRLKESDIENLPYLQAICKETYRKHPSTPLNLPRISSQACQVNGYYIPKNTRLSVNIWAIGRDPNVWENPLEFNPERFMGANKTIDPRGNDFELIPFGAGRRICAGTRMGIVLVQYILGTLVHSFDWKLPNGVVELNMEETFGLALQKKIPLSALITPRLPPTAYNVINS

SEQ ID NO: 12429 - protein, 215 aa, Zea mays
  misc_feature (121)..(121): Xaa can be any naturally occurring amino acid
MAAAKIAPSMLSSDFANLASEAERMVRLGADWLHMDIMDGHFVPNLTIGAPVIQSLRKHTKAYLDCHLMVTKPSDYVEPFGKAGASGFTFHIEVARDNWQDLIQSIKSKGMRPGVSLRPGXAENPVELVLVMTVEPGFGGQKFMPEMMDKVRTLRKKYPSLDIEVDGGLGPSTIDVAASAGANCIVAGSSIFGAADPGAIISVLRKSVEGSQNKN

SEQ ID NO: 12430 - protein, 322 aa, Parvularcula bermudensis HTCC2503
MLVNLGTPDAPEAKAVKRYLREFLSDKRVVDYPRLVWLPVLHGIILNVRPRKTAALYAKIWHRESGKSPLAYFTERQAEGVKARLSPALIVRHAMRYGSPSIDDRLREMTAEGCDRILIVPLYPQYSATTTATVMDKVSACMSEMAWQPALRSLPPFYDDPSYLDALEGSVRRALPEGAERIILSYHGIPERYFAQGDPYHCHCQKTSRLLRERMGWSPNFAPIGFQSKFGPEKWLDPSTESLVIRAAKDGIKRLAVIAPAFVSDCLETLEEVAIGLAETFEEHGGEVLTAIPCLNDDPQFLDSLAQMIERELGGWEPAATS

SEQ ID NO: 12431 - protein, 188 aa, Prochlorococcus marinus str. MIT 9211
MADNSSLIALSKLQKILLMLVAFVLSAALLIMKISVASVQPLEQLARSSLLPEIALANGKPTIFEFYADWCEVCQKMSPSIVDLEKRMGDKLDIVLLNVDNQRWSPLIDKYNVNGIPQFIFFNQDGDLKGISIGLLSSEKIIKASEYLIDNKELTDIEEFNNMSPDRFKFTDLIDTSKSRPVNPRSHS

SEQ ID NO: 12432 - protein, 493 aa, Leptospira interrogans serovar Copenhageni str. Fiocruz L1-130
MFMVTELSYCQKMTQLKRSLNLFDSISLMFSSMVGPGIFITTGYILHQVPNPNIVLLAWILGGFLAVAGAMSYAKSASLFPYAGGDYVYLKEAYSPIVAFASGWLSLSINFSASISLSALAFSKSFFSLINPSWDIYFFEIPFLGLTISIGTAQILAMSAILVFTIVNFFGISTASRIQNLFTSVKILGLVSFVILGFVIGNYDISRFKSFSLFPSDLKGFELLFAGVIPVTYSYLGWNMITYVAEEVKDPDKNIYKAVLYSCALVTILYILMNFLFLSSGTLSELSGDKIGITASSALFGPKATVFITVFICWAFLASISAYIIGGSRIYFAMARDGFFFQNMAKLHSKHKSPYMSLLFQCGYACLFCFVKEIESLLYLITCSTLLLATITAYTPILFEKRNYKLKFRIPGYPYTTYLYIASNFGIIATLLWNKPTEAFWGVGFTFLSIPMYYYFKIMQNTLSKNSTPLETPEVLATSLLPENEPVPIASGE

SEQ ID NO: 12433 - protein, 157 aa, Synechococcus sp. WH 8102
MAISVSNVTVTTPDGSSKSLGDYSGKVLLIVNVASRCGFTKQYAGLQGLNAAYADKGLAVLGFPCNDFGAQEPGSLEEIKSFCSTTYGADFELFEKVHAMGSTTEPYSTLNQMDPTGDVAWNFEKFLVGKDGTVIARYKSGVDPEELKAPIEAALAA

SEQ ID NO: 12434 - protein, 170 aa, Saccharomyces cerevisiae
MPSDVASRTGLPTPWTVRYSKSKKREYFFNPETKHSQWEEPEGTNKDQLHKHLRDHPVRVRCLHILIKHKDSRRPASHRSENITISKQDATDELKTLITRLDDDSKTNSFEALAKERSDCSSYKRGGDLGWFGRGEMQPSFEDAAFQLKVGEVSDIVESGSGVHVIKRVG

SEQ ID NO: 12435 - protein, 158 aa, Oryza sativa
MAPVCISDERSVAVSAERFWKVFSNPPAMPKVCAGFFDAAEVEGDGGPGTVVILKFNPAVKQGLYKTRVVARDNASHFLKSEVLEVALGRAGKLKTHLTETKLEATGAGSCMAKLRVECEPEDGGSLSPEKQKIILEGYFGMLKMIENYLVAHPAEYA

SEQ ID NO: 12436 - protein, 335 aa, Erythrobacter sp. NAP1
MATKVAINGFGRIGRLVARAILERDDHDLELVSINDLADTKSNALLFQYDSTHGRFPGTVEVADGAMVVNGKSIAVTSERDPGNLPHGDQGVDIVLECTGFFQSHEAAEPHLKAGAKRVLISAPAKNVSATIVYGVNHETLTAEDVIVSNASCTTNCLSPVAKVLNDTVGIERGFMTTIHSYTNDQRMLDQMHSDMRRARGGAQNMIPTTTGAARAVGLVLPELAGKLDGSSVRVPTPNVSLVDLVFTPGRDTSAEELNEALKAAAEGPMKGVLEYTDQPLVSSDFNHQPASSTVDSLETSVMEGKLARVVSWYDNEWGFSNRMIDTAGVMAKFL

SEQ ID NO: 12437 - protein, 484 aa, Legionella pneumophila str. Paris
MLIFELSKTGRQAKAQIPRAVSKNYSIPEEFQRKSPPRLPACSELQVVRHFTCLSQKNFSIDTNFYPLGSCTMKYNPRGVHKAASLPGFINRHPLAMDNESQGFLETLYKLQNYISEITGMPGVSLTPMAGSQGEFAGVAMIKAYHQSRGDTARDEILIPDAAHGTNPASAVMCGFKVVEIATAPDGDIDLDELKRKVGPRTAGIMLTNPSTLGLFMRQIKEIANLVHQAGGLLYYDGANLNAILGKVRPGDMGFDVMHLNLHKTFATPHGGGGPGAGPVAVGKRLIPYMPLPVVKKTDSGYHWATRQDYPQSIGRLSCFMGNAGILLRAYFYMLVLGKEGLLRVSEFATLNANYLLKELTKVGYTAAYPGRRASHEFILTLNSEKKNYDVTAMDFAKRLLDYGVHAPTTYFPLLVPECLLIEPPETESKEELDAFVAVMKTIREEAIKQPDILKAAPHTLPVKRLDDVKAARELDLNYFATHE

SEQ ID NO: 12438 - protein, 330 aa, Sinorhizobium meliloti
MSGSDNPYQGSFGTQMTGSASFGGQPASAASGPNDLTPDDLIRETTTAAFTRDVLEASRQQPVLVDFWAPWCGPCKQLTPVIEKVVREAAGRVKLVKMNIDDHPSIAGQLGIQSIPAVIAFIDGRPVDGFMGAVPESQIKEFIDRIAGPAADNGKAEIESVLADAKALIDAGDAQNAAGLYGAVLQADPENAAAVAGMIECMIALGQVAEARQALSGLPEALAGEAAVAAVSKKLDQIEEARKLGDPAALERQLALDPDDHAARLKLAKLRNVEGDRTAAAEHLLTIMKRDRSFEDDGARRELLSFFEVWGPKDPATIAARRKLSSILFS

SEQ ID NO: 12439 - protein, 131 aa, Methanocaldococcus jannaschii
MPTAKFVVADPKTGRCYQIEADNTPLVGKKIGEVFDGKIIGLEGYKLQIRGGTDSSGFPMRPDIHGSRKVRVLLSAPPGFKPKRKGERRRKTVRGNTIAPDIVQINVKVVEYGEKSIPELLGLEGGENQEQ

SEQ ID NO: 12440 - protein, 488 aa, Synechocystis sp. PCC 6803
MGRQLILFPMSDQSDHPLILLWHRRDLRLNDHLALAKARQKTAKIVGVFCLDNKILQAEDMAPARVAYLLGCLQSLQDHYQRLGSELLVFQADPVQLLPKLANTLGAHGVTWTLDTEPYAQKRDLAVAQALRERGLAIATEWDQLMHHPGEVLTQAGSPYTVYTPFWKNWSQLPKTSPVPTPKDLQGLTPAEKEKLAPLEPLAIPQLADLGFIWDQPLPLTPGEEAAEQRLDWFVAHGLEEYQQNRNFPALDGTSQLSAALKFGVISPRTLWQTTLEAWEQSRSEEARASIETWQQELAWREFYQHCLYSFPALAQGPYRSPFQEFPWEENQDHFQAWCEGRTGYPIIDAAMAQLNQTGWMHNRCRMIVASFLIKDLILNWQWGELYFMQTLYDGDLAANNGGWQWSASSGMDPKPLRIFNPHTQAQKFDPEGEYIRTWLPQLARFDTGDLLTGKLTPGSRRSVNYPEPIVDHNQQQREFKRRYQLVK

SEQ ID NO: 12441 - protein, 456 aa, Legionella pneumophila str. Paris
MPYIPHTPNDTKEMLTAVGAQDIQDLFDEIPASLQYAGFQSIPAGINEMEMLKEAQNQAQKNRNGICFIGAGCYEHHIPAAVWDIASRGEFLTAYTPYQAEASQGTLQLLYEYQTMICELTGMEVSNASMYDGATALAEAVLMAVRLNKHSKTNRVLITGTVHPFYRETIETIVRNQHIEVITLPFDEQQGITDFGSLNQYTGEDITALVIAQPNFFGCLEQVDKMTSWAHHNKTISVACVNPTSLALLKPPCSWGEHGVEIVCGEGQPLGSPMASGGPYFGFLSTRMAHVRQMPGRIIGRTVDKDGKTGFSLTLQAREQHIRRAKATSNICTNQGLLVTAATIYMSLLGPEGLSQVATQCHQNTHELITALTQIEGVELAFKAPFFHEALIKLNQPVQSVLQQLADAGIAGGYAPEQHYPQLANTLLVCATEVRSAEDIAKYAKTLKTIMSKRGA

SEQ ID NO: 12442 - protein, 356 aa, Magnaporthe grisea 70-15
MSRANPPSNSSGSRKISFNVSEQYDIQDVVGEGAYGVVCSAIHKPSGQKVAIKKITPFDHSMFCLRTLREMKLLRYFNHENIISILDIQKPRSYETFNEVYLIQELMETDMHRVIRTQDLSDDHCQYFIYQTLRALKAMHSANVLHRDLKPSNLLLNANCDLKVCDFGLARSAASQEDNSGFMTEYVATRWYRAPEIMLTFKEYTKAIDVWSVGCILAEMLSGKPLFPGKDYHHQLTLILDVLGTPTMEDYYGIKSRRAREYIRSLPFKKKVPFRTLFPKTSDLALDLLEKLLAFNPVKRITVEEALKHPYLEPYHDPDDEPTAPPIPEEFFDFDKHKDNLSKEQLKQFIYQEIMR

SEQ ID NO: 12443 - protein, 217 aa, Cytophaga hutchinsonii
MANVLIAPSVLSADFANLERDVKMINSSKADWFHIDIMDGVFVPNISFGFPVMQAINKHAAKPLDVHLMIVNPEKYIQTFKDSGAANISVHYEACTHLHRTIYQIKDVGCKAGIAINPHTPIHLLKDVIKDIDLVCMMSVNPGFGGQKFIEHTYQKVRDLKQLIQENNANVLIEIDGGVNEVTGPKLVQAGADVLVAGNYVFSAKDPVATIEQLKNI

SEQ ID NO: 12444 - protein, 386 aa, Ipomoea purpurea
MVDGNHPLPAPKVCVTGAAGFIGSWLVKTLLQRGYHVHATVRDPGNTKKVKHLVELPKADTNLTVWKGVMEEEGSFDEAIAGCEGVFHVATPMDFDSKDPENEVIKPTINGVLNIINSCVKAKTVKRLVFTSSAGTLNVQPQQKPVYDETCWSDLDFIYAKKMTGWMYFASKILAEKEAWKATKEKKIDFISIIPPLVVGPFITPTFPPSLITALSLITGNQAHYSIIKQGQYVHLDDLCEAHIFLYEHPKAEGRFICSSHHTTIHGLAEMITQNWPEYYIPSQFKGIEKELAVVYFSSKKLQDMGFQFKYSLEDMYRGAIETLRKKGLLPYSTKEAAAIEEEQETVPLKVEEPTAIEQKQETVPLKLEEEPIAIEKKQEVVPLKA

SEQ ID NO: 12445 - protein, 409 aa, Frankia sp. EAN1pec
MWWLRRDLRLDDNPALLAAAESGRVLALFVLDDALRRPSGPVRLAFLHRCLRDLDAQLGGRLCVRTGSPYAVAPGRLRKADGTSYRVFTPFYRAWKEHGWRGPAIPADPVWLQPADLDGGSEPIPADPELGGTELPPAGEHAAHERLRAFLTESLAGYAAHRDEPAAASESGDAVPGWSGASRAGGAGGAGGAGGADAAGGGGGLAGSAEKFRSELAWREFYADVLAGTPSSARTDLTDTLAALAYEPPGDTFEAWKWGRTGYPIVDAGMRQLLAEGWVHNRVRMIEASFVCKDLNVHRTHGARWYLERLVDGDLASNNHGWQWTAGTGTDAAPYFRVFNPVSQGRKFDPAGEYIRRWVPELRGLPPDAVHEPWKLPAGPPNGYPRPVVDHAVERREALDRHARARHHD

SEQ ID NO: 12446 - protein, 110 aa, Thermus thermophilus
  misc_feature (1)..(1): Xaa can be any naturally occurring amino acid
  misc_feature (36)..(36): Xaa can be any naturally occurring amino acid
  misc_feature (67)..(67): Xaa can be any naturally occurring amino acid
  misc_feature (72)..(72): Xaa can be any naturally occurring amino acid
XAKPIEVTDQNFDETLGQHPLVLVDFWAEWCAPCRXIAPILEEIAKEYEGKLLVAKLDVDENPKTAXRYRVXSIPTVILFKDGQPVEVLVGAQPKRNYQAKIEKHLPATA

SEQ ID NO: 12447 - protein, 112 aa, Sinorhizobium meliloti
MKIVMAIIKPFKLDEVREALTAVGIQGLTVTEVKGYGRQKGHTEIYRGTEYAVSFLPKLKVEIAVATEIVDRAVEAIASAAKTGQIGDGKIFVYSIDHAVRIRTGETDSEAL

SEQ ID NO: 12448 - protein, 412 aa, Legionella pneumophila str. Paris
MNSRRVVITGMGMLTPVGLNVEETWRSILAGVSGVGLVEDFDTTEYPTKIWAKVKNFNVENHMPIKDARKMDVFTQYGMAAADEAMLDSGLKIDETLSRRIGVAVGAGIGGIQTITNNQDKLVAGGPRKVSPFFIPAGIINMVAGQISIKHNLKGPNISVVTACTTGTHNIGLAGRIIAYGDADVMICGGAEMTTTPLCLAGFSAVRSLSKRNDEPEKASRPWDKDRDGFVMGEGAGILVLEEYEHAKARGAKIYAELVGFGMSGDAYHITAPDEDADGASRAMEAAIQDAGIDPRQVDYINAHGTSTYLNDLNETKAIKRVFQNHAYDLAVSSTKSMTGHLLGAAGAVEAIISILAIRDQVAPPTINLDNPDEGCDLNYVAHVPQSRTINYVLSNSLGFGGTNGSLLFKRI

SEQ ID NO: 12449 - protein, 188 aa, Oryza sativa
MVLVLALGDLHVPHRAADLPAKFKSMLVPGKIQHIICTGNLCIKEVHDYLKSLCPDLHITRGEYDEDARYPETKTLTIGQFKLGLCHGHQVVPWGDLDSLAMLQRQLDVDILVTGHTHQFKAYKHEGGVVINPGSATGAYSSITYDVNPSFVLMDIDGLRVVVYVYELIDGEVKVDKIDFKKTATMHA

SEQ ID NO: 12450 - protein, 461 aa, Streptococcus thermophilus LMG 18311
MSIFRKKDVGLSQTEMKRHLTLRDVVLLGIGAMVGTGIFTITGTAASTLAGPALIISVLISAVCVGMSAIFFAEFASRYPSAGGVYGYLYASWGEYPAWMGGWLTMIVFMNAVSSVASGWGAYLKGLLASFGLQLPKAISGPFNPSQGTYIDLLPVLVLVLVTALLLMDSKQVLRLNSLLVVLKFSALAVFILVGLFHLNPDNWANFAPFGFGQIYGGKTGIMAGASLMFFGFLGFESISMTVDEIKEPQKNVPRGIILALIIVASLYAVVSLVLTGVVHYTKLNVDDAVAYALRYIGVSWAANYVSVVAIMTLITVCISMAYALSRMVYSLARDGFLPQTFQKVSKTHKVPHYATLLTGILSAISSGIFSLANMASLVNISTLAYLVLLAIALIILRKDKGLPQKDEFKVPFVPVLPILSIIVCLSFMSQYSWQTWSAFGIAVLIGSAIYAFYGYKHSKY

SEQ ID NO: 12451 - protein, 177 aa, Oryza sativa
MAAAGVSGLAVGCLVAATAALLVAGASAQTGCTAALINLYPCLNYISGNETSPTRTCCSQLATVVQSQPQCLCAAISGDSSSSIGGVTIDKTRALELPKACNVVTPPASRCNSAGGNTPGAATTTSPATQTPGATGAGTGVGSKTTPTAPYLINGGASLRGATGLVLALAAVAVYAV

SEQ ID NO: 12452 - protein, 317 aa, Geobacter sulfurreducens PCA
MSDKTAVLLLQMGGPDSLDAVEPFLLNLFSDRDIIRIGPAFLQPFIARLIAKRRSPGVERKYEEIGGKSPIRELTESQARALEDVLGDGYRCFVAMRYWKPSTMEALAAIRREGISRVIALSLYPHYSRATTGSSVNELKRVLSQSGVQFQMMYVDRFFDHPLYIDALAEKIREGLDDFHPLAEVQVLFSAHSLPQSFIDEGDPYLDHIRETVRLVMERFEGVTHHLAFQSRAGPVKWLEPSTDEMLEHLAAHQVKNLLIVPLSFVSDHIETLHEIDIEYAQEAHKLGYSRFRRSPSLNTSPTFISCLADLVRRVEG

SEQ ID NO: 12453 - protein, 367 aa, Polaromonas sp. JS666
MTTVISPVEDIVADMRAGRMVILIDEEDRENEGDLVLAADHVSAEAINFMARFGRGLICLTLTRERCELLQLPPMATRNGTKHSTAFTVSIEAAEGVTTGISAADRARTVQAAVAKDAKVSDLVQPGHIFPLQAVDGGVLMRAGHTEAGCDLASMAGCSPAAVICEIMKDDGTMARLPDLLLFAAEHGLKIGTIADLIEHRSRNESLIEKIGSRTLQTAFGEFTVHAFKDKPSQGLHLALVRGQWSADDTVAARVHEPLSVLDALEVQRSMHSWSLDQSLNHIAREGKGVAVLLNCGESAAQLLAQFEGTARASQAPERGRMDLRTYGVGAQILRECGVHKMNLLGNPRRMPSMTGYGLEIVGYITQ

SEQ ID NO: 12454 - protein, 465 aa, Verbena x hybrida
MAALSRVYGPLMHLKMGFVHVVVAASAGAAEQFLKVNDANFSNRPPNAGAKYVAYNYQDLVFAPYGPRWRLLRKICALHLFSAKALEDFRTVRQEEVGILTRALASAGQTPASLGQMLNVCATNAIARVMLGRRVVGHSSGGGDEKAEEFKEMVVELMKLAGVFNIGDFIPPLERFDLQGVTANMKKLHKRFDAFLGAIVEDHKINSLGRSGEPHVDLLSTLISLKDEDDGEEGKINDTEIKALLLNLFSAGTDTTSSTVEWAIAELMRHPKILAQAQQELDSVVGQNRVVSESDLTQLPFLQAIVKETFRLHPSTPLSLPRIAEKSCEINGYFIPKGSTLLVNVWAIARDPNVWADPLEFRPERFMPGGEKPNVDVKGNDFELIPFGAGRRICAGMSLGIRMVQLLTANLIHGFDFELGNGLSAQQLSMEEAYGLTLQRAEPLVVHPKPRLAPHVYQSSVASVG

SEQ ID NO: 12455 - protein, 337 aa, Cochliobolus lunatus
MVVKVGINGFGRIGRIVFRNAIEHNDVEIVAVNDPFIEPHYAAYMLKYDSTHGQFKGDIKVDGNNLTVNGKTVRFHMEKDPANIPWSETGAYYVVESTGVFTTTEKAKAHLKGGAKKVVISAPSADAPMFVMGVNHETYKSDIEVLSNSSCTTNCLAPLAKVIHDKYTIIEGLMTTIHSYTATQKVVDGPSAKDWRGGRTAAQNIIPSSTGAAKAVGKVIPELNGKLTGMAMRVPTANVSVVDLTVRIEKGASYDEIKQAVKEASEGPLSGILGYTEDDIVTTDLNGDNRSSIFDAKAGISLNKNFVKLVSWYDNEWGYSRRVLDLLVYIAKIDGNA

SEQ ID NO: 12456 - protein, 600 aa, Streptomyces coelicolor A3(2)
MTQVADYVLQRLSEWGVQRVYGYPGDGINGLLGAFDRADGDPEFIQARHEEMAAFMACGHAKFTGEVGCCVATSGPGAVHLLNGLYDAKLDHQPVVAVVGQQKRLSLGTHYQQEIALDQLFADVSEYCQMVVHPGQARHVVDRAFKTALTTRGVATIIIPNDIQEEEAQPSPPREHGSVFSSVGWSRPRVLPDLDELRKAADVLNAGNKVAMLVGQGAANAEAEVKEVAELLGAGVAKALLGRQVLPDDLPYVTGPIGLLGSKASDNMIQGCDTLLMVGSSFPYSEWLPEEGQARGVEIDIDGRMIGIRYPMDAHLVGDSRETLRALIPMLQRKKDRGWREKIEKDVREWHDLCDRWAGEHFGKTINPQAVAAELSARLPDDVILTADSGSGTNWWARHLLLRDGMQASLSGTLATMGPGTPYAIAARFAYPERPVIAFIGDGAFQMNGMNEMITVKRYLDRLSGSAPLIFCVFNNQDLNQVTWEQRAMAGDPKYPGSQDIPDVPYAAYAELLGLKGIVCDDPKKVGAAWDEALSAGRPVVLEFKVDAEIAPIPPHIMKEQGKKAIKAALHDPEATGIATKGVRQKLTEYAEHLPGRGRK

SEQ ID NO: 12457 - protein, 183 aa, Parvularcula bermudensis HTCC2503
MTDRPFDSIPLRTIAGDPLSLADFAGKVILIVNVASKCGLTPQYAALQALYEAKKDQGLVILGVPANDFAGQEPGTDEEIQTFCATTYDVDFPLLSKAVVTGPSKHPLYAALTDAQPVKTGDADGFRAKLRSFGSEPTEDPEVLWNFEKFLIGKEGKVIGRFVPTTAPDDPALISAIDAALAA

SEQ ID NO: 12458 - protein, 818 aa, Methanopyrus kandleri AV19
MTVREVYEELREVVLEKLGKGEDPLPQILGQREVKIQVLSALIAGRHVLIEGPPGIGKTTLARAVADLLPPAEVVKGCPFHCHPKEPVCPLCRARDEDELETETIPGCERFVRIQGSPDLTPEDLLGDIDPIAALEYGPTDPRAFTPGKLLRGNRGVVFFDEINRCPEKLQNALLQVLEEQRATIAGYEVDYPANFVMIATMNPHEYAGTEELSEVLLDRFDTVKMTYPKSKETEKRIVVERGEDFGVKVPEYVLEFIVDLVRATRDHDDIERPASVRATIGLYERAQTHAALQGRSKVELQDVIEVAPSVLRKRIKLSPRVQHVKSEEDVIKEIIQEVLEGYGKTEVPDTDGIPGKSKPDEGASTGAPEGRRRSRRWRPRRTQEHPDGARLGSEKRSRSDSRTVSRSESQKTSATDSAADGEVLDDEYHRRLRFRALTKEDQRKYVEGEPEYVFAARVLRQLLNRGIEYIRPDQLAESLVTSAAYVKGKYGRRFIEEITGWSYDEIASQQHDYSLIDELEEEIQRRLEILQKLGFVRPSYQGGVSLTLKGRELAAFSALIEELEAFEGTEFGHHAAKRLSERGTGSRSYSREYRRGDPYANLDVRGSLRTAVRRGRREILPEDLRSFDREEEVCLDIVYVIDTSGSMSGDRIDAAKRAAIALAHFSVKAGDRVGIVGFNTKAEIVVDITSDVEEIITKVMSLKPGGATDIGDAIRVGTELFRRCGRPDRDWHMILLTDGVPTKGEPDPETKALSEATAASRMGVTISTIGIKLPEEGIRLIEHIAGISGGRSHHITDPEELTLVTLNEYRRAKGMGP

SEQ ID NO: 12459 - protein, 373 aa, Candida maltosa
MSVKTKTITILPGDHVGTEIVNEAIKVLEAIEAATPYQKIHFDFKHHLIGGAAIDATGVPLPDDALESAKNSDAVLLGAVGGPKWGTGALRPEQGLLKIRKELNLYANIRPCNFASDSLLELSPLRPEVVKGTNLIIVRELVGGIYFGDREEQEESADKQTAWDTEKYTVDEVTRITRMAAFMALQHTPPLPIWSLDKANVLASSRLWRRTVDKVISEEFPTLSVQHQLIDSAAMILIQNPTKLNGIIITSNMFGDIISDEASVIPGSLGLLPSASLASLPDTNTAFGLYEPCHGSAPDLPANKVNPIATILSAASMLRLSLDCVKEAEALEEAVKQVLDKGIRTADLRGTSSTTEVGDAIVEAVTKILKEKA

SEQ ID NO: 12460 - protein, 606 aa, Yarrowia lipolytica CLIB122
MGDSDQHEHGHVSPELATAHSPPLTSALQPTSSTSSIEEGPAAASNEEKTESDKRAPLNVPPVADTPPQTSPETTHNKCPPPPASQTPPKSPPKDDTSDVKGTDSASGANGDTDDNTENTNNTNNTTNTTNTNHTNHTNTNTNDKTDVTSGNAHEIPSNTSGKTSPAANTPTTTTTPTATNPIHIPGLTNTKPVSLSGTSSPVAHNTYTAASTVNMGKSGHASDAGSAQETGSTSGATTGSVAIATCGGREINPHVLYVAGVDASVKESILLDLFKVTGPIKSIKIFPDRQKANINFAFIEYEDKEAAQLAMQTLNNRQIHGQEISVSFAFQTKVERDYNLFVGDLGADVNDEMLHKHFAHIPGLLDARVMWDMTTGRSRGYGFVSFETKQGAERGLIENGSVLGSRVIRANWASSRRSNMQGQSGPQGGRNMGGHMGGHMGGGMGGGMGGMGGMGGMGGMGGMGGMGGMGGFNNGMGNFGPYGNQGMGGHNHGPGNHNMMNNRNYRDRSDRSDRSDRSDRNDRDRGGDKMGLPKTVYIGNLPNMHPSELIPLLQNFGYVVEFKHHSNYAFVSYDSHKRAQIAMMQLNGYNIHGRTLKCGWGRDRR

SEQ ID NO: 12461 - protein, 523 aa, Candida maltosa
MAIEQIIEEVLPYLTKWYTIIFGAAVTYFLSIALRNKFYEYKLKCENPVYFQDAGLFGIPALIDIIKVRKAGQLADYTDTTFDKYPNLSSYMTVAGVLKIVFTVDPENIKAVLATQFNDFALGARHAHFDPLLGDGIFTLDGEGWKHSRAMLRPQFAREQIAHVKALEPHVQILAKQIKLNKGKTFDLQELFFRFTVDTATEFLFGESVHSLYDEKLGIPAPNDIPGRENFAEAFNTSQHYLATRTYSQIFYWLTNPKEFRDCNAKVHKLAQYFVNTALNATEKEVEEKSKGGYVFLYELVKQTRDPKVLQDQLLNIMVAGRDTTAGLLSFAMFELARNPKIWNKLREEVEVNFGLGDEARVDEISFETLKKCEYLKAVLNETLRMYPSVPINFRTATRDTTLPRGGGKDGNSPIFVPKGSSVVYSVYKTHRLKQFYGEDAYEFRPERWFEPSTRKLGWAYLPFNGGPRICLGQQFALTEASYVIARLAQMFEHLESKDETYPPNKCIHLTMNHNEGVFISAK

SEQ ID NO: 12462 - protein, 127 aa, Zea mays
TTGRLSFCSFSFPSASGRRRFAAVRASAETMATEKLGIKVERNPPESRLSELGVRQWPKWGCEKSKFPWTYSAKETCYLLQGKVKVYPEGHGEEFVEIGAGDLVVFPKGMSCTWDVAEAVDKHYNFE

SEQ ID NO: 12463 - protein, 554 aa, Pseudomonas syringae pv. phaseolicola 1448A
MAYYRNPSDVTALPAWQALSKHRQSMQNFSMREAFNSDPQRFSQFTLSSAGLFLDYSKNLITTETRDLLVSLAGEVNLKDAIKAQYDGELVNSSEGRPALHTALRRPVGDKLKVNGVDVMPDVHRVLNQMTELVGRIHDGLWRGYTEKPITDVVNIGIGGSFLGPELVSEALVAYAHKGVRCHYLANIDGSEFHELSMKIRAETTLFIVSSKSFNTLETLKNAQAARAWYLAQGGSEVELHRHFIAVSSNNAAAVAFGIREENIFPMWDWVGGRYSLWSAIGLPIALAIGMSNFKELLSGAYTMDQHFQSAPFEQNMPVLLALLGVWYGNFWNAQSHAILPYDHYLRNITKHLQQLDMESNGKSVRQDGTPTSTDTGPVIWGGVGANGQHAYHQLLHQGTQMIPADFIVPIVSFNPVADHHQWLYANCLSQSQALMMGKTRAEAEAELREKGMSEEEVQKLAPHKVIPGNRPSNTLVVERISPRRLGALVAMYEHKVFVQSVIWGTNAFDQWGVELGKEMGKAVYQRLTGGTEEPADDASTQGLINYFRGRHRG

SEQ ID NO: 12464 - protein, 555 aa, Bacteroides fragilis NCTC 9343
MGLFIKKPFEALLAEANVSGSKSLKRVLGPWSLVALGVGVIIGAGLFSITGTVAAGYTGPAITLSFAIAALGCCFAGLCYAEFASMIPVAGSAYTYSYATMGELIAWIIGWDLVLEYTVAATTVSISWSRYLVVFLEGLDIHLPQALTACPWDGGIVNIPAFLIVVLMSIFLIRGTEGSSIFNGIVVFLKVSVIAIFVVLGWKYINADNYTPYIPANTGTLGEYGLSGVLRGAAIVFFAFLGFDAVSTAAQETKNPKRNMPIGILVSLLVCTVLYMLFAHVMTGVAHYTEFSGQQGIAPVAIAIEHMGHADATGIIHPDYPWLNRAIVLAILFGYCSVIMVTLLGQSRVFLSMSHDGLLPPFFSHINEKFRTPARSNLLFMLIVGLLAAFVPARLAGEMTSIGTLMAFTLVCAAVLVVRKTMPNIPRSFKTPFVPLVPILGILTCLCMMLFLPADTWIRLVLWMLIGLDIYVGYGMKHSKLEHGVKNRRGQSALNMIGIALSLLCVITGLWHQQTVGWNESKALLIISFVFAFTHCAYYMMRIWKGTTKQTNDNG

SEQ ID NO: 12465 - protein, 113 aa, Xanthomonas campestris pv. campestris str. ATCC 33913
MSDKVQHVGDADFDTAVLQSGEPVLVDFWAEWCGPCKMIAPVLDDLADTYQGKLKVAKVNVDQNRALAIKYHVRSIPMLLLFKDGEVQASQIGAVGKGQLTQMIDKTLGGAAA

SEQ ID NO: 12466 - protein, 528 aa, Zea mays
MAWLGLGRAGGAIKGRGWKYGSGFVDGVFPVLSPMAQDVLELVQTRGTDAASVWESLDKIPQAHDLWDDIVNVAVQLRLNRQWEPIITVCEWVLRRSSFRPDIICYNLLIDAYGQKRQLSEAEAAYMALLEARCVPTEDTYALLLRAYCGSGQLHRAEGVISEMQRNGIPPTATVYNAYLDGLLKARCSEKAVEVYQRMKKERCRTNTETYTLMINVYGKANQPMSSLRVFREMKSVGCKPNICTYTALVNAFAREGLCEKAEEVFEEMQQAGHEPDVYAYNALMEAYSRAGLPQGASEIFSLMEHMGCEPDRASYNILVDAFGRAGLHQEAEAAFQELKQQGMRPTMKSHMLLLSAHARSGNVARCEEVMAQLHKSGLRPDTFALNAMLNAYGRAGRLDDMERLFAAMERGDGAIAGAPDTSTYNVMVNAYGRAGYLDRMEAAFRSLAARGLAADVVTWTSRIGAYARKKEYGQCLRVFEEMVDAGCYPDAGTAKVLLAACSDERQVEQVKAIVRSMHKDAKTLFAL

SEQ ID NO: 12467 - protein, 506 aa, Blastopirellula marina DSM 3645
MAKAPQNAISPTRADDYPEWYQQVIKAADLAEVSPVRGCMVIKPWGWSIWENMQAVLDGMFKETGHENAYFPLFIPMSFLEKEAEHVEGFAKECAVVTHHRLEPGPNGGLVPAGKLDEPLIVRPTSETIIGAMYAKWVQSYRDLPILINQWANVVRWELRTRMFLRTTEFLWQEGHTAHATAEEAIAETRQMLEVYADFAENYMAMPVIKGEKTSWERFPGASMTLSIESMMQDRKALQAGTSHFLGQNFSKAQEIKFQTQEGTEEFAWTTSWGVSTRLVGGLIMTHSDDDGLIVPPRLAPKHIVLLPIYRSDEERAAVLAYVDQLNSALKGVQYHGAPVRVLIDDRDIRGGEKTWQHIKKGVPLRAEIGPRDVASDSVFLARRDQSPKDKKGTPKAELVATITTLLDEIQSNLFERAKKLRDDNSRTIDKLEELVAYFTPKNEDRPEIHGGFAYCHCADDKAVEEALKKLKLTVRCIPIEGDVEPGECIFTGKPTQRRAVIAKAY

SEQ ID NO: 12468 - protein, 379 aa, Clostridium acetobutylicum ATCC 824
MKSTKILILGAGPAGFSAAKAALGKCDDITMINSEKYLPYYRPRLNEIIAKNKSIDDILIKKNDWYEKNNIKVITSEFATSIDPNNKLVTLKSGEKIKYEKLIIASGSIANKIKVPHADEIFSLYSYDDALKIKDECKNKGKAFIIGGGILGIELAQAIIDSGTPASIGIILEYPLERQLDRDGGLFLKDKLDRLGIKIYTNSNFEEMGDLIRSSCVITAVGVKPNLDFIKDTEIASKRGILVNDHMETSIKDIYACGDVAEFYGKNPGLINIANKQGEVAGLNACGEDASYSEIIPSPILKVSGISIISCGDIENNKPSKVFRSTQEDKYIVCMLKENKIDAAAVIGDVSLGTKLKKAIDSSKSFDNISSLDAILNNL

SEQ ID NO: 12469 - protein, 239 aa, Streptoalloteichus hindustanus
MAQTEKVGHGEIGHIHSDVSGGWLRPAVFGAMDGLVTNIALVAGVGGGGAGPDVVVLSGVAGLVAGALSMAIGEYTSVETQNDAVRAEVAVERAELRDNPEGERAELVEAYVAMGLTRPTAERVAAEVHANPELAVRVHVTQELGVNPDEQPSPWTAALLSFLCFSLGALTPLAPFLLGFASLPAGLLVGGAGLFVAGALVARWTTRSWWRNGLRQLALGALAAVATFLVGSVVGVVTT

SEQ ID NO: 12470 - protein, 447 aa, Bacillus cereus ATCC 14579
MLHRYLPMTEEDKKEMLQTIGVQTIDELFSDIPESVRFKGDLKIKEAKSEPELLKELSQMASKNANLKEYASFLGAGVYDHYAPVIVDHVISRSEFYTAYTPYQPEISQGELQAIFEFQTMICELTGMDVANSSMYDGGTALAEAAMLAAGHTRKKKILVSSAVHPESRAVLETYAKGQNLEVVEINHKDGVTDLDVLQSEVDDTVACVIVQYPNFFGQVEKLADIEKIVHQQKSLFIVSSNPLSLGALTPPGKFGADIVIGDAQPFGIPTQFGGPHCGYFATTKAFMRKIPGRLVGQTVDSDGKRGFVLTLQAREQHIRRDKATSNICSNQALNALAASVAMTALGKQGVKEMARQNISKAQYAKRQFEAKGFTVTFAGPFFNEFVVDCKRPVKEVNDALLQKNIIGGYDLGRDYKEHENHMLVAVTELRTKEEIDTLVNEMGAIQ

SEQ ID NO: 12471 - protein, 249 aa, Solanum tuberosum
MKFNIANPTTGCQKKLEIDDDQKLRAFFDKRISQEVSGDALGEEFKGYVFKIMGGCDKQGFPMKQGVLTPGRVRLLLYRGTPCFRGHGRRNGERRRKSVRGCIVSPDLSVLNLVIVKKGENDLPGLTDTEKPRMRGPKRASKIRKLFNLSKEDDVRKYVNTYRRNFTTKTGKNASKAPKIQRLVTPLTLQRKRARIADKKKRIAKAKSEAADYQKLLASRLKEQRERRSESLAKKRSRLSAASKPSIAA

SEQ ID NO: 12472 - protein, 478 aa, Prochlorococcus marinus str. MIT 9312
MNNPRILFWHRKDLRIFDNQALIKAFSLSNAITSTYILDRNYTHDFSANSRAWFLGDSLQELGNNWEKMGSRLVIEEGDPVLIIPQLAKTIDAKFVIWNKTIEPYEINRDLQIKKNLKEKNIQVIESWDHLLVEPLKIFSGNNKPYSVYGPFYKNLKSKMNLLGLYDQDKVIFQFKDIDNKLKENKLINSSDSTLKKFLKNIKFSGSNICPCRPGENGAEILLEKFINEKNIYSYNSARDLPSHNGTSFLSASLRFGTISIRKVWNATLDLNSDFESHENSLSIETWQKELVWREFYQHCLFHFPELEKGPYRKKWGQFPWQNNNEWFQHWSNGETGVPIVDAAMRQLNSTGWMHNRCRMIVASFLVKDLICSWQMGEKKFMETLVDGDLAANNGGWQWSASSGMDPKPLRIFNPYTQAKKFDPICEYIKSWIPELSKVSNSDLLNGEISNLEKNNYSTPIVDHNIQQRLFKSLYAEI

SEQ ID NO: 12473 - protein, 534 aa, Bacillus cereus ATCC 14579
MKNQDQALIFEVSKEGRIGYSLPKLDVEEVKLEDVFESDYIRVEDAELPEVSELDIMRHYTALSNRNHGVDSGFYPLGSCTMKYNPKINESVARFAGFANIHPLQDEKTVQGAMELMYDLQEHLIEITGMDTVTLQPAAGAHGEWTGLMLIRAYHEANGDFNRTKVIVPDSAHGTNPASATVAGFETITVKSNENGLVDLEDLKRVVNEETAALMLTNPNTLGLFEENILEMAEIVHNAGGKLYYDGANLNAVLSQARPGDMGFDVVHLNLHKTFTGPHGGGGPGSGPVGVKADLIPYLPKPILEKTESGYHFNYDRPEAIGRVKPFYGNFGINVRAYTYIRSMGPDGLRAVTEYAVLNANYMMRRLAPFYDLPFDRHCKHEFVLSGRRQKKLGVRTLDIAKRLLDFGYHPPTIYFPLNVEECIMIEPTETESKETLDGFIDKMIQIAKEVEENPEVVQEAPHTTVIKRLDETMAARKTSFTLCKASSCTSLIRITKEELAEVGSFFVWRICPALTDSKLPTQNLAGAKKPGGR

SEQ ID NO: 12474 - protein, 725 aa, Prochlorococcus marinus str. MIT 9312
MILNPELTEKGEIKDLMKSKDSFRAFPLAAITGHSLLKLSLLLAAVDPSLGGVVIAGGRGTGKSVLARGLHTLLPPIEVLDNELILEKLTKRNSNTSLRPIGRNLDPDKPEEWDISTNKLLEEAIGSDYLNQIEEIPKKVREAPFIQVPIGITEDRLVGSIDVAASLSTGEQVFQPGILAEAHRGVLYVDDINLLDDGIVNLILEATGREKNNIERDGLSLSHPCKSLLIATYNPEEGALRDHVLDRFAIVLSADQSIDNTQRVEITKSVLSHAENNIKFSEKWSEESDNLSTQLILARQWLKDVKITKEQITYLVNEALRGGVEGHRSELFAVKVAKANAALRGDENVNSEDLKVAVRLVILPRAMQIPPEDEDIQPPPPEDQSPPPPPQSNNDDSEPEANENDNNQDQEQEEDNSDGEEESTPEIPEEFILDPEACMVDPDLLLFSSAKAKAGNSGSRSVIFSDSRGRYVKPVIPRGKVKRIAVDATLRAAAPYQKSRRLRNPNKSIVIEENDFRAKLLQKKAGALVIFLVDASGSMALNRMQSAKGAVIRLLTEAYENRDEVALIPFRGNQAEVLLPPTRSITAAKRRLETMPCGGGSPLAHGLTQSAKVAKNALSTGDIGQVIVVAITDGRGNVPLGLSLGKNEVEEKDNENVNLKQEVLDIAAKYPILGIKLLIIDTERKFIASGFGKELAEAARGKYVQLPKATDKAIAAMALNAINEF

SEQ ID NO: 12475 - protein, 532 aa, Bifidobacterium animalis subsp. lactis
MATLPTNIPANGILTPDPALDPVLTPISDHAEQLSLAEAGVSALETTRNDRWYPKFHIASNGGWINDPNGLCRYNGRWHVFYQLHPHGTQWGPMHWGHVSSDNMVDWHREPIAFAPSLEQERHGVFSGSAVIGDDGKPWIFYTGHRWANGKDNTGGDWQVQMLAKPNDDELKTFTKEGMIIDCPTDEVDHHFRDPKVWKTGDTWYMTFGVSSKEHRGQMWLYTSSDMVHWSFDRVLFEHPDPNVFMLECPDFFPIRDARGNEKWVIGFSAMGAKPNGFMNRNVNNAGYMVGTWKPGESFKPETEFRLWDEGHNFYAPQSFNTEGRQIMYGWMSPFVAPIPMEEDGWCGNLTLPREITLGDDGDLVTAPTIEMEGLRENTIGFDSLDLGTNQTSTILDDDGGALEIEMRLDLNKTTAERAGLHVHATSDGHYTAIVFDAQIGGVVIDRQNVANGDKGYRVAKLSDTELAADTLDLRVFIDRGCVEVYVDGGKHAMSSYSFPGDGARAVELVSESGTTHIDTLTMHSLKSIGLE

SEQ ID NO: 12476 - protein, 261 aa, Shigella flexneri
MSESLHLTRNGSILEITLDRPKANAIDAKTSFEMGEVFLNFRDDPQLRVAIITGAGEKFFSAGWDLKAAAEGEAPDADFGPGGFAGLTEIFNLDKPVIAAVNGYAFGGGFELALAADFIVCADNASFALPEAKLGIVPDSGGVLRLPKILPPTIVNEMVMTGRRMGAEEALRWGIVNRVVSQAELMDNARELAQQLVNSAPLAIAALKEIYRTTSEMPVEEAYRYIRSGVLKHYPSVLHSEDAIEGPLAFAEKRDPVWKGR

SEQ ID NO: 12477 - protein, 650 aa, Zea mays
MGEYAAVKTSVWWDIENCHVPRSCEAHLIAQNMSSALAAAGYTGPITISAYGDTNCVPNHVQHALSSTGIALNHVPAGIKDASDKKILVDMLIWAIDNPPPANYLLISGDRDFSNALHKLVMRRYNILLAQPPNVSQALTAAAKHVWLWKDLVAGEPPLAESPYISSIANGSVDHSNTSNNMGSDSSDAPHNSTQGQNSIPGDQQKGGNSKADKQYKVKQPRKNQSDNVSKPTRTDEASVDGVSDSSKGSTATEPNQSQSSSSSLPSSDLHDGGGAQVDELNTQKNQPSSQSKKPKKSTLSHQKSAPHDFYHGKKPGVSVESSSKNGAPDVTSNGRPKYQKPQSSHQPRQQNPVNHRPHGGSGNFQSSNSHRSNSCPAPAGHNGIPTAPLQFWPSGPPYHGPPINYPDMSRLNISEYPRGIHNNQGLHANYHPNHPGYNDYSYRPPTQPNMPSNMQNIGHWGANPGCSQPSSDPQGLVRYILGALEVLKTEKIPPTEQYIADCIWYGHGDANMPNFDVKKALQVAMQHQAVVKKKLGKMSFFLGKDENLWKCVNIMDDNAKYPKETLDAVHAFMSSAPGYSEIKSSQSRYQAATMLKKTCLKHLSLAEVLQVLNIIINTKKWFVPHSSGWQPLSFNIIVADATTATGGKA

SEQ ID NO: 12478 - protein, 424 aa, Streptomyces cyanogenus
MGRRVVVTGIGVLAPGGIGAENFWSLLSEGRTATRGITFFDPSSFRSQIAAEADFDAERSGLSPQEIRRMDRAAQFGVVTGREALADSGLDQAGLDPYRTGVTIGSAVGATMGLDEEYRVVSDGGRLDLVDHHQYTPQHLYNHFVPSSFSAEVAWAVGAEGPNTVVSTGCTSGIDSVGQAVELIREGSVDVMIAGATDAPISPITMACFDAIKATTPRNDEPEHASRPFDGTRNGFVLGEGSAVFVLEELTAARARGANIYAEIAGYASRCNAFHMTGLRPDGREMGEAIRVALDEARINPEAIDYINAHGSGTKQNDRHETAAFKLSLGEHAYRTPISSIKSMVGHSLGAIGSIEIAASLLAMENHVVPPTANLHTPDPECDLDYVPLVAREHTTDHGPDGRQRIPVGFQSAMVLARPERSAA

SEQ ID NO: 12479 - protein, 963 aa, Bordetella pertussis Tohama I
MAQALPTMDRRTFLRRSGLGVGAGLAATQLSLVKRAEAAEGDGKVAIGNTKIEVRRTVCTHCSVGCAVDAVVENGVWVRQEPVFDSPINLGAHCAKGASVREHGHGEHRLRYPMKLVNGKYQRISWDTAYEEITAKLMQLRKESGPDSVYWIGSSKHNNEQSYLLRKFVSFWGSNNCDHQARICHSTTVAGVANTWGYGAMTNSYNDMQNSKVALYIGSNAAEAHPVSMLHMLHAKETGCKMIVVDPRFTRTAAKADQYVRIRSGTDIPFLFGLLYHIFKNGWEDQAYIDARVYGMDEVKADILAKWSPDKVEEACGVDEATMYSVAKTMHENRPGTLVWCMGQTQHSIGNAMVRASCIVQLALGNVGKSGGGANIFRGHDNVQGATDVGPNPDSLPGYYGLAEGSWKHFANTWGVDYEWIKDRYASPAMMTKPGITVSRWIDGVLENPDLIDQDTNLRAVFYWGHAPNSQTRGLEMKRAMDKLDLLVVVDPYPSATAAMAAMPGKAEDLNPNRAVYLLPAATQFETNGSCTASNRSLQWREKVIDPLWESRTDHMIMHQLAEKLGFGKELSKNYKMQKVKGMDEPVVEDILREINASVWAIGYTGQSPERLKAHMRNMHVFDVKTLRAKGGKDAETGYDLTGDYFGLPWPCWGNPSLKHPGTANLYDTSLHVMDGSGNFRANFGVERNGVNLLAADGSHSKGADLTTGYPEFDHVLLKKLGWWEDLTPEEQKAAEGKNWKTDPSGGIIRVTMKVHGCHPFGNARARAVVWNFPDAIPQHREPIYGTRPDLVAKYPTHNDLKTFWRLPTLYTSLQQKNVAEKLYEKFPIILTSGRLVEYEGGGEETRSNPWLAELQQESFVELNPKAAADRGIRNGDRVWVLTPTGARLNVQALVTERVGPDTAFMPFHFSGHWQGVDMLASYPEGAAPIVRGEAVNTGTTYGYDSVTMMQETKTTICNIEKA

SEQ ID NO: 12480 - protein, 312 aa, Pasteurella multocida subsp. multocida str. Pm70
MVVMMTRKSLRIATRQSPLALWQANYVKACLEKIHAGLVVELVPMVTKGDVILDTPLAKIGGKGLFVKELEQALLKGEADIAVHSMKDVPMQFPAGLMLSTICQREDPRDAFVSNSYRTLMELPAGAVVGTSSLRRQCQLKQLRPDLHIHSLRGNVGTRLAKLDNGDYDAIILAAAGLIRLGQQQRITSLIDVTQCLPAVGQGAVGIECRQEAEIELLLAPLADPETTACVLAERAMNRHLQGGCQVPIAGYAIIEEGQLFLRALVGEVDGSSILRAEGRSAVADAETLGIQVAEKLLQQGADKILQTLYSN

SEQ ID NO: 12481 - protein, 469 aa, Geobacter sulfurreducens PCA
MQITFGTDGWRGIIAREFTFDNLSRVAQATMDYLKREGLAARGLVVGYDRRFLSRDFADRVAEIAAGNGIRVWLTDGPAPTPAISWAVHEMKAGAGVMITASHNPPAYNGFKVKESFGGSARPATTRILEEITAANTAAGRGIEERPLAAALADGTVTIFDPREGYCRQLARYVDLDLIRQAAIPLAVDPMHGAGAGVIPELVPGALEIHGDENPGFRGVPPEPTEEHLQELATLVRDGVCRVGLALDGDADRIGAVDENGEFFSSHRIFTVILRHLVERKGLTGGVVKTVSTTRMIDLLAQKYGLPLHETPIGFKHICELMLEHDILMGGEESGGLGVKGHIPERDGVLMGLLLLEAMAMSGKGLRRLLDETMDEIGVFHYQRLDLPIEDAPKAALITRLREERIDAIAGRPVAGTNFRDGFKFMFEDGSWLLIRPSGTEPVLRLYSEAGTPGTVGELLAAGREIAGV

SEQ ID NO: 12482 - protein, 577 aa, Pediococcus pentosaceus ATCC 25745
MTEKINASDAMIKVLESWGVHNVYGLPGGSFDSTMNALYNRKSTINYVQVRHEEVGALAAVGEAKVTGKLGVTFGSAGPGAVHLLNGLYDAKHDHMPVLALVGQVPTTLMNTDYFQELNENPIFTDVAVYNRTVMTAEQMPHVVDEAIRQAYKYSGVAVVTIPKDLGWQPIEDNYVSSANLYQAPILPEPDVKQVDEALEILSNAKHPVMYIGQGTRGAGSDIIALSEKLHIPIVTSALAKGIVPDSYKANMGSAGRVATKPGVEVLQAADAVMFVGSDFPFQPYFVAPDAKYIQVDIDASKFGRRHVVDLAILADSHKFLKVMLEKAETTAESKWYKAALENKKNWEEWKNSFVGQQDTPLNVENVFAKINALATDDAIFQVDVGNVTIDGMRFLKADQAQRFTTSGWYATMGYALPAAIGAQAEYPDRQVWSISGDGGYAMVMQDVLTQVKYHMPIINVILTNESLGFIEAEQDDSKQPHSGVDLIDADYGTSAQALGAEGFEVRTYDELEQAFEKAKDRKGPVVIDIKITNLRPLPVEQLLLDKETQDPEAVEQFVKKYHAESLIPFRKLLEEA

SEQ ID NO: 12483 - protein, 375 aa, Verbena x hybrida
MAPTKTCLTTLAEENSVHQKFIRDEDERPKVPYNQFSDQIPVISLAGIVDETGGGGDRAEACKKIVAACEEWGIFQVVDHGIDAKLIKDMTRLAREFFALPAEEKLRFDMSGGKKGGFIVSSHLQGEVVQDWREIVIYFSYPINGRDYSRWPDKPEGWRSVTEMYSEQLMKLNCKLLEVLSEAMGLENDALAKACVEMDQKLVINFYPKCPQPDLTLGLKRHTDPGTITLLLQDDVGGLQATRDGGKTWITVQPVEGAIVVNLGDHGHYLSNGRFKNADHQAVVNSNYSRLSIATFQNPAPDAIVYPLKINEGEKAVMEEPITYSEMYKRKMNKDLEIARLKKLATEKKLQEAELEKLANQVEVKPCKGLEEILA

SEQ ID NO: 12484 - protein, 313 aa, Wolbachia sp. wCer2
QLGINLTKGLGAGALPDVGKGAAEESIDEIMEHIKDSHMLFITAGMGGGTGTGAAPVIAKAAREARAAVKDRAPKEKKILTVGVVTKPFGFEGVRRMRIAELGLEELQKYVDTLIVIPNQNLFRIANEKTTFSDAFKLADNVLHIGIRGVTDLMVMPGLINLDFADIETVMSEMGKAMIGTGEAEGEDRAISAAEAAISNPLLDNVSMKGAQGILINITGGGDMTLFEVDAAANRVREEVDENANIIFGATFDQAMEGRVRVSVLATGIDGRNNKSETSPISQSEDSEKEKFKWPYSQSESTQDKTLETKPAE

SEQ ID NO: 12485 - protein, 538 aa, Candida maltosa
MSVSFVHNVLEVVTPYVEYYQENLTKWYILIPTILLTLPFLSILHTKYLEYKFNAKPLTNFAQDYSFGVITPLMLMYFKWHGTVMEFACNVWNNKFLVLNGNVRTVGLRIMGLNIIETTDPENVKAILATQFNDFSLGTRHDFLYSLLGDGIFTLDGAGWKHSRAMLRPQFAREQVAHVKLLEPHVQVLFKHVRKSQGKTFDIQELFFRLTVDSSTEFLFGGSVESLRDASIGMVPSTKNIAGREEFADAFNYSQTYNAYRFLLQQFYWILNGSKFNKSIKTVHKFADFYVQKALSLTDDDLEKQEGYVFLYELAKQTRDPKVLRDQLLNILVAGRDTTAGLLSFLFFELSRNPTVFEKLKEEIHNRFGAKEDARVEEITFESLKLCEYLKACVNEALRVYPSVPHNFRVATRNTTLPRGGGKDGMSPIAIKKGQNVMYTISATHRDPSIYGEDANVFRPERWFEPETRKLGWAYVPFNGGPRICLGQQFALTEASYVTVRLLQEFHTLTQDANTRYPPRLQNSLTVSLCDGANIQMY

SEQ ID NO: 12486 - protein, 357 aa, Verbena x hybrida
MFSTVAPSPRVEILAGSGIKTIPKEYVRPDEELESIRDVFAEERSIDGPQVPTIDLAEINSENEEIRKKCHDELKKASMEWGVMHLTNHGIPDELINRVRKAGQGFFDLPVEEKEKHANNQEAGNVQGYGSKLANNASGQLEWEDYFFHCVFPEDKRDLSIWPKNPADYIPATSEYARQLRSLATKILSVLSIGLGLEQDRLENEVGGMEELILQKKINYYPKCPQPELALGVEAHTDVSALTFIIHNMVPGLQVFYEGKWVTAKCVPNSIIMHIGDTIEILSNGKYKSILHRGLVNKDKVRISWAVFCEPPKEKIILKPLPEMVSEAEPPLFPPRTFAQHLKHKLFRKTDDEEIDE

SEQ ID NO: 12487 - protein, 423 aa, Wolbachia endosymbiont of Drosophila melanogaster
MSRRVVVTGVGLITPLAADVDNTWSRLIKSESGIKAINTERFDSSDLACKIAGQVPLQSDNIEHHFNPLDYISEKDSKRTDRFIHYGIAAAIQAVDDSLILESQNINRERVGVTIGSGIGGLPSIQENVITMQEKGPRRVSPFFVPASLINLISGHISIKYEFTGPNDSAVTACATGAHAIINSARTIKLGEADVMIAGGAESALCRVGIAGFASMKALSTKFNDKPEEASRPWDEERDGFVMGEGAGILVLEEYEHAKKRGAKIHAELVGYGLTGDAHHITAPHPEGRGAFKAMQLALKSAQINPNQVGYINAHGTSTPLGDKIEVIAMKQLFGDYVYKIPVSSTKSSIGHLLGAAGSVEAIFSILALNNGIIPPTLNLHKPSEGCDLNFVPFKAQEHKIQYALSNSFGFGGTNASLIFGQV

SEQ ID NO: 12488 - protein, 222 aa, Verbena x hybrida
MIILPSITEVQVESVVFPPAVKPPGSDKTFFLGGAGVRGLEIEGKFIKFTAIGVYLENDAVTSLAAKWKGKTAEEVADSGDFFAEIVTGPFEKFTKVTTILPLTGQQYSEKVVENCVAYWKAIGKFTDAEDEATKKFLQVFKNEMFHPGASILFTQSPQGSLTISFSKDGSIPEKENAIIENKQLSEAVLESIIGKKGVSPSAKQSLAARLSDLLKQCESTT

SEQ ID NO: 12489 - protein, 388 aa, Pichia norvegensis
MSAAKQLFKIVPLTPTEINFLQSLAPVVKEHGVTVTSTMYKYMFQTYPEVRSYFNMTNQKTGRQPKVLAFSLYQYILHLNDLTPISGFVNQIVLKHCGLGIKPDQYPVVGESLVQAFKMVLGEAADEHFVEVFKKAYGNLAQTLIDAEASVYKTLAWEEFKDFRVTKLVKEAEDVTSVYLTPVDGFKLKPIIPGEYISFRWDIHNPDITDIQPREYSISQDVKENEYRISVRDIGIVSDYINKKLQVGDIVPVHAPVGTMKYDSISKKGKVAVLAGGIGITPMIPIIEHALKDGKDVELYYSNRSYQSEPFREFFSNLEKENNGKFKLNNYISAENQKLQVKDLEHINPDEYDVYLLGPVAYMHEFKTYLVGKGVSDLKMEFFGPTDP

SEQ ID NO: 12490 - protein, 180 aa, Yarrowia lipolytica CLIB122
MRPLTEEETKTVFEKLANYVGRNISHFINNEDPHVFRLQKDRVYYVEEKIAKYATCVSRAQLFSVGTCLGKFTKTGKFRLHITALPLLAAHARHKIWIKPNGEMPFLYGNHVLKAHIGKMSDDIPEHAGVIVYSMSDSPLGFGVSAKSSLEVRRLDPTGMVAFRQGDVGEYLREEDTLFA

SEQ ID NO: 12491 - protein, 271 aa, Thermotoga maritima MSB8
MWIDCKTIARSIEERTKERVEKLGFTPKLVSVACTDDPSALSYLKSQRKKAEKLGIAFEIMNVSPEEIVSTLKKLGSDESVNGVFVARPFPLGLDEKEILSSVPVEKDVEGVNPANLGLLLYDEEIFPPCTAEAAVRILERETNLSGKRVTVVGRSVTVGKPLALMLLKKGRDATVTVCHSRTVNLEEITKNSDIVVVAVGRAHFLKKNMVKEGAIVIDVGINYVDGKLQGDVDPSVEEIARVTPVPGGVGQVTTALLFEHVVRAAERQRK

SEQ ID NO: 12492 - protein, 433 aa, Sulfolobus solfataricus P2
MLCLFIFRRDLRLDDNTGLIKALEDCEKVIPAFILDPRQVGNENEYKSEFAINFMINSLNELNDELRKRGSRLYVYFGLAEEVIKNLLKDVDAVYLNEDYTPFSKMRDERIRKYCEDTGKIMKSFEDYLLTSKNDFKNYRNFTTFYNVVKNKQIKKPVQNNYTNYYKNSLGDEHELPPRQGERGGRKEGIKLIERARQINYDRKDFVAEDNRTFLSPHLKFGTLSIREVYYSLLDSQAIIRQLYWRDFYTLLAYYNERVFHEPLKREYNCIEWENNERLFQAWLEGKTGYPIIDAGMRQLNRTGDMPNRVRMLTAFFLVKVLIIDWRIGEKYFASKLIDYDPSVNNGNWQWIASVGTDYIFRVFDPWKQQVTYDPEAKYIKRWVDELESYDAEIIHNAYKYTLKSYPKPIVDWRIRVNLAKRLYEVCRKSKIK

SEQ ID NO: 12493 - protein, 398 aa, Streptomyces coelicolor A3(2)
MLSEQSVPVVRATLPAVGAAIGDIAALFYRKLFDAHPELLRDLFNRGNQANGEQQRALAGSVAAFAGLLLENPDERADVLLSRISHKHASLGITPDQYTIVHRHLMAAVVDVLGDAVTPEVARAWDEVYWLMANALIALEARLYTEKGVAEGDVWRTMEIVDRVEESADAVSLVLGSADGRPVVPFRPGQYVSVQVELADGARQIRQYSLSAAPGRSDWRITVKRVRGDGQPDGEVSSWLYANARKGDALNVSLPAGDLALAEHDGPLLLVSAGIGVTPMLSMLDHLAAAGATRPVTVVHADRTPDHHAHRQEQLDLIRTLPGARLHLWYEEPGDRAPEASTGRADLTGLDLPADLTVYLCGPVPFMRAVRGDLLRRGVPAEAIHYEVFGPDLWLGQQ

SEQ ID NO: 12494 - protein, 298 aa, Zea mays; identical to SEQ ID NO: 361

SEQ ID NO: 12495 - protein, 105 aa, Zea mays
  misc_feature (16)..(16): Xaa can be any naturally occurring amino acid
MTRASRRKGSCKDPDXRIISATTRGDTAARLLDLRNQILSGQANFSDLAARHSDCSSARRGGDLGTFGRRFIYKPFEDATYALKVGELSDIVDTDSGVHIILRTA

SEQ ID NO: 12496 - protein, 433 aa, Xanthomonas campestris pv. campestris str. ATCC 33913
MSSQGNESPALVRAVSRWQIVGLSINDVIGSGIYLLPAATAALLGPMSLWAVMLAGLAVALLVLCYAQAASYFDTPGGSYLYTREAFGPFTGFQIGWMIWLTRISSAAALSNGLADAVARFWPAAGSDGWERLLVVVGSLGLLTAINVIGVKSAARTGVALVIGKLVPLLLFVAIGLFYVDWSWAFAGSTPDLRDLGNLGEAALLLLFAYAGFENIPAAAGEYRNPRRDVPFALITMIVTVTLIYAAVQVVAQGTLPNLAASPTPLADAASRFGGEALALILTVGATISILGTTSNTVMLGPRFLFALAQDGYGPALLARVHPRFHTPAAAVLTQGVLSLALALSGSFTQLALLSMVTRLFAYIGTAAAVIVLARRYRARTDALRLPGGPLIPIAALLLSLGLLASASWQNLAAAGLALLVGCVFYLFPRKPA

SEQ ID NO: 12497 - protein, 199 aa, Triticum aestivum
MDNLPEDSASSASCCAPPPSFPSMAMASAPSTTTSTLAPPLRSPLSFSSSRRLPFAVALPRAAGPSSALLCRAPALARRARVRCRGAVKLVGEGEFEAEVMQSDLPVLVDFVADWCGPCRLVAPVVDWASEEYEGRLKIVKIDHDANPQIIEKYKVYGLPALILFKNGQEVPGSRREGAINKAKFKDYIEPLLETSNVA

SEQ ID NO: 12498 - protein, 361 aa, Oryza sativa (japonica cultivar-group)
MSVDNSSVGSNESRTVMLKHPGLRDMPAPSYSVHNSVIHPNRAMAPTLNEDALARVLMDPSHPTEILSNYEEWTIDLGKLDMGAPFAQGAFGKLYRGTYNGEDVAIKLLEKPENDPERAQLMEQQFVQEVMMLSTLRHPNIVRFIGACRKSIVWCIITEYAKGGSVRQFLARRQNKSVPLGLAVKQALDVARGMAYVHALRFIHRDLKSDNLLISADKSIKIADFGVARIEVQTEGMTPETGTYRWMAPEMIQHRPYDHKVDVYSFGIVLWELITGMLPFTNMTAVQAAFAVVNRGSRPAIPQDCVDSLSKIMTCCWDANPEVRPSFAEIVVMLENAEIEVMRNVRRARFRCCIAGPMTTD

SEQ ID NO: 12499 - protein, 290 aa, Pseudomonas syringae pv. phaseolicola 1448A
MSQETAYIFDATAANFDQMVIDKSFDQPVLVDFWAEWCAPCKVLMPLLQQITESYQGELLLAKVNCDIEQDIVARFGIRSLPTVVLFKDGQPVDGFAGAQSESEIRKILEQHVVMPPPSAADPLKQAQELFAESRFAEAEALLKALLGEDNTNAAALILYARCLAERGELSEAKAVLDAVTGDAHKAELAGAKAQLTFLAQAATLPDVAELKSRLAQNPQDDEAVHQLAIQQLSRQQYEAALDGLLKLFIRNRNYAEGLPHKTLLQVFDLLGNEHPLVTAYRRKLFAALY

SEQ ID NO: 12500 - protein, 220 aa, Leifsonia xyli subsp. xyli str. CTCB07
MAARINPSILAADFVNLERDLGRIASADLVHVDVMDSHFVPNLTFGPQMVGRIQDVSAIPLDVHLMIDDPDRWAPGYAELGAHSVTFHAEAAADPVALARRLRALGARAGIALKPGTAVDGYLDLLPEFDQVLVMTVEPGFGGQSFMLETMPKLRRLRETVEARGLDVWLEVDGGITEETIAVAAEAGADTFVAGSAVFRGEPAERIEALRAAVRWHSTL

SEQ ID NO: 12501 - protein, 414 aa, Ashbya gossypii ATCC 10895
MSKLFIPTVNCGKAHNGDIFDVAVCNAFTVTCSGDGHIKLWKNKLLDGEVPKEHCVSHHVNKTGVHHVDVLHTVERSGVEICVIACVAFDGSLHFYSVNLGEWTLTQMELLSSEEKQRSYWSAKWHKSTYHSQAHKFVATEVSGNTRVWRFHPFSKEVEELKIFEQDEGAEKSDTAVKQQDDELELQPHFTLHGDLPAASPKFATCVDVSVKNLVATGFSDGSVVIAQLSTLRPIYNFEGFGLQGTQDNSNTVRALKFSPLGGLLAVANDSGSFGCVTLYETEYGEPVGSLTVPMHSNQQSIVSVAHSGWVFGLSFNSSGEYLASCGYDAKVRVWDVKLREHVSTLHMSSDDIEDERDMMTVDEHGTSLKAPPVLGVCFVDKGVRGGMSADINEGLCCVCLDRSIRWYREAGGI

SEQ ID NO: 12502 - protein, 446 aa, Glycine max
HASGSQDSPRGVHFRRAGPRQKVYFKSDEVHACIVTCGGLCPGLNTVIREIVCGLSYMYGVNKVLGIDGGYRGFYSKNTITLTPKVVNDIHKRGGTILGTSRGGHDTGKIVDSIQDRGINQVYIIGGDGTQRGATVIYEEVRRRGLKVAIAGIPKTIDNDIPVIDKSFGFDTAVEEAQRAINAAHVEAESIENGIGVVKLMGRYSGFIAMYATLASRDVDCCLIPESPFYLEGKGGLFEFIQKRLKENGHMVIVIAEGAGQDLLTESMQAMDQKDASGNKLLQDVGLWISHKIKDHFARKDKIPINLKYIDPTYMIRAIQSNASDNVYCTLLAQSAVHGAMAGYTGFTVGLVNGRHTYIPFNRINERQNKVVITDRMWARLLSSTNQPSFLSPKDLEEAKKAEQPPTELLEGNNCNDVGDAGKEEQPPKDEQESGNHADNGIKTEN

SEQ ID NO: 12503 - protein, 190 aa, Zea mays
MNLAVPAFGLSTNWSGNGNGSNSEEESVLYQRLKMVEELWERVLQSECGQELVDLLTELRLQGTHEAITSEISEEVIMGITQRIEHLELNDAIRAARAFALYFQLINIVEQHYEQNEQQRNRWEASQETNFYEQAGNEEEMVPPSRLGASTEPLPVGIDQNELQASVGTFHWLMRELKRLNVPPQHIQNL

SEQ ID NO: 12504 - protein, 119 aa, Zea mays
MSSRDQVKASHILIKHQGSRRKASWKDPEGKVIMTTTREAAVEQLKSIREDILSGKANFEDVAARVSDCSSAKRGGDLGPFGRGQMQKPFEEATYALKVGDISEIVDTDSGVHIIKRTA

SEQ ID NO: 12505 - protein, 1000 aa, Blastopirellula marina DSM 3645
MISPDPQTIVVVGNGMVGHRFVENMIEMDIAQRYRIVTFCEEPRAAYDRVGLTSFFAHRDAEKLMLARLDWYKQHEVELHIGDRANRIDRAAQIVYSDRGAAIHYDHLVMATGSYPFVPDLPGVKHHGVFVYRTIEDLERIIEYGKKSKRCAVIGGGLLGLEAAKAAHDLDLETFVIEYNGRVMPRQLDEAGSKMLIEKITSLGLKVLLNKGTKEIRGDGHVQQILFTDGTTLDVDMIIISAGIRPRDELAKDSQLELGKRGGVVVNERLQSSDPNIYAIGEIASYAGMIYGLVAPGYDMAEIAAANFCGQERTFNGADMSTKLKLMGCDVASFGQYNLPAEEARPLVWEDPFKGIYKKLLFTPDGSRLLGGMLVGDASDYGTLLILSKSDAPLPCDPATLIGAGGSGDKSAIGGVADMPDSAQICSCNNVTKGRICEAIRDEGIDNVGDLKMCTKAGTGCGGCMPLVTDLLAAELKAAGKAANTDLCEHFAHTRQELYEIVQLKEIKSFNDLIAQHGRGHGCEICKPAVASILASLWNDQILEPEHQTLQDSNDRFLANIQRGGSYSVVPRVPGGEITPEKLIVLGEVAKKYKLYTKITGGQRVDLFGAQAYELPEIWEELVNAGFESGHAYGKSVRTVKSCVGSTWCRYGIGDSVGFAIAIEERYRGLRSPHKLKFAVSGCVRECAEAQCKDVGLIATENGYNLYVCGNGGTKPRHADLLIADIDEATAITYIDRFLIYYIRTADKLMRTATWMEKLEGGLEHLKAVVIDDKLGVAEELEKQMQYLVDTYKCEWKEVVNNPEKRKWFRQFANTDEHQLDIELIEQRDQARPADWPKENVALVELKGLNGETIDHNGQANLRSWVRVGAVADFPLDGGSAIKYGQTQIAVFNFASQGNWYACQNMCPHKNAFVLSRGMIGTAGETPKVACPLHKKTFSLESGECLTGEEYAVKTFPVKIEADGVYLELPPETVLDAELATDKHCIRGCDAVKALQLAEA

SEQ ID NO: 12506 - protein, 555 aa, Kluyveromyces marxianus
MKFAYSLLLPLAGVSASVINYKRDGDSKAITNTTFSLNRPSVHFTPSHGWMNDPNGLWYDAKEEDWHLYYQYNPAATIWGTPLYWGHAVSKDLTSWTDYGASLGPGSDDAGAFSGSMVIDYNNTSGFFNSSVDPRQRAVAVWTLSKGPSQAQHISYSLDGGYTFEHYTDNAVLDINSSNFRDPKVFWHEGENGEDGRWIMAVAESQVFSVLFYSSPNLKNWTLESNFTHHGWTGTQYECPGLVKVPYDSVVDSSNSSDSKPDSAWVLFVSINPGGPLGGSVTQYFVGDFNGTHFTPIDGQTRFLDMGKDYYALQTFFNTPNEKDVYGIAWASNWQYAQQAPTDPWRSSMSLVRQFTLKDFSTNPNSADVVLNSQPVLNYDALRKNGTTYSITIYTVTSENGKKIKLDNPSGSLEFHLEYVFNGSPDIKSNVFADLSLYFKGNNDDNEYLRLGYETNGGAFFLDRGHTKIPFVKENLFFTHQLAVTNPVSNYTTNVFDVYGVIDKNIIELYFDNGNVVSTNTFFFSTNNVIGEIDIKSPYDKAYTINSFNVTQFNV

SEQ ID NO: 12507 - protein, 353 aa, Triticum aestivum
  misc_feature (148)..(148): Xaa can be any naturally occurring amino acid
MASDHERLRALTAFDDTKAGVKGLVDAGVTAVPSIFHHPPECLPAADAELHHFTIPVIDLASDSRVALVAQVKAAAQAVGFFQVVNHDVPDDLLAEMLVSVRRFHESPVETKRAYYSRDHRRTVQSNSNFYLFQSPAASWRDTMFLQXASLAPSEEIPEACRAVAPEYARQVQRLGRALFELLSEALGLDLSYLEEETMCLDRVNISGHYYPACPEPHLTLGTSRHSDASLLTVLLQDTVGGLQVLLDDGKWADVPAVPGALVVNVGDYLQLMSNNRFKSVEHRVVANSVESRVSVACFIVPNQSSARVLAPIVTGDGSVARYRSTTVEDMFRYYRNRTKALNGTSALQHFTI

SEQ ID NO: 12508 - protein, 469 aa, Propionibacterium acnes KPA171202
MKNYCMPDPGEGLTEGEVVSWQVSPGDTVKINDVLCEVETAKSIVELPSPFAGTVAKLCAEPGETVAVGTPLVTIDDGSEDEPEFLVGHVTAEPGRRRRRRRGAAVSTERAREEGADTHPEQSVSESRHDAEAKPEQRLTEPAPRQDPPRMDRTAHILAKPPARRLAADLGVDLSQVTGTGPQGAVTRSDVKAAAHHGAAAAGDGGACPGDAELASLSVMSRRLLGGAPTEPDGHTRKVPVRGVRKVTAKAVKDSLDTKALVTAFLTCDVTPTMELVNRLRADRRFKGLRVSPLTVWCKAVCLAMGRTPIINAAWDDAADQIVFRDHINLGIAAATPRGLMVPVVRDAQDMAMLELATEITRIVAIAKEDKLQPPDYADGTFSITNVGVFGLDAGTPVVNRTESAILVLGALARRPWVVGTGDDERVVPRWVTTMSLGFDHRLIDGEQGSTFLHDVAEILSDPASAMLY

SEQ ID NO: 12509 - protein, 499 aa, Bifidobacterium adolescentis
MNVFRKKSVEQTLAETGESGHALKRDLTWWDLAIMGVAVAVGAGIFSIGAQAAAFHAGPAVVLSFLIAGVVCGAAVMCYAEFASMIPVAGSAYTFTYTTVGEIVAWVIGWDLILEMLMAGSVVSKYWGVYLNQFFELIGWNINTNIAIGSFNFDLAPVIIVAFFTALLVMGTKIGARVDGALTILKIAIVVFIVVVGFFYIKAENFTPFIPPSEPAASTDGSGVSAVMEQPLWQWATGMAPSIYGVTGIISGAALVFFAFLGFDVVATASEETINPKKNVPLGIGVGLGLIIVLYTLVAIVTTGMVSYKDLAKQSDPSLAVAFKMVGADWAAKIISLGIVIGMATVVMVLLLGLTRVVFAMSRDGLLPRGLSHTGKHGTPVRLQIIVGVVMALIAACCNVGILSDMVNIGTLSAFTLVAISIPIMRKKRPDLERSFKIPGNPWVPILIALANLWLMVNLSVLTWIRFVVWLIVGFAIYFGYGYRHARLGAGELEVAAQE

SEQ ID NO: 12510 - protein, 334 aa, Propionibacterium acnes KPA171202
MSGEVLHSARPQGETTLAKALNAGLSDALAADDRVVLMGEDVGTLGGVFRITDGLKAQFGGRRVIDTPLAESGIVGTAIGMAMRGYRPCVEIQFDGFSAPAFDQIVSQLARYRARVGGRWSLPVTIRIPFGGGVGSPEHHSESPEGFYANTPGLKVVTCSNPDDAYWMLRQSIDSPDPVIFFEPKRRYYTRGHVAQTPTLGLHQARIARSGEEATLICYGPMVDTCVEAAKEASQEGRKLEVIDLRSLSPLDMATVYESVRRTTRAIVVQEAPRTQGVGAEIAARLGEELYYVMEAPVLRVTGWSTPYPPAKAEGEHIPDVDRILDAVDRSLAF

SEQ ID NO: 12511 - protein, 108 aa, Glycine max
  misc_feature (11)..(11): Xaa can be any naturally occurring amino acid
  misc_feature (31)..(31): Xaa can be any naturally occurring amino acid
  misc_feature (36)..(36): Xaa can be any naturally occurring amino acid
  misc_feature (62)..(62): Xaa can be any naturally occurring amino acid
  misc_feature (92)..(92): Xaa can be any naturally occurring amino acid
NLMTLDAAPLXNQRTWAKETLEIFAPLSNRXEFLLXKEQLQNLCFKHINPSHHDELSSKLVXSYDDPMITFAIERLQEALKDECISYNVISXLHKILYKVYRTMLKKK

SEQ ID NO: 12512 - protein, 946 aa, Candida albicans
MISIVNGTSTLSLVAGSVETLNQAINFYTNILGLSVHSEQNDWTYLSNDDNKMIVKIQLDTKSGLSLDQVNDRRTEIIAKLNVTDWRSLDTTSVLKVQNLVALIETLTTFNYTLQITPNELYPNEVYCVGPIGYIIGFTACDEPLTLVPPLQKSHPKPGLVSNLMSKSGSQSRNIEETKAVRRNIAVMTSGGDSQGMNAAVRAVVRATIFHGSKAFAVQEGYAGLVKGGPEYIKEMKWQDVRGFLSEGGTNIGTARCMEFKERWGRLKGCKNLIDAGIDGLIVCGGDGSLTGADLFRHEWPSLIQELKDKGEITNEQFERHKHLYICGMVGSIDNDMAMTDATIGGYSALERICRAIDYIDATANSHSRAFVVEVMGRHCGWLALMAGIATSADYIFIPEKPASSKDWQDQMCDIVGKHRAQGKRKTIVIVAEGAITSDLKPITSDEVKDVLVDRLGLDTRITVLGHVQRGGTAVAFDRTLATLQGVEAVKAILELTPDVPSPLIAIDENKICRRPLVEAVRITKSVASAIEAKDFEKAMSLRDHEFKEHLANFMAMNTANHEKPTLPREKRKKIAIINIGAPAGGMNSAVYAMATYCMSRGHTPYAIHNGFAGLSRHESVKSIEWIDIEGWNSIGGSEIGTNRQTPEETDIGMIAHYFEKYQFDGLIIVGGFEAFVSLEQLERSRAMYPSFRIPMVLIPATISNNVPGTEYSLGADTCLNSLMEYCDIVKQSASATRGTAFIIDVQGGNSGYIATFASLISGAQASYVPEEGISLQQLEMDINSLREAFAVEQGMTKSGKLIIKSSNASKVLTPHTLADIFNDECHGDFDTKTAIPGHVQQGGLPSPIDRSRGDRFAIRAVQFIEDHCDVLAPYRYELDFPIDDKKILNTAAVLGIKSSRLRFTSIRHLFDFETELGRRMPKTIYWNTIRDISDQLVGRTRLDKP

SEQ ID NO: 12513 - protein, 184 aa, Rhodopirellula baltica SH 1
MKADKQLVSTSKFLSLVLRHQPGVIGMTLDEQGWLEIDGLIANANTRGKKLTLELIHEVVATNDKKRFVLSDDGLRIRASQGHSVAGVDLNLTEANPPATLYHGTVDAFLPRIREQGLQKRSRNHVHLSADEATATNVGSRRGKPKLLLIAAQRMHQDGHIFYLSENEVWLVDSVPPTYLTFPT

SEQ ID NO: 12514 - protein, 358 aa, Bordetella pertussis Tohama I
MTHQIAVLPGDGIGPEIVEQAERVLKALDLPLELRQAPVGGAAFDQFEHPLPPATLELAQGSHAVLFGAVGDWKYDTLPREFRPEQAILGLRKALGLFANLRPAILYPELASASSLKPEIVSGLDILIIRELTGDIYFGTPRGVRTAADGAFAGEREGYDTMRYAESEVRRIARIGFESARKRNKKLCSVDKANVLETSQFWRDLVIEVSRDYLDVELSHMYVDNAAMQLVRNPRQFDVIVTGNLFGDILSDEAAMLTGSIGMLPSASLNAAGQGLYEPSHGSAPDIAGQGIANPLATILSAAMLLRYSLNLAPQADRVEAAVRKVLADGLRTADIHEAGTTKVSTSQMGDAVLKALG

SEQ ID NO: 12515 - protein, 319 aa, Triticum aestivum
  misc_feature (133)..(133): Xaa can be any naturally occurring amino acid
  misc_feature (243)..(243): Xaa can be any naturally occurring amino acid
  misc_feature (252)..(252): Xaa can be any naturally occurring amino acid
RVGPPAPHRPGDGLLHHRLRRRGVPPRARRRLPGPLAPLASSDSFFETSAAVDVAEPEDEALEAAAEEEPAVVEEDEEDVAAEEEVVGEYVEPPEEAKVYVGNLPYDVDSERLAQLFEQAGVVEVSEVIYNRXTDQSRGFGFVTMSTIEEAEKAVEMFHRYDVNGRLLTVNKAAPRGARVERPPRDSGSSFRIYVGNLPWQVDDSRLVELFSEHGKVVDARVVYDRDTGRSRGFGFVTMASAXELDDAIAAXMDKSLEGRSPPVNVPNNAVIKCIGGHTRCREHTAPVNPTTLASRSPNVSLAPPFSPSSSNFNFPGLP

SEQ ID NO: 12516 - protein, 257 aa, Mycobacterium sp. KMS
MDYETILVTREGRVGTITLNRPKALNALNSQVMAEVTTAAAEFDSDEGIGAIVVTGSEKAFAAGADIKEMASLSFAEVFTSDFFALWGKFAATRTPTIAAVAGYALGGGCELAMMCDILIAADTAKFGQPEIKLGVLPGMGGSQRLTRAIGKAKAMDLILTGRTIGAEEAERSGLVSRVVPADRLLDEANEVAATIAGMSRNASRMAKEAVDRAFESTLTEGLLYERRLFHSTFATEDQKEGMAAFSEKRPANFTHR

SEQ ID NO: 12517 - protein, 609 aa, Saccharomyces cerevisiae
MKNSTAASSRWTKSRLSHFFPSYTNSSGMGAASTDQSSTQGEELHHRKHCEEDNDGQKPKKSPVSTSTMQIKSRQDEDEDDGRIVIKPVNDEDDTSVIITFNQSISPFIITLTFVASISGFMFGYDTGYISSALISINRDLDNKVLTYGEKELITAATSLGALITSVGAGTAADVFGRRPCLMFSNLMFLIGAILQITAHKFWQMAAGRLIMGFGVGIGSLISPLFISEIAPKMIRGRLTVINSLWLTGGQLIAYGCGAGLNHVKNGWRILVGLSLIPTVLQFSFFCFLPDTPRYYVMKGDLKRAKMVLKRSYVNTEDEIIDQKVEELSSLNQSIPGKNPITKFWNMVKELHTVPSNFRALIIGCGLQAIQQFTGWNSLMYFSGTIFETVGFKNSSAVSIIVSGTNFVFTLIAFFCIDKIGRRYILLIGLPGMTVALVICAIAFHFLGIKFNGADAVVASDGFSSWGIVIIVFIIVYAAFYALGIGTVPWQQSELFPQNVRGVGTSYATATNWAGSLVIASTFLTMLQNITPTGTFSFFAGVACLSTIFCYFCYPELSGLELEEVQTILKDGFNIKASKALAKKRKQQVAEGAAHHKLKFEPTQEIVES

SEQ ID NO: 12518 - protein, 322 aa, Zea mays
MAKKRKRTDAPAEATGAEKPDDSAPARPERTLFGFKDPVPDAEPASAGAEAAVAPFRNREKVLITCSRRITYRYRHLMQDVLSLLPHAKKDSKVESKQSKGNALNELLELRSCSSCLFFECRKQKDLYLWMVKSPGGPSVKFLVNAVHTMEELKLTGNHLKGSRPLLTFSTNFDEQPHWKLVKEMITQIFATPKDHRKAKPFHDHVFVFSIVDGHVWFRNYQISVPHNEIDKVDKGGLDKMTLIEVGPRFCLNPIKIFGGSFGGPTWYENPYYISPNQIRALEKRQKAGKYAKKVKAKVRRKMHEMENTLEPDEFAELWKGE

SEQ ID NO: 12519 - protein, 160 aa, Pseudoalteromonas tunicata D2
MVPFYQFEAISLQGKPISFEEYQGKVVLVVNTASQCKLTPQFKALEALYQKYQSQGLVILGFPCNQFRQQEPGNAEDITQVCSLNYGVTFAMFDKIAVNGKHSSPIFQYLKQQLPGIFGSIIKWNFTKFLIGRDGQPIKRYAPITNPANIEQAIINALKN

SEQ ID NO: 12520 - protein, 439 aa, Staphylococcus epidermidis ATCC 12228
MDIKMPKLGESVHEGTIEQWLVSVGDHVDEYEPLCEVITDKVTAEVPSTISGTITELVVEEGQTVNINTVICKIDSENGQNQTESANEFKEEQNQHSQSNVNVSQFENNPKTHESEVHTTSSRANNNGRFSPVVFKLASEHDIDLTQVKGTGFEGRVTKKDIQNIINNPNDQEKEKEFKQTDKKDHSMNHGDFLHQSSTKNEDSPLSNERVVPVKGIRKAIAQNMVTSVSEIPHGWMMVEADATNLVQTRNYHKAQFKKNEGYNLTFFAFFVKAVAEALKANPLLNSTWQGDEIVIHKDINISIAVADDDKLYVPVIKNADEKSIKGIAREINDLATKARLGKLAQSDMQNGTFTVNNTGSFGSVSSMGIINHPQAAILQVESVVKKPVVIDDMIAIRNMVNLCISIDHRILDGVQTGKFMNLVKKKIEQYSIENTSIY

SEQ ID NO: 12521 - protein, 320 aa, Arabidopsis thaliana
MDGDELTEQETALYDRQIRVWGAGAQRRLSKSHVLVSGIKGTVAEFCKNIVLAGVGSVTLLDDRLVTTEVFNANFLILPDENAYVGKTVAEICCDSLKDFNPMVHVSIEKGDLSTLGVDFFEKFDVVVIGYSSRATKKAVNEKCRNLAKDVAFYTVDCRGSCGEIFVDLQNYKYTKKKLDETVECELTFPSFEEAVSVPWKPMPRRTAKLYFAMRVIELFEETEGRKPGECSLSDLPRVLKLKKELCEGNSVSENHIPDILLERLVSNNTEFPPACAIIGGILGQEVIKVISGKGEPLKNFFYFDAEDGKGVIEDLSHKL

SEQ ID NO: 12522 - protein, 327 aa, Staphylococcus epidermidis ATCC 12228
MTKLSYLEAIQNAQDLALNHFSNAFILGEDVGKKGGVFGTTKGLQSKYGDERVIDTPLAESNIIGTAIGAAMLGKRPIAEIQFADFILPATNQIISEAAKMRYRSNNDWNCPLTIRAPFGGGVHGGLYHSQSVESIFASTPGLTIVIPSSPYDAKGLLLSSIESNDPVLYFEHKKAYRFLKEEVPETYYTVPLGKADVKRPGEDITVFCYGLMVNYCLQAADILANDGIDAEVVDLRTVYPLDKATIIERSQRTGKVLLVTEDNLEGSIMSEVSAIIAENCLFDLDAPIMRLAAPDVPSMPFSPTLENEIMMNPEKIQDKMRELAQF

SEQ ID NO: 12523 - protein, 185 aa, Glycine max
QLFRGFGFTKQNELFVGRVAMLGFAASLLGEGITGKGILAQLNLETGIPLYEAEPLLLFFILFTLLGAIGGLGDRGKFVDDEPTTGGVIPPGKGFREALGLGSGPLFGFTKANELFVGRLAQLGFVFSLIGEIITGKGALAQLNIETGVPINEIEPLVLFNVLFFFIAALNPGTGKFVTDEGEDD

SEQ ID NO: 12524 - protein, 1041 aa, Rhodospirillum rubrum ATCC 11170
MNMDRSNDLAGTLPAPPSVPGPAEDGQSMPIFRWIWRSYLRSALIPLVFIELVFLAIYLLSHQISTSRTLESFGSAVENEFYGAAEREAALLSERLAALGTTASVFAHQAARVLSTPCQPAPRERARLALGANGVLYSTGAPEGSAALFYSGIIPVGPAQIDKAVCSAALDPLMRDISAVEPLVDQIYVNTWDSMNRIYPPIDVLSQYAPHMDIPSFNFFYEADQEHNPERKVVWTDVYLDPAGRGWIASAIAPAYRGTILEGVVGLDVTVGTFIDRVLAAELPFDAYGLLLDRNGGILGAPKVAGEDWGAKPLTEATYGGAITKDTFVDPAFNLFARAEPADLLAALQSQSNGVRPVTLAGKQKVVAWAKVASTGWTYLMVADRDTVFGDILRLDRLFTVIGYLMAGGLLVFYLGFLAFLYIRVREMSVRLSGPLSALNAMIRRIASGSYFQTAPAFDVRELDETGREVAAMGDRLGRANEELIANREELVRARDAAQAAARAKAEFLATMSHEIRTPMNAVIGMTGLLLDGPLEPRQIDYARTIQRSGEHLLGLINDILDFSRIDTGRLVLVDRDFSLSHEVQAVVSLCGVAASAKRLSVRIDLDRALAPGYRGDSQRLRQILVNLVGNAVKFTDKGMVTVQGDVLKIENDIHWLRLRVVDTGCGIPRERFNDLFAAFQQLDGSATRTHGGTGLGLAISRKLARLMGGDITVSSTPGEGSVFSVVVPMVPLSRTPAPDGTLGDGDAERGEEPPAADVPTEAAASRALVVLVAEDILENQILVQAVLEKQGHRVILAANGREALAKLRGADPVDVVLMDIQMPVMDGLDACRAIRGLPPEVHFSDGRPIAGVPIIAFTADALPGDRERFLSAGMNEHLAKPLNARRLRALLGDIAAGRPLTPRSSAAPSPRKSLEAPRRLLDPEALAQLRTSLGEDYPIYLRAAEEALRHRARALPEALARGAFEEASQLLHGLRGTLAAFGMEAEATLCQRLRGDLAGGAGIAIRVEARKLADQALAAADEVRGHRGLPSIDPRAPTPL

SEQ ID NO: 12525 - protein, 966 aa, Medicago truncatula
MANKMEKMASIDAQLRQLVPAKVSEDDKLIEYDALLLDRFLDILQDLHGEDLKDSVQEVYELSAEYERKHDPKKLEELGNLITSFDAGDSIVVAKSFSHMLNLANLAEEVQIAHRRRNKLKKGDFRDESNATTESDIEETLKKLVFDMKKSPQEVFDALKNQTVDLVLTAHPTQSVRRSLLQKHGRVRNCLSQLYAKDITPDDKQELDEALQREIQAAFRTDEIKRTPPTPQDEMRAGMSYFHETIWKGVPKFLRRVDTALKNIGINERVPYNAPLIQFSSWMGGDRDGNPRVTPEVTRDVCLLARMMAANLYYSQIEDLMFELSMWRCNDELRVRAEELHRNSKKDEVAKHYIEFWKKIPLNEPYRVVLGEVRDKLYRTRERSRYLLAHGYSEIPEEATFTNVDEFLEPLELCYRSLCACGDRAIADGSLLDFLRQVSTFGLSLVRLDIRQESDRHTDVMDAITKHLEIGSYQEWSEEKRQEWLLSELIGKRPLFGPDLPQTDEIRDVLDTFRVIAELPSDNFGAYIISMATAPSDVLAVELLQRECKVRNPLRVVPLFEKLDDLESAPAALARLFSIDWYINRIDGKQEVMIGYSDSGKDAGRFSAAWQLYKAQEDLIKVAQKFGVKLTMFHGRGGTVGRGGGPTHLAILSQPPETIHGSLRVTVQGEVIEQSFGEEHLCFRTLQRFTAATLEHGMRPPSSPKPEWRALMDQMAVIATEEYRSIVFKEPRFVEYFRLATPEMEYGRMNIGSRPAKRRPSGGIETLRAIPWIFAWTQTRFHLPVWLGFGAAFRQVVQKDVKNLHMLQEMYNQWPFFRVTIDLVEMVFAKGDPGIAALNDRLLVSKDLWPFGEQLRSKYEETKKLLLQVAAHKEVLEGDPYLKQRLRLRDSYITTLNVFQAYTLKRIRDPNYKVEVRPPISKESAETSKPADELVTLNPTSEYAPGLEDTLILTMKGIAAGMQNTG

SEQ ID NO: 12526 - protein, 291 aa, Wolbachia endosymbiont of Drosophila melanogaster
MSVLVNKDTRLICQGFTGAQGTFHSEQAIDYGTKMVGGVTPGKGGSTHLNLPVFNTVAEAKEKTGANATVIYVPAKFAAAAILEAIDAKIELIICITEGIPILDMVKVKRALIGSKSRLIGPNCPGIITPEECKIGIMPGHIHKRGHIGIMSRSGTLTYEAVAQTTAVGLGQSTCIGIGGDPVHGITFVDCMELFLKDNDTHGIVVIGEIGGNEEEDVSHFVKTEKTKKPIVGFVAGQTAPPGRRMGHAGAIISSSGGSAGAKLEVMRSAGIAIAETPAVIGKKVLEVMHH

SEQ ID NO: 12527 - protein, 359 aa, Aspergillus nidulans FGSC A4
MAPFSIKRAKKDQPQAGQPKKAAPAKPDQPTYKKRAQLTQMFPPRPTFTEKDITFQKGRVFLVTGGTSGIGFELAKILYARGGTVYITGRTEEKAKEAVQKIQASVGERDGQIDYIVLKLDDLTSIRESADAFMEKESKLDVLWNNAGIAQPPVGVLSKQGSELQLATNCLGPFLFTQMMLPLLDAAVALNGPAYPGSVRVVWLSDQVVELSSPIEGIVMQELNNPPQDNSRNYLNSKTGAWFLGSEFARRYGPEHGIVSVAMNPGAARTNLLRHAGWTKFLSWPLLHSPKLAALTELYAGLSPDINLENNGCYVIPWGRIHTTVAPHLMNALRSKEAGGTGRAQQFWDFCDDKTKDYH

SEQ ID NO: 12528 - protein, 600 aa, Glycine max
MPAWWNRKWSKSKEEDEEDEPRAGFHLNFMKSPVSVTSSKSKSKTTTPTPMKKKKKPKSFDEKVEGVPLPRPAHSHADPLGSVSVSGGSSVSSSTSFDDHPISSPNTNPNPNRGHDEVRVNVRSKSPGPGSRGPTSPTSPLHQRLNNLSLDSPTGSQCHPLPLPPGSPTSPSSVLSNARANGHLENATSNVSKWRKGKLLGRGTFGHVYLGFNSENGQMCAIKEVKVVSDDQTSKECLKQLNQEINLLNQLSHPNIVQYHGSELVEESLSVYLEYVSGGSIHKLLQEYGSFKEPVIQNYTRQIVSGLAYLHGRNTVHRDIKGANILVDPNGEIKLADFGMAKHINSSASMLSFKGSPYWMAPEVVMNTNGYSLPVDIWSLGCTIIEMATSKPPWNQYEGVAAIFKIGNSKDMPEIPEHLSNDAKNFIKLCLQRDPLARPTAHKLLDHPFIRDQSATKAANVSITRDAFPCMFDGSRTPPVLESHSNRTSITSLDGDFASKPALAAPRALRSPRDNTRMITSLPVSPSSSPLRRYGPTHQSCFFSPPHPAYTIMGQSSYTLNDISSYPMTSNATFALDPWHETSRYRANTPPGGSPRMRLI

SEQ ID NO: 12529 - protein, 96 aa, Theobroma cacao
IVTGANVQVCWEKFARYFEVELKEVKLKEGYYVMDPVKAVDMVDENTICVAAILGSTLTGEFENVKLLHELLTNKNKETGWDTPIHVDAASGGFIA

SEQ ID NO: 12530 - protein, 287 aa, Methanopyrus kandleri AV19
MLDSDTRVLVQGITGRHGSFHTKLMLEYGTEIVAGVTPGRGGQEVHGVPVYDTVEEAVEETDAEASVIFVPAPQAPDAVMEAIEAGLDPIVVITEHIPAHDTMRFVELARWEGIRIIGPNTPGIIVPPERVKLGIMPHQVFTEGEVAVASRSGTLTYEIVQAMTEAGLGQSLCVGLGGDQIVGTTFIDFLEYVREDDRTEAVVLIGEIGGNAEELAAEYIAETDFPKPVVAYIAGRHAPPGKRMGHAGAIIERGRGTAESKIEAFRKAGVDVAEKPWEVPELLREYL

SEQ ID NO: 12531 - protein, 556 aa, Pseudomonas syringae pv. phaseolicola 1448A
MTMLKDPSKKYRAFPTIDLPDRTWPSKTIDAAPIWCSSDLRDGNQSLIEPMDAAKKLRFWKTLVSVGVKEIEASFPSASQTDFDFVRTLIEDGHIPDDTTIQVLTQAREDLIARTFESLRGAKKAIVHLYNATSPSFRRIVFNQDKAGVKEIAVNAAKLFVKYAAQQPETQWTFEYSPETFSATELEFAKEVCDAVIEVWNPTPENKVILNLPATVEVATPNIYADQIEWFGRNITRRDSVLISLHTHNDRGTGVAATELGLMAGADRVEGCLFGNGERTGNVDLVTVALNLYTQGIDPELDFSDIDGVRKVVEECNQIPVHPRHPYVGDLVHTAFSGSHQDAIRKGFTQQKDGELWEVPYLPIDPADIGRSYEAVIRVNSQSGKGGITYLLEQEYGISLPRRMQIEFSQVVQGETDRLGLEMSAQQIHSLLRREYLQANTPYALISHKLQEENGNSAVDAEVHVDGETQHWRGKGKGALEALVAGLPVAVEIMDYNEHAIGSGTTAKAAAYIELRVNGERAVHGVGIDENITTASFRALFSALNRSLSQTQAKAA

SEQ ID NO: 12532 - protein, 105 aa, Haemophilus ducreyi 35000HP
MTHQVTDATFEQEVLKSDLPVLLDFWAPWCGPCRTIAPWLDELAQEFAGRAKVAKVNVDENQQIAAQFGIRSIPTLLLFKNGEVVAIQVGVLPKSQLVTFIEQAL

SEQ ID NO: 12533 - protein, 360 aa, Physcomitrella patens
MSPSVDCLASLYCAEDVSGTAWNESEMCGAADRVFESQPAVFMDFPVEDDEAIATLLMKEAQFMPEADYLERYQSRKLSLEARLAAIEWILKVHSFYNYSPLTVALAVNYMDRFLSRYYFPEGKEWMLQLLSVACISLAAKMEESDVPILLDFQVEQEEHIFEAHTIQRMELLVLSTLEWRMSGVTPFSYVDYFFHKLGVSDLLLRALLSRVSEIILKSIRVTTSLQYLPSVVAAASIICALEEVTTIRTGDLLRTFNELLVNVESVKDCYIDMRQSEIGPYCVRMGLKRKILHASEPQSPVGVLEAADVSSPSGTVLGFSSRESSPDVTDSPPSTNSQRKRRKLCLHNESCLHVESASL

SEQ ID NO: 12534 - protein, 262 aa, Caulobacter crescentus CB15
MAQFQTLIVEAPESAPGVTLIRLNRPEALNALNTALLGELAQALAAAQADDSVGCIVLTGSAKAFAAGADIKEMSDKTYAQMFKADFFTAGARAIEQCRKPIIAAVAGYALGGGCELAMMCDFILAADTAKFGQPEINLGVAPGIGGTQRLTRFVGKSKAMDMILTGRMMGAEEAERSGLVSRIFPADSLVDETLAIAAKIAGQSPLAVAMNKELVEAAYETTLTTGVALERRLFHSLFAFEDQKEGMTAFVEKRKPLFKGA

SEQ ID NO: 12535 - protein, 169 aa, Medicago truncatula
MAASISAASSSVILHSLNSSSTRVGPSSSSSSQLQFPVRLLPIGTRRLSSSSRSRFLPLVQAKKQTFSSFDDLLANSDKPVFVDFYATWCGPCQFMVPVLEEVSARLQDQIQIVKIDTEKYPSIANKYNIEALPTFIIFKDGKPFDRFEGALTADKLIERIETTLNVKQ

SEQ ID NO: 12536 - protein, 987 aa, Candida albicans
MPSSSDAINRISYISLVTSDNDKFNQTFQFYSQLGFRLTKSFSKVSSYGSGLGANHPEFQLGVSHDSLKEVWLESYPLQNVDSNGNLRPWQEMEVYDGDNCERLNESTVIKVRLLGETPLKSISQKQFVFFTTQLNKIEKILTDANVKYGKVVDNVILAEDPLNNIISFSNTQNELCKTRFQSPEEYVEKTTAEILAKRKKSQLGSKFGSFEEISPSEVGGGNGLRKKKIGVMTSGGDAPGMNPAVRAVVRAGIYYGCDVYAVYEGYEGLVKGGDLLKKMEWSDVRSYMSLGGTSIGTARCKEFRERAGRLQGAYNMIKNGIDALVVCGGDGSLTGADLFRSEWPSLVKELVDTGKLTKEEVSPYEHLTIVGLVGSIDNDMSGTDVTIGAFSALERITEMVDYIGATAASHSRAFVVEVMGRHCGWLALLSGLATGADFVFIPERPPKAGLWKEQLKEVCLRHREYGRRKTTVIVAEGAIDDELNPITSEEVKQVLADLGLDTRNTILGHVQRGGTAVAFDRRLATLQGVEAVKAVLEMTPDTPSPMIGILKHKIVRIPLVDAVKQTKAVAEAISNKDFDKAMSLRDNSFYDDYRYFRDISIYDDGSKQLSEDKRLNIAIVHVGAASAGLNAATRAVALYSLSRGHKLYAVQDGFAGLVKGDLKNLTWMDVEGWHSLGGSEIGTNRSLPSQNIGKVAYNLQKFNIQGLLIVGGFEAFTSLHELSEQKANYPIFEIPMVVVPATVSNNVPGTEYSLGADTCLNQLVSYCDAVQQSASSTRRRVFVVEVQGGHSGYVASYCGLITGALATYTPESNINLRELQGDIDLLQKVFATDRGEDHNGTLIVRNEQASAVYSTQLIADILKENANKRFETRTAIPGHVQQGFTPSANDRVMAVKFSLKAMEFIETRNGCYGKHDRKFSDEEISEHSQVVIGIHGDVVKFTCIKHLYDNEANVALRKGKTVHWTDMIDVANILNGKSLLKKQERY

SEQ ID NO: 12537 - protein, 330 aa, Oryza sativa
MPLAAAVAASAVVPPRPPPPPPRRARPLRSFTGLILTRDLAALTVARCAPSPPAPAAEAEAEAVAVDEAPPAKPRPRRYPRQYPGEAVGVAEEMRFVAMRLRNPKRTTLKMDDTGAEEEVGDGVSEDASASEEEEEEEDDDDVVEEEEEGAGLEGEWMPSMEGFVKYLVDSKLVFDTVERIVAESTDVAYVYFRKSGLERSARITKDLEWFGGQGIAVPEPSTAGSTYATYLTELAESNAPAFLSHYYNIYFAHTTGGVAIGNKISKKILEGRELEFYKWDSDVELLLKDTREKLNELSKHWSRKDRNLCLKEAAKCFQHLGRIVRLIIL

SEQ ID NO: 12538 - protein, 605 aa, Oryza sativa
  misc_feature (145)..(145): Xaa can be any naturally occurring amino acid
  misc_feature (154)..(154): Xaa can be any naturally occurring amino acid
VQTRTKPPTDSDPTISIARSASLPDRSAPPPRAMADEAKAKGNAAFSAGRFEEAAAHFTDAIALVPDNHVLYSNRSAAYASLHRYPEALADAERTVALRPDWAKGCSRLGAARLGLGDAAGAVAAYEKGLALEPSNRAAGIRHEXSARRPAPAXGAGAIGKVFQGRSSGAVMACEPTTRPYLDQPDFMRMLRDVQRNPSSLNNYLSDPRMVQVLSVVLNLRLPNNDAPPRPPAQSTPPPPPQQQQHQPETKAREPEPEPEPMEVTEEEKERKERKAAAQEDKEAGNAAYKKDFETAIQHYTKAMELDDEDVSYLTNRAAVYLEMGKYDECINDRDKAVERGRELHADFKIISRALTRKGTALAKIAKCFKDYDVAIETYQKALTEHRNPDTLKKLNDAEIAKKELEQQEYYDPKIADEEREKGNEFFKQQKYPEAVKHYSEALRRNPKDPRVYSNRAACYTKLGAMPEGLKDAEKCIELDPTFSKGYTRKGAIQFFMKEYDKALETYQAGLKHDPNNQELLDGVRRCVQRINKASRGELSQEELQERQNKAMQDPEIQNILKDPIMQQVLTDFQENPKAAQAHLKNPGVMQKIQKLVSAGIVQMK

SEQ ID NO: 12539 - protein, 290 aa, Glycine max
MSITSLTMAESCLLSSPSSLFHTKTKPSLFTPPSKPLTLQFSCLNSSVSLSLAAPTHRSPLVTFVAQTSDWAQQEEEQSLAETEAGLESWEPNGEDAGDESFVEPPEEAKLFVGNLPYDVDSQKLAMLFEQAGTVEIAEVIYNRETDQSRGFGFVTMSTVEEAESAVEKFNRYDIDGRLLTVNKASPRGTRPERPPPRRSFESSLSIYVGNLPWDVDNTRLKQIFSKHGNVVNARVVYDRESGRSRGFGFVTMSDETEMNDAVAALDGESLDGRAIKVSVAEDRPRRGSF

SEQ ID NO: 12540 - protein, 376 aa, Wolinella succinogenes
MITINDTTLRDGEQAPTVAFTQEEKCEIAKLLYEAGADELEIGIPAMGEAEREDIRAILSLGLPLRLMSWNRATQSDLEASLACGMKAVDLSIPVSTKMVAAKFRGKYAKVLSNLEETLTIAKKEGLFVCVGMEDTSRANARFLKEVIALAMERGADRVRFCDTVGILTPLQTYRAIRSLRRHCTLPVEMHCHNDYGMAVANSIAGIEAGAQSVNTTVIGIGERAGNAGFEQVLLSLIGQFGQNRTLDSTILKALVQKVAKAAGVALAPTAPVVGSRLFWHESGIHADGNQKSEGLYEPFSPELVGASREYPIGKHSGSANLIYHLKQFVPLIEKGEASDLLPLVREIVTKNKKPLSAKELFCLYLSHKRHSQKEG

SEQ ID NO: 12541 - protein, 478 aa, Mesorhizobium sp. BNC1
MATYKAPLMLIGGEWTKGSGEPKEVINPATEEVIAMLPSATEADLDRALQSAQRGFREWQELSAEQRCDIIMRGCRILRERAAEIAPLITIEQGKPVEEARLEIIRAASIIEWDANEGRRAYGTIVPSDPGFNRYGIKLAIGPVAAFTPWNFPISSPGRKLGGALGAGCSVIIKSSEETPAATCALVQCLLDGGLPPEVINIVSGKSSMISAYLIASPVIRAITFTGSTPVGKHLAKLAAEAMKPVVMELGGHSPVIVFDDVDADKIARQAVAAKFRNAGQICTAPTRFIIQEKAHDAFVESFVKAASAIKVGNGLEADTQMGPLANSRRLRALEELVADARAKGATVATGGKRIGNRGYLFEPTVLTDVPDDADVVNVEPFGPIAPVVRFREFEEAIEIANRLPYGLCSYAFTNSQAYSHELAHRVESGIMSLNHFGTSQADTPFGGVKESGYGREGGYETLDAFMITKFVSQQITA

SEQ ID NO: 12542 - protein, 181 aa, Vigna radiata
MASSMISSPAVTTVNRAGAAGMVAPFTGLKSLGGFPTRKTNNDITSVANNGGRVQCMQVWPTIGKKKFETLSYLPDLTEEQLGKEVDYLLRSGWIPCLEFELSHKDAFPHRENNRSPGYYDGRYWTMWKLPMYGCTDSSQVLKELREARTLYPDGFVRIVGFDSVRQVQCISFIAYKPPGY

SEQ ID NO: 12543 - protein, 415 aa, Aquifex aeolicus VF5
MKILVQKFGGTSVGTLERIELCAKRVIKALEKGYKPVVVSSAMAGETDSLIELAKKVHPRPPEREMDTLLAVGEQKAIALFAMTLNKLGYPAVSLCGWQVPIITDNVHTKARIRKIGISRLLSLIEEGYIPVVAGFQGVTEDWEITTLGRGGSDTTAVALAAALKADCEINTDVPGVFTADPRIVPNAKKIKKISYEEMLELASLGAKVMQIRSVEFAAKYNVRIHVRSTFSEEEGTWIVPEDEVMEKVAVRGITVDTKETRFTVVRVPDKPGIAAEIFKALGDAHIVVDMIVQNVSHEGYTDMSFTVNKTDADKAEEIVKKIAQKIGAKEVVRDDKVAKISIVGIGMKSAYGVAGRMFDILARNGINIKAISTSEIKISCLIDEKYAELAVRALHEEFIEEMEEFETINGKNKE

SEQ ID NO: 12544 - protein, 600 aa, Phanerochaete chrysosporium
MLVSVDALALRTLVYELTYLLYPAVPTAAALLLLQRLGSVWLPTWTIVLLSLCSVPVAHRILLWLKDWRAARKAASMGAILPPRLKGRWPGSIDLLRQLTKTFETGFLSEMLWGYMHVLGQTFEVYILWDSNYVTSDANVIKTILATDFDNFVKGEKLDVCVRPVLGTGVFNSDGEMWKFHRSMTRPFFTRERISHFDLFDRHADATMAKMKARLAEGFAVDFQDLISRFTLDSATEFLFGQCVHSLASVLPYPHDAPAHLQTTGASRTEDFARAFAEAQDAVSFRLRMGWLWPWFELFGSRTKAPMAVVDAFLDPILRDAVARADKIKRENGGRVPEVKGEIEEDETLLDHLVNVVQTKILHDEVLNIMIAGRDTTGGTLTSAVYFLSQYPEVLRRLREEILEKVGPTRRPTYDDIREMKYLRAFINETLRLYPAVPWNVRYPVKDTTIPGPHPDKPYFIPANTPVSYSVHCMHRRTDYWGPDAEAFDPDRFLDARVQRYLTPNPFIFLPFNAGPRICLGQQFAYNEMSFFVIRLLQHFDEVQLCEDALAPDCRVPDAWRGAPGRKGVERFWPKAHLTLYAKGGLWVKMREASTSEAVV

SEQ ID NO: 12545 - protein, 163 aa, Triticum aestivum
  misc_feature (105)..(105): Xaa can be any naturally occurring amino acid
MSAAEGAVVFSEEKEALVLKSWAIMKKDSANLGLRFFLKIFEIAPSARQMFPFLRDSDVPLETNPKLKTHAVSVFVMTCEAAAQLRKAGKITVRETTLKRLGGTXHLKYGVADGHFEVTRFALLETIKEALPADMWGPEMRNAWGEAYDQLVAAIKQEMKPSE

SEQ ID NO: 12546 - protein, 560 aa, Arabidopsis lyrata subsp. petraea
MASSTALISDTEAWKDLKGHVEDIKKTHLRDLMTDANRCQSMMMEFDGLLLDYSRQRAPVETMDKLLNLAKAAQLTEKISRMFNGEHINSTENRSVLHVALRAPKDAVIKADGKNVVQEVWNVLDKIKEFSEKIRSGSWVGATGKPLKDVIAIGIGGSFLGPLFVHTALQTDPEALESAKGRQLRFLANIDPVDVARNIIGLNPETTLVVVVSKTFTTAETMLNARTLREWITAALGASAVAKHMVAVSTNLALVEKFGIDPNNAFAFWDWVGGRYSVCSAVGVLPLSLQYGFSVVEKFLKGASSIDQHFQSTPFEKNIPVLLGLLSVWNVSFLGYPARAILPYSQALEKFAPHIQQVSMESNGKGVSIDGLPLPFETGEIDFGEPGTNGQHSFYQLIHQGRVIPCDFIGIVKSQQPVYLKGEVVSNHDELMSNFFAQPDALAYGKTPEQLQKENVSENLIPHKTFSGNRPSLSLLLPELTAYNVGQLLAIYEHRVAVQGFVWGINSFDQWGVELGKVLATQVRKQLHSSRTQGTALEGFNYSTTTLLKRYLETSSEPQM

SEQ ID NO: 12547 - protein, 328 aa, Chlamydia trachomatis D/UW-3/CX
MPNFVTLEIREAIRQAIDEEMTRDPNVCILGEEVAEYNGAYKVTKNLLDKWGPTRVIDTPISEAAFSGIGIGAALTGLRPIIEFMSWNFSLVAADQIISHAAKMYYMTGGKFAVPIVFRGANGAAAQVSCQHSHCIEALYANIPGLIVIAPSTPADAKGLLKSAIRDNNPVLFLENELDYNLKGEVPSEEYLIPIGKARIVQEGKDLTIISHSRMVSIVEQAAKTAKQRWGLSIETIDLRTIKPLDVATLLTSVKKTGNCLVVEEGHYFCGISSEVITTITEHIFDYLDHPPLRVCQKETPMPYNKTLEMATLPNINRILDAIEKIMR

SEQ ID NO: 12548 - protein, 1313 aa, Geobacter metallireducens GS-15
MNRRELMAGVLLGSAGFLVNWFKLSLFFNVDFLFGSVFSMFALLRFGPATGLLAAVIAAGCTWLQWHHPWAIVIFGCEALCAGWLRNRKRMDLMLGDIIYWFSGGLVLVWLFYHQVMGFNAGATLLVALKQGMNGIINTLIAEALFLLSWRLRGGTELPSLRKWLGVILEGVVLVPAFVFAFLDTSWYFRQQMTRLQESTARTAEVGNLTISSWLDEEQHKLGMLVKLVGDPDHNPSQEMQRLLERYHAAHGSDTYRLGVMDRNHVTRAFSPRVDEKGVSTIGVWLGDRPYIAELNDPSHPIVFDAFMGKIGVPGPRLIMLAPCMVGGEYRGAVFSVVSLGHPAALLKGIVGKRDVNLTLLDRHRRVVASTDSGKKFLEQFALPKGGQLHSVGSNVSQWVPDPQPGGGPMKRWNRSFYMTEIALEPKSGFRLVVQSSLAPSLKEINNRASILLGVLAILTLVVVGLSRYFSRRLLAPFAMLGKVTSQLPVRIAQGEQISWRPAEVREEQELQDNFRLMENALQNSFSELTAINEELEHRVTERTAELRIAKEAAENSELQLRSITNSAHDAILMMDHQGSISYWNPAAEQILGYSAAEALGKNLHDLLTPERYLADHLTAFSEFQQTGSGNAVGKTLELFARRKDGQEIEVALSLSAVFLNGAWNAVGLLRDITEQKRINASLRMLSAAVEHSPVSIIITDRDGRIEYVNPKSCQMTGYAFEELRGQNPRIMKGPTHPPEFYKNLWETILSGREWYGEFHNRRKDGSLVWVMASISPIYDEKGEITHFVGVREEIEKQKKLQEELANIAQLEKVARDRAEQANRAKSEFLAGMSHEIRTPLNAIIGMSDLLAETRLDGEQSGYLSVVHSAGETLQGLINDILDLSKIEAGMLQLDSVPFSLRDCIRQLTDITSVKASSKGVTYSFSVKSAVPDWLMGDSLRLRQVLINLVGNAVKFTDSGGSVLLEVEPVQQSDAEVLIRFSVADTGIGIAPEKLDTIFESFSQADSSTTRRYGGTGLGLAISRHLAGMMGGEIGVESTVGKGSCFRFTVPFAISRRTEEPLPKEQLPGDKLGRPLSILVVDDNLANRTVLTAYFRRTEHTVECAVNGEEALAKIKGGGYDVVFMDMEMPVMDGYTAVRLVREWERETGRAPLPVIALTANALKEDQLRSLDAGCTAHLTKPIKKDKLLEIVGEYQQRPRTNGKQGTNMDRDNVPDKIVVVCDPDLEDIIPAYLEGRKTEGSVIRELAVNGQFDEVRTIAHGLKGSGGCYGFSRITEIGRDMELAANDGNLVEVLKQLDTLEAYLQAIEVRYE

SEQ ID NO: 12549 - protein, 74 aa, Triticum aestivum
ACLPSRPRPGATSWRGRRWPPPASPSRRRTAAWDEVEELSAAASHARDKLKDSDPLENYCKENPETDECRTYDS

SEQ ID NO: 12550 - protein, 560 aa, Arabidopsis halleri subsp. gemmifera
MASSTALFCDTEAWKDLKGHVEDIKKTHLRDLMSDANRCQSMMMEFDGLLLDYSRQRAPVETMDKLLNLAKAAQLTEKISRMFNGEHINSTENRSVLHVALRAPKDAVIKADGKNVVPEVWNVLDKIKEFSEKIRSGSWVGATGKPLKDVIAIGIGGSFLGPLFVHTALQTDPEALESAKGRQLRFLANIDPVDVARNIKGLNPETTLVVVVSKTFTTAETMLNARTLREWITAALGASAVAKHMVAVSTNLALVEKFGIDPNNAFAFWDWVGGRYSVCSAVGVLPLSLQYGFSVVEKFLKGASSIDQHFQSTPFEKNIPVLLGLLSVWNVSFLGYPARAILPYSQALEKFAPHIQQVSMESNGKGVSIDGLPLPFETGEVDFGEPGTNGQHSFYQLIHQGRVIPCDFIGIVKSQQPVYLKGEVVSNHDELMSNFFAQPDALAYGKTPEQLQKENVSENLIPHKTFSGNRPSLSLLLPELTAYNVGQLLAIYEHRVAVQGFVWGINSFDQWGVELGKVLATQVRKQLHSSRTQGTALEGFNYSTTTLLKRYLETSSEPQM

SEQ ID NO: 12551 - protein, 359 aa, Pirellula sp.
MNSSIVLLPGDGIGPEIVEQARLVLVKVAERFGHTFDFSSHQIGGIAIDETGDPLPQPTIDACRNAAAILLGAVGGPKWDDPSAKTRPEAGLLKIRKELGLFANLRPIKLFDELADASPLRADIVKGTDILFFRELTGGIYFGESGTSGSGEEETAFQSMTYSVGEVKRIVRMAAQAARGRSNRLTSVDKANVLEPSRLWRRVAAEVMANEFPDVQYDVVLVDSMAMHLINRPSEFDVVVTGNMFGDILTDEASMLPGSLGMLPSASLGDGGPGLYEPIHGSAPDIAGKSVANPLATILAAAMMLRHSLGLTDEAEAIEKAVAGVITDGLRTPDLARGDQSKSVSTEEMGAAVVAKLAS

SEQ ID NO: 12552 - protein, 476 aa, Aquifex aeolicus VF5
MAKKIRYLDRNKEPTLPPEERVKTFREFELGYSVNLALDEAQRCLFCKDAEQRCIKGCPVHVDIPGFIKKITEGDLVGAYKVITQSDIFPSICGRVCPQERQCEGSCILYYDTVRNRKNKGLPVAIGALEKFVGDFIRISGIEIEEEKEPPTGFRVAVIGAGPAGLSCAHELAKKGHEVHVYEALPKPGGVMYYGIPNARLDKSIIEWEVKRLEKLGIKFFYGYLIGKNITLQELREKYDAVFIAVGAGRGKLGLPGDHLKGVYSAIDFLMRVNLYKANEFPKKGVPVELGKRTVIIGGGFTAVDCAITANRLGVETHVVYRRTRETSSARQEEWDHLMEEGVKIHWLTQPVEVIGNEKGEVVGLKCIKMELGEPDESGRPRPVPVPNSEHIIECDSVIFAIGQRANPIAYEGSGIKTTKWGTIEVNERYETNLEGVFAGGDVINGGDRVVVALAHGKEAAKYIHEYLMSNKEVRK

SEQ ID NO: 12553 - protein, 120 aa, Zea mays
  misc_feature (102)..(102): Xaa can be any naturally occurring amino acid
MEANSGGGGGAEGGRAVTGGGGGSDVELVSKTLQVEHKLFYFDLKENPRGRYLKISEKTSATRSTIIVPSSGISWFLDLFNYYVNSEEHELFSKELQLDSKXVFYFDIGENRRGRFFRKF

SEQ ID NO: 12554 - protein, 492 aa, Polaromonas sp. JS666
MDMKTSPISLLKDPSLFKTDALINGQWVAGGSRFDVNDPSNGQKLADVANLGSQDAEAAIAAANAAWPAWRSKTGKERHAILMKWYQLLMANQEDLGRIMTAEQGKPFAEAKGEVAYGASFVEWFAEEAKRVNGETLPQFDNNRRLMVIKQPIGVCAAITPWNFPLAMITRKVAPALAAGCPVVIKPAELTPLTALAAAELAVRAGIPAGVLNVLTADSANSIAVGKVFCASDVVRHISFTGSTEVGRILMAQSAPSVKKLSLELGGNAPFIVFDDADIDSAVEGAMASKYRNAGQTCVCANRIYVQDGVYDQFVEKFAAKVKLLKVGNGFEDGVVQGPLIEDSAVDKVQRHVADALAKGGKLQAGGHKLQGQFFEPTVISEATADMLCAREETFGPFAPVFRFKAEQEAIDAANNTEFGLASYFYSRDIGRIYRVAEALEYGMVGINAGVIATEHVPFGGVKQSGLGREGSSHGMEEYVEMKYLCLGDILK

SEQ ID NO: 12555 - protein, 506 aa, Brucella suis 1330
MVMSTIVKPQPLTGLEVREFSMLIDGKWVGSDSGKSIERVAPGHGVTVSRYPAGNKADVERAVSAARKAFDDGRWSSTTASQRSLVLLKAADLIEARAEELAYLDAIEAGKPISQVRGEISGSVDIWRYAAALARDLHGESYNTLGDGTLGVVLREAIGVVSIITPWNFPFLIVGQKLPFALAAGCTAVVKPSELTSGSTLLLGEILAEAGVPDGVVNIVTGTGADVGQHMSTHPHVDMVSFTGSTGVGKLTMANAAQTLKKVSLELGGKNPQILFPDADMDAFIDAAVFGAWFNAGECCNAGSRLIVHRSVVDAIVGRVADLSKKVIVGDPLDASTQVGAIITPQHLTKVGAYVDQARKAGAAIAHGGEVLDLGLGQYMGPTILAGVKADMAVAREEVFGPVLSVLSFDTVEEAISIANAVDYGLSAGVWSRDFDTCMTIGRKVRAGTVWMNTFMDGTPELPFGGYRQSGLGRELGRHAVEDYTETKTLNMHIGARTGWWMPQAK

SEQ ID NO: 12556 - protein, 258 aa, Brucella suis 1330
MADRIEISIENHIAVMTIRRPEKLNALDIPLLQELSTACDQVEADSSVRVAILTGEGKAFSAGGDIKAWGGMEPQEFGHAWVRYGHRVFERLATLRVPLIAAMNGHALGGGLELAGTADIRIVERQAKIGLPETSLGMIPGWSGTQRLVRRFGAQIVRRMVLGGEMFTADEALSHGLVDHVVETGEALQAALAYAARVAKRGPAALEISKLMLSVANGEDNGTAVEALGSILAAKTGDLKEGVRSFTEKREANFEGKW

SEQ ID NO: 12557 - protein, 602 aa, Rhodococcus opacus
MSKKKNGADRTAVSGVQKMTPSEAFVETMVANGVTDMFGIMGSAFMDAMDIFAPAGIRLVPVVHEQGAGHMADGYARVSGRHGMVIGQNGPGISNCVTAIAAAFWAHSPVVIVTPEAGTMGTGLGGFQEANQLPMFQEFTKYQGHVNNPKRMAEFTGRCFDRAMSEMGPTQLNIPRDYFYGEIETEIPQPTRLDRGPGGETSLNEAAELLAQAEFPVIVSGGGVVMADGVEECKALAERLGAPVVNSYLHNDSFPASHPLWTGPLGYQGSKAAMKLISQADVVLALGTRLGPFGTLPQHGMDYWPKNAKIIQIDADHKMLGLVKKISVGICGDAKAAAVALTERLEGKALVCDANRAARGEKIDAEKAAWEKELDEWTHERDPFSLDMIAEQEGEEGNWLHPRQVLRELEKAMPEDVMVSTDIGNINSVANSYLRFEKPRSFLAPMSFGNCGYALPTVIGAKAAAPERPAIAYAGDGAWGMSLGEIMTAVRHDIPVTAVVFHNRQWGAEKKNQVDFYNRRFVAGELESESFAGIAQAMGAEGIVVDKLEEVGPALQRAVAAQMNEGKTTVIEIMCTRELGDPFRRDALSKPVRLLDKYKDYV

SEQ ID NO: 12558 - protein, 946 aa, Candida albicans SC5314
MISIVNGTSTLSLVAGSVETLNQAINFYTNILGLSVHSEQNDWTYLSNDDNKMIVKIQLDTKSGLSLDQINDRRTEIIAKLNITDWRSLDTTSVLKVQNLVALIETLTTFNYTLQITPNELYPNEVYCVDPLGYIIGFTACDEPLTLVPPLQKSHPKPGLVSNLMSKSGSQSRNIEETKAVRRNIAVMTSGGDSQGMNAAVRAVVRATIFHGSKAFAVQEGYAGLVKGGPEYIKEMKWQDVRGFLSEGGTNIGTARCMEFKERWGRLKGCKNLIDAGIDGLIVCGGDGSLTGADLFRHEWPSLIQELKDKGEITNEQFERHKHLYICGMVGSIDNDMAMTDATIGGYSALERICRAIDYIDATANSHSRAFVVEVMGRHCGWLALMAGIATSADYIFIPEKPASSKDWQDQMCDIVGKHRAQGKRKTIVIVAEGAITSDLKPITSDEVKDVLVDRLGLDTRITVLGHVQRGGTAVAFDRTLATLQGVEAVKAILELTPDVPSPLIAIDENKICRRPLVEAVRITKSVASAIEAKDFEKAMSLRDHEFKEHLANFMAMNTANHEKPTLPREKRKKIAIINIGAPAGGMNSAVYAMATYCMSRGHTPYAIHNGFAGLSRHESVKSIEWIDIEGWNSIGGSEIGTNRQTPEETDIGMIAHYFEKYQFDGLIIVGGFEAFVSLEQLERSRAMYPSFRIPMVLIPATISNNVPGTEYSLGADTCLNSLMEYCDIVKQSASATRGTAFIIDVQGGNSGYIATFASLISGAQASYVPEEGISLQQLEMDINSLREAFAVEQGMTKSGKLIIKSSNASKVLTPHTLADIFNDECHGDFDTKTAIPGHVQQGGLPSPIDRSRGDRFAIRAVQFIEDHCDVLAPYRYELDFPIDDKKILNTAAVLGIKSSRLRFTSIRHLFDFETELGRRMPKTIYWNTIRDISDQLVGRTRLDKP

SEQ ID NO: 12559 - protein, 585 aa, Arabidopsis thaliana
  misc_feature (332)..(332): Xaa can be any naturally occurring amino acid
  misc_feature (353)..(353): Xaa can be any naturally occurring amino acid
MQDLFGSVRRSLVFRSTTDDENQENHPPPFPSLLADKITSCIRKSMVFAKSQSPPNNSTVQIKPPIRWRKGQLIGRGAFGTVYMGMNLDSGELLAVKQVLITSNCASKEKTQAHIQELEEEVKLLKNLSHPNIVRYLGTVREDETLNILLEFVPGGSISSLLEKFGAFPESVVRTYTNQLLLGLEYLHNHAIMHRDIKGANILVDNQGCIKLADFGASKQVAELATISGAKSMKGTPYWMAPEVILQTGHSFSADIWSVGCTVIEMVTGKAPWSQQYKEIAAIFHIGTTKSHPPIPDNISSDANDFLLKCLQQEPNLRPTASELLKVKWSTXHPFVTGKQKESASKDLTSFMXTSTSDDVGDICNLGSLTCTLAFPEKSIQNNSLCLKSNNGYDDDDDNDMCLIDDENFLTYNGETGPSLDNNTDAKKSCDTMSEISDILKCKFDENSGNGETETKVSMEVDHPSYSEDENELTESKIKAFLDDKGHIGRSPSRATDAACCSKSPESGNSSGAPKNSNASAGAEQESNSQSVALSEIERKWKEELDQELERKRREITRQAGMGSSPRDRSLSRHREKSRFASPGK

SEQ ID NO: 12560 - protein, 404 aa, Borrelia burgdorferi
MEEALMKDYNMIDSHTRRFDSTTNPTILKVIGAGGGGSNAVNRMIEYGVRDVEFIVANTDLQALQTSIAPIKIALGAKVTAGLGAGGKPEIGQAAAEEDIDVIRNHLSGADMVFITAGMGGGTGTGAAPVIAQVAKELGILTVGVVTKPFKFEGPKKLRLAEQGINNLRKSVDTLIIIPNQKLLTVVDKRTTIKDAFKRADDVLRMGVQGIAGLIIEHGEVNIDFADVKSIMQGQGDALMGIGYGKGENRAVDRRTSAISNPLLEEVRIEGSKGLLVNVTGGDDFSLLELEEIMGIITVSVDDEATVIYGHAINSNLEDEIYVTVVATGFASKKQKEISSAPENNTLSSKEFDTLMSGNQNAPSGSYEQQDSSFAAKSKNVNYFDDDIDVPTFLRNLNKKSSDD

SEQ ID NO: 12561 - protein, 297 aa, Methanopyrus kandleri AV19
MKRETFRYRGDMDLDGFLREMERVGALGAGRLGRAARILEKMWSSDDVTVLLTVAGPAVAGGLGELFERLIREGLVDAVITSGANVVHDALDALGGIHVCLGERNVDGYGRVHDTHIPTEAFEKFEHFMREVLSDLSGRVSCRELLWEMGKRLESGFLRAAADEGVPIYSPGILDSMVGLHVWIHSQDHDFHLDLVDDMHHLADLVFEAEELGAIILGGSVPKHFAMGAAMLRGGLDYAVQITMDRPETGSLSGAPLEEGKSWEKVREDAEVATIVGDYLIIFPLLASGVMQRLGIV

SEQ ID NO: 12562 - protein, 136 aa, Methanopyrus kandleri AV19
MDVAVKKVEVRQLKKGKYIMIDDEPCKIVEYTTSSPGKHGSAKARIVAVGLFDGKKRTLTKPVDAKVDVPVIERKTAQVVSDMGDTVQLMDMETYETFEVQKPEDEELASQLEPGTMVEYMEAAGKRKIVGIKEEE

SEQ ID NO: 12563 - protein, 309 aa, Streptococcus agalactiae NEM316
MILTVTMNPSIDISYPLDVFKMDTVNRVAEVSKTAGGKGLNVTRVLAEIGDNVAATGLIGGTNGHFLLQHLPQNIQAFFYEIAGDTRNCIAILHEGQQTEILEAGPTIAAEEVNGFLHHYRSLMGATDVVAISGSLPAGLPTEFYVQLVEIAHQFGNKVVLDCSGVALQAALGSPVKPTAIKPNNEELSQLLGREVSKDLNELKEVLSEPLFEGIEWIIVSLGADGAFAKHWDTFYKVDIPKIEVVNPVGSGDSTVAGISSALSHQVDDYSLLKKANVLGMLNAQEKMTGHVNVSKYDNLYNQITVKEV

SEQ ID NO: 12564 - protein, 508 aa, Oryza sativa (japonica cultivar-group)
  misc_feature (16)..(16): Xaa can be any naturally occurring amino acid
  misc_feature (35)..(35): Xaa can be any naturally occurring amino acid
  misc_feature (52)..(52): Xaa can be any naturally occurring amino acid
AAAEKRRRYGGGCGDXGVRGDPGRGKCTGTTPTGXWRVSASGKSVAIVNPTXRLTQYRVQACTQEEVNKVMETAKVAQKAWARTPLWKRAELLHKAAAILKEHKTPIAECLVKEIAKPAKDAISEVVRSGDLVSYTAEEGVRILGEGKLLVSDSFPGNERNKYCLSSKVPLGVVLAIPPFNYPVNLAVSKIGPALIAGNALVLKPPTQGAVAALHMVHCFHLAGFPKGLINCVTGKGSEIGDFLTMHPGVNCISFTGGDTGIAISKKAGMVPLQMELGGKDACVVLEDADLDLVAANIVKGGFSYSGQRCTAVKVVLIMESVADIVVEKVKAKLAKLTVGPPEADSDITPVVTESSANFIEGLVMDAKEKGATFCQEYRREGNLIWPLLLDHVRPDMRIAWEEPFGPVLPVIRINSVEEGIHHCNASNFGLQGCVFTKDINKAIMISDAMETGTVQINSAPARGPDHFPFQGLKDSGIGSQGITNSINMMTKVKSTVINLPSPSYTMG

SEQ ID NO: 12565 - protein, 578 aa, Yarrowia lipolytica CLIB122
MKKEASPDIHEVHEVGEIEEVQYDVPEIHLSAAAELDSTEPFQVYYHYAAIQRAREDALPKSPFSSLFDKYRKKKPEPEERSDESHSSSEGTFSPDCEKTVLDQIPGAKTELAVANMSLRTATWMSVFFLTTTDILGPSASPWAISQLGWFPGVMLFSVLGGAAVYTGWLIYRMFLKLDSPEFPMKTFGDLALRVYGKGFRWGVDVLQSLQLLCNVAVIILSNGQGLSQIYSPLCFSVWCIIFMLAGILLGQIRGLSNFSYIANAAIWMNLFVVFSTMGIAGTKPPNYVGGAKQNGLPNSTDPVRTRAIENVPFQTQLNAVMNIVYSYGGAMVFVEFLSEMRKPREFLKGMLSAQGVIFVCYLLYGLLVYAYQGQYTMNPANQGLGSYNWQTAVNVVSLVSALIGAGLYGNVGVKVVYITLLRRAMPFLPNLEIGLKGRITWGLMVFLFWALAFVLASAIPQFSALTSLVGAACILQFSYTFPPLMYMGLTIREEASKLDIVDMETRKVTKYDSWKTLARWKRGVLSRPWWVLVNFTLFLCSAATGILGIYSSVYSLVQAFDAPGAATVAFGCKSPVA

SEQ ID NO: 12566 - protein, 253 aa, Triticum aestivum
  misc_feature (172)..(172): Xaa can be any naturally occurring amino acid
MVAAAPCATRRSFRDSLKVLEADIQHANTLASECSRDYDGACVQMRMSYSPAARLFLFLLQWTDCSLAGALGLLRILIYKVYVDGTTTMSTHERKASIREFYAVIFPSLMQLEHGISDSDDRRQRAACSERYRRRDEPEDSKRPVSEIDAEIEEECGICMELNSRVVLPNCXSHDMCIKCYRQWRSRSQSCPFCRDSLKRVNSGDLWMLTDQRDVVDMATVTRENIRRLFTYIEKLPLVTLDNIFDAYDSHVK

SEQ ID NO: 12567 - protein, 569 aa, Campylobacter lari RM2100
MKELNGSQMICEALKEENVKVVFGYPGGAALNIYDEIYKQTHFKHILVRHEQAALHSADAYARMSGEVGVAVVTSGPGFTNTVTGLATAYSDSIPLVLISAQVANSLIGTDAFQEIDAIGISRPCVKHNYLVKNIEELPKILKEAFYIATTGRKGPVHIDIPKDITAAIGKWHYPKEISMKTYKPTYKGNIKQIKKLVSLIKNAQKPLFYLGGGCVASNASDELRELIHFCQIPAVETLMALGTLRSDDELNLKMAGMHGSYCANIALSECDLLIAVGARFDDRITGKTSEFAKGAKIVHIDIDPSSISKIIEAHFPIVGDIKSVILDTLEELKKESFDNTKYQEWFKTLQRYQQLYPLIYEDSDEVLKPQWVIEECARLAPDARIITDVGQHQMWVAQFYPFNYARQLATSGGQGTMGYSLPAALGAKLAVGEEVVVNFVGDGSFLMNIQELMTASAYKIKVINIILNNSFLGMVRQWQSMFYKERFSNTDLTSQPDFITIAKGFHCEGYNVCNKEEFQKAFKAALESKKTCVLNVAIDRYEDVLPMVPAGGAIYNMILPSYKNKDKK

SEQ ID NO: 12568 - protein, 279 aa, Bacillus halodurans C-125
MSAVLLDGKALAAKKRDELKSEVTKLKERGITPGLAVILVGNDPASTVYVRSKQKACEQIGIYSVLKELPASTSEEELLTEIDRLNNDPTIHGILVQLPLPEQISEQAVIERISPAKDVDGFHPISVGRMMIGEDTFLPCTPFGVLVMLQEANVEIAGKHVVVVGRSNIVGKPVGQLMLNEHATVTYCHSRTKNLTEITKQADILIVAVGRARFIDASHVKEGAVVIDVGINRVDGKLCGDVDFESVREVASHLTPVPGGVGPMTITMLLANTIQAAKE

SEQ ID NO: 12569 - protein, 163 aa, Gossypium hirsutum
MATYEGKVFTEEQEALVVKSWTVMKKNAAELGLKFFLKIFEIAPSAKKLFSFLRDSNVPLEQNTKLKPHAMSVFVMTCESAVQLRKAGKVTVRESNLKKLGATHFKYGVVDEHFEVTKFALLETIKEAVPDMWSDEMKNAWGEAYDRLVAAIKIEMKACSLAA

SEQ ID NO: 12570 - protein, 609 aa, Arabidopsis thaliana
MGCLRSLVRRKQFDSSNGKAETHHHHQQLAKALTFPHLIAIGVGSTIGAGVYILVGTVAREHSGPALALSFLIAGISAALSAFCYAELSSRFPSAGSAYHYSYICIGEGVAWLIGWALILEYTIGGSTVARGISPNLAMIFGGEDCLPTILARHQIPGLDIVVDPCAAVLVFIVTGLCCLGVKESTFAQGIVTTANVFVMIFVIVAGSYLCFKTGWVGYELPTGYFPYGVDGMLTGSATVFFAYIGFDTVASMAEEVKNPRRDLPLGIGISLLLCCLLYMMVSVVIVGLVPYYAMDPDTPISSAFSSHGIQWAAYLINLGAVMALCSALMGSILPQPRILMAMARDGLLPSYFSYVNQRTQVPINGTITTGVCAAILAFFMDVSQLAGMVSVGTLVAFTMVAISLLIVRYVVPPDEVPLPSSLQENSSSHVGTSIRSKQPLLGKVDDSVVDKENAPGSWVLNKKNRRKFAGWSIMFTCIGNFLLSYAASSFLLPGLLRYSLCGVGGLFLLVGLIVLICIDQDDARHSFGHSGGFICPFVPLLPIVCILINMYLLVNLGAATWVRVSVWLFLGVVVYIFYGRRNSSLVNAVYVSTAHLQEIRRTSGHSLA

SEQ ID NO: 12571 - protein, 826 aa, Shewanella sp. ANA-3
MSISRREFLKANAAVAAATAVGVTLPVKMVEAAESDNIKWDKAPCRFCGVGCSVLVGTKAGKVVATKGDPESPVNRGLNCIKGYFLSKIMYGKDRLTTPLLRMKDGKYHKEGEFTPVSWDVAFDTMAAKWKNSIATKGPTSVGMFGSGQWTIWEGYAASKLHKAGFLTNNIDPNARHCMASAVGGFMRTFGIDEPMGCYDDLEAADQFVLWGANMAEMHPILWARLSDRRLSHKDCRVHVLSTFENRSFDLADNPMVFRPQSDLVILNFIANYIIQHKAVNTDFVTKHTKFALGVDDIGYGLRPDHPLEKKAKNPGNGKSSPISFEEYAKFVSTYTLEYAAKMSGVEPEKLETLAKAYADPKVKVMSLWTMGINQHVRGVWANNMLYNIHLLTGKIATPGNSPFSLTGQPSACGTAREVGTFAHRLPADMEVANDKHRAITEKVWQLPEGTIPPKPGFHAVLQSRMLKDGKLNCYWTMCTNNMQAGPNINDEIYPGFRNPENFIVVSDPYPTVTAMAADLILPTAMWVEKEGAYGNAERRTHMWHQQVKAPEGAKSDLWQLVEFSKRFKVSEVWPAELIAKQPEYADKTLYEVLFANGVINKFPTTDCKGDLNDESAHFGFYLQKGIFEEYAAFGRGHGHDLADFDRYHETRGLRWPVVEGKETLRRFVEGSDPYVKAGEGYKFYGKPDGKAVIFALPYEPAAEEPNEEYDLWMSTGRVLEHWHTGSMTARVPELYRAYPDAQIFMHPEDAKARGLQRGDEVLVASPRGEVKTRVETKGRNKPPRGVVFMPFFDARQLVNKLILDATDPLSKETDFKKCPVKVMKA

SEQ ID NO: 12572 - protein, 460 aa, Oryza sativa (japonica cultivar-group)
ASFRTVGAKITQETGDFFVSDAEGDPDKPTDGFSSIDEAIGALHEGKFVIAVDDESGDNEGDLVMAATLADPESIAFMIRNGSGIISVGMKEEDLTRLMIPMMSPIAEIEDISAAASTVTVDARVGISTGVSAADRAKTIFTLASPDSKPTDLRRPGHIFPLKYRNGGVLKRAGHTEASVDLVALAGLRPVSVLSTVINPVDGSMAGMPVLKQMALEHDIPIVSIADLIRYRRKREKLVELIAVSRLPTKWGLFRAYCYQSKLDGTEHIAVAKGDIGDGEDVLVRVHSECLTGDILGSARCDCGNQLDLAMQLIDKAGRGVLVYLRGHEGRGIGLGQKLRAYNLQDDGHDTVQANVELGLAVDSREYGIGAQILRDMGVRTMRLMTNNPAKFVGLKGYGLAVVGRVPVISPITKENQRYLETKRTKMGHVYGSDLPGNVPEEFLNPDDIAGDQDEDDTHN

SEQ ID NO: 12573 - protein, 176 aa, Triticum aestivum
  misc_feature (149)..(149): Xaa can be any naturally occurring amino acid
MAPTVMASSATSVAPFQGLKSTAGLPVSRRSNGASLGSVSNGGRIRCMQVWPIEGIKKFETLSYLPPLSTEALLKQVDYLIRSKWVPCLEFSKVGFIFREHNASPGYYDGRYWTMWKLPMFGCTDATQVINEVEEVKKEYPDAYVRIIXGFDNMRQVQCVSFIAFKPPGCEESGKA

SEQ ID NO: 12574 - protein, 104 aa, Bacteroides fragilis NCTC 9343
MALEITDNNFKEILAEGSPVVIDFWAPWCGPCKMVGPIIDELAKEYEGKVIMGKCDVDENSDLPAEFGIRNIPTVLFFKNGELVDKQVGAVGKPAFVEKVEKLL

SEQ ID NO: 12575 - protein, 502 aa, Staphylococcus epidermidis ATCC 12228
MISKSSPLIFERSKKDRYAYSLPQNDIENISIASLLDDKYIRKHKAEFPEVSELDLVRHYTELSNKNFGVDTGFYPLGSCTMKYNPKINEKVARISGFSESHPLQEEEHVQGSLEIIYSLQEELKEITGMDEVTLQPAAGAHGEWTALMIFKAYHEKNGQSHRDEVIVPDSAHGTNPASASFAGFKSVTVKSNQRGEVDIEDLKRVVNDNTAAIMLTNPNTLGIFEQNIIEIGKIVHEAGGLLYYDGANLNAILDKVRPGDMGFDAVHLNLHKTFTGPHGGGGPGSGPVGVVEKLASYLPKPMVIKDNDRYKYDNDIPNSIGRVKPFYGNFGIYLRAYTYIRSMGANGLKEVSEAAVLNANYIKSRLKNHFEIPFNQYCKHEFVLSGTLQKQYGVRTLDMAKRLLDFGVHPPTIYFPLNVEEGMMIEPTETESKETLDYFIDAMIQIADETKNDPDKVLEAPHTTIIDRLDETTAARKPILKFEELKDEKYKEHTNIDSEDN

SEQ ID NO: 12576 - protein, 217 aa, Legionella pneumophila str. Paris
MTFQILPSLLSADMTRLGEEVDAVMKAGADFIHFDVMDNHYVPNLTFGPAFCDALIKKFPNLPIDVHLMTTPVDTLIEAFAKAGAKRISIHPDATIHLDRSLQLINNLGCEAGLVLNPATSIDTLTWCAHNLKFVLVMTVNPGFGGQKLIPEVIPKLSKIRQQYPNLDLCVDGGVTPQNIASLAHAGANQFVAGSAIFNSSNYSETIKRMREQLASI

SEQ ID NO: 12577 - protein, 459 aa, Aspergillus nidulans FGSC A4
MSNLPVEPEFEQAYKELASTLENSTLFEQHPEYRRALQVVSVPERVIQFRVVWENDKGEVQINRGYRVQFNSALGPYKGGLRFHPSVNLSILKFLGFEQIFKNALTGLNMGGGKGGSDFDPKGKSDSEIRRFCTAFMTELCKHIGADTDVPAGDIGVTGREVGFLFGQYRRIRNQWEGVLTGKGGSWGGSLIRPEATGYGVVYYVEHMIKHVTGGKESFAGKRVAISGSGNVAQYAALKVIELGGSVVSLSDSKGSLIVKDESASFTPEEIALIADLKVARKQLSELATSSAFAGKFTYIPDARPWTNIPGKFEVALPSATQNEVSGEEAEHLIKSGVRYIAEGSNMGCTQAAIDIFEAHRNANPGDAIWYAPGKAANAGGVAVSGLEMAQNSARLSWTSEEVDARLKGIMEDCFKNGLETAQKFATPAKGVLPSLVTGSNIAGFTKVAEAMKDQGDWW

SEQ ID NO: 12578 - protein, 477 aa, Arabidopsis thaliana
MTMSENSRNLEAGLLLRKNQNDINECRITAVVLFSTFVSVCGSFCFGCAAGYSSVAQTGIINDLGLSVAQYSMFGSIMTFGGMIGAIFSGKVADLMGRKGTMWFAQIFCIFGWVAVALAKDSMWLDIGRLSTGFAVGLLSYVIPVYIAEITPKHVRGAFVFANQLMQSCGLSLFYVIGNFVHWRNLALIGLIPCALQVVTLFFIPESPRLLGKWGHEKECRASLQSLRGDDADISEEANTIKETMILFDEGPKSRVMDLFQRRYAPSVVIGVGLMLLQQLSGSSGLMYYVGSVFDKGGFPSSIGSMILAVIMIPKALLGLILVEKMGRRPLLLMNDLYLQASTGGMCFFSLLLSFSFCFRSYGMLDELTPIFTCIGVVGFISSFAVGMGGLPWIIMSEIFPMNVKVSAGTLGTLANWSFGWIVAFAYNFMLEWNASGTFLIFFTICGAGIVFIYAMVPETKGRTLEDIQASLTDFLQ

SEQ ID NO: 12579 - protein, 156 aa, Haemophilus influenzae
NRTNTPVLVDGKDVMPEVNAVLAKMKDFCQRIISGEWKGYTGKAITDVVNIGIGGSDLGPYTVTEALRPYKNHLNMHFVSNVDGTHIAETLKKVNPETTLFLVASKTFTTQETMTNAQSARDWLLKAAKDESAVAKHFAALSTNAKDVEKFGIDTN

SEQ ID NO: 12580 - protein, 372 aa, Aspergillus oryzae
MYPITTRYQIHENKKSNPPHPRDKLVRRNKRKQPTIKPLRHHFQHLSPWSKIMGQQRRGKPSGGRDVTVSKALSLLLRHAAEKEGLKLDAQGYANVADVLAWRKLKSLKVTFPEIVAAVATSDKKRFALLHIPSTEAQAQQSTSAEASTEHGIPTTSAGQDSATETALAVSESDLDPAHFLIRATQGHSIKSVDAASLMEKLSLDEEAKLPDTVVHGTFHAAWPAILASGGLKSMGRNQVHFATGPSVESVLAQGAQGSKEVTGDHGEKVISGMRRDAQVLIYIDLKKALAAGCPFWRSENGVILSEGMVVEGSSGIVPVEFFDVVVERKHGLGKIWEGGKEVQALPEELVKQGNPKGRRNANKKKEDTTQP

SEQ ID NO: 12581 - protein, 260 aa, Geobacter metallireducens GS-15
MEFKNLLIETADGVATLTVNRPQALNALNSEVLTELASAFYQLEYDPAVRVVVLTGAGEKAFVAGADIKEMAAMSSFEGHQFALKGQHCMMAMEKMKTPVIAAVNGFALGGGLELALGCDFIYASEKAKLGFPEVTLGIIPGFGGTQNLARLIGKNRANELIFTGRMIAADKAQAWGIVNEVFAPEELLVKAKETAAAIAGVGPLGVTYAKNAIANGLNMGKEDGFRYEASLFGVLFGTADQKEGMGAFVEKRKAVFTGK

SEQ ID NO: 12582 - protein, 96 aa, Arabidopsis thaliana
MILNYPGTSWMVFKRCVPTRNKPRQTRGDLTPEELKERQAKGMQDPEIQNILTDPVMRQVLSDLQENPAAAQKHMQNPMIMNKIQKLISSGIVQMK

SEQ ID NO: 12583 - protein, 411 aa, Nicotiana tabacum
MNALAATNRNFKLAARLLGLDSKLEKSLLIPFREIKVECTIPKDDGSLASFVGFRVQHDNARGPMKGGIRYHPEVDPDEVNALAQLMTWKTAVANIPYGGAKGGIGCSPSDLSNSELERLTRVFTQKIHDLIGIHTDVPAPDMGTNPQTMAWILDEYSKFHGYSPAVVTGKPIDLGGSLGRDAATGRGVLFVTEALVKEHGKSIAGQRFVIQGFGNVGSWAAKLINEQGGKIVAVSDITGAIKNENGLNIASLLKHVKENRGVKGFNDARPIDPHSILVEDCDVLIPAALGGVINRDNANDIKAKYIIEAANHPTDPEADEILAKKGVVILPDIYANSGGVTVSYFEWVQNIQGFMWDEDKVNAELKTYMTRGFKDVKDMCKTHNCDLRMGAFTLGVNRVARATVLRGWEA

SEQ ID NO: 12584 - protein, 823 aa, Candida albicans SC5314
MTEINDSTENITRIDRNDAKELKHWLAKANCQHHYSKFIENGITMDLLPELDTGSLKELGISKLGDRLRLEIAISNLKAENLKELISVDEIYQLLNLNPQPSGSLTNLNNNNNSLLDVSNSNEGTLTQLSQNNSSNNLPISSMNSSTNNINGNTINSSSGNVVGNSASSKDSSKTITFILQDGSTKRVNATGCFNAQAIKRRVLKKLGFKPDEIQFDTYVHSVPHGVENVLYGKTEPTITLLYDVELVTICYSPERLEKYRIMLVPKNEPPTPAAIETSKKIMSKYKKQVSGSKAELQEEVNQLHTKDVQAHRSTLRNFFGQRPPSELISSNLAEYFPDTRQKDLEQTVRNSVRHSVRLSRRFNLPAGAFSSSVYSLNKRQSILSNSTGFPSNRTMSISSGEQQSGVFNTSGGGSGGLRRAQRTIGDVMVNSITAIDEVVNSNDTFSVFNKPSTSFSNQPVQPLNNHDSRSIISSKSLSGGTALHRISISPNYNDNPAHDRHSTIELLNPSDSEGEDGEEDGEFGISDYAGLSSSSGENGPPENWLKGARIGSGSFGTVYLGMNPFTGELMAVKQIPLVNENGNNSDTENIQNSMQEQQREMMLLKELNHENIVRYFGSTTDENFLNIFLEYVPGGSVQSMLNSYGPFEEPLIRNFVRQVLIGLSYLHGEDIIHRDIKGANILIDIKGTVKIGDFGISKKVSAIDEEDEDFKKTGKRASLQGSVFWMAPEVVKQTTYTKKADIWSVGCLIVEMFTGRHPFPELSQMQALFKIGNHITPQIPEWCTNEAKEFLKKTFEINFEMRPDAIELLAEQFLNPLIMSKQ

SEQ ID NO: 12585 - protein, 110 aa, Glycine max
MAVANKLLSVLIIALIAISMLQTVVMASHGHGGHHYNDKKKYGPGSLKSFQCPSQCSRRCGKTQYHKPCMFFCQKCCRKCLCVPPGYYGNKAVCPCYNNWKTKEGGPKCP

SEQ ID NO: 12586 - protein, 121 aa, Yarrowia lipolytica CLIB122
GPDFKPSSPQSPRHTHKHASTKPPNITNSRTKRTKKVGITGKYGVRYGSSLRRQCKKLEIQQHSRYDCTFCGKTTVRRGAVGIWTCSACKKTVAGGAYTVSTATANTVRSTIRRLRELAEA

SEQ ID NO: 12587 - protein, 101 aa, Parvularcula bermudensis HTCC2503
MLARIYRPSRTAMQSGKRKTELWVLEFEGRSPRKTDPLMGWTSSADTLGQVKMTFDTKEAAIAYAKEQRLPYQVLEKPDQAPVPKSYADNFAFRRRTPWTH

SEQ ID NO: 12588 - protein, 659 aa, Oryza sativa
  misc_feature (123)..(123): Xaa can be any naturally occurring amino acid
MISLNFFSQCCCSLFSTMNPIPRKHGMKKAFLKSCSSQRCSKHGPDIRFPFRLSTHDPSCGMPGMQLSCSGHDTILDHPVLGSCKVTAIYYRYRVINAILLVESSSNCPLQKLASTNVSTAVXEPQKKDGATIVGCSKDSIATNQDGIVGPRSCLNLSSHGSQLWYLVPPRTYMSALPPDCTVVAKGIPIPYNYDRNGPNENQYLDISNLKEKANKVINFGETAFTWHLNKITNACQGCEWNGHHCGFSSQRGQAFCQHQDFVYSCSNKSCFVPFSFCFKKQILAHTLLILMEQTNFIYFYTATSSAATLVVLLLMVGTTIYLSLKTRYNEEIHLKVEMFLKTYGTSKPTRYSFSEVKKITRRFREKIGHGGYGNVYKGELPNGVPVAVKMLENSRGDGQEFINEVATIGRIHHANVLRLLGFCSEGTRRTLIYEFMPNDSLEKYIFSQGPNVSREFLVPDKMLDISLGIARGMEYLHQGCNQRILHFDIKPQNILLDYSFNPKISDFGLAKLCARDQSIVTLTAARGTMGYIAPELYSRNFGVISYKSDVYSFGMLVLEMVSGRRNLDPGIDNQHEVYFLEWIYEKVFTGQNLLIGTEMTQDEKYKVRKLAIVALWCIQWNPKNRPSTTQVVNMLTGRLQDLQMPPKPFVSSASESIP

SEQ ID NO: 12589 - protein, 486 aa, Photobacterium sp. SKA34
MDMKSLYIDGNYVAASSDIQFTTFNPANGQPIATIGQASQADLELAISAAKKGFAIWSAMTATERSRILLRAVTLLRERNDELAVLEVTDTGKPLQEAIAVDIETGADVIEYFAGLAPGLQGEQQPLSENQFFYTRREPLGICAGIGAWNYPIQIAMWKSAPALAAGNAMIFKPSEETPLTVLKLAEIFTEAGLPDGVFNVVQGDYRVGQMLTAHPEIAKVSFTGETGTGKAVMADSADTLKSVTMELGGKSPMIIFDDANVDHAVSAAMVANFYTQGEVCTHGTRVYVHETIYDTFIEQLKRRTELLIVGDPMNMETQIGALISTSHLSKVLSAIDAAKQSGAILLTGGYQYTDNGLAQGNFVQPTVFIDCDESMSHVKNEIFGPVMSVIKFSDETDVIARANNTHYGLAAGVFTQNLARAHRVIHQLQAGICWVNTWGDSPAQMPVGGYKQSGIGRENGIETLQHYTQTKSILIELGDYQSPYA

SEQ ID NO: 12590 - protein, 651 aa, Phaseolus vulgaris
MEHHKPLLPTSSHAAPNPRTRKDLLLLLCALLFLSSLVAFGRNRASNVPHDHVSSSASNHQQEHQSPTSLPSSKWHAVSRGVSSGVSEKSSSMLFSGEGGASEAFPWDNSMLSWQRTSFHFQPEKNWMNDPNGPMYYKGWYHFFYQYNPNGAVWGDIVWGHAVSRDMIHWLHLPLAMVADQWYDKQGVWTGSATILPNGEIIMLYTGSTNESVQVQNLAYPADPSDPLLVDWIKHPGNPVLVPPPGIGAKDFRDPTTAWLTSEGKWRITIGSKLNKTGIALVYDTDDFKTYELKNGHLRAVPGTGMWECVDFFPVSKKNENGLDTSLSINGAEVKYVMKVSLDDDRHDYYTIGTYDENKVLFTPDDVKNDVGVGLRYDYGIFYASKTFYDQNMDRRILWGWIGESDSEYADVTKGWASVQSIPRTVRLDKKTGSNLLQWPVAEVESLRLRSDEFKSLKAKPGSVVSLDIETATQLDVVAEFEIDAESLQKTAQSNEEFTCSTSGGAAQRGALGPFGLLVLADEGLSEYTPVYFYVIKGRNGNLKTSFCSDQSRSSQPNDVRKQIFGNIVPVLEGEKFSLRMLVDHSIVESFAQGGRTCVTSRVYPTKAIYGAARLFLFNNATEATVTASLKIWQMNSAFIRPFPFNPDQKN

SEQ ID NO: 12591 - protein, 403 aa, Xanthomonas axonopodis pv. citri str. 306
MATEVKVPVLPESVSDATIASWHKKAGEAVKRDENLVDLETDKVVLEVPSPVDGVLKEIKFETGSTVTSNQILAIIEEGAVAAAAPAEEKQAAAPAATAAAPAAAPAPAAAAAPAASKSAADSLPPGARFSAITQGVDPSQVEGTGRRGAVTKEDIVNFAKAGGVGKASGARPEERVPMTRVRKTIAKRLMESKNSTAMLTTFNEVNLAKVSAARKELQDEFQKAHGIKLGFMSFFVKAAANALQRFPLVNASIDGDDIIYHGYSDISIAVSTDKGLVTPVLRNVERQSFADVEQGIADYAAKARAGKLGLDDLQGGTFTITNGGTFGSLLSTPIINPPQSAILGMHAIKERPIAENGQVVIAPMMYLALSYDHRIIDGKDSVQFLVDIKNQLENPGRMLFGL

SEQ ID NO: 12592 - protein, 331 aa, Pyrobaculum aerophilum str. IM2
MKPVVKIGGSLLRSAADFVQAAHFVAAYSEPPVVVVSAVKGVTDLLLQLEKTRSYLLYEELAHRHISIARGLGVEERIAPLLKELEYALRLPHAPWSADYFASFGERLSATMLHAVLEKMGIEAKLFIAPMLTDSNYGNAEPIALEHKEEMSRPDAVAVVTGFIGRDKEGRFTTVGRGGSDYTATYIGKELGARKVSLVTDSPGVMTADPREVQEAYVLPLLSVQEAVEAAKVGAKNFHPRTFIPVVEAGRMAVEVRSYYSRGTLIAHIYPPPPYKIVVRCGQGSCVVGLAAYELTKLGGTPLGQYSVKLNIPPRQVHEHLILPYIKYINT

SEQ ID NO: 12593 - protein, 484 aa, Synechococcus sp. PCC 7002
MTFSFDSWFRGLSPRLSYPFRRQGRLLLLACMLPLLWQGVAIAQGSLGEIPPAVQVTLDTLWVVFAAMLVFFMNAGFAMLESGFCRAKNTVNILAKNLIVFALSSLAFWAIGFALMFGDGNAVLGWNGFFLTGADNSPLTGSAYSGIFSSLSWAGIPLYTKFFFQLAFAGTAATIVSGAVAERIKFASFVIFSLFLVGFSYGITGHWVWGGGWLATLGFYDFAGSTVVHSVGGWAALMGVILLGPRLEKFAGDRINAIPGHNMSTATLGGLILWLGWFGFNPGSTMAADPDAISHIIVTTNMAAAAGAIAATITSWIQFGKPDLSMIINGVLAGLVGITAACAYVNVPSAIVIGAIAGVIVVFSVLTFEGLRFDDPVGALSVHLVCGIWGTLAVGLFSVGGDIYPWYAADAGPSAGLLFGGGVAQLLSQFIGVVVVGMFTAGFSFAIWLVLELSMGLRVSKEEELEGLDIGEHGMEAYHRFFRE

SEQ ID NO: 12594 - protein, 466 aa, Lactococcus lactis
MLYGKENRDEAEFLEPIFGSESEQVDLPKYKLAQQSIEPRVAYQLVQDEMLDEGNARLNLATFCQTYMEPEAVKLMSQTLEKNAIDKSEYPRTTEIENRCVNMIADLWNASEKGKIYGTSTIGSSEACMLGGMAMKFSWRKRAEKLGLDINAKKPNLVISSGYQVCWEKFCVYWDIEMREVPMDREHMSINLEKVMDYVDEYTIGVVGIMGITYTGRYDDIKALDNLIEEYNKQTDYKVYIHVDAASGGLYAPFVEPELEWDFRLKNVISINTSGHKYGLVYPGVGWVLWRDKKYLPEELIFKVSYLGGELPTMAINFSHSASQLIGQYYNFVRYGFDGYKAIHERTHKVAMYLAEEIEKTGMFEIMNDGAQLPIVCYKLKENSNRGWNLYDLADRLLMKGWQVPAYPLPKNLENEIIQRLVIRADFGMNMAFNYVQDMQEAIDALNKAHILFHQEPENKTYGFTH

SEQ ID NO: 12595 - protein, 335 aa, Arabidopsis thaliana
MGVDFYKVLEVDRSANDDELKKAYRKLAMKWHPDKNPNNKKEAEAKFKQISEAYDVLSDPQKRAIYEQYGEEGLNQAPPPGAGGGYPGGSDAGASFRFNPRSADDIFSEFFGFTRPSFGTGSDSRAGPSGFRYGDDIFASFRAATTGGEASIPSRKSAPIERQLPCSLEDLYKGVSKKMKISRDVLDSSGRPTPVEEILTIEIKPGWKKGTKITFLEKGNEHRGVIPSDLVFIVDEKPHPVFKRDGNDLVVMQKISLVDALTGYTAQVTTLDGRTLTVPVNNVISPSYEEVVKGEGMPIPKDPSRKGNLRIRFIIKFPSKLTTEQKSGIKRMLSP

SEQ ID NO: 12596 - protein, 360 aa, Triticum aestivum
  misc_feature (302)..(303): Xaa can be any naturally occurring amino acid
  misc_feature (310)..(310): Xaa can be any naturally occurring amino acid
  misc_feature (313)..(313): Xaa can be any naturally occurring amino acid
AYLGDTIEQVCTKKQAGTGPEFPGYRRPTRPLLSGGLDSSLVASVVSRYLAETKVARQWGNKLHTFCIGLKGSPDLKAAKEVADYLGTVHHELHFTVQQGIDALEEVIYHIETYDVTTIRASTPMFLMSRKIKSLGVKMVLSGEGSDEIFGGYLYFHKAPNKKELHEETCRKIKALHLYDCLRANKATSAWGLEARVPFLDKNFINVAMDLDPECKMIRRDLGRIEKWVLRNAFDDEKKPYLPKHILYRQKETVQRMGLGTSWDGWVWKDHANAHVPESMMTNAYFVYLKTHHNKRTYYYRXXLRILPKXLLXNGPGGHVACTRKTVEWDPPGQASPSAVALVYTRLRERPDRYPLEASS

SEQ ID NO: 12597 - protein, 476 aa, Medicago truncatula
MSNFHYQFPDSPPSFYTSSSDNFDTQAQRTFDRFGDTVDSSMKWAVAESVVYGVVVIIAVIAIVYAIIECLKKAGTAIPAYTQIPTAEKDHQISSNSLTSASKIEVIIPHDSKAEFPAMERFLSNINREKPIRFTPEKLDEITKSYSTILGSGAFGVVFKGELPNGENVAVKVLNCLDMGMEEQFKAEVSTIGRTYHINLVKLYGFCFDHDTRALVYEYVENGSLDKYLFGSKNRDVELRKFQEIAIGTAKGIAYLHEDCQQRIIHYDIKPENVLLDMKLVPKIADFGLAKLRSRESNIVMNTHFRGTRGYAAPEMWKPYPVTHKCDVYSFGILLFEIVGRRRHFDSSYSESQQWFPKWTWEMFENNELVVMLALCGVEEKDNEIAERMLKVALWCVQYSPNDRPLMSTVVKMLEGEIEISSPPFPFHNLVPVKENLTQEGSTADSDATISSWNTESFSESCSKIKHESFQIEKPT

SEQ ID NO: 12598 - protein, 336 aa, Leifsonia xyli subsp. xyli str. CTCB07
MSVKIGINGFGRIGRNYLRAALAKGSGVEIVAVNDLTDNKTLAHLLTYDSTTGPLDTTVHLDGDSIVVNGKPIKVLEERDPANLGWGDLGVDIVVESTGRFTKAADARKHLEAGAKKVIISAPASGEDGTFVLGVNEESYDPANHHIISNASCTTNCLAPLAKVFNDAFGIERGFMMTAHAYTADQNLQDGPHSDLRRARAAAVNIVPASTGAAKAIGLVLPDLQGKLSGSSYRVPVPVGSIVDLTLITGRDDLTVQEINAAYAAAAAEGRLAGILQYTEDPIVSSDIQGNAHSSIFDSELTNVSGNLVKVSSWYDNEWGYSNRLVDLTEYVAERL

SEQ ID NO: 12599 - protein, 579 aa, Gibberella zeae PH-1
MCGIFACHRHPDVEKFKPTALKLAKQIRHRGPDWSGSVISNHTILCHERLSIVGVESGAQPLTNADDSIILAVNGEIYNHRHIRKHLKERYHFKTTSDCEVIIPLYTEFDTDAPNHLDGMFSFVLYDKKQDRTIAARDPIGITTFYQGWSSTEPGTIYFASELKCLHSVCDKIVAFPPGHVYDSKTGETTRYFNPSWWDPKKVPSTPVDYKVLRQALEKSVRKRLMAEVPFGVLLSGGLDSSLTASIAQREVTRLRKQALEANGNVLPVEDPDTGEGLVGVDDDDHLDTLTYLPQLNSFSIGLPGSPDNKAALEVAKFLGTKHHVMTFTIEDGLNALSDVIFHLETYDVTTIRASTPMYLLSRKIKAMGIKMVLSGEGSDEIFGGYLYFHAAPDKDSFHEETVRRVKNLHLSDCLRANKSTSAWGLEARVPFLDKEFLEYSMNIDPQDKMITKEKLEKYILRKAFDTSDEPGEQPYLPDNILWRQKEQFSDGVGYGWIDALKDTAEKQVTDEMMKNPKPEWGNDIPDTKEAYWYRCMFDEHFPPHCASTVMRWTPTWSKQTDPSGRAIATHNAKYDSAA

SEQ ID NO: 12600 - protein, 585 aa, Triticum aestivum
MCGILAVLGCADDTQGKRVRVLELSRRLKHRGPDWSGMHQVGDCYLSHQRLAIIDPASGDQPLYNEDKSIVVTVNGEIYNHEQLRAQLSSHTFRTGSDCEVIAHLYEEHGENFIDMLDGVFSFVLLDTRDNSFIAARDAIGVTPLYIGWGIDGSVWISSEVKGLNDDCEHFEIFPPGHLYSSKQGGFKRWYNPPWFSEVIPSVPYDPLALRKAFEKAVIKRLMTDVPFGVLLSGGLDSSLVAAVTVRHLAGTKAAKRWGTKLHSFCVGLEGSPDLKAAKEVANYLGTMHHEFTFTVQDGIDAIEDVIYHTETYDVTTIRASTPMFLMSRKIKSLGVKMVISGEGSDEIFGGYLYFHKAPNKEELHRETCQKIKALHQYDCLRANKATSAWGLEARVPFLDKEFINEAMSIDPEWKMIRPDLGRIEKWMLRKAFDDEEQPFLPKHILYRQKEQFSDGVGYSWIDGLKAHAESNVTDKMMSNAKFIYPHNTPTTKEAYCYRMIFERFFPQNSAILTVPGGPSVACSTAKAVEWDAQWSGNLDPSGRAALGVHLSAYEQEHLPATILTGTSKKPRMIEVAAPGVAIES

SEQ ID NO: 12601 - protein, 455 aa, Triticum aestivum
PGERERERERERERERERERERAATRAYLDQSDFMQMLREVQRNPSSLNTYLSDPRMMQVLSLMLNIKIQTPQDSDFSQSSSPSQPPPQQQKQQPETKAREMEPEPQPEPMEVSDEEKERKERKAAALKEKEAGNASYKKKDFETAIQHYTKALELDDEDISYLTNRAAVYIEMGKYDECIEDCDKAVERGRELRADFKMVARALTRKGTALAKLAKNSKDYDIAIETFQKALTEHRNPDTLKRLNEAEKAKKDLEQQEYYDPKLADEEREKGNEMFKQQKYPEAIKHYNEAIRRNPKDARVYSNRAACYTKLGAMPEGLKDAEKCIELDPTFTKGYTRKGAVQFFMKEYEKAMETYQAGLKHDPNNQELLDGIRRCVEQINKANRGDISQEDLQEKQSKAMQDPEIQNILTDPIMRQVLMDFQENPRAAQDHLKDPGVAQKIQKLINAGIVQTR

SEQ ID NO: 12602 - protein, 216 aa, Gossypium hirsutum
MDFVVQDYDMVDSGSVSESGTDRPVNFSDEYVMLASSYPKRPAGRKKFRETRHPVYRGVRRRNPGKWVSEVREPNKKSRIWLGTFPKADMAARAHDVAAIALRGKSACLNFADSAWKLPVPASSDPKDIQKTVAEVAETFRTAEHSSGNSRNDAKRSENTEMEKGFYLDEEALFGTQRFWANMAAGMMMSPPRSGHDGGWEEHEVDDYVPLWSYSI

SEQ ID NO: 12603 - protein, 124 aa, Triticum aestivum
  misc_feature (50)..(50): Xaa can be any naturally occurring amino acid
  misc_feature (79)..(79): Xaa can be any naturally occurring amino acid
  misc_feature (88)..(88): Xaa can be any naturally occurring amino acid
  misc_feature (110)..(110): Xaa can be any naturally occurring amino acid
MAAPRGAAVVLAMVLAAMVVAPPATVHAAISCSTVYSTLMPCLQYVQQGXVPPARGCCTGIQNLAGRRPTTAPDRRNIXGCLKNVANXASGGALHHPRPAALPSKCNRRXPLQDQPSVDCNSIH

SEQ ID NO: 12604 - protein, 430 aa, Bacillus thuringiensis serovar konkukian str. 97-27
MTIGTLPFDQETIRQRASEVNEAAWLTEFRLQALAQATELPMPTPDKTKIEKWDFIGKGDAAKQEPVSSLTELPEAVKNLIDENNSVLVQRTGTTAFVSLADEAKEKGVIFTDIVTAATEHAELVQKYLMKDGVKVDEHRLTALHAALINGGAFVYVPKNVVLETPLQAVFLVDGEEANVYNHVLFVADANSTATYVENYVANENAKGIANIVAEVIVEQGAQVKFGAVDLLAKDVTTYVNRRGVVGRDGRIDWALGLMNDGNTISENVTNLMGDGSYADTKTVTIGRGNQTQNFTTKVVHFGKHSEGWILKHGVQKDSATSIFNGIGKIEHGASKSNAQQSSRVLMLDEKARGDANPILLIDEDDVMAGHAASVGRVDPTQLYYLMSRGIPKREAERLVIHGFLAPVVNELPIEGVKAQLVEVIERKVR

SEQ ID NO: 12605 - protein, 200 aa, Triticum aestivum
  misc_feature (12)..(12): Xaa can be any naturally occurring amino acid
  misc_feature (26)..(26): Xaa can be any naturally occurring amino acid
  misc_feature (152)..(152): Xaa can be any naturally occurring amino acid
MMLGEGRTTLFXDDRWISGQSVREIXPRLYQCIPKQRRKTRTVADGLNGNTWARDIQGTIGIHEIGQYLMLWQAIQHFTLSEETDRLLWRWTTSATYSTQSCYAATFQGSTCRHSWKLIWKSWAPPRVKFFHWLAYQDRCWTATRLASRGLXHHPRCLLCDQDPETIQHLLLTCPFAKQIWHRTLDGRTSRPKRRPRHHL

SEQ ID NO: 12606 - protein, 316 aa, Glycine max
MGKKRKHSETTHDEAQPQKEDVAPGRPARTLLGWKDKNEVTDEVEDNSPIFRNREKVLVTCSRRINYRYRHLMLNVVSLLPHCKKENKVESKETKGATLNELVELKNCSSCLFFECRKQKDLYLWIAKCPNGPSVKFLVSAVHTMEELKLTGNQLKGSRPILTFSANFEKDAHWKLLKEMLLQIFETPKDLRRTKPFHDHVFVFSIVDDHIWFRNYQISVPHNESDKLPRGGLDKMSMIEVGPRFCLNPIKIFGGSFGGPTLYENPFYVSPNQIRTLDKRKKAGKFAKKVKAKTRRKMHEMSNPLEPDEFADMWKD

SEQ ID NO: 12607 - protein, 406 aa, Rhodopirellula baltica SH 1
MSSSIELNTIPEAVEAIARGEVIIVIDAEDRENEGDFICAGEKATPELINFILGGRGQLCVSVLPEVCKRLELTPVVPQNNAPLQTAFMTPIDIATAKTGITAAERSETIRRLTDLEATQEDFVRPGHVYPLLAKEGGVLRRAGHTEAAIDLSRMAGLAPVGVLCEVLNETGDRASRDDLARLAKQHDLKIISIEHLIAHRRVSEKLVSRAATSKLPTRYGDFEVIVYEVNYEAQEPIALVYGDLTAPGTPPLVRMHSSCFTGDLIQSLRCDCGDQLHMALDMISREGRGALIYLPQEGRGIGLAQKIRAYALQDKGMDTVEANHALGFKADMRDYGVGLQILKDLGLSEVRLLTNNPKKTKAFNLRGFDLKVVDQVPIVPPTNEHNVRYLETKREKMGHQLPPLS

SEQ ID NO: 12608 - protein, 287 aa, Bacillus cereus ATCC 10987
MKKAMLALAATSVIALSACGTSSSDKIVTSKAGDITKEEFYNEMKQKGGSQVLQSMVMEKVLIKNYKVDEKEVDKKYDEMKKQVGDQFDTLLKQQGLKEETLKNGVRAELAQDKAIEKTITDKELKENYKPEIKASHILVKDEATAKKVKEELGQGKSFEELAKQYSEDTGSKEKGGDLGFFGPGKMVKEFEDAAYKLKKDEVSEPVKSQFGYHIIKVTDIKEPEKSFEQSKADIKKELVAKKKQDTQFMNDLMTKEIKKADVKVDDKDLKDLFEEKKADAKKDEKK

SEQ ID NO: 12609 - protein, 499 aa, Pasteurella multocida subsp. multocida str. Pm70
MPFSLSKVRSFFCHFWTSPMYIFNQGKYKSLHAQQVGELAQIRQHVLRDTQFRPTYHLAPETGLLNDPNGLVFDGEKYHIFYQWFPYAAIHGMKHWKHFMTYDFHHFQVADPLIPDELFESHGCYSGGALLWQDQIVAFYTGNTRNAENQRIPHQNIAIFKKDGTLLKKRCLLNQAPTGYTEHVRDPKPFITEEGKIRFILGAQREDLSGTALIYEMTDLDATPQLIGEFKLPDFDNQQVFMWECPDLLKLQEQDLFLWSPQGKAQKTYCFQNHYHATYALGQYANLHFSAQHIEELDYGFDFYAPQSIQGSEGIYYAWVGLPDLTYPTDEYQWHSMLSLPRQFSIQQGILYQRPIPQVYAQCLPAHKYWVEGKQQIPHLDRSYVAFDAENQPFTLRFFTNQRGQQLILRYQNGILTLDRTYTTQTALMQQFGEQRHCILPQLNHVEIFFDRSVVEIFLNQGEKVMTSRFFIADRENALDSSRPLCVSVAELKPIILTP

SEQ ID NO: 12610 - protein, 439 aa, Geobacter sulfurreducens PCA
MTATAHRKTLPNGLRVVAVEMPHLHSTEIAVYVRVGGRDDSRATAGLAHFLEHMLFRGTAEHPTNLELEAAFEAIGGCVNAATDAESTSYYSRVHPDHVAEGLRLLAAMVLTPTFPGIDIEKRIITEEALEDINDHGDDINPDNLSSSMLWPDHPLGMPTIGYLDTISAITEADLKGHMTRYYVPTNAVVVAAGRVRADDVFGAVADAFGTWAGPSAPGRLPPPSNQDEPRCLFVKDADSQVDLQITFRGFSRPDPQLAASRLLRRVLAGGGCSRLHLNLRERLGIVYSVDAQVAAYDETGCFSIELSTAPENLLTAVEEVLGETRKLAAEPVGAEELRRVRQGYFFDLAYSEDSTFEMQVRYGWGELMGMVKGIDEERAEVEAVDEGTLQAVARRLFAPAALNLVAVGPVTATAKRRIEQLLRRYAKEFPTSSQPPGP

SEQ ID NO: 12611 - protein, 546 aa, Erythrobacter sp. NAP1
MEQLGPDLETMRRVPLADSHVEEICKIGGERSYAEGETVADIGDPMDTFVYVLEGEIEVVDPYTNERLLEASLGPTQFMGEIGFLNRGTNYLKMRAAKDTRVIEAPRTDMLKLMERIPELSDHIITVFAARRRAQFEMSNGSVKVIGADRDGAVQEVERFLSRNRIPFSSYDMDSGDSETLEACDILGHEPGVILGTDQKLEDPTPRKVAQFLNLDLDICSQREFDLLIVGGGPAGVAAAVYAGSEGLDALVIEDMAVGGQAGTSSRIENYMGFPTGISGTDLTYRGQIQALKFGTRFVMPRRVVGLTKREDGSFCAKLDDDDEVCAKAVLVSTGVQYRRLPLDNLERLEGAGVFYSATEMEARFCSNTEAVVIGGGNSAGQAAMYLSRTARCTHLVVRSDSLASSMSSYLSSRLEKDDRIKIHYNTEVTALHGEDWLKAVTFTSDGSDRTIDTRALFIMIGAAPNTDWLSGLVETDENGFVRTGAEVGRETPFETGTDGIFAVGDVRSGSVKRVASAVGEGSVVVSRIWTYLDDLQQKENPAAQD

SEQ ID NO: 12612 - protein, 257 aa, Glycine max
MKKMKGVVPMEPPYEVYQDQRARLRHQSLLQDYEDLHKETEAMRRKLQATRQKKLMLEDEVRFLRQRYNYLLKHPILKPHPKQVVKPQKLKLQAPIISKGKNYSRKEPTLRPHPTSHLNSNGRISNVAEAPLKKTGHLFDLNLNARSSSKKDASFNISAPPVFELNHKERIHSSKEATKKSVTPFFDLNQISREEEELQGNSEPMRIEEPKRSTQRVATDEQHSDIKLSAACRSVGDGSNRAGKRKISWQDQVALRV

SEQ ID NO: 12613 - protein, 495 aa, Arabidopsis thaliana
MGGDLKSQLSRESHVFGLKVWEVIGIAVALLIIAILSVLSCCLTSKKKSRRSKTGLPVIQTPPVVSKEIREVRVEHVSASNFAPGEGILLTIQDKNNKDSEKVMVHLDMRKKRSSSGRSGSFHHLEIIDKHSDSAEEVSASSSLYNIATPSPLSGLPESHLGWGHWFTLRDLETATNRFSKENVIGEGGYGVVYRGELMNGTPVAVKKILNQLFYRGQAEKEFRVEVDAIGHVRHKNLVRLLGYCIEGTHRILVYEYVNNGNLEQWLHGAMRQHGYLTWEARMKVLIGTSKALAYLHEAIEPKVVHRDIKSSNILINDEFNAKVSDFGLAKLLGAGKSHVTTRVMGTFGYVAPEYANSGLLNEKSDVYSFGVVLLEAITGRDPVDYGRPAHEVNLVDWLKMMVGTRRSEEVVDPNIEVKPPTRSLKRALLTALRCVDPDSDKRPKMSQVVRMLESEEYPIPREDRRRSRTREGSMEINSDTDMSTPVSRSQSKRQ

SEQ ID NO: 12614 - protein, 106 aa, Bradyrhizobium japonicum USDA 110
MAVGKVSDTDFEAEVLKANGPVVVDFWAEWCGPCRMIAPALDEIAGAMGDKVKIVKLNVDESPKTASKYGVMSIPTLMIFKGGEMASRQVGAAPKAKLQQWITSAV

SEQ ID NO: 12615 - protein, 1113 aa, Hebeloma cylindrosporum
MAALTTYTLQGGRSSSYGGLGMVGIAFIEKLLNLDDKQKYFIITCGERVHFAYNRVGLTEYFEHRNVENLYLNPPSWYAAQQPDRFRYHLSETVTYLSPRDHLVYTSKGRSFKYDRCVLATGSTASLPLYTSFKDIATTDGVFVYRNISDLDAIIAYAARAEVKHAVVVGGGLLGLEAAKAVYDLETISHVSIINRQAYPLSRQLDADAGEMVLRKIEGMGVQVLTNCSPAQQLTRPATDGSGNKVFTGFTLQDGTTHEADLVIYAIGIKPRDELAQASGIECHPRGGIVVDDNLQTSAPDVYAIGECASWKGNYYGLIAPGIEMADILSFNLTETDSHAPRKMNAPDLSTKLKLMGVDVASFGDFFADKRMTIKTQAATAAFDGTFPGKVVDPAQALVEITTAAGTSATPLIPKRGGRNGNEPIKCLVYNDPFSSTYKKYIFTADGKYLLGGMMIGDVSDFVKLVAIVKKKKALDVPPSQFIIGAKKEGDDDGGDLDDDAQVCSCHNVSKGDIVKRVKGGDCTTIGDLKKKTKVGTGCGGCMPLVTNIFNAEMKRAGYVLNTNICPHFAMARVDLFNVIKVRKLRTFGEVMTTVGIDKNAIGCEICKPAIGSILSSLYNEPIMKPEHHQNQDTNDRFMANIQRNGTFSVVPRIAAGEITPEGLIAIGQVAKKYNLYTKITGGQRIDMFGAMKDDLPSIWEELNDAGFESGQAYGKSLRTVKSCVGTTWCRYGVGDSVGLAVQLEQRYRGVRSPHKFKGGVSGCVRECAEAQSKDFGVIATDKGWNIFVGGNGGANPRHAELFAKDVPPSRVIRILDRFLAYYIMTADRLQRTARWIENMEGGIEKLRQVILEDSLGICAELDAIMTNIVNTYEDEWANAVKDPAKRQQFKQFVNTTERRPQAELIAERGQYRPADWPKSSAGLKITPDQLKTPKSEWTWVTVAQKGDMALSELGTTSVAVKYGDTQLAVYHVPKRGFYATQQMCPHRRAFVLDHGIIGDTPSGELYVSCPLHKRNFTLTDGTCLSDPDYEILAFEARANDADDIEVLLPPVNDIDAVLGTDKWLVRQAESEALGLNEATQVEMVGINGHSVASHEEQGGCASSACGDKRLEW

SEQ ID NO: 12616 - protein, 147 aa, Aspergillus oryzae
MPLSPEQIQLIKATVPVLQQHGTTITTVFYNNMLTAHPELNAVFNNANKVNGHQPRALAGALFAYASHIDDLGALGPAVELICNKHASLYIQPEQYQIVGKFLLEAMGEVLGDALTPEILDAWATAYWQLADLMIGREAELYKQADG

SEQ ID NO: 12617 - protein, 224 aa, Candida albicans SC5314
MSSSTFSQTRSQALSLEKQTEQLLSKFSQFQQQQQQNQSQSLDITPEETIIRQQIEEIFQKRNAVISKLNRISEVEPNLSTSKLQQLTRHKEKLNDDNLSFTKIINNIEDERNKNNLLFNVHRDINHHKQQRNIDGNAYILEESERVNNVNSIADRLLQGAFATRDELLNQRQYLNNAQSQVLSTMQNIPGLNVLISKINTRRKRDTLILASVIAICILFLFFV

SEQ ID NO: 12618 - protein, 147 aa, Aspergillus niger
  misc_feature (29)..(29): Xaa can be any naturally occurring amino acid
MPLTPEQIKIIKATVPVLQEYGTKITTAXYMNMSTVHPELNAVFNTANQVKGHQARALAGALFAYASHIDDLGALGPAVELICNKHASLYIQADEYKIVGKYLLEAMKEVLGDACTDDILDAWGAAYWALADIMINREAALYKQSQG

SEQ ID NO: 12619 - protein, 650 aa, Yarrowia lipolytica CLIB122
MSANENISRFDAPVGKEHPAYELFHNHTRSFVYGLQPRACQGMLDFDFICKRENPSVAGVIYPFGGQFVTKMYWGTKETLLPVYQQVEKAAAKHPEVDVVVNFASSRSVYSSTMELLEYPQFRTIAIIAEGVPERRAREILHKAQKKGVTIIGPATVGGIKPGCFKVGNTGGMMDNIVASKLYRPGSVAYVSKSGGMSNELNNIISHTTDGVYEGIAIGGDRYPGTTFIDHILRYEADPKCKIIVLLGEVGGVEEYRVIEAVKNGQIKKPIVAWAIGTCASMFKTEVQFGHAGSMANSDLETAKAKNAAMKSAGFYVPDTFEDMPEVLAELYEKMVAKGELSRISEPEVPKIPIDYSWAQELGLIRKPAAFISTISDDRGQELLYAGMPISEVFKEDIGIGGVMSLLWFRRRLPDYASKFLEMVLMLTADHGPAVSGAMNTIITTRAGKDLISSLVAGLLTIGTRFGGALDGAATEFTTAYDKGLSPRQFVDTMRKQNKLIPGIGHRVKSRNNPDFRVELVKDFVKKNFPSTQLLDYALAVEEVTTSKKDNLILNVDGAIAVSFVDLMRSCGAFTVEETEDYLKNGVLNGLFVLGRSIGLIAHHLDQKRLKTGLYRHPWDDITYLVGQEAIQKKRVEISAGDVSKAKTRS

SEQ ID NO: 12620 - protein, 498 aa, Rhodopirellula baltica SH 1
MSSISAFTTQELSGGPTGFRFAWLTMVLLVGMMGIGGSLASVASAQDEPAAATDTAEVADAGDADSEEPAADAGVGYAFDNGFLFLCAVLVLFMQAGFAMVEVGLNSSKNTVNILSKNLMDLSVGALLFFFVGFGLMYPGSYGDVTNGYFAFGGTGIYDSSPDQTFSPQVDWFFQAVFAATAATIVSGAVAGRMKFNAYLIYSAILTGLIYPISGFWKWGGGWLMQFGEQAADGSFAMGFQDFAGSAVVHAVGGFAGLAGAIFLGPRLGRYTAEGKSVPLPGHNVAFAALGVFILWVGWYGFNPGSQLAFQSSADIDATVFIAVNTTLAAAAGVIVATAVSWGLFGKPDLTMGLNGALGGLVGITACCDAMSNSMSIVVGAVAGALVVLSIVVLDKVKIDDPVGAFPVHGVCGVWGCMALGILPNAHLESESTNFMIQLIGTASICAWAFISMSVVFGVLKAVGMLRVSPQEEQAGLDISEHGMHAYPSDAVAGGSVI

SEQ ID NO: 12621 - protein, 412 aa, Aspergillus niger
  misc_feature (29)..(29): Xaa can be any naturally occurring amino acid
MPLTPEQIKIIKATVPVLQEYGTKITTAXYMNMSTVHPELNAVFNTANQVKGHQARALAGALFAYASHIDDLGALGPAVELICNKHASLYIQADEYKIVGKYLLEAMKEVLGDACTDDILDAWGAAYWALADIMINREAALYKQSQGWTNWRQFRISKKVPESDEITSFYLEPVDGKPLPAFRPGQYISVSVQVPEEDPQARQYSLSDTSRSDYYRISVKKETGLDPRAPGAKRHPGYVSNVLHDMIKEGDLIDVSHPYGDFFLSTAEATHPIVLLSAGVGMTPMMSILNTITKKSNRKIHFIHGSRTTEARAFKSHVQKLEKEIPNMQVTYFLSRPGDSDQLGVDYHHAGRIDLQKLDGPSHLYLDNPSTEYYICGPDTFMTQMEEALKAYGVGDDRIKMELFGTGGVPHN

SEQ ID NO: 12622 - protein, 354 aa, Debaryomyces hansenii CBS767
MSIELDDKQLTADEIALYDRQIRLWGMATQLRLRSAKILVINLGAVGGEVVKNLVLGGINTLEILDSSKVKEEDFLAQFFLPNNDDIVGQLKLPVVIEQIKDLNNRVNLSANTSSLSSIFSDSQETNNYLAKFDLIIGTELAKSEMLTLNEYTRNLNIPLYVCGLHGMFGYIMSDLIHHTATSEKDAGNQPREPNTKINRCKTITNVDYNKEENKEIVTIVDEFIPILEIFKSKELPKQLNRRQMKRLSAAFPLIFALFDIPRLENPEDTIDIEELRNKLKEVCAQFEIPETVINDEYLRLFSNQAYTEFSPVSAILGGCLAQDVIQFLSKKESPLNNCLILDAVKSEMPIYLL

SEQ ID NO: 12623 - protein, 158 aa, Rhodopirellula baltica SH 1
MAIDAISFRSAIRSGPDCRKGTFFARSIGLLESPARDFWFVPSMKLIIAIVQPSKLDAIKEALTRVEVHRLTVVDCQGFGRQRGQTGSMRGRDYGVSLLRKVQLQIGVNEEFVQPTIDAILEGGRSGESGEIGDGKIFVLPMDDCVRIRTGERGGEAI

SEQ ID NO: 12624 - protein, 635 aa, Lotus japonicus
MCGICCVIGVPAGAESIRSTVLDRAKRIRHRGPDWTGVYAKGKNIIVHERLSIVDVETGNQPLKSADGKQVLVCNGEIYNHLQLRQSLKAPVQFATNSDSECILHLYNERGVGFVNSLNGIFGFVLIDEAKDTFIVARDHEGIIPLYYGWDETGALWVASELKALHDVCVRFEEFPPGHVLHGKVGSAGKLEKWYQPVWHDEAYVPAATAACDIKGLRESLEAAVERQMMTDVPYGVLLSGGLDSSVISAVAVRVAAKRAAAKADSKHTELGHVDPKSVVHSFSVGLKGSPDLKAAREVAAFIGTEHHEFVFTVDDGINALRDVIYHLETFDTTTIRASTAMYLMSRKIKALGVKMVLSGEGSDEVFGGYLYFHKAPDRVEFHKETVRKLKALNKFDCLRANKSTMAWGLEARVPFLDKEFLDFAMTLDPTHKMCGKHAGGRIEKWIVRKAFEGYLPPAILWRQKEQFSDGVGYSWIDSLKAFADAKVSDAQLAAAAFKFPENTPLTKESYLYRSIFETHYPEPAARACVPGGPSVACSTPAAIAWDAAFQKMADPSGRAVAGVHADAYAVAADDKTPDTSADAKHGTAAEHKASGATRAPFIAAANGIKCSAEAALPHALPKPVALASGKAEAE

SEQ ID NO: 12625 - protein, 220 aa, Triticum aestivum
MTSVWKTKVLPGLNKIFDKDGKKAAAAEFLKSFNKEEIDKEIEDKKTELEPKVVETIEASPPEIKGLMKDKKTSKIKKNSVAVTKFLDDLAKIDFPGAKLVSDAVAKSGTTPLSPAIVFILDKVAPFVPAPKEEPKAEPEDAAPAEETTTREVAVEEKKEEAEPSAAPAEAAALEYPSRGPSLRVPSFLVQRGPYREAYYKLGHWAGVLPRPGLGKLLTW

SEQ ID NO: 12626 - protein, 187 aa, Glycine max
MRPLDEKETSAVFEKLFKFVGNNLKNIVENPSHEGPDSNPGRYCFRLHKNKIFYASESLVKRATNVARPNLVSLGTCIGKYTHGGSFHLTVQALNLLAANAKHKVWLKPQSEMSFLYGNHVLKGALGKLSENIAAGDGVVVFSMADVPLGFGVAAKSTLDCRKLDPNGIVVLHQADVGEYLRMEDEL

SEQ ID NO: 12627 - protein, 166 aa, Arabidopsis thaliana
MAAFATAEACDSNAELISNGDLRALHPIFKIYGQRRCFSGPIVTLKVFEDNVLVRNQLETKGEGGVLVIDGGGSMRCALVGGNLGQLAQNNGWSGIVVNGCVRDVDEINDCDVGVRALGSNPLKSTKKGHGEKNVPVHIGGTLIRDGEWLYADSDGILISKTELSV

SEQ ID NO: 12628 - protein, 165 aa, Oryza sativa
ALVEDNNAVAVSFSEEQEALVLKSWAILKKDSANIALRFLLKIFEVAPSASQMFSFLRNSDVPLEKNPKLKTHAMSVFVMTCEAAAQLRKAGKVTVRDTTLKRLGATHLKYGVGDAHFEVVKFALLDTIKEEVPADMWSPAMKSAWSEAYDHLVAAIKQEMKPAE

SEQ ID NO: 12629 - protein, 568 aa, Propionibacterium acnes KPA171202
MSVPFQYAHDDDGGLLRIAARGQEVLTNPLANRGTAFTIEQRKALGLTGLLPSGVMTITDQLKRVYAQYSAQPDDLAKYLYLNHMHDRNEVLYFRLLAEHIEEMLPIVYTPTIGKAIEEYSHWYDRPRGIYLSIDDPEDMEQALAQLGHGPDDVDLIVATDAEGILGIGDQGVGGVAITVGKLAVYTAAAGIHPHRVLPVILDVGTDNMERLNDDGYLGVRHPRVRGERYDEFVQQYVETAHRMFPHALLHWEDFAAGNATRILNKYRDDYCTFNDDIQGTAAVVVAAVLSAVKSSGIPLNDHRIVIHGAGSAGTGIANLLVQLMVSQGADEKTARSHFWGLGSHGLLREGLRLRDFQQPFARNKEELEGWTLDSPDQYTLGDVVRNVHPTILIGCSAQPGAFTEDIVKTMAAQCERPVIMPLSNPTRKAEALPSDVLTWTDGRALVATGSPFKPVMINGVTYQIAQANNALVFPGIGLGTIAVRASRVTSGMIAAAAEAVAMHIDNRVVGASLLPSIKSLRPLSASVAIAVAQQAMEEGVATEVTDNPVEKVFSAMWQPRYPRIAVV

SEQ ID NO: 12630 - protein, 165 aa, Oryza sativa
ALVEDNNAVAVSFSEEQEALVLKSWAILKKDSANIALRFWLKIFEVAPSASQMFSFLRNSDVPLEKNPKLKTHAMSVFVMTCEAAAQLRKAGKVTVRDTTLKRLGATHLKYGVGDAHFEVVKFALLDTIKEEVPADMWSPAMKSAWSEAYDHLVAAIKQEMKPAE

SEQ ID NO: 12631 - protein, 278 aa, Glycine max
MYAETGLFFPYLHNVSHGLHQLEEYCKTQKSNASMDDLVQSSAMSEYDLAAEGDLFKAPEPIIEEPIMDMSAAISMMSCGEDVSSQGLKSTDIDILQNDQFLSEVFYECEKDLLEKAAIESPFSEILEIKVPFLNIDENTIQENKPFTDMQLAKSVSSGSLSSMDWMRGAAMKPAFIDISAIDFNADYGMRRSFSEGDIKTLGNGNMNIVQSPLERPLLISNCTSEERFQKLSRYRNKKTKRNFGRKIKYACRKALADSQPRIRGRFARTEESDVKRE

SEQ ID NO: 12632 - protein, 154 aa, Arabidopsis thaliana
  misc_feature (32)..(32): Xaa can be any naturally occurring amino acid
MPVPLAPYPTPPAPALAPSYNTPPANGSTSGXSQLVCSGCRNLLMYPVGATSLCCAFCNAVTAVPPPGTEMAQLVCGGCHTLLMYIRGATSVQCSCCHTVNLALEANQVAHVNCGNCMMLLMYQYGARSVKCAVCNFVTSVGGSTSTTDSKFYN

SEQ ID NO: 12633 - protein, 560 aa, Propionibacterium acnes KPA171202
MPTLIDATSTPAWGTLSGLKSRFADGPHKLRRLFDADPHRAERYTLDVADLHVDLSKNLLTDEIRDALLELAAQMRVTERRDAMYAGEHINVTEDRAVLHTALRRSRTDELHVDGQDAVADVHEVLDKIYAFADKVRSGEWKGVTGKPIRTVINVGIGGSDLGPVMAYEALKPYVKDGLECRFISNIDPTDAAVKTADLDPETTLVIIASKTFTTLETLTNARCVRAWLLDGLVAAGAISDTEQARRDAVAKHFVAVSTALDKVEEFGIDPVNAFGFWSWVGGRYSVDSAVGTSLAVAIGPKGFEDFLAGFHAVDEHFATAEPERNVPLFMGLLNIWYTNFWDAHSHAVLPYSQYLHRFPAYLQQLTMESNGKSVRWDGSAVTTDTGEIFWGEPGTNGQHAFYQLIHQGTRVIPADFIAVANPVHPTKDGGTDVHELFLSNFFAQTAALAFGKTADEVRAEGTDEAIVPARVFAGDRPTTSIMADELSPKVLGELIALYEHITFVQGVVWGIDSFDQWGVELGKKLALQIAPAVSGNDEALATQDPSTQGLVTWYREHRR

SEQ ID NO: 12634 - protein, 145 aa, Zea mays
MAASTVASLSVPVTTTTFAAAAAAGGADVLIVVPRRAGAGRVVWFPAAARRGGGSGRLVAVRSSGPATPPEISDKVSESIKQAEETCADDQKGDAECAAAWDEVEELSATASHARDSLKETNANDPLEKYCKENPDSEECRIYDN

SEQ ID NO: 12635 - protein, 564 aa, Bordetella pertussis Tohama I
MTQLNGAEAMVRMLQLNGVKHIFGLCGDTSLPFCDALQRLDHGMEHILTRDERSAAYMADAYARVTGKVGVCEGPSGGGATYLLPGLVEANESSVAVLGITSDVSVGSRGKYPLTELDQEALYRPLTKWNTTIDRADQIPGAVRAAFRAMTTGRPGTAHLCLPYDVQKHEVDPADVWAQPGHDRFPAMRFAPDPAAIEQAAARLVGARAPVILCGGGVVISGACAALEELAVTLNAPVCTTVSGQGSLADTHPLNAGVVGSNGGILATRAVLADADVVLLIGCRAGSTSTEHWRFPSREVPILHIDSDPMVIAANYRTDVAMVGDALLALQALNREVHARIDARPTDAVDGKAVAAKAKGAKLAALQPLAASLDAPIRPERVVDALNRLLPAESVVVADPGTPCPYFSAYFEASKPGRHFITNRAHGALGFSMAAGMGAAIGRPSAKVVSVMGDGSFGFTVGEMETIVRRKVPLLMIVLSNSVYGWIKASQKAGYQERYFSVDFNRTDHARVAEAYGVKAWRVEDPRELDGVLKAAIEYGGPALVDIIVQPLQEAAAPVSQWMG

SEQ ID NO: 12636 - protein, 156 aa, Haemophilus influenzae
NRANTPVLVDGKDVMPEINAVLAKMKDFCQRIISGEWKGYTGKAITDVVNIGIGGSDLGPYMVTEALRPYKNHLNMHFVSNVDGTHIAETLKKVNPETTLFLVASKTFTTQETMTNAQSARDWLLKAAKNESAVAKHFAALSTNAKDVEKFGIDTN

SEQ ID NO: 12637 - protein, 335 aa, Xylella fastidiosa Temecula1
MTQTITVIRGDGIGPEIMDATLSVLNALQANLNYEFADAGLSALEKHGDLLPESTLNSISKNKIALKSPLTTPVGEGFSSINVALRRKFDLYANVRPAKSFPNTKSRFSDNVDLITVRENTEGAYLSEGQTISPDGEVATSSARVTRKGSERIVRYAFDLARTTGRKKVTAVHKANIIKSTSGLFLKTARDVASQYPEIDFQEMIVDNTCMQLVMRPEQFDIIVTTNLFGDILSDLCAGLVGGLGLAPGANIGNEQAIFEAVHGSAPDIAGQGKANPCALLLGAVQMLDHIGQPQNAERLRNAIVATLNAKDSLTPDLGGNGNTMGFAKAIASRL

SEQ ID NO: 12638 - protein, 931 aa, Mesorhizobium sp. BNC1
MTATFSTRHIGPRSDETKAMLAFLGLPSLETLISQAVPKSIRLDRPLNLPEAASEAEALAELQAYMRENKVLKSFIGAGYHGCHVPPVIQRNLFENPAWYTAYTPYQSEISQGRLEMLFHFQTLVTELTGLPVASASLLDEASAVAEAVGIAWRHHKSKRNRIVIAGALNPQTRDVVETRAEPLGIEIATNIELDGDTFALIVPWGDTYGAYEDHSALIGEAKAKDAIVIFVADPLGLLLSDTPAALGAEIAVGPMQRFGVPMGFGGPHAAYCAVSDRLTRLMPGRLVGQSVDAHGRPGYRLALQTREQHIRRDKATSNICTAQALLANMAAAYAIWHGPEGLKAIATHVHGLAARLHAGLKAAGLELAGEKIFDTVTVTVPGKAAAIAAEAEKTGSLLRVIDADRVGITFDEISTEADLESIAKLFGITVPAAAPAIAPSQPRGEHFLTQPVFHEHRSETEMMRFLRRLSDKDLALDRAMIPLGSCTMKLNAAAEMMPVSWPEVNGLHPFAPDAHTVGYRRMVGELEGWLAEITGFDAVSLQPNAGSQGEYAGLLAIRRYFRERGEDHRDVCLIPSSAHGTNPASAAMAGMRVVVVRCLEQGDIDPEDLKAKAEEHSSRLAALMITYPSTHGVFEEGVRDMCALIHEHGGQVYLDGANLNALVGLARPGDLGADVCHMNLHKTFCIPHGGGGPGIGPIGVKAHLQPFLPGHVELGSAHAVAAAPFGSASILPITWMYIRMMGAAGLKRATEMAILNANYIAGRLEAYYPVLYRGRNGRVAHECILDTRVFKERAGIGVEDIAKRLIDYGFHAPTMSWPVAGTLMVEPTESEPKSELDRFCDAMISIAGEAGRVEKGEWPKDDNPLVNAPHTAAELMADTWSHPYSRAEAAFPSGSMDWAAKYWPPVSRVDNVAGDRNLVCACPPIEALAS

SEQ ID NO: 12639 - protein, 362 aa, Prochlorococcus marinus
MASHKITLLTGDGIGPEISIVAKKILAALSEKHSITFTIEEKPFGGQAIELTGKPLPEDTLNSCKASDAVLLAAIGDPKYDDLPRDLRPETGLLNLRAGLNLFANIRPIKIRQALISSSSLKSEIIKDVDLVVVRELTGGIYFGQPKGRISTEEAGERAFNTMTYSDYEIDRIAKIAFDLSETRRKKICSIDKANVLEVSQLWRERVIKAQEQYPNIELTHQYVDNAAMQLVREPAQFDVILTSNLFGDIISDEAAMLTGSIGMLPSASLGEDGPGVFEPVHGSAPDIAHKNLANPIAMILSTAMMLRTGLMEYKAATDLENAIDKVLGKGFRTIDLNRDQSNTKLGCREMGDQIIKAINGI

SEQ ID NO: 12640 - protein, 211 aa, Thermoplasma volcanium GSS1
MLVSPSIVAASLTKFQAQVKECEDAGAYSFHLDVMDGNFVPNITVGPDFYFALRSISKIPIDTHLMVDRPDYYYEKFLSQNDRVLIHYESPINIKGLIKKMENEGVKYGLVINPNTPFSKVSDLLERAEILLIMSVYPGFSGQKFIDVSEKIKEARNYIKEMGLRTMIEVDGGINENTAKIVKNAGADIVVSASYLFSGDITDRIKTLSSI

SEQ ID NO: 12641 - protein, 524 aa, Candida tropicalis
MATQEIIDSALPYLTKWYTVITLAALVFLISSNIKNYVKAKKLKCRDPPYFKGAGWTGISPLIEIIKVKGNGRLARFWPIKTFDDYPNHTFYMSIIGALKIVLTVIQENIKAVLATQFTDFSLGTRHAHFYPLLGDGIFTLDGEGWKHSRAMLRPQFARDQIGHVKALEPHIQILAKQIKLNKGKTFDIQELFFRFTVDTATEFLFGESVHSLYDEKLGIPTPNEIPGRDNFATAFNTSQHYLATRTYSQTFYFLTNPKEFRDCNAKVHYLAKYFVNKALNFTPEEIEEKSKSGYVFLYELVKQTRDPKVLQDQLLNIMVAGRDTTAGLLSFAMFELARHPEIWSKLREEIEVNFGVGEESRVEEITFESLKRCEYLKAILNETLRMYPSVPVNSRTATRDTTLPRGGGPNGTDPIFIPKGSTVAYIVYKTHRLEEYYGKDADDFRPERWFEPSTKKLGWAYVPFNGGPRICLGQQFALTEASYVITRLVQMFETVSSPPDVEYPPPKCIHLTMSHDDGVFVKM

SEQ ID NO: 12642 - protein, 507 aa, Candida tropicalis
MIEQVLHYWYYVLPAFIIFHWIVSAIHTNSLRRKLGAKPFTHTQLDGFYGFKFGRDFLKAKRIGRQVDLINSRFPDDIDTFSSYTFGNHVIFTRDPENIKALLATQFNDFSLGGRIKFFKPLLGYGIFTLDGEGWKHSRAMLRPQFAREQLPMSPSLEPHFNVKAYPQEQRWVFDIQELFFRFTVDSATEFLFGESVNSLKSASIGCDEETELEERKKFAEAFNKAQEYISTRVALQQLYWFVNNSEFKECNEIVHKFTNYYVQKALDATPEELEKQSGYVFLYELVKQTRDPNVLRDHHSISLLAGRDTTAGLLSFAVFELARNPHIWAKLREDVESQFGLGEESRIEEITFESLKRCEYLKAVMNETLRLHPSVPRNARFALKDTTLPRGGGPDGKDPILVRKMSCSIFISGTQIDPKHYGKDAKLFRPERWFESSTRNLGWAYLPFNGGPRICLGQQFALTEAGYILVRLAQSFDTLELKPDTEYLTKISHLTMCLFGAFVKMD

SEQ ID NO: 12643 - protein, 295 aa, Brassica napus
VDPRVRRILAVLGTLPCIVLIPGLFFIPESPRWLAKMGMTDDFETSLQVLRGFETDITVEVNEIKRSVGTSTKRSSTVRFVDLKRRRYYFPLMVGIGLLVLQQLGGINGVLFYSSTIFESAGVTSSNAATFGVGAIQVVATAISTWLVDKAGRRLLLTISSVGMTISLVIVAAAFYLKGFVSHDSDMYSMLSILSVVGVVAMVVSFSLGMGPIPWLIMSEILPVNIKGLAGSIATLANWFISWLITMTANLLLAWSSGGTFTLYGLVCAFTVVFVTLWVPETKGKTLEELQALFR

SEQ ID NO: 12644 - protein, 351 aa, Wolbachia endosymbiont of Nephila clavata
VVANTDAQALEKSLCDKKIQLGINLTKGLGAGALPDVGKGAAEESIDEIMEHIKDSHMLFITAGMGGGTGTGAAPVIAKAAREARAAVKDRAPKEKKILTVGVVTKPFGFEGVRRMRIAELGLEELQKYVDTLIVIPNQNLFRIANEKTTFSDAFKLADNVLHIGIRGVTDLMVMPGLINLDFADIETVMSEMGKAMIGTGEAEGEDRAISAAEAAISNPLLDNVSMEGAQGILINITGGGDMTLFEVDAAANRVREEVDENANIIFGATFDQAMEGRVRVSVLATGIDGRNNKSETSPISQSEDSEKEKFKWPYSHSESTQDKTLEAKPTEQVSEGAKWSSNVYDIPAYL

SEQ ID NO: 12645 - protein, 517 aa, Candida tropicalis
MYEQVVEYWYVVLPLVFILHKVFDMWHTRRLMKQLGAAPVTNQLHDNFFGIINGWKHLSSRKKVELKNIMIINLPIRKFQVWVHMLVPSLEQSSSSQKIRRNIKALLATQFSDFSLGKRHTLFKPLLGDGIFTLDGQGWKHSRAMLRPQFAREQVAHVTSLEPHFQLLKKHMVKNKGGFFDIQELFFRFTVDSATEFLFGESVHSLKDETIGSYQDDIDFVGRKDFAESFNKAQEYLAIRTLVQDFYYLVNNQEFRDCNKLVHKFTNYYVQRALDATPEELEKQSGYVFLYELVKQTRGPNVLRDQSLNILLAGRDTSAGLLSFAVFELARNPHIWAKLREDVESQFGLGEQSRIEEITFESLKRCGYLKAFLNETLRVYPSVPRNFRIATKNTTLPRGGGSDGNSPVLVKKGEAVSYGINSTHLDPVYYGDDAAEFRPERWNEPSTRKLGWAYLPFNGGPRICLGQQFALTEAGYVLVRLAQSFDTLELKPPVVYPPKRLTNLTMSLQDGTIVKID

SEQ ID NO: 12646 - protein, 461 aa, Tropheryma whipplei str. Twist
MSEDFILPALGESVSECVITRWLKEAGDRVEVDEPLVEVSTDKVDTELPSTLTGILEEILVQRDETAKPGQILARIAVDKDETKSNFDHGVKQSDVITGDSTGNLLGNTRPIEDTGWPVTLHTAESKPDLSAKADHIGDEGDKQGNLPTAHNAEIPYATPIVRQLARKLNIDLTNIVGSGVGNRILREDVLLASNRTTNTSTECAQNIPSSPEHDKSAASFDSEVSELRGTRIKMSRLRNIIAERAVHSMQNTAQLSTVIEVDLTRIVDYRNSIKEKFKEAEGVNLTVLPFIINATVQALRKYPVINSHIVDDQIVFPDYENISLAVDTERGLLTPVIKNAGDMTVAQFAKSVFDLARRARNNKLSPDELTGGTFTVTNTGSRGALFDTPVVFLPQLAILGIGAIARRPVIVLDAQGNECISIRSVAFFALSYDHRVIDGADAARFLGYIKSLLETGNCTV

SEQ ID NO: 12647 - protein, 185 aa, Xanthomonas axonopodis pv. citri str. 306
MLLNRLLALVLTGFFATPAFAAGTPVLDVEYRPLAGKTPINLNRTYGGKVVMVVNTASKCGFTPQYEGLEALNHRFGSRGFTVLGFPSNDFQGQEPGSEKQIQEFCTLTYGVKFPMFEKVHVLGAEATPLYQRLTQATGVAPGWNFHKYLIGRDGRVVAQFPSKIKPDDPSVLAAIERELKAPAR

SEQ ID NO: 12648 - protein, 502 aa, Haemophilus somnus 2336
METVLNFINGNQVASKGTKAWPIYNPATGEQIRQVMMSTAEEVNEAVEVAQKAFPAWAATSPLRRARVMFKFKQLLERDWDDLARLITEEHGKVFSDAQGELTRGLEVVEFACGIPHLVKGEFSEQAGRGIDIHSAMQPLGVCVGITPFNFPAMVPMWMFPIALACGNTFILKPAKADPSLSIRLAELLKEAGLPDGVFNVVHGDRQDNEILLRDPRVKAVSFVGSTTAAAHVHAIGSAHGKRVQALGAAKNHGLVMPDVDIEATANALLGAAFGAAGERCMALPLAVTIDDETADKLVAALKPKVEALRYGPGLTKEGEKENDFGPLITRQHRDNVKRYVDIGVSEGATLVVDGRDKFPAGYENGFFIGGCLFDHVTPDMTIYKEEIFGPVLGIVRAKNFQEAMKLINEHQFGNGAAIFTNNGAAAREFAYQVQAGMVGVNVPIPVPMAFHCFGGWKESAYGALNAYGPDGVRFYTKMKTVTTRWPEKDLSSQAAFSMPTL

SEQ ID NO: 12649 - protein, 352 aa, Carica papaya
MATMSSISKIIFLATCLIIHMGLSSADFYTVGYSQDDLTSIERLIQLFDSWMLKHNKIYESIDEKIYRFEIFRDNLMYIDETNKKNNSYWLGLNGFADLSNDEFKKKYVGFVAEDFTGLEHFDNEDFTYKHVTNYPQSIDWRAKGAVTPVKNQGACGSCWAFSTIATVEGINKIVTGNLLELSEQELVDCDKHSYGCKGGYQTTSLQYVANNGVHTSKVYPYQAKQYKCRATDKPGPKVKITGYKRVPSNCETSFLGALANQPLSFLVEAGGKPFQLYKSGVFDGPCGTKLDHAVTAVGYGTSDGKNYIIIKNSWGPNWGEKGYMRLKRQSGNSQGTCGVYKSSYYPFKGFA

SEQ ID NO: 12650 - protein, 458 aa, Xanthomonas oryzae pv. oryzae
MTDTPRRDDAATLDRFGYAQELKRQLTLKDLLIYGLVSMVPTAPFSIFGGVFDISAGMVPLTYLVGFVAMLFTALSYQQMSQAFPVAGSVYAYVGRGLNSGMGFLAGWAILLDYLLVPTLLYVVGANAMYNVVPAVPQPAWIGFFVVLNTVVNLRGIETTARANRFFLLGQLVVLAVFLVLATLAIQRGVNGAHWSWRPIYDPQAFSPHVIFSALSVAVVSFLGFDAISTLSEEARGGNRVVGRATLLALLIVAGVFVLQTWLAALLQPTLQRYPSAQASNDAFFEIGRLIAGPWLQIVIALTVAISAAIANSLVAQAATSRLLFAMARDRQLPAFLRYIHPRTAVPQRAILLVAGLSIVLGEVFVGQIALLSSLCNVGALTAFLLLIAVLWHFRAQGRRVLHGLAPLIGIVILAYVLLNADTHAQLGGTAWMVVGLTVLAFLKLSGRSTEFRATDAL

SEQ ID NO: 12651 - protein, 350 aa, Triticum aestivum
MASDRLAALKAFDETKAGVKGLVDAGVKAVPDIFRHPPDPLSPCTKVAAIPVVDLSGPRSEVVAAVREAARTAGFFQLVNHGVPEAAMSGMLAAVRRFNEEPAEAKAPYYTRDAARRVRYNCNADLFRTLVGKWRDTIYMDDVDRLAAGEEEEVLPPACRGVAPKYTAQIRMLGRALFELLSEALGVRRGYLEEEAGCLGTLSVAGHYYPACPEPHLTLGAVRHNDPGFLTVLLQDGVGGLQVLTDVEDGEGNVSAAWADVPAVPGALVVNVGDFLQLVSNDRFRSVAHRVVANSVGPRMSVACFFRAKGATVCAPVVADGGGPPRYRTVTAEELLRSSGKQNGLRDVRL

SEQ ID NO: 12652 - protein, 342 aa, Pseudomonas syringae pv. phaseolicola 1448A
MTLPDPNITETAHFPLAAVVGADDLKLALCLTAIDPRIGGVLIEGPRGMAKSTLARGLADVLASGQFVTLPLGATEERLVGTLDLDAALAEGRAQFSPGVLAKADGGVLYVDEVNLLADHLVDLLLDVAASGVNMVERDGISHRHAARFVLIGTMNPEEGELRPQLLDRFGLNVALSGQTQPAERSQIIRRRLDFDSDPVMFCQQWQAQQDALKLRCEQARQLLAGIELDDHSLAMITERCFAAGVDGMRADLVWLRAARAHAAWRGAGRIEEQDIEAVAEFALRHRRREPAPPPQNPEAPPPGSSSRQADPESGQGNWGELPAQAVTTGARREVPSWPKKP

SEQ ID NO: 12653 - protein, 294 aa, Klebsormidium flaccidum
YIKNMITGAAQMDGAILVVSAADGPMPQTKEHILLAKQVGVPRIVVFLNKEDQVDDNEILQLVELEVRDYLSNYEFPGDEVPVIAGSALMALQALTENPSISREENTWVDKIYNLMDQVDSYIPTPKRDIEKPFLMPVEDVFSIQGRGTVATGRIERGVIKLGDSVELVGLKKETRNTVVTGLEMFRRLLEQSFAGENIGILLRGIEKKDIQRGMVIAQPGTIKPHTRFEAQVYILGKEEGGRHSPFFAGYRPHFYVRTADVTGVIEAFEYDNGRQNKNGNARRSSKMIVELIC

SEQ ID NO: 12654 - protein, 201 aa, Chlamydomonas reinhardtii
MLLTRKNVAVRPARAARRDVRAMSLLGNLFGGGSKPTSSTSNFHQLSALDIDKKNVDFKSLNNRVVLVVNVASKCGLTAANYKEFATLLGKYPATDLTIVAFPCNQFGGQEPGTNAEIKAFASARGFSGAGALLMDKVDVNGANASPVYNFLKVAAGDTSDIGWNFGKFLVRPDGTVFGRYAPTTGPLSLEKYIVELINSR

SEQ ID NO: 12655 - protein, 361 aa, Carica papaya
MATMSSISKIIFLATCLIIHMGLSSADFYTVGYSQDDLTSIERLIQLFDSWMLKHNKIYESIDEKIYRFEIFRDNLMYIDETNKKNNSYWLGLNGFADLSNDEFKKKYVGFVAEDFTGLEHFDNEDFTYKHVTNYPQSIDWRAKGAVTPVKNQGACGSCWAFSTIATVEGINKIVTGNLLELSEQELVDCDKHSYGCKGGYQTTSLQYVANNGVHTSKVYPCQAKQYKCRATDKPGPKVKITGYKRVPSNCETSFLGALANQPLSFLVEAGGKPFQLYKSGVFDGPCGTKLDHAVTAVGYGTSDGKNYIIIKNSWGPNWGEKGYMRLKRQSGNSQGTCGVYKSSYYPFKGFAKDLGFHTYI

SEQ ID NO: 12656 - protein, 465 aa, Bacillus halodurans C-125
MAKKMPEIGEYKYGFSDRDVSIFRSKRGLTREIVEEISRMKQEPQWMLDFRLKSLEQFYKMPMPQWGGDLTELDFDDITYYVKPSEKSERSWDEVPEEIKNTFDKLGIPEAEQKYLAGVSAQYESEVVYHNMKEDLEELGIIFKDTDSALKENEDIFKEYFGTIIPPTDNKFAALNSAVWSGGSFIYVPKGVKTETPLQAYFRINSENMGQFERTLIIADEDSSVHYVEGCTAPVYTTNSLHSAVVEIIVKKDAYCRYTTIQNWAPNVYNLVTKRAVAYENATMEWIDGNIGSKLTMKYPAVIMKGEGAKGTILSIAIAGKGQHQDAGAKVLHLAPNCSSTIVSKSISKQGGKVSYRGIAHFGRKSQGSKSKIECDTLIMDNESTSDTIPYNEILNNDITLEHEATVSKVSEDQLFYLMSRGISEEEATEMIVMGFIEPFTKELPMEYAVEMNRLIKFEMEGSIG

SEQ ID NO: 12657 - protein, 488 aa, Bacillus halodurans C-125
MMNKDQALIFELSKPGRVGHSLPELDVLEQPVETLIPAEFLREEAPELPEVSELQLMRHYTALSKRNHGVDSGFYPLGSCTMKYNPKINEDVARYPGFANIHPYQPEAQVQGALRLMYELQTALAEITGMDEVTLQPAAGAQGEWTGLMLIRAYHEANGDTNRTKVIVPDSAHGTNPASATVAGFESVTVRTDEDGLVDLDHLREVVGEDTAALMLTNPNTLGLFEAHIVEMAAIIHEAGGKLYYDGANSNAILGIARPGDMGFDVVHLNLHKTFTGPHGGGGPGSGPVGVKKELIPYLPKPVVVKDGDSYRLDYDRPHSIGRVKPYYGNFGINVRAYTYIRTMGPEGLRTVSEYAVLNANYMMRRLAPYFDLPYDQHCKHEFVLSGRQQKKLGVRTLDIAKRLLDFGYHPPTIYFPLNVEECLMIEPTETESKETLDEFIEAMIQIAKEAEETPEVVQEAPHHTVIGRLDETTAARKPILRYEKITQ

SEQ ID NO: 12658 - protein, 1287 aa, Nostoc sp. PCC 7120
MLEFNHLRLHNMHGSLVAKIASAIATLVSSSILIGWLLDIQLLKTFFWSSSAIMKPNTALCFTLCGISAWLLVTKPLGEPHFSQRHKPYKKLSRAFSVSTTIIAGLKICEYLFGWELGIDKLLLGDVLTTINTPYPGRMGLNTAINFLLIGIALELLIYPRNHRSYWYAQMLVLFTTVISLQVVVSYAYKVKFSYTINPNITSMSLQTALLFIVLCIGILSGRAEKGLMKIVFSDSYGGLIARRLLVAAIAVPLFLGWLILEGQRAGRYGPAFAVSVFAVILIVIFAIIIWQNAVVIELLSQQRDRAQETLKAYEEKLASLVDANIIGIIFSDIYGGIQQANEAFLMMVGYSQEDLLTGRLNWKNITPPEYIYLDEQGIAEAQVNPKGACTPYEKEYIHQDGSRIPVLIGYVLLGEKREESVAFILDLSERQQAQQKILQLNKDLQRRVVELQTLLDVIPIGIGIAEDPECQHIKINPAFAKQLQLSTDVNASLSAPPDQRPTTFKVFHEGRELLPAELPMQYSAAHGAEVLDYEVDIVHDNGEIIKLLEYVAPLFDEDGNTRGCIGAFVDITERKQAEELLRNEQKWLEDVLNLMPRPLLFIEPETARVTFANRAADELAGGEFPRGVAAEEYHTVYHFTDINGNPVPNEQMPGVRVARGERLEGLELDWHTNDEVLSLLIFADTLPAMHGYPATCVVVFQNITQIKQAEKALSLGYQRLKLLFSTANDLLSSQEPVALIDSCFQKLAQQIGLDVYLNYLVEDNPQSMRLASYRGICPELAQEIEFLRFGEAVCGTTAQERHSIALENVQQSTDPKTQLIRSVGINAYYSYPLIAQGRLLGTLSFGSRSRANFTDNQKGMMQAVCDQIAIAMERVELINSLQRQTEQLTEANRMKDEFLAILSHELRSPLNAILGWAQLLQARRLSEAQTAKGLETIERNAKAQTQLIEDLLDISRMIRGKLRLNVRTCNLIPIIETAIENINLAAQAKEIDLTFFLENPATENLPFQVSGDSERLQQVIWNLLTNAIKFTPSGGKVEVRLTKNPGCEQNELITNNYAQIQVIDTGIGINSSFLPYVFDRFRQADSSITRSHGGLGLGLAIVRHLVELHGGTVHVHSPGEEQGSTFTVKLPLLSENKATSIEPISPRGENLTPLPLCPSLLGVRVLVVDDESDSRDFISTVLEQCQAQVRAVATAKEALQIISQWKPDVLVSDIGMPEEDGYSLIRKLRSLPPEQGGNIPATALTAYARAEDRTRAIQEGFQLHLPKPIEPTELATVVASLIKRGQ

SEQ ID NO: 12659 - protein, 290 aa, Pinus koraiensis
YIKNMITGAAQMDGAILVVSAADGPMPQTKEHILLAKQVGVPSIVVFLNKEDQVDDNEILQLVELEVRDYLSNYEFPGDEVPVIAGSALMALQALTENPSISREENTWVDKIYNLMDQVDSYIPTPKRDIEKPFLMPVEDVFSIQGRGTVATGRIERGVIKLGDSVELVGLKKETRNTVVTGLEMFRRLLEQSFAGENIGILLRGIEKKDIERGMVIAQPGTIKPHTRFEAQVYILGKEEGGRHSPFFAGYRPQFYVRTADVTGVIEAFEYDNGDKTRMVMPGDRVKMIV

SEQ ID NO: 12660 - protein, 447 aa, Bacillus halodurans C-125; identical to SEQ ID NO: 690

SEQ ID NO: 12661 - protein, 226 aa, Carica papaya
PQSIDWRAKGAVTPVKNQGACGSCWAFSTIATVEGINKIVTGNLLELSEQELVDCDRHSYGCKGGYQTTSLQYVANNGVHTSKVYPYQAKQYKCRATDKPGPKVKITGYKRVPSNCETSFLGALANQPLSVLVEAGGKPFQLYKSGVFDGPCGTKLDHAVTAVGYGTSDGKNYIIIKNSWGPNWGEKGYMRLKRQSGNSQGTCGVYKSSYYPFKGFAKDLGFHTYI

SEQ ID NO: 12662 - protein, 175 aa, Glycine max
FFHIMSLSFSHPYGFLLVLLLVVEARDKQRGAPQVVERWGDPESSKCVMAVSMIDRESHPLLAVARKNNQIEVLSPVNGDIQATITDANDLDVQSEVNNIVGLHLFAKQNSELASRDCTLLTCTTKGNASIRSIELVDSSTVSSCIDSPKIWNVCSGGNILCCKVDGNEKFALFG

SEQ ID NO: 12663 - protein, 435 aa, Bacillus halodurans C-125
MSVETKLTIDKEYVQSFSDARNEPQWFKDIRLKGFELVETLELPKPDKTKITSWNFTNFDHKLPEVSPVASIDELRDEVKGLIGEASDTQNLLVQRDATVVYSKLDEALKAKGVIFTDLLTAVKEHGDLVEKYYMKDAVKVDENRLTALHAALVNGGTFIYVPRNVEIEVPLQSVFWFDTEKAGLFNHVIIVAEDNSSITYVENYASFGSEEAVANIVVEVFAGANAKVSFGAVDNLAAGVTTYVVRRAHVGRDSRVEWALGQMNDGNTVSENTTHLLGDNSWADTKTVSVGRGEQKQNFTTQIFHHGKHSEGYILKHGVMREAATSIFNGISKIEHGATKSHGEQTERVLMLSEKARGDANPILLIDEDDVTAGHAASVGKIDPIQMFYLMSRGISRAEAERLVIHGFLAPVVGQLPIESVKERLVEAIERKVK

SEQ ID NO: 12664 - protein, 227 aa, Carica papaya
YPQSIDWRAKGAVTPVKNQGACGSCWAFSTIATVEGINKIVTGNLLELSEQELVDCDKHSYGCKGGYQTTSLQYVANNGVHTSKVYPCQAKQYKCRATDKPGPKVKITGYKRVPSNCETSFLGALANQPLSFLVEAGGKPFQLYKSGVFDGPCGTKLDHAVTAVGYGTSDGKNYIIIKNSWGPNWGEEGYMRLKRQSGNSQGTCGVYKSSYYPFKGFAKDLGFHTYI

SEQ ID NO: 12665 - protein, 450 aa, Vibrio sp. Ex25
MSAFNVAKFGGTSVANFEAMSRCATIIENNPNTRLVVSSACSGVTNLLVELANGVQDQTHRTELLQNLANIHDAILTQLEDSTKTAAEVYGILDTVTSLAEAASIQASAKLTDHLVACGELMSTHILTQLMCERGIQAVRFDIRDVLRTDDNFGRAEPNIEAISTLAQDKLIPLCQQSVVVTQGFIGSDEAGNTTTLGRGGSDYSAALIAESVKAAGLEIWTDVPGIYTTDPRIAPKASPIPEISFSEASEMANFGAKILHPSTLVPALRHDIPVFVGSSKEPEKGGTWIRHQVESSPLFRALALRCNQTMVTLRSANMFHAYGFLAKVFEILAKHKISVDLITTSEISVSLTLDQTDTSGGAPQLPQAVREELEELCKVEVEHDLCLVALIGNNMSESKGYAKQVFGTLEDFNLRMICYGASPHNLCFLLHESVSKQAIQKLHTELFEK

SEQ ID NO: 12666 - protein, 115 aa, Triticum aestivum
  misc_feature (89)..(89): Xaa can be any naturally occurring amino acid
MAHSAVAQVVLVAVVAAMLLAATEAAVSCGQVSSALSPCISYARGNGANPSAACCSGVRSLASSARSTADKQAACKCIKSAAAGLNAGXAAGIPTKCGVSVPYAISSSVDCSKIR

SEQ ID NO: 12667 - protein, 453 aa, Nocardioides sp. JS614
MTPRSAEASPVTRQSSSGGSPSSRGTTRTLQTTTDADGQVTSRVRRTVLPSGLRVISEHQAGVRSAAIGVWVGVGSRDESPSLHGCSHFLEHLLFKGTTERSALDISVALDAVGGEFNAFTAKEYTCFHARVLDEDLPLAVDVLGDMITASTLTAEDVEAERDVILDEIAMHDDDPDDVVHNLFAEQAWGDTPLGRPIAGTVGSIRSLSRDQVRRFYRRHYRPANVVVAAAGNVDHAQLVRQVRTAFARNGWLDGRDTPVVPRHGTRKRVRPGVLATTRPFEQVNVVLGMEGLRRDDDRRFALGVLNTALGGGTSSRLFQEVRERRGLAYSVFSFATHHADSGLVGVSVGCLPNKLDDVLAVVREELAKVAESGITAEELARGKGQLRGGLVLGLEDSASRMSRIGKAELVHDRLMSIDEVIARIDGVTLEEVQSIAAEVFARPEILAVVGPA

SEQ ID NO: 12668 - protein, 427 aa, Dechloromonas aromatica RCB
MNAPLLPSYISAQNIGPWHIFLQQVEQVAPLLDKSLWPWVETLRRPKRSLIVDVPIRLDSGEVAHFEGYRVHHNTSRGPGKGGVRFHQDVTLSEVMALAGWMTIKNAVVNVPFGGAKGGVRVDPRQLSISELEGLTRRYTSEISSMIGPDKDIPAPDMNTNAQVMAWMMDTYSMGEGRTVTGVVTGKPLSLGGSLGRQDATGRGVFVTAREAARKLNLPIEGARVAVQGFGNVGEASARIFAQAGARIVAVQDVSATLYCEAGLDIAALKRYLAENKTLLGAPGCEVIDNAAFWAVPCDFMVPAALESQINRYNAGQITARIVVEGANGPTTPEADVILAERGITVVPDVLANAGGVTVSYFEWVQDFSSFFWSEDEIYQRLERIMSEAFNAIWQLAEARQMSLRSAAFVIGCTRVLEARATRGLYP

SEQ ID NO: 12669 - protein, 321 aa, Bacillus thuringiensis serovar konkukian str. 97-27
MNSVSEEKIYDVIIIGAGPAGMTAAVYTSRANLSTLMLERGIPGGQMANTEDVENYPGYESILGPDLSNKMFEHAKKFGAEYAYGDVKEVIDGKEYKTIIAGKKEYKARAIIVASGAEYKKIGVPGETELGGRGVSYCAVCDGAFFKGKELVVIGGGDSAVEEGVFLTRFASKVTIVHRRDTLRAQKILQDRAFQNEKVDFIWNHTIKEINEANGKVGSVTLVDVNSGEEKEVKTDGVFVYIGMLPLSKPFVELGITNENGYLETNERMETKVPGIFAAGDVREKMLRQIVTATGDGSIAAQSAQHYVEELLEELKTVSEK

SEQ ID NO: 12670 - protein, 424 aa, Propionibacterium acnes KPA171202
MTRVVQKFGGSSVADAASIKRVARRIAATKQAGNDIVVVISAMGDTTDDLMDLALEVSPQPAPRELDMLLTTGERQSAALLAMALSDVGIPARSYTGSQAGVITTAAHGNARIIDITPGRIEKSLEAGDLVIVAGFQGVSQTTKDVTTLGRGASDTTAVALASSLGADFCEIYSDVDGVFTADPRIVKGARRIPEISYEEMLEMAACGAKILHLRCVEYARREDVPVHVRSSFSDKPGTWVKDPTDITKGSDMEEAIISGVAHDRSEAKITIAGLPDAVGRAAQIFEIIAHADINIDMIVQNASRVMNGRTDLSFTLPMNDGPTAVRALTAVKDELGYEQILYNDQIGKVSVVGVGMRTHPGVTSTFFRALADCGINLQMISTSEIRISVVVDADQVDEAVRVAHTAFGLDAEGEAVVYAGTGR

SEQ ID NO: 12671 - protein, 368 aa, Marsilea quadrifolia
QTAASRPLSVKATATEIPSKVHKSSSKNVVRIGINGFGRIGRLCLRVALARDDIEVVAVNDPFIDTKYMAYMFKYDSTHGIYKDEIKAVDESTLQIGGQRVKVFGKRDPSEIPWGSAGADFVVESSGVFTTIEKASSHLKGGAKKVIISAPSADAPMFVMGVNEETYKPDMQIVSNASCTTNCLAPLAKVVDQEFGIVEGLMTTVHATTATQKTVDGPSGKDWRGGRGAAQNIIPSSTGAAKAVGKVLPQLNGKLTGMAFRVPTPNVSVVDLTCRLEKGASYDDVKAAVKAASEGSMKGILGYTEDDVVSTDFVGDSRSSIFDAKAGIALNKNFIKMVTWYDNEWGYSNRVVDLISHIAAVVAANKGN

SEQ ID NO: 12672 - protein, 139 aa, Brassica napus
VDSADEPHSHHHHQLAKALTVPHLIAIGVGATIGAGVYILVGTVAREHSGPSLALSFLIAGIAAALSAFCYAELSSRCPSAGSAYHYSYICVGEGVAWLIGWALILEYTIGGSAVARGISPNLALIYGGEDGLPSFLAR

SEQ ID NO: 12673 - protein, 465 aa, Bacillus thuringiensis serovar konkukian str. 97-27
MAKQLPDIGDYKYGFKDKDVSIFRAGRGLTKEIVEEISRMKEEPQWMLDFRLKSLDKFYEMPMPQWGGDLNDLDFDEITYYVKPSEKSEKSWDEVPDEIKATFDKLGIPEAEQKYLAGVSAQYESEVVYHNMKEDLEALGIVFKDTDSALKENEDIFREHFGKVIPPTDNKFSALNSAVWSGGSFIYVPKGVKVDTPLQAYFRINSENMGQFERTLIIVDEGAHVHYVEGCTAPVYTTNSLHSAVVEIIIKKDAYCRYTTIQNWANNVYNLVTKRAVCEENATMEWIDGNIGSKLTMKYPAVILKGEGARGLTLSIAIAGKGQHQDAGAKMIHLAPNTSSTIVSKSIAKHGGKVTYRGIVHFGPKAKNSRSNIECDTLIMDNQSTSDTIPYNEIKNDYVSLEHEAKVSKVSEEQLFYLMSRGISEQEATEMIVMGFIEPFTRELPMEYAVEMNRLIKFEMEGSIG

SEQ ID NO: 12674 - protein, 285 aa, Zea mays
MGNANAKEGENGHMAASPEPAAPNGGGGSSSSAGGAAARPPPLSPPDDVMLERPPPVPYLFVPQVPETPLHRPTELSPLLNHSPVNESTDHHSQDQGIPTLITWSQGGDEVFLEGSWDNWTSRRALERSGKDHAVLLVLPSGVYHYRIIVDGELRYIPELPHAADERGRVANVLDVHDYVPESLDSVAEFEAPPSPVHSYDLHCPGDEEFAKEPPTLPPQLLVSVLGGDVDSAGHGNQALKPQHVVLDHLFIEKGWGSQSLLALGVTHRFESKYVSFVLYKPLER

SEQ ID NO: 12675 - protein, 451 aa, Triticum aestivum
  misc_feature (7)..(7): Xaa can be any naturally occurring amino acid
  misc_feature (249)..(249): Xaa can be any naturally occurring amino acid
ILAELPXDCFGAYIISMATAPSDVLAVELLQRECHIKKPLRVVPLFEKLADLEAAPAAVARLFSVDWYMDRINGKQEVMIGYSDSGKDAGRLSAAWQMYKAQEELIKVAKHYGVKLTMFHGRGGTVGRGGGPSHLAILSQPPDTIHGSLRVTVQGEVIEHSFGEEHLCFRTLQRFTAATLEHGMHPPISPKPEWRALMDEMAVVATKEYRSIVFQEPRFVEYFRSATPETEYGRMNIGSRPSKRKPSGXIESLRAIPWIFAWTQTRFHLPVWLGFGAAFKHIIQKDIRNIHTLKEMYNEWPFFRVTLDLLEMVFAKGDPGIAALYDKLLVAEDLQSFGEQLRQNFEETKQLLLQVAGHKDVLEGDPYLKQRLRLRESYITTLNVCQAYTLKRIRDPSFEVTPQQPPLSKEFSDKEPAELVQLNRGSEYAPGLEDTLILTMKGIAAGMQNTG

SEQ ID NO: 12676 - protein, 428 aa, Bacillus thuringiensis serovar konkukian str. 97-27
MVAEKGTQTKTQQQREQHFELLNSTQIVISEALEKLGYPNEVYELLKEPIRMMTVKIPVRMDDGTVKIFTGYRAQHNDAVGPTKGGIRFHPNVTENEVKALSIWMSLKCGIVDLPYGGGKGGIICDPREMSFRELERLSRGYVRAISQIVGPTKDIPAPDVFTNSQIMAWMMDEYSRIDEFNSPGFITGKPLVLGGSHGRETATAKGVTICIREAAKKRDIDIKGARVVVQGFGNAGSFLAKFMHDAGAKVIAISDAYGALHDPNGLDIDYLLDRRDSFGTVTKLFNNTISNKELLELDCDILVPAAIENQITEENANDIKAKIVVEAANGPTTLEATKILTDRGILLVPDVLASAGGVTVSYFEWVQNNQGYYWTEEEVEQRLEKVMVRSFDSIYETAQVRKVNMRLAAYMVGVRKMAEASRFRGWV

SEQ ID NO: 12677 - protein, 311 aa, Bacillus cereus ATCC 10987
MKKKIGLLVMAYGTPYKEEDIERYYTHIRRGRKPSPEMLEDLTERYRAIGGISPLATITLEQAKKLEKRLNEVQDEVEYHMYLGLKHIEPFIEDAVKDMHNDGIQDAIALVLAPHYSTFSVKSYVGRAQEEAEKLGNLTIHGIDSWYKEPKFIQYWVDAVKGIYNGMSDAEREKAVLIVSAHSLPEKIIAMGDPYPEQLHETADYIARGAEVANYAVGWQSAGNTPDPWIGPDVQDLTRELNEKHGYTSFVYAPVGFVAEHLEVLYDNDFECKVVTDEIGAKYYRPEMPNASDAFIDCLTDVVLKKKESVL

SEQ ID NO: 12678 - protein, 125 aa, Glycine max
MFGSTKASSLPVSSRSEEGGLRRRLSSLSLKIQDSPTWSFSRSKSLSSMGDYVRTCWAWILSRKLIFATDLEMNDQKTKLLGSHNRGTWSHVFYKLRSEIRRFISTSDHATLPKTYHRSTPQVFS

SEQ ID NO: 12679 - protein, 407 aa, Bradyrhizobium japonicum USDA 110
MRRVVVTGMGIVSSIGNNTQEVLASLHEAKSGISRAEKYAELGFRSQVQGAPTLDPATVVDRRAMRFLGQGAAWNHIAMEQAILDSGLSPEDVSNIRTGIIMGSGGPSARTIVESADITRTKGPKRVGPFAVPKAMSSTASATLATWFKIKGVNYSISSACATSNHCVGNAYETIQIGKQDIIFAGGCEELDWSLSVLFDAMGAMSSKYNDTPATASRPYDVNRDGFVIAGGAGVLVLEELEHAKARGARIYGEIVGYGATSDGYDMVAPSGEGAERCMRMAMSTVKTKVDYINPHATSTPAGDPPEIEALRKVFGVGEKCPPISATKALTGHSLGATGVQEAIYSLLMMNNGFICESAHIQELDPVFADMPIVRKRIDNVKIGTVLSNSFGFGGTNATLVFSRLDV

SEQ ID NO: 12680 - protein, 262 aa, Zea mays
  misc_feature (229)..(229): Xaa can be any naturally occurring amino acid
MASPALISDTDQWKALQAHVSAIHKTHLRDLMTDADRCKAMTAEFEGVFLDYSRQQATTETVDKLFKLAETAKLKEKIDKMFKGEKINTTENRSVLHVALRAPRDAVINSDGVNVVPEVWAVKDKIKQFSETFRSGSWVGATGKPLTNVVSVGIGGSFLGPLFVHTALQTDPEAAECAKGRQLRFLANVDPVDVARSIKDLDPATTLVVVVSKTFTTAETMLNARTIQXRGLSLLLDLRLFPKHMIAGRTNLRLGQEFRNLT

SEQ ID NO: 12681 - protein, 248 aa, Pediococcus pentosaceus ATCC 25745
MNNNEVELNDKIELILSRERKELAKLVLIRHGESTANRDNIYTGWSDVPLTPLGIKQAQRAGKLIAKLGINFDMVHTSMLKRAIVTANIVLDDLNQNWLPINKTWRLNERHYGALRGQNKDETRQIYGKEQVALWRRSFDAVPPLLEHPDDDRRYAVNGILNEPLGESLHMAYNRLLPYWIDQIAPRLMEGQNQLVVAHGSSLRALIKYLENISDQGIDGVEVENGEPIIYELKSDLSIQNKIILKEA

SEQ ID NO: 12682 - protein, 428 aa, Leifsonia xyli subsp. xyli str. CTCB07
MALIVQKFGGSSVSDAESIKRVAKRIVETRKAGNEVVVAVSAMGDTTDELVDLAHEVTPIPAPRELDMLLTAGERISMALLAMAIKSMGSDARSFTGSQAGMITDAVHGSARIVDVTPGRIQDALSEGAIAIVAGFQGFSRESRDITTLGRGGSDTTAVALAVALGAEVCEIYTDVDGVFTSDPRQVPLARKIDRITSEEMLELAAAGAKVLHIRAVEYARRHDVTLHVRSSFSNREGTYVLNEAAAAAAAKKDGIVEEPIIAGVATDLSEAKITVVGVPDVPGKAAQIFKIVAKANANVDMIVQNVSAAATSLTDISFTLPKSEGQRVLTALTAEKYEVGFQSLQYDDQIGKLALVGAGMRTNTGVSAKLFEALFDAGINIEMISTSEIRISVVTCADTVAEAARVVHSAFRLDGDQQAIVYAGTGR

SEQ ID NO: 12683 - protein, 477 aa, Candida albicans SC5314
MSALFAVSRSAIALRSIAPRSSTATTSSFLALARLYSSGKFPPHTVINMPALSPTMTQGNIQSWAKKVGDELTPGEAIAEIETDKASMDFEFQEEGYLAKILLDAGAKDVPVGQPIAVYVEDAGEVAAFENFTAADAGEAPKPAPAAEEEAPKKEEPKASTSTSAPASTPSPSSKKAPTDRIIASPFAKTIALEKGISLKGIKGSGPNGRIVAKDLEGVEPQAAAAAAPAAAAATAGAAPSATASYEDIPITSMRKTIASRLLQSTQQSPSYIIQSQISVSKLLKLRASLNATAEERYKLSINDLLIKAIAKTCVRIPEVNAAWLGEQGVIRQYKNVDVSVAVATPTGLITPIVTNAESKGLAEISNQVKDLGKRAKVGKLLPEEFQGGTICISNLGMNHAVTAFTSIINPPQSAILAIGTTEKKAVPSEVNEQGFVFDDVITITGTFDHRVIDGALGGEWMKELKRIVENPLEMLI

SEQ ID NO: 12684 - protein, 503 aa, Arabidopsis thaliana
MASLLLTSSIMITTSCPSMVLRSALPIGSSFPSLRLTRPYDKATLLVSCCSAESKKVATSATDLKPIMERRPEYIPNKLPHKNYVRVLDTTLRDGEQSPGAALTPPQKLEIARQLAKLRVDIMEVGFPVSSEEEFEAIKTIAKTVGNEVDEETGYVPVICGIARCKKRDIEATWEALKYAKRPRVMLFTSTSEIHMKYKLKKTKEEVIEMAVNSVKYAKSLGFKDIQFGCEDGGRTEKDFICKILGESIKAGATTVGFADTVGINMPQEFGELVAYVIENTPGADDIVFAIHCHNDLGVATANTISGICAGARQVEVTINGIGERSGNAPLEEVVMALKCRGESLMDGVYTKIDSRQIMATSKMVQEHTGMYVQPHKPIVGDNCFVHESGIHQDGILKNRSTYEILSPEDVGIVKSENSGIVLGKLSGRHAVKDRLKELGYEISDEKFNDIFSRYRELTKDKKRITDADLKALVVNGAEISSEKLNSKGINDLMSSPQISAVV

SEQ ID NO: 12685 - protein, 361 aa, Tropheryma whipplei str. Twist
MRDVVGSQNYLAVIKVVGIGGGGVNAVNRMIELGLRGVEFVAVNTDAQALLMSDADVKLDVGRASTRGLGAGADPEVGRRSAEEHAGEIEETLTGADMVFITAGEGGGTGTGGAPVVAKIAKSVGALTIGVVTKPFGFEGKRRALQAEQGIAALKNEVDTLIVVPNDRLLEISDRNISMLDAFATADQVLLSGVQGITDLITTPGLINLDFADVRSVMQGAGSALMGIGSARGADRAIKAAELAVASPLLEASIDGAHGVLLSIQGGSDLGIFEINDAAKLVQEVVHPEANIIFGAVINDTLGDEVRVTVIAAGFDGGEPTLKPTSIAPLQQDKYPDALTPSQSDDYPFEEDGLDVPDFLR

SEQ ID NO: 12686 - protein, 409 aa, Pseudomonas aeruginosa PAO1
MAIEIKAPTFPESVADGTVATWHKKPGEAVKRDELIVDIETDKVVIEVLAEADGVLAEIIKNEGDTVLSNELLGKLNEGGAAAPAAPAAAAPAAAPAAQAAAPAAAGGDDAILSPAARKLAEEAGIDPNSIAGTGKGGRVTKEDVVAAVEAKKNAPAAPAKPAAPAAEAPIFAAGDRVEKRVPMTRLRAKVAERLVEAQSAMAMLTTFNEVNMKPIMDLRSKYKDLFEKKHNGVRLGFMSFFVKAATEALKRFPGVNASIDGNDIVYHGYQDIGVAVSSDRGLVVPVLRNAEFMSLAEIEGGIANFGKKAKEGKLTIEDMTGGTFTISNGGVFGSLLSTPIVNPPQTAILGMHKIQERPMAVNGQVVILPMMYLALSYDHRLIDGKEAVSFLVAIKDLLEDPARLLLDV

SEQ ID NO: 12687 - protein, 496 aa, Shewanella sp. MR-7
MLTMTHYVNGEHTAASTRSQEIFEPATGECRGQVSLASRDEVSAAIAIAKSAFDTWSQVTPLNRARVLFKFKALVEQHMDELARLITLEHGKVLEDARGELIRGLEVVEFACGIPHLLKGEHTEQVGGGVDAWSVNQALGVVAGIAPFNFPVMVPMWMFPIAIACGNTFIMKPSEKDPSAVMRIAEFLTEAGLPAGVFNVVNGDKEAVDTLLSHEDIQAVSFVGSTPIAEYIYSTASKHGKRVQALGGAKNHMLLMPDADLDQAVSALMGAAYGSAGERCMAISVVLAVGDVGDKLVDKLLPQIQQLKVGNGLTPEMEMGPLISRQHHAKVTEFVDAGVQEGATLVVDGRQLTVADHQQGYFLGACLFDNVTPEMRIYREEIFGPVLSIVRVKDYASALALINQHEFGNGTAIFTQSGEAARHFCHHVQVGMVGVNVPIPVPMAFHSFGGWKRSLFGPLHMHGPDGVRFYTKRKAITARWPVGKQTQAEFVMPTMK

SEQ ID NO: 12688 - protein, 366 aa, Photobacterium profundum SS9
MTLSNLSSFFTCRVTKDSVILPPVIFHNKLSRGATVMTIKVGINGFGRIGRFVFRASVERNDIEVVGINDLIDVEYMAYMLKYDSTHGRFNGTVEVVDGNLVVNGNTVRVTAVRNPEELKWDEIGVDVVAEATGLFLTDETARKHITAGAKKVVLTGPSGDVPMFVMGVNSADYAGQDIVSNASCTTNCLAPIAKVINDKWGIESGLMTTVHATTATQKTVDGPSMKDWRGGRGASQNIIPSSTGAAKAVGKVIPELNGLLTGMAFRVPTANVSVVDLTVNLKTAATYEEICAEMKRASENEFAGVLGYTEDAVVSQDFIGEVQTSVFDAKAGVALTDKFVKLVSWYDNEIGYSNKVLDLIAHVSK

SEQ ID NO: 12689 - protein, 913 aa, Oryza sativa (japonica cultivar-group)
MVLPPRLLLFFLLLIGVHASVSHGSPSLPPTYDPSICSNLDGSKQTPFIQLNGENYTILEIIYDSRTIVLADTDALRGSCPRVRHNVTFGQAYPWLQYTGSRDNLTFFFGCKLNLPPPIDPGLVSLADKHQINCKDFSNWPDSGDSFVFTSGELEAPVESELARCCSQVIVVPVNGSVLNSSNQSALPSGGYGQVLKMGFDLAWNSSKDEQCYKCEQSKGHCSYSQNRAFLGCLCSDGKVSTKDCRNNGASNSSALTMLLSLCLRLLPLLLVLVAASHGDASGDTYDTSMCLQKPTTCGNVSISYPFYFATKTKDINGSSNSYCGYPGLAIDCDDGKPILQLNGTEKYKVNYINYGSITNVSLADLEVVDDSSGCPRVDHNVTIPQISWLFFSGISVDYLVFFLRCSFTTFAPKPANFNPIACGSFINLTRPSFVFPDELVPPGNWSQLCEETFEVPVLKYQLMEMDSNGNAWNNSGYAQVLRQGFQLSVNESRRPPNCSQCEESQGRCGYSQAGEFIGCLCPNGRVRSLRCDPSDLAGYAVMDKTRYSILMPFSVPNFLHANIIAGTSSVLLLCLLSFACLFGLKKSRYRRISKGTPRIESFLQRNGTLHPKRYTYTEVKRMTKSFAEKLGHGGFGAVYRGNLSDGRQVAVKMLKDSKGDGEEFINEVASISRTSHVNVVTLLGFCLHGSKRVLIYEYMPNGSLERYAFRNNSEGEHSLTWEKLFDVVVGIARGLEYLHRGCNTRIVHFDIKPHNILLDQEFCPKISDFGMAKLCSNKESIISIAGARGTIGYIAPEVYSKQFGAISSKSDVYSYGMMILEMVGARERNIDANSESSSHYFPQWIYEHLDEYCINSSEIDGETTELVRKMVVVALWCIQVVPTNRPTMTRVVEMLEGSTSGLELPPKVLLSW

SEQ ID NO: 12690 - protein, 756 aa, Silicibacter sp. TM1040
MEQTQPDTDGPLSQHNARFSPRGLLIRYAVIRARMYYARMFAAAGLTSVLAVIFGPFWPLVFFVLYLITDKAETTYLRGLPERLENGTSLAKAKRIIFVFSVLYAGSVCGFAAIPYVQMHTEAGAHEILAEPFFALCIVLGPALSAALDLRYVPLAASVRLLMLSLLPFGLTAHILLQNQTHGADLQLMVAGLVAFFFTQIWFVVMVQKRHRNSRRNLRSQALQRQALEDAYMRLFDQKQEARRLAMIAEHANDGVMLIGRDGIVRWANDGFSRLTGYTFDELVGQNPGKILNSENTDPAALRVIEAGREKGEPFRAELINRRKDGKEIWIETNQVPVFDDTGQIETYIAVERDVTATKEYERQLKEARLAAEEGARIKEEFLATMSHEFRTPMNGVIGMAQMLQATDLSEDQRLYTDTILGSSRALLALINDVLDLSHMNAAGVSLFNVDFDLHACVGDIVRLLSGQADEKHLELSVEIDPDVPVWVTGDDRRLRQILVNLLGNAVKFTTSGSIFIRLRGVVTGDQVALKIEVEDTGIGIPADKLEKIFERFSQADNAISRKYGGSGLGLSISRGLAQAMGGDIDVTSVEGEGACFTLMLDMGVADCPSIVADEAEDADSLPALDQLQGLRLLVAEDNRVNRLLIRKFLDDAPLELRFATNGAEAQELAKRFRPQVILMDMSMPEVNGLEATRAIRSFDITQPYIAALTANVDETSRQACVDAGMDTFLSKPLSRKELLNLLLTFSERARASERG

SEQ ID NO: 12691 - protein, 241 aa, Cupriavidus necator
MHATELNTGHGSQRAIRLAPSILSADFARLGEEVCAIEAGGADLVHFDVMDNHYVPNLTIGPLVCEAIRPLVSIPIDVHLMVEPVDALIPLFAKAGANIISFHPEASRHVDRTIGLIRDHGCKAGLVLNPATPLGWLDHTLDQLDLVLLMSVNPGFGGQAFIPGVLDKVRQARARIDRQVDAGGRPVWLEIDGGVKADNIAAIARAGADTFVAGSAVFGAPDADGGYSSILYRLREAATVT

SEQ ID NO: 12692 - protein, 658 aa, Oryza sativa (japonica cultivar-group)
MAHLPLLLLSFLVLIGVHASVSHGSPPLPSTYDPSICSKSSECGGVNISYPFYLSNATDYYTRFSCGYTDLKISCSRDRDGRNETPTILLGGDNYTVLDIIYDSHTIVLADTDALRGGSCPRVRHNITFAQADEWLQYTGPRDNLTFFFGCKLNLPPPIDPGLVSLADKHQINCKDFSNWPDSGDSFVFTSAELEAPVESELARRCRQVIVVPVNGDILNSSNQSALPSGGYGQVLNKGFDLAWNSRKDEQCYQCEQSQGHCSYSQNRVFLDCLCSDGKVGNQDCRNSGASNSSTLRYSSLKGRMKLYIIAGISSVLLLCLLSFPCLFSLKKYRHRRISKGTPRIESFLQRNGTLHPKRYTYTEVKRMTKSFAEKLGHGGFGAVYRGNLSDGRQVAVKMLKDSKGDGEEFINEVASISRTSHVNVVTLLGFCLHRSKRALIYEYMPNGSLERYAFRNNSKGELSLTWEKLFDVAVGIARGLEYLHRGCSTRIVHFDIKPHNILLDQEFCPKISDFGMAKLCANKESIVSIAGARGTIGYIAPEVYSKQFGAISSKSDVYSYGMMILEMVGARERNIEANSESSSHYFPQWIYEHLDEYCISSSEIDGETTELVRKMVVVALWCIQVVPTNRPTMTRVVEMLEGSTSGLELPPKVLLSW

SEQ ID NO: 12693 - protein, 234 aa, Candida glabrata CBS 138
MVVMPGDELALDQGKPVVLGPGVYCDPQTQTVVPVNAGVPVVKESAKRQTVYVEYNSKRYIPSVGDLVIGVITSTFSDSYRVSLSSFSNSVSLSYMAFPNASKKNRPTLKVGDLVYARVSSAEKELEAEIECLDSTTGESAGFGLLEGGMVIDVTLAFARRLLFNDNFPLLLLLSKRTQFEVAIGVNGKVWIKCDEVKYTMACFRSIMKCQDQPVSQYKDIIKQEFDSLPKEED

SEQ ID NO: 12694 - protein, 503 aa, Arabidopsis thaliana
MASLLLTSSSMITTSCPSMVLRSGLPIGSSFPSLRLTRPYDKATLFVSCCSAESKKVATSATDLKPIMERRPEYIPNKLPHKNYVRVLDTTLRDGEQSPGAALTPPQKLEIARQLAKLRVDIMEVGFPVSSEEEFEAIKTIAKTVGNEVDEETGYVPVICGIARCKKRDIEATWEALKYAKRPRVMLFTSTSEIHMKYKLKKTKEEVIEMAVNSVKYAKSLGFKDIQFGCEDGGRTEKDFICKILGESIKAGATTVGFADTVGINMPQEFGELVAYVIENTPGADDIVFAIHCHNDLGVATANTISGICAGARQVEVTINGIGERSGNAPLEEVVMALKCRGESLMDGVYTKIDSRQIMATSKMVQEHTGMYVQPHKPIVGDNCFVHESGIHQDGILKNRSTYEILSPEDVGIVKSENSGIVLGKLSGRHAVKDRLKELGYEISDEKFNDIFSRYRELTKDKKRITDADLKALVVNGAEISSEKLNSKGINDLMSSPQISAVV

SEQ ID NO: 12695 - protein, 422 aa, Burkholderia sp. 383
MNTRRIVVTGMGMVSPLGCGVESVWSRLLKGHSGVVSLPDDVTDGIASKVGGVVPVLTPDCPWGFDPALAADPKDQKKMDRFSLFALGAAQEALNQSGWRPETESARERTATIVASGVGGFGAIVEAVRITDDRGPRRLSPFTVPSFLANMAAGHISIRHGLRGPLGAPVTACAASAQAIGDAARLIRAGEADIAVCGGAEACIDRVSLGSFAAARTMSTGFNDHPAQASRPFDAGRDGFVMGEGAGMLVIEALEHALRRGATPIAEVLGYGTSADAYHMTSPPEDGAGGRRAMELAIRQANLEPELIGHLNAHATSTPVGDISELAAIKTVFGSGRGPAVSATKASTGHLLGAAGGVEAIFTVLALRDQLAPPTLNLTQPDSAAEGIDIVTGSARRISTEYAISNGFGFGGVNASLVFRRL

SEQ ID NO: 12696 - protein, 424 aa, Sinorhizobium meliloti
MARIVMKFGGTSVADLNRIHNVARHVKREVDAGHEVAVVVSAMSGKTNELVGWVENMPKVAGSNAPFYDAREYDAVVASGEQVTSGLLAIALQSMGINARSWQGWQLPIKTDNAHGAARILEIDGADVIRRMGEGQVAVVAGFQGLGPDNRLATLGRGGSDTSAVAIAAAVKADRCDIYTDVDGVYTTDPRIEPKARRLKKIAFEEMLEMASLGAKVLQVRSVELAMVHKVRTFVRSSFEDPDAPGMGDLMNPPGTLICDEDEIVEQEVVTGIAYAKDEAQISLRRLADRPGVSAAIFGPLAEAHINVDMIVQNISEDGSKTDMTFTVPSGDVDKALRVLGDNKEKIGYDVIQSESGLVKVSVIGIGMRSHAGVAASAFRALADKGINIKAITTSEIKISILIDGPYAELAVRTLHSVYGLDKS

SEQ ID NO: 12697 - protein, 363 aa, Pseudomonas fluorescens PfO-1
MALNSIEELVEDIRQGKMVILMDDEDRENEGDLIMAAECCKAEHINFMAKYARGLICMPMSRERCETLKLPLMAPRNGSGFGTKFTVSIEAAEGVTTGISAADRARTVQAAAAKDAKAEDIVSPGHIFPLMAQAGGTLARAGHTEAACDLARMAGFEPSGVICEVMNDDGTMSRRAELEAFAAEHDIKIGTIADLIHYRMIHERTVQRIAEQPLDSELGQFNLVTYRDSVEGDVHMALTLGTVCAEEPTLVRVHNMDPLRDLLMVKQPGRWSLRAAMAAVAEAGSGVVLLLGHPLDGDVLLAHIRETGDQAAVKKPTTYSIVGAGSQILRDLGVRKMRLMSAPMKFNAISGFDLEVVEYVPSE

SEQ ID NO: 12698 - protein, 554 aa, Pseudomonas syringae pv. tomato str. DC3000
MAYYRNPSDVTAMPAWQALTKHRQAMQDFSMREAFTDDPKRFSQFTLSSAGLFLDYSKNLITAETRDLLVALAGEVGLKDAIKAQYYGELVNSSEGRPALHTALRRPVGDKLKVNGVDVIPDVHRVLNQMTELVGRIHDGLWRGYTEKPITDVVNIGIGGSFLGPELVSEALVAYAHKGVRCHYLANIDGSEFHELSMKIRAETTLFIVSSKSFNTLETLKNAQAARAWYLAQGGSEVELHRHFIAVSSNNAAAVAFGIREENIFPMWDWVGGRYSLWSAIGLPIALAIGMSNFKELLSGAYTMDQHFQSAPFDQNMPVLLALLGVWYGNFWNAQSHAILPYDHYLRNITKHLQQLDMESNGKSVRQDGTPALTDTGPVIWGGVGANGQHAYHQLLHQGTQMIPADFIVPIVSFNPVADHHQWLYANCLSQSQALMMGKTRAEAEAELRDKGMSEEEVQKLAPHKVIPGNRPSNTLVVERISPRRLGALVAMYEHKVFVQSVIWGTNAFDQWGVELGKEMGKAVYQRLTGGTEEPADDASTQGLINYFRGRHRG

SEQ ID NO: 12699 - protein, 120 aa, Triticum aestivum
  misc_feature (32)..(32): Xaa can be any naturally occurring amino acid
MEIESVKCECCGLREDCTPDYIASVRAGFYGXQWLCGLCCEAVRDEAGRKKQAHPGVEEAVRAHMAFCKKFKSNPAVRVADGMRQMLRRRSGDLSKPPGSSSSNKYGTAQVGDDSPVSLY

SEQ ID NO: 12700 - protein, 126 aa, Triticum aestivum
  misc_feature (89)..(89): Xaa can be any naturally occurring amino acid
  misc_feature (109)..(109): Xaa can be any naturally occurring amino acid
MAASMITSPIVAPTSVPSLSRRGSSFAVVCSGGKKIKVDKPLGLGGGLTVDIDANGRKVGKKGVYQFVDKYGANVDGYSPIYTPEEWSXLGDRYAGGTTGLLIWAVTSXLLGGGVLLVYNTSALAG

SEQ ID NO: 12701 - protein, 290 aa, Pseudomonas fluorescens PfO-1
MSQQTPYIFDATTADFDQSVIEASFQKPVLVDFWAEWCAPCKALMPMLQGIAESYQGELLLAKVNCDIEQDIVARFGIRSLPTVVLFKDGQPVDGFAGAQPESAVRALLEPHVQMPAPSAADPFEQAQALFDEGRYADAEAKLVVLLGEDNTNAKALILYARCLTERGELGEAQTVLDAVKSDEHKAALAGAKAQIKFLGLARDLPDAADLKSRLAQNPQDDEAVYQLAIQQLARQQYEAALDALLKLFIRNRSYGEGLPHKTLLQVFELLGNDHPLVTAYRRKVFAALY

SEQ ID NO: 12702 - protein, 590 aa, Pseudomonas syringae pv. tomato str. DC3000
MCGLAGELRFDHQPADLAAVERITHELAPRGPDAWGFHSQGPIALGHRRLKIMDLSDGSAQPMIDSNLGLSMAFNGAIYNFPELRAELESLGYQFHSGGDTEVLLKGYHAWGAEMLPKLNGMFAFAIWERDSKQLFIARDRLGVKPLYLSKTDKRLRFASSLPALLKGGDISGMLDPVALNHYLNFHAVVPAPRTLLAGVEKLPPASWMRIDASGKVEQKVWWTLPYGPHEDEKNLTLEDWRDRVLDSTREAVAIRQRAAVDVGVLLSGGVDSSMLVGLLREVGVEDLSTFSIGFQDAGGERGDEFQYSDLIAKHYGTRHHQLRIQESEIIEQLPAAFRAMSEPMVSHDCIAFYLLSREVAKHCKVVQSGQGADELFAGYHWYPQVDGASDPVAAYRYAFVDRSYAEYADTVQPKWRTANDAAGDFVRDHFAQPGASAAVDKALRLDSTVMLVDDPVKRVDNMTMAWGLEARTPFLDYRLVELSARIPGKFKLPDGGKQVLKEAARLVIPSEVIDRKKGYFPVPGLKHLQGDTLNWVRELLTDPSQDRGLFNPTMVDKLLTNPEGQLTPLRGSKLWQLAALNLWLSEQGL

SEQ ID NO: 12703 - protein, 947 aa, Oceanicola granulosus HTCC2516
MTFKPTDYLPYDFANRRHIGPSPAEMDEMLDVVGADSLEALIDDTLPPKIRQAAPLDFGKPLSERELLHRMKVTASKNEVLVSLIGQGYHGTVTPPAIQRNILENPAWYTAYTPYQPEISQGRLEALLNFQTMVSDLTGLEIANASLLDEATACAEAMTMAQRVSKSKLKAFFVDESCHPQNISVMKTRAAPLGIEVIVGAPDTLDPGSVFGAIFQYPGTHGHLRDFTDEMSALHEHKAIGIVAADPMALCLLKEPGAMGADIAVGSTQRFGVPIGYGGPHAAYMATKQAYARNMPGRIVGVSIDSHGNRAYRLALQTREQHIRREKATSNVCTAQALLAVMAGFYAVFHGPEGLKAIAQRIHRKTVRLAEGLAEAGFDVAPKSFFDTITVEVGGRQSAILQAAVDEGINLRRVADGRIGITLDERTRPATIQAVWRAFGIDRRDDDYTPRYRLPESLVRSSAYLTHPVFHMNRAETEMMRYMRRLSDRDLALDRAMIPLGSCTMKLNSAAEMMPVTWDEFSLLHPYAPREQAAGYTEMIDDLSAKLCDVTGYDAISMQPNSGAQGEYAGLLTIAGHHRARGEGHRNICLIPMSAHGTNPASAQMVGWKVVPIKSAANGDIDLDDFRAKAEQYADTLAASMITYPSTHGVFEETVIEVCRITHEHGGQVYIDGANMNAMVGLSRPGDLGGDVSHLNLHKTFCIPHGGGGPGMGPIGVKSHLVEHLPGDPATGEGAVSAAPFGSPSLLPISWAYCLMMGGEGLTQATRVAILNANYIARRLDGAYDVLYKGPSGRVAHECIIDTRPFADSAGVTVDDIAKRLVDCGFHAPTMSWPVAGTLMIEPTESETKAELDRFCDAMLAIRAEIADIEEGRADREANPLKNAPHTMEDLVRDWDRPYSRETGCFPPGAFRVDKYWPPVNRVDNAWGDRNLTCTCPPMEAYKDAAE

SEQ ID NO: 12704 - protein, 440 aa, Chlamydophila caviae GPIC
MSPVVYKFGGTSLGTAESIRKVYAIVCKNTPRFIVVSAVAGITDLLDMFCCVSSEYREQIVLDIAKKHDEIIHELQLAFSLSPWIEKLNKWVDKKEISLGDRAEILALGEDISASLFQAFCHSNNFPIEFLEARTVILTDDEYHRATPDISRMRENWHTLNLKGDACYITQGFIGASTSGKTTVLGRGGSDYSGALIAEMSCAEEVRIYTDVNGIYTMDPRIIEDAQLIPELSFEEMQNLATFGAKILYPPMLSPCVRAGIPIFVTSTFDVSKGGTWIYAMDKTVSYEPRVKALSLRQHQRLWSVDCGILGAVSLDKILPILDTYRILPGLITSQDAKVSFTTDDDDISEEIIQDLYSQLSNIGTVHMLYDLALITMIGSGLASTKVVTTVTDKLRNYPAPVFCCCQSCMALSLVVPENLAGSIVEQLHNDYVKQKFSVV

SEQ ID NO: 12705 - protein, 448 aa, Methanocaldococcus jannaschii
MRAIIIGSGAAGLTTASTIRKYNKDMEIVVITKEKEIAYSPCAIPYVIEGAIKSFDDIIMHTPEDYKRERNIDILTETTVIDVDSKNNKIKCVDKDGNEFEMNYDYLVLATGAEPFIPPIEGKDLDGVFKVRTIEDGRAILKYIEENGCKKVAVVGAGAIGLEMAYGLKCRGLDVLVVEMAPQVLPRFLDPDMAEIVQKYLEKEGIKVMLSKPLEKIVGKEKVEAVYVDGKLYDVDMVIMATGVRPNIELAKKAGCKIGKFAIEVNEKMQTSIPNIYAVGDCVEVIDFITGEKTLSPFGTAAVRQGKVAGKNIAGVEAKFYPVLNSAVSKIGDLEIGGTGLTAFSANLKRIPIVIGRAKALTRARYYPGGKEIEIKMIFNEDGKVVGCQIVGGERVAERIDAMSIAIFKKVSAEELANMEFCYAPPVSMVHEPLSLAAEDALKKLSNK

SEQ ID NO: 12706 - protein, 157 aa, Bacillus halodurans C-125
MSIHEFSARLINGEEKALSDYKDQVLLIVNTASKCGLTPQYEELQILYETYKDQGFTVLGFPSNQFMNQEPGDHNEIAAFCERNYGVSFPIFEKVKVNGKEAHPLFQYLTSQQGGLFTEKIKWNFTKFLIDRSGNVVKRYAPSTSPIKIKDDIEELL

SEQ ID NO: 12707 - protein, 657 aa, Oryza sativa (japonica cultivar-group)
MDFTNLLITVLLLLSPLKYESDVATASDDEDFFKTCSSQRCSKHGPEIRYPFRLSTQPPSCGAPGMQLSCSGQDTILDHPVLGSCKVTMIYYRHVIMNAIPLVDSLPHCPLQKLVSVNQSTAVYKPHTSEVASVVGCSRDSIDTNQYGIVGPTSCPSLANNASQFWYLAYPYTYMSILPLGCTIVSKDIPMPYSYDKNGPNFDISIFTETAKRVISTGETVFTWYTSNVTSICQQCEREGRRCGFSSQRESSILPASYVNRVETRTYPSYTTLVRKLCTCIFPAMLCKIIESGPRVTIIAATSSVGTFIVLSLIVATALYISLKSRYNEEIHLKVEMFLKTYGTSKPTRYTFSEVKKIARRFKDKLGHGAFGTVYKGELPNGVPVAVKMLENSVGEGQEFINEVATIGRIHHANIVRLLGFCSEGTRRALIYELMPNESLEKYIFPHGSNISRELLVPDKMLDIALGIARGMEYLHQGCNQRILHFDIKPHNILLDYSFNPKISDFGLAKLCARDQSIVTLTAARGTMGYIAPELYSRNFGAISYKSDVYSFGMLVLEMVSGRRNTDPPAENQNEFYFPEWVFERVMNGQDLVLTMETTQGEKEMVRQLAIVALWCIQWNPKDRPSMTKVVNMLTGRLQNLQVPPKPFISSQNQLVI

SEQ ID NO: 12708 - protein, 503 aa, Arabidopsis thaliana
MASLLLTSSSMITTSCPSMVLRSGLPIGSSFPSLRLTRPYDKATLFVSCCSAESKKVATSATDLKPIMERRPEYIPNKLPHKNYVRVLDTTLRDGEQSPGAALTPPQKLEIARQLAKLRVDIMEVGFPVSSEEEFEAIKTIAKTVGNEVDEETGYAPVICGIARCKKRDIEATWEALKYAKRPRVMLFTSTSEIHMKYKLKKTKEEVIEMAVNSVKYAKSLGFKDIQFGCEDGGRTEKDFLCKILGESIKAGATTVGFADTVGINMPQEFGELVAYVIENTPGADDIVFAIHCHNDLGVATANTISGICAGARQVEVTINGIGERSGNAPLEEVVMALKCRGESLMDGVYTKIDSRQIMATSKMVQEHTGMYVQPHKPIVGDNCFVHESGIHQDGILKNRSTYEILSPEDVGIVKSENSGIVLGKLSGRHAVKDRLKELGYEISDEKFNDIFSRYRELTKDKKRITDADLKALVVNGAEISSEKLNSKGINDLMSSPQISAVV

SEQ ID NO: 12709 - protein, 747 aa, Bacteroides fragilis NCTC 9343
MDTENQKEIAEEQMIEQAFQELLNDYLATKHRKRIEIITKAFNFANQAHKGIKRRSGEPYIMHPIAVAKIVCNEIGLGSTSICAALLHDVVEDTDYTVEDIENIFGAKIAQIVDGLTKISGGIFGDRASAQAENFKKLLLTMSDDIRVILIKIADRLHNMRTLGSMLPNKQYKIAGETLYIYAPLANRLGLYKIKTELENLSFKYEHPEEYQEIEEKLNATAAERDMVFNEFTAPIREQLDKMGLKYRILARVKSIYSIWNKMQTKHVPFEEIYDLLAVRIIFEPRNIDEELNDCFDIYVSISKIYKPHPDRLRDWVSHPKANGYQALHVTLMGNNGQWIEVQIRSERMNDVAEQGFAAHWKYKEGGGSEDEGELEKWLRTIKEILDDPQPDAIDFLDTIKLNLFASEIFVFTPKGELKTMPQNSTALDFAFSLHTDIGSHCIGAKVNHKLVPLSHKLQSGDQVEILTSKSQRVQPQWEVFATTARARAKIAAILRKERKTFQKEGEELLNEFFKKEEIRPEAAVIEKLCKLHNMKNEEEFLVAIGNKTIVLGDADKNELKEKQSSNWMKYLTFSFGNNKDKQQEEKEPQEKEKINTKQILKLTEDALQKKYIMAECCHPIPGDDVLGYMDENDRIIIHKRQCPVAAKLKSSYGNRIIATEWDTHKKLSFLVYIYIKGIDNVGLLNEITQVISRQLNVNIRKLDMETDDGIFEGKVQLYVHDVEDVKAICNNLRKIPNIKSVTRVEN

SEQ ID NO: 12710 - protein, 650 aa, Oryza sativa (japonica cultivar-group)
MRVIYVLCVLGVLVPDAAGGRRHHRRHDCPPFTCGHLSDVSFPFRRRGDPPECGVQSYELTCADDKATIQIDKETYSVSDINYGDSTLWVVDASFLDSRSSCLLPRWNPLLRDPRLQAKSHHIIELAPPVGVTWASFVNCSQEIRNSSWMYMPVACLSTSRSFVYVFTGQQSAYIQNLEPSCGYLATTPLGGSKLNSTSALQNVSYQDVVKLMMTGFAVRFPFTVSGWNFKECLALSIRIANIAIIDFYFWSCFLLGDRSHNNLIYTYMVVDTALLILKWTAVLCRFVLAPLAVFIFLAHKYWRNKITIDAVEKFLQMQLTLGPTRYAYTDLTAITGHFGEKLGQGGYGSVYKGVLPGYVNVAVKVLENANCNGEEFISEVSTIGRIHHVNVVRLVGFCSEELRRALVYEYMPRGSLDKYIFSSKRSFSWDKLNEIALGIARGINYLHQGCDMQILHFDIKPHNILLDDNFVPKVADFGLAKLYPRDNSFVPLNALRGTIGYIAPEMISRSFGVISSKSDVYSFGMLLLEMAGGRRNSDMHAGNSSQAYYPSWVYDRLIEQQVGVGEISAATVANMHELERKLCIIGLHCIQMKSHDRPTMSEVIEMLEGGVVGLQMPPRPFFCDDESMSPMMDSYQFSSGLTEILEEDE

SEQ ID NO: 12711 - protein, 174 aa, Pyrus communis
YHLFYQYNPKGVVWGNIVWAHSTSTDLVNWTPHDAAIFPSQPSDINGCWSGSATILPSGKPVILYTGINPQNQQVQNLAFPKNLSDPFLREWVKVPQNPLMAPTQANRINASSFRDPTTAWLGPDKRWRVIIGSKQNQRGLAILYRSKDFLHWVKAKHPLHSAKKTGMWECPDF

SEQ ID NO: 12712 - protein, 265 aa, Oryza sativa
MAATLFSTALSPHLLPLPSTSSNPASSSLSFLSKPLLPALAVAGWPRRRTSPFVPVAVAVSEEVETEEDEEEEEEGSGGEEFSDDLRVFVGNLPFSVDSAQLAGLFEQAGSVEMVEVIYDKLTGRSRGFGFVTMSSVEEVEAAVEQFNGYILDGRSLRVNSGPPPPREQSSQRAPRGEANRVYVGNLSWGVDNAALANLFSGEGEVLEAKVIYDRESGRSRGFGFVTYGSAEEVENAVSNLDGADMDGRQIRVTVAESKPPRRQY

SEQ ID NO: 12713 - protein, 233 aa, Arabidopsis thaliana
  misc_feature (217)..(217): Xaa can be any naturally occurring amino acid
CWVSGTVYVDMPLKPNILDDIAKDHWASALPPRQKYLSSVGEELVMLEDESGRLRLTGAPLKNQILVTGCVIAVMGTENSNGDFEVVDIKIPDLPPQTERRDAFASKNKNRDQAESIKNDDFQAKDTTEPTSHGKKIAIVSGLGFSGTDADHSVEIQLLVEYLIGEAFDPTIQNSVSQISRLIIAGNSITPDDIKVSHEITSATRKPQKKYGYDSSXYNPTPLAHLDYFLSCL

SEQ ID NO: 12714 - protein, 605 aa, Ashbya gossypii ATCC 10895
MFRHTLIRLAIGAGRSVTPHKPTYRNMLRDPSKKYKAPLKVPLARRDWPAKTISRAPRWLSTDLRDGNQALSDPMSLEQKKAFFHKLIEIGFKEIEVAFPSASQTDFDFTRYAVENAPDDVSIQCLVQSREHLIRRTVEALRGARRATVHTYLATSDMFREIVFNMTREEAITKAVEATRLVRSLTKDDPAQQSTRWTYEFSPECFSETPVEYAVEVCEAVKAAWEPTEDNPIIFNLPATVEVASPNVYADQIEYFCKHISEREKVCVSMHTHNDRGCAVAATELGLLAGADRVEGCLFGSGERTGNVDLVTVALNMYTHGISPELDFSDIPDVTRVVERCNKIQVHPRTPYGGDLVVCAFSGSHQDAIKKGFAYRDRAREPHWRMPYLPLDPADVGRDYEAVIRVNSQSGKGGAAWIIQKTLGLDMPRDMQTRFSTIVQDAADSAGRELQAAEIAALFSQTYNYDKRLSHLELLDYDITRHSPERRELRGIARAGGRQFALSGFGNGPVSAFVDALNNHLHSDLSVAQYAEHSLGSGSSTRAAAFILLSFTGPDGRRASRWGVGVSEDVADASTEAVVAAANCILEAGGLQLPKQVRDTISAQN

SEQ ID NO: 12715 - protein, 633 aa, Oryza sativa (japonica cultivar-group)
MAIPGAYAHAVQALATGILFVVVSLVLDHVEGRHHKCPSFSCGHLKGVSAPFRRAADPPGCGSKSYELVCSDTNATILIDNATYHVNEINYDYRRFWVVDANIAGSTCPLPQWNHLLDQYKRKVSGHRIEIELAPGAYNHAYFVRCSREVKDNGIYRPVTCASSNYSFIYVLLSSDSDNPGYIESLEPSCGYLAMTLLGDWSTTVPRNASYEDVKKFMRGGFTVRFPVNYGAGNINECLMDSISLSRLLLTPVRCMYYAVLCRFVLVPLAILTFLAHKYWKTRLAIDAVEKFLQMQQVLGPTRYAYTDLTAVTSHFRDKLGQGGYGSVYKGVLLSGDVHVAVKMLNGTSTYDGEEFISEVSTIGRIHHVNVVRLVGFCSEELRRALVYEYMPQGSLDKYIFSSERSFSWDKLNEIAIGIARGINYLHQGCDMQILHFDIKPHNILLDDNFVPKVADFGLAKLYPRNKSFVSDRALRGTVGYIAPEMVSRSFGVISSKCDVYSFGMLLLEMAGGRRNADPNTNPNASQSYYPSWVYGQLTGEQVGETSGAADMHELQKKLCLVGLWCIQMKSHDRPTMSETIEMLEGDVNALQVPPRPFFCDGDFMPNVMDSYLHSSELTAISEDDGAIEFASN

SEQ ID NO: 12716 - protein, 153 aa, Medicago truncatula
MGFTEKQEFLVNSSWESFKQNLPGYSVLFYTIILEKAPAAKGMFSFLKNTPEVKDSPQLQAHAEKVFQMVRDAAVQLRATGEVVLGYTKVGAIHIQRGVVDPHFVVVKEALLKTIKEASGDNWSEELNTAWEIAYDELAISIKKAVKLGMIYC

SEQ ID NO: 12717 - protein, 579 aa, Propionibacterium acnes KPA171202
MNVAEQLVQQLLDAGVRRIYGIVGDSLNPVVDAVRKTGGSVKGGIDWVHVRHEEAAAFAAAAEATLTGELAVCAGSCGPGNLHLINGLFDAYRSQVPVLAIASHVPSVQIGMSYFQETHPDRLFVECSDYCELVSTPEQAPRVMNSAIRHAVAGSTVSVITLPGDISDKKAAAPSPVFIPSRRPTIEPNPEDVRQLVKLLNDVRKVAIFAGAGVEGAHDEVLALADKLKAPIGHSLRGKDFIQYDNPFDVGMTGLLGYGAAAEGMNDADVLILLGTDFPYNQFLPDTLTVQVENRPEKLGRRTDVSFPIHADVKALCDAVTPLLKQHDDKFLKAAVKRHAKIMKAPVGSYTRNVEHMKPIHPEYVAHVLNEVADRDAIFTADTGMCNVWTARYIDPLGTRRLIGSFLHGSMANALPHAIGAQASHPGRQVISVSGDGGLSMLLGELVTARMLNLPIKVVAFNNSTLGMVKLEMLVNGLPDFGTDVHDVDYAGLAKAIGFHAERVDDPRNIRRALTDAMDFDGPALVEVITDPNALSLPPEIKGEQMIGFATAMSKIVLNRGAGEAVSMATSNMRNIPRF

SEQ ID NO: 12718 - protein, 382 aa, Solanum tuberosum
MASEVHAVVDAHSPPKTPTVCVTGAAGFIGSWLVMRLLERGYNVHATVRDPENQKKVKHLLELPKADTNLTLWKADLAVEGSFDEAIKGCQGVFHVATPMDFESKDPENEVIQPTVRGMLSIIESCAKAKTVKRLVFTSSAGTLDVQEDQKLFYDETSWSDLDFIYAKKMTGWMYFVSKILAEKAAMEEAKKNNINFISIIPPLVVGPFITPTFPPSLITALSLITGNEAHYGIIKQGQYVHLDDLCEAHIFLYEHPKAEGRFICSSHHAIIYDVAKMVRQKWPEYYVPTEFKGIDKDLPIVSFSSKKLMDMGFQFKYTLEDMYKGAIETCRQKQLLPFHTRSTAANGKDKEAIPIFTENYSSGKENAPVANCTGKFTNGEI

SEQ ID NO: 12719 - protein, 326 aa, Triticum aestivum
MAAPIPREWVGLQQFPAATQTKLHELLGKLKEENVSTLTILVMGKGGVGKSSTVNSIVGERVANVSAFQSEGLRPMMCSRTRAGFTLNIIDTPGLIEGGYINEQAVEIIKRFLLEKTIDVLLYVDRLDTYRMDTLDEQVIRAITNSLGKAIWRRTLVVLTHAQLSPPDGIDYNDFLARRSESLLRYIRSGAGIGKREYADFPLPIALAENSGRCKTNENGAKILPDGTPWIPNLMKEITIVVSNGSKSIHVDQKLIDGPNPNNRWKKYIPLILAVQYFFVVKGIRRAIHSDISNGKLDDWEQRYRDLVGSGNPVDQKVSSSRNPKA

SEQ ID NO: 12720 - protein, 657 aa, Ipomoea batatas
MASSPLTPSYDLENAAAAVYTPLPEQPHSAGVEIRDRKPFKIISGIILSSLFLLALILVAVNYQTPPSHAPPLSSGGDNSQPAAVIPPSRGVSQGVSEKAFRGGSGAGNGVSFAWSNLMLSWQRTSYHFQPVKNWMNDPNGPLYYKGWYHLFYQYNPDSAVWGNITWGHAVSTDLINWLHLPFAMVPDQWYDVNGVWTGSATILPDGRIVMLYTGDTDDYVQVQNLAFPANLSDPLLVDWVKYPNNPVIYPPPGIGVKDFRDPTTAWTAGSQNGQWLVTIGSKVGKTGISLVYETTNFTTFKLLDGVLHAVPGTGMWECVDLYPVSTTGENGLDTSVNGLDVKHVLKASLDDDKHDYYALGTYDPAKNKWTPDNTDLDVGIGLRLDYGKYYASKTFYDQNKQRRILWGWIGETDLEAVDLMKGWASLQAIPRTIVFDKKTGTNVLQWPVEEVESLRSGDPITAEANLEPGSVVPIHVSEGTQLDITASFEVDETLLETTSESHDSGYDCSNSGGAVTRGSLGPFGLLVVADEKLSELTPVYFYVAKGADGKAKTHFCADQTRSSMASGVEKEVYGSSVPVLDGENYSARILIDHSIVESFAQGGRTVITSRIYPTKAIFGAAKVFLFNNATKATVTASVKMWQMNSADIKRFPLDEL

SEQ ID NO: 12721 - protein, 487 aa, uncultured bacterium 561
MNIELTNPTLFRTEAYVNGEWIGADNGARLPVTNPATGALITDVAKTGAAETRRAIAAAETAMLSWRQKPAKQRAQVMRRWFDLIMANQEDLARIMTLEQGKTLAESRGEVAYGASYIEWFAEQAKRIDGDVIPAPSGDKRIICIKQPVGVCAAITPWNFPNAMITRKAAPALAAGCTIVIKPASETPLSALALAELAHQAGIPPGVLNVLAGSSSDIGAELTSNPTVRKLSFTGSTPIGKMLEAQCVPTLKKTSMELGGNAPFIVFDDADIDSAVQGALISKYRNSGQTCVCSNRLLVQAGIAEEFTAKLVAATESLKLGNGLDENVDLGPLVNAKAVNDVHELVQGSISAGAKLVLGGAPSNLGVCFYQPTILTGVRPEMPVFRNEIFGPVAPIISFETEAEAIELANDTEFGLASYFYTRDIGRVWRVAEALEYGIVGINEGIISNEMAPFGGVKESGSGREGSKYGIDDYLEIKYMLMGGLNQ

SEQ ID NO: 12722 - protein, 940 aa, Streptococcus thermophilus LMG 18311
MAFNKLESSNNQEIISEEVGILKELLDDATRGMAGEQGLTTIQHLVELYDEGDYEALTQAISEMTNDDMVVASRYFSLLPLLINISEDVDLAYEVNRKNNIDESYLGKLSETFDVVAESDNARDILENVNVVPVLTAHPTQVQRKTMLELTNHIHELLRKHRDVKDGLINKDKWYADLRRYVEIMMKTDIIREKKLKVKNEITNVMEYYNSSLIKAITKLSHEFKRLAVEKGIELDNPTPITMGMWIGGDRDGNPFVTAETLKLSATLQSEVILNYYIEKVDNLYRSFSLSSRLTEVSETVAEMAKLSPDTSVYRENEPYRRAFSYIQSKLIQTLLFFKAGNFSKERAAKRLSENVRLGSVSTGEVVADFVHDRLSQSLQAVSQQTTEFYETAEAFHDDLLAIKNSLLENDDSVLISGDFEELLQAVEVFGFYLATIDMRQDSSVHEACVAELLKSANIVDNYSELTEVEKVAVLLKELQEDPRTLSSTNVSKSETLEKELAIFRTARLLKDYLGEEVIKQHIISHTESVSDMFELAILLKEVGLVDTERARVQIVPLFETIEDLENSNEIMKQYLGYDIVKRWIKNSNNYQEIMLGYSDSNKDGGYLSSGWTLYKAQNELTNIGEERGIKITFFHGRGGTVGRGGGPSYDAITSQPFGTIKDRIRLTEQGEVIGNKYGNKDAAYYNLEMLVSATLDRMVTRQITDPDELVDFREIMDSIVQDSNRIYRDLVFGNEHFYDYFFEASPIKEVSSLNIGSRPAARKTITDISGLRAIPWVFSWSQNRIMLPGWYGVGSAFNHYIEAEEGNLEKLQHMFETWPFFRSLLSNVDMVLSKSDMNIAFHYAQLAESEEVRSVFNIILDEWQLTKNVILAIEKHDDFLEESPSLKASLGFRLPYFNVLNYIQIELIKRLRNNNLTDDEISLIHITINGIATGLRNSG

SEQ ID NO: 12723 - protein, 269 aa, Chromobacterium violaceum ATCC 12472
MGIHEEHNMARYLTLERLGKSAIITLSNLPANLLTTDGLNELTATLQALNADDDVRSVVITGAGDAFFSAGADLKQFAAGDKAAADTLLQAFADTLQAIRAYRGVTVAAVNGFALGGGLECALVCDYIIAERGAKLGLPEAKVGLIPAAGGTKTLADKVGVSWAKRIILGGEVVSAEQALKIGLIEEVVDQGFAKIVAVSLANKVAGQSPAAVAVARKLIEDSPNLTLDEHLKRERAATLGLVGGSEQLDGVAAFLAKRAPSWAQDDDD

SEQ ID NO: 12724 - protein, 519 aa, Magnaporthe grisea 70-15
MGVQDFANLFLGGRFSGSVTTAAMLLFLVVVLVVSGVRSIRSISARRRFIAENNCKPAPAWPQKDPILALDFILKGLANFKQKKFLDGWTKYYEDLGPTFTTKSAGMLYINTIDPENIKTVLATRFRDFSLAERVEIMGPLLGRGIFVTDGDEWAHSRALLRPNFAKEQVADLGMIDRHFSDLMALLRPHAADGTTVALQPLLMRMTMDTATEFLFGQSTRTLSVEQADSAGNAFSRAFQFSLNEMAHLFRLGPFRILRRQSRELKDSHDICRAYVDGFVDEAWAWKQGGKTDGRTNFLRDLVESTDNKQKVRDELLNILIAGRDTVASVLGSLFRVLAQRPEIWAKVRAEVAQFEGELPRYDQLRDLKYAKYCINEALRLWPAVPLNGRLAVRDTVLPRGGGPNGDEPVYVPKGSLVNYSVYSMHRRTDFYGADAEEFRPERWEGKIQGWQYLPFNGGPRICLGQQYALTEMLVVLVRFAQEFSHIESRESTPWQEELHLTVQPANGVQVALTAANTA

SEQ ID NO: 12725 - protein, 736 aa, Acidobacteria bacterium Ellin345
MATTKAEPKPATASTKAVNKTYEGLTREDLLRAYRLMYLSRRIDDREILLKRQQRVFFQISGAGHEAMLVAAGLLLKPGYDWFFPYYRDRALCLALGMTAEEMLLGAVGAAADPNSGGRQMPSHWGHKGLNIVTGSSPTGSQILHAVGCAEAGRLFNAHPDSAAKAEGDYREFKDVVFHGDEVSYVSCGDGTTSQGEFWEALSSASNNKLPVLFVVEDNGYAISTPVEVNTPGGNISKVVSGFPNFHFEECDGTEVLESYRAFKRAIDYIRAGKGPAFVHGHVIRPYSHSLSDDEKLYRPEAERKDEANRDPITKFYKWLVAESLATDKELKDLQTDVDTEVQDSSDRAVEAPIPALDSYSQHLYSSTLDPASAAFETRPQFPVHVEGETAVAPAKTMADLINACLKDEMKRDPRIVIFGEDVADCSREEYLKQKQVKGKGGVFKLTSGLQMEYGADRVFNSPLAEANIVGRATGMAVRGLKPVVEIQFFDYIWPAMHQLRNELPVVRWRSNGAFSSPAVIRVAIGGYLTGGAIYHSQCGESIFTHTPGMRVIFPSNALDANGLLRTAIRCDDPVLFLEHKRLYRETFGRSPYPGPDYMVPFGKAKIVKAGHDITVVTYGAVVPRALQAAQKIERENGVSVELIDLRTLNPYDFEAIAESIHKTNRVIVAHEDTLSWGYGAEIAARIADELFDELDAPVKRVAAKDTFVAYQPALEDVILPQSDDLFAAMLEMSKY

SEQ ID NO: 12726 - protein, 163 aa, Gemmata sp. Wa1-1
MIVLGSIPELTPLDPKTAKPSLPQRNRAPGRARPAVRSRRHEALGSVPSDSGPLGPARCETVGKKLYVGNLGYGVTDEQLRGMFGPYGSVQTAQVIMDRDTGRSKGFGFVEMNSDQEAQAAIAGMNGQMSEGRALTVNEAKPKESRSREGRGGGSRGGSGGRY

SEQ ID NO: 12727 - protein, 310 aa, Acinetobacter sp. ADP1
MAKILTITLNPAIDVTIELNELRLGEVNRQEHVQLHAAGKGLNVAQVLHDLGHTVIVSGFLGRENREIFDKHFHHMQFDNQFIYIDGETRQNIKVAESSGRMTDINGKGFIISEQNKTAFFAQIEACSVDIDHVVIAGSLPQGFSIDDFKSLISLLKKLNKKIAIDTSGKALATAIAMNPWLIKPNTDELEESFGKNVEQFSAQTELFKQLDSQIEHVVISMGENGVNWLNSGKALHAQPPKMTVKSTVGAGDSLLAGMLHGLVSNFTPEETLTTATAIASHAVSQVGFRIPTQDKLAHLKQQTTIKSLS

SEQ ID NO: 12728 - protein, 231 aa, Hordeum vulgare subsp. vulgare
MATMVALSSFAVVGRSAARSPVVAPRRRTLVVRAQTEVSLHVARTITVSVFGCLPASTITSRLDLTVNLFVYVQPDMDSAKETTSASTSPSPSQYTSPSPTTIPAAPKPVTKKANPSVWDALAFSGPAPERINGRLAMVGFVAALSVEAARGGGLLDQVGMWSSGLAWFLATAGVFSVASLLPLLQGQSVESKSSGIWSADAELWNGRFAMLGLVALAATEFITGAPFVNI

SEQ ID NO: 12729 - protein, 190 aa, Medicago truncatula
MVLVLALGDMHIPHRAPDIPAKFKSMLVPGKIQHIICTGNLCIKEVHDYLKTLCPDLHITRGEYDEDSRYPETKTLTIGQFKLGLCHGHQVIPWGDLDSLAMLQRQLDVDILVTGHTHQFTAYKHEGGVVINPGSASGAYSSMTYDVNPSFVLMDIDALRVVVYVYELIDGEVKVDKIDFKKTSTSVPAL

SEQ ID NO: 12730 - protein, 480 aa, Colwellia psychrerythraea 34H
MSESIFCNYINGTWVEGESSLANISPADISDVIGHYAQANQEQAEAALDAAIKGQLEWQESGLEQRYSVLMAIGDELIARKDELGKLLAREEGKTLPEGAGEIYRSGQFFHYYAAEVLRQMGETADSVRPGIEIETRREPVGVVGIITPWNFPVATAAWKIAPALAFGNSVVLKPANQVPASAWALTEIISRQGLPAGTFNLVMGPGAEVGDLLINSKKINALTFTGSLETGRKVAIATATNLVKCQLEMGSKNALIVLDDADLDNAVECAVGGAFFGTGQKCTASSRLIVTEGIHDRFVDAVVARMKQLVVGHPLREGVHIGAVADARQMKQNLNYLEIAKKEGGKLVSGGDVITEETEGYYLTPALFTETTNAMTINRDEAFAPIACVIKVKDYDEALATLNDTNYGLVGGICTQSLKYATHFKRNAQTGCAMVNLPTAGTDYHVPFGGRKDSSFGSREMGSYAKEFYTIVKTTYIRS

SEQ ID NO: 12731 - protein, 167 aa, Hordeum vulgare subsp. vulgare
MATMMAMSSFAGAAVLPRGSARSLPALGRRTLVVRAQTEGPNAPPPNKPKASTSIWDAMAFSGPAPERINGRLAMVGFVTALAVEAGRGDGLLSQLGSGTGQAWFAYTVAMLSMASLVPLLQGESAEGRAGAIMNANAELWNGRFAMIGLVALAATEIITGTPFINV

SEQ ID NO: 12732 - protein, 107 aa, Brucella suis 1330
MATVKVDNSNFQSDVLQSSEPVVVDFWAEWCGPCKTIAPALDEIAAEMAGQVKIAKVNIDENPELAAQFGVRSIPTLLMFKDGELAANMVGAAPKSRLADWIKASAA

SEQ ID NO: 12733 - protein, 670 aa, Ashbya gossypii ATCC 10895
MPLNEQFALLALDAECAAPVKQLVFKPKVAKSAIAVPVVVVALQSTTTPVGVVAHASGSKDPRLARDELFQSHFGVETAKAFDLSHLEQAQHGFQLLVDRELAALADEAAVGLSGVAVEKGALMAYLQKHGAVEVDFAQEVQAAAPKAKKGAAVVKESAALADAKLIGITVDKALDFPGWYQQVLVKGDLLDYYDISGCYILKPASYCIWERIQEWFNGKIRSMGVQNVCFPMFISSRALEKEKDHIEGFAPEVAWVTKAGSSDLEEPIAIRPTSETAMYPFFAKWVQSYRDLPLKYNQWTSVVRWEFKHPQPFLRTREFLWQEGHTAHLTKEEATDEVMQILDHYEQVYVELLAVPVVKGTKTENEKFAGADFTTSVEGYIPQTGRGIQGATSHHLGQNFSKMFNICVENPLGPQHPKVHAYQNSWGLSTRSIGVMVMTHSDNKGLVIPPRVAQHQVVILPVGITAKTKEDVRSKIHDSARAIENRLHKAGIRVLGDYADNYTPGWKFAQYELKGVPLRLEFGPKDMEKAQVTAVRRNDGAKISVPLADLEERIPQILDEMHQLLYQKAKKSFDDHLITVTEWKDFVPTLNKKNIILSPWCGVPECETDIKASSAKKDDGDEYEVDEKAPSMGAKSLCVPFEQPVLAPGQKCIKCDKPAVNYCMFGRSY

SEQ ID NO: 12734 - protein, 260 aa, Xanthomonas axonopodis pv. citri str. 306
MSNHVILIADHASVRTITVNRPDKLNALNQATMQALDQAFQDAAAADDVRAVILTGAGPKAFVAGADIAEMSDLSAIQGRAFSLLGQRLMRRIERMPKPVIAMINGFALGGGLELAMACHLRIAAATARLGQPEINLGLIPGFGGTQRLLRLTGRAAALELCLLGLPIDAARALQLGLVNRVVEADALHEETLALAQRLANAAPLALRGILDAVMFGGECAIEEGLQLEAAQFALLFATDDMREGTRAFLDKRPAQFRNR

SEQ ID NO: 12735 - protein, 147 aa, Medicago truncatula
MGFTEKQESLVNSSWESFKQNLSGYSVLFYTIILEKAPAAKGMFSFLKDTTGVQDSPQLQAHAAKVFEMVRDSAVQLRATGEVILGDATLGAIHIQKGVVDPHFVVVKEALLKTIKEAAGGNWSEELSTAWEVAYDGLAASIKKSMS

SEQ ID NO: 12736 - protein, 321 aa, Rhodospirillum rubrum ATCC 11170
MMTAIEKSKLRIGTRGSPLALAQTHQVRDLLIAANPDLGEPGAVTIEVIKTTGDAILDRPLSELGGKGLFTREIDDAMLAGTIDIAVHSMKDVPTYLPDGIVLPCMLEREDVRDAFLGRDHARLADLPEGSVVGTASLRRGAQILAMRPDIKVISFRGNVQTRLDKLARGEADATMLAIAGLNRLGMADKASSVLEIDEMLPAVAQGAVGVTCRAGDETAHRWLAPLNHRATQLCVEIERAFLTRLDGSCRTPIGGLARLKRVEDPSGTVFFRGMIIRTDGKVIHQTTREGLAADGIALGDDAGAELLAKAGPGFFQVGAL

SEQ ID NO: 12737 - protein, 311 aa, Ustilago maydis 521
MPATKIAPSVLASDLGNLNCECQRMMDSGADWLHMDIMDGHFVPNIVMGAPVIASVSKAVPNIFMDCHMMVSDPGKWVKDISEAGGASYTFHLEATDDPMDVVRQIKATKMRAAVAINPGTPASEISDELGNAVDMILVMTVWPGAGGQKFMKECMPKVAELRARFPDLDVEVDGGVGPKTIDRCADAGANIIVAGTAIFNHSSPKDVIKFLRTRCDEAQERIKRERERIARGEPVDHEIKHYEDGRKSGWQSGAITPLSYPRVYMSASKREKLRRESQGALERGERPTLSSLQGMSGLSITPAASAVEGK

SEQ ID NO: 12738 - protein, 333 aa, Pseudomonas fluorescens PfO-1
MTLRIAINGFGRIGRNVLRALYTQGYRQDLQIVAINDLGDSAINAHLLKYDTVHGTFDAEVAHDNESLTVNGDRISVSAIRNPADLPWAAEKIDVVFECTGLFTDRAKAAAHITAGARKVIISAPAKGADATVVYGVNHDILRQSHQIISNASCTTNCLAPVAQVLHRELGIESGLMTTIHAYTNDQNLTDVYHTDPYRARSATQNMIPSKTGAAEAVGLVLPELAGKLTGMAVRVPVINVSLVDLTVQLKREASADEVNALMKAASQHSKILGFNTLPLVSSDFNHNPLSSIFDANHTKASGKLLKVLAWYDNEWGFSNRMLDNCLALCNAE

SEQ ID NO: 12739 - protein, 497 aa, Nicotiana tabacum
MAQPVIFCREISASPANCTSYSPFHQVDGQSSVPFAASCLRVPKNCSLVAARCSLKPSMMPSALVTSRPQQVSTDPVNVVCDGKIGVLLLNLGGPESLEDVQPFLFNLFADPDIIRLPRLFRFLQRPLAQFISVARAPKSKEGYASIGGGSPLRRITDAQAEALRKALRERNVPAKVYVGMRYWHPFTEEAIELIKRDGITKLVVLPLYPQFSISTSGSSLRLLESIFREDEYLVNMQHTVIPSWYQREGYIKAMADLMEKELKSFERPGEVMIFFSAHGVPLAYVEEAGDPYKAEMEECVDLIMEELEKRRVYNAYTLAYQSRVGPVEWLKPYTDETIIELGKKGVKSILAVPISFVSEHIETLEEIDVEYKELALESGIQNWARVPALGVEPTFISDLADAVIESLPYVGAMAVSNLEARQSLVPLGSVEELLAAYDSHGRELPPPVTVWEWGWTKSAETWNGRAAMLAVLVLLVLEVTTGEGFLHQWGILPLFR

SEQ ID NO: 12740 - protein, 231 aa, Xanthobacter autotrophicus Py2
MKPPHRENHLIERIGWLRAAVLGANDGIISTASLMVGVAAASTNASEILVAGVASLVAGAMSMAAGEYVSVSSQADTENADLRKEQRELAEQPESELTELTQIYVRRGVEPALARQVAEQMTAKDAFTTHARDELGLAEHVVARPIQAALTSAVTFALGAAIPLVISLLAPTALIAPIVSGGSLVCLAALGALGARAGGADIWKPTIRVTFWGAIAMAATAAIGTLVGHAV

SEQ ID NO: 12741 - protein, 181 aa, Vasconcellea cundinamarcensis
YPQRMDWRKKGAVTPVKNQGGCGSCWTFSSVAAVEGINKIVTGQLLSLSEQELLDCERRSYGCRGGFPLYALQYVANSGIHLRQYYPYEGVQRQCRASQAKGPKVKTDGVGRVPRNNEQALIQRIAIQPVSIVVEAKGRAFQNYRGGIFAGPCGTSIDHAVQRLGTEMPLILKNSWGNFWG

SEQ ID NO: 12742 - protein, 962 aa, Shewanella sp. ANA-3
MTKQTLTQLEQHDLFLRRHIGPDSSQQQEMLNYVGAESLDDLTAQIVPESIRLSQELSIGDSCGEAEGIAYIRGLAKQNQVFKSYIGMGYYGTQVPNVILRNVFENPGWYTAYTPYQPEIAQGRLEAILNFQQVSMDLTGLDLASASLLDEATAAAEAMALAKRVSKAKKANIFFVADDVFPQTLDVVKTRAECFGFEVVVGPAHEAVNHELFGALFQYSNRFGQITDFTDLFAELRAKNVIVTVAADIMALVLLKSPGAMGADVVFGSAQRFGVPMGFGGPHAAFFVARDEHKRSMPGRIIGVSKDTRGNRALRMAMQTREQHIRREKANSNICTAQILLANMASFYAVFHGPQGLKTIASRINRFTDILAAGLQAKGVSLVNNTWFDTISIKGLDVAAVNARALAAEMNLRFDADGIVGVSLDETTIRTDIEALFDVILGAGHGLDVAALDAQIVAQGSQSIPASLVRQDAILSHPTFNRYQSETEMMRYIKRLESKDLALNYSMISLGSCTMKLNAAVEMIPVSWPEFANMHPFCPLDQAKGYTQLIEELSSWLVNVTGYDAVCIQPNSGAQGEYAGLLAIRKYHESRGEAHRNICLIPQSAHGTNPASAQLAGMQVVVTACDKQGNVDLEDLKAKAAEVAENLSCIMITYPSTHGVYEESIREICNIVHQHGGQVYLDGANMNAQVGLTSPGFIGADVSHLNLHKTFAIPHGGGGPGMGPIGVKAHLAPFVAGHVVVKPGRESDNNGAVSAAPYGSAGILPISWMYIKLLGSNGLKKSTQTALLNANYVMKKLSEHYPVLFRGRNDRVAHECIIDLRPIKEASGVTEMDIAKRLNDYGFHAPTMSFPVAGTLMIEPTESESKVELDRFIDAMVSIRAEIAKVEAGEWPADNNPLHNAPHTMADIMDPAFDSRPYSREVAVFPSAAVRTNKFWPTVNRIDDVYGDRNLFCACVPLSDYE

SEQ ID NO: 12743 - protein, 396 aa, Xylella fastidiosa Temecula1
MAQDKFKRTKLHVNVGTIGHVDHGKTTLTAALTKVGAERFGGEFKAYDAIDAAPEEKARGITISTAHVEYETEVRHYAHVDCPGHADYVKNMITGAAQMDGAILVCSAADGPMPQTREHILLARQVGVPYIVVFLNKADMVDDAELLELVEMEVRELLSKYDFPGDDTPIVRGSALKALEGDQSEIGVPAIIRLAEALDTHIPNPERAIDRPFLMPVEDVFSISGRGTVVTGRIECGVIKVGDEVEIVGIRPTSKTIVTGVEMFRKLLDQGQAGDNAGLLLRGTKRDEVERGQVLAKPGCIKAHKEFEAEVYVLSKEEGGRHTPFFNGYTPQFYMRTTDITGKVCLPEGVEMVMPGDNVKVTVSLINPVAMGEGQRFAIREGGRTVGAGVVSKVIG

SEQ ID NO: 12744 - protein, 422 aa, Zea mays
MAVEYHCCSAAFFEHIVIIIVLVLFAGLMSGLTLGLMSLSLVDLEVLAKSGTEQDRKHAAKILPVVKNQHLLLCTLLICNAAAMEALPIFLDSLVTAWGAILISVTLILLFGEILPQSICSHYGLAIGASVAPLVRVLVWVCFPIAYPISKLLDYVLGHGQTALFRRAELKTLVTLHGNEAGKGGELTHDETTIIAGALELTEKKAKDAMTPLCQTFAIDINAKLDRNLMQEVLEKGHSRVPVYYEKKTNIIGLILVKNLLSVSADDEVPIKSVTIRKIPRVLEEMPLYDILNEFQKGHSHMAVVIRKNNPSYQPAEQAANDGGTFEVSIAIDDKNNEKVVKNLPPPLQRWKSYPNTQNTSNRGNRPKKWSKDQADVLQVHKEPLPTLSEDEEAVGIITMEDVIEELLQEEIYDETDVHEEQ

SEQ ID NO: 12745 - protein, 420 aa, Bartonella henselae str. Houston-1
MRRVVITGLGLVSPLAGDVEYSWKRLLEGKSGVRRITEFDVSDLSCQIAARIPVGDGTNGTYNADLHMESKEQRKVDAFIVYAIAAADQALADAEWFPKSDEDQICTGVLIGSGIGGIEGIVEAGYTLRDKGPRRISPFFIPGRLINLASGYVSIKYGLRGPNHSVVTACSTGAHAIGDAARLIALGDADVMLAGGTESPINRISLAGFSACRALSTCRNDDPERASRPYDVDRDGFVMGEGAAIVVLEELEHAKKRGARIYAEIIGYGLSGDAYHITAPSESGEGAQRSMMAALKRAQVNVSELDYINAHGTSTMADVIELAAVERVLGYYAPQVSMSSTKSSIGHLLGAAGAAEAIFCVLAIRDNIAPATLNLENPSIETKIDLVPHKPRERKIDTVLSNSFGFGGTNASLVMRRFSE

SEQ ID NO: 12746 - protein, 114 aa, Glycine max
  misc_feature (32)..(32): Xaa can be any naturally occurring amino acid
  misc_feature (45)..(45): Xaa can be any naturally occurring amino acid
  misc_feature (72)..(72): Xaa can be any naturally occurring amino acid
GIGEYPPGGSLQVTVQALTWLFAKVEVKVWLXRSPACPQGAGNHXLKGALGELSENIDYGAGGVVFSKDVEXLGFGVPQKSNFYYRNIDGDGIVVFKQGNWGSLSSRITLAAFL

SEQ ID NO: 12747 - protein, 727 aa, Nocardioides sp. JS614
MGVLGLLVVGDGGPVADGAGARYRARGGEQSLRECGLARSCRAHEHHVADPVRAARRQILTRCSPVSAALFCHDRSSCHGSRCWDLGPTQLLIGPGNKGCWSRFASLTLVAPCLGWWVVSPCSRRSGTPSVKARRHPYSGSAWSTLKYDVPWPAPARSTAHLQGRTRGPRHAGAPAPPPGRHGARGCSGPPRQRVNPSLHGVSKGFLPTTRCSLRSRRIQGDTLPSACQRFHPRSRGARLGSMNGLDLLGPTQRGLLIGGTWRDAEGGKRLDVIDPADGSVLTDVADGSVADAVDALDAAVAAQADWAATPPRQRGELLRTAFELIIERSEQFAHLMSLEMGKTVAEAAGEVTYGAEFFRWYAEEAVRIHGRWMQAPGGGSRLLTIKKPVGPCLFITPWNFPLAMGTRKIGPAVAAGCTMVVKPASQTPLSMLALAAVLEEAGLPAGVLNVVTTSHTGEFSETLQADDRLRKVSFTGSTGVGRVLVRQSADRLQRVSMELGGNAPFLVFEDADVDAAVDGAMVAKMRNMGEACTAANRFLVHASVADDFAEKLGKRMGALSLGRGQDDGVDVGPLIDERAVESVSQLVTDAVHDGATVVTGGRPVDGPGYFYPPTVLLGVPADSEINVQEIFGPVAPITTFDSEADAIRMANDTEYGLASYVYTRDLARTIRLAEALEFGMVGVNTGLISNPAAPFGGVKSSGFGREGGFEGIEEYLETTYVALPAG

SEQ ID NO: 12748 - protein, 159 aa, Brassica napus
MVKARTVGVGMDYSPTSKSALRWTAENLLDDGDTIILIHVQPQNAEHTRKILFEETGSPLIPLEEFREVNFSKQYGLAYDPEVLDVLDTLSRAKKVKVVAKVYWGDPREKLCDAVENLKLDSIVLGSRGLGPLKRMLLGSVSNHVVTNATCPVTVVKAN

SEQ ID NO: 12749 - protein, 257 aa, Dianthus plumarius
GVFHIATPMDFESKDPENEMIKPTINGMLDILKSCVKAKVRRVVFTSSGGTVNVEATQKPVYDETCWSDLDFIRSVKMTGWMYFVSKILAEQAAWKYAAENNLDFISIIPPLVVGPFIMPSMPPSLITALSPITRTESHYTIIKQGQYVHLDDLCMSHIFLYENPKANGRYIASACAATIYDIAKMLREEYPEYNVPTKFKDYKEDMGQVQFSSKKLTDLGFEFKYGLKDMYTEAVETCRAKGLLPLSLEHHENGSA

SEQ ID NO: 12750 - protein, 534 aa, Arabidopsis thaliana
  misc_feature (198)..(198): Xaa can be any naturally occurring amino acid
  misc_feature (517)..(517): Xaa can be any naturally occurring amino acid
MADPSEQKEKVVKEKKEKVKKEKVVKEKVAKASSSGQKKKDVKKETGLGLSVKKDENFGEWYSEVCKQDMIEYYDISGCYILRPWSMAIWEIMQIFFDAEIKKMKVKNCYFPLFVSPGVLEKEKDHIEGFAPEVAWVTKSGKSDLEVPIAIRPTSETVMYPYYSKWIRGHRDLPLKLNQWCNVVRWEFSNPTPFIRSXREFLWQEGHTAFATKAEADEEVLQILELYRRIYEEYLAVPVVKGMKSENEKFAGGLYTTSVEAFIPNTGRGVQGATSHCLGQNFAKMFEINFENEKAETEMVWQNSWAYSTRTIGVMIMTHGDDKGLVLPPKVASVQVVVIPVPYKDANTQGIYDACTATASALCEAGIRAEEDLRDNYSPGWKYSDWEMKGVPLRIEIGPRDLENDQVRTVRRDNGVKEDIPRGSLVEHVKELLEKIQQNMYEVAKQKREACVQEVKTWDEFIKALNEKKLILAPWCDEEEVERDVKARTKGETGAAKTLCSPFDQPELPEGKPAKKXWTYWGQDCRSYKGILTR

SEQ ID NO: 12751 - protein, 1275 aa, Dechloromonas aromatica RCB
MSFLSKMASPSSALSFRKQIIRPVLVSTIALAILILLSFAAYLDWRERERTALATQQVERIWQGMVDNNGRYLRWMATQVANDHRFVEAMQRGDRDALLALAGPRYRELHAQFDLSHWYFITPDRKVLLRVHDPERSGDEVRRKGLLDAEASGQMTTGLELGTTSVFTLRQVMPWRVNGNVIGYVEMGMEVESFAREIKRLTGLDVLTAVHKAYSSAEAFANGKKAFGLSGNWGDHAEIALLSQSFPGVPASLIASWQGFVRGSDPGVFDVIKGERIWSAKLIALLDNDQHPVASMAILRDIAADRVSRTQLLFFVGTGSALFIVLLMLALHRRVGSVEQHVIQANDALAASNQRFRDFSESSADWLWETDANLRFSYFSENLQRICGIDPQKVLGKARSELWLNDEINKPDALAGHLAVLENREAFRDFEYCLLNDRGEHLWLLASGIPYFDKEGHFAGYRGIGQNITVRKDLELAAEKSAKLLREAVENVSVGFTIYDEEDRLVICNETYLDIYSDSSDLIVPGMHFADIIRKGAERGQYPEAQGDIDGWVCSRVAQHQHPDGLAIEQELNDGRWLLIIENRTPSGYIVGNRIDITARKQAERQLLLLSMAVEQSTEGILITDVDANIEYVNEAFVRISGFSREEAIGQTPRILDSGLTPRETYAEMWAVLSRGQLWQGELINKRKSGEIYTERLTIMPMRQDGRVTHYVAVKEDVTEKRRNADELERHRHHLEELVAERTAELAVAHEAAEAASRAKSAFLANMSHEIRTPMNAIVGLTYMLRRTITDSGQADKLGKIAASADHLLGVINDILDISKIEANKLALDQSEFNLEELLSRVTSMVIDRVREKRLELIIDTDASLGFLMGDATRLGQSLINYLGNAVKFTDYGSIVLRARLVEESSNDVLIRFEVEDTGIGVAPENLPRLFQVFEQGDSTTTRRYGGTGLGLAITRRLAQLMGGEAGVESTLGVGSTFWLTARLGRVRAATGRHRIPSLRGKRALVIDDMPVTRLVQSQLLRMIGLEGEGAAGGAVALQEIEAAEREGKPYDLVLVDLLMPGMDGFETLARLRALPLRQQPLAILVTASSDPEIIEDATRMGFAEALLKPLSPSMLNDCLVRHLADIPGQTGGMPLADKPAGSDAESILKADFSSARILLVEDEPINQDVALAILEEIGWKIDVAANGRESLALVEANDYQVVLMDMQMPVMDGLAATRQIRRLPGHETLPIIAMTANAFSEDRDRCVEAGMNDFLSKPVEPEVLYAMLLKWLRH

SEQ ID NO: 12752 - protein, 250 aa, Bordetella parapertussis
MYKLVLIRHGESQWNLENRFTGWTDVDLTETGREQARKAGELLKREGYAFDLAYTSVLKRAIRTLWIALDALDAMYTPVGINWRLNERHYGQLQGLNKAETAAKYGDEQVLIWRRAYAIAPEPLDLEDPRHPRFDGRYAKIPADQLPATECLKDTVARVLPFWNESIAPAIRAGRRVLVAAHGNSLRALIKHLDNVSDDDIVGVNIPTGQPLVYELDEDLKPIRHYYLGDAAEIEAAMAAVAAQGKAKKD

SEQ ID NO: 12753 - protein, 172 aa, Hordeum vulgare subsp. vulgare
MATMMSMSSFAGAAVVPRSSASSFGARSLPALGRRALVVRAQTEGPSAPPPNKPKASTSIWDEMAFSGPAPERINGRLAMVGFVTALAVEAGRGDGLLSQLGSGTGQAWFAYTVAVLSMASLVPLLQGESAEGRAGAIMNANAELWNGRFAMLGLVALAATEIITGAPFINV

SEQ ID NO: 12754 - protein, 501 aa, Thermoproteus tenax
MRAGLLEGVIKEKGGVPVYPSYLAGEWGGSGQEIEVKSPIDLATIAKVISPSREEVERTLDVLFKRGRWSARDMPGTERLAVLRKAADIIERNLDVFAEVLVMNAGKPKSAAVGEVKAAVDRLRLAELDLKKIGGDYIPGDWTYDTLETEGLVRREPLGVVAAITPFNYPLFDAVNKITYSFIYGNAVVVKPSISDPLPAAMAVKALLDAGFPPDAIALLNLPGKEAEKIVADDRVAAVSFTGSTEVGERVVKVGGVKQYVMELGGGDPAIVLEDADLDLAADKIARGIYSYAGQRCDAIKLVLAERPVYGKLVEEVAKRLSSLRVGDPRDPTVDVGPLISPSAVDEMMAAIEDAVEKGGRVLAGGRRLGPTYVQPTLVEAPADRVKDMVLYKREVFAPVASAVEVKDLDQAIELANGRPYGLDAAVFGRDVVKIRRAVRLLEVGAIYINDMPRHGIGYYPFGGRKKSGVFREGIGYAVEAVTAYKTIVFNYKGKGVWKYE

SEQ ID NO: 12755 - protein, 152 aa, Pyrobaculum aerophilum str. IM2
MSRPRRELPQPLKRLLKLRLLLKRKKPEFVRIDQWRYKRIEDSGWRNTRSIDNKIRRKWKGWPKPVEVGYRKPAAVRGLHPSGFVEVLVHNVEELAKLDPKTHAIRIGRTVGLRKRIEIVKRAREMGFYVLNPGKRVEEALKKELNTAQTGQ

SEQ ID NO: 12756 - protein, 651 aa, Pseudomonas aeruginosa PAO1
MSQRHGWDIRTRMLAISLGPALLLTLLLTAYFTYSRLQDLRQELTHTGQLIADQLAPAAEYGVIAGNTPVLQKLLQATLDTPHVRFIEVRDRNDNILVYVEQLSGALQNAAPIDIFHSTIQRQRIALASDPLLDGASEGDGQSGEDYLGRVVVGMSNDAFSQRQQEILLKAALLAAFALILTFLVARRLAQRLSAPISTMGQAVEAIQSGDYKTSLPILDDGEIGDLARHINNLASGLDRASREQEQAIGQLISAREEAEQANRAKSDFLAMMSHELRTPMNGVLGMLQLLETTEQTREQAEYTALATESTEHLLKVINDILDFSRIERGALELECIPFNLLELVQGSALVFQHSAQQRGLALELQIQAGLENIEVCGDPTRIRQILVNLLGNALKFTEEGAIHLSLEWQALDHDVLWLTCAVHDSGIGISPERLEHMFDAFQQADSSISRRYGGTGLGLAIARTLAERMGGTLQAESKEGSGSTFTLEIPLPFQQSPAHRQQAAGDAAPVAAGQEILLVEDNPVNQTVIEAMLRSLGYRVTLVADGIQAVRSAERQRYDAILMDCRLPVLDGYSATREIRAQENGRRVPIIALTANALQGDRENCLQAGMNDYLAKPFKRAELQRILQRWIGSQPELPVTSNETGRGEPE

SEQ ID NO: 12757 - protein, 473 aa, Zymomonas mobilis
MSSESSQGLVTRLALIAAIGGLLFGYDSAVIAAIGTPVDIHFIAPRHLSATAAASLSGMVVVAVLVGCVTGSLLSGWIGIRFGRRGGLLMSSICFVAAGFGAALTEKLFGTGGSALQIFCFFRFLAGLGIGVVSTLTPTYIAEIAPPDKRGQMVSGQQMAIVTGALTGYIFTWLLAHFGSIDWVNASGWCWSPASEGLIGIAFLLLLLTAPDTPHWLVMKGRHSEASKILARLEPQADPNLTIQKIKAGFDKAMDKSSAGLFAFGITVVFAGVSVAAFQQLVGINAVLYYAPQMFQNLGFGADTALLQTISIGVVNFIFTMIASRVVDRFGRKPLLIWGALGMAAMMAVLGCCFWFKVGGVLPLASVLLYIAVFGMSWGPVCWVVLSEMFPSSIKGAAMPIAVTGQWLANILVNFLFKVADGSPALNQTFNHGFSYLVFAALSILGGLIVARFVPETKGRSLDEIEEMWRSQK

SEQ ID NO: 12758 - protein, 505 aa, Acidobacteria bacterium Ellin345
MSNLNDKITKVATHVSQNEDLIFEKSSPGKKAYRLPPLDVPDVDERALLGAEYVREDLGNMPEVSEIEIIRHFTRMSTWNYAVDYGMYPLGSCTMKYNARINEVVARLDGIAGAHPYQPEKLSQGNLRIMKMLADQLVEITGMDSITLQPAAGAHGEMTGILLIRAYLESQGNPRKKILIPDSAHGTNPATAAICGYQVENLKSNSAGLTDIPSLVAQMNEDVAALMLTNPNTLGVFEQEIHKIADILHEKGGQLYMDGANMNALVGKTRPGDFGVDVMHLNLHKTFSTPHGGGGPGSGPVAIKKHLEPFLPKPVVVANSDGTLRLDYDRPKSIGRVRMYFGNFGMHVRALAYIMANGPDGLRLTTEDAVLNANYIRKKLAGIYDLPYSTPSMHEVVFSDRNQARKGIKTGDIAKRLIDYGFHPYTTSFPLIVPGALMIEPTESESKEELDQFIEAMKAVAEEAENNPEIIAGAPYNTRVSRMDETAAARKPILRWKPKAKSAAE

SEQ ID NO: 12759 - protein, 131 aa, Aspergillus oryzae
MVLAKKHVPIVKKRTKTFKRHQSDRFKCVPESWRKPKGIDSRVRRRFKSNIPMPSIGYGSNKKTKHMMPSGHKAFLVQNPKDVELLLMHNRTYAAEIGHAVSSRKRVEIIAKAKALGVKVTNPKGRVTTEA

SEQ ID NO: 12760 - protein, 443 aa, Acidobacteria bacterium Ellin345
MRYLPKSQSDRDQMLRELGCATIDDLFAPIPAEYRLTRDLAIPRQYGESEILDFFKQRASENANGYSIFIGAGAYNHYRPVVIDSLISRGEWFTAYTPYQPEISQGTLQAIFEFQSMICELTGMEVANASMYDGSTGAAEAIMMAVRLTGRHSAIIANTVHPEYREVIATYAQHQGLPISHVGYNAETGRVDIKALEAAITDQTAAVLIQSPNFFGTIEDVAAIADLVHKKGALLVVSISEALSLGLIKPPSEADIISMESQSFGVPLGYGGPYVGVIATKEKFVRQIPGRLCGQTVDRNGKRGFVLTLSTREQHIRREKATSNICTNQALIALIASIFMTVYGKQGLRELAKQNLAKTAYAVSAFEKAGAKVLFKNSPFFNEFVVQTKSDSRELNDKLISDKIIGGFPLKKFYPELGNSAVWCVTELNAKAAIDAAAKGVAQ

SEQ ID NO: 12761 - protein, 134 aa, Hordeum vulgare
MARAQVLLMAAALVLMLTAAPRAAVALNCGQVDSKMKPCLTYVQGGPGPSGECCNGVRDLHNQAQSSGDRQTVCNCLKGIARGIHNLNLNNAASIPSKCNVNVPYTISPDIDCSRFTERRSVKLVLSSSIHVEL

SEQ ID NO: 12762 - protein, 522 aa, Aspergillus oryzae
MALTPVDTTLKVPPPDPVEEPPKVAVTPCEPPTGPYYFEGGFRRVSPYHYTYNTFCKERWRGRELVDIFISEFRDRPPEYYREALEAGRVCVNGKPAGPDTKVKNGDVISHTLHRHEPPVTSQEIGIIHEDDGLIVIDKPAGVPVHSAGRYHYNSVIEILRSERGGGWVPRPCNRLDRLTSGVMFIAKEPKAAEMVARRLKERTVHKEYVTRVKGKFPDGVVVCDQPIMQVSPKLGLNRVRATGKTAKTKFRRLAYYPPHDPEPVAANKDRAATPPPAYANEEEGYSIVHCLPLTGRTHQIRVHLQFLGHPITNDPIYSNRRVFGPGLGKSEDNGDRDKEIMERLNNMGKTEVADTVSYRTHLTAAPLVPPGTDSSVIEGIMSREHEAALVEYHKRKGERLSGEQCDVCGTELYTDPGVHELGIFLHAVAYSSDDGDWKYRSKMPSWALPPSGMEGPRAVPDWEPVPEEEEIVIGNGTVPEGMEDEDKPKRRQGDVLVRGVGVVDSEKLQSNSDLLELSLST

SEQ ID NO: 12763 - protein, 469 aa, Pediococcus pentosaceus ATCC 25745
MESENPQFEKDQLRDERGAMDPVAPVFSTGVGIDAETIKQISQAKNEPAWMLEIRLAAYQTYLDLPMPKFGPDLNGIDLDQIKYFQRATDHIARDWEDVPNDIKATFERIGVPEAERKYLAGSAAQYESEAIYSNLKKDLESQGIIFMDTDSALQKHPDLVRQYFGTLVPADDNKFAALNTAVWSGGTFLYVPKNVHADIPIQSYFRINAGRTGQFERTLIIVEKGGSVNYVEGCTAPNYSEDSLHAAVVEVFVKKDGYCRYTTIQNWSTNVYSLETKRAQAGTNATMEWIDGNLGSKVTMKYPSIYLVGQGATGSMLSIAAAGANMHQDTGAKMIHMAPHTHSTIVSKAICHNGGRADYRGLIKYTKAATKAKSHVECDTILMDPDSASDTFPVNDIETSDGTIEHEAHVSKIAEDQLYYMQSRGLDEATASQLIVMGFLEPFTKQLPMEYAVELDRLIKFQMEDSIG

SEQ ID NO: 12764 - protein, 527 aa, Chlamydophila caviae GPIC
MNKKGFLDSSSTKILQDLAVAPIDLTAPGVISKERIERFSLSVEGFTLSYATERVDEGILSALEDLASERGLIESMQAMQNGEVVNYIENFPSESRPALHTATRAWVKESPLQGNAEDISLRSKIEAQRLKDFLNRYRDVFTTIVQIGIGGSELGPKALHWALKGCCPSDKKVYFVSNVDPDNAAEVLQEIDCAKTLVVTVSKSGTTLETAVNEELLADHFLKQGLHFQDHFIAVTCEGSPMDDTSKYLEVFHIWDSIGGRYSSTSMVGGVVLGFAYGFDVFLQLLEGAASMDLAALEPRMSENLPLLSAMLGIWNRNFLRYPTSAVVPYATGLEYFPAHLQQCGMESNGKSVAQTGEVIGFATSPILWGEVGTNSQHSFFQCLHQGSDIVPIEFIGFQENQRGKDIVIAGSSSSQKLFANMVAQSIALAKGRENTNPNKNFRGNRPSSLLVSERLTPYTMGALLAFYEHKIVFQGFCWGINSFDQEGVTLGKDLANQVLQVMQGQEKEGALLEAEALLRLFNNIKK

SEQ ID NO: 12765 - protein, 449 aa, Streptococcus agalactiae NEM316
MTSGKTYVASVLEKVKKQNEHEEEFLQAVEEVFESLVPVFDKYPQYIEENLLERLVEPERVISFRVPWVDDKGQVQVNRGYRVQFSSAIGPYKGGLRFHPTVTQSIVKFLGFEQIFKNSLTGLPIGGGKGGSNFDPKGKSDNEVMRFTQSFMTELQKYIGPDLDVPAGDIGVGGREIGYLYGQYKRLNGYQNGVLTGKGLTYGGSLVRTEATGYGAVYFAKEMLAARGQDLTGKVALVSGSGNVAIYATEKLQELGATVVAVSDSSGYVYDPDGIDLETLKQIKEVERARIVKYTEKHPKANFTPADQGSIWSIKADLAFPCATQNELDEEDAKLLVENGVLAVTEGANMPSTLGAIKVFQKAGVAFGPAKAANAGGVAVSALEMAQNSSRRAWTFEEVDQELQRIMKTIFVNASEATDEFGDSGNLVLGANIAGFLKVAQAMSAQGIV

SEQ ID NO: 12766 - protein, 395 aa, Kluyveromyces lactis NRRL Y-1140
MLSVNTKNIVKATVPVLEQHGVTITKIFYNNMLSENPVLLNTFNRVNQKKGRQPTALAMTVLAAAKNIDDLSVLLPAVNEIGQKHRALQVEPAQYDIVGKYLLLAIKEVLGSAATPEIIQAWGEAYKVIADIFISVEKEMYKKAAWPSWKPFVVTEKTHVADEIIEFVVKTAPGCDVDLSKLKIVPGQYLTVKTHPTTHDNEYDALRHYSICSESTEDGLKFAVKYEHGEEQDGLVSEYMHKFINVGDQIELSAPAGDFEMNKELIKQEEVPLVLISAGVGATPLVAMLEFQQKHNPKRPVLWIQSSNDEMSQPFKDHVTDLLSKFDNARSEIVHTASMPRIDGTFLEKHIPGHSDVYICGSIEFMETLMGVLKDLGHHDQMIHYEPFGPKMSLV

SEQ ID NO: 12767 - protein, 69 aa, Glycine max
MADWGPVVIAVVLFVLLSPGLLFQLPGRSRVVEFGNMQTSAISILVHTIIFFGLITIFLIAIGVHIYTG

SEQ ID NO: 12768 - protein, 74 aa, Oryza sativa
PGGSGPSGAFFTGVRSLNSAAGPPADPRPACKCPKNVAGSIRGLNAGNAPSLPPQWGVGIPYPLSPSLGWSRVD

SEQ ID NO: 12769 - protein, 331 aa, Gibberella zeae PH-1
MPITILSPQPPTPRRPQAVAAANNDSDSDSEGGAGVDADEIFTPGTVITSNSQWMRGHGTYIPADSSEITSSLAGTLTKTNKLLSVRPLRARYTPEIGDLVVGRIVEVQAKRWRVDVAASQLAILQISAINLPGGILRKRTETDELQIRSFFAEGDLVVAEVQQLHQDGAASLHTRSLKYGKLRNGVFAAVTGTGGGGGVVRSKRQVWTMDVANAGGKVDVLLGVNGYIWISKHIESETAAEAAGINRMEETVSSKVYSSQNDPMDVATMREIARIRSVILALVENGLKVDEDTVTRGYGEAVDQARDSTDDDLYLGGEKGRRLATAVAGH

SEQ ID NO: 12770 - protein, 112 aa, Triticum aestivum
  misc_feature (55)..(55): Xaa can be any naturally occurring amino acid
  misc_feature (71)..(71): Xaa can be any naturally occurring amino acid
  misc_feature (81)..(81): Xaa can be any naturally occurring amino acid
  misc_feature (103)..(103): Xaa can be any naturally occurring amino acid
MVRAAVAQLMLVALVAAMLLVATDAAISCGQMSSALSPCISSARGNGANPPAACXSGIRSLAGAARSTADXQAACKCIKSXAGRLNVGKAAGIPSKCGVSIPXAISSSVDCS

SEQ ID NO: 12771 - protein, 377 aa, Arabidopsis thaliana
MWQMNLSSDETMETGSYPERPGEPDCSYYIRTGLCRFGSTCRFNHPRDRELVIATARMRGEYPERIGQPECEYYLKTGTCKFGVTCKFHHPRNKAGIAGRVSLNMLGYPLRSNEVDCAYFLRTGHCKFGGTCKFNHPQPQPTNMMVPTSGQQSYPWSRASFIASPRWQDPSSYASLIMPQGVVPVQGWNPYSGQLGSVSPSGTGNDQNYRNLQQNETIESGSQSQGSFSGYNPGSSVPLGGYYALPRENVFPERPGQPECQFYMKTGDCKFGTVCKFHHPRDRQAPPPDCLLSSIGLPLRPGEPLCVFYTRYGICKFGPSCKFDHPMRVFTYDNTASETDEVVETSTGKSRRLSVSETRQAATTSSGKDTTIDNTQQ

SEQ ID NO: 12772 - protein, 131 aa, Solanum melongena
DPKKKPVTRSVKAGLQFPVGRIGRYLKKGQYAQRVGSGAPVYLAAVLEYLAAEVLELAGNAARDNKKNRIIPRHLLLAVRNDEELGKLLAGVTIAHGGVLPNINPVLLPKKTGAEKAPKSPSKATKSPKKA

SEQ ID NO: 12773 - protein, 517 aa, Arabidopsis thaliana
MASISTPFPISLHPKTVRSKPLKFRVLTRPIKASGSETPDLTVATRTGSKDLPIRNIPGNYGLPIVGPIKDRWDYFYDQGAEEFFKSRIRKYNSTVYRVNMPPGAFIAENPQVVALLDGKSFPVLFDVDKVEKKDLFTGTYMPSTELTGGYRILSYLDPSEPKHEKLKNLLFFLLKSSRNRIFPEFQATYSELFDSLEKEAFPLRESGFRRFQRRNRLLFLGSSFLRDESRRYKLKADAPGLITKWVLFNLHPLLSIGLPRVIEEPLIHTFSLPPALVKSDYQRLYEFLRIRGEILVEADKLGISREEATHNLLFATSFNTWGGMKILFPNMVKRIGPGGHQVHNRLAEEIRSVIKSNGGELTMGAIEKMELTKSVVYECLRFEPPVTAQYGRAKKDLVIESHDAAFKVKAGEMLYGYQPLATRDPKIFDRADEFVPERFVGEEGEKLLRHVLWSNGPETETPTVGNKQCAGKDFVVLVARLFVIEIFRRYDSFDIEVGTSPLGSSVNFSSLRKASF

SEQ ID NO: 12774 - protein, 215 aa, Synechococcus sp. WH 5701
MGWTVDDIPSQEGRIAVVTGANIGLGLETTRALAAKGATVVMACRSRSRGEAARRQLLDEGLTGLDLLEIDLADLRSIERAIAVLSDQYGHLDLLLNNAGVMAPPRQLSPQGHELQFAVNHLGHMALTQGLLPLMASQTDPRVVTVTSGAQYFGTIRWDDLSWAQGYDRYGAYGQSKLANVMFALELHNRLQSENSSVKSLAAHPGIARTNLQPA

SEQ ID NO: 12775 - protein, 324 aa, Sulfolobus solfataricus
MSLLPRTTSVKPGEKFDVIIVGLGPAAYGAALYSARYMLKTLVIGETPGGQLTEAGIVDDYLGLIEIQASDMIKVFNKHIEKYEVPVLLDIVEKIENRGDEFVVKTKRKGEFKADSVILGIGVKRRKLGVPGEQEFAGRGISYCSVCDAPLFKNRVVAVIGGGDSALEGAEILSSYSTKVYLIHRRDTFKGQQPIYVETVKKKPNVEFVLNSVVKEIKGDKVVKQVVVENLKTGEIKELNVNGVFIEIGFDPPTDFAKSNGIETDTNGYIKVDEWMRTSVPGVFAAGDCTSAWLGFRQVITAVAQGAVAATSAYRYVTEKKGKK

SEQ ID NO: 12776 - protein, 477 aa, Nocardioides sp. JS614
MSSGLWIDGGWQESRGDRGEFAVVDPATTGVLARVVDGSVEDMAAAVDAASRTHETWAETPARERSVVLRRAWELMTERSEELARLIVLENGKALPDARSEVVYAAEFFRWFSEEAVRAHGDMRRSPSGQNWIMVTEEPIGVALLVTPWNYPAAMATRKIAPALAAGCTAVLKPAAETPLTALALAELLADAGLPDGVLNVVCTTRAGQLVEHALGDPRVRALSFTGSTEVGRKLLALAARNVVRASMELGGNAPFVVLDDADLEEAVEGLMVAKLRNGGSACTAANRIYVADRVADEFVERFTARMAGVRHGNGLDEGVELGPLVNEDTQRKVGELVDGALREGASLATGGGHDGLPGYSYRATVLTDVKPDAEILKHEIFGPVAPIVRFGEDAEAVALANDSEFGLISYLYTRDLDRGLAVSRRLRSGMVGVNRGVVSDPAAPFGGVKQSGIGREGAAEGLREFTEMKYTAIPYR

SEQ ID NO: 12777 - protein, 285 aa, Photobacterium profundum SS9
MAAQIIDGKLIAQTVRQEVAARVKARVEAGLRAPGLAVVLVGQDPASQIYVSSKRKACEEVGFISQSFDLPANTKEIELLALINELNTNKEIDGILVQLPLPAGIDTTNILEHIDPEKDVDGFHPYNVGRLSQRIPKLRSCTPKGIITLLERYNIPVRGKHAVIVGASNIVGRPMTLEMLLAGATTTTCHRFTQDLEHHIRQADILVVAVGKPHFIPGDWIKEGATVIDVGINRLDSGKLAGDVEYDVAREKAKYITPVPGGVGPMTVATLIENTLLACEQYHSD

SEQ ID NO: 12778 - protein, 415 aa, Zea mays
MMVEGPNFAGLIGGHDNGGNFCDMAYYRKLGEGSNMSIDSLNSMQTSTHGGSIAMSVDNSSVGSCSSHTRMLNHPGLKGPVVGNYSVGGHSIFRHGRVSHALSDDALAQALMDPRYPTETLKDYEEWTIDLAKLHMGMPFAQGAFGKLYRGTYNGEDVAIKLLERPEADPERAGLMEQQFVQEVMMLATLRHQNIVKFIGACRKPVVWCIVTEYAKGGSVRQFLAKRQNRSVPLKLAVKQALDVARGMAYVHGLGFIHRDLKSDNLLISGDKSIKIADFGVARIEVKTEGMTPETGTYRWMAPEMIQHRPYDQKVDVYSFGIVLWELITGMLPFANMTAVQAAFAVVNKGVRPAIPQDCLPTLGEIMTRCWDPNPDVRPPFTEVVRMLEHAEVEILSTVRKARFRCCISQPMTTD

SEQ ID NO: 12779 - protein, 950 aa, Pseudomonas fluorescens PfO-1
MTQVNLGTANEFIARHIGPRAGDEQAMLNSLGFDSLEALSASVIPESIKGTSVLGLDDGLSEADALAMIKGIAGKNQLFKTYIGQGYYNCHTPSPILRNLLENPAWYTAYTPYQPEISQGRLEALLNFQTLISDLTGLPIANASLLDEATAAAEAMTFCKRLSKNKGSHQFFASIHSHTQTLDVLRTRAEPLGIDVVVGDERELTDVTPFFGALLQYPASNGDVFDYRELTERFHAANALVAVAADLLALTLLTPPGEFGADVAIGSAQRFGVPLGFGGPHAAYFSTKDAFKRDMPGRLVGVSVDRFGKPALRLAMQTREQHIRREKATSNICTAQVLLANIASMYAVYHGPKGLTQIANRVHHLTAILAKGLSALGVTVEQTSFFDTLTLATGAQTAALHDKARAQQINLRVIDAQRLGLSVDETTTQADIETLWGLFADGKTLPDFAALAAAAQSTIPASLVRQSPILSHPVFNRYHSETELMRYLRKLADKDLALDRTMIPLGSCTMKLNAASEMIPVTWAEFGALHPFAPAEQSAGYQQLTDELEAMLCAATGYDSISLQPNAGSQGEYAGLLAIRAYHQSRGEDRRDICLIPSSAHGTNPATANMAGMRVVVTACDARGNVDIEDLRAKAIEHREHLAALMITYPSTHGVFEEGIREICGIIHDNGGQVYIDGANMNAMVGLCAPGKFGGDVSHLNLHKTFCIPHGGGGPGVGPIGVKSHLTPFLPGHGHMERKEGAVCAAPFGSASILPITWMYIRMMGGAGLKRASQLAILNANYISRRLEEHYPVLYTGSNGLVAHECILDLRPLKDSSGISVDDVAKRLIDFGFHAPTMSFPVAGTLMIEPTESESKEELDRFCDAMIRIREEIRAVENGTLDKDDNPLKNAPHTAAELVGEWTHPYSREQAVYPVASLIEGKYWPPVGRVDNVFGDRNLVCACPSIESYA

SEQ ID NO: 12780 - protein, 380 aa, Oryza sativa
GHRLRHRPPTVTYHAYRRHQGRRQGGLVDAGVTTVPYFFRHHPDPLPVAAPSEAASAIPLIDLAKADVDRGRVVAEVRAAAETVGFFQVVNHGVAGELMDEMLAAVRRFNEEPLEAKVPYYTRDVANKVRFSSNFDLFRNGFRSPAANWRDTMFVEMFPEVPSPEEFPPPCRGVLEEYAAAVRRLGERLFELMSEALGLPAGYLGRDAGGTDGLSLSVAAHYYPACPEPEATMGATKHSDPSFLTVLLQDTSGGLQALLDQPRRRWVDVPPVAGALVVNVGDFLQLVSNDRLRSVEHRVLPTGAAGPARVSVACFFRVEYASTRPYVPVVVGGGGARAAAVYRGTTAGEFLAHFNGKGLDGRSALDHFRIPAAASSPPPL

SEQ ID NO: 12781 - protein, 532 aa, Burkholderia sp. 383
MLDANLKNQLKAYLEKITRPIELVASLDDSAKSQELLALLNEIASLTDRVTVTERRDDAERKPSFSIGEPGKPAGIRFAGIPMGHEFTSLVLALLQTGGHPIKLDDDVIEQIRALDGEYAFETYFSLSCQNCPEVVQALNVMSLINPCIRHVAIDGALFQSEVESRQIMAVPTMFLNGASFGQGRSSVKEILAKLDTGASARAAKSLENKPVFDTLIVGGGPAGAAAAIYSARKGIATGVVAERFGGQVLDTMAIENFVSVQETEGPKFATALEQHVKQYDVDIMDVQRADALIPGDVHQIRLANGAVLKAKTIVLATGARWREINVPGEREYRNRGVAYCPHCDGPLFKGKRVAVVGGGNSGVEAAIDLAGIVKAVTLIEYGAQLRADEVLQRKLRSLPNVTIVTQAQTTELTGDGSKLNGLVYKDLRSGDTQRIDLEGVFVQIGLVPNTEWLKGTVELSKHGEIVVDARGATSVPGVFAAGDVTTVPFKQIVIAVGEGAKASLGAFDHLIRQDVAPVAAAQPQAEEAVTA

SEQ ID NO: 12782 - protein, 348 aa, Shewanella sp. MR-7
MLACRGIWLIKGTTLTSPSPAFGVLLVNLGTPDEPTPKAVKRFLKQFLSDPRVVDLSPWLWQPILQGIILNTRPAKVAKLYQSVWTEQGSPLMVISEQQAQKLATDLSATFNQTIPVELGMSYGNPSIDSGFAKLKAQGAERIVVLPLYPQYSCSTVASVFDAVAQYFTQVRDIPELRFSKQYFDHEAYIAALAHSVKRHWKTHRQADKLILSFHGIPLRYATEGDPYPEQCRATAKLLAQALELTDGQWQVCFQSRFGKEEWLTPYADELLADLPRQGVKSVDVICPAFATDCLETLEEISIGGKETFLHAGGEAYHFIPCLNDDELHIELLRQLVQEQAQPWIRAE

SEQ ID NO: 12783 - protein, 391 aa, Bordetella pertussis Tohama I
MSAQISPLNAGAAPESFGIASVPEIIAELRAGRIVILVDEEDRENEGDLVMAAEFVTPEAINFMVTHGRGLVCLTLTEERCRQLDLPLMASRNGTRYGTNFTQSIEAAEGVETGISAADRARTIQVAVARDAQPSDLVQPGHIFPVRAVPGGVLVRAGHTEAGCDLTAMGGLTPAAVICEILKPDGTMARLPDLVEFAREHKLKIGTIADLIQYRSEHESIIARMGERMMQTPWGDFRCIAYRDDATRSPHLALVHGNIDPERETLVRVHEPASLFDVLDTGASPHSWSVGQALHAIAASPAGVLVLMNCQSSTEHLFGQIANWAGPAERAAAQEGDRFGLRTYGIGAQILRDLNVGRMKLLARPRKMPSMAGFALTITGYDCVPPNLRND

SEQ ID NO: 12784 - protein, 320 aa, Escherichia coli
GTTKHSKLLILGSGPAGYTAAVYAARANLQPVLITGMEKGGQLTTTTEVENWPGDPNDLTGPLLMERMHEHATKFETEIIFDHINKVDLQNRPFRLNGDNGEYTCDALIIATGASARYLGLPSEEAFKGRGVSACATCDGFFYRNQKVAVIGGGNTAVEEALYLSNIASEVHLIHRRDGFRAEKILIKRLMDKVENGNIILHTNRTLEEVTGDQMGVTGVRLRDTQNSDNIESLDVAGLFVAIGHSPNTAIFEGQLELENGYIKVQSGIHGNATQTSIPGVFAAGDVMDHIYRQAITSAGTGCMAALDAERYLDGLADAK

SEQ ID NO: 12785 - protein, 115 aa, Triticum aestivum
MARAAAAQLVLFTLVAAMVLTATDAAISCGQVSSALSPCISYARGSGSSPPAACCSGVRSLAGAARSTADKQAACKCIKSAAGGLNAGKAAGIPSKCGVSIPYAISSSVDCSKIR

SEQ ID NO: 12786 - protein, 478 aa, Solibacter usitatus Ellin6076
MFANYINGEWIAAGATFENRNPANTDEVVAVMAKGSAADIAAAADAAGAAFPAWSAMSGPARGNILYKAADILDKTFDSVAADMTREEGKTLPEAKGEVRRAINILRYFAGEGSRLPGMLVPSERDRVHMFALRKPVGVVGLITPWNFPSAIPAWKLAPALICGNTVVIKPASAAPLSAWRIVEALHQAGIPKGVVNFIAGSGGELGQALVNAAPLKAVSFTGSCEIGDWLHAEASKRRLRIQLEMGGKNPTIVLADADFGSAVENVVNAAFFSTGQKCTATSRAIVEDAIYDKFVAAVVARTRKLKVGDGMQPGIDIGPCVDQSQMETVLRYIEIGRKECGEPACGGKRLTEGALAKGYFVEPTVFAGVTPDQTIAREEIFGPVLAIMRARDFEDAMSIANSIPFGLSSSIQTTNLSRAFEYIYRAEAGLLTVNLPSAGVEYQLPFGGTKDSSFGPKEQGPAALEFYSDYKTVYLKY

SEQ ID NO: 12787 - protein, 477 aa, Novosphingobium aromaticivorans DSM 12444
MEFNNNYHMLIGGELVAAEARLDVVNPANEQVIACVPDAGAAELDAAVAAARKAFPGWAATPIAERKAMLDALADSIFANVDGFKRLLTAEQGKPHHEAQGEIMGAGYWLKAYTALDLPETVNEDSDERLSITRHVPLGVVGAIAPWNFPMILAMFKVAPGLLAGNTMVLKPSPFTPLCTLKFAELAKEILPAGVLNVITGGDHLGPLMTAHPGFDKISFTGSTQTGRRVMASAAPTLKRVTLELGGNDAAIVMPDVDVEKIAEQLFWAAFTNNGQICIATKRMYIHKDIYEPLRDALVAYARTVKVGDGSEQGTQIGPINNEAQYNRVLDLIQDAKDNGYKFLLGGEKAEVPGYFVPITILDNPPEDSRIVQEEQFGPVLPLIRFDDFEDVLNRVNASDYGLGGSVWGSDEDKAFELAQRVQSGTVWVNETQHLSPLAAFGGMKQSGVGVEGGLEGLLEYTSAQTLVRRKKAAFVN

SEQ ID NO: 12788 - protein, 108 aa, Vibrio cholerae O1 biovar eltor str. N16961
MKINITGKNIEVTSAIRNHIEGKLKKLEKWQVDIIGCQASFSEEPNKQKKFEAVVSIPRGQLVASAIHEDLYAAINEVEQKLERQLNKLRHKPEARRADKTELSEEVE

SEQ ID NO: 12789 - protein, 227 aa, Triticum aestivum
MNDTDVSKQIQQMVRFIRQEAEEKAGEISVSAEEEFNIEKLQLVEAEKKKIRQEYERKEKQVDVRKKIEYSMQLNASRIKVLQAQDDLVNKMKEDAMKELLNISSNHHEYKNLLKELVVQGLLRLKEPAVLLRCRKEDHHNVESVLHSAKNEYASKADVHEPEILVDHSVYLPPSPSHGDEHGQICHGGVVLASRDGKIVFENTVDARLEVVFRKKLPEIRKLLVAA

SEQ ID NO: 12790 - protein, 232 aa, Mycobacterium tuberculosis H37Rv
MSLMAGSTGGPLIAPSILAADFARLADEAAAVNGADWLHVDVMDGHFVPNLTIGLPVVESLLAVTDIPMDCHLMIDNPDRWAPPYAEAGAYNVTFHAEATDNPVGVARDIRAAGAKAGISVKPGTPLEPYLDILPHFDTLLVMSVEPGFGGQRFIPEVLSKVRAVRKMVDAGELTILVEIDGGINDDTIEQAAEAGVDCFVAGSAVYGADDPAAAVAALRRQAGAASLHLSL

SEQ ID NO: 12791 - protein, 493 aa, Geobacillus stearothermophilus
MKTHNSEKYRPTFHFSPKKNWMNDPNGLVYFKGEYHLFFQHNPNDSIWGPMHWGHAVSKDMIEWEELDIALYPDENGTIFSGSVVIDWNNTSGFFPKEPGMVAIFTQNLHDADHTTPIQTQSLAFSHDRGRTWTKYEKNPVLKHPTKVDFRDPKVFWHYESEKWIMVLATGQTVSIYSSPNLIDWQFESEFGENIGCHDGVWECPDLFELPVENSEEKKWVMFVSIGDNRQFDSGSRTQYFIGSFDGSNFKVDENNNEVLWLDFGKDNYAGVTFSDIPKEDGRRIYIGWMSNWRYANEVPTVGWRGQMTLPRVLSLRKIGDKLRVIQNPVKELDNYFTKQIVIHDEIISSGIQKKIDINQPSVEIVLNVNNLGAKQFGLVLHHTENQSTTITIDLLTNLLSLDRTNSGEVSFSENFLNNQVMKIHDTTKLNLRIIVDSSSVEIFVNEGAHALTSLIYPDKACEKISIFSLGGDIQLSNSYISFPNSIRRNFGY

SEQ ID NO: 12792 - protein, 468 aa, Novosphingobium aromaticivorans DSM 12444
MSQQPQPGGNLGFIGLIVAVATIGGFMFGYDSGAINGTQDGLKHAFGLGEAELGLTVSALLPGCALGAFLAGRFADIWGRRAVMMMAAALFILSALGSGAAPSAIVLAVARFFAGAAVGAASVLSPAYISEVTPAHVRGRLSSAQQVMIISGLTGAFLANYWLAGAAGSSLGAFWCGYPAWRWMFWVQAAPAILFLVTLLLIPESPRFLVAKGRTEEARSVLARLFGDATADAKLGEIRASLAADHQPSLADIRKPGGGWRPIVWVGIGLAVFQQLVGINVVFYYGAVLWQAVGFSEADALKINILSGVVSIAACLVSIGLVDKLGRKPLLLIGSAGMTATLGALAWCFAQASTGPDGALVLPEGVGTIALYAANIYVVFFNMSWGPVMWVMLGEMFPNQMRGSALAVAGAAQWLANFAVSSSFPWLAGNIGLPVTYAAYTLFAAISLVFVWTSVKETKGKELEAMEG

SEQ ID NO: 12793 - protein, 214 aa, Oryza sativa (japonica cultivar-group)
MADVNCRCSRVVYVGNIAFHATEAELRDACELIGPVRSLRLAALDPATNKRKGYAFVEYADDETARSALRNLHGHLLRGRELRVGLAARPSIRRRGGGGGGEREPVGMEDAVHAASLVVSGRPLASVTRYLAARSRQEVREMVAALEATEQLKIPGLGTAMEQAQRLLEMFAADEEEVARKKLKRASDEEHAKQSKVVGVDGVVKASSRIVPCF

SEQ ID NO: 12794 - protein, 457 aa, Synechococcus sp. WH 7805
MLRVAVVGGGPSGSCAAEILAKAGISTWLFERKLDNAKPCGGAIPLCMVEEFDLPESIIDRKVRNMKMISPSNKEVDIQLDPLGYDDNAYIGMCRREVFDAFMRNRAAELGTTLINGLVQKIDTGSARQGPYTLHYADYSSGGPTGELKTLEVDLIIGADGANSRVAKAMDAGDYNVAIAFQERIKLPPEEMTYYEDLAEMYVGTDVSPDFYAWVFPKYDHVAVGTGTMQQNQSLIKGLQKGIRERARKRLFKGEVIKVEAHPIPEHPRPRRVVGRMALVGDAAGYVTKSSGEGIYFAAKSGRMCAEAIVEISANGSRVPTEKEIKSTYLKRWDRKYGATYAVLDILQRIFYRNDAAREAFVEMCDDRDVQKLTFDSYLYKRVVMMNPWQQVKLTLRTLGSLLRGEALAPAGYDAVPSAVGRSEGDFLADEAAQAIKAQVHTESSTETKERPTVTTG

SEQ ID NO: 12795 - protein, 773 aa, Pediococcus pentosaceus ATCC 25745
MEENTSYDEGLKVSLSTKDLLVYGITFMIPVAPLAFYGSFLTPANGMVALAYFVGMVAMLFTGFSYATMSRRYPFSGSVYTYVQQGTNAGLGFIGGWGITLDYFLIPTITYLISKSFGESLFPTVPGWAWIIILVIFNTIVNILGANVVTKISWVLFALQGIVLVAFIIGTIRLLLSGAIQPQTISFYNPQHFNIQGVLQATGIVIVSYLGFDAISTLSEEAEDPHRSVGRAIILSILSIGILFVVITVLAGFVAPDYQNLNQNTAFLGILQRVGGTWLVKLADITIILSFGFASGQEGQTAVSRILYAMGRDGILPPAFAKLHKKYRTPIFAIVLVGLASLILSLTLSQDTVSNLVSFGALFGFILLNLSVIWKFYVKGDHGSVFSKERVETKYYEDDTKIYLTLLKKQDILDLDLSRERVKKRVISNISTTGNTKYAEKLISKYYRDFDYVFDMVRAEQALPSKKDNFLKSISEPKPTPRFQIHKYDLVKLIDGRLAIVFSINDANTEYEVRVEKGSESWELITIKQIDIAHVYQHLDSFLSPTKISLSIKDVFFKHDVNFLIEEFPDINVETLCTDSEWFDLENKLEGLLLKYSQISNKQSHNIGIRIQQMLDIIPEKYVDVRLSSVVPPTLEEIDQLEELDVVKLKDGKFATIVFAPPHPYSWDMHFDFDIGDSSTSWATPITEIAEIIFFHSKNLPIHLNKMLTKEAIQNLHVLVPDFDVNKTLSKEEFTKLYDLIDHKLMTQGFDTNDEPTPIGLMAENLLTEFADI

SEQ ID NO: 12796 - protein, 316 aa, Ustilago maydis 521
MLRLRPVATSACSAASLLHRSAACYPRSAIRCYSTSIGPTQLVSLDTLSDIAKTEHGSASPYDEHISVLTLNRAPAKNAISKALLAEMDQHVTSLLTSSTVRTLLIRSSVSGTFCAGADLKERKGMSKAEVDAFLLGLRKVFTNVSRLPMPTIACLDGLAMGGGLELALTCDLRIAGPAATRLGLTETKLGIIPGAGGTSRLTRLVGAARAKELIFSAKLVDAVEASRIGFVDIVAQEGDDTAAFNKGVQLARSFAKNGPLAVRAAKLAIDKGEQMDPETALDFERQCYETILGTKDRLEGLKAFAEKREPEYRGE

SEQ ID NO: 12797 - protein, 181 aa, Zea mays
MASSMLSSAAVVTSPAQATMVAPFTGLKSSAAFPVTRKANNDITSIASNGGRVSCMKVWPPVGKKKFETLSYLPDLTEVELGKEVDYLLRNKWIPCVEFELEHGFVYREHGSTPGYYDGRYWTMWKLPLFGCTDSAQVLKEVQECKTEYPNAFIRIIGFDNNRQVQCISFIAYKPPSFTGA

SEQ ID NO: 12798 - protein, 370 aa, Synechococcus sp. WH 7805
MNGQQSSSPAEEGILPSQSARIEVIGVGGGGSNAVNRMIISDLEGVTYRVLNTDAQALIQSAAVHRVQLGQTLTRGLGAGGNPSIGQKAAEESRADLQQAIQGSDLVFIAAGMGGGTGTGAAPVVAEVAKESGALTVGIVTKPFGFEGRRRMRQADEGIARLAEHVDTLIVIPNDRLRDAIAAAPLQEAFRSADDVLRMGVKGICDIITCPGLVNVDFADVRSVMTEAGTALLGIGVGSGRSRAIEAAQTAINSPLLEAARIDGAKGCVINISGGRDMTLEDMTSASEVIYDVVDPEANIIVGAVVDEALEGEIHVTVIATGFESGQPYRSERSIPKPAAMPYVSPEPMDAGARIPEFLRQRQSRTDQSE

SEQ ID NO: 12799 - protein, 411 aa, Bacillus halodurans C-125
MIEIKVPELAESITEGTIAQWLKKVGDHVSQGEYIAELETDKVNVEITAEHSGVIQELKREEGDTVEVGEVIAVLAEGDSPTASTEQAEAPKEEKKVSTVASEEAAPAPGNRPVASPAARKLAREKGIDLEAVPTADPLGRLRKQDVASYEEKPAASAPAKAPEKKAAPAAANVESPGKPVERIKMSRRRQTIAKRLVEAQQTAAMLTTFNEVDMSAVMELRKRRKDQFFEKHDVKLGFMSFFTKAVIGALKEFPLLNAEIQGDEILLKKYYDIGIAVSTDEGLVVPVVRDADRLGFAGIEREIMHLGKKARENKLSLSELQGGTFTITNGGVFGSLWSTPILNAPQVGILGMHKIQWRPVAIDEENFENRPMMYIALSYDHRIVDGKEAVSFLVRVKEMLEDPESLLLDS

SEQ ID NO: 12800 - protein, 325 aa, Nicotiana tabacum
MAFSSPLFSPVNFALNPNPQIHPKCTKPNRRNFSVCAIPPLSTATDISAVTGPLDGTTLAVLGGGSVAALAAILSLADPERRRQLQAEEVGGGDKEVVREYFNNNGFQRWKKIYGDTDDVNKVQLDIRLGHSKTVENVMKMLTEEGSLQGVTVCDAGCGTGCLSIPLAKEGAVVSASDISASMVAEAQKQAQEELFKDKDDQSPAPVMPKFEVKDLESLDGKYDTVVCLDVMIHYPQSKADGMIAHLASLAENRLILSFAPKTFYYDLLKRIGELFPGPSKATRAYLHAEADVERALQKAGWKIRKRGLIATQFYFAKLIEAVPA

SEQ ID NO: 12801 - protein, 114 aa, Solanum tuberosum
MEMFGKIACFVLLCMVVVAPHAEALSCGQVTSGLAPCLPYLQGRGPIGGCCGGIKGLLGAAKTPADRKTACTCLKSAASAIKGINVGKAAGIPRVCGVNIPYKISPSTDCSKVR

SEQ ID NO: 12802 - protein, 227 aa, Zea mays
MAPSFTSLLSAANSAAASRLPSAAAGRASTFVRFPHHPTGWAGASVAAPRTARKRAPGVAYATAATEKSIYDYTVKDIDGKDVPLKKFKNKVLLIVNVASQCGLTTANYTELSHIYEKYKTQGFEILAFPCNQFGAQEPGSNTQIKQFACTRFKAEFPIFDKVDVNGPNTAPIYKFLKSSAGGFLGDLVKWNFEKFLVDKNGKVIERYPPTTSPFQIEKDIQKLLAA

SEQ ID NO: 12803 - protein, 114 aa, Solanum tuberosum
MEMFGKIACFVLLCMVVVAPHAEALSCGQVTSGLAPCLPYLQGRGPIGGCCGGIKGLLGAAKTPADRKTACTCLKSAASAIKGINVGKAAGIPRLCGVNIPYKISPSTDCSKVR

SEQ ID NO: 12804 - protein, 944 aa, Candida glabrata CBS 138
MYGAVLMDSDTRNNEGKSGRRRDSVSTTPRMFSTNTEQTGAQIDTAREKHSKSSQPRVFHRKSLSGWDFMETVGAGSMGKVKLAKNKNSNEVCAIKIVHRATKAYMHKAQQLPPPADENEAKERQKRLNKEISRDKRTVREASLGQILFHPNVCKLYEMQTLSNHYYMFFEFISGGQLLDYIIQHGSLKENHARKVSRGILSALQYLHANNIVHRDLKIENIMLSKTGEIKLIDFGLSNMYDPRKSLQTFCGSLYFAAPELLKAHPYLGPEVDVWSFGVVLYVLVCGKVPFDDENSSALHEKIKKGKVTYPQFLSIDVISLLSKILVVDPQKRATLQQVVNHQWMLKGYDFPPQSYLPRRVPLTVDDINIDVIKEMYRFEFVESIDAAYKTIIDIITEPEYKQLADQYWELADKSSFSEDSKFFTDDFKDPTQAYHPLISLYYLTFEKMQRDAKKENKDWLSTKSSEITNSDVGLNKEYKFTPKKMESIQKEPSPSELLEEQGNVTPEDISPQISNDKEQSPIAGQSGSKAPRSSIKALTNRADQSAQVGKNAGISPKPSVENTEKSGFTNIFRRFSQRHQRPSNINNSIASKNNNIRTHTRAVSDYMSVAPNELQKPVEIVSQNLPDLPTDAKLIIEKTRNSSKNKSDENETLQPVPHAKGKKLHPTARAKSVGHARRESLNFTRPAVVPPNMADIEEVVDTGFLQTPDEEKLVKDKAFGEALSNTIVEDLTDDEILKEASKAPPGSMPSIDYPRTLFLKGFFSVQTTSSKPLPIVRYKIISVLKKHNIEFVEVKGGFVCSKSPTVTILNTKTAPEKVDVYSGYDNDDTPDWSSQQSPKSMNDARLVFSDLDKSSNPHLTEGHSNSSLNDFENDNLSVGGKGDYLDNIQGPRAKVMDRAPIKFEIHIVRVRIVGLAGIHFKKLSGNTWMYKELATRILHDLKL

SEQ ID NO: 12805 - protein, 520 aa, Arabidopsis thaliana
  misc_feature (494)..(494): Xaa can be any naturally occurring amino acid
MSGAITCSAADLATLLGPNATAAADYICGQLGTVNNKFTDAAFAIDNTYLLFSAYLVFAMQLGFAMLCAGSVRAKNTMNIMLTNVLDAAAGGLFYYLFGYAFAFGGSSEGFIGRHNFALRDFPTPTADYSFFLYQWAFAIAAAGITSGSIAERTQFVAYLIYSSFLTGFVYPVVSHWFWSPDGWASPFRSADDRLFSTGAIDFAGSGVVHMVGGIAGLWGALIEGPRRGRFEKGGRAIALRGHSASLVVLGTFLLWFGWYGFNPGSFTKILVPYNSGSNYGQWSGIGRTAVNTTLSGCTAALTTLFGKRLLSGHWNVTDVCNGLLGGFAAITAGCSVVEPWAAIVCGFMASVVLIGCNKLAELVQYDDPLEAAQLHGGCGAWGLIFVGLFAKEKYLNEVYGATPGRPYGLFMGGGGKLLGAQLVQILVIVGWVSATMGTLFFILKRLNLLRISEQHEMQGMDMTRHGGFAYIYHDNDDESHRVDPGSPFPRSAXLLLAFNFQLFGNLLPFKYCLGFGFEI

SEQ ID NO: 12806 - protein, 515 aa, Penicillium sp. TN-88
MISQGLTGALKALPLVCALVARAVADDYRPAFHFCPAENWMNEPNGLIQINSTWHLFYQADPAANVWGNECWGHATSSDLLHWDHLPVAIPVENGIESFTGTSYYDSNNTSGLGTSTNPPYLAFFTGYTESNKTQDQRLAYSTDLGQTWVKFAGNPIIGAAQEAPQDISGGLESRDPKVFFHAPSGKWVMVLAHGGQDKLTFWTSLDAKNWTWVSDLSSSQIEGFPSSITGWEVPDMFQLPIQGIKKTTWVLIFTPAQGSPPGGNGVVALTGSFDGETFVADPVDPSTLWLDYGRDFDGALSWENVPASDGRRIIAAVMNSYGSNPPTTTWKGMLSFPRTLALKQIGSKQYFLQQPVAELSTIDGSLTSIQNQTITPNQTLLSSIHGTSLDIRMAFVIDSGATLSLAVRKGGSEQTVIRYFQSNSTLSVDRTASGDISYDPAAGGVHTAQLAQDNTELVHIWALIDTCSVEVFGGEGEAVISDLIFPSNSSDGLSLEVSGGTAMLRSVNVSSVSL

SEQ ID NO: 12807 - protein, 304 aa, Roseovarius nubinhibens ISM
MKIGTRGSPLALAQAYETRDRLVAAFDLPETAFEIVIITTTGDRVIDRPLKEIGGKGLFTREIEDALLTGDIDLAVHSMKDMPVLQPEGLIIDCYLPREDVRDAFICPTGRNLSEMAPGTKVGSSSLRRRAQVLVAHPQLEVVEFRGNVQTRLRKLDEGVAACTFLAMAGLNRLKRTEVITRALEPEEMLPAVAQGAIGIERRRDDSGAAMMLEAIHHGPTGQRLAAERAFLAALDGSCETPIAGLAELQGGTLRLRGEILRPDGSERLCDDRSAPVEDGAELGRAMAVDLLAQAGPDFFDWRG

SEQ ID NO: 12808 - protein, 243 aa, Glycine max
MRDPNLELQESGWEELRKEARKIEGDLDVKLSSYAKLGARFTQGGSGSGYVDSGSPPIGSSRSWKSMEMEIQSLLEKLLDINDSMSRCAASAGPATSVTQKLARHRDILHEFTQEFRRIKGNINSMREHAELLSSVRDDITDFKTSGSMSPRMQLLRERAAIHGSISHIDDVISQAQATRAVLGSQRTLFTDVQGKVKVLGDKFPMIRSLLGSIRRRRSRDTLILSAVIAACTLFLIIYWLSK

SEQ ID NO: 12809 - protein, 146 aa, Triticum aestivum
MASSMLSSAAVATSPAQATMVAPFTGLKSSAAFPVTRKSNTDITSIASNGGRVSCMKVWPPVGKKKFETLSYLPDLTDVELAKEVDYLLRNKWIPCVEFELEHGFVYREHGSTPGYYDGRYWTMWKLPLFGCTDSAQVLKEVQECK

SEQ ID NO: 12810 - protein, 282 aa, Zea mays
MSAVVCGKRSSSIFADELLPPSPSCAHSSHQPAAKRSRRSPSHRGGSDGLRPEALVDYLLALFPDMDPQLLEKALEASGDDLDSAIKSLNLLRLESAEAILSSTGFKPENCLQTAIQPSLEGIPNGGVDTATEHPPSVDNYQTSYNGSEWVELLVTEMRNASDINDARARASRALEALEKTIVERAGAEATQTLHKENMMLKEQLTVVLRENSVLKRAVAIQHERQKEFDERSHEVQNLKQLVLQYQEQVRTLEMNNYALTMHLKQAQQNSSIPGRFNPDVF

SEQ ID NO: 12811 - protein, 462 aa, Schizosaccharomyces pombe
MVEVRHSIPCEETKRLELSLSQQTYSQQYASIYFARLTALRPRITEAASKKWPDKQRLERVLDVKSDEDCWVVATAYMTTALKPNVMNDVTQLHTIVTTTEESPYVSPEDAASGDIEYALEDDYGRIDCSGSFLYDAGVVTGVVLAVLGHEDEQGRFVVVDVCFPGIFSHSIPMTTDESQAQPEYIAAVSGLGLSNDGIEGIQVHQLVDFLRGTLPHVSSFSPSSIKRLIILGNCLAPSIEIADSASASVPIGKKKVKRYGYDTSAYNPNPTFQLDNFLDQVCSSIDVTLMPGPYDYSSTILPQQPLHPALLTKSKVWLGSSLQTVTNPTWLSLGNHFVLATSGQNINDLRKYHPKKSSLQCMENTLLWNHITPTSPDTLWCYPFTDKDTFVMEEMPDLYLCGNQPKFGCKTVINEGNRIQLVSVPEFRKTGVLVLINMHTLNVEIIQFRPMSVKAETPITS

SEQ ID NO: 12812 - protein, 253 aa, Pseudomonas aeruginosa PAO1
MSGLLQETRGTVRLLRFDNPARRNALSPALRMELLRALEAAECDPSIRSVLLTGGEEVFCAGGDLGDMRVTELAAGRARMQDNARLVRQMVRMGKPLIAAVEGWAVGAGLSVALACDSIVCGAGARFAAGFGKVGLLADLGQLHTLPARIGWGRARQILMFGQVVEAEEALRIGLADRLCAAGGALAMALELAGRVEQQAPLPLAMTKALLAEGLDLLLEREGELQSQLFLSADHAEGKAAFLAKRPPVFRGN

SEQ ID NO: 12813 - protein, 744 aa, uncultured bacterium 561
MVQVRALLETESLDQASFANWLTGLATPLDTLDQNRLIDAFVLLREQDSEQSQGTMDWAGDADVLSVGLETVQILAELRLGPDALIAGFLYRSVRQQVISIDTLKHRFGDKVASLLDGVLRMAAVSDLTDLSDVPVLGQSAAPNINIRRMLVAIVDDVRVALIKLAERTVAMRGLKGAEEHRQQRIAWEVFNVYAPLAHRLGVGHLKWELEDLSFRYTNKDAYHRIASLLDGRRQDRDSFIARVNAQLTQTLTQSELAFEITGRAKHIYSIWRKMQRKGIGFSQVHDIRALRILVDDVAACYQTLGVVHGMWRNIPNEFDDYIASPKENGYRSLHTAVIGPEGKILEVQIRTEEMHEEAELGVCAHWRYKASDAHGAGPDTYEEKLSWLRQVLEWHESVGDDEVVAEQFTFDSAQDRVYVFTPKGDVVSLVHGATPLDFAYHVHTEVGHRCRGARVNGTLVPLTYVLGTGERVEILTASTVQPRRDWLSSSSGFLRTARARNRVQQWFKSQNRDDNVAAGRELVERECARLALTSLDYKAMSGALDLDAVDDMFAAVGSGDLTSKQVLRVAKSVTHSDSVLHPEWAIHPQQAASEGAARVDGVGNLLTQFAGCCLPVPGDGIEGYITRSGGVTVHRADCARLLALHDEYPERIIAVNWGAAAVELFPVDIELTAYDRQGLLADVTLVLAQASANVTSINTQSHPDNNTAHMRLRAEVSTIDALMELLAKLHQLDNVISAKRVVE

SEQ ID NO: 12814 - protein, 170 aa, Zea mays
MAPTVMMASSATAVAPFQGLKSTASLPIARRSSRSLGNVSNGGRIRCMQVWPAYGNKKFETLSYLPPLSTDDLLKQVDYLLRNGWIPCLEFSKVGFVYRENSTSPCYYDGRYWTMWKLPMFGCNDATQVYKELQEAIKSYPDAFHRVIGFDNIKQTQCVSFIAYKPPGSD

SEQ ID NO: 12815 - protein, 458 aa, Novosphingobium aromaticivorans DSM 12444
MRVLFAFSLKSVRGLCVTPFPWSDVFVILGLVLLNGLFSMSELAIVSARPARLKVAAEEGSKGAKVALALAADPGKFLSTVQIGITLVGIIAGAYSGSSLGGPMAERLAAWGFPARYADDAGFVIVIAFTTYLSLVVGELVPKQLALRAAEPIAKIAAPAMALMSKVTAPFVWLLDNSSSLLIRLLGLKQGTDQEVTAEELHMIFAEATRSGVIEEEERALMTGIMRLAERPVREVMTPRTELHWIERKAPEAELRSAIEDSPHSLLLVADGSVDKIVGVVKVRDVLSTLLRGRKVQLGRLMKKPAIVPDQLDTMDALGMIQQAEVAIALVHDEYGHLEGIVTPADLLSAIAGNFVGHADAGDEPMVVEREDGSLLISGALPADALSDRLGLDLPDDREFATTAGYCLSVLKRLPNEGEHFHDQGWRFEVVDMDGRKIDKLLVCRSKAMPIAAPEADG

SEQ ID NO: 12816 - protein, 558 aa, Arabidopsis thaliana
MAEEAKSKGNAAFSSGDYATAITHFTEAINLSPTNHILYSNRSASYASLHRYEEALSDAKKTIELKPDWSKGYSRLGAAFIGLSKFDEAVDSYKKGLEIDPSNEMLKSGLADASRSRVSSKSNPFVDAFQGKEMWEKLTADPGTRVYLEQDDFVKTMKEIQRNPNNLNLYMKDKRVMKALGVLLNVKFGGSSGEDTEMKEADERKEPEPEMEPMELTEEERQKKERKEKALKEKGEGNVAYKKKDFGRAVEHYTKAMELDDEDISYLTNRAAVYLEMGKYEECIEDCDKAVERGRELRSDFKMIARALTRKGSALVKMARCSKDFEPAIETFQKALTEHRNPDTLKKLNDAEKVKKELEQQEYFDPTIAEEEREKGNGFFKEQKYPEAVKHYSEAIKRNPNDVRAYSNRAACYTKLGALPEGLKDAEKCIELDPSFTKGYSRKGAIQFFMKEYDKAMETYQEGLKHDPKNQEFLDGVRRCVEQINKASRGDLTPEELKERQAKAMQDPEVQNILSDPVMRQVLVDFQENPKAAQEHMKNPMVMNKIQKLVSAGIVQVR

SEQ ID NO: 12817 - protein, 227 aa, Synechococcus sp. WH 7805
MSTKSLVVSPSILSADFSRLGEEVKAVDQAGADWIHVDVMDGRFVPNITIGPLIVDALRPVTAKPLDVHLMIVEPEKYVADFAKAGADIISVQVEACPHLHRNLAQIKDLGKMAGAVLNPSTPLSTLEYCLELCDLVLIMSVNPGFGGQSFIDNQVQKIRDLRRMCEEKGVDPWIEVDGGVKGGNAWKVIEAGANAIVSGSGVFNQPDYAAAIQGIRDSKRPEAVLV

SEQ ID NO: 12818 - protein, 222 aa, Coxiella burnetii RSA 493
MNKKIISASILSADFSRLGEEVKSVIQAGADNIHFDVMDHHFVPNLSFGAVVCKALRDAKITAPIDVHLMVKNPNEFIKPFAEAGANLITFHPETVKDVEDTIARIKKAGMQVGMAFNPEKSLSLFTSFLTKIDLVLLMSVNPGFAGQSFMAESLKKIAATRQLLDTLQSKAFLGIDGGIKINNIADVSRAGADFFVVGSGLFHSSNYEEKLKEMRHAINDR

SEQ ID NO: 12819 - protein, 261 aa, Pseudomonas aeruginosa PAO1
MSADPSPVVLLEFPAADIALLRLNRPQARNALNDEVRQRLASHFQTLGADPAIRVIVLTGDSRCFAAGADLRDLSTSTAIGLYGRHGERYWEAIARCPKPVIAAVNGFALGGGCELAMHCDLIVAGESAQFAQPEIKVGVMPGAGGTQRLVRAVGKFQALRMLFTGCLVKAPQALAMGLVSEVVADESTLARALELAMEIARLPPLALAQIKEVVLAGADLPLDSALALERKAFQLLFDSQDQKEGMHAFLEKRPPNYQGK

SEQ ID NO: 12820 - protein, 959 aa, Pseudomonas aeruginosa UCBPP-PA14
MTDNLNLGTIDLGTDDEFIARHIGPRAADTQAMLQRLGYDSLDTLIGNVIPDSIKGSSVLDLPAGMGEAEALASLKAIAARNRALRSFIGQGYYNCHTPAPILRNLLENPAWYTAYTPYQPEISQGRLEALLNFQTLVSDLSGLPIANASMLDEATAAAEAMTFCKRLSKNRTSQAFFASRHCHPQTLDVLRTRAEPLGIEVVVGDESAIEDFSAYFGALLQYPTCDGEIVDYRELVSRFHAVDALVAVAADLLALTLLTPPGEFGADVAIGSAQRFGVPLGFGGPHAAYFATRDAFKRDMPGRLVGVSIDRHGKPAYRLAMQTREQHIRREKATSNICTAQVLLANIASMFAVYHGPQGLLRIARRTHRLTAILAAGLERLGVAVEQKHFFDTLSLATGARTAAIHAKARAAGINLREIDAGRLGLSLDETVRQADVETLWGLLAEEGQALPDFAALAASSGDRLPVELLRQSAILSHPIFNRHHSETELMRYLRKLADKDLALDRTMIPLGSCTMKLNAASEMIPVTWAEFGNLHPFAPAEQSEGYRQLTDELEAMLCSATGYDAVSLQPNAGSQGEYAGLLAIRAYHQSRGDSQRDICLIPSSAHGTNPATASMVGMRVVVVACDARGNVDVEDLRNKASEHKERLAALMITYPSTHGVFEEAIREICAIVHDCGGQVYIDGANMNAMVGLCAPGKFGGDVSHLNLHKTFCIPHGGGGPGVGPIGVRAHLAPFLPGHARGERKEGAVSAAPYGSASILPITWMYIRMMGGEGLKRASEMAILNANYIAHRLEEHYPVLYAGGNGLVAHECILDLRPLKDSSGISVDDVAKRLMDFGFHAPTMSFPVAGTLMIEPTESESKAELDRFCDAMIRIREEIRAVERGELDKEDNPLKNAPHTAAELLGEWNHAYSREQAAYPLASLVEAKYWPPVGRVDNVYGDRNLTCSCPPIEAYSEE

SEQ ID NO: 12821 - protein, 494 aa, Colwellia psychrerythraea 34H
MTEVTCNLEAAGIKDSQLIKPFSYINGSWHSSETQFPVINPSTGEVVAQVSNADVAETELAVSAAKGALKMWSAKSANERATLLRNWFNLVMENQDDLGRILTLEQGKPLAEAKGEIAYGAAFLEWFAEEGKRVYGDTIPALSSDKKIVVIKQPVGVVASITPWNFPNAMIARKAAAALAAGCTFVVRPSESTPLSALAMAELAERAGIPAGVFNVVVGSNSRGMGQVLTQHPDVAKFTFTGSTGVGKLLLTQCATTVKKVSMELGGNAPFIVFNDADIDAAVQGAIISKYRNAGQTCVCTNRILVQQGVLEEFTEKFKNAVAELHIGDGLVEGVNLGPMISDKAVCDVEKLVADSIAAGAKVAFGGQRSEAGELFYQPTILTGVTNDMPIAANEIFGPVSPIIAFETEEEAIELANDTEYGLAAYFYSRDIGTVWRVAEGLEFGMVGINEGIISNAAAPFGGVKQSGNGREGSKYGLDDYLEIKYLCMGGLDK

SEQ ID NO: 12822 - protein, 308 aa, Oryza sativa
MAALPLATAELCDANAHLIMNGELRALQPVFQVYGRRQVFAGPIVTLKVYEDNVLVREFLEEKGQGRVLVVDGGGSLRCAILGGNPVQQAQNNGWAGIVVNGCIRDVDEINGCDIGVRALNSHPMKANKKGIGEKHVPVTIAGTRICDGEWLYADTDAGGGHGEGAAGWSDVTCVDGGGGRVEHRRGRVELGGEKAASRAPRVVSARRSGGGSARGAAAAATAGRGTGDAAALPESRGERPAGAARNHRLPQLERKEREIHGFPVHPFPGGGGGGGGGGGRRRGAAAMAAEEEEEEGGARWLTVAPNG

SEQ ID NO: 12823 - protein, 80 aa, Penicillium aethiopicum
LFYAVGHDPASGLVKGQVELDSEGYIITKPGTSFTNVEGVFACGDVQDKRYRQAITSAGSGCVAALEAEKFLADLETHQE

SEQ ID NO: 12824 - protein, 220 aa, Rickettsiella grylli
MRRFIISASVLSADMGCLARESSAVLQAGADQLHIDVMDNHFVPNLTFGPLICRALRKHLPNVFLDVHLMVNPVDALISAFAAAGANQMTFHPEASNDIVKNLNQIRRLGCKAGLAINPQTELTLLNNYWDHLDFVLMMSVHPGFAEQPFIPEVLNKISTAKQLLSLHKPSARLGVDGGVKKNNIAEIAKAGADTFILGSGIFNTANYSNTLNELRSQLR

SEQ ID NO: 12825 - protein, 335 aa, Glycine max
MKGLFKSKPRTPADVVRQTRDLLLFVDRSPETRESKREEKQMSELFKNIRELKSILYGNSESEPVSEACAQLTQEFFKEDTLRLLIKCLPKLNLEARKDATQVVANLQRQQVQFKLIASDYLEKNMDLMDILIVGYENQDMALHYGAMLRECIRHQIVAKYVLNSPRMKKFFDYIQLPNFDIAADAAATFKELLTRHKSTVAEFLSKNYEWFFAEYNTKLLESSNYITRRQAVKLLGDMLLDRSNSAVMTRYVSSRDNLRILMNLLRESSKSIQIEAFHVFKLFAANQHKPADIVSIFVANKSKMLRLLEDFKIDKEDEQFEADKAQVMREIEAL

SEQ ID NO: 12826 - protein, 223 aa, Arabidopsis thaliana
MNMKNLYLAILYLLAASTLPFAIASDPSPLQDFCIGVNTPANALFVNGKFCKDPKLVTADDFYFSGLDKARTTESSPVGSNVTTVNVNQIPGLNTLGISLVRIDYGINGQNPPHTHPRATEILLVQEGTLFVGFFSSFPENRLFNKTLNKGDVFVFPEGLIHFQVNIGKQPAVAFASLSSQNPGVIIIGNTLFGSKPPIDPNVLAKAFQLDPKVIIQLQKKFG

SEQ ID NO: 12827 - protein, 192 aa, Oryza sativa
  misc_feature (19)..(19): Xaa can be any naturally occurring amino acid
MESNGKAVTRSGDYVKYTXGAVFWGEPGTNSQHSFFQLLHQGTKLIPADFIRAVETHNPVQGGLHQRMLASNFLAQTEALMVGKTPEQVKAEGAPEELIPHKTFLGNRPTTSILADKISPATLGALIAYYEHMVFTEGAIWNINSFDQWGVELGKALAKKVQKDLETEGAGSGHDSSTSGLIAAFKAKSGLK

SEQ ID NO: 12828 - protein, 411 aa, Leptospira interrogans serovar Lai str. 56601
MTGSLQNRKTETKLSLENQFEKFVSQSKEPQALKDFRKKVFAKFQTLKIPGSENESWRKIPLSNFHPEDFTEVPDFAAVVWKIPDLVKLQRSETLSGKELENFLNILEGIFQKQNEEWFTLYSLSNFTHGLYLEIGNDFVVQEEIEIKFRLEKENKILPLIVAKIGSHNKILIVERYECIEEQELKFFQGLSVLQTGAGSKVSYVGIESFGSSIFHFQNLFSDQREDSDLKIAKVTPGGYKGKNLLNVDLSGKGARARVIGLAPMAAREFQDSEVKIVHNESHTESSILYRSALKNKAHHIFTGNLRIPNSCKDVNAIQINNNLLLNRTSRAESIPKLEVYAENVKCEHGATVGEIDEEQLFYLASRGIDEDEARRMIVDGFLGQVIGEIESNSIQEELFRLIARKVEGVI

SEQ ID NO: 12829 - protein, 221 aa, Mesorhizobium loti MAFF303099
MFAGRKFAAFLFDMDGTLINSIASAERVWSDWARRHGLDVASFLPTIHGVRAIETITNLALPGVDPAHEADLLLKAEAADLDGIVPIAGAVAFLKALPGESWAIVTSAPRSLALARMEAAGIPVPAVIVAAEDVSRGKPAPDCFRLGAQRLGVDARDCLVFEDAPAGIAAAEAAQASVMVISATHSHPLPTQHAAIAGYDGVGITIDERGWLALEAQRDAA

SEQ ID NO: 12830 - protein, 440 aa, Streptomyces viridochromogenes
MTIHNPEEPEYFPEVFPRDAFPRYTWDDGMRPLTLPHEVWLSETTHRDGQQGGLPLSLDTSRKIYDILCEITGDSTAIRHAEFFPYRDSDRNALIYALERHRDGAPIEPTTWIRARREDVELIKRIGVTETGLLSSSSDYHTFHKFGSGGRTEAAAMYLDAVTMALDHGIKPRVHLEDTTRSDPDFVRALVEEVLRIAAPYPAELQPRFRVCDTLGIGLPFDDVALPRSVPRWIRLLRGFGLTPSQIELHPHNDTWLTVANCLAAIREGCGVISGTTLGTGERTGNAPLEAVMVHLLGMGYWPEGGVDLTAVNKLVELYDGIGAGPSQKYPLFGRDAYVTRAGIHADGLNKFWWMYAPFNAPLLTGRELDVALTKDSGQAGLLFVLNKRLGLRLEKGDPRVVDLLAWMDEQWDAGRVSAIEWSELEPVVEKVFATEEEAS

SEQ ID NO: 12831 - protein, 176 aa, Coccidioides immitis RS
MSSATSFFDFATPDKKGEPFPLSSLQGKVILVVNTASKCGFTPQLQGLEALYKKISADYPDKFTVLGFPCNQFGSQDPGTNDEIQSFCQVNYGVTFPILGKVDVNGDKAAPVFEWMKKEMPGLMGLKRVKWNFEKFLISADGKVVGRWASITKPESLEAPILKEIEKMEKGGRTSL

SEQ ID NO: 12832 - protein, 178 aa, Triticum aestivum
ARGTAEHPAVSEVDSFRRQVDDLASKTDVLERRVNEVVGFYDGKKHGSGGRRASGSSRYAANGARDSNCKGMPDLTRQLTGIIRQITSHEWSAPFLQPVDVVGLQLDDYHKIITKPMDFSTIQNKMEAKDGTKYRSVREIYSDVRLIFTNAMTYNDEHHDVHIMAKLLLEKFEEKWLQ

SEQ ID NO: 12833 - protein, 404 aa, Photobacterium profundum SS9
MKRAVITGMGIVSSIGNDVKEVLASLKSGKSGINFSEQFAENKLRSNVWGDLKMNPAEHIDRKKMRFMGDAAAFAYLSMEQAIEDSGLSDDQVSNDRTGLVAGSGGASSYNQVAAVDIIRNKGVKRVGPYMVPRTMSSTVSACLATPFKIRGVNYTMSSACATSAHCIGHAVELIQLGKQDVVFAGGGEELDWSLTMMFDAMGALSTKYNDDPSKASRTYDADRDGFVISGGGGMVVIEELEHALARGAKIYGEVVGYGATSDGYDMVAPSGEGAVRCMKMAMKDLDAPIDYINTHGTSTPVGDVKELGAIQELFGKNSPAISATKAMTGHALGAAGVHEAIYSTLMLNNNFVAPSINIDNLDPAAEGLDIVTETRETELTTVMSNSFGFGGTNATLVIKKYEG

SEQ ID NO: 12834 - protein, 173 aa, Triticum aestivum
  misc_feature (139)..(139): Xaa can be any naturally occurring amino acid
MLQGSGISNQKTLYEVLSVPEDATYDEIRAAYKCAALNTHPDKAQATLEPSVSTGEQHGFFSVQKAWETLRYPKCRAEYDKQLQSSRQSLDVIATDIEIEDMIVESSGDGVELLYACRCGDYFSITACELGEMGISVSXDGEIEAQAPDSLPTSVVLGCGSCSLKTRLIINKA

SEQ ID NO: 12835 - protein, 680 aa, Dechloromonas aromatica RCB
MSNAENDLSNERLHDFSRSSADWFWETDTDHRFTYLSDDIESKVGVPIDYLMGKSRRELATQLTNNPPGDWEKYLAALNAREAFRDFEYCALAPNGVAYWFSISGVPFFDEQGEFRGYRGVGRDVTETHSMQVELHRYRSHLEDEVRRRTEESLKERERAISASQAKSIFLANMSHEIRTPMNAIVGLTHLLRKEITTPAQLEKLAQVSASADHLLSVINDILDISKIESGNAALDELDFELEGMIRRVSSVIALRAQAKGLELIVDIRTLPTVLHGDPTRLSQVLINFLGNAVKFTVQGSITLRGRIEAETATDMVVRFEVEDTGIGISPDAQEKIFEAFEQADQSTTRNYGGTGLGLAIAKHAAKMMKGDVGVRSTPGVGSVFWITARLGKVNAAGPEFIVPEAVGVSTLVVDDLPLTQAVHSQLLKRIGLNPIAVMSGQEALTAVQIADRELHPFGIAFIDLHMPDLNGLEVIAKIRALPLRYQPHCVLVTAAGIQSIVDEAKSVGYAAVLQKPASLAGLREIVSQLLTTQGSQFQYLKEKKRPCEALLREHKAGCRILLVEDEPINQMIARELLEDASLVVHVADNGQQAVEMALSTPSPYDLILMDVQMPVLDGIAAAHCIREKRPDLHTPIIALTANAFSDDRRKCLAAGMNDFVSKPVDPDVLFEIIWKWLSK

SEQ ID NO: 12836 - protein, 466 aa, Streptomyces viridochromogenes
MFVNGALQPARRHTTVHDRWTGEPVGTVPRDGAEEAAAAVAALAAGRRATTPQQRSAVLTRAADMLTARAEEFSTLITAESGVCRKETLREVSRAAGNLRVAAAEAERIRGESIPLPDGTRLAVTLPEPVGVVLGITPFNRPLNQVVVKAAPALAAGCPLLLKPSEKTPLTALAFAELLVEAGCAKDMLAVVTGEPGEVGPPLAAHPDVAMVTFTGSVATGHAVAAQAAGKRQLLELGGNDPLFVLPDADLRRAAKLAADGSCATAGQSCRGIKRVFVWEEVADEFTALLEPAVAAKRAGDPRREDTDLGPLVSEEAALVVERRIARAVRDGARLVTGGERDGALVRPAVLDHVPPDTELVTEETFGPVAPVIRVRDADEAVRLSNGTAYGLQAGVLTRDSAAFWDIAARLRVGAVNLGEGPHFDSPHIPFGGVKSSGVGREGIRYAIAEMTVTKTVTLPGPYGTG

SEQ ID NO: 12837 - protein, 553 aa, Escherichia coli
ASIFGVFDIKTDAVELRKKALELSRLMRHRGPDWSGIYASDNAILAHERLSIVDVNAGAQPLYNQQKTHVLAVNGEIYNHQALRAEYGDRYQFQTGSDCEVILALYQEKGPEFLDDLQGMFAFALYDSEKDAYLIGRDHLGIIPLYMGYDEHGQLYVASEMKALVPVCRTIKEFPAGSYLWSQDGEIRSYYHRDWFDYDAVKDNVTDKNELRQALEDSVKSHLMSDVPYGVLLSGGLDSSIISAITKKYAARRVEDQERSEAWWPQLHSFAVGLPGSPDLKAAQEVANHLGTVHHEIHFTVQEGLDAIRDVIYHIETYDVTTIRASTPMYLMSRKIKAMGIKMVLSGEGSDEVFGGYLYFHKAPNAKELHEETVRKLLALHMYDCARANKAMSAWGVEARVPFLDKKFLDVAMRINPQDKMCGNGKMEKHILRECFEAYLPASVAWRQKEQFSDGVGYSWIDTLKEVAAQQVSDQQLETARFRFPYNTPTSKEAYLYREIFEELFPLPSAAECVPGGPSVACSSAKAIEWDEAFKKMDDPSGRAVGVHQSAYK

SEQ ID NO: 12838 - protein, 450 aa, Lactobacillus plantarum WCFS1
MKVIVIGCTHAGTAAVNQILASNPDTEVTIYERNDNVSFLSCGIALYLGGQVADPQGLFYSSPEQLAKLGATVHMQHDVTDVNTDKHEITVTDLKTGESKTDHYDKLVVTTGSWPVIPPIDGIDSPNVYLCKNWTHAQNLWEAAKPAKRVIVIGGGYIGTELVEAYQKQGKEVTLIDGLPRILNKYLDKEFTDRVEQDFVDHGIKMALNQMVQGFSDDGKEVTVKTDKGSYTADMAILCVGFRPNTGLLKGKVDMNANGSIKTNDYMQTSDPDIYGAGDSVAVHYNPTKKDAYIPLATNAVRQGTLVGLNIFKPTRKYMGTQSTSGLMLFGQTIVSSGMTLEHAQAENVPAAAVTFEDNYRPEFMPTTKPVLMQLVYNPETREILGAQFMSEHDVSQSANVISVMIQNHNTIDDLGFVDMFFQPIYDRPFNYLNLLGQAAIAHAAEAVTE

SEQ ID NO: 12839 - protein, 293 aa, Arabidopsis thaliana
MATNIGMMDSAYFVGRNEILSWINDRLHLNLSRIEEAASGAVQCQMLDMTFPGVVPMHKVNFEAKNEYEMIQNYKVMQEVFTKLKITKPLEVNRLVKGRPLDNLEFLQWLKRFCDSINGGIMNENYNPVERRSRGGREKSVKGSSKISKSLQTNNMHHPPVATSNKPAGPKQAKSHGIGGGSNSSAEVQALSKEVEDLKVSVDLLEKERDFYFSKLRDIEILCQTPELDDLPIVVAVKKILYATDANESVLEEAQECLNQSLGLEGYEEEGKEEEEEEEEEEEEAAAAAETQT

SEQ ID NO: 12840 - protein, 149 aa, Arabidopsis thaliana
  misc_feature (59)..(59): Xaa can be any naturally occurring amino acid
  misc_feature (63)..(63): Xaa can be any naturally occurring amino acid
  misc_feature (80)..(80): Xaa can be any naturally occurring amino acid
  misc_feature (82)..(82): Xaa can be any naturally occurring amino acid
  misc_feature (102)..(102): Xaa can be any naturally occurring amino acid
  misc_feature (138)..(138): Xaa can be any naturally occurring amino acid
MASSMLSSAAVATYPAQANMGAPFTAMKPCASLPDTRKANNDITYITCNGGRASRMKGXPPIXKKTLETLSYLPDLTDYXIXKEVDYLLHNKWITRGEFQMXHGLEYREHGNTPGYYDGRDWTIAKLPLFGCTDSAQXLNEGEECKNEY

SEQ ID NO: 12841 - protein, 391 aa, Oceanobacillus iheyensis HTE831
MLDFDTNMEELATIKVIGVGGGGNNAVNRMIEHGVEGVEFIAVNTDAQALNLSKAESKIQIGGKLTRGLGAGANPEVGKKAAEESKEQLEEVLKGADMVFVTAGMGGGTGTGAAPVIAQVAKDIGALTVGVVTRPFSFEGRRRSTQAVSGIDTLKGAVDTLIVIPNDRLLEIVDKNTPMLEAFREADNVLRQGVQGISDLIAKPGLINVDFADVKTIMFDKGSALMGIGIATGETRATEAAKKAISSPLLETSIDGAHGILMNITGGTNLSLYEVQEAADLVTSAADQEVNVIFGSVINENLNDEIVVTVIATGFDENAKKVDTRQKQQRTNIGQSQQTASKDLNEAASTRETRESRESQQPSQPQAQSRPRQDEEELDIPTFLRNRNRNR

SEQ ID NO: 12842 - protein, 388 aa, Hordeum vulgare subsp. vulgare
MALQLLPSTLSVPKKGSSMGAVAVKDTAAFLGVSSKAKKASLAVRTQVATAPSPVTTSPGSTASSPSGKKTLRQGVVVITGASSGLGLAAAKALAETGKWHVVMACRDFLKASKAAKAAGMADGSYTVMHLDLASLDSVRQFVDAFRRAEMPLDVLVCNAAIYRPTARTPTFTADGHEMSVGVNHLGHFLLARLLMEDLQKSDYPSRRMVIVGSITGNSNTLAGNVPPKASLGDLRGLAGGLSGASGSAMIDGDESFDGAKAYKDSKVCNMLTMQEFHRRYHEETGITFSSLYPGCIATTGLFREHIPLFRTLFPPFQKFVTKGFVSEAESGKRLAQVVAEPVLTKSGVYWSWNKDSASFENQLSQEASDPEKARKVWELSEKLVGLA

SEQ ID NO: 12843 - protein, 106 aa, Arabidopsis thaliana
MAKSYGAIFLLTLIVLFMLQTMVMASSGSNVKWRQKRYGPGSLKRTQCPSECDRRCKKTQYHKACITFCNKCCRKCLCVPPGYYGNKQVCSCYNNWKTQEGGPKCP

SEQ ID NO: 12844 - protein, 387 aa, Arabidopsis thaliana
MATMITNLRRDLIEEIISRVPLRSMKAVRLTCKSWNNISKSEIFTKMQIDKATTREGKTMMISVMPHNLSLMSVAVDDVDPSVEFKGQLSFLCNQVSIHKVIHCEGLLLCFLKDHTRVVVWNPYSGQTRWVKLRYPHPPSPSKWDWFRYALGYEDKGSCRSVKFLRFLDYLPEEPENQNVCYEIYDFDSDLWTTLDVTSHSWICYSSCGVFLKGNAYWPVVKSSSEANIDHIIYFDFTRESFGPPLPLPFGATDRGYSYVNLSCVKEEKLAAFFQHYISYKYEFEIWVTTKIEAEMVSWSKFLRMDLGPNIDIPITFFIDEEKKVFMGFEHREYPKRFINIIGEAKYLRKLDLQVPQGQYCCPPLCSYVPSSIQIKKPALRQKDRAK

SEQ ID NO: 12845 - protein, 110 aa, Hyacinthus orientalis
SIGRVTQRTDNIVENALAAIEGAMELVPKKWGNLRSVHVKTVESVALPVYQAVPEIGMKIEGVWDKQGGSFVKGKKSERGEDEKKQRKEKKGRIHDAGVFDGDGGGGGDG

SEQ ID NO: 12846 - protein, 406 aa, Vibrio vulnificus CMCP6
MSDTASQVHGAVQTLTQSSDTLFLLLGAIMVFLMHAGFAFLEVGTVRHKNQVNALVKILADFGISTLAYFFIGYWVAYGAHFFADAETLAQGNGYELVKFFFLLTFAAAIPAIVSGGIAERARFYPVLIATFFTVGIVYPLFEGIIWNGNFGIQAWFEATFGVGFHDFAGSVVVHGVGGWIALVAVIFLGMRRGRVRAGKHTNFAPSNIPFLALGAWILCVGWFGFNVMSAQTLNGISGLVAMNSLMAMAGGIVAALIAGKNDPGFIHNGPLAGLVAVCAGSDLMHPLGALVTGSVAGVLFVYLFTYLQNKTKIDDVLGVWPLHGVCGAWGGIAAGIFGQSSLGGLGGVSFTVQLLGTLLGISVALIGAGIVYGAINRLSGLRLSQEDEFNGADLAIHKISSVNAE

SEQ ID NO: 12847 - protein, 418 aa, Medicago truncatula
MVTTLLPSSLTNPNKLLSHSSLFHNSSLSTSHSVSLYPKTQRFTRRFGSVKCSLAYVDNAKIKVVGIGGGGNNAVNRMIGSGLQGVDFYAINTDAQALLHSAAENPIKIGELLTRGLGTGGNPLLGEQAAEESKEAIADALKGSDLVFITAGMGGGTGSGAAPVVAQISKEAGYLTVGVVTYPFSFEGRKRSLQALEAIEKLQRNVDTLIVIPNDRLLDIADEQMPLQDAFRLADDVLRQGVQGISDIITIPGLVNVDFADVKAVMKDSGTAMLGVGVSSGKNRAEEAAEQATLAPLIGSSIQSATGVVYNITGGKDITLQEVNRVSQVVTSLADPSANIIFGAVVDDRYTGEIHVTIIATGFSQSFQKKLLTDPRAAKLLDKVAEGKESKTVPAPLKSSNLSSKVESRAPPPRKLFF

SEQ ID NO: 12848 - protein, 213 aa, Pyrobaculum aerophilum str. IM2
MGIEDAIAAFKAGRLVMIYDGDDREAEVDFVIRADAVTPTTIRWLRQNAGGLLCFVTTREVGEILGLEFLSSYYKRRGFLATAPYGDEPAFMGYVNHVKTKTGIRDVDKALTIRELAKVVQLAQRDPEEAREAFKANFYMPGHVPILGGRLGERWGHTELSLILAKAAGVPPAVVIVEVLGDHTEAMPVEEAREYSKTLGVPLVTGTEIKSLI

SEQ ID NO: 12849 - protein, 176 aa, hyperthermophilic archaeon G1-H
PYGGGKGGIIVDPKKLSDREKERLARGYIRAIYDVISPYEDIPAPDVYTNPQIMAWMMDEYEAISRRKTPAFGIITGKPLSIGGSLGRNEATARGASYTIREAAKVLGWGDLKGKTIAIQGYGNAGYYLAKIMSEDYGMKVVAVSDTKGGIYNPDGLNADEVLKWKQEHGSVKDFP

SEQ ID NO: 12850 - protein, 445 aa, Propionibacterium acnes KPA171202
MDRQLENAYESVLRRNPGEAEFHQAVREIFESLGPVLDTNPQYVEAAVLSRICEPERQIIFRVPWVDDEGKIRINRGFRVEYSSVLGPYKGGLRFHPSVYLGTIKFLGFEQIFKNALTGMPIGGAKGGSDFDPHDASEAEVMRFCQSFMTELYRHLGEHTDVPAGDIGVGSREIGFLFGQYKRITNRHESGVLTGKGLTWGGSLVRTEATGYGTVFFVQRMLATNGKSLDGLRVTVSGSGNVAIYAIEKAQDLGATVVACSDSSGYVVDEKGIDVALLKQIKEVERARICEYAARRDSATFHSDGSIWDVPVDVALPCATQNELNGQAAATLIRNGVVAVAEGANMPCTPEAVHSFQDAGVIFAPGKASNAGGVATSALEMQQNAARDSWDFDATEARLQQIMADIHDRCIETADEYGHPGDYVMGANIAGFTKVADAVIAMGVV

SEQ ID NO: 12851 - protein, 322 aa, Acidobacteria bacterium Ellin345
MSRKIAVLTSGGDAPGMNAAIRSVTRSAIAKGWTVMGVNQGYAGLVAGDYRELAARDVGGLLSKGGTFLGSARCPEFQKEDVREKALRNLNRSGIGALVVIGGNGSQTGGAALNDMGFPTLGVASTIDNDLVGSEITIGVDTALNIALEAIDRLRVTAASHQRGFLIEVMGRKCGYLALMAGIAGGAELVLVPEIDFEPDQIAEAIHDAYRRGKAHAMVVVAEGAKHNAEQLVRYFHDKNTGFELRATILGHVQRGGTPTAYDRLLASRLGAGAVEALDKGISGVVVGMNQGVVSTTPYSEVTGRTKGISPELYQLAHVLSR

SEQ ID NO: 12852 - protein, 457 aa, Bartonella henselae str. Houston-1
MSIDILMPALSPTMEEGKLSKWLKKEGDKVSSGDIIAEIETDKAMMEVEAVDEGTLGRICVLEGSEGVKVNTVIAVLLEEGETVEDISQSTNSLNTHQKNGGASSSFSSSVPQLPILDTLPDSDIPAGTKMVTMTVREALNQAMAEEMRRDEMVFLLGEEVAQYQGAYKVSQGLLEEFGTRRVIDTPITEHGFAGLAVGAAFGGLRPIVEFMTFNFAMQAMDQIINSAAKTRYMSGGQMTAPMVFRGPNGAAARVGAQHSQCYAAWYSHVPGLKVVMPYSAADAKGLLKAAIRDDNPIIFLENEILYGHQFDVPQIDDFVLPIGKARIHKSGQDVTVVACGIGMHYAVQALPEIEKLGVDVELIDLRTIRPMDLPTIVSSVKKTGRLITIEEGYPQSSVGTEIATRVMQQAFDYLDAPVATVAGKDVPMPYAANLEKLALPNTAEIVEAVKAVTYKA

SEQ ID NO: 12853 - protein, 313 aa, Arabidopsis thaliana
MAISDLPRDLVEEVLSRVPVTSLRTVRSTCKKWNIISKDESFTKKHVGQANAAARESEFQVVIMTEYKVYLMSVNLHGIQNNVDPSIEFKCKLISLDDSDRIVDFHPVYETEIYNFHSDSWKNIVDSTPEGDMQYFKQGVSLKGNTYWFARKYVIYEGGQEAWVSFLICFDFTTERFGPRLTLPFDYSTKESVSLLSAREEQLVLLYHPWFTMMMEIWVSNKIELNAVSWIKFLEVNMITFPHYRFSFHHVSFFIDKKNKVVVVLDKDKETRSRNLGYFIGDDGYFKEVELGGSRDRNGYPFVFSYVPSSVQF

SEQ ID NO: 12854 - protein, 319 aa, Listeria monocytogenes
MKRIAILTSGGDAPGMNAATRAVVRKAIYEGLEVYGINYGFLGLVNGDIRKLELGSVGDLLHRGGTFLYSARYPEFATEEGQLKGIEQLKKHQIDGLVVIGGDGSYHGAEALTKRGFPTIGIPGTIDNDISGTDFTIGFDTALNTVLDALDKIRDTATSHERTFIIEVMGRDAGDIALWSGLAGGAEAIIVPEESFNMDDVVDRLNKGRERGKKHSIIVVAEGVMSGNEFAKQLAEYGDYHARVTVLGHVQRGGSPTAFDRVLASRLGARSVELLLENRGGLAVGIRENRIVENDISEILKEKHTLDQKLFDLASILSI

SEQ ID NO: 12855 - protein, 264 aa, Oryza sativa (japonica cultivar-group)
MILDKPLADIGGKGLFTKEIDDALLQGRIDIAVHSMKDVPTYLPEGTILPCNLPREDVRDAFICLTASSLAELPAGSVVGSASLRRQSQILYKYPSLKVVNFRGNVQTRLRKLKEGDVHATLLALAGLKRLNMAETATSVLSVDEMLPAVAQGAIGIACRSSDDTMMNYLSSLNHEDTRLAVACEREFLSVLDGNCRTPIAAYASRDKDGNCSFRGLLASPDGSTVYETSRTGPYDFDIMVEMGKDAGHELKAKAGPGFFDSLQ

SEQ ID NO: 12856 - protein, 415 aa, Magnetospirillum magnetotacticum MS-1
MFILLGAVMVLAMHSGFAFLEVGTVRKKNQVNALVKIISDFAVSTIAYFFVGYGVAYGTNFLVGADVLIGKTGNAFAASGYDLVKFFFLATFAAAIPAIVSGGIAERAKFTTQLMATAILVGLVYPLFEGMVWGTRFGFQELMKGWFGAAFHDFAGSVVVHAVGGWIGLGAVLMLGTRLGRYRKDGRLVAFPPSNIPFLALGAWILSVGWFGFNVMSAQVIADISGLVAMNSLMAMVGGILTSLVVGRNDPGFIHNGALAGLVAVCAGSDVMHPIGALVTGGIAGALFVWLFNLCQIKWKIDDVLGVWALHGMCGFLGGVACGVFGQEALGGLGGVSFGGQIAGTVIGAAFGLAGGLAVYGGLKAAFGIRLSDEEEFAGADLSIHQIGAYPEDATTVHDDGLAMSVHSANKRKAG

SEQ ID NO: 12857 - protein, 425 aa, Streptomyces rimosus
MSKIHDARRVVITGIGVVAPGDVGTKPFWEMLTAGRTATRPISSFDASPFRSQVAAECDFDPAAEGLSQRQVRAWDRTMQFAYVAAREALADSGVTGEADPLRTGVMAGTACGMTMSLDREYAVVSDEGRLWQVDDAHGVPYLYDYFVPSSMAAEIAWLAEAEGPAGVVSAGCTSGIDVLTHAADLVRDGAAEVMVAGASDAAISPITVACFDAIKATTPRNDEPETASRPFDRTRNGFVLGEGAAFFVLEEYAHARRRGARAYAEIAGYAGRCNAYSMTGLRSDGRELAEAVSRALDIARVDPSEVDYVNAHGSATKQNDLHETAAFKRSLGPHAYSVPISSIKSMIGHSLGAICALEVAASALRIEHGVIPPTANLREPDPDCDLDYVPLVAREAEVSTVVSVASGFGGFQSAIVLTEPGRQR

SEQ ID NO: 12858 - protein, 203 aa, Glycine max
MKQIEMESNASALAKKVWSMVRVVLFMLRKGITKGKLMMDLNMMLKRRGKLAGKAIANLMSSHHHHNRGGSHNSHHLKFSAPREYEFSCSNTPHNFFFPTGGKHHRHHFFACVHAPPTQDDDVVTVNAMKAVMEMLNNNNNDAVKVEASPALPGFGRSPMVRQLRVTDSPFPLRDADQDNDHLVDKAAEDFIKRFYKELRKQD

SEQ ID NO: 12859 - protein, 157 aa, Triticum aestivum
MVAGCFITDECALAVSTERMWKAVFSGEDTAVLPKACAGFIDAVDVEGDGGPGSVSTMTLSPAAAELAGSGVMRSRLVARDNAARVIKTELLEGSKVSAQLKSQVAEVNLEAAGGGALRGQSSTGEYQNAPPARRHLARRIHRITIRDRTSPGGGHR

SEQ ID NO: 12860 - protein, 566 aa, Kluyveromyces lactis
MSELETGTAAHGTPVENKSVSSSQASTPTNVGSRDDLKVDDDNHSVDAIELPKKPRSAYITVSILCLMVAFGGFVFGWDTGTISGFVNQTDFIRRFGQEKADGSHYLSNVRTGLIVSIFNIGCAIGGIILSKLGDMYGRRIGLMIVVLIYVVGIIIQIASIDKWYQYFIGRIISGLGVGGISVLSPMLISETAPKHIRGTLVSFYQLMITFGIFLGYCTNYGTKTYSNSVQWRVPLGLCFAWAIFMITGMLFVPESPRFLVEKDRIDEAKRSIAKSNKVSYEDPAVQAEVDLICAGVEAERLAGSASIKELFSTKTKVFQRLIMGMLIQSFQQLTGNNYFFYYGTTIFNSVGMDDSFETSIVLGIVNFASTFVAIYVVDKFGRRKCLLWGAAAMTACMVVFASVGVTRLWPDGANHPETASKGAGNCMIVFACFYIFCFATSWAPIAYVVVAESYPLRVKAKCMAIATASNWIWGFLNGFFTPFITSAIHFYYGYVFMGCLVAMFFYVFFFVPETKGLTLEEVQEMWEEGVLPWKSSSWVPSSRRNAGYDVDALQHDEKPWYKAML

SEQ ID NO: 12861 - protein, 125 aa, Sulfolobus acidocaldarius
MTKPAKKNMKSPGKAIKFLRFDWDKYYRIGRQERWRKPRGIDNAIRLELKGYQPKVKIGYRTDKQIRGLHPSGLRPILVKSVKDLEAFAKGKQDVIIIISSTIGLRKRIELIKKAEELGLKIANR

SEQ ID NO: 12862 - protein, 322 aa, Crocosphaera watsonii WH 8501
MTIRTVTTTPFEGQKPGTSGLRKAVSVFQEQNYLENFIQSILDSLDGCEGQTLVVGGDGRYYNRQAIQIILKMAAANNIGRILVGTNGIFSTPAASAVIRKNNAFGGIILSASHNPGGPKGDFGVKYNVGNGGPAPEKVTNAIFERTKTIDEYKILEAGDINLDRPGSFKLGTMDVEVMDSVNPYVELMQELFDFDKIKSMVSSDNFKMCMDSLHAVTGPYARALFEQFLGAKEGTVQNGIPLEDFGGGHPDPNLVYAHDLVEIMFGDNAPDFGAASDGDGDRNMVLGKNFFVTPSDSLAVLTARATLVPGYKDGIAGGARS

SEQ ID NO: 12863 - protein, 377 aa, Lilium speciosum
MENAKGPVVVTGASGYVGSWLVMKLLQYGYTIRATVRDPRDLRKTKPLLDIPGADERLTIWKADLSEDASFDEAINGCTGVYHVATPMDFDSKDPENEVIQPTINGVLGIMKSCKKAGTVKRVIFTSSAGTVNVQENQMPEYDESSWSDVDFCRRVKMTGWMYFVSKTLAEKAAWEFAKENDIQLISIIPTLVVGPFITSTMPPSMLTALSLITGNEAHYSILKQIQLVHLDDVCKAHIFLFENPEASGRYICSSYDATIYDLARKIKDRYPQYAIPQKFEGIDDQIKPVHFSSKKLMDLGFKYQYTFEEMFDEGIRSCIEKKLIPHQTQERYYVHDELDLGCSKMTNDKLDLGGSKLNSMDEMVRGHNERVSVALQ

SEQ ID NO: 12864 - protein, 612 aa, Streptomyces rimosus
MCGIAGWIDFERNLAQERATAWAMTDTMACRGPDDAGLWTGGHAALGHRRLAVIDPAHGRQPMHSTLPDGTSHVITFSGEIYNFRELRVELESQGHRFRTHCDTEVVLHGYTRWGRELVDRLNGMYAFAVWDEARQELLLVRDRMGVKPLYYHPTATGVLFGSEPKAVLAHPSLRRRVTAEGLCEVLDMVKTPGRTVFSGMREVLPGEMVTVGRSGVARRRYWTLQAREHTDDLETTIATVRGLLTDRVRRQLVSDVPLCTLLSGGLDSSAVTALAARAGDGPVRTFSVDFSGAGTRFQPDAVRGNTDAPYVQEMVRHVAADHTEVVLDSADLAAPEVRAAVLGATDLPPAFWGDMWPSLYLFFRQVRQHCTVALSGEAADELFGGYRWFHRTAAIDAGTFPWLTAGSARYFGGRGLFDRKLLDKLDLPGYQRDRYAEARKEVPVLPGEDAREAELRRVTYLNLTRFVQTLLDRKDRMSMATGLEVRVPFCDHRLVDYVFNVPWAMKSFDGREKSLLRAAVRDLLPESVVTRVKTPYPATQDPVYERLLRDELAALLADSQAPVRELLDLGRARDLLRRPVGAVSQPYDRGSLELVLWMNTWLAEYGVSLEL

SEQ ID NO: 12865 - protein, 299 aa, Heterosigma akashiwo
WDDMEKIWHHTFYNELRVAPEEHPVLLTEAPLNPKANRERMTQIMFETFNVPAMYVNIQAVLSLYASGRTTGCVLDSGDGVSHTVPIYEGYALPHAIVRLDLAGRDLTDHLMKILTERGYSFTTTAEREIVRDIKEKLTYVALDFDQEMKTATESSALEKSYELPDGNVIVIGNERFRCPEVLFQPSLIGKEASGIHDCTFQTIMKCDVDIRKDLYSNIVLSGGTSMFPGIADRLAKEITALAPSTMKIKVVAPPERKYSVWIGGSILASLSTFQQMWISKAEYDEAGPSIVHRKCFQA

SEQ ID NO: 12866 - protein, 369 aa, Lilium speciosum
MAPVATTFLPTISDEKTLRASFVRDEDERPKVAYNNFSDDIPIISLAGMDEDGPIRSEICGKIVAACEDWGIFQVVDHGVDAGLVTEMNRLAREFFALPPEDKLRFDMTGGKKGGFIVSSHLQGEAVQDWREIVTYFSYPIRVRDYSRWPDKPEGWRAVVEAYSEQLMGLACKLLGVLSEAMGLDKEALTKACVDMDQKIVVNFYPKCPQPDLTLGLKRHTDPGTITLLLQDQVGGLQATKDGGNTWITVKPIEGAFVVNLGDHGHFLSNGRFKNADHQAVVNSNSSRLSIATFQNPAPEATVYPLAIRDGEKPVLDAPMTFSEMYRKKMSKDIELAKLKKLANTEAQEVAKKPTEVAVQPGKLDQILA

SEQ ID NO: 12867 - protein, 341 aa, Anaplasma marginale str. St. Maries
MRPEIHLWERMALITVREALRQAMEEEMERDPNVLLIGEEVGEYQGAYKVSQGLLERFGPSRVVDTPISEHAFTGIAVGAAFCGLKPIVEFMSFNFSMQAMDQIVNSAAKTNYMSGGQLGCPIVFRGPNGAAAGVAAQHSQCYASWYAHIPGIKVVAPYFAADCKGMLKAAIRDPNPVIFLENEIAYGHQHDISEEEQSADYLVEIGKAAVVREGSDLTVLAFSLQLQYALEAADALMNDGISAEVIDLRTIRPLDRETILQSVRKTNRLVTVEEGWPFSGVGAEIAAFVTEFAFDDLDAPVLRVAGKEVPLPYAANLEASALPQVGDIVSAAHEVCYRKV

SEQ ID NO: 12868 - protein, 449 aa, Streptococcus mutans UA159
MTTGKEYVASVFEKVKAQNAHEPEFLQAVEEVFESLIPVFDNYPKYIEENLLERLVEPERIVSFRVPWVDDKGQVQVNRGFRVQFSSAIGPYKGGLRFHPSVNQSIIKFLGFEQIFKNSLTGQPIGGGKGGSNFDPKGKSDNEIMRFCQSFMTELSKHIGADTDVPAGDIGVGGREIGYLYGQYKRLRNEYTGVLTGKGLTWGGSLARTEATGYGAVYFAEQMLKARGQDFAGKTAIVSGSGNVAIYATEKLQTLGAKVVAVSDSSGYVYDPDGIDVALLKELKEVQRARIIKYADARPNASFTPAGGDSIWTIKADLAFPCATQNELNEADAKTLVANGVIAVSEGANMPSTLEAIDVFLKAGVSFGPAKAANAGGVAVSALEMAQNSQRTAWTFEEVDRKLYDIMKGIYDNSAAAAKSFGQEGNLVVGANIAGFLKVADAMSAQGIV

SEQ ID NO: 12869 - protein, 365 aa, Listeria monocytogenes
MEKNIDVLQNWLKDQGAEVGFLTDPENIAYFSGYHSEPHERVLGLAVFSDSEPFLFTPALEVEDVRGGDWTHPAYGYNDTENPFTIIADEIKKRVANPSKFAIEKKHMSVDRYEQLGGLFSGSSFIPIEHKIEQIRLIKTEAELKILKEAALLADYAVQVGVDEIAEGKTEAEIVAKIEYEMKKKGVTAMSFDTMVLTGKNGALPHGTPGETKIKKGDLVLFDLGVVHKGYCSDITRTVAFGDISDEQKKIYDTVLEAQIAAVEKVKAGVKASEIDLTARNIIREAGFGDYFPHRLGHGLGASVHEFPSITETNSMELQENMVFTIEPGIYVPGVAGVRIEDDLVVTKDGVQVLTEFPKTLQVIE

SEQ ID NO: 12870 - protein, 550 aa, Cryptococcus neoformans var. neoformans B-3501A
MGGGAPAGGDFEALLTQRQNEGWRGLFKNGRALGLACFASLGGVLYGYNQGVFGQVQVMYNFEQRYTATLTNPDTKGLLTSILELAAFVGALMAGPLSDRYSRKYSISAWCVVFMMGTAIQTGANSNVACIYAGRWFAGMGVGALSMLVPMFNAELAPPGIRGSLVALQQLAITFGILISYWIGYGTNYIGGTGAGQTTAAWRIPLGLQLIPGVVLCVGACFLPFSPRWLMLRGREEECLTNLARLRSSTEEAPEIQYEFRALQAERLVEREAAKERYGQEDVNFRVTMLEYKRLFTTRPLLHRLMLGAGAQALQQWTGINAIIYYAPTIFAQIGLTGSGASGTISLLATGIVGVVNFVFTIPAVLFVDNFGRRPLLAWGEANMAISHAIIAAIVAEFGDRFDSNKKAGNAAVFFIYWYIANFAVTWGPLAWVVSAEVFPLDMRAKGMSISSGVNWLMNFTVAMVTPHMIDNIGYKTYIVFMCFCVVGFLYSIFILPELKGLSLEEVDRVFHDESGAEDRARRERVAAQIGLDKVAEQIQHKEKVNDSEA

SEQ ID NO: 12871 - protein, 480 aa, Euglena gracilis
MYCGRYETIGETRGNSLNVFIGAAAGFVAAVALINSGLATSFYSTPVRAVPQVIVPSSLAASSQLPVVPKETNIQVNSAQILYPDSTVKGQERTITILGVCSFLSASLFYIWKQFGMKARTTKPADLQEVSGGRIWSLASTTGSNIGAGKTVRVATRKSPLAMWQAEFIQSELERLWPGITVELQPMSTRGDKILDSPLAKVGGKGLFVKELETALLENRSDIAVHSTKDVPMELPEGLVLGVICKRHDPCDAIVFPKGSNLKSLEDLPHGARVGTSSLRRQCQLLLKRPDLKFLELRGNVNTRLAKLDSGDYDAIILAAAGLKRLGFSDRVLPGETNIIDPNVMCPAAGQGALSIELRTNDPEIAALLEPLHHIPDAVTVACERAMNRRLNGGCQVPISGFAQLKDGQLRMEARVGSVTGKGPLIIQSKTFRLPWSGRTWPQLQKESEALGVEVADMLLADGAQAYLDEAYASRTLGWA

SEQ ID NO: 12872 - protein, 489 aa, Cryptococcus neoformans var. neoformans B-3501A
MGGGAPAGGDFEALLTQRQNEGWRGLFKNGRALGLACFASLGGVLYGYNQGVFGQVQVMYNFEQRYTATLTNPDTKGLLTSILELAAFVGALMAGPLSDRYSRKYSISAWCVVFMMGTAIQTGANSNVACIYAGRWFAGMGVGALSMLVPMFNAELAPPGIRGSLVALQQLAITFGILISYWIGYGTNYIGGTGAGQTTAAWRIPLGLQLIPGVVLCVGACFLPFSPRWLMLRGREEECLTNLARLRSSTEEAPEIQYEFRALQAERLVEREAAKERYGQEDVNFRVTMLEYKRLFTTRPLLHRLMLGAGAQALQQWTGINAIIYYAPTIFAQIGLTGSGASGTISLLATGIVGVVNFVFTIPAVLFVDNFGRRPLLAWGEANMAISHAIIAAIVAEFGDRFDSNKKAGNAAVFFIYWYIANFAVTWGPLAWVVSAEVFPLDMRAKGMSISSGVNWLVSLLLQRVSFRIALIIAVDELHCRYGYPSHDR

SEQ ID NO: 12873 - protein, 491 aa, Rhizobium sp. NGR234
MTLTSALTRHLKCPELFRNLANEPHPSVAGQRQRFSVFNPSTGELLAEVPDMGAADAHAAIERADAAQEPWSGLTARARSDILWKWHRFILEHSDDLAAILTAEMGKPLGEAKSEVQHAAAYLQWYAEEANRIYGETISAPSTDRRMLVIKQPIGVVGAITPWNFPASMVARKISPALAAGCTVVLKPAEQTPLVAGAMFALAKLAGFPDGVLNLVYASEGDAIGRELCTNPKVRKISFTGSTEVGRLLMRQCSDQIKRISFELGGNAPFIVFDDADIDAAVDGAIQAKFRNAGQTCVSANRIYVQSGVYAEFAEKFTERVRTLKVGDGFDPNVAIGPLINQEALKKIELHISDAVQKGARVRSGGRRTGSSGTFFEPTVVTDVSKTMRLAEEETFGPLAPLLRFDDADHVVREANDTIYGLAAYFYASNLKRVWRVAEALEYGMVGINTGRMSSEAAPFGGVKQSGIGREGSRHGLEDYLDMKYLCVGGL

SEQ ID NO: 12874 - protein, 308 aa, Staphylococcus aureus subsp. aureus NCTC 8325
MRKLVVGSRRSKLALTQSQQFIDKLKAVEPNLEIEIKEIVTKGDRIVDKQLSKVGGKGLFVKEIQHELFEKNIDMAIHSLKDVPSVIPEGLTLGCIPDRELPFDAYISKTHTPLSQLPEGSIIGTSSLRRGAQILSKYPNLEIKWIRGNIDTRLEKLQTEDYDAIILAAAGLRRMGWSDDIVTSYLDRDTLLPAIGQGALGIECRSDDEELLTLLSKVHNDEVAKCVTAERTFLAEMDGSCQVPIAGYATISDQNEIEFTGLIMTPDGKERFEYTMNGTDPVELGKTVSNKLKEQGAYEIIKRLNEQH

SEQ ID NO: 12875 - protein, 234 aa, Pyrococcus abyssi GE5
KISEEALEFLKRPQRIVEVTIPVEMDDGSVKVFTGFRVQYNWARGPTKGGIRWHPEETLSTVKALAAWMTWKTAVMDLPYGGGKGGIIVDPKKLSDREKERLARGYIRAIYDVISPYEDIPAPDVYTNPQIMAWMMDEYETIARRKTPAFGIITGKPLSIGGSLGRNEATARGASYTIREAAKVLGWDDLKGKTIAIQGYGNAGYYLAKIMSEDYGMKVVAVSDSKGGIYNPDG

SEQ ID NO: 12876 - protein, 550 aa, Photobacterium sp. SKA34
MLKNINPTQTQAWQDLTAHFEQAQDFQLSDLFANDSARFSKFSAQFGSDILLDYSKNLITEETLTKLFALAKETELDVAIADMFSGEKINRTEDRAVLHVALRNRSNTPIMVDGEDVMPAVNAVLEKMKSFSDRIISGEWKGYTGKEITDIVNIGIGGSDLGPYMVSEALGAYKTRLNMHFVSNVDGTHIAETLKDLNPETTLFLIASKTFTTQETMTNALSARDWFLAKAEDKAHVAKHFAALSTNGEAVAEFGIDTDNMFEFWDWVGGRYSLWSAIGLSISLSVGFDNFVALLDGGHAMDKHFAEAPLEQKLPVILALIGIWYNNFHGAETEAILPYDQYMHRFAAYFQQGNMESNGKYVDRGGNPVDYQTGPIIWGEPGTNGQHAFYQLIHQGTKLIPCDFIAPAISHNPLGDHHPKLMANFFAQTEALAFGKSREKVEAEFFAAGKSQEEVNELAEFKVFEGNRPTNSILVKEITPYTLGALIALYEHKIFTQGVIWNIFSFDQWGVELGKQLANQILPELNNKEEVSSHDSSTNGLINAFKQWRA

SEQ ID NO: 12877 - protein, 451 aa, Cryptococcus neoformans var. neoformans JEC21
MSNYPSEPEFQQAVAEITQTLEPFLAKNPEYRRALDVVQVPERIVQFRVTWERDDGTIAINRGYRVQFNSALGPYKGGLRLHPTVNLSILKFLGFEQIFKNALTGLMMGGGKGGSDFDPKGKTDSEIRRFCYAFMQELSRHIGTDTDVPAGDIGTGGREIGFMFGAYKKYRNENAGILTGKGADWGGSHIRPEATGYGLVYYVTEMLRDLDNTDWKGKRVLISGAGNVAQYAALKVIELGGTVLSLSDSTGALVATGDEGFTPEEIMNIADIKLQRKSLTAFATGSKFQWHEGKRPWTLVSNADIALPSASQNELNDEEAKALIKAGVRYVAEGSNMGCTLDAIKIFEESRTAAKNATDAGVCFYAPGKAANCGGVAVSGLEMAQNSQRLKWTHEEVDAKLKAIMINCYQTCWETGKQYAEAGVVPSLVAGANIAGFVKVANAMREQGDWW

SEQ ID NO: 12878 - protein, 109 aa, Pediococcus pentosaceus ATCC 25745
MAVTINQDNLTDVTQSGLTIVDFWAPWCGPCKMMEPALESLEKTYGDQIQFAKMNVDNNQAVAESFKIMSIPALVLFKDGKAIEKVTGYYPEAKLAKYLEKKISENEPK

SEQ ID NO: 12879 - protein, 512 aa, Rhizobium sp.
MDAGRRRLVINDCMKPERGRRSPLPRRPTRPPDERSSGIGNLAMTPAKLHMTTSLAPIAVHSPYDGSLLGSVEATDPADIDRLLATARRGAEISRNLPRHKRASILEGAAQMVESRHDAFAEIIVREAGKTIVQARKEVLRCVNTLKLSAEEAKRNAGEIVPFDAYTGSEQRQGWFTRDPLGIITAITPYNDPLNLVAHKLGPAIAGGNAVMLKPSNLTPFSAIKLVGALREAGLPEEVITISHGDRELVTAMIAAREVRMVSFTGGFATGEAISRAAGLKKLAMELGGNAPVIVMNDCDFDKAVEGCVSGAFWAAGQNCIGAQRILIQSELYGRFRDAFVAATKKLKAGDPLQEDTDVGPMISKQVAERTEAAVNEAIKAGATLLCGNYREGSLYHPTVLEGTPLTCRLWHEEVFAPVVMLAPFDTLDKGIEMANDPDYSLHAGIFTNDLNVALEAANRIEVGGVMINDSSDYRFDAMPFGGFKYGSMGREGVRFAYEDMTQPKVVCINRG

SEQ ID NO: 12880 - protein, 578 aa, Ustilago maydis 521
MSTPSKPLRSVQIRSAVYTTCRSSSDRFAASQTSSLLPGKGKQRENDASTLSTISCGCHFQQRRHQQTFVRTVSPAGAQVRVQLKSTRSGVFGLSTSRGTRAYQEDTASVSCLHVPVDELRRNYLKLHSLSSSAAGAAAANAALEWDPEKAGGEELAGQVVWFGCFDGHGGQQVSSFLRDQLHRTFESVEKDMVTDTVQYTRELGGYFRRFTGGVLERWVRKDRLKPVRAIAAAGRRPPTLANTAKTTEAGSKQDDVRYKSTEEQVDHLTKPDSLSDMLSDEGQAQDSSKTILQPTRQDGAVKIGGNVDGLGKKTAGSELPAGSAELGWDKLIERIPPPEGMEKETMTMAERLTLAWLVADRQIQSSPELDVGGSTASVALLHSLDMPSIPWYSSEFVGLHVAHVGDTRMLMCSVKDGKAVPLTSYHHPDDRSESERLRKMGAGMITDSFGEARWMGALANTRAFGDSRFKKVGITVEPEIFSQVIRGSDYGFVIAFSDGVGGVMSDQEVVDLCRNAKHPTQAAQNVLTFAEELGAQDNCTVIVIPLKGWAKVGGQDVTRERREMRRSKIDLYRDNRR

SEQ ID NO: 12881 - protein, 481 aa, Azospirillum brasilense
MANVTYTDTQLLIDGEWVDAASGKTIDVVNPATGKPIGRVAHAGIADLDRALAAAQSGFEAWRKVPAHERAATMRKAAALVRERADAIAQLMTQEQGKPLTEARVEVLSAADIIEWFADEGRRVYGRIVPPRNLGAQQTVVKEPVGPVAAFTPWNFPVNQVVRKLSAALATGCSFLVKAPEETPASPAALLRAFVDAGVPAGVIGLVYGDPAEISSYLIPHPVIRKVTFTGSTPVGKQLASLAGLHMKRATMELGGHAPVIVAEDADVALAVKAAGGAKFRNAGQVCISPTRFLVHNSIRDEFTRALVKHAEGLKVGNGLEEGTTLGALANPRRLTAMASVIDNARKVGASIETGGERIGSEGNFFAPTVIANVPLDADVFNNEPFGPVAAIRGFDKLEEAIAEANRLPFGLAGYAFTRSFANVHLLTQRLEVGMLWINQPATPWPEMPFGGVKDSGYGSEGGPEALEPYLVTKSVTVMAV

SEQ ID NO: 12882 - protein, 481 aa, Bacillus halodurans C-125; identical to SEQ ID NO: 698

SEQ ID NO: 12883 - protein, 443 aa, Rhizobium sp.
MSFLDLPEGLPERIIQCNSPYTVRFGVRLRGRMYSFIGWRSVREHCEPVKGDIRYASNADAEEVEALAALMTLKCSLVDVPFGGSKGALKIDPRGWTPQELEHITRRFTQEMNKRPDRARRQCVGSDIGTGEREMAWMMDEFRRANPTDVVTSGACVTGKPLSKGGIAGRAESTGRGVQFAIQSSLRDTRTPGLDGRRNLKGASTVIQGFGNVGYHAARFLSEEDDARVTVLAERDGYVANPEGLSIEALKQHQIRTGSILGFDGAKSIAGDMCGVEQPCDVLIPAAMENAIHAENAERMKAHLVVEAANGPVTFEADEILRSRGVTILPDLYVNAGGVVVSYFERVKNLTHIPFGLMERRRRERGNHTIATALERMTGKESPADMRDEFLEGGAEIDLVRSGLEDVMRSTWTRIADLMEQQPELGDYRTAAYVASIRQVADL

SEQ ID NO: 12884 - protein, 528 aa, Photobacterium profundum SS9
MFFNLEGLLPEAIESIEEQTERAYQQYQKFDKDMDKHIYLRNIQDTNETLFYRLVENHITEMMPIIYTPTVGAACEDFSNIYRRGRGLFISYPNRDRIEDMLNNASRQNVKVIVVTDGERILGLGDQGIGGMGIPIGKLALYTACGGISPAYTLPVVLDVGTNNPQRLSDPMYMGWRHTRISGQEYDNFVDEFIQAVKRRWPDALIQFEDFAQKNAMPLLERYKNKICCFNDDIQGTAAVTVGSLLAACKAAKSKLSEQRISFLGAGSAGCGIAEAIIAQMVSEGISEAQARSQVFMVDRWGLLIDDMPNLLNFQQALVQKRDTVNEWDLADNNVSLLDVMRNAKPTVLIGVSGVPGLFSEDVIREMHAHCKRPIVFPLSNPTSRVEATPADIINWTDGNALVATGSPFEPVVHNGKTYPIAQCNNSYIFPGIGLGILAVNARRVTDEMLMASSRALAECSPLAINGHGALLPPLEDIQKVSRKIAFAVAKKAIEQGKAPKNSDERILDKIDANFWQSDYRNYKRTSF

SEQ ID NO: 12885 - protein, 586 aa, Archaeoglobus fulgidus DSM 4304
MPLRIAVVDRERCQPKKCGQECVKYCPRVRTGDETVKIEDKAVISENLCVGCGICVKKCPMHAIWIVGLPEELEGREVHRYGKNGFVLYNLPVPRKGYVVGILGPNGTGKSTAIKILSGQLKPNLGKEEASWEEIFDRFAGTELLDYLKGIKEGAIRVSQKPQYIEAIPKVYSGKAIELLKRVDERGMLDAVVEKLGLAEAIKRDVKDLSGGELQRLAIAACILRDADFYFFDEVTSYLDIYQRIAVAGVIRELAAEKTVMIVEHDLAILDMLADFVHITYGTPGVFGVVTNAKGARVGINQYLRGYLAEENIRIRDKPIEFEVFQPRESVGENILVEYPSFTKSYEGFRLEVEGGEIYQGEVLGVVGSNATGKSTFVKVLAGVIEDDEKKVELDVKVSYKPQYVKADVNMQVGMFLRRINPMIDSSYYKTEFLKPLMLENLMDRYLDDLSGGELQRVAIVACLLREADLYLLDEPSAHLDVEQRTEAARVIRRFALNTGKSVLVVDHDIYLIDMVSDRLLVFEGQPGKHGIARRPRGMREGMNLFLSKLGITFRRDEETKRPRVNKPDSRLDREQKAAGEYYYYF

SEQ ID NO: 12886 - protein, 156 aa, Zea mays
  misc_feature (138)..(138): Xaa can be any naturally occurring amino acid
GTLGLGRGALTLAPLPSSTESYERSHAVLRDKRSTWFAPQSAVAVAVVAEGLLLAAVVTTSEADITCGQVSFVIAPCLSYARGTGSAPCAFCCIGVMNLKSAVSTDGNRRAGCNCLKNAVRGVRGLNAGNADSIHSKXGESIPYTISTYTDWSRVN

SEQ ID NO: 12887 - protein, 499 aa, Oryza sativa
MAAVAGTGVFAEILEGEVYRYYADGEWRVSASGKSVAIVNPTTRLTQYRVQACTQEEVNKVMETAKVAQKAWARTPLWKRAELLHKAAAILKEHKTPIAECLVKEIAKPAKDAISEVVRSGDLVSYTAEEGVRILGEGKLLVSDSFPGNERNKYCLSSKVPLGVVLAIPPFNYPVNLAVSKIGPALIAGNALVLKPPTQGAVAALHMVHCFHLAGFPKGLINCVTGKGSEIGDFLTMHPGVNCISFTGGDTGIAISKKAGMVPLQMELGGKDACVVLEDADLDLVAANIVKGGFSYSGQRCTAVKVVLIMESVADIVVEKVKAKLAKLTVGPPEADSDITPVVTESSANFIEGLVMDAKEKGATFCQEYRREGNLIWPLLLDHVRPDMRIAWEEPFGPVLPVIRINSVEEGIHHCNASNFGLQGCVFTKDINKAIMISDAMETGTVQINSAPARGPDHFPFQGLKDSGIGSQGITNSINMMTKVKSTVINLPSPSYTMG

SEQ ID NO: 12888 - protein, 317 aa, Vibrio cholerae O1 biovar eltor str. N16961
MDRNIIMTETPIRIATRQSPLALWQANYVKDALMAAHPGLQVELVTMVTRGDVILDTPLAKVGGKGLFVKELEIAMLEGRADLAVHSMKDVPVDFPDGLGLVTICEREDPRDAFVSNTYAKIEDLPSGAIVGTCSLRRQCQLKAARPDLVIKELRGNVGTRLSKLDAGEYDAIILAAAGLKRLELESRIRSFIEPEQSLPAVGQGAVGIECRVNDQRVRALLAPLNHADTADRVRCERAMNLTLQGGCQVPIGSYALLEGDTIWLRALVGEPDGSQIVRGEIRGPRTQAEQLGITLAEQLLSQGAKEILERLYCDHE

SEQ ID NO: 12889 - protein, 151 aa, Triticum aestivum
GVCPICATRVGMDLIGHLTMQHGSYFKMQRRRRVRKVSTGSHSLLSLLRKDLRNGSLQSFLGGSSYVSNPPAAAPDPFLSSLICSLPVAEPSKDLHSDSSDNNFLLNKFPDEKTVERAEPSLSEKDQKERIQRSKFVRGLVLSTIFDDDNL

SEQ ID NO: 12890 - protein, 315 aa, Clostridium litorale
MENVYDIAIIGSGPAGLAAALYGARAKMKTLLLEGMKVGGQIVITHEVANYPGSVPEATGPSLIGRMEEQVEEFGAERVMDNIVDVDFTDKIKVLKGAKGEYKAKAVIVATGASPKLAGCPGEKELTGKGVSYCATCDADFFEDMEVFVIGGGDTAVEEAMFLTKFARKVTIVHRRAELRAAKSIQEKAFKNEKLNFMWNTVIEEIKGDGIVESAVFKNRETGEVTEFVAPEEDGTFGIFVFIGYDPKSALVEGKLELDETGYIPTDDNMKTNVEGVFAAGDIRVKSLRQVVTATADGAIAAVQAEKYIEELFAE

SEQ ID NO: 12891 - protein, 107 aa, Clostridium litorale
MLMLDKDTFKTEVLEGTGYVLVDYFSDGCVPCKALMPAVEELSKKYEGRVVFAKLNTTGARRLAISQKILGLPTLSLYKDGVKVDEVTKDDATIENIEAMVEEHISK

SEQ ID NO: 12892 - protein, 589 aa, Arabidopsis thaliana
MGGGGNLVDGVRRWLFQRPSSSSSSSSSNNNNNNHEQPIFNSSSFSSSSNPNHSANSGELIIEEDLDFSGLTLINVPKRNHLPMDPHKKGETEFFTEYGEANRYQIQEVVGKGSYGVVASAVDSHTGERVAIKKINDVFEHVSDATRILREIKLLRLLRHPDVVEIKHIMLPPSRREFRDIYVVFELMESDLHQVIKANDDLTPEHYQFFLYQLLRGLKYVHAANVFHRDLKPKNILANADCKLKICDFGLARVSFNDAPTAIFWTDYVATRWYRAPELCGSFFSKYTPAIDIWSVGCIFAEMLLGKPLFPGKNVVHQLDLMTDFLGTPPPESISRIRNEKARRYLSSMRKKQPVPFSHKFPKADPLALRLLERLLAFDPKDRASAEDALADPYFSGLSNSEREPTTQPISKLEFDFERKKLVKDDVRELIYREILEYHPQMLEEYLRGGDQLSFMYPSGVDRFKRQFAHLEENQGKPGAAGGGRSTALHRHHASLPRERVPAPNGETAEESSDVERRAAAAVASTLESEEADNGGGYSARNLMKSASISGSKCIGVQSKTDKEDTIAEEEDNETVAELTDKVASLHNS

SEQ ID NO: 12893 - protein, 516 aa, Bifidobacterium longum DJO10A
MTTTASPVSKQTASAAQETGATGAAATAIETIETGVAGVADAATNAAANAIEDLEAAESRGFSTRFPLNSAFIFTFGALGGMLFGFDTGIISGASPLIESDFGLSVSQTGFITSSVLIGSCAGALSIGALSDRFGRKKLLIVSALLFLLGSGLCASSTGFAMMVCARIILGLAVGAASALTPAYLAELAPKERRGSLSTLFQLMVTFGILLAYASNLGFLNHNLFGIRDWRWMLGSALVPAALLLLGGLLLPESPRYLVNKGDTRNAFKVLTLIRKDVDQTQVQIELDEIKAVAAQDTKGGVRELFRIARPALVAAIGIMLFQQLVGINSVIYFLPQVFIKGFGFPEGDAIWVSVGIGVVNFVSTIVATLIMDRFPRKGMLIFGSIVMTVSLAVLAVMNFVGDVAVLAVPTMILIAFYILGFAVSWGPIAWVLIGEIFPLSVRGIGSSFGSAANWLGNFIVSQFFLVLLDAFGNNVGGPFAIFGVFSALSIPFVLRLVPETKGKSLEEIEKEMTKR

SEQ ID NO: 12894 - protein, 297 aa, Mallomonas rasilis
WDDMEKIWHHTFYNELRVAPEEHPVLLTEAPLNPKANRERMTQIMFETFNVPAMYVNIQAVLSLYASGRTTGCVLDSGDGVSHTVPIYEGYALPHAIVRLDLAGRDLTDYLMKILTERGYSFTTTAEREIVRDIKEKLTYVALDFDQEIKTASESSALEKSYELPDGNVIVIGNERFRCPEVLFQPNLIGKEASGIHDCTFQTVMKCDVDIRRDLYANIVMSGGTTMFPGIAERMTKELTALAPSTMKIKVVAPPEGKYSVWIGGSILASLSTFQQMWISKAEYDESGPSIVHRKCF

SEQ ID NO: 12895 - protein, 128 aa, Thermoplasma acidophilum DSM 1728
MANSLAIIADPKTGKTYKKEIPAERMGSLVGRKIGDEIDGVFFDLVGYKLVVTGGSSIDGFPMRSDLQTQGKKQILVSYKKGYRGKNGIRKRITVRGSIIGSDISQINLKIVQYGPTPLEEKKDDQQA

SEQ ID NO: 12896 - protein, 546 aa, Cryptococcus neoformans var. neoformans B-3501A
MPVFSTLINSTESYQRRFDQMARAVLVYWVLKYVLLDGFRHIKARGLCGTANEIRNKIKSLVVRIMLAFPSNRAKLNSELAKTRAELKEKLAPSQYPDGVRLTTVRTLPETGRGREWLESEWENLKKLEKADVDNGRVSGAVYHGGDELNAVINEAMAKFVVTNPLHPDVFPGVRKMESEIVSMCLNLFNGPNGAGTTTSGGTESILMSVKTHRDWARVTKGITRPEMVIPSSAHAAFWKASEYFNIKLHVIPVNQKTRKAEVTAMKRAINPNTIMIVGSAPNFPDGAIDPIPELGALAKRRNVGLHVDCCLGSFIMPFLEKAGFSEGIDPFDFRVPGVTSISCDTHKYAFCPKGTSVIMYRSSELRRFQYYVITDWAGGVYASPSMAGSRPGSVLAGAWAVLNHIGADGYTSSCRQIISAARYLTSSLRTLFPDDLYVLGDPKGPVVAFNSKTINIYAVGDVMSKKGWHLSALGGDGGLHMAFTRLSAKSVDKLIEDLGDALKEVKASPQGAGGDMVALYGLGQTSAGPHVVGKLAETFLDTLYE

SEQ ID NO: 12897 - protein, 280 aa, Thermus thermophilus
MAAKKDYYAILGVPRNATQEEIKRAYKRLARQYHPDVNKSPEAEEKFKEINEAYAVLSDPEKRRIYDTYGTTEAPPPPPPGGYDFSGFDVEDFSEFFQELFGPGLFGGFGRRSRKGRDLRAELPLTLEEAFHGGERVVEVAGRRVSVRIPPGVREGSVIRVPGMGGQGNPPGDLLLVVRLLPHPVFRLEGQDLYATLDVPAPIAVVGGKVRAMTLEGPVEVAVPPRTQAGRKLRLKGKGFPGPAGRGDLYLEVRITIPERLTPEEEALWKKLAEAYYARA

SEQ ID NO: 12898 - protein, 299 aa, Phytophthora palmivora
WDDMEKIWHHTFYNELRVAPEDHPVLLTEAPLNPKANRERMTQIMFETFSVPAMYVNIQAVLSLYASGRTTGCVLDSGDGVTHTVPIYEGYAIPSAIMRLNLAGRDLTDYMMKILTERGYSFTTTAEREIVRDIKEKLTYIALDFDQEMKTAAESSGLEKSYELPDGNVIVIGNERFRTPEVLLQPDLLGKEALGIHECTFQTIMKCDVDIRKDLYCNVVLSGGTTMYPGIGERLTKELTALAPSSMKIKVVAPPERKYSVWIGGSILSSLSTFQQMWISKAEYDESGPSIVHRKCFQA

SEQ ID NO: 12899 - protein, 141 aa, Geobacter metallireducens GS-15
MTQQGAIKTRLILIEDEPGHTRLITKNLMKSADVEILPFDTGRRALEYFEGKTAEDLRQHLVVLDINMPGIDGFEVLKRLKGNEATAAVPVIVFTTTDHPDEIRRCYHEGANLYLVKPMDYTAFQVTIDFLAATLTMMRLP

SEQ ID NO: 12900 - protein, 303 aa, Oceanobacillus iheyensis HTE831
MIYTITLNPSIDFIVPVDQLKLGKLNYMNDEYKVPGGKGINVSRILQELTTSSTALGFIGGFTGNFIIDFLEKRNLKTDFISISEDTRINIKLKSSSETEINGRGPSISSDESSKLLSQLEKITANDFVVLSGSKPPSLPADFYEKVIKKVTETGARFAIDTTGDALMQSLAYQPLVIKPNQHELEDLFGVTISTNEDVIKYGKKLLKKGAQHVIVSMGADGAILITNNGVYKGTSPSGTLRNSVGAGDSMIAGFLSIYLTSQNVLEAFKMSIAAGSATAFSHDLATRNKIDNLLSEIEITTL

SEQ ID NO: 12901 - protein, 396 aa, uncultured bacterium 562
MAREKFERTLPHVNVGTVGHVDHGKTTLTAALTKVAAEVFGGDAVDFANIDNAPEERERGITIATSHVEYVSTARHYAHVDCPGHADYVKNMITGAAQMDGAILVVSAADGPMPQTREHILLCRQVGVPYIVVYMNKADQNDDPEMIELVEMEIRELLNEYDFPGDDTPIIVGSALKALEGDTSEIGVPSVTKLIETLDSYVPEPERPVDGAFLMPIEDVFTISGRGTVVTGRIETGIVNTGDPLEIIGIKDTTTTTCTGVEMFRKSLDEGRAGENCGVLLRGVEREAVERGQVLSKPGAISPHTKFEAEIYVLSKDEGGRHTPFMNNYRPQFYFRTTDVTGACELPSGVEMVMPGDNIKMNIELIAPIAMDEGLKFAIREGGRTVGAGVVSKIIE

SEQ ID NO: 12902 - protein, 411 aa, Zea mays
MNALAATSRNFKQAAKLVGLDSKLEKSLLIPFREIKVECTIPKDDGTLASYVGFRVQHDNARGPMKGGIRYHHEVDPDEVNALAQLMTWKTAVANIPYGGAKGGIGCSPGDLSISELERLTRVFTQKIHDLIGIHTDVPAPDMGTNSQTMAWILDEYSKFHGYSPAVVTGKPVDLGGSLGRDAATGRRVLFATEALLAEHGKGIAGQRFVIQGFGNVGSWAAQLISEAGGKVIAISDVTGAVKNVGGLDIAEVVKHSAENKGIKGFKGGDAIAPDSLLTEECDVLIPAALGGVINKDNANDIKAKYIIEAANHPTDPEADEILSKKGVLILPDILANSGGVTVSYFEWVQNIQGFMWDEEKVNAELQTYMTRAFGDVKQMCRSHSCDLRMGAFTLGVNRVARATVLRGWEA

SEQ ID NO: 12903 - protein, 351 aa, Wolbachia endosymbiont of Diabrotica barberi
VVANTDAQALEKSLCDKKIQLGINLTKGLGAGALPDVGKGAAEESIDEIMEHIKDSHMLFITAGMGGGTGTGAAPVIAKAAREARAAVKDRAPKEKKILTVGVVTKPFGFEGVRRMRTAEFGLEELQKYVDTLIVIPNQNLFRIANEKTTFSDAFKLADNVLHIGIRGVTDLMVMPGLINLDFADIETIMSEMGKAMIGTGEAEGEDRAISAAEAAISNPLLDNVSMKGAQGILINITGGGDMTLFEVDAAANRVREEVDENANIIFGATFDQAMEGRVRVSVLATGIDGRNNKSETSPISQSEDSEKEKFKWPYSHSESTQDKTLETKPTEQVSEGAKWGSNVYDIPAYL

SEQ ID NO: 12904 - protein, 111 aa, Prosthecobacter dejongeii
NVMNTKMYVGNLPFTAMESELRALFNDYGTVTDMHLPMDHATGRPRGFAFVTMDSAMAMNEAITALNGKDFGGRSLTINEARPKEDRPAYSGGGSRGGKGGYGGGGGGGRY

SEQ ID NO: 12905 - protein, 81 aa, Triticum aestivum
  misc_feature (24)..(24): Xaa can be any naturally occurring amino acid
  misc_feature (55)..(55): Xaa can be any naturally occurring amino acid
MSEESGRPLPKFGEWDVNDPASAXGFTVIFNKARDEKKAGNGQDTESPGQRCQDXEGGNLMPPKANSKKWFCCVTPSPTQS

SEQ ID NO: 12906 - protein, 180 aa, Pseudomonas aeruginosa UCBPP-PA14
MLLSALALAGLPLSGWAADCPELLQGQLTKLRSKESIDLCQRYAGKPLVVVNTASHCGFTPQFKGLEALYQRYKGQGLEVLGVPSDDFKQEAADTAETAKICYGNYGVTFAMTQPQHVRGDEAIPLFRQLAEQSGQAPRWNFYKYVVDRQGRVVAQFSSKTTPDDPQLQAAIEKAIASQP

SEQ ID NO: 12907 - protein, 290 aa, Vibrio vulnificus YJ016
MSVLINKDTKVICQGFTGGQGTFHSEQALAYGTQMVGGVSPGKGGQTHLGLPVFNTVREAVEATGATATVIYVPAPFCKDAILEAIDAGIELIVTITEGIPTTDMIDVKVKLEQTGVRMIGPNCPGVITPDECKIGIMPGHIHKKGKVGIVSRSGTLTYEAVKQTTDEGFGQSTCVGIGGDPIPGSNFIDILKLFQEDPETEAIVMIGEIGGTAEEEAAAFIKENVTKPVVSYIAGVTAPPGKRMGHAGAIISGGKGTADEKFAALESAGVKTVKSLADIGQALREVTGW

SEQ ID NO: 12908 - protein, 598 aa, Glycine max
HDTAHWEELYNTRERARQLLANGSSEIPEETTFTNVEQFLEPLELCYRSLCACGDQPIADGSLLDFLRQVSTFGLSLVRLDIRQESDRHTDVMDAITNHLEIGSYREWSEERRQEWLLSELSGKRPLFGPDLPKTEEIADVLETFHVIAELPSDSFGAYIISMATAPSDVLSVELLQRECHVKQPLRVVPLFEKLADLEAAPAAVARLFSIDWYRDRINGKQEVMIGYSDSGKDAGRFSAAWALYKAQEELIKVAKEFGVKLTMFHGRGGTVGRGGGPTHLAILSQPPDTIHGSLRVTVQGEVIEQSFGEEHLCFRTLQRFTAATLEHGMHPPVAPKPEWRALMDEMAVIATEEYRSIVFQEPRFVEYFRCATPELEYGRMNIGSRPSKRKPSGGIESLRAIPWIFAWTQTRFHLPVWLGFGAAFSHVIKKDPKNLQMLQDMYNQWPFFRVSLDLVEMVFAKGDPGIAALYDKLLVSEELWPFGERLRSMFEETKSLLLQVAGHKDLLEGDPYLKQRLRLRDSYITTLNVLQAYTLKRIRDPDYHVKLRPHLSKDYMESNKPAAELVKLNPTSDYAPGLEDTLILTMKGIAAGMQNTG

SEQ ID NO: 12909 - protein, 463 aa, Synechococcus sp. WH 5701
MVGGGPSGSCVAEVLAKAGIETWLFERKLDNAKPCGGAIPLCMVEEFDLPESIIDRKVRNMRMISPSNREVDIHLENENEYIGMCRREILDGFLRNRAAELGAHLINGLVQSIDTGSARQGPYTLHYADYSGGGPTGEIKSLEVDLIVGADGANSRVAKAMDAGDYNVAIAFQERIRLPKEEMSYYEDLAEMYVGTDVSPDFYAWVFPKYDHVAVGTGTMQKNQALIKSLQKGIRKRASARLLRGEVIKVEAHPIPEHPRPRRVVGRMALVGDAAGYVTKSSGEGIYFAAKSGRMCAEQIVAASASGAKIPTEADLKVYIRKWDKQYGATYKVLEILQNIFYRNDAAREAFVEMCDDKDVQRLTFDSYLYKRVVMMNPWQQIKLTLLTLGAVLRGNALAPQSYKPVPSVVRSPEEMEAWLATLAQESEQQQGVGKARREPLAQPVVANPQVSEEREPALAAKG

SEQ ID NO: 12910 - protein, 108 aa, Escherichia coli
SDKIIHLTDDSFDTDVLKADGAILVDFWAEWCGPCEMIAPILDEIADEYQGKLTVAKLNIDQNPGTAPKYGIRGIPTLLLFKNGEVAATKVGALSKGQLKEFLDANLA

SEQ ID NO: 12911 - protein, 131 aa, Ashbya gossypii ATCC 10895
MSGKGGKAGSAAKASQSRSAKAGLTFPVGRVHRLLRKGNYAQRIGSGAPVYLTAVLEYLAAEILELAGNAARDNKKTRIIPRHLQLAIRNDDELNKLLGNVTIAQGGVLPNIHANLLPKKSAKATKASQEL

SEQ ID NO: 12912 - protein, 400 aa, Photobacterium sp. SKA34
MLSQKTIDIVKTTAPVIAEAGPMVTQHFYQRMFNHNPELKNVFNMSHQKNGANNGPSSQQEALFNAICAYANNIENLAVLLPAVEKIAHKHTSFMITAEQYNIVGSHLIATIDELLAPGQDVLDAWTEAYGLLANIFINREEEIYQENANKVGGWRGTREFVVTNKQQDSEFITSFTFKPTDDGKVASYKPGQYLGIYLNADELENQEIRQYSLSSAPQDDQYRISVKRESHGKVSNYLHNNINIGDKVMLAAPAGDFFLDVEANTPVTLLSAGVGLTPTLSMLESLTDHQAPVNWLHATENGAHHAYKKQVKALAQQHNHIQDITWYNAPLDSDLPAEDYDYQGLMDLSAIKSQLSDNNMHFYFCGPVAFMQYVAKQLLALGVSEDRIHYECFGPHKVL

SEQ ID NO: 12913 - protein, 321 aa, Deinococcus radiodurans R1
MRGDLFSERHFPLPWPQMSGTPTSTLNSGYAYRTTLQRGGQRVLDFLAQEFRHSDRATWAARLAAGEVTVDGLTVRGDETLRPGQMLVWQRPPWAEPDAPLHFDVIYEDADLLAVSKPSGLPTMPGGGFLEHTLLHQVRGRWPDASPLHRLGRGTSGLVLFSLTSQAGAALLKDWRAGRVQKVYRALSAGVAEQDEYDITVPIGPVAHPRLGQVFAASTAGKTAHSRARVLERREDTTLFEVEIFTGRPHQIRIHLASLGLPLAVDPLYVSGGLPRPDALPGDLGYALHASTLTFQHPAHGAALTLSAPAPTLLSCQVTDS

SEQ ID NO: 12914 - protein, 464 aa, Bacillus licheniformis ATCC 14580
MVNEKKISSGFIYFFGAFAGILFGYDIGVMTGALPFLQNDWNLQDNAGVIGWITSSVMLGAIFGGALAGQLSDRLGRRKMILISAIIFVVGSILSGIAPHNGILFLIVSRVLLGLAVGAASALVPAYMSEMAPARLRGRLSGINQTMICSGMLLSYIVDFLLKDLPETMAWRLMLGLAAVPALILYVGMLKLPESPRFLIKNNKLDEARKVLSYIRSNKGEIDSEITQIQETAREEAKANQNASWATLLSNKYRFLLIAGVGVAAFQQFQGANAIFYYIPLIVEKATGNAASSALMWPIIQGVILVLGSLIFLVIADKFNRRTLLTVGGTIMGLSFILPAILNILIPNANPMMMVVFLSIYVALYSFTWAPLTWVIVGEIFPLVIRGRASGLASSFNWIGSFLVGLLFPVMTASMSQEAVFAIFGVICLLGVVFIRTRVPETRGRSLEEIEKNGENKRVDGKSA

SEQ ID NO: 12915 - protein, 501 aa, Silicibacter sp. TM1040
MTTEVRVPTLGESVTEATVATWFKKPGDTVAADEMLCELETDKVTVEVPAPAAGTLAEIVAKEGDTVGVDALLANITEGGAAAASAPAAKPAPAEAPASSGGDAVDVMVPTLGESVSEATVSTWFKKVGDSVAQDEMLCELETDKVSVEVPAPAAGVLAEITAPEGTTVDASAKLGVISGDGAAVAAAPAAAPAAAETPAAVSKDVANAPSAEKAMAEAGLSASDVKGTGRDGRIMKEDVASAIAAAKSAPAPTAAPAAPRAPVSADDASREERVKMTRLRQTIAKRLKDSQNTAAMLTTYNEVDMTEVMALRNEYKDLFLKKHGVKLGFMSFFTKACCHALKEVPEVNAEIDGTDIVYKNFVHMGIAAGTPTGLVVPVIRDADAMSFADIEKAIAEKGARARDGKLSMAEMQGGTFTISNGGVYGSLMSSPILNPPQSGILGMHKIQDRPMAINGKVEIRPMMYLALSYDHRIVDGKGAVTFLVRVKEALEDPRRLLMDL

SEQ ID NO: 12916 - protein, 192 aa, Triticum aestivum
MATMVALSSFAGAAVVGRSASWSPAVPRRRALLVRAQIEPGVEPTKEETTSASTSSPSPTPSPSTTPVAPKPKAKANPSVWDALAFSGPAPERINGRLAMVGFVAALSVEAARGGGLLDQAGSGAGLGWFLTTAAVFSVASLVPLLQGQSVESKSSGVWTADAELWNGRFAMLGLVALAVTEFITGTPFVNV

SEQ ID NO: 12917 - protein, 272 aa, Colwellia psychrerythraea 34H
MNMPNSFSNSHIYLGNVMHRRFSPKKHSFDYRLFMLALDVADVEKAQGGFGVFGFSWYRPLRFVETDYLKESIKDNSKDNLAGDPRSLSHRIKNKVHELAGYADIKRIVMLVQVRCFGIYFSPANFYFCYDQDDKCTQMLAEVSNTPWNERHYYLVDLLKEEGDKTTKKMFQVSPFMDLAMTYFWQVTPPCNGNDKLLVKIENKRVNDESGTVSKLFDASLVMRRKPFTKASLLRIWGQLPVMTMKVVVTIYWQALKLFIKRVPFIGYQKPS

SEQ ID NO: 12918 - protein, 462 aa, Listeria monocytogenes
MFKTNVEQNNVPVFGSFESGQDLPEKRMNKESVDPRIAYQLVKDQLIDEGSARQNLATFCQTYMEPEAEQIMAETMEKNAIDKSEYPQTAKLESSCVNMLADLWNVDESEHYMGTSTVGSSEACMLGGMAMKFRWRSAALKNGLDIHAKKPSLVISSGYQVCWEKFCVYWDIELREVPMSEEHLSINTDIIMDYVDEYTIGIVGILGITYTGKFDDIMTLNDLVEDYNNTHDNEVVIHVDGASGAMFTPFVEPGLEWDFRLPNVVSINTSGHKYGLVYPGVGWILWRDKEYLPEELVFDVSYLGGHMPTMAINFSRSASQIIGQYYNFLRFGYEGYRQIHMRTRDGALQLSQAVAETGLFEIYNDGANLPIVCYKLKDDANVAWTLYDLADRLQMKGWQVPAYPLPKEMGNTIIQRYVCRGDLGQNMVTAFKNDLSESIEELNNAHILYHDVNTSKTHGFTH

SEQ ID NO: 12919 - protein, 295 aa, Silicibacter sp. TM1040
MAVLIDENTKVICQGLTGSQGTFHTEQAIAYGTKMVGGVTPGKGGQTHLDLPVFNSVHEAKHVTEANASVIYVPPPFAADSILEAIDAEMELIVCITEGIPVLDMMKVQRALEGSKSRLIGPNCPGVITPDACKIGIMPGHIHKRGSVGVVSRSGTLTYEAVKQTSDIGLGQSSAVGIGGDPIKGTEHIDVLDMFLDDDETQSIIMIGEIGGSAEEEAAEFIAEQKKKGRWKPIAGFIAGRTAPPGRRMGHAGAIVAGGKGGAEDKIEAMKSAGIVVADSPATLGEAVQKAIANG

SEQ ID NO: 12920 - protein, 790 aa, Oryza sativa
  misc_feature (165)..(165): Xaa can be any naturally occurring amino acid
  misc_feature (184)..(184): Xaa can be any naturally occurring amino acid
MTTQAKEKCPLCTEEMDLTDKQLKPCKCGYEDIIIKDLTSILKELCADKSNFQKEQAKSQKQKPVKVQSGVTEESIDPYSVRVIQRRLVYIVGMPSEFASDKVLRQHNFLGQYGKIESIIIDNIGANQQIPDSGRVYVTFSREEEAFRCIEAVNGFILDGRPLKXCRKPICSYVHQKAPPEDIXRLQHLLGMDTKGLRSGNTLPPPGDCVSRTTVCNGNSKDKTCSDDYGVLHNHGNKNLGTLPATTLQEEKKRNSTPNNQQGLSASVSQELPPLGPKVHHLNDQLASCGDKPQASVQSANGNLNSKQVTAAGNGTVGTLSAKQYVNVVSQGSSGSGRRFTVLTRQTASSDTRSKATGQVGNASSDSQKLTSANNEHSDRIKISRSDNVKLVSQRPEEPSQMLANHLTGAIDKTHVDTDEKNARSDINEKTVCGIQMQLKESTAAHRSTVLQSLRDNPMSNNLPTLDVKSQISVVPDKPSDSQSASKTQLQPSNHKKTAVCSSDTANASDACGIANNQVLFPGGKHQTSSQGEDHSLYKRDKSQSGDQLSSQHPGNVFSPRLLTSLSSIDITAKENKGIKRHVCPPGFEELHRPSDSDKITSVSSPTSSIMCSGPDTLVQDSCSAKDQPDFISWVSECLEDGGETTQSNRSIPSTLSSTDATWRYMQYPASCFSGASNHFLVSPYPRGLSQHTVGRIENTMNCCCSHPSVSGIANHKPEYWSGSDHSYMSTGGYDVFSQSATLGMIAGMVGTSPQQPSPPVHYNDWTTGSADSDLKSPQVDHTYPMYSLF

SEQ ID NO: 12921 - protein, 364 aa, Oryza sativa
MSQPKTHKIALLPGDGIGPEVCAEAVKVLEAVGALRGHTFAFERALCGGASYDVHQSHLPQETIDIVARSDAVLFGSVGGPPDAQEDPKWKDAEKNCLLGLRKNFGLAVNIRPAKIYSMLPDLSPLKPSLIASGVDMVIVRELISGIYFGEHATNGDVATDVMRYTEAEIKIPMRFAFETAMSRTKKLTVVDKANVLDCSRLWRKVAKEMHAEFPQVALEFMYIDNAVMQIIQKPSHFDVIATGNMFGDILSDAASVLPGSLGLMPSASLGDKIHLFEPIGGSAPDIAGKGVANPIAQILSAALLLRYSFALEAEAQLIEKAVEDVLQDGLRTGDLTHDRASAVGTAAMGDAIVAKIHALHQQQ

SEQ ID NO: 12922 - protein, 179 aa, Zea mays
  misc_feature (99)..(99): Xaa can be any naturally occurring amino acid
  misc_feature (107)..(107): Xaa can be any naturally occurring amino acid
HVPKINGEIPSIDEATTDHERLTERLRLYELVENKVKGDGNCQFRALSDQLYQSPDHHEFVRSQIINQLKTNRDAYDGYVPMAYDDYLEKVARNGEWGXDHVTLQAXADKYGVKIFGMTSVKDTCYIEILPKVQKSNKVILLSFWAEVHYNSIHPQNDAPRSQTTKRRRWWPFSQHHHH

SEQ ID NO: 12923 - protein, 299 aa, Rhodomonas salina
WDDMEKIWHHTFYNELRVAPEEHPVLLTEAPLNPKANREKMTQIMFETFNTPAMYVAIQAVLSLYASGRTTGIVLDSGDGVSHTVPIYEGYALPHAILRLDLAGRDLTDYMMKILTERGYSFTTTAEREIVRDIKEKLCYVALDFEQEMQTAAQSSSIEKSYELPDGQVITIGNERFRCPEVLFQPSFIGLESAGIHETTYNSIMKCDVDIRKDLYGNIVLSGGTTMFSGIADRMQKEITALAPSTMKIKIIAPPERKYSVWIGGSILASLSTFQQMWISKQEYDESGPSIVHRKCFQA

SEQ ID NO: 12924 - protein, 112 aa, Xanthobacter autotrophicus Py2
MKIVMAIIKPFKLEEVRDALTGIGVHGLTVTEVKGYGRQKGHTEIYRGAEYAVSFLPKLKIEVAVSADQVSKVVEAITASAKTGQIGDGKIFVLPIEHAVRIRTGETDADAL

SEQ ID NO: 12925 - protein, 498 aa, Xanthobacter autotrophicus Py2
MTSKTWSRVGIPALLLATAFALPVLAQTAAPAADATTTAAAAAAAPTVNKGDVAWMLTSSLLVLMMSVPGLFLFYGGLLRAKNMLSMLMQVGYCVAIVGLIWVLYGYSLAFTGGSPFIGGFSKAFLSGVTGESLAATFSVGVAIPELVYIAFQMTFAMITPALIFGAFAERTKFTAVVLFVPLWVTFVYFPVAHMVWYWAGPDAIDAAAKAVAAAADGAAKTAAQAALDSVLADAGYIFSLGAIDFAGGTVVHINAGIAGLVACLMVGKRLGYGKEALSPHSLTLTMVGASLLWVGWFGFNAGSNLEANAVTALAMMNTFIATCAAAISWMFVEWLVKGKPSMLGLASGIVAGLVAVTPPSGFAGIMGSLVLGLIVSPICFIFCTAIKNAFGYDDALDVFGVHGVGGIVGAIATGILVSPALGGTGIFDYTTGAVAPYDMATQVIAQLKAVGVTVVWSGVGTAVILFIISVIVGLRPTTDVEREGLDINEHGERAYHS

SEQ ID NO: 12926 - protein, 345 aa, Thermoplasma acidophilum DSM 1728
MVDQNESAEDIWTKDEDLTRIIEDRNFRIKVFGFGGSGSNTINRLMRENLVGVKLIACNTDAAHLLRIRAHAKILLGKNLTRGLGAGADPTVGEMAAKESESEILRHIDETSIVFITAGFGGGTGTGAAPYVAKLAKDRGALTIAFATLPFSSEGYVRMKNAAEGIRKLVKNSDAAIVIPNDKLIEKYNDVPVYKAFKFEDEVISTGIKGITDLIMNTGTINLDFNDLRKVMKDAGYAAIGMGSSNQAVNDRIVEALEKALDSPFMDYDISRAKGAIVNVTGGRDLQLQEAQQAADMLRKKIARDATIMWGTVIDENMRSGVRILIIVAGIKPNFKLDQDLEEVR

SEQ ID NO: 12927 - protein, 116 aa, Pinus pinaster
TVFTVILYGSPLSVIRLVIHTKSVEFMPSFYFSLFAFLGSVLWMVYGALSGDILIMAPNFVGIPLGLSQMALYCIYWNNSPVRVEATKLEAGGELKSIEQNIKEDIELYTEDIEKA

SEQ ID NO: 12928 - protein, 412 aa, Rhodococcus erythropolis
MTSDIVVIGGGVAGVSAVQSLRSEGYDGRLFLIGKERELPYDRTSLSKAVLAGDLADPPPLAPADWYDELQVETVLDRTVLQVDVTRKEVLLDGGRSLEVDRVLLATGASARVPSFSGADLPGVTTLRTVDDAQRLRQDWEPGQRLVVVGGGLIGCEVATTARKLGLEVSILEASDELLQRVLGRRIGGWCRARLEELGISVMVNTGVAEFDGVDRITAVIGTDGRRFPADSAIVCVGAEPETAIAEQAGLACSRGIIVNDSGGTALEGVFAAGDAASWPLRTGGRRSLETYINSQKEATAVASAMLGKAVHAPQLPLSWTEIAGHRIQMIGDIEGSGEYVMRGAPDDGPALLFRLTDGKLTAALSVDAPREFAMATRLVESGAQVGRDVLADTSVELRELNRAARERTTAA

SEQ ID NO: 12929 - protein, 105 aa, Rhodopirellula baltica SH 1
MILIQAIIQPTKLSNVQSALDEAGFSDTIVGDALGYGRQRGQTALFRGNEYKIDLLRKVTFEMVIDDDDLEPVVEIIRNASRTGTEGQIGDGKIFVLPVANVIDI

SEQ ID NO: 12930 - protein, 219 aa, Methanococcoides burtonii DSM 6242
MASDILDKKAILQRDRESYAIVPHTPAGIISADELQCVVDVARKYGATIKFTSAQRVALIGLKENDLEDAWSELGMKPASSIGRCVRSIKVCPGITNCKRAQQDAMALGLKLDELYHGIELPSKFKMAVSGCMNSCSGPAVKDIGVMGTPRGFTLLAGGNAGIRPRIGDVIAEGLDEVEALEMVGRIIEFYMRSAKKYRLGRLIDDIGLDVFKNEVRIV

SEQ ID NO: 12931 - protein, 488 aa, Pyrobaculum aerophilum str. IM2
MELIREARPHSREKLKSNLIEWFHWLLREAELYDVRYPVKGAYVWRPYGMKIRRNVENLIRKFHDETGHEEVLFPVFIPYEFFGKESQHIKGFEKEVFWVSKGGEAGERLVLRPTSETAIMPMVKLWIQDYKDLPLRVYQIVSVFRAETKMTHPMIRLREISMFKEAHTVHADKEDAERQVREAVEIYKRIFDEMCLAYLINKRPEWDKFAGAEYTIAFDTILPDGRSLQIGTVHYLGTNFTKVFEVTYLDADGTRKLAHTTSYGISERSIAAMLITHGDDGGTTLPPKLAPIQVVVIPIYYGEEEAPLVMPLVRETANRLNEAGIRVYVDERADKTPGWKFYYWELKGVPLRVEIGKRDVEKRQAVIARRDTLEKYAVSINELVDAVKQLMKSVEENLRKRAWEELKGRVVKAEDIEVAKAAIKEGKVVEIPWSGDNDCGIKIQELVGADALGIPLDADASVGGYDLRDLACKERRAELWLRLSERY

SEQ ID NO: 12932 - protein, 553 aa, Lycopersicon esculentum
MATQCYDPENSASRYTLLPDQPDSGHRKSLKIISGIFLSVFLLLSVAFFPILNNQSPDLQIDSRSPAPPSRGVSQGVSDKTFRDVAGASHVSYAWSNAMLSWQRTAYHFQPQKNWMNDPNGPLYHKGWYHLFYQYNPDSAIWGNITWGHAVSKDLIHWLYLPFAMVPDQWYDINGVWTGSATILPDGQIMMLYTGDTDDYVQVQNLAYPANLSDPLLLDWVKFKGNPVLVPPPGIGVKDFRDPTTAWTGPQNGQWLLTIGSKIGKTGVALVYETSNFTSFKLLDGVLHAVPGTGMWECVDFYPVSTKKTNGLDTSYNGPGVKHVLKASLDDNKQDHYAIGTYDLGKNKWTPDNPELDCGIGLRLDYGKYYASKTFYDPKKERRVLWGWIGETDSESADLQKGWASVQSIPRTVLYDKKTGTHLLQWPVEEIESLRVGDPTVKQVDLQPGSIELLRVDSAAELDIEASFEVDKVALQGIIEADHVGFSCSTSGGAASRGILGPFGVIVIADQTLSELTPVYFYISKGADGRAETHFCADQTRFAFLSGTINLSL

SEQ ID NO: 12933 - protein, 87 aa, Arabidopsis thaliana
  misc_feature (11)..(11): Xaa can be any naturally occurring amino acid
  misc_feature (52)..(53): Xaa can be any naturally occurring amino acid
  misc_feature (64)..(64): Xaa can be any naturally occurring amino acid
  misc_feature (69)..(69): Xaa can be any naturally occurring amino acid
  misc_feature (71)..(71): Xaa can be any naturally occurring amino acid
  misc_feature (80)..(80): Xaa can be any naturally occurring amino acid
MAVPLLTKKVXKKRSAKFIRPQSDRRITVKESWRRPKGIDSRVRRKFKGVTXXPNVGYGSNKKXRHYLXNXFKEFVFHNXSELWFFT

SEQ ID NO: 12934 - protein, 333 aa, Arabidopsis thaliana
MGVDYYNILKVNHNATEDDLKKAYKRLAMIWHPDKNPSTRRDEAEAKFKRISEAYDVLSDPQKRQIYDLYGEEGLKSGKIPNSSSSEHRPQHPPNASSFRFNPRDAEDIYAEFFGSENGGGSNNAGGRGNRAFRNGHFNTGGANGYSGEMRKVPAMENPLPVSLEDLYKGVVKKMRITRNVYDASGRMMVEAEILPIEIKPGWKKGTKLTFPKKGNEEPGIIPADIVFVVEEKPHPVYKRDGNDLLVSQEITLLEALTGKTVNLITLDGRTLMIPLTEIIKPDHEIVVPNEGMPISKEPGKKGNLKLKLSVKYPSRLTSDQKFELKRVLGGVS

SEQ ID NO: 12935 - protein, 636 aa, Lycopersicon esculentum
MATQCYDPENSASRYTLLPDQPDSGHRKSLKIISGIFLSVFLLLSVAFFPILNNQSPDLQIDSRSPAPPSRGVSQGVSDKTFRDVAGASHVSYAWSNAMLSWQRTAYHFQPQKNWMNDPNGPLYHKGWYHLFYQYNPDSAIWGNITWGHAVSKDLIHWLYLPFAMVPDQWYDINGVWTGSATILPDGQIIMLYTGDTDDYVQVQNLAYPANLSDPLLLDWVKFKANPVLVPPPGIGVKDFRDPITAWTGPQNGQWLLTIGSKIGKTGVALVCETSNFTSFKLLDGVLHAVPGTGMWECVDFYPVSTKKTNGLDTSYNGPGVKHVLKASLDDNKQDHYAIGTYDLGKNKWTPDNPELDCGIGLRLDYGKYYASKTFYDPKRERRVLWGWIGETDSESADLQKGWASVQSIPRTVLYDKKTGTHLLQWPVEEIESLRVGDPTVKQVDLQPGSIELLRVDSAAELDIEASFEVDKVALQGIIEADHVGFSCSTSGGAASRGILGPFGVIVIADQTLSELTPVYFYISKGADGRAETHFCADQTRSSEAPGVGKQVYGSSVPVLDGEKHSMRLLVDHSIVESFAQGGRTVITSRIYPTKAVNGAARLFVFNNATGASVTASVKIWSLESANIQSFPLQDL

SEQ ID NO: 12936 - protein, 319 aa, Geobacillus stearothermophilus
MKRIGVLTSGGDSPGMNAAIRSVVRKAIYHGVEVYGVYHGYAGLIAGNIKKLEVGDVGDIIHRGGTILYTARCPEFKTEEGQKKGIEQLKKHGIQGLVVIGGDGSYQGAKKLTEHGFPCVGVPGTIDNDIPGTDFTIGFDTALNTVIDAIDKIRDTATSHERTYVIEVMGRHAGDIALWSGLAGGAETILIPEADYDMNDVIARLKRGHERGKKHSIIIVAEGVGSGVDFGRQIQEATGFETRVTVLGHVQRGGSPTAFDRVLASRLGARAVELLLEGKGGRCVGIQNNQLVDHDIAEALANKHTIDQRMYALSKELSI

SEQ ID NO: 12937 - protein, 233 aa, Mesembryanthemum crystallinum
MEAYKMFAFVVLLATTLYQAYATDPTQLQDFCVGVNKPNDGLFVNGLFCKDPMEVNPDDFLFRGLNMPANTDNALGFAATLVTAANLPGLNTLGISVARLDFAPHGLNPPHTHPRATEVFVVLEGTFYVGFVTSNLADGGNKLFAKVLNKGDVFVFPQGLIHFQLNIGNYPGVGISGLSSQNPGVITIANAVFGPEHLSQLMFLLRPSISMRIWSSFFRIGSQVVAATTSMCS

SEQ ID NO: 12938 - protein, 120 aa, Hyacinthus orientalis
GSNYYACLSMLSLLILTPFAIAERAPSMWAVGWQNAMSQIGPNFIWWVAAQSIFYHLYNQVSYMSLDEISPLTFSIGNTMKRISVIVSSIIIFHTPVQPVNALGAAIAILGTFLYSQAKQ

SEQ ID NO: 12939 - protein, 145 aa, Triticum aestivum
  misc_feature (15)..(15): Xaa can be any naturally occurring amino acid
  misc_feature (89)..(89): Xaa can be any naturally occurring amino acid
MASSMISSPAVTTVXNRAGAGMVAPFTGLKSMAGFPTRKTNNDITSIASNGGRVQCMQVWPPVGKKKFETLSYLPDLDDAQLAKEVEYXLRKGWIPCLEFELEHGFVYREHNRSPGYYDGRYWTMWKLPMFGCTDASQVLKELQE

SEQ ID NO: 12940 - protein, 330 aa, Triticum aestivum
HVDHGKTTLTAAITKVLAEAGSAKAVAFDEIDKAPEEKARGITISTAHVEYETAKRHYAHVDCPGHADYVKNMITGAAQMDGGILVVSAPDGPMPQTKEHILLARQVGVPSLVCFLNKVDAVEDEELLELVEMELRELLSFYKFPGDDIPIIRGSALSALNGTNEEIGKNAILKLMDAVDSYIPDPVRVLDKSFLMPIEGIFSIQGRGTVVTGRIEQGVIKTGEDVEVIGLTESGPVKTTVTGVEMFKKMMDHGEAGDNVGLLLRGLKRGDVERGQVVCKPGTVKTYKKFEAEIYVLTKDEGGRHTAFFSNYSPQLFKHNKVGTGGGKGV

SEQ ID NO: 12941 - protein, 495 aa, Ashbya gossypii ATCC 10895
MGFQSFKPTFRNEDLVRRGAYINGEWITSAKESFNVTDPATDQVIAELPDFDSGEAEAALKAAHASFQSYKKTSPTQRSEWLRNLYDLIMENAEDLAAIVTWENGKSLREALVEIRYGATFFKWFSEEALRLYGTTIQPSNPGNRAFTIRQPVGVCALICPWNFPNAMISRKAAPALAAGCTVIIKPDPQTPLSSLALAHLAEKAGFPPGVINVVPTSKYTKDIGVLLCESSLVRKVSFTGSTAVGKILMQQAASTVKKVSFELGGNAPVIIMGDADMEKTVEEVLATKFRGMGQTCICANRLYVHRSIIDDFSSRLVKKVEGLKLGNGFQEGVTHGSLINNAAIEKVERHAKDAIERGAKVLLPGGRAPELGPHFYSPTVLSDVKPDSVLTREETFGPLCAMIPFDTVEEVVGYANDTQYGLASYVFSENIKTVYSIAEALDFGMVACNTGLFSDSMVPFGGIKESGFGIEGSLHGINDYTVLKTVTIGNVPTL

SEQ ID NO: 12942 - protein, 572 aa, Salmonella typhimurium LT2
MKQTVAAFIAKTLEQAGVKQIWGVTGDSLNGLSDSLNRMGTIEWMPTRHEEVAAFAAGAQAQLTGELAVCAGSCGPGNLHLINGLFDCHRNHVPVLAIAAHIPSSEIGSGYFQETHPQELFRECSHYCELVSSPEQIPQVLAIAMRKAVLNRGVSVVVLPGDVALKPAPENAVTHWYHAPLPVVTPAEEELKKLAQLLRYSSNIALMCGSGCAGAHEELVALAAKLKAPIVHALRGKEHVEYDNPYDVGMTGLIGFSSGFHTMMNADTLILLGTQFPYRAFYPSDAKIIQIDINPGSIGAHSKVDMALVGDIKATLRALLPLVEEKSNRKFLDKALEHYRDARKGLDDLAKLSDKAIHPQYLAQQISHFAADDAIFTCDVGTPTVWAARYLKMNGKRRLLGSFNHGSMANAMPQALGAQATAPGRQVIAMCGDGGFSMLMGDFLSVVQMKLPIKIVVFNNSVLGFVAMEMKAGGYLTDGTELHDTNFARIAEACGITGIRVEKAADVDGALQRAFSIDGPVLVDVVVAKEELAIPPQIKLEQAKGFSLYMLRAIISGRGDEVIELAKTNWLR

SEQ ID NO: 12943 - protein, 536 aa, Synechococcus sp. WH 7805
MHLVMSFPDFSATDTQIQWQRFCDLLWYHDDLGIWLDVSRMHLNSAALDELTPPLEKAFDAMKKLEGGAIANVDENRQVGHYWLRDPRLSPDPEVSQHIASEVNDIEQFGKAVISGEIKSPTGQPFTDILWIGIGGSGLGPLLMVRALQDNGQGLPFHFFDNVDPNGMSRVLGELGNNLLTTLVVTVSKSGGTPEPHLGMEQARHRLESLGGQWAAQAVAITMSQSLLDQQASKEKWLKRFDMFDWVGGRTSITSAVGLLPGALIGTDIRDFLAGAAQMDEATRLADVRRNPAALMAAAWYFAGEGKGKRDMVVLPYRDRLEVFSRYLQQLVMESLGKRLDRSGAIAHQGIAVYGNKGSTDQHAYVQQLRDGVDNFFVTFIEVLRDVEDIPEIKGERPGDFLDGFVQGTRSALTEGGRQSLSISMRTFDARRLGALIALFERAVGFYGELVNINAYHQPGVEAGKKAAAAILKLQKQVEDVLSDGTSRSVLEIQQAIGEGSDEAIFWILRHLTGNNRGYQAQGTWDSPASLRFVKG

SEQ ID NO: 12944 - protein, 407 aa, Zea mays
MAAALQATPIKTLATSRWRVEGAEARPRPMAVSFRCSAAARSYNITLLPGDGIGPEVVAVAKDVLSLAGALEGVELRFQEKLVGGSALDATGVPLPDETLDAAKGSDAVLLGAIGGYKWDNNEKHLKPETGLLQLRAGLGVFANLRPAAVLPQLVDASTLKKEVAEGVDIMVVRELTGGIYFGKPRGFGTNDNGDDIGFNTEVYSASEIDRIARVAFEVARKRRGKLCSVDKANVLEASMLWRKKVTALASEFPDIELSHMYVDNAAMQLVRNPKQFDTIVTNNIFGDILSDEASMITGSIGMLPSASVGESGPGLFEPIHGSAPDIAGQDKANPLATILSAAMLLRYGLGEENAARRIEAAVTETLNHGFRTGDIYSPGTTLVGCKRMGEEVLKTVESLKEVAAVN

SEQ ID NO: 12945 - protein, 537 aa, Bifidobacterium longum DJO10A
MGGNQSQPNATAIIGTGKGGPLDTSAGTIASRGISFTYDHAAEPALRDITLTVPAGECIVLCGASGCGKTSYTRVANGLIPSFFHGAFAGNQTTCGLDVETVPIDRPTPLVGSVFQNPKTQYFNANVTDELAFPAENIGLPAEDINRRITAVAERFGIGHLLHRSIFHLSGGQKQRIAVAAATMLGPRLVVLDEPTSNLDANAIADMRAMIEQMKDEGLTIVIAEHRLAWLNGVADRYVVFDGGHIVQDYEADEFLSLSPGCVAAMGLRALDLQPYRHRIATLASSPAADECTSALLGTHNLTIGYKGKDGFTRAIPDLRFRAGEITGLMGNNGCGKTTLVRTLTGLIKPVSGRIELNGVPAKPRDLTRAGFLVMQDVNYQLFSDSVREELLIGLDETDAGITAQANQVMADLDLAAFVERHPMSLSGGQKQRVAIGSALMCGKDLIILDEPTSGLDRYHMEQVGELLRQLASQGKAILVVTHDEELAAGWCDRIVNLGADDSGNNGSHASNPDASSPNPNASTNFATASTHERNAQ

SEQ ID NO: 12946 - protein, 269 aa, Candida albicans SC5314
MSLLSSIGLRTSIIDNADGSAELSIYNNNSNEASSSSSSSDDNSIIKLITSINGPIEPKQRQELPNRASLEINIYPSIGLSTTKEKLLENKLRSILQNNIIINYKYPRQLIQISIQFLISSGSGSSSSSSSNYGSMMMNLLDLNALINCCYFALIDANIAMNYSFASIVIIIDHQGNLLIPIDGNDLHQQQQQEEDYESIHLCCYSIIAKKVDKLLLLESQGDFNESQLFNVLEKSIYKVEKFHNEIHRQFINDKIKNDYIWKQEREDE

SEQ ID NO: 12947 - protein, 200 aa, Prunus persica
DSYVLSESSLFVYPYKVIIKTCGTTKLLRSIPAILKLAETLSLAVKSVRYSRGSFIFPGAQPSPHRSFSEEVAVLDGHFGKLGLASRAYVMGSSDKTQKWHIYSASAELASLLWGARQSGPTYTLEMCMTGLNRNKASVFYKSKASSAAGMTEESGIRKILPQSEICDFEFDPCGYSMNSIEGNAISTIHVTPEDGFSYA

SEQ ID NO: 12948 - protein, 209 aa, Kluyveromyces lactis NRRL Y-1140
MIFTDIEVAIEKFRQNKFVIVMDDESRENEGDLICAANAITTEQMAFLIRYSSGYVCAPMTNEWADRLDLPLLKDLSCESYADDRHGTAYTITCDYAHGTTTGISAHDRALTCSKLADKTTTAIDYLKPGHVVPLRAKEGGVLARRGHTEAAVDLCKLASLPPVGVIGELVKDEDGDMMRLDDCVEFGKEFDISIITLEALVDYIQKHQ

SEQ ID NO: 12949 - protein, 357 aa, Synechococcus sp. WH 5701
MTSYRITLLPGDGIGPEITAVARRLLDAVSVRHGFGLTYDEQPIGGDAIDRTGVPLPETTLAACRSADAVLLAAIGSPRFDALPREQRPETGLLGLRSGLGLFANLRPVKIIPALIGASTLRPEVITGVDLLVVRELTGGIYFGTPKGRVEAEGRVRAFNTMVYADDEIDRIARVAFQLARERGGRLCSVDKANVLDVSQLWRDRVEVIAAEYPQVELSHLYVDNAAMQLVRAPRQFDVLLTGNLFGDILSDEAAMLTGSIGMLPSASLGAEGPGLFEPVHGSAPDIAGADLANPMAMVLSAAMMLRVGLKQEAAACELEAAVDRVLSAGYRTGDLMAEGCTQLGCSAMGEQLLAVL

SEQ ID NO: 12950 - protein, 400 aa, Deinococcus radiodurans R1
MTLIESSREPGDKLAVLSCRCDKSVTVHRVHWAHQRNHNQAGRVKFAAPGGRFLGGWPFFFGLEQFSELRRRRNSTATRSILRPARWFALAPLAKKRCTLFVKCSRVQSPGPALFMVGVMNTQQGAQDLTGRRILITGATGGIGLETARELAGRGAQVVIVGRDPGRTARVAAEVGAAGTLLADLSELVQVERAAAEYRERFGELDVLVNNAGALHRERQESREGIELTWALNHLAPFLLTRELLPLLRRSSETRRVPARVVTVASAAHVVGRIRFDDPEFRRGYAAWPAYAQSKLANILFARELARREPSVLSVSLHPGMVASGFGKNGGGRFAQAYGLLDRFSLTPEQGAQTSLHAVSAPVHTGGYYANARRVTPAPQALDDGAAARLWALSEGYLQV

SEQ ID NO: 12951 - protein, 397 aa, Oryza sativa (japonica cultivar-group)
MALLEAQCVPTEDTYALLLRAYCNAGSLHRAEGVISEMREHGIPPNATVYNAYLDGLLKARCTEKAVEVYQRMKRERCRANTETFTLMINVYGKAKQPMSSMKVFNEMKSIGCKPNICTYTALVNAFAREGLCEKAEEVFEEMQQAGHEPDVYAYNALMEAYSRAGLPQGASEIFSLMQHMGCEPDRASYNILVDAYGRAGLHEDAEAVFEELKQRGMSPTMKSHMLLLAAHARSGNATRCEEVMAQLHKSGLTPDTFALNAMLNAYARAGRLDDMERLFAAMERRGDADVGTYNVAVNAYGRAGYVGRMEAAFAAVAARGLAADVVTWTARMGAYARRKEYGRCVGMVEEMVDAGCYPDAGTARVLLAACSDERQVEQVTAIVRSMHKKPKTLFTI

SEQ ID NO: 12952 - protein, 448 aa, Schizosaccharomyces pombe
MPVRPCIHFTPPEGFMNDPNGLVYSNGKWHLFFQWNPTGNQAGNQHWGHAVSKNLYKWKLLPTALAPGDDHGLMFSGSAVIDKTNSSGFFESGFFSRKSVDPEERIVLIYTTHYDNRETQNIAYSLDGGITFIKYKKNPILDIKESQFRDPKVFWHEESRAWIMVVVLAQKYKVLFYHSLNLRDWVKLSEFGSAGVLGYQYECPDFVRLPIEGTDEFRWVLIVSINPGSSINGGSMVQYFIGDFDGQTFTPIDSASRILDCGHDCYATQTFGNAPDGRVISISWASNWNYTNDVPMRMKHATVFYLAVSIPKSIVLESPMEFLCLTWSTTPDVETSKEYFELGYRFHDGAVYVERGVCSSSWKYPLYPERCTSSVPPSSYEDNYILEIEAVVDHSIIEVYLQGGIMCLTNAYYFKGDEPLQYYYLRVPTGASLAKSGMQPLLNNRPHS

SEQ ID NO: 12953 - protein, 280 aa, Thermus thermophilus
MAAKKDYYAILGVPRNATQEEIKRAYKRLARQYHPDVNKSPEAEEKFKEINEAYAVLSDPEKRRIYDTYGTTEAPPPPPPGGYDFSGFDVEDFSEFFQELFGPGLFGGFGRRSRKGRDLRAELPLTLEKAFHGGERVVEVAGRRVSVRIPPGVREGSVIRVPGMGGQGNPPGDLLLVVRLLPHPVFRLEGQDLYATLDVPAPIAVVGGKVRAMTLEGPVEVAVPPRTQAGRKLRLKGKGFPGPAGRGDLYLEVRITIPERLTPEEEALWKKLAEAYYARA

SEQ ID NO: 12954 - protein, 467 aa, Arabidopsis thaliana
MATTVTLKSFTGLRQSSTEQTNFVSHVPSSLSLPQRRTSLRVTAARATPKLSNRKLRVAVIGGGPAGGAAAETLAQGGIETILIERKMDNCKPCGGAIPLCMVGEFNLPLDIIDRRVTKMKMISPSNIAVDIGRTLKEHEYIGMVRREVLDAYLRERAEKSGATVINGLFLKMDHPENWDSPYTLHYTEYDGKTGATGTKKTMEVDAVIGADGANSRVAKSIDAGDYDYAIAFQERIRIPDEKMTYYEDLAEMYVGDDVSPDFYGWVFPKCDHVAVGTGTVTHKGDIKKFQLATRNRAKDKILGGKIIRVEAHPIPEHPRPRRLSKRVALVGDAAGYVTKCSGEGIYFAAKSGRMCAEAIVEGSQNGKKMIDEGDLRKYLEKWDKTYLPTYRVLDVLQKVFYRSNPAREAFVEMCNDEYVQKMTFDSYLYKRVAPGSPLEDIKLAVNTIGSLVRANALRREIEKLSV

SEQ ID NO: 12955 - protein, 506 aa, Oryza sativa
MSDSELSQSTVVFGLRMWVLVGVAVGAAFVLFLVLLSVLCLLASRRRRRRRGPNTSPVQQLPVSAPPKNPQKVKAPKDIQEVPAQATAAAAAKTPLAQVLQMPAPPPPPPPMAAAAPPPETVQIATGKEHRITYPEPPHRSGSSSHGSGEAPSVPEVSHLGWGHWYTLKELEAATEMFADENVIGEGGYGIVYHGVLENGTQVAVKNLLNNRGQAEKEFKVEVEAIGRVRHKNLVRLLGYCAEGNQRMLVYEYVDNGNLEQWLHGEVGPVSPLSWDSRVKIILGTAKGLMYLHEGLEPKVVHRDVKSSNILLDKHWNAKLSDFGLAKLLGSERSYVTTRVMGTFGYVAPEYAGTGMLNETSDVYSFGILIMEIISSRVPVDYNRPPGEVNLVDWLKTMVSTRNSEGVVDPKMPQKPTSRALKKALLVALRCVDPDARKRPKIGHVIHMLEVDDFPYRDERRGARAPVQARVADKPVAIEAGDRESDSSGNNSARQTEPFRWRNPES

SEQ ID NO: 12956 - protein, 513 aa, Glycine max
RIWVVNSSKMASDLNSGLSKKTFVFGLKVWVLMGIIVGLFIIIILVVLSICLTLRKKFRRVNGKLPLSHVISVSDEIKEIKVDQVSANNHPQNGVFMSLNDKFGDRESEKVLNQTKNGENSSQSGSFNHLKKDANGSQSGEESGVKSVSTYRSSSHPITAPSPLCGLPEFSHLGWGHWFTLRDLELATNRFSKDNVIGEGGYGVVYQGQLINGSPVAVKKLLNNLGQAEKEFRVEVEAIGHVRHKNLVRLLGYCIEGTHRLLVYEYVNNGNLEQWLHGAMRQYGFLTWDARIKILLGTAKALAYLHEAIEPKVVHRDIKSSNILIDDDFNAKISDFGLAKLLGAGKSHITTRVMGTFGYVAPEYANSGLLKEKSDVYSFGVLLLEAITGRDPVDYSRPATEVNLVDWLKMMVGNRRSEEVLDPNIETRPSTSTLKRALLTALRCVDPDAEKRPRMSQVVRMLESEEYPIPREDRRRRRSQAGNMEVETQRENSDTDKSDNPDYKPSGRRNQRM

SEQ ID NO: 12957 - protein, 364 aa, Chromobacterium violaceum ATCC 12472
MAMPRYLTEPAFRHDYAPKTGVLLINLGTPDAPTAQALRPYLKQFLSDPRVIEIPRLPWWLILNGIILNTRPKQSAKKYASIWTKEGSPLLLHTRSQAKLLKGQLGEMGLHNLAVDYAMRYGNPSIESVIGKMREQGVERLLLLPLYPQYAASSSATALDEAFRVLSRLRNMPEVRTVRHFHDDPGYIAALAAQIRKHWQYGQRPDKLVMSFHGVPRFTRDKGDPYHCECQKTGRLLAEALQLRPDQYVISFQSRFGRTEWLKPYTSEVLEALGKAKTARVDVVCPGFVGDCLETLEEIAMEGKETFLSHGGGEFRYIPCLNEDPQWISSLAGIVRNNLAGWTEIRAEDSQQRAALAHDMGASA

SEQ ID NO: 12958 - protein, 188 aa, Zea mays
MVDAGDITAGGPPRAHEEEQAGTPAYGSVVLGGTFDRLHDGHRRLLKASADLGRDRIVVGVCTGPMLAKKEYAELIEPVDKRIKGVEDYIKSIKPELIVQVEPIEDPYGPSITDEKLDAIIVSKETLNGGLAVNRKREEKGFPLLKVEVVDLLSGGVEGEKLSSSALRKLEAEQAQQSETKSGSLEAS

SEQ ID NO: 12959 - protein, 524 aa, Hevea brasiliensis
MASSVLPSPSLQSQFMSLRSSTKPYSRRSSLSPIKASVSEKPSIGISSPTVSPTDSSKLPLRKIPGDYGLPFIGPINDRLDYFYKQGKEEYFKSRAQKYQSTVFRANMPPGPFISSNPHVVVVLDGKSFSVLFDVTKVEKKDLFTGTFMPSTDLTGGYRILSYLDPSETKHGQLKQLLFYLLKSRRDYVIPEFSSTYSQLFESLEKDLASKGKVSFNDPGEQAAFSFLGRCYFGVNPVDTKVGTDGPTLIAKWVLFQLAPILTLGLPAFIEEPTIHTFRLPAFIIKKDYQRLYDYFYSSGGSVLDEAERMGLTREEACHNILFATCFNTFGGLKIFFPNVLKWIGRAGVKLHTQLAQEIRSVIKSNGGQITMAALEQMPLMKSAVYEAFRIEPPVPAQYGRAKRDLIIESHDAAFGVKEGQMIFGYQPFATKDPKIFDRPEEYVPDRFVGEGEKLLKHVLWSNGPETEHPTVGNKQSAGRDFVVFISRLFVVELFRRYDSFEIEVGSSALGSSITITSLKRASF

SEQ ID NO: 12960 - protein, 215 aa, Mycoplasma gallisepticum
MSDLLFSILPMLNDYDQNKLASYKQLGLNKIHYDVMDEFVNNKAFDERYVDNLKDLGYQINVHLMVNKVANHILVYAKTRCNQISFHVEPLANNKQLINKYLAYIKTNNKKAGLAFKFNTDVNDYLDQIKLVDYVTLMSVEPGAGGQAFNPLVYRNIAKLIKFNPKLEIEIDGGINFEKAIELKGLVSGFVSGSYFYQLSDQSKLEMLEKIRAFS

SEQ ID NO: 12961 - protein, 351 aa, Bdellovibrio bacteriovorus HD100
MASIAQAIRMALHYGEANMGVKDIFGQDVGAPLGGVFTATQGLETAWNSTLDERGIISMAMGIAMGGDRCVAEIQFADYIFNTIDLLKIAGNTLWCTNGQIQLPMVVMTPVGAGIFGSVYHSHSFDAWASRLQGWKIVMPSNPLDAYGLMLSAIEDPNPVLYLKSKALMRHKGDELIPGEPADEKELKAMIDKPVQNSEGWKPRWPELEKYMVPIGKGKITHAGEHITVVTYSRMVHLCDEVAVKLAEEGISVEVIDLRSIYPYDWPMIKASIEKTGRVLFVNEDTEVTNFGEHLAYRATQECFYQLMARPRVLAGKNLPGIGLHPNLEKNSVPQIHDIELAIREVVAEVP

SEQ ID NO: 12962 - protein, 90 aa, Arabidopsis thaliana
  misc_feature (23)..(23): Xaa can be any naturally occurring amino acid
MLSYATMVASPAHATMVAPLRGXKYSAGFPSTRKANNYITSITSNRGRVNCMQVWPSILKKKFETLSYLPDLTDSQLANEDDYLIPNKSI

SEQ ID NO: 12963 - protein, 1047 aa, Cryptococcus neoformans var. neoformans JEC21
MSVSILRRAARLPLSRQHQPLFARPLSISSIVLRPTSTSPTRSSTTATQPHPRSPSESFHPAPTSVFTPLDTFLPRHLGPREADIQAMLEVLGHKTLDEFVATTIPSEVRIDQLTNKEEKGKGLRALSELELRRRIEEIAAMNRPVKSYIGMGYHNAIVPPVIQRNVFENPAWYTAYTPYSPEQSQGRLESLINFQTVAISLTGLPIANASLLDEGTAAAEAMAMCLASVAKPKFNKGKKVFLVSPNVAPQTIEVLQTRASGFDIDLRIAESDANFLSEVESLGEAQLMGALVQYPDVNGEIGDWEEVATKVKATGAKMVVTTDLLALTMIKPPGEWGADIVCGNSQRFGVPAGYGGPHAAFFACTDDLKRKMPGRLVGLSKDSQGAPAYRLALQTREQHIRREKATSNVCTAQALLANMAAMYAVYHGPEGLRRIAGKVHSLTRVLSESLASLGFTTVNKAFFDTLTIDVSSAGVTAADVHTASVKAGINFRKIDDKTIGITLDESVGPLDLTDIINVFYAVKGQPAVEPEVLEALAQKLELSAESVTSPIATLARTTPFLTQPVFNKHHSETDMLRYMMHLQEKDYSLVHGMIPLGSCTMKLNSTSSMVPLSWKEFGGLHPFAPTDQAKGYEVIIKELENDLSLVTGYDATSVQPNSGASGEYAGLRVIQAYHESRGEGHRDVCLIPLSAHGTNPASAAMVGYKVVPIKALNDGSLDLADLKEKAEKHKDKLAAFMVTYPSTFGVFEEGIEEACQIVHDNGGQVYVDGANCNSLIGLTSLGRVGGDVSHTNLHKTFSIPHGGGGPGVGPISCKSHLAPFLPSHPIVPTGGSTPITAVSAAPYGSASINTISWAYIKMLGGEGLTTVSKIALLNANYIAERLKPYYNLRYSNKNGRVAHECLIDLAEFEKSAGLKVPDFSKRLQDYSFHPPTAQWPISTCWLIEPTESESKEEIDRFIEALISIRKEIDEIVSGEQSKDDNVFKNAPHPLSLLTADKWDRPYSREKAVFPVPGLKKSKFWPSVGRLDDAAGDLNLICECGSVEEYA

SEQ ID NO: 12964 - protein, 207 aa, Pennisetum glaucum
MATRRRMLLKVIILGDSGVGKTSLMNQYVNKKFSNQYKATIGADFLTKEVQIDDRLFTLQIWDTAGQERFQSLGVAFYRGADCCVLVYDVNVTKSFEKLNNWREEFLLQASPSDPENFPFVLLGNKIDVDGGNSRTISEKKAKAWCASKGNIPYFETSAKEGFNVEAAFECIARNAIKNEPEDDMYLPDTIDVGGAGRQQRSSGCEC

SEQ ID NO: 12965 - protein, 137 aa, Botryotinia fuckeliana
MTGGKSAGGKAGTTKNAQSRFHPKAGLAFPVGRVHRLLRKGNYAQRVGAGAPVYLAAVLEYLAAEILELAGNAARDNKKTRIIPRHLQLAIRNDEELNKLLGHVTIAQGGVLPNIHQSLLPKKTAKTAGGKPASQEL

SEQ ID NO: 12966 - protein, 312 aa, Zea mays
  misc_feature (279)..(279): Xaa can be any naturally occurring amino acid
MNMCEKDQNLPWGYDLFRDPFAPPNGYYGPPPGYCDGHCCDLHHYGRASHPDETQLHSSQLAYDMYNPSVGIYHPGSTHEHEHETVYVEPSSSSPDTGGDGCFEMEEEVGKRFYPMVPVPHVPKINGEIPSIDEATMDHERLTERLRLYELVENKVKGDGNCQFRALSDQLYQSPDHHEFVRSQIINQLKTNRDAYDGYVPMAYDDYLEKVARNGEWGDHVTLQAAADKYGVKIFVMTSFKDTCYIEILPKVQKSNKVILLSFWAEVHYNSIHPQNGEXRAVGMPGLHRQHAPRSQTTKRRRWWPFSQHHHH

SEQ ID NO: 12967 - protein, 507 aa, Poncirus trifoliata
MKLSALQQSYLSRRSNSFRGSAPLDSSSDSAIKSPAAIFWLVLHGLCCLISLVLGFRFSRLVFFFIFSTSTTSTTNLYTAPFRNLASDITTPFVSSSTPVEIPVLNRTTPNSNSRVVVGRHGIRIRPWPHPNPTEVMKAHKIIERVQREQRAHVGVKNPRTLIVVTPTYVRTFQTLHLTGVMHSLMLVPYDLVWIVVEARGVTNETASLIAKSKLRTIHVGVDQKMPASWGGRHQLEAKMRLRALRIVREEKLDGIVMFADDSNMHSMELFDEIQNVKWFGAVSVGILALAGNQDESSSVIMEEGGENTAMPVQGPACNSSNNVAGWHTFNTPYARTSATYIDDRATVLPRKLEWAGFVLNSRLLWKEAKDKPEWVNDLDLLDGLEDIESPLSLLKDQSMVEPLGNCGRQVLVWWLRVEARSDSKFPPGGIIDPPLEITVPSKRTPWPDAPPELPSNEKVLVGIQEHTVKHTPKNRSSRSKRSSRSKRKHETKVVDMQASARNSGRN

SEQ ID NO: 12968 - protein, 160 aa, Acinetobacter sp. ADP1
MTNLYQFEAELLEGDTKSLADYQGKVLLIVNTASKCGFTPQFAGLEKIYEKYKDRGFEVLGFPCNQFGGQDPGSNNEIGAFCQRNYGVSFPMFAKVDVKGPEAHAIFRYLTREAKGILGSENIKWNFTKFLVGRDGKVLNRYAPTTKPESLEEDIEKALA

SEQ ID NO: 12969 - protein, 560 aa, Synechococcus sp. WH 7805
MEFELRTSRALPESVDQSTQSQTLFDTIPDALKAIRNGECVVVVDDERRENEGDLICAAQFATPEQINFMATEARGLICLAMQGDRLDSLDLPLMVDRNTDANQTAFTVSIDAGPEHGVSTGISAEDRSRTIQVAIQSESRPSDLRRPGHIFPLRARPGGVLKRAGHTEAAVDLAQLAGLNSSGVICEIQNADGSMARLPELQDYARQWGLRLISIADLIRYRLENERFVVRQAQASLPSQFGSFQAIGFRNALDGSEHVALVKGTIGSMKEPVLVRMHSECLTGDAFGSLRCDCRGQLEAALRRIEQEGEGVLVYLRQEGRGIGLINKLKAYSLQDGGLDTVEANEKLGFAPDLRNYGVGAQILSDLGIHRLRLLTNNPRKIAGLGGYGLEVVDRVPLEIDPGDYNAQYLATKREKLGHLFEERPERSHWVIGLDTDATGETVLSKLVQRMEQLALEHKLQLQAEHNPRLLALWERPRFVWSIQNSDPTLSVVQKLLVTMASWQETSRIGVLHAVKTIQISHPPQWLNREERSLESLRSTMEKADWFQRENQPALIHWS

SEQ ID NO: 12970 - protein, 78 aa, Brassica napus
  misc_feature (17)..(17): Xaa can be any naturally occurring amino acid
MAYSVSISPSLSFFKDXQLTRLWCPFSPLYSRPRVQNPSLLTKNKTWSSSVVVAATAAEKQKKRYPGESKGFVEEMRF

SEQ ID NO: 12971 - protein, 579 aa, Ustilago maydis 521
MPAFPSSSAANSAGRHIELRSDNAYVQHLVHVINTVLERTGLALPVLVLTLLFLTIKYHNRTIFAKPPRKELYSPPAWPLIGHTLQAMKYTDNILDWFLEQSRKHPVGFSASIAGTGSGQMNFIYRPEYIEYVQKTNFENFEKGQAVKTRFSDLLGQNGIFNSDGHVWKTQRKMASHIFSVYQFRTWVQTVVQREMDSVVGILDALTEGKSSSDPATLLLPDLFFRYTLSSFGKMAFGSDIDCLSADPSCLEREVEFSNAFDFVQMVIDKRFRKPMWQLIERFSSEGRKNARMVKKINSFSGQIIEQRLREREAGIQKEKMTSDGKEGKDLLDLFMDITTDRDDLISVVLNFIIAGRDTTAQGLSWLFYELMKNPQYVEEIRSEIRNVLGNTDGSIRKLDYDTTKDLVFTQACFNEAIRLHPPVPKNGKRAIKDDVVVPQGPTAAGLPPIKIYAGELLSWSDWVIARNPEVWGPDCCEFKPMRFIETVTNEDGTKTRSLKNFGQWKFHVFNGGPRLCLGMTLANYEALSIIAAVMNRYDFGWGTKAQGQTADWPLKYLPSVTHPSQMYTATVVRRDELM

SEQ ID NO: 12972 - protein, 526 aa, Colwellia psychrerythraea 34H
MSNPQINNDQVIIFDTTLRDGEQALNASLSVHEKLQIALAIERLGVDVMEVGFPVSSPGDFESVQQIARTIKNARVCGLARAVEADIDACAEALKVADQFRIHTFISTSDVHVQQKLKKEFSDVEAMAIHAVKHARKYTDDVEFSCEDAGRTPIDNLCRMVEGAIKAGATTVNIPDTVGYTLPFEFQGIITDLFNRVPNIDQAIISVHCHNDLGLAVANSMAAVQAGARQIECTINGIGERAGNCSLEEVAMIMQTRQALLGVKTNINHQEIARVSKLVSTVCNMPVQLNKAIVGGNAFSHSSGIHQDGMLKASNTYEIMTPESVGIAKTKLNLTSRSGRHVIKHRMESLGYQESDYEIEELYADFLTLADKKGQVFDDDLEALVFKLQQKDLQDFFQLDTINVQCGDGEFSTASIKLISGEVTGDKENSKTHAATGNGPVDALYQAIKQSVDIEFEVSDYKISNKGSGEDGLGQADLIIIWQGRNFHGYGLETDVIEASGQALINALNSIHRAMTIADLKSAKQA

SEQ ID NO: 12973 - protein, 159 aa, Acidobacteria bacterium Ellin345
MGLYDLSATLNNGKEKKLSDYKGEVLLVVNTASECGFTPQYKGLQELYEKYKNQGFEILGFPCDQFGHQEPGSDKEIASFCEVNYGVTFPIFSKIEVNGANEHPVYKFLKSEKGGLLTNNIKWNFTKFLVDKQGNVVDRYAPQTIPARIAADVEKLLST

SEQ ID NO: 12974 - protein, 481 aa, Geobacillus kaustophilus HTA426
MKSEREQKLIEQAYAEVEKYETLVNRDRYRLRYHLMPPVGLMNDPNGLIDWHGTYHVFYQWMPFRTGHGAKFWGHYTSPDLVHWQAAPIALAPSEWYDKDGCYSGSAISCDGKLVLFYTGNVKDEQGNRQTYQCMAVSEDGIHFTKKGVVITLPDGYTAHFRDPKVWRYQGHWYMILGAQSESGDGKAVLFRSADLCHWEHLGPIAGGNMNGLGPFGYMWECPDLFPLDGQDVLIVCPQGLKPDGMRYQNVYQSGYFVGRFDYERAEFLHGTFEELDRGFEFYAPQTMLDRNGRRILIGWMGVPDQNEDRQPTVSHRWVHALTLPRELRLTGGKLRQTPVEELKQLRKQKVAYPSATVVNELRSWPGLEGDAIELRLDNIELFGSMMEIYFRHAARLVYNSDEGVLTLERKSFVNGLTEKRQCRLPRLRSLHVFLDTSSIELFVNDGEETFTARFFPHPDDQTIFFGAHGHLQMDIEKWEL

SEQ ID NO: 12975 - protein, 457 aa, Saccharomyces cerevisiae
MTSEPEFQQAYDEIVSSVEDSKIFEKFPQYKKVLPIVSVPERIIQFRVTWENDNGEQEVAQGYRVQFNSAKGPYKGGLRFHPSVNLSILKFLGFEQIFKNALTGLDMGGGKGGLCVDLKGKSDNEIRRICYAFMRELSRHIGKDTDVPAGDIGVGGREIGYLFGAYRSYKNSWEGVLTGKGLNWGGSLIRPEATGFGLVYYTQAMIDYATNGKESFEGKRVTISGSGNVAQYAALKVIELGGIVVSLSDSKGCIISETGITSEQIHDIASAKIRFKSLEEIVDEYSTFSESKMKYVAGARPWTHVSNVDIALPCATQNEVSGDEAKALVASGVKFVAEGANMGSTPEAISVFETARSTATNAKDAVWFGPPKAANLGGVAVSGLEMAQNSQKVTWTAERVDQELKKIMINCFNDCIQAAQEYSTEKNTNTLPSLVKGANIASFVMVADAMLDQGDVF

SEQ ID NO: 12976 - protein, 142 aa, Glycine max
  misc_feature (94)..(94): Xaa can be any naturally occurring amino acid
RHFVPNLTIGAPVIESLRKHTKAYLDCHLMVTNPLDYVEPLAKAGASGFTFHVETSKDNWKELIQRIKSHGMIPGVALKPGTPVGEVYPRVRTXEAENPVEMVLVMTVEPGFGGQKFMAETMDKVSSLFLMLCLMVDNTHQL

SEQ ID NO: 12977 - protein, 212 aa, Triticum aestivum
  misc_feature (107)..(107): Xaa can be any naturally occurring amino acid
  misc_feature (124)..(124): Xaa can be any naturally occurring amino acid
MAPTVMASSATSVAPFQGLKSTAGLPVSRRSNGASLGSVSNGGRIRCMQVWPIEGIKKFETLSYLPPLSTEALLKQVDYLIRSKWVPCLEFSKVGFIFREHNASPGXYYDGRYWTMWKLPMFGXATDATQVINEVEEVKKEYPDAYVRIIGFDNMRQGQCVSFIAFKPRGCEESGKALNSSLTTGQYIKCHGQFWQPLNIAFGFSLPPFNLS

SEQ ID NO: 12978 - protein, 624 aa, Burkholderia vietnamiensis G4
MIDRLQFSFSGLAAYDARVADTQAGLSRLLDAARLDAVVVTSQDEYITEYLPRCNNPRYALSGFDGSAGCGIFLSAATAHALGIPPFVLFVDGRYHLQAERQCDPARVQVVKLGIDVTIWQALAGWLVTHAARLARVGYDAWRISIAQRDRLLAQTQPASLDWVSLAAREIDRAIALPGWVVERPIFGLPDAMTGASVAQNLDALNGRLAAHTATTSDTASDTTPPTTAFLTCASDDLAYLLNSRGYHIPNASSHLGFLFVLGEQVALFLPERCDRCAVDLPSYPVLHVIRRDFAELERFLARFAVEHVCYGFESVNCALVESVRRVWPHARHADFNPVEALRASKTPAALERFRDAFARSSAAIAETMRWAKTGEPGRRHTEYDLARKINDAYGARSAVALTFPSIAANGANSAFAHYTEASADVELTEGELVLLDSGAYYDAGFATDCTRVVLRRTRAETVAQPWQREIYTVALKACIKGLVTRFPNTATGGDVDATVRQVCRDHGYDYGHGTGHGVGIHVHEGGVRFAPGASYGLVPNAVISVEPGIYLPGKGGVRIENIVIVHADDAEAGTVAFENLVTVGYDWDLIDVALLDDDERAYLRDYERLCAQRGTQVTACPLL

SEQ ID NO: 12979 - protein, 229 aa, Methanothermobacter thermautotrophicus str. Delta H
MEIVIMIQEALKALRRGEIVLVFDADNRERETDMIVAAEKIKPEHIRIMRNDAGGLICVPVSWENSEKLGIPYMTDIMEEASGRYPVLGKLSPHDIPYDEKSAFSITVNHRKTFTGITDNDRALTIGELAGICRDDRHESFGDLFRSPGHVTLLRAADGHVLRRGGHTEMSIALMEMAGLTGVAVCCEMMDDRTGNSLSTEDAMKYAREHDLIFMSGAELIESYMEFRS

SEQ ID NO: 12980 - protein, 559 aa, Azoarcus sp. EbN1
MEVANNSKHSVFIAVTEPFTPPHRLSAWSTLENHAARLRTMRIAELFEHDAARFATLSFGHRGLLLDLSKQSIDAPALAALVDLAGQARLPDGIEALFAGEHLNFTEDRAVLHMALRGACAAPLEDAATLAQSQQRMRAFTVALRSGTMTGATGKPIRLVVNLGIGGSDLGPRMAAQALVPTGLRATPEVRFVANIDRRELDEALADADPASTLFVVSSKSFATAETLANAQAARAWLQAGLGAGCDPALHFTAVSNATDAAAAFGIPAERVFPLPEWVGGRYSVWSTIGLPLMIAIGASEFDAFLAGARAMDEHFRTAPPGENLPVLMGLAGLWNTDFLGIESLALLPYAHGLRSFAAWLQQLEMESNGKRCLRDGSGSVIHTSPIVWGGVGTVGQHAFHQLFYQGTRRVALDFIVPVAAADDVSQRSLVENAFAQSAALMSGRDLDTALASLRAKGLAESEAAVLAPHLVCPGNQPSTTVLLPALDAFSLGQLMALYEHKVFVQGWIWGINSFDQYGVELGKEMARSLSAGSGENHDASTAGLMAAAEAMRRTPDRS

SEQ ID NO: 12981 - protein, 838 aa, Photobacterium profundum SS9
MGNAREVIMKVSRRKFIKAQAVASAAAAAGISIPISASNVVTDSSLTKITWEKAPCRFCGTGCSVNVGTKEGKVVATHGDIKSPVNRGLNCVKGYFLSKIMYGKDRLTQPLLRMTDGKFDKNGEFSPISWDQAFDIMAEKWKKTLKEKGPEAIGMFGSGQWTIYDGYAASKLMKAGFRSNNLEPNARHCMASAVVGFIRTFGIDEPMGCYDDIEAADAFVLWGSNMVEMHPILWTRVTDRRLSVPGVKVSVLSTFEHRSFELADIPIIFTPQSDLAILNFIANYIITNDKVNKDFTSKHVNFRRGTTDIGYGLRPEHPLQQAAKNPDSGDSTPMTFEEFKAFVSEYTVEKASEISGVKPDKLIELAELYANPETKVVSFWTMGFNQHTRGVWCNNLVYNIHLLTGKISTPGNSPFSLTGQPSACGTAREVGTFAHRLPADLVVTNPEHRKIAEKIWKLPDGTIPGKVGAHAVLQSRMLKDGKINAYWIQVNNNLQAGANINEETLPGYRNPDNFIVVSEAYPTVTSQAADLVLPTAMWVEKEGGFGNAERRTQLWHQMVEAPGESKPDLWQLMEFSKRFKTDEVWPKELLDSNPDYKGKTLFDVLFINGNVNKYPLDDLAEGTLNDESNYYGFYVHKGLFEEYAEFGRGHGHDLAPFDMYHETRGLRWPVVDGKETLWRYREGSDPYVKEGAGFEFYGKPDGKAIIFALPYEPAAESPDEEYDMWLSTGRVIEHWHSGSMTQRVPELYKAYPDAQVFMHPDDAKSRGLRRGDAVKVMSRRGEIITRVETRGRNKPPIGLVFVPWFDASQLINKVTLDATDPLSKQTDFKKCAVKIVKA

SEQ ID NO: 12982 - protein, 109 aa, Acidobacteria bacterium Ellin345
MATDTIVEVTDSNFDQLVLKSDKPVLIDFWAAWCGPCKALAPIVDEVAQSYNGKVTVGKMDVDKNAATPSRYGIRGIPTLLLFKGGQVQEQIVGYVARERIEQAINKAL

SEQ ID NO: 12983 - protein, 165 aa, Zea mays
MAAEKRTIGMGMDYSPSSKAAARWAVDNLIKAGDRLVLVHVLPKGVDSSHKELWKTTGSPLIPLSEFMEMNLQARYGLNPDKETLEILRAVSKSKQVEVLAKVYWGDAREKLCEAVDDLKVDSFVLGCRGLGPLKRALLGSVSNYVVNNATCPVTVVRGPTGLSA

SEQ ID NO: 12984 - protein, 211 aa, Brassica napus
  misc_feature (180)..(180): Xaa can be any naturally occurring amino acid
MRIISMASTIRPSLLGCVSASPRFPVVSRNLSRSTLSFSHVTQSKLLTLRRSVSCLGVAESGNASTAATEEDLLKWVKDDNRRMLHVVYRVGDLDRTIKFYTECLGMKLLRKRDIPEEKYTNAFLGYGPEDSHFVIELTYNYGVDKYDIGAGFGHFGIAVDDVAKTVELIKAKGGKVTRXEPGAVKGGKTVIAFIEDPDGYKFELLERGPT

SEQ ID NO: 12985 - protein, 115 aa, Triticum aestivum
MARGAATQLVLVAMVAAMLLVACDAAISCGQVTSALSPCISYARGNVANPPAACCSGVRSLAGAARSTADKQAACRCIKSAAGGLNAGKAAGIPSKCGVSVPYAISSSVDCSKIR

SEQ ID NO: 12986 - protein, 105 aa, Alicyclobacillus acidocaldarius
ATMTLTDANFQQAIQGDGPVLVDFWAAWCGPCRMMAPVLEEFAEAHADKVTVAKLNVDENPETTSQFGIMSIPTLILFKGGRPVKQLIGYQPKEQLEAQLADVLQ

SEQ ID NO: 12987 - protein, 359 aa, Glycine max
MAGSAIGFEGYEKRLEISFFEHGVFADPEGIGLRALSKDQLDEILKPAECTIVASLSNDYVDSYVLSESSLFVYPYKIIIKTCGTTKLLLSIPVILKLADALDIAVKSVRYTRGSFIFPGAQSFPHRSFSEEVSVLDSYFSNLGSGSKAYVMGDPSKSQIWHIYSASAQTKGSSEAVYGLEMCMTGLEKESASVFFKENTSSAALMTENSGIRKILPQSDISDFEFDPCGYSMNGIEGGAISTIHVTPEDGFSYASFEAVGYDFDEMALGELVERVLACFRPAEFSVALHIDMHGEKLNKFPLDIKGYYCGERSYEELGVGGAVVYQSFVQGCDGSTSPRSILKCCWSEDENEDEVREI

SEQ ID NO: 12988 - protein, 90 aa, Bdellovibrio bacteriovorus HD100
MKIRASHILVKHQYEAEDILRALKSGKTFEELAQRYSQCPSARVGGDLGVFAEGRMDEVFEEAAFALKVNETTLHPVRTRFGYHIIRRTE

SEQ ID NO: 12989 - protein, 447 aa, Oceanobacillus iheyensis HTE831
MSKKIIIVGGVGGGATVAAQIRRTNKTAEILVLERNGYVSFANCGMPYYLGGTITDRQKLIYPEEKFAQKYDLTVQTHANVTKINREQKSVVYEKYKTEHKADYDILILSPGASPVLPDIAGLQQSNTFPLRTIEDMDNIEQFIQSNNPQSAAIIGGGFIGLEMAESLCHRGFSCSLVDRSEHVLKRIDKEMAIHIDEHLQEKGIALYVNDGLKSFSDNGTTLHLSSDKTIQADMTIMAIGIKPNTELAIDAGLEIGETGGIKVNQYMQTTDPTIFALGDAVEVTDFITREPAHIALAWPAHRQAFIISSFLSGNPISDDGIIGSSILRVFDLTVAATGQNKQTLIDNEIAFEETIMKGYSHAAYYPGSKELWMQIVYDKNTGQLFGGSVIGFDGADKRMAVLATAIKGKLTVADLASLELGYSPIYSGAKDPLNILGYKAMEQLED

SEQ ID NO: 12990 - protein, 228 aa, Chlamydophila pneumoniae J138
MALLILLRHGQSVWNEKNLFSGWVDIPLSQQGIEEAFSAGRAIQNLPIDCIFTSTLVRSLMTALLAMTNHHSKKIPYIVHEDPKAKEMSRIYSAEEENNMIPLYQSSALNERMYGELQGKNKKQTAEQFGEERVKLWRRSYKTAPPQGESLYDTKQRTLPYFEKNILPQLQHGKNVFVSAHGNSLRSLIMDLEKLSEEEVLSLELPTGKPVVYQWKNHKIEKHPEFFG

SEQ ID NO: 12991 - protein, 497 aa, Oceanobacillus iheyensis HTE831
MTALTLETDVLKNFIDGKWVDVNNTTAVTNPANGERIVQVPLSDQSHVEEAVQAAIKAQKEWALVPAPQRAEVLYRVGMIMKDKKERLSRLLTMENGKVLEEARGEVQEGIDMAFYMAGEGRRLFGQTTPAELKDKFAMSQRVPVGVVGIITPWNFPIAIATWKSFPAIVAGNAVVWKPATETPIMAYELAKIFEEAGLPSGVINVVFGKGSEVGDSMVQHKDIRVISFTGSNDTGRNIASDCGKQLKKVSLEMGGKNAVIVMDDADLDLAVEGILWSAFGTSGQRCTACSRVIVHHKVKKTLEERLLAAMDHLTIGNGLEDGIKVGPIINEAGLNKIKKYIEVGKQEGATLLAGGTEWETNNPGYYFTPTLFTDAKPDMRIAQEEIFGPVVSLIEVSSFEEAIEVNNQVTFGLSSSIFTKDVNRVFKAQRDLDTGIVYVNAGTTGAEIHLPFGGTKGTGNGHRDSGVQALDVFTEWKAIYVDYSGKLQRAQIDTEE

SEQ ID NO: 12992 - protein, 334 aa, Wolbachia pipientis
QTLEKSLCDKKIQLGINLTKGLGAGALPDVGKGAAEESIDEIMEHIKDSHMLFITAGMGGGTGTGAAPVIAKAAREARAVVKDKGAKEKKILTVGVVTKPFGFEGVRRMRIAELGLEELQKYVDTLIVIPNQNLFRIANEKTTFADAFQLADNVLHIGIRGVTDLMIMPGLINLDFADIETVMSEMGKAMIGTGEAEGEDRAISAAEAAISNPLLDNVSMKGAQGILINITGGGDMTLFEVDAAANRVREEVDENANIIFGATFDQAMEGRVRVSVLATGIDSCNNNSSVNQNKIPAEEKNFKWPYNQIPILETKEYASTEQTNERVKWGSNVL

SEQ ID NO: 12993 - protein, 572 aa, Arabidopsis thaliana
MAEEAKAKGNAAFSSGDFTTAINHFTEAIALAPTNHVLFSNRSAAHASLHQYAEALSDAKETIKLKPYWPKGYSRLGAAHLGLNQFELAVTAYKKGLDVDPTNEALKSGLADAEASVARSRAAPNPFGDAFQGPEMWTKLTSDPSTRGFLQQPDFVNMMQEIQKNPSSLNLYLKDQRVMQSLGVLLNVKFRPPPPQGDEAEVPESDMGQSSSNEPEVEKKREPEPEPEPEVTEEKEKKERKEKAKKEKELGNAAYKKKDFETAIQHYSTAIEIDDEDISYLTNRAAVYLEMGKYNECIEDCNKAVERGRELRSDYKMVARALTRKGTALTKMAKCSKDYEPAIEAFQKALTEHRNPDTLKRLNDAERAKKEWEQKQYFDPKLGDEEREKGNDFFKEQKYPEAIKHYTEAIKRNPNDHKAYSNRAASYTKLGAMPEGLKDAEKCIELDPTFSKGYSRKAAVQFFLKEYDNAMETYQAGLEHDPSNQELLDGVKRCVQQINKANRGDLTPEELKERQAKGMQDPEIQNILTDPVMRQVLSDLQENPSAAQKHMQNPMVMNKIQKLISAGIVQMK

SEQ ID NO: 12994 - protein, 212 aa, Tortula ruralis
MAASTMLSRASYLGTVAGVPSLKLKPNVNTAFLGVRRNVVVYAKQTDDTPLPGTKVDPEEKEDPLRIFGGSPVEKFFRPEEERRPEDGNTSPDSLMKFDGPAPETINSRLAMLGITWAFVAEIITGQSVWEQVTEGRGLIWFLFVAPIIIGATLIPMFNRESPDSRANGPFNAQNERWNGRAAMIGLVALLVTENIYLKGPLLGFVHSSLNL

SEQ ID NO: 12995 - protein, 331 aa, Wolbachia sp.
DAQALEKSLCDKKIQLGINLTKGLGAGALPDVGKGAAEESIDEIMEHIKDSHMLFITAGMGGGTGTGAAPVIAKTAREARAVVKDKGAKEKKILTVGVVTKPFVFEGVRRMRIAELGIEELQKYVDTLIVIPNQNLFRIANEKTTFADAFQLADNVLHIGIRGVTDLMIMPGLINLDFADIETVMSEMGKAMIGTGEAEGEDRAISAAEAAISNPLLDNVSMKGAKGILINITGGGDMTLFEVDAAANRVREEVDENANIIFGATFDQAMEGRVRVSVLATGIDSCNNNSSVDQNKIPAEEKNFKWPYNQIPISETKEYASTEQTNERVKW

SEQ ID NO: 12996 - protein, 195 aa, Zea mays
  misc_feature (169)..(169): Xaa can be any naturally occurring amino acid
  misc_feature (184)..(184): Xaa can be any naturally occurring amino acid
MAENAELLEWPKKDKRRFLHVVYRVGDLDRTIQFYTECFGMKLLRKRDVPEEKYSNAFLGFGPETSNFVVELTYNYGVSSYDIGTGFGHFAISTQDVSKMVEAVRAKGGNVTREPGPVKGGGSVIAFVKDPDGYMFELIQRGPTPEPLCQVMLRVGDLDRAIKFYEKAXLGMRLLRRIERPEYXYTIGMMGYAEE

SEQ ID NO: 12997 - protein, 346 aa, Bdellovibrio bacteriovorus HD100
MTIIIVLFISTIGISFLCSMLEAVLLTSTSAYIGVLVKENKRSGKLLEHLKENIDRPISAILTLNTLSHTLGSAAIAYQIQIQYGQEAVTVASFALTFMILILSEIIPKSVGAAHWKALVPFAAYTIQFMILLLYPLVIMSEWLGRFFAKTSEDPEVTREEILMTAEIGVEEGTLKGKESNIIKNLLMLDKIYVSDIMTPRSVFFALDKELTVEEVFNKYRPLRFSRIPVYDGSLDNIIGMTYRYKIHETLSNDLHDKKVGEIVTPISSIPERMTVSQVLDFFIKEKEHMALAVDEYGIVAGLVSLEDAVETLLGVEIVDELDSVEDMRKFALEQWQMRKQKLRRS

SEQ ID NO: 12998 - protein, 598 aa, Vibrio parahaemolyticus RIMD 2210633
MNTTNSVNQRLSSLRDAMANYKVSAYIVTNNDPHNSEYSADHWAGRTWISGFTGSAGNVVITQQGGGLWTDGRYYIQAEEQLHGTGLDLFKARQPETPTIPKWLANTLDENSAIAVDGRSISYAFYQELKQALEPKNIEIVLDLDLITPIWTDRPSRPSAEIFDHPVAFSGVETKQKLADIRKWLNENHADCLLVSTLDDVMWTLNIRGGDTLYCPVSESYLIVERDRATAFIDKQKLPAEIEKNLTTQGVSVRHYEYVSQYLNQQCEGLSLAFSPVYTDSLLVNSIEQNLSLKPMPCPVTDMKAIKNQTELANLEQSLTDDGVAVVKFMSWLEDQVPSGLVTELSAEAQLKNYRRQTRHYVNDSFRTIAGFAAHGAKMHYAADEESNAVVNESNFFLVDSGGQYLGGTTDITRTFHFGSPTIKQRKDYTLVLKAVIRLTQTRFMKGSTGANLDIMARGVLWQHGIDYKCGTGHGVGICLNVHEGPQNFSQSHREVELKPGMVITNEPGIYREGEYGVRIENIMKVVEVEQNEFGIFYGFETITLAPIATNMLDVSLLGHDEINWLNQYHSRVYQALSPSLDEHDKAWLQRATQFVEL

SEQ ID NO: 12999 - protein, 857 aa, Thermus sp.
MSDPFEALKAEVDLLGRLLGEAIRKVSGERFFALVEEVRLLSKARRQGDGAAAEVLSQRVERMPVEEMEALVRAFTHYFHLVNLAEERHRVRVNRLRTEGETLENPRPEGFLALAKALKERGLSLEEAEAHLNRLALLLTFTAHPTETRRRTLRHHLERLQEELEGGDRERLLARVVLLYATEEVRKARPSVEDEIKGGLYYLPTTLWRAIPKVVEGLEAALERVYGKRPHLRSPVRFRSWMGGDRDGNPYVTPEVTAFAGRYAREVAKGRYLEELEALVRDLSLSEARIPVPKEVREGGEGVERFPGEPYRRYFAALYRALEGEALSTEGLARALKVAEKGLEGVGLAQVAQAFLRPLEARLSAFGLELAPLDLREESGKLLEAAAELLRLGGVHPDFLALSPEEKEALLTEELKTARPLLPVGEVPQGEALRVALGALRAWGDKGAHVVSMTHHPADLLAVFLLAREVGLYRPGKPLPFDVVPLFETLEDLERAPEVLRRLLANPVFRAHAQGRGGVEVMIGYSDSNKDAGFLMANLALYQAQEALHAVGEAQGIPVFFFHGRGTSTARGGGPAGRAIAGLPPKSVGHRLRLTEQGEALADRYAHPDLAVRHLEQLLYHFAQAALGDGVEPKAHWREALGEAGERSMARYRALLSQEGFFPFFEAFTPIREIGELPIASRPVYRHGRVRDIRDLRAIPWVMAWTQVRLLLPGWYGLSALEGLPMPLLREMYREWPFFATTLESAAMALAKADLGIAERYLKLVPEGLQGFYHHLAEEYRRTVALLEAIFEAPLLHNQKTLERQIALRNPYVDPINFVQVELLARYRAPGGREDEGVRRALLLSLLGVAAGLRNAG

SEQ ID NO: 13000 - protein, 224 aa, Tortula ruralis
MAAATMMTSQMALNCAALRSPSTEVLSSRTGAAAPRLPVRRSLVRCQAGPEGLRGAVDKATKKTLTKEEIVRHQETDESEQRSIFGARPTPGTPYGRPEVERRPETGDRSFLGIWSFDGAVPETVNCRLAMLGIVWAFFAEKATGLTVIEQLTAPGQTGLPAFIGAVQLFTYASLIPIFNGESTDARSFGPFTARAERWNGRLAMLGFFSLIVTELFRTVPVFH

SEQ ID NO: 13001 - protein, 330 aa, Wolbachia sp.
  misc_feature (46)..(46): Xaa can be any naturally occurring amino acid
  misc_feature (296)..(296): Xaa can be any naturally occurring amino acid
AQALEKSLCDKKIQLGINLTKGLGAGALPDVGKGAAEESIDEIMEXIKDSHMLFITAGMGGGTGTGAAPVIAKAAREARAVVKDKGAKEKKILTVGVVTKPFGFEGVRRMRIAELGLEELQKYVDTLIVIPNQNLFRIANEKTTFADAFQLADNVLHIGIRGVTDLMVMPGLINLDFADIETVMSEMGKAMIGTGEAEGEDRAISAAEAAISNPLLDNVSMKGAQGILINITGGGDMTLFEVDSAANRVREEVDENANIIFGATFDQAMEGRVRVSVLATGIDSCNNNSSVNQNKXPAEEKNFKWPYNQIPISETKEYASTEQTNERVKW

SEQ ID NO: 13002 - protein, 193 aa, Arabidopsis thaliana
SDLYIFNRNNCLIIVRWVDGKTCVFWDVEDYPIPAGLHPRSIRRRIVKDVKKYGCDAEVLIHAYANDNTVSVTMRRQFSAAGIKLEVFTQAGDKYARHCSLYGDIMLWSLENPPPSNIIVIAKIIDDDLADRIGCLTTVWSYGLLISQVKPEWLERLFPVGSYPSFLAAIFDGGLPKSSKANKDRFPLDESDD

SEQ ID NO: 13003 - protein, 334 aa, Wolbachia sp.
  misc_feature (9)..(9): Xaa can be any naturally occurring amino acid
  misc_feature (35)..(35): Xaa can be any naturally occurring amino acid
  misc_feature (37)..(37): Xaa can be any naturally occurring amino acid
  misc_feature (87)..(87): Xaa can be any naturally occurring amino acid
  misc_feature (189)..(189): Xaa can be any naturally occurring amino acid
  misc_feature (210)..(210): Xaa can be any naturally occurring amino acid
DAQALEKSXCDKKIQLGINLTKGLGAGALPDVGKXAXEESIDEIMEHIKDSHMLFITAGMGGGTGTGAAPVIAKAAREARAVVKDKXAKEKKILTVGVVTKPFGFEGVRRMRIAELGLEELQKYVDTLIVIPNQNLFRIANEKTTFADAFQLADNVLHIGIRGVTDLMIMPGLINLDFADIETVMSEMXKAMIGTGEAEGEDRAISAAEXAISNPLLDNVSMKGAQGILINITGGGDMTLFEVDSAANRVREEVDENANIIFGATFDQAMEGRVRVSVLATGIDSCNNKPEASSVNQNKIPAEEKNFKWPYNQIPISETKEYDSTEQTNERVKW

SEQ ID NO: 13004 - protein, 220 aa, Actinidia chinensis
LPSYVDWRSAGAVVDIKSQGECGGCWAFSAIATVEGINKITSGSLISLSEQELIDCGRTQNTRGCDGGYITDGFQFIINDGGINTEENYPYTAQDGDCDVALQDQKYVTIDTYENVPYNNEWALQTAVTYQPVSVALDAAGDAFKQYASGIFTGPCGTAVDHAIVIVGYGTEGGVDYWIVKNSWDTTWGEEGYMRILRNVGGAGTCGIATMPSYPVKYNN

SEQ ID NO: 13005 - protein, 334 aa, Wolbachia sp.
  misc_feature (262)..(262): Xaa can be any naturally occurring amino acid
DAQALEKSLCDKKIQLGINLTKGLGAGALPDVGKGAAEESIDEIMEHIKDSHMLFITAGMGGGTGTGAAPVIAKAAREARAVVKDKGAKEKKILTVGVVTKPFGFEGVRRMRIAELGLEELQKYVDTLIVIPNQNLFRIANEKTTFADAFQLADNVLHIGIRGVTDLMIMPGLINLDFADIETVMSEMGKAMIGTGEAEGEDRAISAAEAAISNPLLDNVSMKGAQGILINITGGGDMTLFEVDSAANRVREEVDENANIIXGATFDQAMEGRVRVSVLATGIDSCHNKPEASSVNQNKIPAEEKNFKWPYNQIPISETKEYASTEQTNERVKW

SEQ ID NO: 13006 - protein, 334 aa, Wolbachia sp.
  misc_feature (237)..(237): Xaa can be any naturally occurring amino acid
DAQALEKSLCDKKIQLGINLTKGLGAGALPDVGKGAAEESIDEIMEHIKDSHMLFITAGMGGGTGTGAAPVIAKAAREARAVVKDKGAKEKKILTVGVVTKPFGFEGVRRMRIAELGLEELQKYVDTLIVIPNQNLFRIANEKTTFADAFQLADNVLHIGIRGVTDLMIMPGLINLDFADIETVMSEMGKAMIGTGEAEGEDRAISAAEAAISNPLLDNVSMKGAQGILINITGGGXMTLFEVDSAANRVREEVDENANIIFGATFDQAMEGRVRVSVLATGIDSCHNKPEASSVNQNKIPAEEKNFKWPYNQIPISETKEYASTEQTNERVKW

SEQ ID NO: 13007 - protein, 118 aa, Triticum aestivum
MRHKLHTFFCSMFAEPLFFSLAQSRDSYSDMLEGGNFSNQETLYEVLSVRKDATYDEIRAAYKSAVLNTHPDKAQMALNPLVSSSERNEFLSVQKAWEILRYPKSRAEYDKQLQSSRQ

SEQ ID NO: 13008 - protein, 344 aa, Neurospora crassa
MQSIRRAALRSALSASRAISTQAPAASFSASIARTALVSSRIQAIRFFSQSPRVLNTEEPTQPEQTETETAPAATEEAAVQKDTTEGHAAFVRNIVFDATEEHLKGAFEKFGNVTDVFLARDPRGLSKGYGFVTFATREALEEACSQVDGSFWHGRRISVEPRRAKVNRGSAVGEPSACLFIGNIPYETTDAELNNIFVGIDGLKDVRVAVDRATGWPRGFAHADFVDVEAAVNALEKLQGTQLGERTIKIDYAQPAAARQPRENNGERREYRPRQQRDGQRDGQRSYNRDGGNRSYNREGGNRNYNRDGGNRSYNREGGDRSYNREGGDRNYNRRDQGESTEF

SEQ ID NO: 13009 - protein, 967 aa, Flaveria pringlei
MANRNLEKLASIDAQLRLLVPGKVSEDDKLIEYDALLLDKFLDILQDLHGEDLKEAVQECYELSAEYEGKHDPKKLEELGSVLTSLDPGDSIVIAKAFSHMLNLANLAEEVQIAYRRRIKLKRGDFADEANATTESDIEETFKKLVLKLNKSPEEVFDALKNQTVDLVLTAHPTQSVRRSLLQKHGRIRNCLAQLYAKDITPDDKQELDEALHREIQAAFRTDEIRRTPPTPQDEMRAGMSYFHETIWKGVPKFLRRVDTALKNIGINERVPYNAPLIQFSSWMGGDRDGKHPRVTPEVTRDVCLLARMMASNMYFSQIEDLMFEMSMWRCNSELRVRAEELYRTARRDVKHYIEFWKQVPPTEPYRVILGDVRDKLYNTRERSRHLLAHGISDIPEEAVYTNVEQFLEPLELCYRSLCDCGDRVIADGSLLDFLRQVSTFGLSLVKLDIRQESDRHTDVLDAITQHLEIGSYREWSEEKRQEWLLAELSGKRPLFGSDLPKTEEVKDVLDTFNVLAELPSDCFGAYIISMATSPSDVLAVELLQRECHVKHPLRVVPLFEKLADLEAAPAAMARLFSIDWYRNRIDGKQEVMIGYSDSGKDAGRFSAAWQLYKAQEEIIKVAKEFGVKLVIFHGRGGTVGRGGGPTHLAILSQPPDTIHGSLRVTVQGEVIEQSFGEEHLCFRTLQRFCAATLEHGMNPPISPRPEWRELMDQMAVVATEEYRSIVFKEPRFVEYFRLATPELEYGRMNIGSRPSKRKPSGGIESLRAIPWIFAWTQTRFHLPVWLGFGAAFKHAIKKDSKNLQMLQEMYKTWPFFRVTIDLVEMVFAKGDPGIAALNDKLLVSEDLWPFGESLRANYEETKDYLLKIAGHRDLLEGDPYLKQRIRLRDSYITTLNVCQAYTLKRIRDPNYHVTLRPHISKEYAAEPSKPADELIHLNPTSEYAPGLEDTLILTMKGIAAGMQNTG

SEQ ID NO: 13010 - protein, 473 aa, Ralstonia solanacearum
MLDTLALDVIEDPWRQAYHLCPPQGLLNDPNGLIFWRGAYHVFYQWNPHGCRHENKHWAHARSTDLIHWELLPPALAPDAPYDEDGCYSGCAVEVDGDLFLLYSGNVRSPDGGRASYQCLAHSRDGVGFDKLGPVINGVLPGYTGHFRDPKAWRQGDHWYAVLGAQRTDLTGTVLLLKSPDLRQWQLLGELIAPALPCYMYECPDLFTLDRRTVLVCCQQTMETGAGGNRRSDVAGYMLGQIDLERAQFPHSGFRPLDQGFDFYAPQTLLGPDGRRLLIGWMGLPVQPQTPTVASGWMHCLTLPRELTLEGDQLMQRPARELAMLRSATIRVPDVDLEANTAFVLPQPDGGAWELDLSIRAECPAGWVLHLFDSAQQSLSLAFDGVGTLTLRRHCPMAGQINERKTCGIGGPVTRLQVFIDRSSVEMFVNDGVAVLTTCCYPAAEPEAPRLQARQPLSLRDIHVWPLEDRLAR

SEQ ID NO: 13011 - protein, 449 aa, Escherichia coli K12
MSEIVVSKFGGTSVADFDAMNRSADIVLSDANVRLVVLSASAGITNLLVALAEGLEPGERFEKLDAIRNIQFAILERLRYPNVIREEIERLLENITVLAEAAALATSPALTDELVSHGELMSTLLFVEILRERDVQAQWFDVRKVMRTNDRFGRAEPDIAALAELAALQLLPRLNEGLVITQGFIGSENKGRTTTLGRGGSDYTAALLAEALHASRVDIWTDVPGIYTTDPRVVSAAKRIDEIAFAEAAEMATFGAKVLHPATLLPAVRSDIPVFVGSSKDPRAGGTLVCNKTENPPLFRALALRRNQTLLTLHSLNMLHSRGFLAEVFGILARHNISVDLITTSEVSVALTLDTTGSTSTGDTLLTQSLLMELSALCRVEVEEGLALVALIGNDLSKACGVGKEVFGVLEPFNIRMICYGASSHNLCFLVPGEDAEQVVQKLHSNLFE

SEQ ID NO: 13012 - protein, 105 aa, Pyrobaculum aerophilum str. IM2
MAPHMPFSHTKIVGPAGRYGARYGMGLRRKVTAIEVKQRGKHRCPSCRSLVRLERIAFGIWRCPKCGFTFAGGAWTPQTIMGKALAPEELKEVEAQKAKWKEAVK

SEQ ID NO: 13013 - protein, 260 aa, Triticum aestivum
  misc_feature (162)..(162): Xaa can be any naturally occurring amino acid
  misc_feature (171)..(171): Xaa can be any naturally occurring amino acid
  misc_feature (236)..(236): Xaa can be any naturally occurring amino acid
HYRTSLYKKAGWYRSGIPGISSTHASALVHRLRLLRSAVVCSSSALLPCSRPRLAIPFAQPPLRGPAFAAASSPLLRSVGARFSLFSSMAAAASSASSIHDFTVKDASGKDVDLSTYKGKVLLIVNVASQCGLTNSNYTELAQLYEKYKDQGFEILAFPCNXQFGGQEPGXTNEEIVQFACTRFKAEYPIFDKVDVNGDNVAPVYKFLKSSKGSLFGDNIKWNFSQVLVDKEGRVXVDRYAPTTSPLSIEKDIKKLLASS

SEQ ID NO: 13014 - protein, 602 aa, Ustilago maydis 521
MKSILVGAALATFATFVSAAPSTIDPFDFREADLVYPRMNYDSAQHDARALGKGQCLNSNGSSLAGYQPALYTEPVRPQIHFSPTVNFMNDPNGLVYSNGKWHLFYQYNPTENVAGNQHWGHAVSTDLYHWENLPIAIAPEKEGEGIFSGNAVIDFENTSGFFNESTPKDQRIVAFYTLNTPTSQTQHLAYSSDGVHFTKYPEAVISRNQTQFRDPKAFWDEKSSRWIVALALSQEFGIVFYSSPNLKDWTEVSRFQSSGILGYQYECPDLFQVPIEGGPDDGKMMYVLAISINPGALVGGSFVQYWVGDWDGSKFTPRDNAVRTMDFSKDFYAFSSWNNSPGKKAYAIAWANNWQYTNQVPTSPFRSIQSLPRELTLKYYRPTPQFGDLILNNKPANLSALRSKTLYKSDNGNSATNKTVHLKGKGAFDITATFKLPASSKITYNTIASFEIFAGDGKQSVKTGIQMGEPAVAYIDRRGAGPSFAAENPFFTDKTSGIVRYAANYTSASDGGSDQYVLGPLPTSAYLDTAGKDQYIKLQAVVDRSVIEVFVNDGELAGTSVFYFDNDEIPAKVTVSIGDNQIKLVDLEVTALDSIWSKCNK

SEQ ID NO: 13015 - protein, 458 aa, Zea mays
  misc_feature (19)..(19): Xaa can be any naturally occurring amino acid
MATHAALAASRIPAGARLXHSRAAASSRHGGQRVDFADFSGLRPGSCSVSAAAREASFSDVLGAQLVAKVRMRFMDDATGENAVRAPAEAKLKVAINGFGRIGRNFLRCWHGREDSPIDVVVVNDSGGVRNASHLLKYDSMLGTFKADVKIVDDTTISVDGKPITVVSSRDPLKLPWGELGIDIVIEGTGVFVDGPGAGKHIQAGAKKVIITAPAKGADIPTYVVGVNEGDYDHSVADIISNASCTTNCLAPFVKILDEEFGIVKGTMTTTHSYTGDQRLLDASHRDLRRARAAALNIVPTSTGAAKAVALVLPQLKGKLNGIALRVPTPNVSVVDLVINTVKTGITADDVNAAFRKAAAGPLQGILEVCDVPLVSVDFRCSDVSCTIDASLSMVMGDDMVKVVAWYDNEWGYSQRVVDLAHLVAAKWPGAAAAGSGDPLEDFCKDNPETDECKVYEA

SEQ ID NO: 13016 - protein, 116 aa, Brassica napus
MSEILSSLRSLMASHTPPLDALVVPSEDYHQSEYVSARDKRREFVSGFTGSAGLALITKNEARLWTDGRYFLQAIQQLSDEWTLMRMGEDPLVEVWMSDNLSEGANIGVDPWCVSV

SEQ ID NO: 13017 - protein, 382 aa, Pyrocystis lunula
LFLLLLRPPPEHASNSTSPGPLPPSSPCTHSDLTPATAMAAGSDTKAAINGFGRIGRNVLRCWLKKETKPFDVVAINVGSMGAKAAAHLLKYDTVLGTLQANVSFTDDEITIDGKSFKVVSGRDPAAMPWKDMGVEVIIESTGAFNSLEGGSKHLEAGAKKIVLTAPGKNCPTYVVGVNEGDYDAENDTVVSNASCTTDGMASVCKVLDESFGVEYGMMTTTHSYTGDQMILDGRHRDLRRARAGACNIVPTSTGAAKAVAEVLPKYKGKLNGIALRVPTPNVSIVDLVVKVSKKCTKEEVNAAVKAAADGPMKGIINFEEQPLVSSDFMQTDYSNSVDVALTMVMGEDLVKVVMWYDNEWGYSQRVLDLTAIVAAKLPVAA

SEQ ID NO: 13018 - protein, 500 aa, Schizosaccharomyces pombe
MAKKDKTSVKKSVKETASKKGAIEKPSKSKKITKEAAKEIAKQSSKTDVSPKKSKKEAKRASSPEPSKKSVKKQKKSKKKEESSSESESESSSSESESSSSESESSSSESESSSSESSSSESEEEVIVKTEEKKESSSESSSSSESEEEEEAVVKIEEKKESSSDSSSESSSSESESESSSSESEEEEEVVEKTEEKKEGSSESSSDSESSSDSSSESGDSDSSSDSESESSSEDEKKRKAEPASEERPAKITKPSQDSNETCTVFVGRLSWNVDDQWLGQEFEEYGTIVGARVIMDGQSGRSKGYGYVDFETPEAAKAAVAANGTKEIDGRMVNLDLSNPRPANPQPYAQQRAGNFGDQLSEPSDTVFVGNLSFNATEDDLSTAFGGCGDIQSIRLPTDPQSGRLKGFGYVTFSDIDSAKKCVEMNGHFIAGRPCRLDFSTPRTGGGSRGGRGGFGGRGGFGGRGGFGGGRGRGRGGARSGNPNRGSVAPFSGNKVTFD

SEQ ID NO: 13019 - protein, 363 aa, Vibrio sp. Ex25
MTDKSYKIAVLPGDGIGPEVMAQAHKVLDAIEKKHGIAFERDEHDVGGIAIDNHGSPLPESTVKACEESDAVLFGSVGGPKWEHLPPNDQPERGALLPLRKHFQLFCNLRPAQIHAGLEAFSPLRADISGRGFDIVVVRELTGGIYFGQPKGREGEGATEKAFDTEVYHRFEIERIAKIAFESARLRRKKVCSIDKANVLQSSILWREVVEEIAKDYPDVELSHMYIDNATMQLIKDPAQFDVMLCSNIFGDIISDECAMITGSMGMLPSASLNESKFGLYEPAGGSAPDIAGKNIANPVAQILSAALMLRYSLGEEAAAQDIEAAVSKALSAGELTGDLAGNNPALTTSEMGDKIAEYILNS

SEQ ID NO: 13020 - protein, 519 aa, Listeria monocytogenes str. 4b F2365
MTLTKFSEFGLDEKIVKSVNRMGFEEATPIQEKTIPLGLAGKDLIGQAQTGTGKTAAFGLPMIHKIDQKSNNVQALIIAPTRELAIQVSEELYKLSYDKHVRVLAVYGGSDISRQIRSLKKNPQIVVGTPGRILDHINRRTLKLDHVETLVLDEADEMLNMGFIDDIETILKEVPAERQTLLFSATMPDPIRRIGERFMHSPELIRIKAKEMTALLIEQFFVKVHEKEKFDVLSRLLDVQAPELAIVFGRTKRRVDELSRALDMRGYVAEGIHGDLTQAKRMSVLRKFKEGKIDVLVATDVAARGLDISGVTHVYNYDIPQDPESYVHRIGRTGRAGKEGMAITFVQPREMGYLRIVEETTKKRMQPLQAPTWDEAFAGQLRVATEKIQEAITEENLADYKTFANELLEKYDATDIAAAMLKMLAKEPDKTPVHITEERPLPSRGGGGYKGKNGKGGKGGGYRGGSGKGGSYRDRNNSGKGRRSGGGSGSGGGGNRDRRSGGGEQRSGGNKGNYSQKSK

SEQ ID NO: 13021 - protein, 515 aa, Vibrio sp. Ex25
MNDQVIIFDTTLRDGEQALSASLTVKEKLQIAYALERLGVDVIEAGFPISSPGDFESVQTIAKNIKNSRVCALSRAVAKDIDAAAEALKVADQFRIHTFLATSTIHVEDKLRRSYDDVLEMAVNAVKHARNYTDDVEFSCEDAGRTPIDNLCRMVEAAINAGASTINIPDTVGYTVPSEFGGIIQTLFNRVPNIDKAIISVHCHDDLGMSVANSIAAVQAGARQIEGTINGIGERAGNCSLEEIAMIIKTRQEFLGVHTGIKHDEIHRTSKLVSQLCNMPIQSNKAIVGANAFSHSSGIHQDGMLKNKNTYEIMTPESIGLKNQALNLTSRSGRAAVKSHMDTMGYNEDEYNLDALYADFLKLADRKGQVFDYDLEALMHFSNLREEDDFYKLNYLSVQSGSVMATTSIKMQCGDEEMCEAAVGNGPVDALYQCIYRVTGYDIVLDKFDLTAKGEGEDGLGQADIIANYKGRKYHGTGVSTDIVEASGQALLHVINSIHRADKIEEMKQKKIATV

SEQ ID NO: 13022 - protein, 300 aa, Triticum aestivum
  misc_feature (154)..(154): Xaa can be any naturally occurring amino acid
MRKAGRVHLVKPYMVAVQSNNVSAVNEALNELYVEEEDYERLRESVDMHDNFDQIGLAQKLEKHELLEMRRIAAYIYKKAGRWKQSIALSKKDNMRKDCMETCSQSGDRELQVISLFTSSLGKAIWRSFLVVLTHAQLSPPDGIDYNDFLARRXESLLRYIRSGAGIGKREYADFPLPIALAENSGRCKTNENGAKILPDGTPWIPNLMKEITIVVSNGSQSIHVDQKLIDGPNPNNRWKKYIPLILAVQYFFVVKGIRRAIHSDISNGKLDDWEQRYRDLVGSGNPVDQKVSSSRNPKA

SEQ ID NO: 13023 - protein, 371 aa, Brucella melitensis 16M
MSYNQKQVVDAICAFERGEIVVVMDDDGRENEGDLIVAAVHCTPEKMAFIVRHTSGIVCTPMTREEAKRLNLTPMVAENESAHTTAFTVTVDYRHGTTTGISAEDRTLTVRNLANPNAGASDFVRPGHIFPLVAREGGVLMRSGHTEAAVDLCKLANLPPIGVICELVNDDGTVMRGPDVAAFAEEHKLHRVTVADLIAYRQRKETLVRRIGDAPVETCAGKAHAYSYELPWEPMQHVAVVFGDIRDGEEVPVRLHREDVLNDVFGKGGSNLDAIMQRMGQEGRGILVYLREGSVGVRSDHRDARAREALQGEHEAHAEAVAREEEWRQIGLGAQILKDLGVSSIVLLASRERHYVGLEGFGICITRTEII

SEQ ID NO: 13024 - protein, 424 aa, Deinococcus radiodurans R1
MQAVTEVMTSIWPFVQAHPEYAEHALLERLIEPERVISFRVTWVDDAGQVQVNRGYRVQHSSSIGPYKGGMRFHPSVNLSILKFLAFEQTFKNALTTLPLGGGKGGSDFDPKGKSDGEVMRFCQALMTELWRHLGPDTDVPAGDIGVGGREVGYLAGMMKKLANHAGGVFTGKGLSYGGSLLRPEATGYGTVYFVEHMLRDQRMEMEGLRVSVSGSGNVAQYAIEKALHLGAHVLTASNSGGTVVDEDGFTYDKLAVLMDIKNERRGRVEDYAREVGAEFRPGVRPWDVPVDVALPCATQNELGADDARTLIAGGVRVVAEGANMPCDLAAIQAFEEAGVLYAPGKATNAGGVATSGLEMSQNAQRLSWTREEVDQRLRSIMSAIHDSCLEYGRRPDRHVSYLDGANIAGFVKVATAMREQGVL

SEQ ID NO: 13025 - protein, 779 aa, Bradyrhizobium japonicum
MYTTGRLEVRLKAGRHGVSTPQINADAGRNRIGCRGPDSPVARPAKPRARMMRQYDLVERVRSYNPNTNEDLLNRAYVYAMKAHGSQTRASGDPYFSHPLEVAAILTDLKLDDATIVAALLHDTIEDTEATRAEIDQIFGPEICALVEGLTKLKRLELVSREAKQAENLRKLLLAIADDVRVLLVKLADRLHNMRTLEFVPPESRRRIAEETLDIYAPLAGRMGMQEMREELEDLSFRTLDPEAYSVVMQRLDALAERNRNLIGEIEAQLSNNLRHRGLGARVYGRRKKPFSIWTKMERKSVGFEQLSDIFGFRVVVNDIEACYRALGIVHTTWPVVPGRFKDYISTPKQNDYRSIHTTVIGPGNQRAELQIRTEAMDQIAERGIAAHVFYKEGAGSPTEFLKRESNAFAWLRHTVGILSEMPTPRNSRAHKLEVELFHDQVFCFTPKQADRAAAPRQRQRDFAYAVHTDVGNSAVGCKINGKFSPLSSELQNGDEVEVLTSEAQSAPPSAWETLAVTGKARAAIRPPRHAHRRAHQYVGLGRRIVERLFERAKIEYADDKLKGALPRLARTSIEDVMAAVGRGEIRGLPRRASMYPDYKEERVARYGHQEGARRQAQGEGGLRAAANPGRDPDPRHQFRPAGEVRAERRAVPGDRIVGIVTPGEGITIYPIQAPALKDFEEEPERWLDVRWDIEDTAPQRFPARIRVENVNEPGALAQIATVIAEHDGNIDNISMQRRSPDFTEDDDRSRKVYGPEGSLERDPGPVAREGGRRPRRTC

SEQ ID NO: 13026 - protein, 112 aa, Bdellovibrio bacteriovorus HD100
MKKIEAIIKPFKLDDVVDALSEVGVEGITVSEVRGFGRQKGRTEVYKGAEYVVDFLPKIKIEVVLPTALVDSAVEAIRKTAHTGKIGDGKIFVLPVDSALRIRTGEKDEQAL

SEQ ID NO: 13027 - protein, 479 aa, Magnaporthe grisea 70-15
MTDNGAPAPGTQLPPPPQANAGAPGFDNPQNGQSGPMAPPPLHIPQNTNPIPTAITSPMGGGDQSALMSPGGTFTRRTAPEPNKRALYVGGLDARVTEDVLRQIFETTGHVQNVKIIPDKNAKGYNYGFVEYDDPGAADRAMQTLNGRRVHQSEIRVNWAYQAATSATKEDTSNHFHIFVGDLSNEVNDEVLTQAFSVFGSVSEARVMWDMKTGRSRGYGFVAFRDRSDAEKALSSMDGEWLGSRAIRCNWANQKGQPSIAQQQAMSAVGMTPTTPFGHHHFPTHGMQSYEMVVNQTPAYQTTCYVGNLTPYTTANDVVPLFQNFGYVVESRFQADRGFAFIKMDSHENAAQAICGLNGYNVNGRPLKCSWGKDKNSTNPQGNFDPSQAFSPQSAGGPGFPGTPSTYFPQYGGQFSGPQGNFGPNSAQSPAGFQQPMPFSNPPSAGGYGRGQQAPNAQWSSPQGQPQNFNNNGFSGYQG

SEQ ID NO: 13028 - protein, 269 aa, Mycoplasma pneumoniae M129
MSFDGKQLAHEILLTYKNRDWSQVKLVILQTNNDVSSDAFIRQKMNACNTLGAQSELIKYHESVTEKELLEKIQQLNTDPEVTGIILQLPVYPHLKQNKLLKAIDPYKDVDYLTGNCPLPIRSCVVEAVLILKEHFHHDFTNKQIVVVGLGVTGGGPIFHYLKETGHQVVGCDKHTPNTMELIKTADVVITAIGKPHFFKTTNFKPGVILYDVGVSRNVLNKLCGDIDPNGIEKVAKWWSPTPGGVGPFTVLAIMKNLWVLYEAHQRRI

SEQ ID NO: 13029 - protein, 366 aa, Pseudomonas syringae pv. tomato str. DC3000
MSQSFLSPVTTQTWANGRHLVRVVKVIQETWDVRTFCFMADQPIMFFFKPGQFVTLELEIDGVPIMRSYTISSSPSVPYSFSITVKRVPGGKVSNYLHDTLSEGQELAVHGPVGLFNAIDFPNPKILYLSGGVGITPVMSMARWFYDTNANVDMVFVHSARSPKDIIYHRELEHMASRIDNFSLHLVCEKHGLGEPWAGYRGYLNQKMLELMAPDFMDREVFCCGPTPYMTAVKRLLQENGFNMAQYHEESFGATPPEARADAVEQAEIAADAPDVDAADLHQVEFTDTGKSIRVAPGETVHAAAAKLGLMIPKACGMGICGTCKVMKLSGEVEMEHNGGITDEDVAEGYILSCCSVPKGDVRIEY

SEQ ID NO: 13030 - protein, 738 aa, Chromobacterium violaceum ATCC 12472
MREAKQMAEQATRAKSLFLANMSHEIRTPMNAIIGMSYLALRTDLDDQQRNYIGKIHNAGTSLLGIINDILDFSKVEAGKLELEAQPFWLDDVLDGVSALVAQKAADKGLELLFETAGDVPQGLVGDALRLGQVLTNLAGNAIKFTETGQVSIIIGQVERIGDKVQLKFCVHDTGIGMSEEQQSRLFQAFSQADGSTTRRFGGTGLGLTIAKRLVELMGGSMLVESAPGWGSSFIFSCWLGVSAETDSRRQSLPKEIRGLRVLVVDDNQSAVDVLCAQLKQLGFEVQGCLNGHEALSKVRQDCLQKPFDVAFVDWMMPEMDGLEAVRRMRQVSRKMRIVMVTAFGRDEIRVKARAAGCDAFMVKPVNLSQLYDVLLEVFGFGRSGGLSLFDETDQLPRFDGAHLLLVEDNRINQQIAIELLEGTGATITVAANGQAALDKLLAYGPKAFDAVLMDVQMPVMDGIEATGRIRSQPGFIDLPVIAMTADALVEERERCLAAGMVDHIAKPIDPHILFSTLARWVRRSGAPQGREAETAADQTPLPQIDGLDQLAGLRRVAGNRQLYLHLLRQFVDEEAGAATRLGLALGERDFQTAERIAHTLKGAAGSIGFVDLQSAAMRLEMALRARESWQDLLVELEMELGQVVGALRAGLAELGQPASGARPDDALLERLAALLAVGDGDALGYFLEHAPRIRACFPEGACADFEQALNRFDFVSALGALRELARACGKKLPEDTR

SEQ ID NO: 13031 - protein, 153 aa, Lupinus luteus
GVLTDVQVALVKSSFEEFNANIPKNTHRFFTLVLEIAPGAKDLFSFLKGSSEVPQNNPDLQAHAGKVFKLTYEAAIQLEVNGAVASDATLKSLGSVHVSKGVVDAHFPVVKEAILKTIKEVVGDKWSEELNTAWTIAYDELAIIIKKEMKDAA

SEQ ID NO: 13032 - protein, 473 aa, Agrobacterium tumefaciens str. C58
MPVEILMPALSPTMEEGTLSKWLKKEGDKVTSGDVIAEIETDKATMEVEAVDEGVIGKLLIDAGTEGVKVNTPIAVLIQEGESADDISSSAKKEEPKAEAANSGSDAAGGKTREAAEEPSAAKEAAKVPAAPKIEVAADPDIPEGTEMVMTTVREALRDAMAEEMRADEKVFVMGEEVAEYQGAYKITQGLLQEFGERRVIDTPITEHGFAGIGVGAAMTGLKPIVEFMTFNFAMQAIDQIVNSAAKTLYMSGGQMGAPMVFRGPSGAAARVGAQHSQCYAAWYSHIPGLKVVMPYTAADAKGLLKAAIRDPNPVIFLENEILYGQSFEVPKLDDFVLPIGKARIHRKGKDATIVSFGIGMTYAIKAVAELEKLGIDVELIDLRTIRPMDLPTVIESVKKTGRLVTVEEGFPQSSVGDFIANQVMRAAFDYLDAPILTIAGKDVPMPYAANLEKLALPNVDEVVQAVKTVCYK

SEQ ID NO: 13033 - protein, 153 aa, Lupinus luteus
GALTESQAALVKSSWEEFNANIPKHTHRFFILVLEIAPAAKDLFSFLKGTSEVPQNNPELQAHAGKVFKLVYEAAIQLEVTGVVVSDATLKNLGSVHVSKGVADAHFPVVKEAILKTIKEVVGAKWSEELNSAWTIAYDELAIVIKKEMDDAA

SEQ ID NO: 13034 - protein, 184 aa, Triticum aestivum
MAVSELEVDGVVFPPLARPPGSEHAHFLAGAGVRGMEIGGKFITSTAIWVYLQADTTAPALAAKWAAKPAADLASDAAFFPDPSTGEFEKFTRVTMILPLTGAHYSDKVTETCLSYWKARGVYTDSEAAAVDKYEEALGGHRCSPGPMILFTHSTAGVLSTGFSKESSVPVLRRRGHLKAPGLC

SEQ ID NO: 13035 - protein, 332 aa, Wolbachia pipientis
QALEKSLCDKKIQLGINLTKGLGAGALPDVGKGAAEESIDEIMEHIKDSHMLFITAGMGGGTGTGAAPVIAKAAREARAVVKDKGAKEKKILTVGVVTKPFGFEGVRRMRIAELGLEELQKYVDTLIVIPNQNLFRIANEKTTFADAFQLADNVLHIGIRGVTDLMVMPGLINLDFADIETVMSEMGKAMIGTGEAEGEDRAISAAEAAISNPLLDNVSMKGAQGILINITGGGDMTLFEVDAAANRVREEVDENANIIFGATFDQAMEGRVRVSVLATGIDSCNNNSSVNQNKIPAEEKNFKWPYNQIPVSETKEYAPTEQTNERVKWGSN

SEQ ID NO: 13036 - protein, 155 aa, Zea mays
  misc_feature (91)..(91): Xaa can be any naturally occurring amino acid
  misc_feature (121)..(121): Xaa can be any naturally occurring amino acid
MAASTVASLSVPVTTTTFAAAGGGDVLIVVPRRAGAKRVVWFPAAARRGGGRLVAVRSSGPATPPEISDKVSESIKQAEETCADDQKGDAXCAAAWDEVEELSATGQPPPRDSLKETNAQXTPLEKYLQGQPRTSEECRIYEQLASRIGYIGPST

SEQ ID NO: 13037 - protein, 131 aa, Arabidopsis thaliana
  misc_feature (84)..(84): Xaa can be any naturally occurring amino acid
  misc_feature (115)..(115): Xaa can be any naturally occurring amino acid
PRPKWAFSVLLEPIFLASPSKAIIKIGGPTKLLLFIQPLLRLVGGLFLGVKFGKTTRGSFLCPGGQPISNRSFFEESSVFEGHXTKLGLTRVAFLLGNVDEPKKVDVIAAFAKDXSTCTTIVYTFKMGLTG

SEQ ID NO: 13038 - protein, 591 aa, Oryza sativa
MEIGAVENGGVVGGEVVAGKRGKTPQATETFEKVATIGVVANLTVYLVKRFNIGQIEAANITNIFFGTLNFAPLLGAFISDVYLGRFKTLAYGCFASLLGMLGMTLYASLPALKPPICHEKTRLGGGCNSPSTLQLSVLYLSLGFLIIGGGAIRPCSLPFGVDQFDKTDEEGRKGLNSYYNWYYGTSTAALVLSMIVIIYIQNNVSWPIGFGIPTLLMFLAIIMLFLGTNLYVHVQPEGSIFAGIAQVLVASFKKRNLKLPCPHDINQQGLMLYNPPSKGNRVFRLPLTSQFRFLNKGAIVMGDDINVDGSARNSWELCNVQQIEEVKCLIRIVPVCISGVLCFVALAQQFTYIILQTFTMDCHFGTHFEIPAGSVVSISLIALTLFIPIYDRILVPIARGFTGVESGITLLQRQGIGLAISPISMVVAGLVERKRRNSALSNGGISPMSVLWLAPQLVLMGIAEAFNAVGQIEFYNKQFPENMQTLAGSLFFCTIAGANYLSTALANIMRKVTTRDGHSSWLTDNINLGKLDYYFYFIALMGVLNLIYFLICSHFYQYKVMSLHSEESIKIPTKEEEATEIDIDTDAPSK

SEQ ID NO: 13039 - protein, 648 aa, Flaveria trinervia
MISLNSSFLERSSVTGGSRTQSQSLRLSARRPVVTSMLNSNSLPERNVSVSVDSAVRDVNAPVAVEVDRSVGEKPFAAVGGGVEDMYGEDTATEDHYITPWSVSVASGYSLLRDPHHNKGLAFTEKERDAHFLRGLLPPVVVNHDLQVKKMMHNIRQYQVPLQRYQAMMDLQQRNERLFYKLLIENVEELLPIVYTPTVGEACQKYGSIFENSQGLFISLKDKGRILEILKNWPHKKIQVIVVTDGERILGLGDLGCQGMGIPVGKLALYTALGGVRPSACLPITIDVGTNNEKLLNDDEFYIGLKQKRAAGQEYAELMNEFMSAVKQNYGENLLIQFEDFANHNAFDLLEKYRTTHLVFNDDIQGTASVVLGGLISALKLVGGSLADQKFLFLGAGEAGTGIAELIALEISKQTNIPLEESRKKVWLVDSKGLIVRSRLDSLQHFKKPWAHDHEPVNEFLDAIKTIRPTVLIGSSGTGQTFTKEVVETMSSLNEKPIILALSNPTSQSECTAEQAYTWSEGRAIFASGSPFKPVEYNGKLYVSGQANNAYIFPGFGLGLIISGAIRVHDDMLLAASEAPAEQVTQEHFDKGLIFPPFTSIRKISAHIAAKVAAKAYELGLASRLPQPENLVAYAESCMYSPKYRIYR

SEQ ID NO: 13040 - protein, 381 aa, Staphylococcus aureus subsp. aureus COL
MIRIQDNTIRDGMQQSNVRKSLIIKKEVLKQINKLNINSVEVGMCTTIEDEFNIHQFRDIISPEKELVVLTRLNEKEIKKIVKLKIHNLVVKILLPISDLHIKEKLNFSNKYYIQKIKDCLDILKKDKKGVDICFEDGTRTSREKLKEYMEIISKYQVRTVTFADTVGCSTPLEYGDIFNYFVKKYSNIIFSAHCHNDLGLATANTLAAILNGAKQIETTFLGIGERAGNAPIEEIITILTKKQIESTEFTLPDVYKTSINISKILDFQISENKPIIGENIFKHESGIHQDGTKKNINMYQYLVPSDLGLKNSQVVQFPISNISSKKILHNKFKSIVNTEEIDENISFYKLVNKFSPEVAPEDTVDLLQIIKRRSKDGNFK

SEQ ID NO: 13041 - protein, 420 aa, Streptococcus mutans UA159
MTKESILTFSQSKAEPAWLQEKRLAAFDKIDDLELPRIERVKFQRWNLGDGTITESPISANVPDFTSFGENPKLVQLGTQTVLESLPAKLVEQGVVFTDFHSALEEIPQVIEKYFATALKFDEDKLSAYHTAYFNSGSVLYVPDNVEIDLPLEGIFLQDSTSNVPLNKHVLIIAGRHAKVNYLERFETIGDSDVKATANIAVEVLAQAGSQVKFAAIDRLGNNITTYISRRGRLDNDASIDWALGVMNEGNVIADFDSDLIGNGSHAELKVVAASSGRQIQGIDTRVTNYGNNSIGHILQHGVILERGTLTFNGIGHIIKGAKGADAQQESRVLMLSDKARSDANPILLIDENEVTAGHAASIGQVDPEDMYYLMSRGIDKETAERLVIRGFLGTVITEIPVKAVRDEMIAVLDEKLDKR

SEQ ID NO: 13042 - protein, 170 aa, Acinetobacter sp. ADP1
MTTTVPFVTCDLLDDHTDKDIQVLTPSLDGRFFKSYGARKIFSGQIVTVKCFEDNSRVKELLATDGTGKVLVVDGGASMRCALMGDMIAESAVKYHWDGVVIYGCIRDVDALAELDLGIHALAAIPQKSNRQGIGEVGVNLYFGGVTFQAGCYIYADNNGIIVSKQKLID

SEQ ID NO: 13043 - protein, 967 aa, Flaveria trinervia
MANRNVEKLASIDAQLRLLVPGKVSEDDKLVEYDALLLDKFLDILQDLHGEDLKEAVQQCYELSAEYEGKHDPKKLDELGSLLTSLDPGDSIVIAKAFSHMLNLANLAEEVQIAYRRRIKLKSGDFADEANATTESDIEETFKRLVHKLNKSPEEVFDALKNQTVELVLTAHPTQSIRRSLLQKHGRIRNCLAQLYAKDITPDDKQELDEALHREIQAAFRTDEIRRTPPTPQDEMRAGMSYFHETIWKGVPKFLRRVDTALKNIGINERFPYNAPLIQFSSWMGGDRDGKHPRVTPEVTRDVCLLARMMTSNMYFSQIEDLMIEMSMWRCNSELRVRAEELYRTARKDVKHYIEFWKQIPPNQPYRVILGDVRDKLYNTRERSRHLLVDGKSDIPDEAVYTNVEQLLEPLELCYRSLCDSGDHVIADGSLLDFLRQVSTFGLSLVKLDIRQESDRHTEVLDAITQHLGIGSYREWSEEKRQEWLLAELSGKRPLIGPDLPKTEEVKDCLDTFNVLAELPSDCFGAYIISMATSTSDVLAVELLQREYHIKHPLRVVPLFEKLADLEAAPAAMTRLFSMDWYRNRIDGKQEVMIGYSDSGKDAGRFSAAWQLYKTQEQIVKIAKEFGVKLVIFHGRGGTVGRGGGPTHLALLSQPPDTINGSLRVTVQGEVIEQSFGEEHLCFRTLQRFCAATLEHGMNPPISPRPEWRELMDQMAVVATEEYRSVVFKEPRFVEYFRLATPELEFGRMNIGSRPSKRKPSGGIESLRAIPWIFSWTQTRFHLPVWLGFGAAFKHAIQKDSKNLQMLQEMYKTWPFFRVTIDLVEMVFAKGNPGIAALNDKLLVSEDLRPFGESLRANYEETKNYLLKIAGHKDLLEGDPYLKQGIRLRDPYITTLNVCQAYTLKRIRDPNYHVTLRPHISKEYAAEPSKPADELIHLNPTSEYAPGLEDTLILTMKGIAAGMQNTG

SEQ ID NO: 13044 - protein, 493 aa, Bacillus sp. snu-7
MSSLIAGLIEDPEDDFGYGKLTRLGTAASLAAAITVGRPILHYTAKNTWLNDPNGLVWHQGVYHLFYQNNPFDNVWGNMSWGHATSTDLLHWTEHPVAIACNEEEDVFSGSIVVDHGNTSGFGTAEDPALVAIYTSAFKEGSVHQGTQAQSLAFSTDAGMTWSKYAGNPVLGPGSAHFRDPKVFRYEGPAGSRWIMVAVEAQHQQVVLYRSADLKDWEYLSTFGPANASDGEWECPLPVDGDPDNVKWVLVVNINPGAVAGGSGGQYFVGDFDGVQFPADPDSLVPTDADGNVDLRHCLWLDWGRDYYAAVSFSNAPENRRIMIGWMNNWDYANSLPTSPWRSSMSLAREIELATVDGFPRLVQRPVLPLDSGEPARTIQNMELTTPCCNCPTRRPPGSAQLIEAEILPGTARHIAFRLLGAPDGSAATVLSFDALTSRLTLDRRNSGNTAFTISSRRLNPQPVKASTGGALRLKVIIDQCSVEVFAQTAGLC

SEQ ID NO: 13045 - protein, 173 aa, Flaveria trinervia
MASIPATVAAVPQTNMVAPFTGLKANAAFPVTKKVNGFSTLPSNGGRVQCMKVWPPVGKKKYETLSYLPELTEAQLAKEVDYLLRNKWVPCLEFELEHGFVYRENASSPGYYDGRYWTMWKLPMFGCTDSAQVMKELQECKKEYPQAWIRIIGFDNVRQVQCVSFIASKPTGF

SEQ ID NO: 13046 - protein, 99 aa, Zea mays
SCGQVASAIAPCISYARGQGSGPSAGCCSGVRSLNNAARTTADRRAACNCLKNAAAGVSGLNAGNAASIPSKCGVSIPYTISTSTDCSRYSRRMHASAD

SEQ ID NO: 13047 - protein, 274 aa, Kalanchoe fedtschenkoi
MSEALSRVYEVCEEIGRGQFGRVFRCLNLSTNELFACKSIDKRVLADSIDRECVEKEPKTMLCLSSHPNIVSIHEAYEDDSHLHLIMDLCEPGLDLYQLLSGGAVPEQEASVIAASLMEGIAHCHRRGVCHRDVKPENVLFDSVGRLKLADFGSAEWFGDGRGMSGVVGTPYYVAPEVLQGREYNEKVDVWSAGVILYTMLAGFPPFYGETAQDIFEAVMRGNLRFPFRAFRNVSAGAKDLLRRMLCRDVSRRFSAEQVLRHSWILSAGDDTNF

SEQ ID NO: 13048 - protein, 677 aa, Candida glabrata CBS 138
MTRRGLTDPMIRISGVVARACRRSAAYQVCKYSVRAVPRPEPSPSFNVDPDTAAANTGSGVKLSSKLKNVATQKMDNSFVGLTGGQIFNEMMARNNVDTVFGYPGGAILPVYDAIHNSDKFKFVLPKHEQGAGHMAEGYARASGKPGVVLVTSGPGATNVVTPMADALADGIPMVVFTGQVPTTAIGTDAFQEADIVGISRSCTKWNVMVKNVAELPLRINEAFQIATSGRPGPVLVDLPKDVTAAILRTPIPVKSTLPSTALQQLTAGVQDQFVIENIKKSADLINIAKNPVLYVGGGILNNVDGPRLVKELSERAQIPVTTTLQGLGAFDQEDPKSLDMLGMHGCATANLAVQNSDLIIAVGARFDDRVTGNITKFAPEARKAALEGRGGIIHFEITPKNINKVVEAQVAVEGDAASNLSKLIPLVFPVKERPEWFEKINKWKKEFPYSYSLETPGSRIKPQTAIAKLSKIANATSKEVIVTTGVGQHQMWAAQHWTWKNPRTFITSGGLGTMGYGLPSAIGAQVAKPDALVIDIDGDASFNMSLQELSSAVQANAPVKILVLNNEEQGMVTQWQSLFYEHRYSHTHQLNPDFVKLAEAMGMKGMRVKDQAELEKTLKEFVDYQGPVLLEVEVEKKVPVLPMVPAGKGLHEFINYDPEMEREQNELRHKRTGGKH

SEQ ID NO: 13049 - protein, 488 aa, Burkholderia thailandensis E264
MPSGDILIGGEWRRGRGATTPNFYPADGSLNTEIHMADAADTREAVEAADAAWRRANWSGLKPHQRAGVLYRVADLIHANREALAQLQRRDNGKPINETRALVASAANTFRYFAACAETLDEALTPSRGDYLSMSVHEPLGVVAAITPWNSPIASDAQKLGPALAAGNAVVLKPAEVTPLASLALARLCEQAGVPRGVISVLPGKGSVIGDALVRDPLVKKVSFTGGTEVGRGIARLAAEKLMPLSLELGGKSPTIVFGDADLDHAVNGVLYGIFSSSGESCIAGSRLFVQRSIYDAFVARLVDAARKLRVGDPASERTQMGPLITAQHRDTVERYVALGRDEGARVLCGGERPTGEGRDAGFFYLPTILDGLSNRARICREEIFGPVLVALPFDDEAALVAEANDSVFGLAAGIWTRDYKRAWRVARALDAGTVWINTYKQFSISTPFSGWKESGMGREKGSLGIREYMQQKSLYWGLNDSPLPWAN

SEQ ID NO: 13050 - protein, 159 aa, Arabidopsis thaliana
MSDDEHHFEASESGASKTYPQSAGNIRKGGHIVIKNRPCKVVEVSTSKTGKHGHAKCHFVAIDIFTAKKLEDIVPSSHNCDVPHVNRVDYQLIDITEDGFVSLLTDSGGTKDDLKLPTDDGLTAQMRLGFDEGKDIVVSVMSSMGEEQICAVKEVGGGK

SEQ ID NO: 13051 - protein, 261 aa, Physcomitrella patens
MVEKVVVSSLRVKRGGNLLAPLKRNVSSIAKKSSTPKSGKPVGSPKVYKGVRMRTWGKWVSEIREPNKRSRIWLGSFPTAEMAAKAYDAAAVCLRGRSVKLNFPDSPPRCAARCNSPREVQAAATAAAVACIPSATALTVANFQSPAQTLESSPLHSSPSSSDMSSGDEDSGEDSVQSFVAEGSQISPSEVVPVLEWVKVEFGDKETVAAGDVDFDCDYSFISEFAADSLLACSYNSKGRTEYLPIETHDAALYDSTLWFF

SEQ ID NO: 13052 - protein, 244 aa, Synechocystis sp. PCC 6803
MRQLLLISDLDNTWVGDQQALEHLQEYLGDRRGNFYLAYATGRSYHSARELQKQVGLMEPDYWLTAVGSEIYHPEGLDQHWADYLSEHWQRDILQAIADGFEALKPQSPLEQNPWKISYHLDPQACPTVIDQLTEMLKETGIPVQVIFSSGKDVDLLPQRSNKGNATQYLQQHLAMEPSQTLVCGDSGNDIGLFETSARGVIVRNAQPELLHWYDQWGDSRHYRAQSSHAGAILEAIAHFDFLS

SEQ ID NO: 13053 - protein, 424 aa, Staphylococcus aureus subsp. aureus MSSA476
MEITMPKLGESVHEGTIEQWLVSVGDHIDEYEPLCEVITDKVTAEVPSTISGTITEILVEAGQTVAIDTIICKIETADEKTNETTEEIQAKVDEHTQKSTKKASATVEQTFTAKQNQPRNNGRFSPVVFKLASEHDIDLSQVVGSGFEGRVTKKDIMSVIENGGTTAQSDKQVQTKSTSVDTSSNQSSEDNSENSTIPVNGVRKAIAQNMVNSVTEIPHAWMMIEVDATNLVNTRNHYKNSFKNKEGYNLTFFAFFVKAVADALKAYPLLNSSWQGNEIVLHKDINISIAVADENKLYVPVIKHADEKSIKGIAREINTLATKARNKQLTAEDMQGGTFTVNNTGTFGSVSSMGIINHPQAAILQVESIVKKPVVINDMIAIRNMVNLCISIDHRILDGLQTGKFMNHIKQRIEQYTLENTNIY

SEQ ID NO: 13054 - protein, 327 aa, Staphylococcus aureus subsp. aureus MSSA476
MAKLSYLEAIRQAQDLALQQNKDVFILGEDVGKKGGVFGTTQGLQQQYGEDRVIDTPLAESNIVGTAIGAAMVGKRPIAEIQFADFILPATNQIISEAAKMRYRSNNDWQCPLTIRAPFGGGVHGGLYHSQSIESIFASSPGLTIVIPSTPYDAKGLLLSSIESNDPVLYFEHKKAYRFLKEEVPEEYYTVPLGKADVKREGEDLTVFCYGLMVNYCLQAADILAADGINVEVVDLRTVYPLDKETIIDRAKNTGKVLLVTEDNLEGSIMSEVSAIIAEHCLFDLDAPIMRLAAPDVPSMPFSPVLENEIMMNPEKILNKMRELAEF

SEQ ID NO: 13055 - protein, 446 aa, unidentified bacterium
MEYAVSVESFLSSLQRHNPHQPEYLQAVREVFTSLWPFIERNPAYREQALLERLVEPERIIQFRVSWVDDRGQVQVNRAFRVQFNSAIGPYKGGMRFHPSVNLSILKFLGFEQTFKNALTTLPMGGGKGGSDFDPKGKSQGRIMRFCQALMTELYRHLGPDTDVPAGDIGDGGREVGFMAGMMKKLSNNTACVFTGKGLSFGGSLIRPEATGYGLVYFTDAMLQRHGLGFEGMRVAVSGSGNVAQYTIEKALELDARVITVSDSGGTLVDEDGFTTEKLAHLAEIKNQRYGRVADYAAERGLTYLAGQQPWNVPVDIALPCATQNELDLEAARVIRNGVKAVAEGANMPTTIQATDAFLDAGVLFAPGKAANAAGLATSGLEMAQNAARIGWRAEKVDVRLQHIMADIHHACVEYGGEGKQTHYVHGANIAGFVKVAEAMLAQGVL

SEQ ID NO: 13056 - protein, 181 aa, uncultured proteobacterium
MDWLPEDLSGKRVLDAGCGTGAFSVEASRRGADVVAVDLSPTLITLAQERVGSAEMRGTIDFRVGDMGHLDLGTFDHIVAMDSLIHYESEDGLRTLAAMAETVTTSIVFTFAPKTPLLAAMHSVGQLFPRGNRSPAIAPMALSQLQRAVASQPEFTEWEMARDFRVSRGFYISHAMELTRK

SEQ ID NO: 13057 - protein, 645 aa, Sinorhizobium meliloti 1021
MCGFGGYLGSIRDGKPLLERMTAAIGHRGPDERGIFTAPGAGLGHVRLSIVGLGDGQQPMSNPSGELTIAFNGEIFNYVELRDELRARGRQFRTSSDTEVILHLYEEMGEDCLSLLNGDFAFAIWDARRRRMMLARDRMGVRPLFHTLKGGTLYFASEVKALLEVPGVSAEIDPIALDQIFTLWAPIAPRTPFRDIHELEPGHLMIADQNGTTTRPYWQLDYPDRDERPAYAEESRAAEELRALLTDATRIRMRADVPVGAYLSGGLDSSIISALAAGMTSQGLRTFSVTFDSAEHDESAFQEEMAAALGTEHRAVACRAGDIARDFPDVIRFTEKPIIRTAPAPLYKLSGLVREAGLKVVLTGEGADEVFAGYDIFKEARVRRFCGRQPGSRIRPHLFRKLYPYLPGLQQQSAEYLAAFFGAGDVALDDPLFSHRPRLKGTAATKMFFSSDLRAELTGYDAAEELVSRLPAAFGRWHPLHQAQYLESRFLLPGYILSSQGDRMAMAHGIEGRFPFLDHRLVEFAAKLPPEMKLRGLVEKHILREATKDLLPPAIGRRTKQPYRAPDSHSFSGAGELDYVRSAMSEDAVAAGGLFNAKAVTKLYEKCQSRPASGFRDNAAFVGVLSTQLWLQTFTGTSLRKAEAA

SEQ ID NO: 13058 - protein, 334 aa, Zea mays
MDGGGGGAGGAEGELTAQETALYDRQIRVWGVDAQKRLSKAHVLVCGMNGTTIEFCKNIVLAGVGSLSLMDDNVVTEEDLNANFLIPPDESIYGGRSRAQVCCESLIDFNPMVRVSVEKGDPSLIDGEFLDKFDIVVLSRASLKTKLLINENCRKRSKHIAFYTIDCKDSCGEIFVDLQKHSYVQKKPGGATEQQELTYSSLQEAISVPWNSLPKKTAKLYFAMRVLEDYELSEGRSPGETTLSDIDAVLARRKDMCDKMSLNESRIPTTLVERLLAAGKKEHPPVCAILGGILGQEVIKSISCKGDPVKNFFYFDVADGKGVIEDIPPPPPAK

SEQ ID NO: 13059 - protein, 124 aa, Zea mays
MAARRAHAAATLALLVAALVLSAAPAPAEGAVANCGQVVSYLAPCISYAMGRVSVPGGGCCSGVRGLNAAAATPADRKTTCTCLKQQASGMGGIKPNLVAGIPGKCGVNIPYAISQGTDCSKVR

SEQ ID NO: 13060 - protein, 471 aa, Streptococcus mutans UA159
MPENERVEPKPIDIGDYQFGFHDDVKPIASTGKGPTKEAVREISRIKGEPEWMLDFRLKSLEIFYKMPMQEWGPDLTGIDFDDIIYYQKPTDKPARSWEEVPEKIKDTFEKIGIPEAERAYLAGASAQYESEVVYHNMKEEYDKLGIVFTDTDSALKEYPELFKKYFAKLVPPTDNKLAALNSAFWSGGTFIYVPKGVKVDIPLQTYFRINNEGTGQFERTLIIVDEGASVHYVEGCTAPTYSTASLHAAIVEIFALDGAYMRYSTIQNWSDNVYNLVTKRAKAMTNATVEWIDGNLGAHTTMKYPSVYLDGEGARGTMLSIAFANRGQHQDTGAKMIHNAPHTSSSIVSKSIAKGGGKVDYRGQVSFNKSSQKSVSHIECDTIIMDDISASDTIPFNEIHNSQVALEHEAKVSKISEEQLYYLMSRGLTESEATEMIVMGFVEPFTKELPMEYAIELNRLISYEMEGSVG

SEQ ID NO: 13061 - protein, 318 aa, Carica papaya
MENFPVIDLSKLNGEERASTMELIHDACENWGFFELVNHGISHDLMDTVERLTKEHYKKCMEQRFKEMVESNGLEAVQSEINDMDWESTFFLRHLPASNMHEIPDLEDDYRKAMKEFAVGLQKLAEQMLDLLCENLGLEKGYLKKVFYGSKGPNFGTKVSNYPPCPKPDLIKGLRAHTDAGGIILLFQDDKVSGLQLLKDDQWVDVPPMKHSIVINLGDQLEVITNGKYKSVMHRVIAQTDGNRMSLASFYNPGDDAVIYPAPSLVEKEAEKNQIYPKFVFDDYMKLYVGLKFQAKEPRFEAMKAMESTVTPGAIATV

SEQ ID NO: 13062 - protein, 168 aa, Corynebacterium glutamicum ATCC 13032
MGMTQSAPEFIATADLVDIIGDNAQSCDTQFQNLGGATEFHGIITTVKCFQDNALLKSILSEDNPGGVLVIDGDASVHTALVGDIIAGLGKDHGWSGVIVNGAIRDSAVIGTMTFGCKALGTNPRKSTKTGSGERDVVVSIGGIDFIPGHYVYADSDGIIVTEAPIKQ

SEQ ID NO: 13063 - protein, 599 aa, Hordeum vulgare
MAQAWAFLLLPALALASYASHLLLPAYITTPLCGGGDGARSFFLCAQAPKDQDQDPSPASTMYKTAFHFQPAKNWMNDPSGPMYFNGIYHEFYQYNLNGPIFGDIVWGHSVSTDLVNWIGLEPALVRDTPSDIDGCWTGSVTILPGGKPVIIYTGGNIDQHQTQNIAFPKNRSDPYLREWIKAANNPVLRPDEPGMNVIEFRDPTTGWIGPDGHWRMAVGGELNGYSAALLYKSEDFLNWTKVDHPPYSHNGSNMWECPDFFAALPGNNGGLDLSAAIPQGAKHALKMSVDSVDKYMIGVYDLQRDAFVPDNVVDDRRLWLRMDYGTFYASKSFFDSKKGRRIVWGWSGETDSPSDDLAKGWAGLHTIPRTIWLAADGKQLLQWPVEEIESLRTNEINHQGLELNKGDLFEIKEVDAFQADVEIDFELASIDEAEPFDPSWLLDPEKHCGEAGASVPGGIGPFGLVILASDNMDEHTEVYFRVYKSQEKYMVLMCSDLRRSSLRPGLEKPAYGGFFEFDLAKERKISLRTLIDRSAVESFGGGGRVCITSRVYPAVLANVGRAHIYAFNNGNAMVRVPQLSAWTMRKAQVNVEKGWSAI

SEQ ID NO: 13064 - protein, 61 aa, Glycine max
  misc_feature (31)..(31): Xaa can be any naturally occurring amino acid
  misc_feature (43)..(43): Xaa can be any naturally occurring amino acid
NNLSAAANTTADRLTACNCLKSVVCHFSGFXANNAASLPGKCXVSIPYKISTSTNCSTIKV

SEQ ID NO: 13065 - protein, 325 aa, Anaplasma marginale str. St. Maries
MTEPQQQAKAPVKVLVMGSGAAGCTAAIYAGRANLEPLLVTGMQPGGQLTITTDVENYPGFSLVQGPELMEHMKQQALHCGATEIMDEITQIDANVYPFKCTSMFGEEYYAYSIIVATGAQAKWLGMDSEQFFMGKGVSACATCDGSFFKGEVVAVIGGGNTAVEEAIYLTRSASKVFLVHRRDKLRAEAVMQNRLFENSKIEVVWNSVVKEILGDKENKKVGALLLESTLDGSTRTLETAGVFIAIGHKPNTQVLADMPGRHVELDPDGYVITSPDSTATSCPGIFAAGDVRDKVYRQAVVAAGTGCMAALDAEKFLSERGITS

SEQ ID NO: 13066 - protein, 420 aa, Coxiella burnetii RSA 493
MSKKNVFYAQSGGATAVINATACGVIQTAAQYPTKIGKVLAGRNGIIGALKEELIDTSLESLENIAALRHTPSSAFGSCRYKLNNIHHDRRQYERLIEVFKAHDIGYVFYNGGGDSQDTTHKISQLSQLMDYPLVCIGLPKTIDNDLPFTDNCPGFGSVAKYIAVSTQEAALDVRGMCATSTKIFILEVMGRHAGWIAASSALGKSQPDDAPHLILFPEVPFQTEQFLTKVSRSVEKNGYCVIVASEGIRHPDGRFVAESGLHDAFGHEQLGGVAPILARLIKKRLNFKYHWAVADYLQRAARHIASQTDLDQAYALGKTAVEFALAGKSDVMLTIQREMGSDYKWRIGTAPLCEVANVEHKMPSHYISEDGFGITEACYTYLKPLIEGESYPPYKNGVPDYVTLKNQLVAKKLKEAFAV

SEQ ID NO: 13067 - protein, 282 aa, Bifidobacterium adolescentis
MAARTKADLAKRVELLKARGIQPGLGTILVGSDPGSVKYVAGKHADCAEIGVNSIKRELPENATFDQVADAVRQLNADPACTGYIVQLPLPRGIDENAIIDLIDPKKDADGMHPYNLGELVLHARGDITTPLPCTPRGVIELLRAYDIDLDGKEVCVLGRGITIGRTIGLLLTRKAVNATVTLCHTGTKDVRDHMRRADVIVAAMGVAGFVKPEDIKEGSILVDVGVSRVFDEESGRYKVKGDVDKACYEKAFAYTPNPGGVGPMTRAMLLQNVVEMAERQL

SEQ ID NO: 13068 - protein, 442 aa, Methanococcoides burtonii DSM 6242
MESVRNIANAGLTSEVCGLARVLTKDLDACIDAGVGMIHTFVSTSDIQRIHTIKKSREEVVEMSVNAVQYIKDHGMRCMFSAMDATRTDLDYLIEVYRAVEDAGCDIINVPDTVGIIAPSGMYRLISKLDKEMNIPIDTHCHNDFGLAVANSLMAIEAGASQAQVTVNGLGERAGNADLAETVMSLHSIYGAKTSINTEYIVETARMVERYTGVQIPPHMPVVGENAFAHESGIHTHGVLENSDTFEPGIMTPEMVGHTRRIVLGKHAGKHAVLRSLQSANINPTEDQLDAIIKKVKMLADKGKRITDSDLYTIAFDILGKPEGMPAIDLKEVSVMTGNITTSTAVVKALFNGKECVTSNVGIGPVDAALKAVETLIGQHAKVTIHDFRIEAVTGGSDALAEVVIGVQNDNGRIVTARAANADIVLASVEALVTAINMLLKK

SEQ ID NO: 13069 - protein, 221 aa, Pavlova lutheri
ARGFTLLSTSLAFSPAARSAMAGRGHAASAVSMASDFLIAPSILSADFARLGDEVTNVLASGADVVHFDVMDNHYVPNLTIGPMVCKALRKHGVTAPIDVHLMVSPVDRIIGDFAEAGASYITFHPEATGHIDRSLQLVKSLGCKSGLVFNPATPLDCLEYVMDKVDIILLMSVNPGFGGQAFIPATLDKLRQARALIDKSGRDIRLEIDGGVTPKNIGEI

SEQ ID NO: 13070 - protein, 468 aa, Burkholderia vietnamiensis G4
MSLFRKKNVDRMIAGAHAAGLKKALGAIDLTFLGIGAIIGTGIFVLTGTGAVQAGPALMLSFVIAAIACGLAALSYAEFASTIPVAGSIYTYSYATLGELVAWIIGWDLMLEYGLAASAVSVGWSGYLQSLLQGFGLSLPTVLTAAPGAIPGTVTWFNLPAFLVMLVITTLLSIGIRESTRINNVMVFIKVSVVLLVIAVGLFHVTPANWKPFMPHGWNGVFGAAAVMFFAFIGFDAVSSAAEEVKNPKRDLPIGIIASLAVCAVLYVTVAAVATGIVPSAQYANVSHPISYALQIAGEKWVAGFIDLGAVLGMLTVILVMSYGQTRIIFAMSRDGLLPAMLSRVHPRYATPFLTTWLVGLFFGLIAALVPLNVLAELINIGTLAAFSMVSIAVLVLRRTHPELPRAFRCPGVPVVPILAVGACLFLMLNLQPITWAAFGIWLVIGLVIYFLYSRHHSKLARGQHDAH

SEQ ID NO: 13071 - protein, 337 aa, Ashbya gossypii ATCC 10895
MQGSVRAIRSLARQFRTMSVEKIYYPRKVQTAASDASLTLNHTSFRIKDPKVSVPFYEKHFGMQLLQKLEFPEQQRDVYVMSFPKQVNKLENGAPGIFHLSGTLHLAHSHGTENDAGYRPNNGNEEPHRGFGHICFSVADLPKECERLEAEGVAFKKRMSDGRQKNIAFALDPDGYWIELIQYNLSDAEPVDLGPKFNHTMLRVKDATKSLEFYQNVLGMSLLEVSEHANAKFTLYFLGYPAADERLKRESILELTHNWGTEDDADFSYHNGNAEPTGYSHMGVSLSDPAPLCADIEETYPDLEWELRYNKGSIKNLAVLRDPDGYHIQVLPRTWSL

SEQ ID NO: 13072 - protein, 369 aa, Colwellia psychrerythraea 34H
MNLNTPQEIIADIALGKMVILMDDEDRENEGDFIMAAEKVTPAAINFMATHGRGLICMPMSREKCETLKLPLMVDKNEAQFSTNFTVSIEAATGVTTGISAADRATTVLAAANKEATHLSIVQPGHIFPLIAKDGGVLNRAGHTEASVDLARMAGFESAAVIVEILNEDGTMARRSDLEVIAQKHDIKMGTIADLIEFRNATETTIERVSQCKLPTAFGEFDLTVFKDTIDGQAHFALTKGEIKADEPTLVRVHLENTFRDLLFSQRESISTWPIANALEKIAKEGGVLVLLGKHESPNELINLVEKYAKIDAGETVKETNRHIGSRNVGVGSQILANLGVSKMRLLSSQTKYHSLSGFGLEVVEYIAD

SEQ ID NO: 13073 - protein, 668 aa, Oryza sativa
  misc_feature (24)..(24): Xaa can be any naturally occurring amino acid
ETKTVLNCLDSRLLAGKPPPPPPXLLPPPPPSSREGSAPQTRAEPRSTMSADSAAAGRDALLDELRALMAAHSPSLHALVVPSEDAHQSEYVSERDKRRQFVSGFTGSAGLALITMKEALLWTDGRYFLQAEQQLTNRWKLMRMGEDPPVEVWIADNLSDEAVIGINPWCISVDTAQRYEHAFSKKHQTLFQLSSDLVDEIWKDRPPVNALPVFVQPVEYAGCSVTEKLKELREKLLHEKARGIIIAALVEVAWLYNIRGNDVHYSPVVHSYSIVTLHSAFFYVDNRKVSVEVQNYMTENGIDIKDYNMVQSDASLLASGQLKGSAVNGSSHGENDMNENSKVWIDSNSCCLALYSKLDQYQVLMLQSPIALPKAVKNPVELDGLRKAHIRDGAAVVQYLAWLDKQMQENYGASGYFTEAKGSQKKEHMNVKLTEVSVSDKLEGFRASKENTLWMTLYVLLLSRKHMYLDGTTDITRTVHFGKPSEHEKSCYTAVLKGHIALDTAVFPNGTTGHAIDILARTPLWRSGLDYRHGTGHGIGSYLNVHEGPHLISFRPSARNVPLQASMTVTDEPGYYEDGSFGIRLENVLIVKEANTKFNFGDKGYLAFEHITWTPYQTKLIDTTLLTPAEIEWVNAYHSDCRKILQPYLNEQEKEWLRKATEPIAASC

SEQ ID NO: 13074 - protein, 232 aa, Mesembryanthemum crystallinum
YHLFYQYNPYSAVWGNITWGHAVSTDLIHWKHLPLAMVPDQWYDINGVWTGSATILPDGKIMMVYTGDTDQFVQVQNLAYPKDLSDPLLLEWVKYPGNPVMTPPKGIGAKDFRDPTTAWVGPDGVWRLIIGSKVNKTGISMVYKTTDFISYDLVANLHSVPGTGMWECVDFFPVSTTSQNGLDTSVYGPGIKHLLKFSSDDERIDYYALGTYDMGTETWVPDNPELDVGIGG

SEQ ID NO: 13075 - protein, 158 aa, Arabidopsis thaliana
  misc_feature (137)..(137): Xaa can be any naturally occurring amino acid
MRPLSVQSKFEDVATSTSVNHHGVTPQSPWHSPVPYLFGGLAAMLGLIAFALLILACSYWRLSSSGEEDGQNVDEEKESRSGDKAANGAYEEKFLVIMAGEDLPRYLATPAMKKCTCGGHEGKMVISQEESVAKEEXKMREGEEEKVKDTGETTTTSH

SEQ ID NO: 13076 - protein, 482 aa, Burkholderia pseudomallei K96243
MKVSARELRYEQGIDRLLELAGARDDTEYADVADEFASAPSSAFAHDLGEPDSLDHQASDESAGAGSFGDKPTRPAHGDTDVDTDWRDDDAPPSGSNDAAPVDTAASTDPLALFVRRMHAVPLLTHAQEIALAAEIEAGREQVLQALAEALDRLDLASLPADPALGRARAALQRARARGDEGARAFARARTAAYAALAAHGWPSAEVDAVRRAMRRLPTSPEKSDAGAQRAFADGEARISAATARMAEANLRLVLSIARKYASRGLDLADLLQEGNLGLLRAIEKFEHRRGFKFSTYATWWIRQAISRAIADRARTIRVPVHVGDEARRVRKAADRIERRSGVNASLAELSEATGLPAERLRAVLTLPREPRSLNAPLGDDDQAEFGDIVEDTSTPSLFDALAHGQMCDVVTSLLKTMSAQEADILRRRFGIGGDEPWSYEQIAARAGVSREQVRRIEKRALQTLRVTAEACNAHDFLDVQP

SEQ ID NO: 13077 - protein, 319 aa, Populus x canadensis
MEFPVISMEKLNGEERAATMEKIKDACENWGFFELLNHGISHEFLDTVERMTKEHYKKCMEQRFKELVASKALDGVQTEIKDLDWESTFQLRHLPKSNIAEIPDLDDEYRKVMKEFALKLEKLAEELLDLLCENLGLEKGYLKRAFYGSNGSPTFGTKVSNYPPCPKPDLVKGLRAHTDAGGIILLFQDDKVSGLQLLKDGQWIDVPPMRHSIVVNLGDQLEVITNGKYKSVEHRVIAQTDGTRMSVASFYNPGSEAVIYPAPALVEKEAEEKKKVYPKFVFDDYMKLYAGLKFQAKEPRFEAMKAVETTVNLGPIATA

SEQ ID NO: 13078 - protein, 359 aa, Magnetospirillum magnetotacticum MS-1
MMRTYAIAAIPADGIGKEVVAAGLEVLDALAKRDGGFRLNVESFDWGSDYYKKHGVMMPENGRDTLKKFDAIYFGAVGAPDVPDHITLWGLRLNICQPFDQYANVRPTRILPGIKSPLGNVRPQDLDWVIVRENSEGEYAGQGGRSHRGFPEEVATEVTIFTRAGVTRIMRFAFKLAQSRPRKLLTVVTKSNAQRHGMVMWDEIAAEVAAEFPDVTWDKMLVDAMTMRMTLKPETLDTIVATNLHADILSDLAAALAGSLGIAPTANLNPERKFPSMFEPIHGSAFDITGKGIANPIGTFWTACMMLDHLGETAASARLMRAIERVTADPALHTPDLGGKATTRIVTDAVIAAIKADNE

SEQ ID NO: 13079 - protein, 532 aa, Oryza sativa (japonica cultivar-group)
MLRAALLRSGSGLRRPPMAAPLSTAAAASWLSDSASSPPRVRLLIGGEFVESRADEHVDVTNPATQEVVSRIPLTTADEFRAAVDAARTAFPGWRNTPVTTRQRIMLKFQELIRANMDKLAENITTEQGKTEGCLGRCFRGLEVVEHACGMGTLQMGEYVSNVSNGIDTFSIREPLGVCAGICPFNFPAMIPLWMFPIAVTCGNTFVLKPSEKDPGAAMMLAELAMEAGLPKGVLNIVHGTHDVVNNICDDEDIQAVSFVGSNIAGMHIYSRASAKGKRVQSNMGAKNHAIILPDADRDATLNALIAAGFGAAGQRCMALSTAVFVGGSEPWEDELVKRASSLVVNSGMASDADLGPVISKQAKERICKLIQSGADNGARVLLDGRDIVVPNFENGNFVGPTLLADVKSEMECYKEEIFGPVLLMKAESLNDAIQIVNRNKYGNGASIFTTSGVSARKFQTDIEAGQVGINVPIPEPLPFFSFTGSKASFAGDLNFYGKAGVQFFTQIKTVTQQWKESPAQRVSLSMPTSQK

SEQ ID NO: 13080 - protein, 352 aa, Magnetospirillum magnetotacticum MS-1
MTQGLGAGSRPDIGRAAAAEESLEEILGQIGGANMVFITAGMGGGTGSGAAPVIARAAREQGILTVGVVTKPFHFEGAHRMRTAESAIEELQQFVDTLIIIPNQNLFRVATERTTFADAFKMADDVLYSGVRGVTDLMIMPGLINLDFADIRTVMSEMGKAMMGTGEAEGDKRAIDAAEAAISNPLLDDTSMKGARGVLINITGGMDMTLFEVDEAANRIRDEVDPDANIIFGSTFDEKLNGKMRVSVVATGIASEAAAQGKPTVISLVTPTAPPAPAPAARPAAAATQAPFFRPHAAAQPAVARTPVSAPVSAPAAVAHSAPQPAQRSATAAQCSPSWTSDAPNPWSVTSP

SEQ ID NO: 13081 - protein, 397 aa, uncultured proteobacterium
MSNTDYDVVVIGGGPSGASAAEHLAKQNYRVLLLERAFRIKPCGGAIPPCLIDEFEIPEDLLVARIRSARMISPTEKKVDMPVGETFVGMVDRDVFDPWLRERAVTAGAELRIGAFKALHYDDDGVLHIDFQSKEAGLENVSVTTRSVIGADGARSNVARQAIPCSKNARWVLAYHEIVEAPAANDELYDGDRCDVWYQGDLSPDFYAWVFPHGRHASIGVGSETDGFSARNSVATLRAKTGLDTCQTVRREGAPIPMKPLKRWDDGKGILLSGDAAGVVAPASGEGIYYAMLCGKIAAQTIDEFLQVGDARILGDARRQFMKLHGKTFWALGLLQRIWYRSDKRREKFVSMCQDKDVQELTWQAYTQKQLVKRRKTAHLRVALKDIGNLIGLTRAS

SEQ ID NO: 13082 - protein, 201 aa, Zea mays
  misc_feature (164)..(164): Xaa can be any naturally occurring amino acid
  misc_feature (170)..(170): Xaa can be any naturally occurring amino acid
MASRKLLVGLTARRQLQSRTQQLFWATSLPEATTSRSLMVAAAMARLSDRSSAPFILSSRAISSTQPVMQSTGDVSGSSPSAVDHKLAMQEDEFHKLADETIHDLLEKLEEYGDSIQMDGFDIEYGNQVLTLRLGDLGTYVINKQTPNKQIWLSSPVRYSNASXFDWEAXANGWIYKRTEVNLVRLLEKEIGELCGTPVEL

SEQ ID NO: 13083 - protein, 569 aa, Clarkia epilobioides
MASPALISETEAWKDLKAHLEGIKMTHLRELMGDTERCQSMMVEFDNIFLDYSRQQASPDTISKLYKLADAAHLKQKIDRMYNGDHINTTENRSVLHVALRAPRNSSICSDGKNVVPDVWNVLDKIKDFSDRVRNGSWIGATGKELKDVIAVGIGGSFLGPLFVHTALQTDPEASKNARGRELRFLANVDPIDVARNISGLNPETTLVVVVSKTFTTAETMLNARTLREWISSALGPSAVAKHMVAVSTNLPLVEKFGIDPNNAFAFWDWVGGRYSVCSAVGVLPLSLQYGFAVVEKFLQGAHSIDQHFSSAPFEKNIPVLLGLLSVWNVSFLGYPARAILPYSQALEKLAPHIQQVSMESNGKGVSIDGLPLPFESGEIDFGEPGTNGQHSFYQLIHQGRVIPCDFIGVVKSQQPVYLKGEVVNNHDELMSNFFAQPDALAYGKTPEELKKENVSEHLIPHKTFTGNRPSLSILLPTLDAYRIGQLLAIYEHRVAVQGFVWGINSFDQWGVELGKSLATQVRKQLHASRVKGEPVEEGFNFSTKTLLTRYLQATSDVPADPSTLLPNI

SEQ ID NO: 13084 - protein, 569 aa, Clarkia epilobioides
MATPALISETEAWKDLKAHLEGIKRTHLRELMGDTERSQSMMVEFDNIFLDYSRQQASPDTINKLYKLAEAAHLKQKIDRMNNGDHINSTENRSVLHVALRAPRNSVICSDGKNVVPDVWNVLDKIKDFSERVRNGSWVGATGKELKDVIAVGIGGSFLGPLFVHTALQTDPEASKNARGRELRFLANVDPIDAARNISGLNPETTLVVVVSKTFTTAETMLNARTLREWISSALGVSAVAKHMVAVSTNLPLVEKFGIDPNNAFAFWDWVGGRYSVCSAVGVLPLSLQYSFAVVEKFLQGAHSIDQHFSSAPFEKNIPVLLGLLSVWNVSFLGYPARAILPYSQALEKLAPHIQQVSMESNGKGVSIDGLPLPFESGEIDFGEPGTNGQHSFYQLIHQGRVIPCDFIGVVKSQQPVYLKGEVVNNHDELMSNFFAQPDALAYGKTPEQLKKENVSEHLIPHKTFTGNRPSLSILLPTLDAYRIGQLLGIYEHRVAVQGFVWGINSFDQWGVELGKSLATQVRKQLHASRVKGEPVEEGFNFSTKTLLTRYLQATSDVPADPSTLLPNI

SEQ ID NO: 13085 - protein, 1068 aa, Chlamydomonas reinhardtii
MPITARPPISAAAGASGTAGSLPARVTGPGRQNQGHNAQHVPVARAPTLASARSTTRTSAASGTTVMTVTDRVRKSIERRSMDARPQEQGEPLEPLEQVPEDPLERLTADLAALSMQHAAAVAAAVAITTASASSSGTSSSAPALPAASSGRNGRPQGPSGRYGSSSASGPAPVHASYNNSGAPSSSPNALQQQQSQSGSADSRRCDLGDTGLPAQLLALRDPACPVSLPPPTGLPSSCLPLDNWKLDKLVLSLSANKATWRRSLLLFEWLKAAGHQLDDRLCTTLIRVCSDHGDAVSALAVYDWMTGSTASGGAALEATAYTYTAAMRAALAGGLTDRALSIWNEAWRRHSAGRLQLDCRLCITYLELCTRLGLTDQALAMYAAMRAAPAGSRMAPTVHAYTAAMRAATEGGRWYRALDIWADMRSAGCEPTGHAYSAAISACAAAGDWRRAVALFDEMTGPGGIRPDVVSCTALITALAAGGEADRAEAVVAWMLSNSVRPNARTYTALMAALGNAKRWARAVEVLGRMQTPEWGGVQPNAYTYSALLKSLGEHGQWQLAEAVFSSIERQVLGPAAGSAPPAAAALSLASALVPAASPPPSPLAAMIAEASATAAAAAAAVASAAGSAAVAAAIRPPASPCASESSSSAPSQWTRPSQLNGLSLDLHSPTSTGGAVEAGPSRRSFSLFSHPPAPSSSTATSCAPSSTGTSGRSSFSADSAVPSDVYSVASTSAAEAWRSTLDHASAAALAGQLAAMAAASGCGAPGPLATVPEGELVTFPSIDAEEASTSAATTLAPGVYTPGVLRAGVAPPPPPPPPPMSSSAQQQQQQQSASTSGNSASSSSSGGVLNEVVCGALMLAYERAGKWQEAVAVLLRALNLGITPNTVMYNTAISAAGKAGQLEIAEKLYGKVRQPDAVTHETMIAAYGMAGLPERAEAVFSAMTSAGLRPRDFAFCGLIAAHSLAGNWEGAMRVRARMRRAGVQPSVHVYNALLAACERAGQPDRALELLGAMRREGVEPNTLTANLLQLVGRQGVRSVESQQQLAASVSAALAAYGALLMQTGLF

SEQ ID NO: 13086 - protein, 305 aa, Aeropyrum pernix K1
MRVAARGSRLSLLQVEQALEELSRYAGVSMHWEVVRVKSAGDVWSDRPLESIGVVGVFTREVDRAVASGAADIAVHSLKDMPTSGYGGPLKIVYIASRPSARDALISRQGPGRVEDLEPGSTLGTSSARRRALSLHYNPRIRVENLRGNLDTRLRKLREGLYDAIIASEAGLIRLGVDVEYTPLDPSYFPPAPGQGFVAVVARVGSNVEKMLRDLDKPPWWHVAWAERGVLEGARAGCRTPVAAYAEPLGRSMVRVTAAALSPDGSRAYWARAEGRIEEARRIGVSLGEELSRVVEGWHKTGGGS

SEQ ID NO: 13087 - protein, 173 aa, Triticum aestivum
  misc_feature (105)..(105): Xaa can be any naturally occurring amino acid
MAVRAVTMLAVAALVVVAAVLAGGASAQSTSGCTQTLIGMSPCLNYITGNETAPSKSCCSQLAAVVSSKPECLCVALNADPAALGLGHRRQDPAPSAFPDQCGVXTPPLSNCASAPTASPSSGSPAGQTPTSSGAGSKSTPTADVGSGGGSLQSSAGIVAGFIVAAVYAVSAM

SEQ ID NO: 13088 - protein, 476 aa, Clarkia delicata
MATPALISETEAWKDLKAHLEGIKRTHLRELMGDTERSQSMMVEFDNIFLDYSRQQASPDTINKLYKLAEAAHLKQKIDRMNNGDHINSTENRSVLHVALRAPRNSVICSDGKNVVPDVWNVLDKIKDFSERVRNGSWVGATGKELKDVIAVGIGGSFLGPLFVHTALQTDPEASKNARGRELRFLANVDPIDAARNISGLNPETTLVVVVSKTFTTAETMLNARTLREWISSALGVSAVAKHMVAVSTNLPLVEKFGIDPNNAFAFWDWVGGRYSVCSAVGVLPLSLQYSFAVVEKFLQGAHSIDQHFSSAPFEKNIPVLLGLLSVWNVSFLGYPARAILPYSQALEKLAPHIQQVSMESNGKGVSIDGLPLPFESGEIDFGEPGTNGQHSFYQLIHQGRVIPCDFIGVVKSQQPVYLKGEVVNNHDELMSNFFAQPDALAYGKTPEQLKKENVSEHLIPHKLLGIYEHRVAVQG

SEQ ID NO: 13089 - protein, 633 aa, Phalaenopsis hybrid cultivar
MEGCDCIEPQWPADELLVKYQYISDFFIALAYFSIPLELIYFVKKSSFFPYRWVLIQFGAFIVLCGATHLINLWTFTMHSRTLAIVMTVAKVSTAVVSCATALMLVHIIPDLLSVKTRELFLRNKAEELDKEMGLIRTQEETGRHVRMLTHEIRSTLDRHTILRTTLVELGRTLDLAECALWMPSRTGLNLQLSHTLNNQIPVGSVVSINLPVVNQVFNSSRAVRIPHTCQLARFQPHTGRYVPPEVVAVRVPLLHLSNFQINDWPELSAKNFAVMVLMLPSDSARKWHVYELELVEVVADQVAVALSHAAILEESMRARDQLMDQNVALDLARREAEMAIRARNDFLAVMNHEMRTPMHAIIALSSLLLETELTPEQRLMVETILKSSNLLATLINDVLDLSKLEDGSFELEVTVFNLHTVFREVVNLIKPIAAVKKLSLIVSLSPDLPSCAVGDEKRLMQTMLNVVGNAVKFTKEGSISITASIAKPDSLRDPRDPEFYPIPSDGHFYLRVQIKDTGCGISPQELPHLFTKFAHAQNGSDKGYNGSGLGLAICKRFVNLMKGHIWLESEVLGKGCTTIFIVKVGISEDPAHRYQHKLLPPIRAGQSEADAFGSKRTPTDLIPLKNRYQRSL

SEQ ID NO: 13090 - protein, 310 aa, Methylobacillus flagellatus KT
MNAPKTLVIASRESALAMWQAQYIQGRLQTLYPETEVTILGMTTTGDQILDSPLARIGGKGLFVKELEQALADGRADLAVHSMKDVPMHLPPGFALAAISERDDPRDAFVSNDYPNLASLPAGSIVGTSSLRRQSQLQARFPGLKVESLRGNLQTRLRKLDEGQYAAIILAAAGLKRLGLASRIRESIDPDNSIPAVGQGALGIEINAERLDLLKVLAPLNHPETAACVEAERGMSRALAGSCQVPLGAFAQQHGDTLQMTGFVASIDGKEFLRESVQGPAEQPEALGQALAAKLVALGADRILAALPHE

SEQ ID NO: 13091 - protein, 144 aa, Clostridium perfringens str. 13
MLDQKTIDIIKSTVPVLKSNGLEITKTFYKNMFEQNPEVKPLFNMNKQESEEQPKALAMAILAVAQNIDNLEAIKPVVNRIGVIHCNAKVQPEHYPIVGKHLLGAIKEVLGDGATEDIINAWAKTYGVIAEVFINNEKEMYASR

SEQ ID NO: 13092 - protein, 444 aa, Oryza sativa
MATHAALAASRIPATARLHSKAASKQRVDFADFSGLRPGSCSISHAAREASFSDVLGSQLVARATGENAVRAPAEAKLKVAINGFGRIGRNFLRCWHERENSPLEVVVVNDSGGVRNASHLLKYDSMLGTFKADVKIVDDQTISVDGKLIKVVSNRDPLKLPWAELGIDIVIEGTGVFVDGPGAGKHIQAGAKKVIITAPAKGADIPTYVLGVNEGDYSHEVANIISNASCTTNCLAPFVKILDEEFGIVKGTMTTTHSYTGDQRLLDASHRDLRRARAAALNIVPTSTGAAKAVALVLPQLKGKLNGIALRVPTPNVSVVDLVINTVKTGITADDVNAAFRKAAAGPLSGILDVCDVPLVSVDFRCSDVSSTIDASLTMVMGDDMVKVVAWYDNEWGYSQRVVDLAHLVASKWPGAAVQGSGDPLEDFCKDNPETDECKVYEN

SEQ ID NO: 13093 - protein, 381 aa, Arabidopsis thaliana
MTTMSDLSPDLVGEILTRVPMTSLISVRCTCKMWNALSKEGIFFKAARKQFMGFTMMDSRVCSMKFDLQGIRNNEHDFVDPCIKQIAKLDQIEVSKVLQCDGLLLCVGKDNSRLLVWNPYLGQTRFIKPRKRFNKLEWYALGYDNNHNYKILMNYDTGHLFGYEIYDFSSDSWRVLDVSPDCHIPFHQQSVSLNGNTYFLAQEKIIVEGEEEEVVDEIEKFLLCFDFTTERFGPRLPLPFHSDVLETVAISCVRDDQLAVLYQRFETWEIWVTTKIDPTAVSWSMFLSVDMEPPTGCQFDDEAGSFFIDEENKVAVFFNSDLFNPRVENRNRRYPTAYIIGQDGYFKSATLREAPDLVKPDPYVYCCPLVWSSYAPSLVQL

SEQ ID NO: 13094 - protein, 320 aa, Vibrio vulnificus CMCP6
MIKKIGVLTSGGDAPGMNAAIRGVVRTALGAGLEVYGIYDGYLGLYEGRIKQLDRSSVSDVINRGGTFLGSARFPEFKEVAVREKAIENLKAHGIDALVVIGGDGSYMGAKKLTEMGYPCIGLPGTIDNDIAGTDYTIGYLTALNTVIESIDRLRDTSSSHQRISIVEIMGRHCGDLTLMSAIAGGCEYIITPETGLDKEKLIGNIQDGISKGKKHAIIALTELMMDANELAKEIEAGTGRETRATVLGHIQRGGRPTAFDRVLASRMGNYAVHLLMEGHGGRCVGIVKEQLVHHDIIDAIENMKRPVRNDLFKVAEELF

SEQ ID NO: 13095 - protein, 376 aa, Schizosaccharomyces pombe
IMAASRNVAMMVVGRFIVGYGIGLTSLIVPMYITELAPARLRGRLVIIYVVFITGGQLIAYSLNAAFEHVHQGWRIMFGIGAAPALGQLISLFWTPESPRYLLRHHHVEKVYKILSRIHPEAKPAEIAYKVSLIQEGVKVDFPEGNKFQHFFHSLKVLFTVPSNRRSLFIGCFLQWFQQFSGTNAIQYFSAIIFQSVGFKNSISVSMVVGATNFVFTIVAFMFIDRIGRRRILLCTSAVMIAGLALCAIAYHFLPADTTQNTHSGWQYVVIASIIIFLASYASGIGNIPWQQAELFPMEVRALGAGFSTAINWVGNLIISASFLTMMESITPTGTFALFAGFCFVGLVTSYFTYPELAGMFIENIHKLLEKGFWQA

SEQ ID NO: 13096 - protein, 966 aa, Oryza sativa
MARNAADKGTSIDAQLRILAPKKLSEDDKLVEYDALLLDRFLDILQDLHGEDIRETVQECYELAAEYESKVDPKQLDAIGNVLTRLDPGDSIVMTKSFSHMLILANLAEEVQIAYRRRIKLKKGDFADENSATTESNFEETLKRLVGELKKSPHEVFDALKNQTIDLVLTAHPTQSVRRSLLQKHGRIRSCLTKLYAKDITPDEKQELDEALKREIQAAFRTDEIRRAPPTPQDEMRAGMSYFHETIWKGVPKFLRRVDTALKNIGINERVPYNAPLIQFSSWMGGDRDGNPRVTPEVTRDVCLLARMMAANLYYAQIEDLMFELSMWRCSDELRVKADQLHRCAKKNTTKHYIEFWKQVPPSEPYRVILSNVRDKLYNTRERARHLLASGFSEIPDEATFTDVEQFLEPLELCYRSLCACGDNSIADGSLLDFLRQVSTFGLSLVRLDIRQESDRHTDVMDAITQYLGIGSYREWSEEKRQEWLLSELNGKRPLFGPDLPQTDEIADALDTFHVIAELPYDSFGAYVISMATAPSDVLAVELLQRECHVKKPLRVVPLFEKLADLEAAPAALARLFSVDWYRNRIDGKQEVMIGYSDSGKDAGRFSAAWELYKAQEELIKVAKQFGVKLTMFHGRGGTVGRGGGPTHLAILSQPPDTIHGSLRVTVQGEVIEQSFGEEHLCFRTLQRFTCATLEHGMHPPISPKPEWRALMDEMAAVATKEYRSIVFQEARFVEYFRLATPELEYGRMNIGSRPSKRKPSGGIESLRAIPWIFAWTQTRFHLPVWLGFGAAFKHVLQKDIRNLQILQEMYNEWPFFRVTIDLVEMVFAKGDPGIAALYDKLLVSEDLWPFGARLRANYEETKQLLLQVAGHKDLLEGDPYLRQRLRIRDSYITALNVCQACTAKAYQGPGFHVSPRAHLSKDIMDSGKPAAELVKLNTTSEYGPGLEDTLILTMKGIAAGMQNTG

SEQ ID NO: 13097 - protein, 239 aa, Triticum aestivum
MESRKPQRSALVDSYVVPGDVILDLADMTNQTIKLGAGLRQDCDTIQATSAGRLRLSKPNKYWVENSQKRYVPSVEDTVLGIVVDTKPDNFLVDIKGPNLAFLPVLSFEGGTRRNIPKFEIGTLIYARVVKANSIMNPELSCMDASGKAAEFGQLKSGYTFETSTGLARMLLSSPTCPLLEALGKKLSFEIAVGLNGRVWVNAPSPSNVIVVSSAIKESESYSRLQQKTMVEKLLAKLS

SEQ ID NO: 13098 - protein, 497 aa, Pseudomonas fluorescens Pf-5
MSLIQHLIHGELVSDNGRSADVFNPSTGQAIHKVPLASRETIQQAIDSAKSAFPAWRNTPPAKRAQVMFRFKQLLEQNEARIAKLISEEHGKTLEDAAGELKRGIENVEYACAAPEILKGEYSRNVGPNIDAWSDFQPLGVVAGITPFNFPAMVPLWMYPLAIACGNCFILKPSERDPSSTLLIAELLHEAGLPKGVLNVVHGDKTAVDALIEAPEVKALSFVGSTPIAEYIYAEGTKRGKRVQALGGAKNHAVLMPDADLDNAVSALMGAAYGSCGERCMAISVAVCVGDQVADALVAKLVPQIKALKIGAGTSCGLDMGPLVTAQARDKVSGYVEDGVAAGAQLVVDGRGLSVAGHEDGFFLGGCLFDRVTPQMRIYKEEIFGPVLCIVRVNSLEEAMQLINDHEYGNGTCIFTRDGEAARLFCDEIEVGMVGVNVPLPVPVAYHSFGGWKRSLFGDLHAYGPDGVRFYTRRKAITQRWPQRASHEASQFAFPSL

SEQ ID NO: 13099 - protein, 364 aa, delta proteobacterium MLMS-1
MKKIVISTGGGDAPGLNAVIYAVTKSAYRRGWEIYGSKSGYRGLLDPDELIRLTPEKVEDIMPLGGTILGSTNKGDPFAMPVENLAGEIQTLDLSDRIMRNFRRLGFFCHIAVGGDGSLEIAHRFAVEKGMPVIGVPKTIDNDLEATQRTFGFDTAVSTATDALDKLHSTAKSHDRVMVVELMGRDSGWIALNAGISGGADVILIPEVPFDMNVVCQKINDNDLRDKNYSIVVVAEGAKAASMKKALCKKKVELGRSEELLGGIGDWVAEQIRCQTGKDTRSLTLGHLQRGGSPTTFDRLLALRFGGAAVRMAEQELFDHMVALKTPDMVPVPLAEAIKSRKKVQLDSDKLLTAREIGICFGDA

SEQ ID NO: 13100 - protein, 590 aa, Azoarcus sp. EbN1
MCGIAGEIRFDGQSPDVGALERMNARQRVRGPDSGGVFVQGALGFGHRRLKIIDLSESAQQPMFDPALGLGIVFNGAIYNHAALRRELETLGYRFYSRGDTEVLLKAYHAWGQDFVQRLNGMFAFAIWERDSGRVVLGRDRLGIKPLYYSAQPGLLRFASSLPALVAAGGVDTTVDAVALNHYLSFHAVVPAPHTILAGVRKLPPATLMTIHTDGRRSERSYWSLAYAHEPGDAARSFEEWTEILLEGLRSAVGRRLVADVPVGALLSGGVDSSLIVGLMAQAGVQGLRTYNVGFEDVGGEKGNEFEYADIVAERFATIHERIFVPEAQLLARLPEAVAAMSEPMVSHDCIGFFLLSEAVSRHSKVVQSGQGADEVFGGYHWYPKLAGSVDPVGDYLAAFRDRDYDEYCRMVGAANRADDCSGAFVAAHFDLPGAIDPVDKALRLDTTVMLVDDPVKRVDNMTMAFGLEARVPFLDHELVELAARIPARHKLAHGGKGVLKEAARQVIPSAVIDRPKGYFPVPGLKYLQGQVLERVRDALTNRAARERGLFRREYVDTLLADPGAHMTPLRGSKLWQLGLLEWWLQTHVR

SEQ ID NO: 13101 - protein, 370 aa, Capsicum annuum
MASDLETRAKEAFIDDHFELAVDLYTQAISLSPKNPELFADRAQANIKLNYFTEAVVDANKAIELDPYMSKAYLRKGLACMKLEEYQTAKAALETGASLAPGESRFTKLMKECDESIAEEAGELPNISLEKPSANAVASSASELSDNVAIAPRDPQSTVTLSHQESAAKPKYRHEFYQKPEEVVVTIFAKGIPAKNVVVDFGEQILSVSIDLPGGETYSFQPRLFGKITPAKCRYEVMSTKIEIRLAKAEPLHWTSLDYTREPVVIHRPVVSSAAPRPSYPSSKLRNVDWDKLEAQVKKEEKDEKLDGDAALNKFFRDIYKDADEDTRRAMMKSFVESNGTVLSTNWKEVGTKKVEGSPPDGMELKKWEI

SEQ ID NO: 13102 - protein, 109 aa, uncultured Prochlorococcus sp.
SDLDGVTYRVLNTDAQALIQSSATHRVQLGQSLTRGLGAGGNPSIGQKAAEESRADLQQALKGVDLVFIAAGMGGGTGTGAAPVVAQVAKESGALTVGIGTKPFNFEGK

SEQ ID NO: 13103 - protein, 162 aa, Triticum aestivum
MSAAERAVVFSEEKDALVLKSWAIMKKDSANLGLRFFLKIFEIAPSARQMFPFLRDSDVPLETNPKLKTHAVSVFVMTCEAAAQLRKAGKITVRETTLKRLGGTHLKYGVADGHFEVTRFALLETIKEALPADMWGPEMRNAWGEAYDQLVAAIKQEMKPSE

SEQ ID NO: 13104 - protein, 109 aa, uncultured Prochlorococcus sp.
SDLDGVTYRVLNTDAQALIQSSATHRVQLGQSLTRGLGAGGNPSIGQKAAEESRTDLQQALEGVDLVFIAAGMGGGTGTGAAPVVAQVAKESGALTVGIVTKPFSFEGK

SEQ ID NO: 13105 - protein, 322 aa, Arabidopsis thaliana
MGGVKRKISIELIEKKDSRAVAFSKRSRGLYSKASDLCLLSDAQIAIIATPVSSKSNVSFYTFGHSSVDNVVAAFLTNQRPREGLGLDYWWEDERLSKSEDLEELRDAMDSMSKMLKDLKDLQNQRDCEEDVKKKGVLHGTHQKQTFNPESCSVNFDGFNKNTEEFDLDEIFDYVSTAEALSMNLDMDDVSVVTTNQNPVSASETVEDRELVVHKNMDEDNIHVSDMDDKDTMLMISDKNNVLPENLDEFDQELDLDQLLDFETNYESLLKSCEMEDYASMVTTKQNLCSNPEAVEDGGLMIQKDLPEDNLCFSDYFSDLHC

SEQ ID NO: 13106 - protein, 669 aa, Schizosaccharomyces pombe
MTVLVPLRRLDTRAAFSSYGREIALQKRFLNLNSCSAVRRYGTGFSNNLRIKKLKNAFGVVRANSTKSTSTVTTASPIKYDSSFVGKTGGEIFHDMMLKHNVKHVFGYPGGAILPVFDAIYRSPHFEFILPRHEQAAGHAAQAYSRVTKKPGVVLVTSGPGATNVITPIADALADGTPLVVFSGQVATSAIGSDAFQEADMVGISRSCTKWNVMVKDVADLPRRIDEAFEIATSGRPGPVLVDLPKDVTASVLKEPIPILSSVPSMNRRMKEVLEEGSKNVTAKIDRVGNLLKLAKKPVIFCGHGVLANPECPTLLRKFSERLQIPVTTSLLGLGAVDERSDLSLHMLGMHGSGYANMAMQEADLILALGVRFDDRVTGNVSLFAPQARLAAAEERGGIIHFDISPKNIGKVVQPTEAIEGDVYESLKLLDSATKNIKIPSRFDWLSQIQTWKERFPFTFTRSAPGELVKPQEVIQELDKQTSDIKDKVTITTGVGAHQMWAATFYRWTKPSSLVTSGGLGTMGFGLPAAIGASVAAPKDIVIDIDGDASFSMTGMELATVRQFDIPVKILILNNEEQGMVTQWQNLFYEKRYSHTHQKNPNFVKLADAMGIKALRVEKREDLAKKMKEFLSTKGPVLMEVLVAQKEHVYPFVPGGKALHQFILHESLS

SEQ ID NO: 13107 - protein, 406 aa, Haemophilus influenzae R2866
MRRTVITGFGIISSIGNNKEEVLASLKAGKSGIEVVPEFVEMNMRSHVAGTIKLNPSEHIDRKVFRFMGDAAAYAYLSMREAIEDAGLTEDQVSNDRTGLVIGAGTGSAHNQLVACDAVRGPRGVKAIGPYAVTKTMASSVSACLATPYKIRGVNYSMSSACATSAHCIGHAVELIQLGKQDIVFAGGAEELSWECATEFDAMGAVSTKYNETPEKASRAYDANRDGFVIAGGGAVVVVEELEHALARGAKIYAEIVGYGATSDGYDMVAPSGEGAERCMKQAMATVDTPIDYINVHGTSTPVGDVKELGAIKNVFGDKIPAISSTKSMTGHSLGAAGAHEAIYTLLMLDNDFIAPSINIETLDEAAEGCNIVTETKENAGLETVMSNSFGFGGTNATLIFKRYNG

SEQ ID NO: 13108 - protein, 109 aa, uncultured Prochlorococcus sp.
SDLDGVTYRVLNTDAQALIQSSATHRVQLGQSLTRGLGAGGNPSIGQKAAEESRADLQQALEGVDLVFIAAGMGGGTGTGAAPVVAQVAKESGALTVGIVTKPFSFEGK

SEQ ID NO: 13109 - protein, 540 aa, uncultured proteobacterium
MSSIMNIDPELQSLANQIATRRVTECFEGDANRASDFRCTSNGLVLDYSKHHIDAPSRQRLLEIAQQSALAADFEALTRGDAINITEERAALHTLLRGTRKEESPELYAEVHATNSKLAQLVAKIHSGAWSGFGANRFTDVVNIGIGGSDFGPKMVCRALRTETDLMKSHFVANVDPQDLDETLASLDPQSTLFIICSKSFTTEETLTNALRARAWLLAAGAKDTDVNKHMVAVTTNLEGASRFGISPENCFPMWDWVGGRYSLWSAVGLSIALQSGWETFLRLLTGAHEMDIHTLGSHDKNNLPLMMALLEFWNTVYLKTDTHVVLPYAQALEKLPDFLQQLSMESNGKRVDLSGSALTLPSAPVLWGSAGTIGQHSYYQLLHQGNRRFTADIILPLSHKEKDLDAQRKLAANALAQSRALLVGRDKSAAQRLAAERGQPESFAPHYEMPGNHSHSLIYFESLTPEILGALIAAYEHKTFFLSRLLGINAFDQWGVELGKVIGRQILTMLEHGEGLEVIDPATAIVVEAWRAANAKNTS

SEQ ID NO: 13110 - protein, 109 aa, uncultured Prochlorococcus sp.
SDLEGVSFRVLNTDAQALLQSSAERRVQLGQNLTRGLGAGGNPSIGQKAAEESRDELQQSLEGSDLVFIAAGMGGGTGTGAAPVVAEVAKQSGALTIGIVTKPFSFEGK

SEQ ID NO: 13111 - protein, 1132 aa, Bdellovibrio bacteriovorus HD100
MNHKNRLFLFTSVLVLGTLLIAGTVGYKMGSSSLEQSTRERLVQIRDFKSDEIQKEFAYLKNALVLTSEYTPILQFLRRYPQEHQQMQSWLRSHGKATAWRNEMEEHRPPQVSDYPRILEQFTALPLFLQYQFQQSARSQNRPLPQLASVNGFSDLNYFRSYESLHSKLFDVLERSHLNDVLLIEPNGTVAYSAAKSLALGDNLISGPLSNSRLAQAYRWSLNAPKGATKYFDFTPVSHFWHTPAAFLTMPLFDQTNFVGTLVFQLSLERIDQILSHNSKWKELGLGMTGEVVAFGTDGFVRNNPRLYLESPVQFLQKVRQQEDARAALESIERSSSASLSLILPPTQIRRYMERGVAFDSGEDYMGTRSLQSAGRVNVVDNTDWIIISKMDLNEALAPLSFKLPWFFIGGFLLWSLALGGAWLVYRRMFFPSQVLSDGMDKLKSHNFSETLQAPEEEEYKDLYKKFDEIREDFRKTKAARDFLENVVYSLNEVFFIVEVEDVEDSLRKNFRVRGFNPTAQSLTGAPGPALKNSDLSLWLETDYSVIENSLRERDANKSTHTAEASLKKITGDRVPLEVSWARVNTENKDKVLLAMMGTDMRWKKEIEKELKLKEELLKESQSLSKTGSFRWDIRTGKCLWSEEEFHLLGLTPDNVVPSYDLFRSLILSEDLPVFDKALAEAHKNIAPFHVDLRMKKQDSNDLIWVRCQGRTEYDDYGNALFMYVTTQDITELRRVEQSLITTKNEALKASQAKSEFLAQMSHEIRTPMNAIMGMAELLKETRLDVDQKYYVTIFCKAGEVLMSLINDILDLSKIEAGEVSIENIPFDMKKLMADVEDMMKPRALEKGLNCICEIAPGVSPHLMGDPTKLRQVLINLIGNSIKFTNKGQVRLVIGKNPSKKDTLLISITDTGIGIPEDRQHMIFQKFSQADNSVTRKYGGTGLGLAISKSLVELMGGQIWFKSRPGTGTTFFFTIPYREQIYNPVNYMPVPMRTPELDFVSPKPRDPNHKVKILIADDTEDNRTLFTHYLKNEPFEIIEAENGLQAIDQIKSGEFDIVFMDVQMPEMDGYAATDRIREWEKESHKPPVPIIALTAHALAEDRQKSLRAGCNDHIAKPFKKDTLLGVINKYSL

SEQ ID NO: 13112 - protein, 105 aa, Triticum aestivum
ALLAYGFFHRGLIPGLCFGAGLGITLFGMAYMFVHDGLVHRRFPVGPIADVPYFRRVAAAHKIHHMDKFEGVPYGLFLGPKELEDVGGLDELEQELARINRTRSI

SEQ ID NO: 13113 - protein, 856 aa, Cytophaga hutchinsonii
MNLSIRTLNIIFSISLLLLASAFIYSYLNIQGLRSANHWVNHTNKVIISLESIYSDIKNAESGVRGYALTKDASYLEQQDQSRTNIKNQLILLDSLLADNPEQHIYIDTLQKTVNDRFFLFNGLINLTNNNADQAEVLPLMQKGKASTEHIYNLVKKMKNNEGILLLQRNEKAEALDKTTPITIVFSGIFGFMVLVISYYFILADLKQRRKIANEVKIKNTLLEYAQQITQMGTFEYNVFTNTLFWSNEMYNIFELDRSVIPEINFIDSLIKEESEITHNRRKKNFQPGASYSDELKIRTVNGNEKVLISNGYVVNEENGLVVHGAIIDITPLKKAELTAREQQELMRVAKEKAESASQFKTRFLSNMSHEIRTPINAILGFTAILSKQELTEQQKKLLKNISISGELLLKLIGNILDISKIEEGKVIIESKSFHLKESIRSVLSPFQHSASEKGLQFHLIIDKSIPDYLLGDFPRISQVLVNLIGNALKFTSHGNITVSVLLTKKQDGLSFVEFVINDTGIGIQANKQDEIFESFTQANESISVKYGGSGLGLSIVQEVVHLMGGNIQVQSPAHYNERGKGYGSKFFFTLPFKLGEKGADPQAKKTAVQPFPRVLHILVADDNEMNRTLATYTLQSLGCTFEIVENGLQAIQKAAANTYDIILMDMQMPVCDGLQATRQIRLNKNTTPIVGLTANVFQEDINRCLDAGMDGHLGKPYTEEDLYHIIDKWVFKNEKNIAASVPSFSNYEFIEKLSKNDPVIFREMLEMFLNQNAQLLKIIHTAINAEDLETLSFNVHQYKSCARMLNIEKQISLIKQIEEKIEARVSLETIRTDIMQLIETGALVSKEIEQKLLIV

SEQ ID NO: 13114 - protein, 290 aa, Flavobacteria bacterium BBFL7
MSVLVNKDSKIIVQGFTGSEGTFHAGQMIEYGTNVVGGVTPGKGGQTHLDKPVFNTVSEAVEKVGANVTIIFVPPAFAADAIMEAADAGIEVIITITEGIPVADMVKAADYIKEKNCRLVGPNCPGVITPGEAKVGIMPGFVFKKGKVGIVSKSGTLTYEASDQVVKQGYGISTAIGIGGDPIIGTTTKEAVELFMNDPETEAIVMIGEIGGQLEADAAQWIKATGNKKPVIGFIAGETAPAGRTMGHAGAIVGGSEDTAQAKKAIMRESGIHVVDSPAEIGKKVAEVLG

SEQ ID NO: 13115 - protein, 299 aa, Vibrio parahaemolyticus RIMD 2210633
MNEDNSPSSNEGKKEKAEGPSRKSFFERLGQLFQGEPKDRQELVDVIRDSEVNDLIDHDTRDMLEGVMEISEMRVRDIMIPRSQMVTVERTDDLDTLIALITDAQHSRYPVISEDKDHVEGILLAKDLLKYLGSGSNPFDIEEVIRPAVVVPESKRVDRLLKEFREERYHMAIVVDEFGGVSGLVTIEDILEEIVGDIEDEFDESEETDIRKLSKHTFAVRALTTIEEFNETFGTNFSDEEVDTVGGMVMTAFGHLPSRGELVEIEGYNFKVTAADNRRVIQLQVTIPDEETLVEATQE

SEQ ID NO: 13116 - protein, 145 aa, Gossypium hirsutum
MAHFQNQYSAPEVTQTDAYGNPTRRTDEYGNPIPTQETGRGILGIGGHHHGGHHGLHRTGSSSSSSSSSEDEGTGKKKKGLKERLKEKIPGNKEHQSQATSTTTPGQGPTYHQHHREERSDGQDQGEAPWSPQPLISCLWSAISY

SEQ ID NO: 13117 - protein, 547 aa, Neisseria gonorrhoeae FA 1090
MDAFTRAWYALERHYQDTCHILLRDRFAAEPDRFERMHERLDGMLFDYSKNRFGEDTLQLLCRLAETADLEGKMRALRTGAKVNGSEGRAALHTALRLPDGADAVYADGRDVLPEIRRELNRALKFAHSLDDGLYQGITGKRIADFVHIGIGGSDLGPAMCVQALEPFRRQISVHFVSNADPACLDEVLCRLNPETTMFCVASKSFKTPETLLNAEAVKAWYRGAGFSESETAHHFCAVSADTEAAQSFGIAAERVFAMYDWVGGRYSVWSPVGLPVMVAVGGARFRELLAGAHAMDSHFFHTPPRRNIPVLMALIAVWYNNFQHADGQTAVPYSHNLRLLPAWLNQLDMESLGKSRASDGSPAACKTGGIVFGGEGVNCQHAYFQLLHQGTRLIPCDFIVPMTAQGAEDGRSRFTVANAFAQAEALMKGKTLDEARAELADLPEAERERLAPHKEFPGNRPSNSILLDRLTPCNLGMLMAAYEHKTFVQGAIWNVNPFDQWGVEYGKQLAKTIIGELEGGTSVHDASTEGLMAFYRECRLKGGGAA

SEQ ID NO: 13118 - protein, 321 aa, Tropheryma whipplei TW08/27
MYPLRIGTRSSLLATAQTAQVQKTMRDVFLLDTQQVLIQTGSVRRRDGSFVAALRTALLEGECDLAVHSLKDIPIAPHEGTLITAVLPREDPCDVLCARKDLTLTTLPSGAKVGTASARRRAQILNFRPDLDVVSLRGNIDKRLIHLDTLDAIVLSAAGLKRIDREDAITESFDIHDWPTAAGQGSLAIEVCRAQLDDPQNRVAVTYRLDNPMARVTTTAERGVLSLLQADCFSPIAVHAVYTANDKSLRLHAKVFSRDGKIFCESIRFARLVKQLTDTNQNHTKNSGSDDIGNALEVAMTLAKTVVDELLSKNAREILKQ

SEQ ID NO: 13119 - protein, 462 aa, Hordeum vulgare
MHAHAAHALGLRVPPPAFPRRRARPRRRPAAAVLATSAAPQRETDPRKRVVITGMGLASVFGSDVDTFYDRLLAGESGVGPIDRFDASSFPTRFAGQIRGFSSEGYIDGKNDRRLDDCIRYCILSGKKALESAGLGAGSDAHVKLDVGRAGVLVGTGMGGLSVFSDGVQNLIEKGYRKISPFFIPYAITNMGSALLAIDVGFMGPNYSISTACATSNYCFYAAANHIRRGEADIIVAGGTEAAIIPIGLGGFVACRALSQRNDDPITACRPWDKERDGFVMGEGAGVLVMESLEHAMKRDAPIIAEYLGGAVNCDAYHMTDPRADGLGVSSCITMSLRDAGVAPEEVNYINAHATSTLAGDLAEVRAIKQVFKNPSEIKINSTKSMIGHCLGAAGGLEAIATIKSITTGWVHPTINQFNPEPEVDFDTVANEKKQHEVNVGISNSFGFGGHNSVVVFAPFKP

SEQ ID NO: 13120 - protein, 826 aa, Bacteroides fragilis YCH46
MKIIIIGGVAGGATTAARIRRSDETAEIILLEKGKYISYANCGLPYYIGDVIEEREKLFVQTPEAFGVRFRVDVRTENEVIFIDRKKKTVTVRLKSEDTYEESYDKLLISTGASPVRPPLPGIDSTGIFTLRNVADTDRIKAYVNNRPPRRAVVIGAGFIGLEMAENLHALGAQVSIVEMGNQVMAPIDFSMAALVHQHLMEKGVNLYLEQAVASFEQAGKEVKVVFKNGQSILADIVILSIGVRPETTLARAAELTIGEAGGIAVNDYLQTSDESIYAIGDAIEFRHPITGKPWLNYLAGPANRQGRIVADNLLGAQIPYEGAIGTSIAKVFDMTVASTGLPGKRLKQAGIVYASSTTHPASHAGYYPDAMPMSIKITFDPQTGKLYGGQIVGYDGVDKRIDELSLVIKHEGTIYDLMKVEQAYAPPFSSAKDPVAIAGYVAENIILGRVKPVYWRDLRDIELKDVFLLDVRTPDEFALGSLPGAVNIPLDEIRDRIAELPSNKPIYTFCAVGLRGYLAYRILIQHGFKEVYNLSGGLKTYRAATAPIILHENEETDDTPSAQDSPAKPSVGAEAPQTTTAANPKTIRVDACGLQCPGPVLKMKKTMDTLVPGERVEIVATDPGFSRDAAAWCNSTGNKFISKDSTGGKSVVVIEKGEPQACNLTTTCDSKGKTLIMFSDDLDKALATFVLANGAAATGQKVTIFFTFWGLNVIKKLHKPKVEKDIFGKMFGTMLPSSSLKLKLSKMSMGGMGGKMMRYIMHRKGIDSLESLRQQALENGVEFIACQMSMDVMGVKREELLDEVTVGGVATYMERADNANINLFI

SEQ ID NO: 13121 - protein, 508 aa, Pseudomonas fluorescens Pf-5
MNASLKPDGTTLQQVKLLIDGEWIQSQSQEWHDIVNPATQEVLAKVPFATAAEVDAAIAAAQRAFQTWKLTPIGARMRIMLKLQALIREHSKRIAVVLSAEQGKTIADAEGDIFRGLEVVEHACSIGTLQMGEFAENVAGGVDTYTLRQPIGVCAGITPFNFPAMIPLWMFPMAIACGNTFVLKPSEQDPLSTMLLVELAVEAGVPAGVLNVVHGGKDVVDALCTHKDIKAVSFVGSTAVGTHVYDLAGKHGKRVQSMMGAKNHAVVLPDANREQTLNALVGAGFGAAGQRCMATSVVVLVGAAKQWLPDLKALAQKLKVNAGSEPGTDVGPVVSKRAKARILELIESGVKEGAKLELDGRDIKVPGYEQGNFIGPTLFSGVTTDMQIYTQEIFGPVLVVLEVDTLDQAIALVNANPFGNGTGLFTQSGAAARKFQSEIDVGQVGINIPIPVPVPFFSFTGSRGSKLGDLGPYGKQVVQFYTQTKTVTSRWFDDDSVNDGVNTTISLR

SEQ ID NO: 13122 - protein, 403 aa, Vibrio vulnificus CMCP6
MKRVVITGMGIVSSIGNNVEEVLASLKAGKSGITSSEQFKEKGLRSQVWGDLKITPADHIDRKQMRFMGDAAAYAYLSMEQAIADAGLTEDQVSNDRTGIVAGSGGASSLNQAAAVDTLREKGVKRIGPYMVPRTMSSTVSACLATPFKIRGVNYTMSSACATSAHCIGHAAELIQLGKQDIVFAGGGEELDWTLTMMFDAMGALSTKYNETPEKASRTYDADRDGFVISGGGGMLVIEELEHALARGAKIYGEIVGYGATSDGYDMVAPSGEGAVRCMKMAMQDVEKIDYINTHGTSTPVGDVKELGAIQEVFAGNSPAISATKAMTGHALGAAGVHEAIYSTLMLHHNFIAPSINIENLDAAAEGLDIVTEMREAELNTVMSNSFGFGGTNATLVIKKYQG

SEQ ID NO: 13123 - protein, 571 aa, Lolium perenne
MAQGWPFFLLVLFSCVSNHLVNGERVFLFPQSHKVSSIVSKRYRTAYHFQPPKNWINDPNGPMYYNGIYHEFYQYNPNGSLWGNIIWGHSVSTDLINWIPVEPAIERDIPSDISGCWTGSATIISGDQPIIIYTGADKENRQLQNIVLPKNKSDPYLREWTKAGNNPVIQPVGPGLNASQFRDPTTGWIGPDGLWRIAVGAELNGYGAALLYKSQDFLNWTRVDHPLYSSNASSMWECPDFFAVLPGNSGGLDLSAEIPNGAKHVLKMSLDSCDKYMIGVYDLKSDTFMPDSVLDDRRLWSRIDHGNFYASKSFFDSKKGRRIIWGWTNETDSSSDDVAKGWAGIHAIPRTIWLDSYGKQLLQWPVEEIESLRRNEISYQGLELKKGDLFEIKGTDTSQADVQVDFELTSIDNADTFDPSWLLDVEKQCREAGASVQGGIGPFGLVVLASDNMEEHTAVHFRVYKSQQSYMILMCSDPRRSSLRSGMYTPAYGGFFEFDLQKERKISLRTLIDRSAVESFGGGGRVCIMARVYPVVLVDDGGAHMYAFNNGSTTVRVPQLRAWSMSRAEHK

SEQ ID NO: 13124 - protein, 583 aa, Lolium perenne
MGNPKWVLAPWAVLLLLQLASASHHARLSLETEAASPSVPASIVSPLLRTGYHFQPPMNWINDPNGPLYYKGWYHLFYQYNPKGAVWGNIIWAHSVSRDLINWIALEPAISPTIPTDQYGVWSGSTTILHDGTPAILYTGIDRPSVNYQIQNIALPKNASDPLLREWYKPGYNPIAVPVEGINATQFRDPTTAWFAGRHWRMLVGGLRPGTLRGEAILYRSRDFKHWVRAKHPLHSALTGMWECPDFFPVGKAGVEKGLDTSEYGAAAGVEKHVLKNSLDLTRYDYYTIGTYDNVKERYVPDNPTGDVYQRLQYDYGNFYASKTFFDPVKQRRILLGWANESDSVAHDKAKGWAGIQAIPRKIWLDPSGKQLVQWPVEELEKLRGKPVNVGDKVVKPGQHFEVTGLQSYQSDVEVSFEVSSLDKAEPFDPAYSNDAQKLCGIKGADVKGGVGPFGLWVLSSADLAEKTAVFFRVFKDGYGKPIVLMCSDPTKSSLTPDLYKPTFAGFVDTDISSGKISLRSLIDRSVVESFGAGGKTCILSRVYPSMALGKDAHLHVFNNGETDIKVSKLTAWEMKRPLMNGA

SEQ ID NO: 13125 - protein, 109 aa, uncultured Prochlorococcus sp.
SDLEGVSFRVLNTDAQALLQSSAERRVQLGQNLTRGLGAGGNPSIGQKAAEESREELQQSLEGSDLVFIAAGMGGGTGTGAAPVVAEVAKQSGALTIGIVTKPFSFEGK

SEQ ID NO: 13126 - protein, 520 aa, Oryza sativa
MGKFRKLGRHAAHRVSMLRTMVSQLVKHERIETTVAKAKEVRTKADQMVQLGKEAAFSTHGAAAIAGAALSPPPSESRRPRLAQRTATAPPGIGRVQQGSGGINSIGFAVIRKGSLKLRCYAIGGLGGGENLNDPLKESNNGPVLQGFNGSSASFRTVGAKITQETGDFFVSDAEGDPDKPTDGFSSIDEAIGALHEGKFVIAVDDESGDNEGDLVMAATLADPESIAFMIRNGSGIISVGMKEEDLTRLMIPMMSPIAEIEDISAAASTVTVMALEHDIPIVSIADLIRYRRKREKLVELIAVSRLPTKWGLFRAYCYQSKLDGTEHIAVAKGDIGDGEDVLVRVHSECLTGDILGSARCDCGNQLDLAMQLIDKAGRGVLVYLRGHEGRGIGLGQKLRAYNLQDDGHDTVQANVELGLAVDSREYGIGAQILRDMGVRTMRLMTNNPAKFVGLKGYGLAVVGRVPVISPITKENQRYLETKRTKMGHVYGSDLPGNVPEEFLNPDDIAGDQDEDDTHN

SEQ ID NO: 13127 - protein, 101 aa, Synechococcus sp. WH 5701
MALVLKQTAMASGITVTSNPDPAQLVSLGVSNWPTWGCEVSTFPWTYDEQETCLLLEGDVTVTPDGGKPVRFGAGDLVVFDAGLSCTWDVHAPVQKHYRFG

SEQ ID NO: 13128 - protein, 304 aa, Magnetospirillum magnetotacticum MS-1
MEGVDFIAADIDYHSLHQSRTEQRVQLGKQVPPGFFCGSRPNWGRIAAKESLGEILSQIQGTDMLFIIAGMGGCTGAGVAPVIARAAREQGVLTVGLVTTPFFFEGTHRMRTAKGAIDELQKHVNTLIIIPNQNLFRVATERTTFADAFKLVDDELYSSVRGVTNLATNLDFSNIRTVMGEMSNAVIGAGEAEGDKRPHDAALAAICNPLLDSTTLKEERLLINVAGGADMTLFEVDDAVTCIRDLMPPEARITVGSTFDNKLKGKMRVTVLAAGELLDTGLRHSGGPGSTQSIAAPSWRPSNV

SEQ ID NO: 13129 - protein, 171 aa, Glycine max
SAVLQSPFLSSPFISSLTHAQFSPPDGLPYDEFFSQRSESLLKVLRSGARIKKEAFQAASIPVVLVENSGRCNKNDSDEKVLPNGTAWIPNLVQTITDIALNQSESIHVDKNLIEGPNPNQRGKLWTPLVFAIQYFLIMKPIKGLIERDIANERKPTWERRDAAFRKRDLY

SEQ ID NO: 13130 - protein, 653 aa, Lolium perenne
MVADSQACIYPVLMVHTEAGPTNQPRHRPTINHARSSRVRSSIHQLSSIFSNTMKSRATPPRLIQCVSLHLHRTSGGATRWRACTTTVLAVGVLAHALAGAGEIMAWWLGAGKGADGFPWTSAMLQWQRTGFHFQPEKNFMSDPSGPVYYRGWYHLFYQYNPEGTVGANITWGHAVSRDLVHWRHLPLAMLPDRWYDINGVWTGSATMLPNGTLTMLYTGSTNASTQVQCLAVPANPNDSLLRNWTKHPANPVLLPPPGIGDKDFRDPTTAWFHKSDSTWHIAIGSKDDHGHSGIAITYKTKDFVSYELIPGFLHRVESTGMWECVDFYPVGSRDQDAENSSEELLYVMKASMDDHRHDCYALGRYDAEANIWTPVDPEADVGIGLRYDWGRFFASKTFYDPAKRRRVLLGYVAEADSELADVAKGWACLSIPRTVALDEKTRMNLLQWPVEEIETLRLNTIDLGNITIGTGSIFPLPLRQATQLDMEASFRLDASAIAAFNEVDVSYNCSTSGGAASRGTLGPFGLLVLTTADSRSEQMAVYFYVSKSIDGTLQTSFCHDESRSSRAWDVVKRVVGSTVPVLHGEALSVRVLVDHSIVESFAMGGRSTVTSRVYPTEAIYEAARAYVFNNATGSTVTVERLVVHDMDSAFIK

SEQ ID NO: 13131 - protein, 109 aa, uncultured Prochlorococcus sp.
SDLEGVSFRVLNTDAQALLQSSAERRVQLGQNLTRGLGAGGNPSIGQKAAEESREELQQSLEGSDLVFIAAGMGGGTGTGAAPVVAEVAEQSGALTIGIVTKPFSFEGK

SEQ ID NO: 13132 - protein, 303 aa, Oryza sativa
MTKSFAHTLGKGGYGTVYKGSLSDGSEIAVKMLEDTKDDAEDFINEVVSIGRTSHINVVTLLGLCLHRSKRALVYEYMPNGSLDKYAVGVVDTVQGEKSLSWEKLYEILVGIAQGLDYLHRWCNHRVVHLDIKPQNILLDQDFRPKISDFGLAKLCKPKESKISIGGARGTIGYMAPEVFWRHHGAVTTKSDVYSYGMLILQMVGARENTNASMQTVSKYFPEWLYDNLNQFCGAATEGIDSRNTCISEVARKLVTIGFWCIQCTPEDRPSMSEVIDMFDRSMHELQLPPRMSCCGIDNPSIV

SEQ ID NO: 13133 - protein, 109 aa, uncultured Prochlorococcus sp.
SDLEGVSFRVLNTDAQALLNSSAEQRVQLGQNLTRGLGAGGNPSIGQKAAEESREELQQALEGSDLVFIAAGMGGGTGTGAAPVVAEVAKQSGALTVGIVTKPFSFEGK

SEQ ID NO: 13134 - protein, 343 aa, uncultured proteobacterium
MIRVAINGFGRIGRNILRAYYDRPELSQAIDIVAINDLGEPAINAHLLEFDTAHGRFGHEVTSGEDYLAVDGRRIAVLNERSPSALPWAELNIDLVLECTGLFTTRVSAAAHLDAGAQRVLVSAPTKDADATIVYGVNHGTLTNEHRVISNASCTTNCLAPVVQPLHEEIGLVSGLMTTIHAYTNDQNLNDVYHKDLFRARAAGQSMIPTATGAANAIGLVLPELQGRLDGLAVRVPTLNVSLVDLSFTAARETSVEEINSLMSKAATEDAFGILGYNERPLVSVDFNHDSHSANFDANHTRVAGSLVKVLAWYDNEWGFSNRMLDNALELSAIAGLSANKAA

SEQ ID NO: 13135 - protein, 873 aa, uncultured proteobacterium
MTPSSTSNTAQLRQNVRHLGEILGQVIQSQGDAGLFEAVEAIRLQSKQSRDDDDQEALRALLTQLNEKQILDVARAFSHFLNLANIAEQHHTLADYSQSLFSATASLESAFQQLLNDHEHNRLNTVLKNLSIDLVLTAHPTEITRRTLIHKHGEINDCLTRLEILNDKAAASSKDHSRLKELISQIWHTEEFRSDRPTPIDEARWAFAVIENSLWDAVPQFLRVVDDICERYALPIPPPNWSPIRISSWIGGDRDGNPNVTAKVTREVLLLAQWQACTLLENDIATLYEELSVTTASTTLEGATEGALEPYRFLLKPLRDRLQGQRLNIEKALNDQSLAPVPLTLSEIVDPLEACYESLQAVNLDVLARGYLLDTLRRVHCFGPYLIQLDIRQESARHTQAIAELTEALALGDYRDWNEGQRCDWLRGELDNPRPLIPAGWKPTPETQEVIDTFLVIAETPQSALGSYVISMAAEASDVLAVQVLLKATGCTTNMLVAPLFETLDDLESAPRVVEELLSDNAYRDRCDHQIMVMIGYSDSAKDAGMLAAGWAQYRAQESLLSVCKKFAVKLQLFHGRGGSIGRGGAPAHDALLSQPPGSLENGLRVTEQGEMIRTKLGLTPLAVNTLGRYASAILQANLTPPPEPAGEWRVLMNRLAQHSCEDYRRWVRDEPNFVPYFRQATPEQELASLPLGSRPTRRRSDGGIASLRAIPWIFAWSQNRLMLPAWLGAGSALARAAADEHEVVLKSMAREWPFFGARLSMLEMVFAKSDLTIAELYDHLLVSPELADLGAALRQQLSNDRAALLAILETGSELERDNWGRESINLRDIYTAPLNLLQAELLRRQRANPEEATERALMVTIAGVAAGMRNTG

SEQ ID NO: 13136 - protein, 116 aa, Gerbera hybrid cv. 'Terra Regina'
MASMVMNVLCVAVACMVFSASYADAISCGQVTSGLVPCFGYLAAGGPVPPACCNGVRGLNNAAKTTPDRQTACGCLKGILAANTRINLNNANSLPGKCGISIGYKITPNIDCSKIH

SEQ ID NO: 13137 - protein, 573 aa, Haemophilus influenzae
MKKLSGAEMVVQSLRDEGVEYVFGYPGGAVLDIYDAIHTLGGIEHILVRHEQAAVHMADGYARSTGKVGCVLVTSGPGATNAITGILTAYTDSVPMVIISGQVMSNLIGSDAFQECDMLGISRPVVKHSFIVKKAEDIPSTLKKAFYIASTGRPGPVVVDIPKDTVNPNFKYPYEYPEYVELRSYNPTVNGHKGQIKKALKALLVAKKPILFVGGGAITAECSEQLIQFAQRLNLPVTSSLMGLGAYPSTDKQFLGMLGMHGTLEANTAMHESDLILGIGVRFDDRTTNNLEKYCPNAKVIHIDIDPTSISKNVPVAIPIVGNAKNVLEEFLGLLNEEGLKSQTDLESWWQEINQWKAKKCLEFDRTSGVIKPQQVVEAVYRLTKGQAYVASDVGQHQMFAALHYPFDEPRHWINSGGAGTMGFGFPAALGVKLAHPEGTVVCVTGDGSIQMNIQELSTATQYGIPVVIICLNNHFLGMVKQWQDLIYSGRHSQTYMNSLPDFAKLAESYGHVGIKIATPDELESKLQEAFSIKNKLVFVDINVDESEHVYPMQIRGGAMNEMILSKPQEETN

SEQ ID NO: 13138 - protein, 954 aa, Agrobacterium tumefaciens str. C58
MTTPTEFHFTDYQPYDFANRRHIGPSPSEMAEMLKVVGYKSLDALIDATVPSSIRQKVPLTWGAALTEREALDRLRETANKNQVLTSLIGQGYYGTITPPVIQRNILENPAWYTAYTPYQPEISQGRLEALLNYQTMVCDLTGLDVANASLLDEATAAAEAMAMCQRVAKSKATAFFVDANCHPQTIALIETRAAPLGWKVIIGNPFTDLDPVDVFGAIFQYPGTHGHVSDFTGLISRLHQTGAIAAVAADLLALTLLKSPGEMGADIAIGTSQRFGVPVGYGGPHAAYMSVKDAHKRSMPGRLVGVSVDARGNRAYRLSLQTREQHIRREKATSNICTAQVLLAVMASMYGVFHGPQGIKAIAQQTHQKAVLMAKGLEKLGYTIEPETFFDTITVEVGHMQGVILRSAVAEGVNLRKVGATKIGMSLDERTRPATLEAVWRAFGGNFSISDFEPDYRLPKDLLRTSQYMTHPIFHMNRAESEMTRYIRRLSDRDLALDRSMIPLGSCTMKLNATAEMLPITWPEFSDIHPFVPANQALGYKEMIDDLSEKLCSVTGYDAFSMQPNSGAQGEYAGLLTIRNYHLANGGTHRDVCLIPTSAHGTNPASAQMVGMKVVPVKVRDNGDIDIDDFRLKAEQYAENLSCCMITYPSTHGVFEETVREICEITHKHGGQVYLDGANMNAMVGLARPGDIGSDVSHLNLHKTFCIPHGGGGPGMGPIGVKAHLAPFLPGHPTTDGREGAVSAAPFGSPSILPISWSYCLMMGGEGLTQATKVAILNANYIAERLKGAYDVLYKSETGRVAHECIIDTRPLADSCGVTVDDVAKRLIDCGFHAPTMSWPVAGTLMIEPTESETKAEIDRFCDAMLAIREEARDIEEGRADKNNNPLKNAPHTVEDLVGEWDRPYSREKGCFPPGAFRIDKYWSPVNRIDNVYGDRNLICTCPPMEAYAEAAE

SEQ ID NO: 13139 - protein, 328 aa, Cytophaga hutchinsonii
MKKIAVYTSGGDAPGMNACIRAAVRAGHYHNLEVYGIVRGYDGMINGNFIELDNRAVSNIIQKGGTILKSARSEEFRSPEGRRKAFDQIQKFGIDGLVAIGGNGTFTGAELFYNEYQIPCVGAPGTIDNDLYGSDFTIGYDTAVNTCLAAIDKIRDTADAHERVFFIEVMGRDTGYIAVRSAISGGAEMAIIPEFPYDKNVVINRLKHGTSDTKASHIIIVAEGHQEGRASMIARDIKEALPQLDCRVTTLGHVQRGGGPSAADRVLASRLGLATVEGLLEGRANVMAGIIDHKVVYTPFIDTITKRKPINEDLLSLAEKLNGRSYKV

SEQ ID NO: 13140 - protein, 648 aa, Triticum aestivum
  misc_feature (423)..(423): Xaa can be any naturally occurring amino acid
  misc_feature (465)..(465): Xaa can be any naturally occurring amino acid
  misc_feature (535)..(535): Xaa can be any naturally occurring amino acid
  misc_feature (565)..(565): Xaa can be any naturally occurring amino acid
  misc_feature (609)..(609): Xaa can be any naturally occurring amino acid
MAAATSPAVAFSGATAAAMPKPARHPLPRHQPVSRRALPARVVRCCAASPAATSAAPPATALRPWGPSEPRKGADILVEALERCGIVDVFAYPGGASMEIHQALTRSPVITNHLFRHEQGEAFAASGYARASGRVGVCVATSGPGATNLVSALADALLDSIPMVAITGQVPRRMIGTDAFQETPIVEVTRSITKHNYLVLDVEDIPRVIQEAFFLASSGRPGPVLVDIPKDIQQQMAVPIWDTPMSLPGYIARLPKPPSTESLEQVLRLVGESRRPILYVGGGCAASGEELRRFVELTGIPVTTTLMGLGNFPSDDPLSLRMLGMHGTVYANYAVDKADLLLAFGVRFDDRVTGKIEAFASRSKIVHIDIDPAEIGKNKQPHVSICADVKLALQGLNALLNGSKAQQGLDFGPWHKELDQQKXREFPLGFKTFGEAIPPQYAIQVLDELTKGEAIIATGVGQHQXMWAGSVLPLPKRPRQWLSSSGLGAMGFGLPAAAGAAVANPGVTVVDIDGDGSFLMNIQELALIRIENLPXKLMILNHQHLGMVVQWEDRFYKAKRGAHIXLGNPENESGIFPDFGTIAKGFHVPAVRVKKKSEVTAAIKKMLEXPGPYLLDIIVPHQEHVLPMIPSGGAFKDMIMEGDGRTSY

SEQ ID NO: 13141 - protein, 391 aa, Agrobacterium tumefaciens str. C58
MAKSKFERNKPHVNIGTIGHVDHGKTSLTAAITKYFGEFKAYDQIDAAPEEKARGITISTAHVEYETPARHYAHVDCPGHADYVKNMITGAAQMDGAILVCSAADGPMPQTREHILLARQVGVPAIVVFLNKVDQVDDAELLELVELEVRELLSSYDFPGDDIPIIKGSALAALEDSDKKIGEDAIRELMAAVDAYIPTPERPIDQPFLMPIEDVFSISGRGTVVTGRVERGIVKVGEEVEIVGIRPTSKTTVTGVEMFRKLLDQGQAGDNIGALVRGVTRDGVERGQILCKPGSVKPHKKFMAEAYILTKEEGGRHTPFFTNYRPQFYFRTTDVTGIVSLPEGTEMVMPGDNVTVEVELIVPIAMEEKLRFAIREGGRTVGAGIVASIVE

SEQ ID NO: 13142 - protein, 182 aa, Triticum aestivum
  misc_feature (91)..(91): Xaa can be any naturally occurring amino acid
  misc_feature (108)..(108): Xaa can be any naturally occurring amino acid
  misc_feature (160)..(160): Xaa can be any naturally occurring amino acid
MAPTVMASSATSVAPFQGLKSTAGLPVSRRSNGASLGSVSNGGRIRCMQVWPIEGIKKFETLSYLPPLSTEALLKQVDYLIRSKWVPCLEXFNKVGFIFREHNASPGXYYDGRVLGQCGKLPYVPGATDATQVINEVEGGQERSTLDAYVRIIGFNNNAXKVQCVSFIAFKPTGCEGVPEGP

SEQ ID NO: 13143 - protein, 277 aa, Glycine max
MATSIGIMDSAYFVGRNEILSWINNRLQLSLSRIEEAASGAVQCQMMDMTYPGVVPMHKVNFDAKTEYDMIQNYKVLQDVFNKLKIEKHIEVGRLVKGRPLDNLEFLQWLKRYCDSVNGGIMNENYNPVERRIKGGKDRNVKSLKSSKSLQTNTMNHSGSGDSLRSKQLRSSGGADGVNSSAEIQALSKQVSDLKLSVDHLEKERDFYFAKLRDIEILCQASELENDPMSLAIKKILYAADAKGSALDEAQEYLNDVINGGEDEAEAEAEAEVETEA

SEQ ID NO: 13144 - protein, 95 aa, Vibrio vulnificus YJ016
MQINIQGHHVDLTDSMQDYVHSKFDKLERFFDHINSIQVVLKVEKIHQIAEATLHVNQGEIHASSDDENMYAAIDSLVDKLVRQLNKHKEKLHSH

SEQ ID NO: 13145 - protein, 225 aa, Burkholderia xenovorans LB400
MSNLFALSSQQTHRSLTGRVQRALSAMRDGRPVVVVDDLDREDEADLVIAAERITVESMALMIRECSGIVCLCLTGETLQRLQLPPMVERNESRHGTAFTVSIEAKVGVTTGVSAADRVTTVRAAIADHARAEDLARPGHIFPLMARPNGVLERRGHTEGAVDLARMAGLKPAAVLCELMNEDGTMARGAQIVRFAAIHRLPVISIADIAAYRCAQELAVSATAV

SEQ ID NO: 13146 - protein, 547 aa, Pseudomonas aeruginosa UCBPP-PA14
MSELIRVPDIGNGEGEVIELLVKPGDKVEADQSLLTLESDKASMEIPSPKAGVVKSIKAKVGDTLKEGDEILELEVEGGEQPAEAKAEAAPAQPEAPKAEAPAPAPSESKPAAPAAASVQDIKVPDIGSAGKANVIEVMVKAGDTVEADQSLITLESDKASMEIPSPASGVVESVSIKVGDEVGTGDLILKLKVEGAAPAAEEQPAAAPAQAAAPAAEQKPAAAAPAPAKADTPAPVGAPSRDGAKVHAGPAVRMLAREFGVELSEVKASGPKGRILKEDVQVFVKEQLQRAKSGGAGATGGAGIPPIPEVDFSKFGEVEEVAMTRLMQVGAANLHRSWLNVPHVTQFDQSDITDMEAFRVAQKAAAEKAGVKLTVLPILLKACAHLLKELPDFNSSLAPSGKALIRKKYVHIGFAVDTPDGLLVPVIRDVDRKSLLQLAAEAAELADKARNKKLSADAMQGACFTISSLGHIGGTGFTPIVNAPEVAILGVSKATMQPVWDGKAFQPRLMLPLSLSYDHRVINGAAAARFTKRLGELLADIRTLLL

SEQ ID NO: 13147 - protein, 621 aa, Listeria monocytogenes
MCGFVGCVHDRITEITGADKETFRQMNSMITHRGPDDEGYFTDDHVQFGFRRLSIIDVENGHQPLTYENERYWIIFNGEVYNYVELREQLVAEGMTFETESDTEVIIATYAKYKEKTAERLRGMFGFVIWDKQEELVYGARDPFGIKPFFYAEEDDKLFMGSEKKSILHALKEKELDEVSLQNYMTYQFVPEPDSLTKNVKRLEPGHQFTKKIGQPMEITTYWKASFAPVTKSEDAWIKEVRDVMYDSVKMHMRSDVPVGSFLSGGIDSSIIAAIAKEYHPAIKTFSVGFERDGFSEIDVAKETADKLGVENISYVISPEEYMKELPKIVWHMDDPLADPAAIPLYFLSREARKQVTVALSGEGADELFGGYNIYNEPNSLAMFNKMPGVFKSMLNNLARIMPEGMRGKSFLERGTTPMEERYIGNAKMFTEKEKQILLPKYQAGHDYTNITDPFYAETTNYHPVERMQYIDIHTWLRGDILLKADRMTMANSLEVRVPFLDKEVYNVARNIPDTMKTTNGTTKYILRKAAATFVPEHVLNRRKLGFPVPIRHWLKDEMNAWVKNIIKESPTDHLINKQYVLDLLDDHCAGKFDYSRKIWTVVIFMIWYDVYVADKYDFGK

SEQ ID NO: 13148 - protein, 286 aa, Methanococcoides burtonii DSM 6242
MPDTDNTKIIDGRAIAKKVEAEVKADVERLVREKGITPGLSAILVGEDPASKMYVRLKHKACGRVGIFAEDQHLPEDITQEELLEAISSLNARKDIHGILLQLPLPKHLNEQEAMNAIDPAKDADGFHPFNMGQLLIGVEELVPCTPKGIIRALEEYGVEIQGKHAVIVGHSNVVGKPMAAMLVNRNATVSICHVFTKDVTKFTRDADILVVATGVKHLIKEDMVKEGSVIFDVGITEENGKVYGDVDFENVIKKASRVTPVPGGVGPVTIATLMQHVLMSAQKTA

SEQ ID NO: 13149 - protein, 403 aa, Rickettsiella grylli
MSIEVKVPMLPESVTDATIVTWHKKPGETVKRDDNLVDLETDKVVLEVPASADGILGDIIKQTGAVVKAGEILAYLNTEKEVTMKPEQPAHQETKIETEEKTKHDNRAEPVAGPAARRSAAEQNLPLKNITGSGKAGRVTRNDVLQHAHSPRQNPLSSESDARSSLRHADDRLEKRVPMTRLRARIAERLLAAQHHAAILTTFNEINLQNVIALRQRYKESFEKKHGIRLGFMSFFTKAVIEALKLFPAVNASIDGNDIVYHGYFDIGIAVSTDRGLMVPILRDADRLSFADIEKTISNYGRKAKENQIAIEDMTGGTFTITNGGVFGSLLATPIINPPQSAILGMNKIEERPIAEKGQVVIRPMMYVALSYDHRIIDGKESVSFLKTIKERLEDPARLLIDI

SEQ ID NO: 13150 - protein, 289 aa, Rickettsiella grylli
MSILIDKNTKVICQGFTGKQGTFHSEQAIAYGTKMVGGVTPGKGGTQHLGLPVFDTVADAVAKTGADASVIYVPAPFCKDSIIEAADAGISFIVCITEGIPVLDMLDVKVYLETKNIARLVGPNCPGVITPGECKIGIMPGYIHQSGRVGIVSRSGTLTYEAVKQTTDLGLGQSTCVGIGGDPIPGMNFVDVLRLFQEDPQTEAILMVGEIGGNAEEEAAAFIKTKVTKPVVAYIAGVTAPVGKRMGHAGAIISGGKGTAAEKFKALEAAGVYTVKSPTDMGKRIAQLL

SEQ ID NO: 13151 - protein, 640 aa, Corynebacterium glutamicum
MCGLLGILTANGNAEAFVPALERALPCMRHRGPDDAGTWHDADAAFGFNRLSIIDIAHSHQPLRWGPADEPDRYAMTFNGEIYNYVELRKELSDLGYTFNTSGDGEPIVVGFHHWGESVVEHLRGMFGIAIWDTKEKSLFLARDQFGIKPLFYATTEHGTVFSSEKKTILEMAEEMNLDLGLDKRTIEHYVDLQYVPEPDTLHAQISRLESGCTATVRPGGKLEQKRYFKPQFPVQKVVKGKEQDLFDRIAQVLEDSVEKHMRADVTVGSFLSGGIDSTAIAPLAKRHNPDLLTFTTGFEREGYSEVDVAAESAAAIGAEHIVKIVSPEEYANAIPKIMWYLDDPVADPSLVPLYFVAAEARKHVKVVLSGEGADELFGGYTIYKEPLSLAPFEKIPSPLRKGLGKLSKVLPDGMKGKSLLERGSMTMEERYYGNARSFNFEQMQRVIPWAKREWDHREVTAPIYAQSRNFDPVARMQHLDLFTWMRGDILVKADKINMANSLELRVPFLDKEVFKVAETIPYDLKIANGTTKYALRRALEQIVPPHVLHRKKLGFPVPMRHWLAGDELFGWAQDTIKESGTEDIFNKQAVLDMLNEHRDGVSDHSRRLWTVLSFMVWHGIFVENRIDPQIEDRSYPVEL

SEQ ID NO: 13152 - protein, 136 aa, Polaromonas sp. JS666
MRLLHTMLRVGNLQRSIDFYTQVLGMKLLRTSENPEYKYSLAFVGYEGNPAQAEIELTYNWGTESYELGTAYGHIALGVPDAYAACEKIKAAGGNVTREAGPVKGGKTVIAFVTDPDGYKIELIQRAEDGGGAGLR

SEQ ID NO: 13153 - protein, 865 aa, Methanothermobacter thermautotrophicus str. Delta H
MTVLEAALANDIYIPHLCFREGIEPFGGCRLCLVENTDGRLVTACETPVEDGAEFISESERINNIRRTVVSLLISEHSRDCLSCPSSGDCSLQEVSSYLNLTEDDLSRLRQDLPESEPDESNPFFIRNHDKCILCGLCVRVCRATGAEAIDFAYRGHDTRISTFMDRAITESSCVSCGECVEVCPVGALVSREEKPFTEVKTVCPYCGAGCGIYLGVRGDRVVSSRGDPDNPVNRGKLCVKGRFALKFVNSPERLKKPLIKVDGRFVEVEWDEALSTVAERLSEYSGEEFAAVASAKCTNEENYILQKFTRAVMLSGNIDHCARLCHAPSVRSLSMTLGSGAMTNSIAELEDSACILAVGTNPTETHPLTAYSVIRAIRSGAKLVVIDPRRTRISELADIHLQNRPGSDIPLIMAMCRFIIEEGLHDTEFIESRTENFDEFRDAVMALDLEEVESLTGVGVEDMRRAAITYASKKPASIIYSMGITQHAHGTDNVIALSNLALLTGNLGKPSAGINPLRGQNNVQGACDMGALPDLLPGYQTLDDSFRFSDKWGSTIPGPGMTLPEMFDAALEGRLRAMYIMGENPLLSEPETEKTRKALESLDFLVVQDIFMTETAELADVVLPACAWAEKDGTFTNTERRVQLIRKALDAPGEARTDWEIICMLAEKMGAEGFDYASSSEIFKEIAALVPSYAGISHERLQDGGIQWPCTSYEHGGTQYLHSERFSTPTGRASFLLPGYHVGEVSEEYPMVLVTGRNLYQYHTRSMTGRVPELDSFSDREELLINPLDAAKLGVEDGGTVLVKSEGGSLEVRARVSGDVMEGVVFMTFHFAETPANVLTGGDRDPVSGMPELKFTPVSIRPVE

SEQ ID NO: 13154 - protein, 291 aa, Oryza sativa (japonica cultivar-group)
MASGSEAEKSPEVVLEWPKKDKKRVLHAVYRVGDLDRTIKCYTECFGMKLLRKRDVPEEKYTNAFLGFGPEDTNFALELTYNYGVDKYDIGAGFGHFAIATEDVYKLAEKIKSSCCCKITREPGPVKGGSTVIAFAQDPDGYMFELIQRGPTPEPLCQVMLRVGDLDRSIKFYEKALGMKLLRKKDVPDYKYTIAMLGYADEDKTTVIELTYNYGVTEYTKGNAYAQVAIGTEDVYKSAEAVELVTKELGGKILRQPGPLPGLNTKIASFLDPDGWKVVLVDNADFLKELQ

SEQ ID NO: 13155 - protein, 528 aa, Lycopersicon esculentum
SDAIRILREIKLLRLLRHPDIVDIKRIMLPPSKRDFKDIYVVFELMESDLHHVIKANDDLSHEHHRFFLYQMLRALKYMHTANVYHRDLKPKNILANANCKLKVCDLGLARVSFSDTPTTALWTDYVATRWYRAPELCGSFFSKYTPAIDIWSIGCIFAEVLTGKPLFPGKSVVHQLHLMTDPLGTPSADSKSGVRNEKARKYLTSMRKKNPVPFTEKFPGADPLVLRLLQRLLAFDPKDRPTAEEALSDPYFKGLAKIEREPSCRPISNLEFEFERRRVTKEDIKELIFREILEYHPQLQKDYIAGNDGTNFLYPSATDQFRRQFAYLEENNDKSGPVIPLGREHVSLPRSAVNSSTDPPKLAEFSGFDHTQVTEKSSTDVRVAEKTSGTIQNISRPPHGVHAAKPGRVVGPILPYDGRMLTQNTGLLPHGISPHYMFRMNPGNREKCGTESKDATQVRPLPAQCNMSVEMNTNPYYPAQEKVAQLGGQIAIDAKLLQAQTKFGAVGAAAVAVAAHREVGTIQYSLT

SEQ ID NO: 13156 - protein, 406 aa, Arabidopsis thaliana
MSSIIHGAGAATTTLSTFNSVDSKKLFVAPSRTNLSVRSQRYIVAGSDASKKSFGSGLRVRHSQKLIPNAVATKEADTSASTGHELLLFEALQEGLEEEMDRDPHVCVMGEDVGHYGGSYKVTKGLADKFGDLRVLDTPICENAFTGMGIGAAMTGLRPVIEGMNMGFLLLAFNQISNNCGMLHYTSGGQFTIPVVIRGPGGVGRQLGAEHSQRLESYFQSIPGIQMVACSTPYNAKGLMKAAIRSENPVILFEHVLLYNLKEKIPDEDYVCNLEEAEMVRPGEHITILTYSRMRYHVMQAAKTLVNKGYDPEVIDIRSLKPFDLHTIGNSVKKTHRVLIVEECMRTGGIGASLTAAINENFHDYLDAPVMCLSSQDVPTPYAGTLEEWTVVQPAQIVTAVEQLCQ

SEQ ID NO: 13157 - protein, 499 aa, Legionella pneumophila str. Paris
MGYNVPHYIGGQLINETDTEAQAIYNPALGEIIGQVHFASKATCDRAVAIAKAAGNEWSQTPAIKRARVLFRFRELLEKYQMDLARIVTREHGKTLDDAKGSVARGIEVVELHCGLVNELKGDFSAEVASHIDCHTFRQPLGVCAGVSPFNFPVMVPIWMMIPAIACGNTFILKPSEQDPSAPVRLLELLSDAGLPPGVANCIQGNKTTVEHLLAHPDVAAFTAVASTPVAEYIYTTAAAYGKRAHTFGGAKNHCVVMPDADLDQAANAIVGAAYGSAGERCMALSVVVTVGQHTADALINKISPLIRAIRVDAGDVEGTDMGPLVSQAHRQRVLAAIEKGVNEGARLIIDGRTFQHPQYPQGFYLGPCLFDEVTEEMSVYQNEIFGPVLVIVRVNHFEEALALVNKHQYGNGTAIFTRDGFTAREYSQRVQAGLVGINIPIPVPIANHPFGGWKRSVFGDTNMHGEESIHFYTRRKTVTSKWPITELKDSSFAMPTHD

SEQ ID NO: 13158 - protein, 157 aa, Oceanobacillus iheyensis HTE831
MSIYEYQVEKSNGEEISLSQYQDNVLLIVNTATKCGFANQFEGLEELHQKYQDEGLRVLGFPSNQFNEQEPVDDENMEEACKVNFGVTFPLFKKIDVKGPNAAPLFKYLTEEQKGLLGSNVKWNFTKFLVDRNGNVVKRFAPKDKPAKIEDDIKALL

SEQ ID NO: 13159 - protein, 104 aa, Bdellovibrio bacteriovorus HD100
MGKKIYVGNLSYNVDQDQLGGLFADFGTVDSVNIITDRDTGRSKGFAFVEMSSDSEATAAIDKLNGMDLGGRAMNISEAKPQEPRSGGGPRRNGGGFGGSRRSY

SEQ ID NO: 13160 - protein, 515 aa, Methanocaldococcus jannaschii
MCGINGIIRFGKEVIKEEINKMNKAIKHRGPDDEGIFIYNFKNYSIGLGHVRLAILDLSEKGHQPMGYNVDEDKIIYRDDELDRADIIIVYNGEIYNYLELKEKFNLETETGTDTEVILKLYNKLGFDCVKEFNGMWAFCIFDKKKGLIFCSRDRLGVKPFYYYWDGNEFIFSSELKGILAVKEINKKENINKDAVELYFALGFIPSPYSIYKNTFKLEARQNLIFDLDKREIRKYYYWELPDYKPIYDKKKLIEEGKKLLYDAVKIRMRSDVPVGAFLSGGLDSSTVVGVMREFTDLSKLHTFSIGFEGKYDETPYIKIVVDYFKTQHHHYYFKERDFEELIDKYSWIYDEPFGDYSGFPTYKVSEMARKFVTVVLSGDGGDEVFGGYMTHLNGYRMDFIRKLPKFLRVVGSKLPVKKDLNGIANLYLLKEAFRLSLINPEEFYAESIKEDAIRPEIYKKWTIEKLRYCLNKGDNKLGEALRIFDLLFNTLCDNFLVKVDRASMLTLWKLEVHF

SEQ ID NO: 13161 - protein, 1222 aa, Cytophaga hutchinsonii
MSQEHESSFQDPSRDELIQQVKELQIINANQRPEKILQEAFEKINLLVITIDQDGLIVYANEAFLEVIGWEKQRLLGENWKEFLEPGKDKNKEEHIYTLIKKQGFIDQLKRKFLSKEGDYRTIKFNVVIHHPIGNDVHLTTLIGEDITDKKKVIRALKDSNDQLQDLFENANDLIQVFDLDGKIQFVNRAWKDILQYSDEEILKLNFRDIIAKEQVGVTMEHLNNILAGKKDDKFETVFTSKNGRNIQVICSVNVRYEKEKPVSFRGIFHDNTEHMRAERAQNLYYKISTLAINSDRLDSLLDNIHKELRTIIAVNNFHVALYDRDHNYLNFPYYVDENIGPKPISMKRIVGKGLTEYSLFNEEPTFLYEEDINKLSEAGAIELLGPTPKIWLGVPLRLENRTIGVICVKSHSDRNKYKRRHVELLDFISGQIALVIERKRNEEQIIDKTARLNAIFESSSHLIWSVNRKRGLTSFNQNYANAIFRKYQKYPTIYDEGVTKEVLVLSDPEFHDSIDKKYKDAFNGQPQHFEACNTNQNGEIFWRETYLNPIFLPDGRIDEVSGISHDITEKKQWEITIQESEEKFRNIFESFQDIYYRTDLSGYITMISPSGCELSGYTQEEIIGKHISEFFTTPKQQVNLIREVLKTGRVKNYETNVNIKGGESIQSISNIRLIYNNEGKPIGVDGVARDITFLKKASQELYHAKEIAEKSLKVKENFLANMSHEIRTPMNGVIGMIDLLNETPLMEEQRKYVQTIKKSSETLLNILNDILDLSKIEAGKMQLRLAPISIEQTVEKLHALFYQQATLKNIDLLYSIDSNVPKVVLADETRLLQILSNLTSNAIKFTDQGSVRIQISLQSKKDLVNKIRVNISDTGIGIAQDKLNVLFGYFNQVDNSSSKSYGGTGLGLAISKELSKLMNGEIGVQTEANKGSVFWFTFEANESKRLVEAKVETPNAFSSEKTFKDYPKILLVDDNAINLFVASEILRKAGCEIDTAGNGLEAIQKVKENPYRMVLMDIQMPQMDGIEATAEIRKLNLAYTPPIIAMTAYSMKEDKDRFMVNGMDDYIAKPIKAESLISKVKAWLDSNAAKNGHTATQTSDETAVEIPILDLEVFEKLKSLSGAEIIDQIYKEFENESLEQIVDCKNSLAMGDFHNILNKLHTLKGVSGTLGLIELESISRLVESKLKKGDYPELAVDIEKLSEAHNRFIEHYTFILNSNSK

SEQ ID NO: 13162 - protein, 673 aa, Thermobifida fusca YX
MEERVHVYPFSAIVGSDDLVLALILTGISPDIGGVLIRGEKGTAKSTAVRAQAALLPPITVVTDCRFSCDPAAPDPDCPDGPHPPSVASATRPVRLVELPVGAGEDRVVGSLHLEKALSGSGVEYEPGLLARANRGILYVDEVNLLHDHLVDLLLDAAAMGRATVERDGVSLSHAARFTLVGTMNPEEGELRPQLLDRFGLSVEVAAPRDPAVRAEIIRRRLAFDADPAGFTSAYATAEQQLAERIADARLRLPKVVLGQEALLAIAEVCAAFDVDGMRADLVCARAAVAHAAWCGRTDVTRADVRAAARLALPHRRRRTPFDSPGMDEGLLDEILGEDHDPDPGPDGSGGPGGPPSDSGSDTPPPTAGSTPDPPASGLGSPTSSNDDPRPDAPAPVSVTAPEEPYRPRLFTVAGTGKGTLGRRSRAITTSGRTVGDVPAGRGTGPIHLAATVRTAALRHATSRSSPDTTRLSIALSDLRRSLCEGKESNLVLLCVDASGSMAARRRMSQVKTAVLALLLDAYRRRDRVGLITFRNHEATLTLPPTGSVDVAAARLRELPAGGRTPLAEGLLKAAETLRRERLRDPDRRALLVVVTDGRATAGPKAVERSLHAADHLAREGVSALVIDSETGRFRMGLAAALARRMGAEYVHVGEVSAEAITSAVAGATTRAA

SEQ ID NO: 13163 - protein, 182 aa, Bdellovibrio bacteriovorus HD100
MSTLNHIEFNTADGKKATLADYSGKVLLVVNVASECGLTPQYEGLEKIHQKYESQGLRVLAFPANEFGAQEPGSNEQIQEFCRTQFGVKFPVFAKMVVKGEGQHPLYQQLTTLQPAAQQVPGGKLKSVLEEHGLLSGGPSDIMWNFEKFLIGKSGNVVARFAPDMTPEDPTIVKAIEAELAR

SEQ ID NO: 13164 - protein, 487 aa, Salmonella enterica subsp. enterica serovar Dublin
MKKINHWINGQNVAGDDYFQTTNPATGDVLAEVASGGEAKLNQAVAAAKEAFPKWANLPMKKRARLMRRLGDLIDQNVPEIAAMETADTGLPIHQTKNVLIPRASHKFEFFAEVCQQMNGKTYPVDDKMLNYTLVQPVGVCALVSPWNVPFMTATWKVAPCLALGNTAVLKMSELSPLTADRLGELALEAGIPAGVLNVVQGYGATAGDALVRHHDVRGVSFTGGTATGRNIMKNAGLKKYSMELGGNSPVLIFEDAEIERALEAALFTIFLINGERCTAGLSIFIQQSIYPEFVKRFAERANRLRVGDPTDPNTQVGALISQQHWEKVSGYIRLGIEEGATLLAGGAEKPTDLPAHLKGGNFLRPTVLADVDNRMRVQEEIFGPVACLLPFKDEAEGLRLANDVEYGLASYIWTQDVSKVLRLARAIEAGMVFVNTQNVRDLRQPFGGVKASGTGREGGEYSFEVFAEMKNVCISMGDHPIPKWGV

SEQ ID NO: 13165 - protein, 433 aa, Candidatus Protochlamydia amoebophila UWE25
MPFTLTMPKLSPTMEEGTLIKWHKKIGDSIQTGDLLIEVATDKATVEYNAIDDGWLRQILIQEGKDAAVNQAIAILTVDQNESLEGYQADGVKEKALQLSSDSIEMPELNYKEKKEPKSKTTAFQQPVFVPEFPLENYTFEFPIERGDKKLLASPLAKKLAKEKGLDLTTVKGTGPQQRIISRDLDKAQAAGVVNFGHRETPQLPPGSYEELSLTPMRKVIGQRLQESKSFIPHFYVTLTIDASPLTQIREQLKNNQVKVSINDFIVRACALALRQNPGLNCGFNSANQSIIQFKTIDIAVAVSLEEGLITPIIRHADFKNLGELSVEMRVLAQKAREGKLEPQEYKGGSFTISNLGMFGVSEFQAILNPPQAAILAVSGILDVPVIQNNMVIPGKTMNLTLSVDHRVIDGVAAAKFLQSLKQLLENPAGLLL

SEQ ID NO: 13166 - protein, 234 aa, uncultured proteobacterium
MPLANYQQRRAQIEHYFDRTAADVWARLTSDEPVSGIRETVRAGRESMRSTLLSWLPDDLSGKKVLDAGCGTGVISIELAKRGAHVVAVDLSESLISLANQRYSDLDEYGRIQFVVGDMRQLEGEQFDHVLAMDSIIHYAAKDGLKTLETLASTVNASMVFTFAPKTIPLAAMHAIGKLFPRSDRAPAIEPIAPHNLRRSITTSEALLDWQVSRERRVSTGFYTSQAMELVKRC

SEQ ID NO: 13167 - protein, 272 aa, Agrobacterium tumefaciens str. C58
MTPPLTSALFPGHVTHARFKPKTHKLAYRIYSLLLDLDELEMLDRNLRFFSVDRFNLFSFHRRDRGDGSAIGLRRQIETAMTAAGIAVDGGPIRLLTMPRLLGWAFNPLSVFFCYGRDMSLKAILWEVDNTFGQRHSYLIPVEIGKETEIVQRCDKAFYVSPFMDMDLRYVFRVVPPGDRLKIVIETFDDDGIVLTARHLGRRVELTDGALLKAFATIPFLTLKVVLGIHWEALKIWLKGVRLKKRPLPPAEPVSFVHPSSSQIEARIHDPV

SEQ ID NO: 13168 - protein, 330 aa, Candidatus Protochlamydia amoebophila UWE25
MSTEKQTIDIREALRQAINEEMARDSSVFVMGEEVGEYNGAYKITKGMLDKWGANRIIDTPISELGFAGLCIGAAMTGLRPIVEFMSFNFSFVAADQLISNAIKMYYMSGNRFSVPIVFRGPNGAAAQVSSQHSHCVEAIYGNLPGWTIIAPSNAYDAKGLLKSAIRDNNPVLFLESELSYGDKMEIPVDEYLIPIGKAQIVVPGADVTLIAHSRMVTICKEVVNELTKMGICAELIDLRTVKPLDIATIANSVKKTNRCVIVEEGHLFAGIAAEVGFQIMEHCFDYLDAPLERVCQRETPMPYSKVLEKETMPNKQRILSAIYKTLQKN

SEQ ID NO: 13169 - protein, 348 aa, Acinetobacter sp. ADP1
MSLYLNRIPAMSNHQVALQFEDGVTRFIRIAQGETLSDAAYRQQINIPMDCREGACGTCRAFCESGNYDMPEDNYIEDALTPEEAQQGYVLACQCRPTSDAVFQIQASSEVCKTKIHHFEGTLARVENLSDSTITFDIQLDDGQPDIHFLAGQYVNVTLPGTTETRSYSFSSQPGNRLTGFVVRNVPQGKMSEYLSVQAKAGDKMSFTGPFGSFYLRDVKRPVLMLAGGTGIAPFLSMLQVLEQKGSEHPVRLVFGVTQDCDLVALEQLDALQQKLPWFEYRTVVAHAESQHERKGYVTGHIEYDWLNGGEVDVYLCGPVPMVEAVRSWLDTQGIQPANFLFEKFSAN

SEQ ID NO: 13170 - protein, 496 aa, Thlaspi arvense
MDLLYIVAALVIFASLLIAKSKRKPKKNLPPGPPRLPIIGNLHQLGEKPHRAMVELSKTYGPLMSLKLGSVTTVVATSVETVRDVLKTYDLECCSRPYMTYPARITYNLKDLVFSPYDKYWRQVRKLTVVELYTAKRVQSFRHIREEEVASFVRFNKQAASSEETVNLSQKILKMSGSVICRIGFGINLEGSKLENTYQEIIVQAFEVLGSLAAVDYFPVIGTIIDRITGLHAKCEKVFHGIDSFFDQAIQRHIDDPSIKDDIIDLLLKMERGEGSLGEYELTREHTKGILMNILTAGIDTSAQTMTWAMTHLLANPRVMKKLQAEIREKIKNIDEITDDDVEQLDYFKLVLKETFRISPIVPVLVPRVAAKDLKIAGYDVPEKTWIHVNMWAVHMSPSIWKDPETFNPERFIDNQTDFKGLNFELLPFGSGRRMCPGMGMGLAVVHLTLINLLYRFDWKLPNGMKAEELSIEENYGLICVKKLPLEAIPVLTQWT

SEQ ID NO: 13171 - protein, 506 aa, Bifidobacterium adolescentis
MSEWRQRTVAENQASNAAADVEMSQYVADRTRVNEDKIKQDDEIIEQFGDYNYGWHDTDFAGEAAKKGIDENVVRAISADKHEPEWMLEKRLEGYRDFINRPMPQWGVDLKDFDADDFKYYVKPIDKQATTWEELPDEIRSTYDKLGIPEAEKSRLVSGVAAQYESEVIYNSIQKDLEEQGVIFVDTDTAVQKYPELVKKYFGKCIPSNDNKFSALNTAAWSGGSFVYVPKGVHVDIPLQAYFRINTPNMGQFERTLIIADEGSYVHYVEGCTAPIYSTDSLHSGVVEIFVEPHARVRYTTVQNWSNNVYNLVTQRAYVREGGTMEWVDGNIGSKATMKYPACILAEPYAKASTMSLGFAGKGQYQDTGAKMIHLAPHTSSTIVAKSISRGGGRSAYRGLVKIVKGAEGSSNSTVCDALLVDEFSRSDTYPHVDVREDNVSMAHEATVSKVSEDQLFYLMSRGLSEDEAMGMIVRGFVEPISRELPMEYALELNRLVELQMEGSVG

SEQ ID NO: 13172 - protein, 943 aa, Actinomyces naeslundii
MSRTTRALSALTAFCLLAAASTLASMPAAASGQARPVSAAPNAPAAPTAPKADQTGERWRPQSHYTPQKNWMNDPNGLVYYDGEYHMFYQYNPEGSDWGNMSWGHAVSKDLVHWQELGVAIPHTSQYGVFSGSAVIDTKNTSGLGSPDNPAMVAVWTRADVGGNQSQSLAYSTDKGGTWNLYNNGDPVLDIGSNEFRDPKVFWDQASGRWTMVVSHATEHRVSFYSSPDLIHWTEQSSFGGEGITSAVWACPDFFPLPVDGSSQEVKWVLVVTVADSAQYFVGSWDGTTFTPDEIPHYSGEEGTTLADFENGYAGWKADGAAFGSGPATGDLPGHQGKAYVDSFGSGDADTGTLTSDEFTVSSSYINLRTAGGKHPYNPQATGDNGGGRLLAGFDGSWEGWTVEGSAFAATPPQGATPAQQPLVNHSSAGLLNTYLDAATGQGSDAPTGTATSPTFTIDSAYLNLLMGGGNNPRPEGGADGGSRVSVVELIVDGKVVRSATGRNLEELNWQSWDVSDLKGKSAQIVVTDTATGGWGHILLDEVRASDKKASPIADNTSVNLVVDGKVVASATGNNSGTLEWTSMNVAAYKGRKARLVIEDRNGNAEDWGHLMVDQILQSDTKAFSGADVVPRLDYGKDYYAAVTWDNVPNGKRYQVGWMSNWAYVRDLPTTTWRTAMSTVREMGLTRVNGKLRLTAQPVTALESLRTGQELIRKDTDIPVGETSLGKAAQGTSLDISVDLSPSASSFAGLKVLDNGEQYTLIGYDSQAKQLVVDRTHSGVTDFSPKFPARSTAPLSPDSKGQVHLRIIVDAHSVEVFAADGTPVITQTVYPEQDATGVSLYAEGGTAHLGSLSLWHLGSVQDAGAPAEGPDSPGAGKPAVQGPARGQAKAASASASPTAAAAGKSVSARFPLARTGTSLTLGALGAAAAATGAYSLRLPRRRS

SEQ ID NO: 13173 - protein, 283 aa, Brassica napus
MAENADLVEWPKKDKRRFLHVVYRVGDLDRTIQFYTECFGMKVLRKRDVPEEKYSNAFLGFGPETSNFVVELTYNYGVSSYDIGTGFGHFAISTQDVSKMVEAVRAKGGNVTREPGPVKGGGSVIAFVKDPDGYTFELIQRGPTPEPLCQVMLRVGDLDRAIKFYEKALGMRLLRRIERPEYKYTIGMMGYAEEYESIVLELTYNYGVTEYTKGNAYAQIAIGTDDVYKSAEVVKIANQELGGKITREAGPLPGLGTKIVSFLDPDGWKTVLVDNEDFLKELE

SEQ ID NO: 13174 - protein, 243 aa, Azotobacter vinelandii
IPPIPPVDFAKYGEIEEVPMTRLMQIGATNLHRSWLNVPHVTQFESADITELEAFRVAQKAVAKKAGVKLTVLPLLLKACAYLLKELPDFNSSLAPSGQALIRKKYVHIGFAVDTPDGLLVPVIRNVDQKSLLQLAAEAAELAEKARSKKLGADAMQGACFTISSLGHIGGTAFTPIVNAPEVAILGVSKASMQPVWDGKAFQPRLMLPLSLSYDHRVINGAAAARFTKRLGDLLADIRAILL

SEQ ID NO: 13175 - protein, 85 aa, Petunia inflata
MSDQRNERPLPRFGEWDVNNPAAAREFSVIFDRARNAKKDVNNDSPWKNKERETTPFTVKSDPQLRKSSSKQKWLCCGHPSYAES

SEQ ID NO: 13176 - protein, 356 aa, Magnaporthe grisea
MSRANPPSNSSGSRKISFNVSEQYDIQDVVGEGAYGVVCSAIHKPSGQKVAIKKITPFDHSMFCLRTLREMKLLRYFNHENIISILDIQKPRSYETFNEVYLIQELMETDMHRVIRTQDLSDDHCQYFIYQTLRALKAMHSANVLHRDLKPSNLLLNANCDLKVCDFGLARSAASQENNSGFMTEYVATRWYRAPEIMLTFKEYTKAIDVWSVGCILAEMLSGKPLFPGKDYHHQLTLILDVLGTPTMEDYYGIKSRRAREYIRSLPFKKKVPFRTLFPKTSDLALDLLEKLLAFNPVKRITVEEALKHPYLEPYHDPDDEPTAPPIPEEFFDFDKHKDNLSKEQLKQFIYQEIMR

SEQ ID NO: 13177 - protein, 490 aa, Trichodesmium erythraeum IMS101
MVTATKPEQKVKIGPTKLLINNEWVESASGKRFETINPATGEVICNVAEADAPDVDKAVIAARKAFTSGEWPKISAAKRGELLYKLADLIEKNIEELARLETLDNGKPFKDSLNTDLPLAIACYRYYAGWADKVQGKTIPISGPYFCYTRHEPVGVVGQIIPWNFPLLMQAWKLAPALAMGNTLVMKTAEQTPLSALRVGELVIEAGFPPGVVNILSGYGPTAGAAISHHKDIDKVAFTGSTEVGRLIMEAAAKSNLKRVTLELGGKSPNIVFADADMDAAIEGSHFALFFNQGQCCCAGSRLFVEEKCYDEFVNKSVERAKLRMVGDPFTERVEQGPQVDEEQFNKVMSYIESGQQDGAQMLCGGSRVGDRGYFIAPTVFADVQDNMKIAQEEIFGPVMSIIKFKDIDELVERANNSMYGLAAGVWTQDVTKAHTLAHRLRAGTVWVNCYDVFDAAAPFGGFKQSGLGRELGEYGLQQYTEIKTVTMKM

SEQ ID NO: 13178 - protein, 145 aa, Azoarcus sp. EbN1
MTETLTIACPHCHVLNRLPGGRLSDDPNCGKCHQALFTSHPVELDAASFDVHAGHGDLPLLVDFWASWCGPCRTMAPAFEEAAAKLEPHVRLGKVNTEEAQDLAARYAIRSIPTMVLFRAGREVARQSGAMNTGQILQWAKAQGL

SEQ ID NO: 13179 - protein, 650 aa, Daucus carota
MEHPITISHYTPLPDGEHSPSLTTTNTAEQSSRRRSLTFVLLFSSILAACLVMGTMVLFPNSGNEAVEKSTVVPEETVEVAPRGVAEGVSMKSFRRPALNAEPPANFPWNSNVLSWQRSSFHFQPNQNWMNDPNGPLFYKGWYHLFYQYNPDGAIWGNKIVWGHAVSSDLIHWKHLPVAMVTDHWYDVNGVWTGSATILPDGQIVMLYTGSTNESVQVQNLAYPADPSDPLLIEWVKYPGNPVLVPPPGIDFKDFRDPTTAWRTPEGKWRLIIGSKLNKTGISLVYDTVDFKNFTLLDGVLHAVHGTGMWECVDFYPVSKFGENGLDTSFDGVGVKHVMKASLDDDRNDYYAIGTYDPVSGKWVPDNPELDVGIGLRYDYGIYYASKTFYDSNKKRRVLWSWIKETDSEISDVRKGWASVQGIPRTILFDPKTGSNLLQWPVEEVNKLRLNKTVFENVEINTGAVLPLEIGSGSQLDITAEFEVDKESLERVQETNEVYDCKNNGGSSGRGALGPFGLLILADKDLSEQTPVYFYIAKGSGGNLRTFFCADHSRSSKAVDVDKEIYGSVVPVLRGEKLTMRILVDHSIVESFSQGGRTCITSRVYPTKAIYNNAKVFLFNNATEARIIASLNIWQMNTAQRQTHFADLVI

SEQ ID NO: 13180 - protein, 350 aa, Burkholderia thailandensis E264
MPKRTARHRIDRAPCGVRSRVAASGRHVFFLLPRSPEMPEIVTITPNPAVDVATAVERVTDTRKLRCGPARRDPGGGGINVARVLTRLGADCSAVYLAGGGTGLALHRLLADEGVRARCVDIAGETRENFSVLETSTGREFRFVLPGPALAPHEWPRCVDALARLADASRYLVMSGSLPPGMPDDCYGRLVRIARARGVRTAVDTSGPALAAALDAGVYLVKPSLGELRALTGLPLEDDGARLAAARAIVGSGRAQIVALTLGDAGALVVSRDDAVRLPGVKVAVRSAIGAGDSFVAGLVAALDRGAGIADASRYALATASASLLSEGTALCTKEDVERIYRELPGMAGA

SEQ ID NO: 13181 - protein, 661 aa, Daucus carota
MDTYHFLPSRDLEHASSYTPRPDSPETRHEPDPDRSKTNRRPIKIVSSVLLSTLILSFVIFLLVNPNVQQVVRKKVSKNSNGEDRNKASKSPEMLGPPSRGVSQGVSEKSFRQATAEPSYPWTNDMLSWQRTSFHFQPQENWMNDPNGPLFHMGWYHLFYQYNPDSAIWGNITWGHAISRDLINWLHLPFAMQPDQWYDINGVWTGSATVLPDGKIVMLYTGDTDDLVQVQNLAYPANLSDPLLLDWIKYPDNPVMFPPPGIGSTDFRDPTTAWIGRDGKWRITIGSKVNKTGISLMYKTTDFITYELLDNLLHAVPGTGMWECVDFYPVSVTGSNGLDTSVNGPGVKHVLKSSLDDDRHDYYALGTYDPINDKWTPDNPELDVGIGLRLDYGKYYASKTFYDQDKERRLLWGWIGETDSESADLLKGWASVQSIPRTVVFDKKTGTNILQWPVKEVESLRSRSYEIDDVELKPGSLVPLKISSAAQLDIVASFEVDEEAFKGTYEADASYNCTASEGAAGRGILGPFGILVLADDPLSELTPVYFYIAKGVDGNAKTYFCADQSRSSTASDVDKEVYGSDVPVLHGESLSMRLLVDHSIVESFAQGGRTVITSRVYPTRAIYSAARVFLFNNATGVSVTASVKAWQMASATLKPFPFDQL

SEQ ID NO: 13182 - protein, 570 aa, Daucus carota
MDTKIIVPPCSPLLEKAETEKTSVVLRRSIKGLCSLLLVSTLLVLLFVQQGPRITRNGEDDLNLKSLEQAWRWVSKEITLDVSGERVKAYPWTNDMLSWQRTSYHFQPQKNWMNDPNGPLFHMGWYHFFYQYNPNSAVWGNITWGHAVSKDLINWFHLPIAMVPDNWYDIAGVWTGSATILPDGQIIMLYTGKTANLTEVQNLAYPANLSDPLLLEWVKHPGNPVMVPPPGIGFKDFRDPTTAWLGLDGMWRITIGSKVNNNGLSLVYKTANFTEFELLDELLHEVPGSGMWECIDFYPVSLASTDGLDTSANGAGVKHVLKASLDQYMQDYYAIGTYDPMSDKWTPDDPKADVGLGLRVDDGQFYASKTFYDQNKKRRIIWAWVGESDSESTDVLKGWASLQAIPRTIVFDKETGTNILQWPVEEVESLRSVSYDFDKLKLGPGSVLPLNIAQPHRFVTIFYVIRLSCNDFTVVFWKVQQHRFMIICCLQLDIVATFEIDEEALQSTVEANEDYNCSSSGGGASRGVLGPFGILVLADEPLSELTPVYFYVSKGTDGIAKTHFCADQSR

SEQ ID NO: 13183 - protein, 302 aa, Deinococcus radiodurans R1
MGGVFQDSPSLDSLFFPQPLPSAAKSCHHAGMTYSDDDLRLDEMEFENITIDQHGPIAVLTVNRPKALNALNGTTLSELAMAADLIANDPEVGALIVTGAGDKAFVAGADISELAGLEGPFAGRDMSLLGQDAMTQLSNLPIPVIAAIGGYALGGGLELALCCDIRIASPRARMGLPEVTLGLLPGFAGTQRLPRLIGAGRALDLMLTARQIGAEEALSMGLVNYVADDPLQKAREVAEQIVKNGPLAISLVKEAVRRGLATDLEAGMEIEADLFGLAFATSDFKEGTKAFLEKRPAEFKGE

SEQ ID NO: 13184 - protein, 115 aa, Hordeum vulgare subsp. vulgare
MARSAATQLVLVAMVAAMLLVAADAAISCGQVSSALRPCISYASGNGGILPPACCSGVKRLAGAAQSTADKQAVCKCIKSAAAGLNAGKAAGIPSKCGVSVPYSISTSVDCSKIH

SEQ ID NO: 13185 - protein, 472 aa, Bacillus clausii KSM-K16
MNHALFINNECVATDDMIEVENPATKEVIGTVANGGKQEALAAVDAAAAALPEWRAKTAAERGAYLQKWYELIQREEEEIAKLMTLEQGKPFAEALGEVRYANSFLSWYAEEGKRVYGETVPAAATNKRIFVQKQAIGVIAAITPWNFPAAMLTRKLGPALAAGCTAVMKPSELTPFTAYRIVELAKVAGIPKGVVNMITGDAQQIGETWMADERVRKVSFTGSTRVGKLLMRQAADTVKKLSLELGGHAPFIVTAQADIQKAVDGLIASKYRNGGQTCVCANRIYVHESIKAPFVEAFAAEMKKLKVGNGMEPDSHIGPLINEAAVAKVQKHIEDAQAKGGEVIFGQEADATNGYFQTPALIANATDDMLCMKEETFGPLAPIATYTSTEDVIERANHSPYGLAAYVYSNDLSEAVTIAERLEYGIVGLNDGLPSVAQAPFGGMKESGLGREGGHWGIEEYVEVKYISLQL

SEQ ID NO: 13186 - protein, 411 aa, Pseudomonas sp. JR1
MIKSIVIIGAGLAGATATRYLRAQGYQGKIHLVGEELHVAYDRPSLSKVALSGKVVEPPAILDPCWYASADIDLHLGVRVTGIDVVNHQVLFESGDILAYDRLLLATGARARRMAITGSELAGIHTLRDRADSQALRQALEPGQSLVIVGGGLIGCEVATTAINAGAHVTVLEAGDELLLRVLGRSTGAWCRNELERLGVRVELNAQAAHFEGEGHVHAVVCADGRRIAAGTVLVSIGVEPADELARAAGFACERGVVVDATGASSCPAVFAAGDVAAWPLRSGELRSLETYLNSHMQAETAAAAMLGKSIPALQVPTSWTEIAGHRIQMVGDIEGPGEVVLRGNVENGQPLVQFRVLDGRVEAATAINAPKDFSVATRLVADHIPVSATKLQDASSNLRDFMKAKAERCE

SEQ ID NO: 13187 - protein, 412 aa, Rhodococcus sp. M5
MTAAIAVIGNGVAGVSAAQTLRLEGFDGRLFLIGEEEHEPYDRTALSKAVLAGETAEPPPLMTSEQLEALDVESITGRTVVGVDSAAGTLRFADGGTLASDRLLLVTGARARVPRVPGVALSGVHTLRTSGDVKALRQAWRPGAHVVIVGGGLIGCEVATTARKVGLEVTLLEAGSELLTRVLGRQVGAWCRQRLEGLGVEVRLNTAVAEFVGRDYVSAVMTSDGNRFDVDSVLVCVGAEPNTVLAQSLGLKCDRGIVVDAAGSTDHPTIFAAGDAASWPLRSGGRRSLETYLNSQKQASAVVAAMLDRSIPAPQVPLSWTEVAGHHLQMIGDIEGPGEFVARGRIDDGPGSVFRLLGGEVVAAVAIDSPRDFAVVTRLVESRAVVSAHALGDGSSHLRDLLKGRSSPRAHI

SEQ ID NO: 13188 - protein, 357 aa, Synechococcus sp. WH 8102
MAQHRVVLLPGDGIGPEITAVARQLLEAVSQRHGFELCFDGQLIGGSAIDACGEPLPASTLDACKAADAVLLAAIGSPRFDNLPRDKRPETGLLGLRSGMALFANLRPVKIVPALIGASSLRPEVIEGVDLMVVRELTGGIYFGQPKGRIQADGEERGFNTMTYSSSEVDRIARVAFDLARERRGNLCSVDKANVLDVSQLWRDRVDAMAPAYSDVEVSHMYVDNAAMQLVRSPRQFDVLLTGNLFGDILSDEAAMLTGSIGMLPSASLGSDCPGLFEPVHGSAPDIAGQDKANPMAMVLSAAMMLRIGLKQTEAAADLEAAVDKVLAAGFRTGDLMAEGCTALGCRAMGDALLKAL

SEQ ID NO: 13189 - protein, 746 aa, Porphyromonas gingivalis W83
MTIHDNTLFSADERSRFLSSYASLIRTLAPDRQLVKKVRSLLSRFTELGCFDRDKNGMHGLLRNMEVARIASCEIGLGIEAIGALLFYRPAMKGLTRPEEIAELMGEDVARLIDLLLKTSEIYMRNTAINTANFEHFLLSIAEDIRVVLLIIADRSYLLRQAKDMVCAEERTALAAEVSYLYAPLAHRLGLYAIKSEMEDLCLKYTDRQTFDFIKRKLGETKRSRDAYIEAFIAPLRRRLDEALPNIPYEMKGRTKSINSIRNKLRQQGIEFESIYDLFAIRIILDVPVKDEKAACWHVYSIITDMYQPNPQRMKDWISIPKSNGYESLHVTVMGPQNRWVEVQIRSRRMDEVAERGLAAHWKYKGIKSESGLDEFLTSVRETLEARDHSSDDSAETVKNFKMNLFTDEIYAFTPTGELIKLPQGASVLDFAFAIHSRIGCQAVGANVNGKNVPLKHKLENGDSVSIITSAQQTPKKDWLSYVVSSKARNKIKQQLRLQMESSIGVVKELLNRRLKNRKLPFEEAVFTRVVRRKGFKHLTDFYMEIAADRLDVQEVLELYSHELEEEQRRDAGSGAARRSADTFVAHPPKEEEIVKGGKSDVLVIDNNMTGVEYSFGKCCNPIYGDSVFGFVSNSGIKIHRTDCPNAPDMFSRYGYRIIEARWSGKGSTGYEATLHVIGQDNLAIVTNITSVINKEPGVSLRAYSINSKDNLFEGVFTVEVPDTSTLSILLRKIRATHGVKSAERH

SEQ ID NO: 13190 - protein, 221 aa, Alkaliphilus metalliredigenes QYMF
MLQDIEAVIFDLDGTLIDSMWVWMKIDVEFLEKRGILLPEDLGKGIEGMSFTETAAFFKKTFNLPESVEAIKKEWIEIGQEYYKNKIQLKPGAKEFIEILKAKGIKIGLGTSCSAELVEGVLSQHNLKKYFHSIVTSCEVAKGKPHPDVFFKVAENLNVNPRKTLVFEDTVAGALAGKAAGMKVIGVYDEYSKDSLLELKGIVDIYVETLSDFIEEKSQVG

SEQ ID NO: 13191 - protein, 330 aa, Legionella pneumophila str. Paris
MTIRVAINGYGRIGRCILRSIFEYNRQNEFEVVAINDLSGIDVTAHLTRYDSTHGPFRSDVSIEGNMLIVDGHGIQVIAERDPAKLPWKQLDIDIVFECTGFFTSRDAAMGHINAGAKKVLISAPAKGVDTTVVYGVNHSVIKASDVIVSNASCTTNCLAPVVKVLNDAIGIESGLVNTVHAYTKDQMLLDGSHKDLRRARSATQSIIPTKTGAAAAVGLVLPELAGKLDGFAMRVPVLNVSVVDLTFQAKRATSVEEVNDIMRKAKSRILQINEDPLVSCDFNHNPASAIFDTTETKVIGSLVKVVAWYDNEWGFSNRMIDTAHQMMNC

SEQ ID NO: 13192 - protein, 160 aa, Medicago sativa
MGTLDTKGFTEEQEALVVKSWNAMKKNSAELGLKLFLKIFEIAPSAQKLFSFLKDSKVPLEQNTKLKPHAMSVFLMTCESAVQLRKSGKVTVRESSLKKLGANHFKYGVVDEHFEVTKFALLETIKEAVPEMWSPAMKNAWGEAYDQLVNAIKSEMKPSS

SEQ ID NO: 13193 - protein, 503 aa, Debaryomyces hansenii CBS767
MPQDTETMYSGRVVNKVYNQDFIIDRRFKIVKELGHGAYGIVCSAKYDDGSDNEDGSYVAIKKITNIFSKKILCKRSLRELKLLQFFRGHKNITCLYDLDIIPNPITGEFNEIYLYEELMECDMHQIIRSGQHLTDSHYQSFIYQTLCGLKYIHSADVLHRDLKPGNLLVNADCELKICDFGLARGFLECPEQNVGFMTEYVATRWYRAPEIMLSFTNYTKAIDIWSVGCILAELLGGKPIFRGKDYVDQLNQILLILGTPKESTLTKIGSVRAQNYVRSLPFMRKVHYSELFPTANPLALDLLEKMLTLDPYERITVEEALNHPYLSVWHDPQDEPECQIKFDFKSFETVDDMKSMKNLIIDEVKNFRDFVRKPLQEQQQIQLQMQIQQQEREKQKNDSMDLSTPINQQQFNEMLSSSSNSNSNSNSNPETGVNTDTPKMTNDNDLQYYQSIPKPQELDEFTFSHNSKGLSPTDNNDNHTDLFRLEEELGFGLDGAGMFNNI

SEQ ID NO: 13194 - protein, 377 aa, Xylella fastidiosa Ann-1
MNSFAAVPVLIEEIRAGRMVVIVDDEDRENEGDLIMAAELVAPKDINFMVTHARGLVCLSLTRERCAQIGLSPMVQRNTTRLQTNFTVSIEAAEGLTTGISAYDRAHTIRTAVRPNAKPSDLHQPGHIFPLIAQPGGVLTRAGHTEAASDLPMLAGMEPAGVLVEIMNADGTMARRPQLEVFAQQHGLKIGSIADLIAYRLANEHTVERVDERVIETEYGSFLLVTYRDRIAHDLHFALVRGTLDASIPTLVRVQVENPLADMLHWRREDFGVAASDALRMIAAAERGVMVMLAAPRDSDVLLARLRSEPEVVSNVKDVGQWRRNGAGGQILADLGLAKLRVLGTPRRQIALAGFGLEVLEYVECRGGVPVAPQGVD

SEQ ID NO: 13195 - protein, 781 aa, Magnaporthe grisea 70-15
MAPKKKIAVMTSGGDAPGMNAAVRAIVRMSIHLGCDAFCVYEGYEGLVQGGNFIRQMQAEDVRGWLSEGGTLIGTARCMAFYERPGRLTAAKNMVLNGIDALIICGGDGSLTGADKFRAEWPSLLEELVSKGELKEEQIAPYKHLNIVGLVGSIDNDLSGTDATIGCYSALSRICEMVDYIEATAASHSRAFVIEVMGRHCGWLALLAGVATGADFIFIPEHPQEGNWKEGMYAVVEKHRKLGKRKTIVIIAEGANDRNGKKITPEEVKDLLADKNGLALDTRITTLGHVQRGGRAVAYDRIIATQMGVEAVRAVIEATPETETCFIAVNENKIVRKPLMQAVKDTKKVATAIEAQDFDQAMSLRDSEFAEQYQSFQIMTTPEPALLLPKEKRMKIAFINVGAPAGGMNAAIRAGVLWCQSRGHEAIAIHNGFAGFARHHGDKPLGAVRPFDRLEVDGWASRGGSEIGTNREVPSQSGMELIAKLIGQYGFDALFVIGGFEAFQAVSELRRAQEEYPSLRIPMALLPATISNNVPGTEYSLGSDTALNALVDYSDMIKQSAAATRRRVFVIETQGGKCGYLATLAGMACGASAVYTPEEGISLDMLAADVAHLKEIFAHDKGQSRAGRLVLVNEKASNVYNAKLIADILREEAHGRFEARDSIPGHVQQGGVPSPMDRSRAVRLAIKCIQHLEQYGPKPHEKVKADPRSAGVIGIRGADVVMTPMKEVEDTETDWPNRRPLNAFWTEMKESVDILGSRGPYPRPEPTLKGLKAKDVKRGLE

SEQ ID NO: 13196 - protein, 544 aa, Listeria monocytogenes
MAYSFKLPDIGEGIHEGEIVKWFVQPGDKIEEDESLFEVQNDKSVEEITSPVSGTIKEIKVAEGTVATVGQVLVTFDGVEGHEDDAEEESAAPKAESTESTPAPAQASGKGIFEFKLPDIGEGIHEGEIVKWFIQPGDKVEEDQSIFEVQNDKSVEEITSPVDGTVKDILVSEGTVATVGQVLVTFEGDFEGEASHESTPESPAEDAALANNDATSAPATGGNGTPSSKKDPNGLVIAMPSVRKYAREKGVNIAEVAGSGKNNRVVKADIDAFLNGEQPAAATTTAQTEEKAAAPKAEKAAGKQPVASSDAYPETREKLTPTRRAIAKAMVNSKHTAPHVTLMDEIEVTALMAHRKRFKEVAAEKGIKLTFLPYMVKALVATLRDFPVLNTTLDDATEELVYKHYFNVGIAADTDHGLYVPVIKNADKKSVFQISDEINELAGKARDGKLTADEMRHGSATISNIGSAGGQWFTPVINYPEVAILGVGRIAQKPIVKDGEIVAAPVLALSLSFDHRVIDGATAQKAMNNIKRLLNDPELLLMEV

SEQ ID NO: 13197 - protein, 832 aa, Arabidopsis thaliana
MAIDKLPLLLFLSILLCLNRPVLSDTDEEDILLTGINSYRTTQNLTILSKNENAECLADEIADQFKNKPCTNDTGSATVPGTEPQFANYPQILAKCHLNVSDTRDGSIMPACVPRLESNLVLTNFTKSQYSMSLNDSKFTGIGIGKEDDWIVVVLTTNTPEGSYSTATPTKQESNGFTFGIGLDILGSVRRSLVFRSSLAGDDGTSGGGLSGFVGKINSSIRSSRIGLFSKPPPGLPAPRKEEAPSIRWRKGELIGCGAFGRVYMGMNLDSGELLAIKQVLIAPSSASKEKTQGHIRELEEEVQLLKNLSHPNIVRYLGTVRESDSLNILMEFVPGGSISSLLEKFGSFPEPVIIMYTKQLLLGLEYLHNNGIMHRDIKGANILVDNKGCIRLADFGASKKVVELATVNGAKSMKGTPYWMAPEVILQTGHSFSADIWSVGCTVIEMATGKPPWSEQYQQFAAVLHIGRTKAHPPIPEDLSPEAKDFLMKCLHKEPSLRLSATELLQHPFVTGKRQEPYPAYRNSLTECGNPITTQGMNVRSSINSLIRRSTCSGLKDVCELGSLRSSIIYPQKSNNSGFGWRDGDSDDLCQTDMDDLCNIESVRNNVLSQSTDLNKSFNPMCDSTDNWSCKFDESPKVMKSKSNLLSYQASQLQTGVPCDEETSLTFAGGSSVAEDDYKGTELKIKSFLDEKAQDLKRLQTPLLEEFHNAMNPGIPQGALGDTNIYNLPNLPSISKTPKRLPSRRLSAISDAMPSPLKSSKRTLNTSRVMQSGTEPTQVNESTKKGVNNSRCFSEIRRKWEEELYEELERHRENLRHAGAGGKTPLSGHKG

SEQ ID NO: 13198 - protein, 171 aa, Oryza sativa (japonica cultivar-group)
MAAAPSATSVHDFTVKGVQDASGKDVNLSTYKGKVLLIVNVASQCGLTNSNYTELSQLYEKYKVQGFEILAFPCNQFGGQEPGSNEEIVQFACTRFKAEYPIFDKVDVNGNNAAPLYKYLKSNKGGLFGDSIKWNFSKFLVDKEGRVVDRYAPTTSPLSIEKDIKKLLGSS

SEQ ID NO: 13199 - protein, 400 aa, uncultured proteobacterium
MSNNQTDFDVIVVGGGPSGATAAHEIALAGHRVLLLERAFRIKPCGGAIPPCMLEEFDIPRSLLKAEIQSARMISPTVQKVDMPIEGTFVGMVDRDEFDPWLRSRAQQAGAELELAAFKKLEYLDDETIQVTYVSKGHDTDVRRATARCVLGADGARSKVARQGIPKYADVPWVLAYHEIVKAPDTATENYDPQRCEVWYQGKLSPDFYAWVFPHGNSASIGVGSALKDFSAQDSVSALRTISGLDTAETIRKEGAPIPMKPMKRWDDGKGVLVSGDAAGVVAPASGEGIYYAMLCGRLSADAVNEFLLSGKPAALKAPRKRFMKLHGRTFWALGLLQYFWYHSDKRREQFVEMCKDDDVQTLTWQSYTQKKLVKKKRKEHLRVFVKDIAQLLGLSKTAS

SEQ ID NO: 13200 - protein, 828 aa, Escherichia coli O157:H7 EDL933
  misc_feature (185)..(185): Xaa can be any naturally occurring amino acid
MKLSRRSFMKANAVAAAAAAAGLSVPGVARAVVGQQEAIKWDKAPCRFCGTGCGVLVGTQQGRVVACQGDPDAPVNRGLNCIKGYFLPKIMYGKDRLTQPLLRMKNGKYDKEGEFTPITWDQAFDVMEEKFKTALKEKGPESIGMFGSGQWTIWEGYAASKLFKAGFRSNNIDPNARHCMASAVXGFMRTFGMDEPMGCYDDIEQADAFVLWGANMAEMHPILWSRITNRRLSNQDVTVAVLSTYQHRSFELADNGIIFTPQSDLVILNYIANYIIQNNAINQDFFSKHVNLRKGATDIGYGLRPTHPLEKAAKNPGSDASEPMSFEDYKAFVAEYTLEKTAEMTGVPKDQLEQLAQLYADPNKKVISYWTMGFNQHTRGVWANNLVYNLHLLTGKISQPGCGPFSLTGQPSACGTAREVGTFAHRLPADMVVTNEKHRDICEKKWNIPSGTIPAKIGLHAVAQDRALKDGKLNVYWTMCTNNMQAGPNINEERMPGWRDPRNFIIVSDPYPTVSALAADLILPTAMWVEKEGAYGNAERRTQFWRQQVQAPGEAKSDLWQLVQFSRRFKTEEVWPEELLAKKPELRGKTLYEVLYATPEVSKFPVSELAEDQLNDESRELGFYLQKGLFEEYAWFGRGHGHDLAPFDDYHKARGLRWPVVNGKETQWRYSEGNDPYVKAGEGYKFYGKPDGKAVIFALPFEPAAEAPDEEYDLWLSTGRVLEHWHTGSMTRRVPELHRAFPEAVLFIHPLDAKARDLRRGDKVKVVSRRGEVISIVETRGRNRPPQGLVYMPFFDAAQLVNKLTLDATDPLSKETDFKKCAVKLEKV

SEQ ID NO: 13201 - protein, 140 aa, Campylobacter jejuni
MTKEQIQIIKDCVPILQKNGEDLTNEFYKIMFNDYPEVKPMFNMEKQISGEQPKALAMAILMAAKNIENLENMRSFVDKVAITHVNLGVKEEHYPIVGACLLKAIKNLLNPDEATLKAWEVAYGKIAEFYIDIEKKLYDK

SEQ ID NO: 13202 - protein, 330 aa, Escherichia coli O157:H7 EDL933
MSQNTLKVHDLNEDAEFDDNRVEVFDEKALVEEEPSDNDLAEEELLSQGATQRVLDATQLYLGEIGYSPLLTAEEEVYFARRALRGDVASRRRMIESNLRLVVKIARRYGNRGLALLDLIEEGNLGLIRAVEKFDPERGFRFSTYATWWIRQTIERAIMNQTRTIRLPIHIVKELNVYLRTARELSHKLDHEPSAEEIAEQLDKPVDDVSRMLRLNERITSVDTPLGGDSEKALLDILADEKENGPEDTTQDDDMKQSIVKWLFELNAKQREVLARRFGLLGYEAATLEDVGREIGLTRERVRQIQVEGLRRLREILQTQGLNIEALFRE

SEQ ID NO: 13203 - protein, 348 aa, Rickettsiella grylli
METPVCKNSLKEKLLNKCVEHIDITQFDARPIIDSMAAMSFTSRDLARATRIFNAMLQDDQCSIILSIAGSTSAGGCMKLYADLIHYNMVDAIVATGASIVDMDFFEALGFRHYQGSSSIDDGKLRDLQIDRIYDTYIDEEQLQQCDHVIFEIANTLEPKAYSSREFIQAMGSYLSRGQAKKQDSLVQLAYEHHVPIFCPAFTDSSAGFGLVLHQVKNPNQHITIDAIRDFRELTDIKIKAGTTGLLMIGGGVPKNFVQDTVVCAEILGKPVDMHKYAIQVTVADVRDGACSSSTLKEACSWGKVDRAYEQMVYAEASSVLPLLASDAYHRGYWKRRSRRNFSKLLNQ

SEQ ID NO: 13204 - protein, 466 aa, Escherichia coli O6
MDKKQVTDLRSELLDSRFGAKSISTIAESKRFPLHEMRDDVAFQIINDELYLDGNARQNLATFCQTWDDDNVHKLMDLSINKNWIDKEEYPQSAAIDLRCVNMVADLWHAPAPKNGQAVGTNTIGSSEACMLGGMAMKWRWRKRMEAAGKPTNKPNLVCGPVQICWHKFARYWDVELREIPMRPGQLFMDPKRMIEACDENTIGVVPTFGVTYTGNYEFPQPLHDALDKFQADTGIDIDMHIDAASGGFLAPFVAPDIVWDFRLPRVKSISASGHKFGLAPLGCGWVIWRDEEALPQELVFNVDYLGGQIGTFAINFSRPAGQVIAQYYEFLRLGREGYTKVQNASYQVAAYLADEIAKLGPYEFICTGRPDEGIPAVCFKLKDGEDPGYTLYDLSERLRLRGWQVPAFTLGGEATDIVVMRIMCRRGFEMDFAELLLEDYKASLKYLSDHPKLQGIAQQNSFKHT

SEQ ID NO: 13205 - protein, 163 aa, Wolbachia endosymbiont of Cotesia glomerata
GLEELQKYVDTLIVIPNQNLFRIANEKTTFADAFQLADNVLHIGIRGVTDLMIMPGLINLDFADIETVMSEMGKAMIGTGETEGEDRAISAAEAAISNPLLDNVSMKGAQGILINITGGGDMTLFEVDAAANRVREEVDENANIIFGATFDQAMEGRVRVSVL

SEQ ID NO: 13206 - protein, 482 aa, Ralstonia eutropha JMP134
MQLRDPSLFKALACIDGQWVGADSGATIEVTDPATGEIVAKVPDLRAAETERAIAAAERAQKGWARKTGKERAIILRRWFDLMIANTDDLAYLMTREQGKPLDEAKGEIAYAASFLEWFAEEAKRVDGEVLASPAADKRLVTLRQPVGVCAAITPWNFPAAMITRKAAPALAAGCAIVIKPAELTPLSAFALAELAHRAGVPAGVLQVVTGDARTIGAVLTASPIVRKLSFTGSTEVGRILMAQSAATVKRLSLELGGNAPFVVFDDADVDAAVDGAIAAKFRNGGQTCVCANRFYIQDGIYDAFATKFAQRASQLRVGNGLEQGVVIGPLIEEAAVEKVTSLVDDATSKGGRLLTGGLKHQLSGTYYAPTVIADATATMRVAREEIFGPLAPLFRFKRDEDAVAAANATEYGLAAYLYTRDIARAWRTAEALEYGMVGLNTGLISNEVAPFGGIKQSGLGREGSRHGIEEYLETKYLCLQM

SEQ ID NO: 13207 - protein, 344 aa, Oryza sativa
MEFTPKITGKTTSMSGELKRDYEIGEEIGRGRFGVVHRCTSRATGEAFAVKSVDRSQLADDLDRELAELEPKLAQLAAAGNPGVVQVHAVYEDDAWTHMVMDLCSGPDLLDWIRLRRGAPVPEPVAAAVVAQLAEALAHCHRRGVAHRDVKPDNILLDVVDDGIDGGGTPRARLADFGSAAWVGESGGSAEGLVGTPHYVAPEVVAGGEYGEKADVWSAGVVLYVLLSGGALPFGGETAAEVLASVLRGSVRFPPRLFAGVSPAAKDLMRRMMCRDTWRRFSAEQVLGKNNPTKSSKSSWISPHFPPSFRSKRTNHLIACRAVRNAGHPWIVSGGGARAMEQPT

SEQ ID NO: 13208 - protein, 274 aa, Ustilago maydis 521
MTASALAYLEPDSSAELTGVYHLVLDRPEARNAISRSLLQDVLQCLQVLVCKITQPKQDEPLPRVLILRANGPCFCAGADLKERREMSEAEVIEFLQDLRHMLEQVEKLPIPTLAAIDGPALGGGLELALACDFRIAAETVSKIGFPEVKLGIIPGAGGTQRAPRIIGMQRAKELIYTGTQLNATQAKDLGLIDHVAPGSTCLKLCQELAQQMMPSAPLALRAAKMAISMGANVELARGLDLEWACYEPLLESKDRREALDAFQQKRKPIFTGK

SEQ ID NO: 13209 - protein, 394 aa, Vibrio vulnificus CMCP6
MLSENTINIVKSTAPLLAETGPKLTAHFYQRMFEHNPELKDIFNMSNQRNGDQREALFNAICAYASNIDNLPALLGAVEKIAHKHSSFLITADQYQIVGGHLLATIDELFSPGQAVLDAWAEAYGVLANVFIQREEQIYQDNQSQTGGWRGLREFELVEKQYESAHICSFVFKPVDGGSVVSFKPGQYLGIYINDEQFENQEIRQYSLSSSVRPDCYRISVKREEGGRVSNYLHDHLDVGSKVKLAAPAGDFFLDAAPTAPVVLISAGVGLTPTLSMLESLTEHQAPVTWIHATENGQQHAFKQHVKQLVETHPHFNSLVWYNQPNSDDKIGDDFQFSGWVNLHEIETVLKQADVQVYFCGPVGFMQFIAKQLLEMGVPEQQFHYECFGPHKVV

SEQ ID NO: 13210 - protein, 307 aa, Gibberella zeae PH-1
MPMTERELGQRVKALTKCVAANEPPENAIKLLETLKKDASPTEEMLRATRAGVFVGKLRSNPNKEIARAAAELVSKWKKLVEQEKSSKLQKSKVGSGSPAPAPASAPASSPAPPPSSSGNSGAKYKGDIEKRKYETDNVNVKRTDSAVRNSCIGLIYNGLAYRSTASENEVVNKAITVENAAFVKFKGETADYKKKIRSLFTNLKNKSNKELGKSVLSGEISPEKFVVMSDDELKSEEQRKKELELEKENMKMAQVPQEQKSISESLECGKCKKKQVSYTQAQTRAADEPMTTFCECMACGNRWKFS

SEQ ID NO: 13211 - protein, 271 aa, Mycobacterium sp. JLS
MRIIVTGGNSGVGRATASAMAAEGHEVVIACRTMSKGYDAAASMSGRVDVRELDLADLTSVRKFADTVDYVDVLVNNAGVLGLPLTRTADGFEAHMGTNHLGHFALTCLLGDRIRDRVVSVASTNYTTARMHFDDLNWQQRKYNPWSAYGESKLANLLFVHELVARGKTAYASDPGMTNTAITRDGSGVLQWAGRVISPHIAQSPDDGARSTIQAITTTLPNGTYLAPRGLMHQWGKPKPTKLKAKARDADSARRLWDLSAELTGCAWQEA

SEQ ID NO: 13212 - protein, 338 aa, Cupriavidus necator
MARKLSIKLAINEAIDQEMTRDPSVIMLGEDIVGGAGADGEKDAWGGVLGVTKGLYAKHGDRLLDTPLSESAYVGAAIGAAACGMRPIAELMFIDFMGVCFDQIFNQAAKFRYMFGGKAETPVVIRAMVGAGFRAAAQHSQMLTPLFTHIPGLKVVCPSTPYDTKGLLIQAIRDNDPVIFCEHKNLYGLEGEVPEGAYAIPFGEANIVRDGKDVSIVTYGLMVHRALEAAATLAKEGIEAEIVDLRTLSPLDMDTVLESVENTGRLVVVDEASPRCNIATDISAQVAQQAFGALKAGIEMVCPPHTPVPFSPTLEDLYIPSAAQIAAAARKTMKGGKH

SEQ ID NO: 13213 - protein, 457 aa, Hevea brasiliensis
MVSLLSVPSMIDLIISINKAKKSTSNPELKSTSQRCSEPTCLLVLSSLPIHTWSSCLMGRAFLFFSTYLRSKRKIFFTGTYMPSTELTGGYRILSYLDPSEPKHTQLKNFLFYLLKSRRDHVIPEFSSTYTGLFESLENDLASKGKVSFNNPGEQAAFSFLGRSYFGVNPVDTKIGTDGPTLIAKWVLFQLAPILTLGLPAFLEEPTIHTFRLPAFLVKKDYKRLYDYFYSSAGSLLDEAEKMGISREEACHNILFATCFNTFGGLKIFFPNILKWIGRAGVKLHTQLAQEIRSVIKSNGGEITMAALEQMPLMKSAVYEAFRIEPPVPAQYGKAKRDLIIESHDAAYDVKEGEMIFGYQPFATKDPKIFDTPDEYVPDRFVGEGEKLLQHVLWSNGPETEHPTVGNKQCAGKDFVVFISRLFVVELFRRYDSFEIEVGSSALGSSITITSLKRASF

SEQ ID NO: 13214 - protein, 526 aa, Zea mays
MKDRHLALNQTQRVRLEAALQELQSVAPAAAVTVADTIPVNQEDNILKGHGTSDQDGEVVATLCGVVERVNKLVYVRTLRASCRFSMEMNGVLQAADAKYWVYKGEGAANLILSYTGSSPTMLGKVLRVKKLLNDKSQLPPSCMVFSSHEQLLWGHIPELVESVKQDCLAQAYAVHVMSQHLGANHVDGGVHVRVSRDFLELVEKNVLSSRPPWRVNASSIDITADAALLIADHSLFSGTPKGSSCIAVEIKAKCGFVPSSEYISKDNSIKKQVTRYKMHQHLKFHQGEISKTSEYNPLDLFSESKERISMAIKSFFSTPQNNFRIFVNGSLAFGGMGGGADSVHPADTDKCIKDLSKVSGLELPDFTELLSETIFKSGVLGKLLTTQKLDDHDIEGAIHLYYNIISQPCLVCKNLTDVELLRKYTLLHSLPLDKSLKIVRNFLISATAKDCSLMISFRPRENGSTDSEYDSVFLESAKRTYEYKTYFVDLDVKPLDKMVHYFKLDQRIVNSYTRYGEVLPPPKGK

SEQ ID NO: 13215 - protein, 276 aa, Debaryomyces hansenii CBS767
MLSRSTTRCLSKANTIRLARSIHRSTVCLDAAVVSGTLLAKSIRSKIAEKIVDYNTTNFSNLNASNINFDNLQFRPNLTIIQVGGRPDSSAYVKAKLKAAKSSNILSSLLKFDEDMSEEDLLEEIDRLNKDPKVNGLLIQLPLPKHFNETLITNAVATEKDVDGFARYNVGELTKKGGAPMFKPCTPNGIMELIKTTGISLRGKNAVVLGRSDIVGTPVAAMLRNEDCTVTICHRHTYDLPSVVRNADIIVAAVGIPEYVKADWVKENVCGYRRWY

SEQ ID NO: 13216 - protein, 570 aa, Saccharomyces pastorianus
MSHVNASYAHSQGSSTSVSRVEMEKPATKEVFEDPTPKKFELDDDEAGKTSSVFNPDLNLEEEVRALDELGDSFKRDRSFWGKMKALEFEVEFENKKNMVLMLGTFAAFAGILSGIDQSIISGASIGMNKMLHLSTHEASLVSSLMPLGAVAGSILLTPFSEYFGRKKSLAISCVFYTIGAIVCAAASNHHEMYAGRFLIGVGVGLEGGGIGVYIAESVPSSVRGSLVSLYQFNIALGELFGYIVGVIFFDVKGGWRYMVGSSLVFSTTLFIGLLFLPESPRWLMHKGRVGESWNVWKRLRDVKEEGNKIEFLELRDVASHDRELHANESRFQSLFDLVRVPRNRRALVYSCMMIGLGQLTGINAIMYYMSTLMKNIGFDDKQSVAMSMVGGAALLIGTVPAILWMDRFGRRTWAMTIIIFIVGLVLVGVGYQINLKTHMAAAEGVYLTGQIIYNMAFGSYAALTWVLPSESFSLGTRSAGMTVSSALLYLFAFTVTYNFEKMKEAMTYTGLTLGFYGGIALAIGIPYQLLCMPETKNRTLEEIDDIFEKPTSQIIKENIAYLKKGQLSY

SEQ ID NO: 13217 - protein, 120 aa, Bdellovibrio bacteriovorus HD100
MAKKLYVGNLPYSVDDEALHQHFAQFGAVDSAKVIMDRETGRSKGFGFVEMSDDSAADQAIERGNGIELGGRPINISEARPQAPREGGPRRGGGGFGGGRGGGGGERRGGFGGGGRGGPR

SEQ ID NO: 13218 - protein, 317 aa, Haemophilus somnus 2336
MSDFKHSQLLILGSGPAGYTAAIYAARANLKPVLVTGLQQGGQLTTTTEIENWPGDFGDTTGPELMQRMLQHAEKFDTEIVFDHINNVDLSERPFKLFGDAGAYSCDALIIATGASARYLGLPSEETYKGRGVSACATCDGFFYRNKPVAVVGGGNTAVEEALYLANIASEVHLIHRRDTFRAEKILIDRLNKKVEEGKIILHTNRTLAEVLGDNMGVTGIRLKNTQTENVEDLKLEGVFIAIGHAPNTELFANQLELNNGYIVVKSGLEGNATATSVQGVFAAGDVMDHNYRQAITSAGTGCMAALDAERFLDTQK

SEQ ID NO: 13219 - protein, 311 aa, Thermosynechococcus elongatus BP-1
MARTDFKDYYQILGVSKNATEAEIRQAFRRLARKYHPDLNPGDKEAEARFKEINEAHEVLSDPQKRRKYDQFGQYWQQASAAEAGGFNVNVGDFGADFSQFANFEDFINELLGRFATGTGRTRSWSTVGFDTSGFGSADVEAEMQISFQEAFQGCQKSFAIGNEQVTVTIPAGIKPGTKLRLRGKGQYNPYTQQRGDLYLTVQVAPHPLFRFEDDQLVIDLPITPDEAALGAQVTVPTPSGNVVLNVPAGTRSGQSLRLRGKGWRSSGGIAGDLLAKVQIVPPKSLSAQEKELYEKLRSLRSFNPRGHWPI

SEQ ID NO: 13220 - protein, 321 aa, Synechococcus elongatus PCC 7942
MSETQQPTVIITGASSGVGLYGAKALAARGWHVVMACRNLQKAAEAAKSLGINPENYSLMEIDLGSLASVRRFVDQFRATGRSLDALVCNAAVYLPRLKEPQRSPEGYEISVATNHFGHFLLCNLLLDDLKRSPAPEKRLVILGTVTANSKELGGKIPIPAPADLGNLEGLEAGFKAPIAMIDGKKFKPGKAYKDSKLCNMITTRELHRRFHDSTGIVFSSLYPGCVADTPLFRNTPKLFQKIFPWFQKNITGGYVTQELAGERVAQVVADPEFKTSGVHWSWGNRQQKDRQSFVQELSDKASDDRTAQRLWDLSAKLVGL

SEQ ID NO: 13221 - protein, 156 aa, Brassica napus
MSETQNSTETVRSSDKTEDTLTRMKVNEENMEQSSPSPYPDRPGERDCQFFLRTGQCGYGNSCRYNHPLSLVPQAVSYHRDELPERIGQPDCEYYLKTGACKYGSTCKYHHPKDRNGAEPVLFNVLGYPMRQGEKSCPYYMQTGMCRFGVACKFHH

SEQ ID NO: 13222 - protein, 336 aa, Pichia minuta var. minuta
MAYNVGINGFGRIGRLVLRIALSRKDINVVAVNDPFIAAEYAAYMFKYDSTHGRYQGEVTFEGKYLVIDGQKIEVFQERDPADIPWGKEGVDFVIDSTGVFTTTAGAQKHIDAGAKKVIITAPSADAPMFVMGVNHKEYTKDLSIVSNASCTTNCLAPLAKVVNDVFGIESGLMTTVHSITATQKTVDGPSHKDWRGGRTASGNIIPSSTGAAKAVGKVLPALAGKLTGMSLRVPTTDVSVVDLTVNLKTPTTYAEISAAIKKASEGELAGILGYTEDAVVSTDFLTDNRSSIFDASAGILLTPTFVKLISWYDNEYGYSTRVVDLLEHVAKVSSA

SEQ ID NO: 13223 - protein, 81 aa, Gaertnera acuminata
TPQDEMRAGMSYLHETIWKGVPKFLRRVDTALKNIGINERVPYNAPVIQFSSWMGGDRDGNPRVTPEVTRDVCLLARMMAA

SEQ ID NO: 13224 - protein, 530 aa, Mesorhizobium sp. BNC1
MRLPRREGRRRKFNQLDRDYAQSGLAMEETMQTAHTWKADRQQSLRGHTVPTALLIAGEWIERDKSFTVTNPATNEEIARVSDGTAEDALRALEAATASQEAWAAWAPRQRANLFHRAHRLMLERATAFAEVMTLESGKPLAEAKAEFALSADFFLWYAEQIAHLHGTFASGSPGGYRIIATHRPVGPCFLVTPWNFPLLMIARKGGAALAAGCTTIVKSARETPLTAALFAQTLLEAGFPAGTVNLIHTTSSASISEALLADPRLRKVSFTGSTEVGSRLLSGAAQNIVNASMELGGDGPFVVLEDADIDLAVRQAIICKFRNAGQACVAANRIICHAAVVDEFTQKFVDETRKLRVGDGFEPGTDVGPIISSPQLERVDRMVAMLKDAGAELLTGGKRKGVTGNFYEPTVMRIKGSAPACRNEELFAPIAVIYSVDSVAEAIRFANDTIYGLAAYVFTRNVDRAIAVSEKLDFGMVGINRGIMADPAAPFGGIKSSGLGREAGHDGIYEFLEPQYLALTVNEAAGISQ

SEQ ID NO: 13225 - protein, 580 aa, Thermobifida fusca YX
MSTPVTMPDLGESVTEGTVTQWLKQEGDTVEVDEPLLEVSTDKVDTEIPSPVSGVLTKILVGEDETVEVGAQIAIITPAGEAPPAQPAPETAAEPAAQPEPEPEPAPQPAAEARTEPAAPVADAGAATPVTMPNLGESVSEGTVTQWLKQEGDTVEADEPLLEVSTDKVDTEIPSPVSGVLTKILVGEDETVEVGAQIALISPAGQAAAPAAPAAPQPAPEPKPEARPEPAPQPAAQPEAAARTEPAPQPRRTRDDETPTVDLETISGTGQVLGTDATSEGYVTPLVRKLAAQEGVDLSQVKGTGVGGRIRKQDVLEAARRMREQRQRAAAAPAPAAADTALRGRTETMSRLRQTFAEQIVESLHTAAQLTQVVEVDVTAIARLREQVGERFAAETGVELGFFPFFALAVVEALQRHPKLNAVIDGTEVTYHDTENLAVVVDTEQGVLAPVVKDAGRLSLRELARRIDDLGARARTARLVPDELSGGTFTMVDSGAYGALVETPIIHQPQVAVLSTGTVVKRPVVVEEPQLGEVITVRSMVYLSLSFDHRLIDGADAARFLSDVKRRLEEGAFEDAVGLK

SEQ ID NO: 13226 - protein, 355 aa, Botryotinia fuckeliana
MTARAPNPASGSRKISFNVSEQYDIQDVVGEGAYGVVCSALHKPSGQKVAIKKITPFDHSMFCLRTLREMKLLRYFNHENIISILDIQKPRNYESFTEVYLIQELMETDMHRVIRTQDLSDDHCQYFIYQTLRALKAMHSANVLHRDLKPSNLLLNANCDLKVCDFGLARSAASQEDNSGFMTEYVATRWYRAPEIMLTFKEYTKAIDVWSVGCILAEMLSGKPLFPGKDYHHQLTLILDVLGTPTMEDYYGIKSRRAREYIRSLPFKKKVPFKTMFPKTSDLALDLLEKLLAFNPVKRITVEEALKHPYLEPYHDPEDEPTANPIPEEFFDFDKNKDNLTKEQLKKLIYDEIMR

SEQ ID NO: 13227 - protein, 81 aa, Gaertnera brevipedicellata
  misc_feature (55)..(55): Xaa can be any naturally occurring amino acid
TPQDEMRAGMSYFHETIWKGVPKFLRRVDTALKNIGINERVPYNAPLIQFSSWMXGDRDGBPRVTPEVTRDVCLLARMMAA

SEQ ID NO: 13228 - protein, 816 aa, Haemophilus somnus 129PT
MRVLKFGGTSLANPQRFLQAAALIEKAHLEEQAAGVLSAPAKITNHLVALSEKAALNQPTDGHFDEALEIFYNIINGLYAENTHFDLVGTKALIESEFAQIKGLLENIRQAGKVDDAVKATIDCRGEKLSIAMMNAWFEAKGYTVTVINPVEKLLAYGSYLESSVDIAESTKRVDAKSIPAKNIVLMAGFTAGNDKGELVLLGRNGSDYSAACLAACLGASVCEIWTDVDGVYTCDPRLVPDARLLSSLSYREAMELSYFGAKVIHPRTIGPLVEPQIPCLIKNTGNPEGAGSIIDNRENISEGLQVKGITNLDNVAMFNVSGPGMQGMVGMAARVFSAMSKASVSVILITQSSSEYSISFCVPTKAIEKAKAALNAEFEQELVAKDLDPVEVIHDLSIISVVGDGMAQSKGIAASFFSALASANISIVAIAQGSSERSISAVVPLNKAIEAVKATHQALFNNRKVVDMFLVGVGGVGGELIEQIKRQSEYLAKKDIEIRVCALANSNKMLLNENGLNLDNWREDLANATQPSDFDVLLSFIKLHHVVNPVFVDCTTAESVAGLYERALKEGFHVITPNKKANTRELDYYNQVRENARKNHRKFLYDTNVGAGLPVIDNLQNLLAAGDDVVSFNGILSGSLSFIFGKLEEGLSLSEATALAREKGFTEPDPRDDLSGQDVARKLLILAREIGLELELSDIEVEGVLPQGFSEGKSADEFMAMLPSLDEEFAERVAKAKSEGKVLRYVGQIEEGKCKVSIVAVDGDAPLYKVKNGENALAFYTRYYQPIPLLLRGYGAGNAVTAAGIFADILRTLKH

SEQ ID NO: 13229 - protein, 318 aa, Prochlorococcus marinus str. MIT 9211
METIETDVVIVGGGPAGCSCALYTSRADLKTVILDKNPSVGALAITHQIANYPGVPTDISGDDLLTLMRDQAIQYGTDYRRAQVFGVDVNGEWKTVFTPEGTFKAKALVLASGAMGRPASFKGEADFLGRGVSYCATCDGAFYKGREVAVVGTNKEAIEEANVLTKFASTVHWITSSDPKDDDMHAQDLMNQPNVKHWSRTRLMQIEGDDGGVTGVLVKNRSQESNQSLTLEGVFVYMSGSKPITDFLGDQIALNENGGVVVDDFMSTTSEGVWAIGDIRNTPFKQAVVAASDGCIAAMAIDRYLNSRKSIRVDWVHS

SEQ ID NO: 13230 - protein, 106 aa, Arabidopsis thaliana
  misc_feature (28)..(28): Xaa can be any naturally occurring amino acid
  misc_feature (45)..(45): Xaa can be any naturally occurring amino acid
RTRGIRTTATYTLSSATRAACPTQATLXAPINGLKNSGALPSHTXMANHYFTSITSNEGRDNCMHVRPPIGENKFETLSYLPDHIHFECSNAVDYLIRIMRVSRDQ

SEQ ID NO: 13231 - protein, 1019 aa, Arabidopsis thaliana
MSELPEHLLEEILYRVPAMSLKQLGSTCKGWNCLFKDRRFTRKHLDKGPKQFLIHILSLRRLIVMRLRHQGGQYLARGMEPVYWSNKVDSTHDLYDNYTLGSYQNNSYNILAHTGFGYDHEFQIYEINSNSWRIIDATLDFKLGYIGRGVSLKGKTYWIASGEEEKRLGKFLISFDYTTERFERLCLPNKYPCYATLALSVVREEKLSMLSQRGIKSKAEIWVTNKIGETQVVSWSMVLALDLQPKRCIGESGSFLVDEKKRVVVCCDNIRDQGKTTFDSNLPRYHRQKKKGRMIIVFDVESMRLPVTVKATKPSFLVIWIRYSSAASSPTVSLNPSGRLQQTLAGSVEVKGKSLHSGKFSTVKLNPEIAGAGRFFEFRSRFIPASIEFAQESPLCTTLLKDELKIRTVEHLLSALEAKGVDNCRIQIESESSDDREVEVPIFDGSAKEWVDAIQGVGINAAQNHDGESVEKMVAHVNKPVYVCKNDTFVAAFPALETRITCGIDFPQVPAIGCQWFSWRPIHESSFAKDIASSRTFCVYEEVERMREAGLIKGGSLDNAIVCSAEHGWMNPPLRFDDEACRHKILDLIGDLSLVSRGGNGGLPVAHIVAYKNEEEEVRSSTEENENVRSSTEENEYVRSSTEAGRGEDPHEDSDNISESGAIHLQIMERFNQRSGSGKEEEEDTMDLSIKQVDLLNQVEISRVYHCDGLLLCVAKDNSRVVVWNPYLGQTRWIRPRTESNIGDSYALGYDINRNHKILRMVQTRNVSVYRYEIYDLRSNSWRVLEVTPNGEMDPNHPLYGVSVKGNTYFFAHEDSSSGEIDEDGDIIDLEDFLLCFDFTTETFGLRLPLPFHSTIDATVTLSCVRDQQLAVLYHNEGLHSDDRFTTVEFWVTTSIEPNSVSWSKFLTVDMRPLALTGVRFDNDMGATFFIDEDEKVAVVFDLDGYLSTESARYHTAFISGKDGFFKPVTLGVAPNVGEPCPRTGHIPTTYRPPLVCSSTYLPSLVQVNQQRKRKERHV

SEQ ID NO: 13232 - protein, 188 aa, Glycine max
MRPLDEKETTMVFEKLFKFTGPNLKHLLERPSVEGPDPEPGRYCLRLHKNRVFYASESLVRRATAVSRTRLAGVGTPIGKFTHGGAFHLTVHALDLLAAHARRRIWLKPDTERSFLFGNSVPKSALARITENTKSGDGVVVMSMADVPLGFGVAARGAQDCRKADTNAVVVLHQSDAGEYLRKEEELM

SEQ ID NO: 13233 - protein, 334 aa, Lactococcus lactis subsp. lactis
MTFITNPTTLNYLTGLAIDPHERIAGLMIFRDSTPMLFTPALEVEKAKEHTSGLDIFGYEDSQNPWEVVKNHVKSDVKSIAVEFSDIPLAKTEGLKAQFGDINFVNLTPLIERMRLIKSADEIEKMKVAGDFADKCFEIGFATAAERNGVTESDIVAKIEYEMKRMGVPQMSFDTLVLSGARAANPHGAPENVEIQENKLLLFDLGVMSGGYASDATRTIAIGQPNDFDAEIHKIVKEAQQAAMDFIKPGVTAHEVDAVARDLITKAGYGEYFNHRLGHGIGMDVHEYPSIVAGNDLVIQEGMCFSNEPGIYIPGKVGVRIEDCLYVTENGCES

SEQ ID NO: 13234 - protein, 190 aa, Synechococcus sp. WH 7805
MDVESFSRMTGTPDSTSLTSLQKGLLLVSAIALAVSLFLVRNGGIAESPLDQLARRSLAPEIALSNGRPTILEFYADWCEVCQEMAPAMMTMEEAHSDELDVVLVNIDNPRWLDLTDRYDVTGIPQLNLFAADGELRGRSLGGRSESELNALAAALVTNTSLPTLTGVGSASPLPEPTMLETAAGPRSHS

SEQ ID NO: 13235 - protein, 109 aa, Synechocystis sp. PCC 6803
MSLLEITDAEFEQETQGQTKPVLVYFWASWCGPCRLMAPAIQAIAKDYGDKLKVLKLEVDPNPAAVAQCKVEGVPALRLFKNNELVMTHEGAIAKPKLLELLKEELDFI

SEQ ID NO: 13236 - protein, 126 aa, Prochlorococcus marinus str. MIT 9211
MLRVGDLEKSLWFYTTILGMNLLRQKEYPSGRFTLAFVGYGPEENNTVLELTHNWDVDHYELGNAYGHIALGVKNIFETCELIKKNGGNIVREPGPMKHGKTIIAFVEDPDGYKIELIDLSSRTLK

SEQ ID NO: 13237 - protein, 411 aa, Bacillus clausii KSM-K16
MSTVMLKEESKRLVKATVPILAAHGETITKHFYKRMFHHHPELLNVFNRTNQKIGRQPQALANSIYAAAQHIDNLEAILPVVKRIAHKHRSLNIKPEQYPIVGENLLAAMKEVLGEAASDDVIEAWREAYEIIAGVFIEVEKQMYDQAGKAPGGWSGFRSFVVEKKKQESKAITSFYLKPKDGNEIASYQPGQYMTVKVNIPGDTYTHMRQYSLSDAPGKGYYRISVKREEGNTECPPGVVSNYLHQHIREGDVLEMTAPAGDFTLKQGEERPIVLISGGVGITPLMSMFNTLMQQGTKQKVTFIHAAIDGTYHAMHDHVAQTASQKENVHYAVCYERPTSEDQMNPYMKKEGYIDEQFLRSMIEDHHADFYFCGPIPFMKTVYHILNNWGVPEEQIHYEFFGPAGTLASS

SEQ ID NO: 13238 - protein, 558 aa, Leptospira interrogans serovar Copenhageni str. Fiocruz L1-130
MNTSNNHSVPIPLNETARLRALHSYQILDTASEEKFDSLTQIAAYICNSSMALISLVDTNRLWFKSKLGMQESEAPRKISFCQYAIMKDDLLEIEDALENEIFKNKPSVLGPPYIRFYVGAPLKTPDGFNIGTLCVFDSQPKHLNPKQRVILKALSNQIIYNFELNKKNIELLLIQKKEEELQKSKSLFFANMSHEIRTPVHGILGVSGLLSETELQQEQKEYVDTIQRSGKLLLNLLNDILDFSKLESFNMKIEIIAFDLIDLLKDVFHLFEADAKRKNIEFKLVGKQPSHSIVSTDPHRFKQILVNLISNAIKFTEKGSVLIEFDFKSDLKHCDIQIRIKDTGVGIPEQKLKELFQAYRQVDTSVSRKYGGTGLGLSISKNLSEMMNLKLTARSIINQGSVFEISGQIPLAEKSEVNFEPKKATQNIEIQNLNILVAEDNETNQMLIKKILEKLGYKPVIVSNGIEALHHIKMYKTDVLFLDIQMPELNGIEAAKILTQQNDSSIRPYIIAMTANASQTDKEDCMASGIDQYLSKPFHKEEIADLLNQFISHKTTN

SEQ ID NO: 13239 - protein, 218 aa, Glycine max
MDSDSWISTRLSSSSRRHHYRSDLYAEESEGNDDFRAEFLCPFCAEDYDVVSLCCHIDDHHPIQAKNGVCPICGKKVGVDLVGHFTTQHGNFLRISFLQRKRRVRKGGSASTISILRKELQEGALQSLLGGSSYLASSNSEPDPLLSSFMFNPVVADESVSATPPSTEDALVKESSKDDFLKRKPQQLQLSEEDQVEKARRFEFVQGLLMSTILDDKL

SEQ ID NO: 13240 - protein, 522 aa, Salmonella typhimurium
MSQQVIIFDTTLRDGEQALQASLSAKEKLQIALALERMGVDVMEVGFPVSSPGDFESVQTIARTIKNSRVCALARCVEKDIDVAAQALKVADAFRIHTFIATSPMHIATKLRRTLDEVIERAVYMVKRARNYTDDVEFSCEDAGRTPVDDLARVVEAAINAGARTINIPDTVGYTMPFEFAGIISGLYERVPNIDKAIISVHTHDDLGIAVGNSLAAVHAGARQVEGAMNGIGERAGNCALEEVIMAIKVRKDIMNVHTNINHHETGAPARPSVQICNIADPSQQSDCRQRRFRHSSGIHQDGVLKNRENYEIMTPESIGSEPDTAEPDLPLWPCRRETSHGRDGLQGHRLQHGPPVRRVPEAGDKKGQVFDYDLEALAFINKQQEEPEHFRLDYFSVQSGSSDIATASVKLACGEEIKAEAANGNGPVDAIYQAINRITGYDVELVKYDLNAKGRARRAGSGRYRREPSWSPLPRRGLATDIVESSAKAMVHVLNNIWRAAEVEKELQRKAQNKENNKETV

SEQ ID NO: 13241 - protein, 284 aa, Neisseria meningitidis Z2491
MSAQLINGKEVSQKRLQAVAEAVAQRQQDNLHMPCLAVVLVGGDPASAVYVRNKKTACQKCGIKSLSYELPESTSQEELLALVDRLNADSEVDGILVQLPLPKHLDSQAVLERISPDKDVDGFHPYNVGRLAVKMPLMRPCTPKGVMTLLEAYGIDPKGKKAVVVGASNIVGRPQALELLLARATVTVCHSATENLTDEVAGADILVVGVGIPNFVKGEWIKPGAVVIDVGINRLDDGSLCGDVEFETAKERAAMITPVPGGVGPMTIATLMENTLHAASLHDA

SEQ ID NO: 13242 - protein, 479 aa, Oryza sativa
  misc_feature (202)..(202): Xaa can be any naturally occurring amino acid
MELGVPLPRRPVPGSYGVPFVSAVRDRLDFYYLQGQDKYFESRAERYGSTVVRINVPPGPFMARDPRVVALLDAKSFPVLFDVAKVEKRDVFTGTFMPSTSLTGGYRVCAYLDPSEPNHAKIKQLLLSLLVSRKDAFVPVFRSNFGALLDTVQSQLASGGGKSDFTALNDATSFEFIGKAYFGVRPSASSSLGTGGLDQGRXLWLLWQLAPLTTLGLPMIIEDPLLHTLPLPPFLISSDYKALYAYFAAAASQALDAAEGLGLSREEACHNLLFATVFNSYGGFKLLLPQILSRVAQAGEKLHERLAAEIRSAVADAGGNVTLAALEKMELTRSVVWEALRLDPPVRFQYGRAKADLEIESHDASFAIKKGEMLFGYQPCATRDPRVFGATAREFVGDRFVGEEGRKLLQYVYWSNGRETENPSVDNKQCPGKNLVVLVGRLLLVELFLRYDTFTAEAGKKVVITGVTKASTSAVNRTA

SEQ ID NO: 13243 - protein, 406 aa, Oceanobacillus iheyensis HTE831
MSNTTVLLDKKTTEIIKATVPVLKEHGEAITKHFYKILLENNPELKNVFNQTNQRKGAQSKALANTVYAAAANIEKLEEILPHVKQIAHKHVSLNIKPEQYPIVGKYLLIAIKEVLGDAATDEIIEAWEKAYFVIADIFISVEKEMYNEKKNQIGGWTGFRDFKVIKKVKESKEITSFYLKPDDNLPITTFIPGQYITIKAQIESEAYVHLRQYSLSTAPGKDYYRISVKREASNQPIGVVSNYLHTSVEVGSVLPISAPAGDFILDERDHRPLVLISGGVGLTPIMSMLESVVEHQPNRNVVFIHAAKSIDHQAMRKRVSEIAKSKEQVKQYVVYSNPTNRTDGDKQGYIDYEWLKEVIPTKDAAFYLCGPKPFMSAINNDLQNMNIAQNDIHMELFGPLEPIAK

SEQ ID NO: 13244 - protein, 386 aa, Catharanthus roseus
FLPNSEQERKMKDLNFHAATLSEEESLRELKAFDETKAGVKGIVDTGITKIPRIFIDQPKNLDRISVCRGKSDIKIPVINLNGLSSNSEIRREIVEKIGEASEKYGFFQIVNHGIPQDVMDKMVDGVRKFHEQDDQIKRQYYSRDRFNKNFLYSSNYVLIPGIACNWRDTMECIMNSNQPDPQEFPDVCRDILMKYSNYVRNLGLILFELLSEALGLKPNHLEEMDCAEGLILLGHYYPACPQPELTFGTSKHSDSGFLTILMQDQIGGLQILLENQWIDVPFIPGALVINIADLLQLITNDKFKSVEHRVLANKVGPRISVAVAFGIKTQTQEGVSPRLYGPIKELISEENPPIYKEVTVKDFITIRFAKRFDDSSSLSPFRLNN

SEQ ID NO: 13245 - protein, 695 aa, Coccidioides immitis RS
MLSARPSRSALCAIQLKPSRLAPRQFSTTQIVAAVSPHRRSAQKISAGEATKRGQSTATATVTQTRPIPSPAFNQEPQQYASPLQSRQYPGLDDSFVGLSGGEIFHEMMLRLDVKHVFGYPGGAILPVFDAIYNSKHFDFVLPRHEQGAGHMAQGYARASGKPGVVLVTSGPGATNVITPMQDALSDGTPMVVFCGQVPTTAIGTDAFQEADVIGISRACTKWNVMVKNVAELPRRIKEAFEIATSGRPGPVLVDLPKDVTAGILRKPIPMTSTLPSHPSAATLAARELSRKQLEATVKRVANLVNVAKKPILYVGQGLLARPEGPALLKELADKACIPVTTTLQGLGGFDELDSKSLHMLGMHGSAYANMAMQEADLIIALGARFDDRVTGNIAKFAPQAKAAAQQGRGGIIHFEVMPKNINKVVEATEAVEGDCADNLALLIPQIKAVAERPEWFSQINDWKARFPLSSYERQTPDGLIKPQYVIEKLSDLTAHMKDRTIITTGVGQHQMWAAQHFRWRHPRTMITSGGLGTMGYGLPSAIGAKVARPDCLVVDIDGDASFNMTLTELSTAAQFNIGIKALILNNEEQGMVTQWQSLFYEDRFAHTHQKNPDFVKLAEAMGVQAQRCAKPEDIESSLKWLLETDGPALLEVITDKKVPVLPMVPAGKALHEFLVYDEAKEKERRALMKKRSGH

SEQ ID NO: 13246 - protein, 519 aa, Xylella fastidiosa Ann-1
MNTSISSQPPCIRIFDTTLRDGEQSPGCSMPAQQKLVMARALDALGVDIIETGFPASSQSDYEAMTLIARELRRPTLAVLSRCLQADIETSARALESATKPRLHVFLSTSPLHREHKLRMSKEQVLESVHKHVSLSRTLIDDVEFSAEDATRTEEDFLIEVTRVAIAAGATTINLPDTVGFSTPEEIRNMFTRVIANVEGANKVIFSAHCHDDLGLAVANSLAAIEGGARQIECTINGIGERAGNCALEELTMVLKVRNAFYNIDTSIHTSRIVSTSQLLQRLVGMPVQRNKAVVGANAFAHESGIHQHGMLRHRGTYEIMRPQEVGWVCSHMVLGRHSGRAAVEQRLRALGYLLEEEDLKLVFEEFKQLCEKQRLVTDVDLQVLMQDTTVQHGYRLASMTISDVGNRANALVELSDPQGQRVAETAQGNGPVDALFGALAAATGVKLELDSYQVHSVGIGADARGEANLSVRHNDTQYEGTGTSKDIIEASALAWLDVANRLLRNPENMQNKQNTALA

SEQ ID NO: 13247 - protein, 398 aa, Kinetoplastibacterium blastocrithidii
MFELVDNIPASPVIKVIGVGGGGGNAVNHMVKSNIEGVEFICANTDAQALKSIGARTILQLGTAVTKGLGAGANPEVGRQAALEDRERIAEVLQGTNMVFITTGMGGGTGTGAAPIIAEVAKEMGILTVAVVTRPFPFEGRKRMRIADEGIRLLSESVDSLITIPNEKLLTILGKDASLLSAFAKADDVLAGAVRGISDIIKRPGMINVDFADVRTVMSEMGMAMMGTGCASGPNRAREATEAAIRNPLLEDVNLQGARGILVNITAGPDLSLGEYSDVGSIIEAFASEHAMVKVGTVIDPDMRDELHVTVVATGLGAKIEKPVKVIDNTVHTSHASQQAAAPAPSRQELPSVNYRDLDRPTVMRNQAQAGAAASRSPNPQDDLDYLDIPAFLRRQAD

SEQ ID NO: 13248 - protein, 382 aa, Catharanthus roseus
SEQERKMKDLNFHAATLSEEESLRELKAFDETKAGVKGIVDTGITKIPRIFIDQPKNLDRISVCRGKSDIKIPVINLNGLSSNSEIRREIVEKIGEASEKYGFFQIVNHGIPQDVMDKMVDGVRKFHEQDDQIKRQYYSRDRFNKNFLYSSNYVLIPGIACNWRDTMECIMNSNQPDPQEFPDVCRDILMKYSNYVRNLGLILFELLSEALGLKPNHLEEMDCAEGLILLGHYYPACPQPELTFGTSKHSDSGFLTILMQDQIGGLQILLENQWIDVPFIPGALVINIADLLQLITNDKFKSVEHRVLANKVGPRISVAVAFGIKTQTQEGVSPRLYGPIKELISEENPPIYKEVTVKDFITIRFAKRFDDSSSLSPFRLNN

SEQ ID NO: 13249 - protein, 81 aa, Gaertnera cooperi
  misc_feature (5)..(5): Xaa can be any naturally occurring amino acid
  misc_feature (46)..(46): Xaa can be any naturally occurring amino acid
  misc_feature (50)..(50): Xaa can be any naturally occurring amino acid
TPQDXMRAGMSYFHETIWKGAPKFLRRVDTALKNIGINERVPYNGXVIQXSSWMGGDRDGNPRVTPEVTRDVCLLARMMAA

SEQ ID NO: 13250 - protein, 398 aa, endosymbiont of Crithidia deanei
MFELVDNIPASPVIKVIGVGGGGGNAVNHMVKSNIEGVEFICANTDAQALKSIGARTILQLGTAVTKGLGAGANPEVGRQAALEDRERIAEVLQGTNMVFITTGMGGGTGTGAAPIIAEVAKEMGILTVAVVTRPFPFEGRKRMQVADEGIRLLSESVDSLITIPNEKLLTILGKDASLLSAFAKADDVLAGAVRGISDIIKRPGMINVDFADVRTVMSEMGMAMMGTGCASGPNRAREATEAAIRNPLLEDVSLQGARGILVNITAGPDLSLGEYSDVGSIIEAFASEHAMVKVGTVIDPDMRDELHVTVVATGLGAKIEKPVKVIDNTVHTSHASQSAAAPAPSRQELPSVNYRDLDRPTVMRNQAQAGAAASRSPNPQDDLDYLDIPAFLRRQAD

SEQ ID NO: 13251 - protein, 222 aa, Hordeum vulgare subsp. spontaneum
MEYQGQQQQHGRVDEYGNPVAGHGVGTGMGTHGGVGTGAAAGGHYQPMRDEHQTGRGILHRSGSSSSSSSEDDGMGGRRKKGIKEKIKEKLPGGHGDQQHAAGTYGYGQQGTGMAGTGGTYGQQGHTGMTGTGGTYGQQGHTGMTGTGATGGTYGQQGHTGMTGAGAHGTTATGGTYGQQGHTGMTGTGMHGAGGTYGQHGTDTGEKKGIMDKIKEKLPGQH

SEQ ID NO: 13252 - protein, 583 aa, Xylella fastidiosa Ann-1
MNRSAHSATRNGASWLTHALEAEGVDTLFGYPGGTIMPFYDALVDSRLTHILVRHEQGAALAANGYARASGRVGVCVATSGPGASNLITGIADAMLDSVPMVCLTGQVASSLLGTDAFQELDVFGLTMPIVKHSFLVRSIQDLPSMVQDAFRIAREGRPGPVLIDLPKDVQMTDASHLQDHVSAAVMAPPQAEAAMIIEAAAAIASAEKPVIYGGGGIALADAVNVFRTFVDTTSIPTTLTLRGLGALPHAHPHYLGMLGMHGTRAANMAIQECDLLLVIGARFDDRATGKVNEFAPFARIVHLDADAYEINKLRNADIAVPGNLATTLTALSASLSPSTAHPHISSSRYEWHERCIGNRERFGVRYDAPGNDIYAPALLKRLSEMAPVDTIIACDVGQHQMWVAQHCKFEDPRNHLTSGGLGTMGFGLPAAMGAQFAYPERTVVLVSGDGSFMMNVQELTTIARCKLPLKIVLLDNNSLGMVRQWQELFFAERYSEIDLSDNPDFTALVQVFGIPAKRITVRSDVEQGLAYLLAQPGPALLHVQIDARANVWPLVPPNTANSTMLESNPAHVQKETPHAIPA

SEQ ID NO: 13253 - protein, 555 aa, Xylella fastidiosa Ann-1
MQPRPQPMQYHPPVRHPLKLATDQHPDCPSTTQHHPGTNVGSPPRFFYSQPAAHHRRQHHNHLTQANDRAMATDIATPQNAEILERLDRHYEAGFVTQIESDSLPPGLNETIIRALSAKKHEPEWMTEWRLAAYRHWLNMPMPEWAKLHIAPIDFQALSYYSAPKGPKYASLDEVPKELLDTYDKLGVPLHERARLAGVAVDAVFDSVSLGTTFRKELAEKGIIFCSISEAIQEHPDLIRQYLGSVVPVRDNYFAALNSAVFSDGSFVFIPKSVRCPMELSTYFRINAGHTGQFERTLIVCEEQAYVSYLEGCTAPIRDENQLHAAVVELVAQEDAEIKYSTVQNWYPGDEAGRGGIYNFVTKRAECRGARSKVIWTQVETGSAITWKYPSCVLLGDDSTGEFHSVALTRHHQQADTGTKMIHIGKRTKSKIVSKGISAGHGQNTYRGLVKIDRNAEGARNHTQCDSLLIGKQCGAHTFPYIEVKHPNATVEHEATTSKISDDQLFYCRARGIAEEDAVSIIVDGFCKQVFRELPMEFAVEAKKLLDISLEGSVG

SEQ ID NO: 13254 - protein, 139 aa, Parietaria judaica
QETCGTMVRALMPCLPFVQGKEKEPSKGCCSGAKRLDGETKTGPQRVHACECIQTAMKTYSDIDGKLVSEVPKHCGIVDSKLPPIDVNMDCKTLGVVPRQPQLPVSLRHGPVTGPSDPAHKARLERPQIRVPPPAPEKA

SEQ ID NO: 13255 - protein, 363 aa, Vibrio vulnificus YJ016
MTDKTYKIAVLPGDGIGPEVMAQAHKVLDAIEKKHAIHFEREEHDVGGIAIDNHGCPLPQSTVTACEESDAVLFGSVGGPKWEHLPPNDQPERGALLPLRKHFQLFCNLRPAQIHSGLEAFSPLRADISGRGFDIVVVRELTGGIYFGQPKGREGEGANEKAYDTEIYHRFEIERIAKIAFESARLRRKKVCSIDKANVLQSSILWREVVEEIAKDYPDVELSHMYIDNATMQLIKDPAQFDVMLCSNIFGDIISDECAMITGSMGMLPSASLNESKFGLYEPAGGSAPDIAGKNIANPVAQILSAALMLRYSLGEEAAAQDIENAVSQALAAGELTADLAGDKPALSTAEMGDKIAQYILNS

SEQ ID NO: 13256 - protein, 81 aa, Gaertnera drakeana
  misc_feature (5)..(5): Xaa can be any naturally occurring amino acid
  misc_feature (63)..(63): Xaa can be any naturally occurring amino acid
  misc_feature (70)..(70): Xaa can be any naturally occurring amino acid
TPQDXMRAGMSYFHETIWKGVPKFLRRVDTALKNIGINERVPYNAPVIQFSSWMGGDRDGNPXVTPEVTXDVCLLARMMAA

SEQ ID NO: 13257 - protein, 96 aa, Arabidopsis thaliana
FIRVHTYTQSTAAFSCGILARRLTPYATYLTQRALVPISRCTGVKTLISMAKTTPHRHYTCRCIQSTATIISGLNPSLSSGLPGKCGVSNPYRISM

SEQ ID NO: 13258 - protein, 550 aa, uncultured proteobacterium
MTLWERAQLAITLLAIDPHRLGGLVIRARAGPAQAAMLAAVQSLDLAKVKLQHHMTVEVLNGDIDLTASLAGRQLVTRKSIFDCAPSLFILPMAERSAPQFSARICQALEEGRGHALLALDEGVEVGDGLPDALTDRLAFHITLEDLALQDLSPMILPRSLEDIRAAVRGVTLPADVMEEAVILAASLGISSLRAPLLLGYAAQAHAALHARYEVTEEDLKLAVMLVYPHRATRLPQDPEPEAPSEQTNPAEAPQDPNQAIPPNDLMIEAVKAVLPPGVLAQLQTVVKQPASGSGSGARRKGNHRGRPLPARLGPKNSGARVDLVASLRAAIPWQTLRKTANPEAVGPIFKASDLRHKRYEIGSDRLLIFTVDASGSAAVARLAEAKGAVELLLGEAYARRDHVALYAFRGTGSEALLPPTRSLVQTKKRLAALPGGGATPLAAGLAAAFQLALQERRNGLTPTLILLTDGRANVALDGSNDRAQAAADALMLAQKIAEAQIPALVIDTTIRPEKTLQTLAGKMRAHYIALPRSDAKSVSGAVSSALAHS

SEQ ID NO: 13259 - protein, 335 aa, uncultured proteobacterium
MKQPFPFSAIVGQDDMKLAMVLTAIDPSIAGVLVFGERGTGKSTAVRALAGLLPPILAVKACPVNSADIKDCPAWCEISDARVQSIATPVVDLPLGASEDRVTGALDIEKALTKGEKAFQPGLFAQANRGYLYIDEVNLLEDHIVDLLLDVAQSGENVVEREGLSIRHAARFVLVGSGNPEEGELRPQLMDRFGLSVDVLSPTNIDERIEVIKRRDAYENDHEAFIAHWQLEDATLRARIVAARAALADLQTADSALRRIAELCIALGSDGLRGELTLLKAARAFAAFAGDEAVTDEHIRKTAVLALRHRLRRDPLDESGSSSRVARTVSEILGD

SEQ ID NO: 13260 - protein, 81 aa, Gaertnera fractiflexa
  misc_feature (49)..(49): Xaa can be any naturally occurring amino acid
  misc_feature (67)..(67): Xaa can be any naturally occurring amino acid
TPQDEMRAGMSYFHETIWKGVPKFLRRVDTALKNIGINERVPYNAPVIXFSSWMGGDRDGNPRVTPXVTRDVCLLARMMAA

SEQ ID NO: 13261 - protein, 589 aa, Methanococcoides burtonii DSM 6242
MRIAILNKDRCQPRRCSHECEKYCPRVRTGYETIVFGDDGKAIISEELCVGCGICVNKCPFSAIMIIGLPEALDKPTHRYGQNGFALYGLPTPQVGKVTGILGPNGIGKSTSVQILSGALVPNFGEDIGDWDTVLEHYAGTGMYDYFKNVVDGKIKVSQKPQYVDMIPKAFNGKTRDLLEGTDERGVMDELVEKLDLGHIINRNIGELSGGELQRVAIAACAARDADFYFFDEISPYLDIYQRINSSKLIQDLAKDKAVLVVEHDLAILDMLSDVVQVAYGMPSGYGVITHPKGVRIAINQYLKGYLPEENVRVRPDAITFEVHPPRVATDIATLLDYNAFSKKYGDGFSLRSDSGSLKEGEVIGIVGPNGIGKSTFVKILAGEVEPDEGELESEVSISYKPQYIKVDSFMQVRQFLRSITRRFDTSYYEAEIIKPLQLEPLFDKMLNDLSGGELQRVAIAACLSKDADLYILDEPSAHLDVEQRSLATKAIKRFAENNGKTAMVVDHDIYMIDMLSERLIVFEGEPAVFGIAHPPSSMQKGMNKFLSDLGITFRRDEETIRPRVNKKDSRLDREQKAKGEYYYYKVDE

SEQ ID NO: 13262 - protein, 282 aa, Haemophilus somnus 129PT
MPAQIISGTELSKNIKFNVAEKIQHYLQQGKRAPGLAVILVGADPASQVYVGSKRRSCEELGIYSKSYDLPAETTEQELLTLIEQLNQDPQIDGILVQLPLPKKINSTKVIEHISPTKDIDGFHPYNVGRLCQRIPTLRACTPLGIMKLLETTGVDLYGQHAVIVGASNIVGRPMALELLLAGCTVTVTHRFTKDLKSHVHQADILVVAVGKPHIIPGEWIKEGAIVIDVGINRVDGKLVGDVQYDEASKKASFITPVPGGVGPMTVAMLMFNTLLAYESHS

SEQ ID NO: 13263 - protein, 540 aa, Arabidopsis thaliana
MKKTNFVSSASGGDPMIRLTFVQVLELEKELEIKRKRLEMIKQKRLTLKSEVRFLRRRYEHLKQDQTLETSPEMLRLSESGGLEVPRKPSGERKKQSGVRASVPCFDLKLKNTICNEKEALANNVASCDLDKKRKRSRGSDVLTFPVSLPDLNGEGNTSGTDKVPGFDLNQISREEEEPEVNGEHMVAEAMKNAMLDNRISDLHVERKLPICGDVEKELNRAVKRKSIRTQNDEAFFNPMEVNGGEGKVEMGSGLYPDWSELTRECLLDIFSRLSQEQRWIGPMLVSKNWMNACYDPTLNTIFDLETRFLSFPESINWWTPEFEDKVDSFLRSVVDRSEGGLTEIRIRHCTERSLSYAAERCPNLEVLWIKNCPNVTDASMEKIAMNCPNLRELDISYSYGITHESLITLGRSCQNLKILKRNLLPRLGPSLPTIVAPLDYLATFPRYGNIEARIIGKYMTQLKHLEIRYSTLTARGLDSVCKGCSNLEYMDLRGCISLTRSDINTNTSGLKNLTEIIKPDFNPPIAVLRVPRPGNPREE

SEQ ID NO: 13264 - protein, 342 aa, Burkholderia sp. NK8
MSSYNIALNFEDGVTRFVECKAGEKVLDAAFRAKINLPMDCSDGVCGTCKCRAESGSYDLGEDYIEDALSDDEKEGGLVLTCQMVPQSDCVIAVPASSTACKTAQSKFAAKVTKVAPHNDAAVVLELDVDAAASAPVFLPGQYVNIDVPGSGQHRSYSFSSAPGETKISFLIKKIPGGVMSTWLESAETGSTVELTGPLGSFYLRAVERPLLFLAGGTGLAPFLSMLEVLARANSQQKIHLIYGVTRDLDLVQVEAIEAYTAKLSNFTFSTVVADADSDHPRKGWVTQHMPAESLNDGDVDVYLCGPPPMVDAVRKHFDDNGVKPNSFHYEKFTPNAAPVTA

SEQ ID NO: 13265 - protein, 114 aa, Leavenworthia stylosa
LVEKFGIDPNNAFAFWDWVGGRYSVCSAVGVLPLSLQYGFSVVEKFLKGASSIDQHFKSTSLEENIPVLLGLLSVRNVSFLGYPARAILPYSQALEKFAPHIQQVSMESNGKGV

SEQ ID NO: 13266 - protein, 435 aa, Brassica oleracea var. alboglabra
MKGVGKPYENSHTSFLLVFFVLTLFSPAFSINTLSSIESLKISNSRTLVSPGNVLELGFFRTPSSSRWYLGMWYKKLSERTYVWVANRDNPLSCSIGTLKISNMNLVLLDHSNKSLWSTNHTRGNERSPVVAELLANGNFVLRDSNKNDRSGFLWQSFDYPTDTLLPEMKLGYDLRTGLNRFLTSWRSSDDPSSGDFSYKLQTRRLPEFYLFKDDFLVHRSGPWNGVGFSGMPEDQKLSYMVYNFTQNSEEVAYTFLMTNNSIYSRLTISSSGYFERLTWTPSSGMWNVFWSSPEDFQCDVYKICGAYSYCDVNTSPVCNCIQRFDPSNVQEWGLRAWSGGCRRRTRLSCSGDGFTRMKKMKLPETTMAIVDRSIGLKECEKRCLSDCNCTAFANADIRNGGTGCVIWTGQLEDIRTYFANGQDLYVRLAPADLV

SEQ ID NO: 13267 - protein, 571 aa, Arabidopsis thaliana
MADEAKAKGNAAFSSGDFNSAVNHFTDAINLTPTNHVLFSNRSAAHASLNHYDEALSDAKKTVELKPDWGKGYSRLGAAHLGLNQFDEAVEAYSKGLEIDPSNEGLKSGLADAKASASRSRASAPNPFGDAFQGPEMWSKLTADPSTRGLLKQPDFVNMMKEIQRNPSNLNLYLQDQRVMQALGVLLNIQIRTQQAGDDMEIGEEEMAVPSRKEPEVEKKRKPEPEPEPEPEFGEEKQKKLKAQKEKELGNAAYKKKDFETAIQHYSTAMEIDDEDISYITNRAAVHLEMGKYDECIKDCDKAVERGRELRSDYKMVAKALTRKGTALGKMAKVSKDYEPVIQTYQKALTEHRNPETLKRLNEAERAKKELEQQEYYDPNIGDEEREKGNDFFKEQKYPDAVRHYTEAIKRNPKDPRAYSNRAACYTKLGAMPEGLKDAEKCIELDPTFLKGYSRKGAVQFFMKEYDNAMETYQKGLEHDPNNQELLDGVKRCVQQINKANRGDLTPEELKERQAKGMQDPEIQNILTDPVMRQVLSDLQENPAAAQKHMQNPMIMNKIQKLISSGIVQMK

SEQ ID NO: 13268 - protein, 266 aa, Ralstonia eutropha JMP134
MLHMETALNTEELDRQRRDGVLWLKLNRPQALNSLTLSLVNALARAIEEAQGDPEVRVIVLTGAGRAFCAGADLKDPARSRPESGAEFVKAIGGLTELIEASATPVIAAINGIAVAGGLELVLACDLVIAAESARIGDAHSNYALFPGAGATARLPRKVGLNNAKLLMFTGDMHPASEWKALGLVNLVVADDGFIGAVEALAKKLAAKSPLVLGRMKQALNDALDQPLSIGLRYERALSNLHHFSADRVEGLAAFKEKRAPRFTGT

SEQ ID NO: 13269 - protein, 114 aa, Leavenworthia stylosa
LVEKFGIDPNNAFAFWDWVGGRYSVYSAVGVLPLSLQYGFSVVEKFLKGASSIDQHFKSTSLEENIPVLLGLLSVWNVSFLGYPARAILPYSQALEKFAPHIQQVSMESNGKGV

SEQ ID NO: 13270 - protein, 814 aa, Oryza sativa
MASAFSPATAAPAASPALFSASTSRPLSLTAAAAAVSARIPSRRGFRRGRFTVCNVAAPSATQQEAKAAGAKESQRPVYPFAAIVGQDEMKLCLLLNVIDPKIGGVMIMGDRGTGKSTTVRSLVDLLPDIRVVVGDPFNSDPDDPEVMGPEVRERVLEGEKLPVVTAKITMVDLPLGATEDRVCGTIDIEKALTDGVKAFEPGLLAKANRGILYVDEVNLLDDHLVDVLLDSAASGWNTVEREGISISHPARFILIGSGNPEEGELRPQLLDRFGMHAQVGTVRDAELRVKIVEERARFDRDPMAFREAYLGKCNHLQQNLDKLQEKLTNMENENHVLRQKALNMSPLNNMPMTTKAFPQKFATPIGLPNGEQKHGYETPPPAKYLASLPQSLTRSRRTRMPVERQEENHEILLRCIKENLGFKDGKPVTACIIYSCLLHWRAFESERTAIFDHVIEAINNVLKGEEADGRLPYWLSNTSSLLCLLQKNLRSNGLFATPSRRSGGTLGIGDKIVQTLRSPSKLMGRSDNLGQVDARYPAILFKQQLTACVEKIFGQLRDNLKKEISPLLSVCIQAPKSSRAQPGKATKSPGIGAQPPSNSHWDNIVKFLDLLMDTLHENYVPSFFIRKLITQLFSFINIQLFNSLLLRRECCTFSNGEYVKAGLSLLEKWITDATDEFAGTSMHELNYIRQAVGFLVIHQKRKKKLEEIRNELCPNLSVRQIYRICSMYWDDKYNTQGISNEVVSAMREEVNKDTQNLVSNSFLLDDDLCIPFSTEDLSIAIPAIDYVDIELPESLHHYASVQLLLKHHDPQPV

SEQ ID NO: 13271 - protein, 681 aa, Oryza sativa
MQGRKMKSAREMAREEKNHHHHQQQQQQQSSSKGQAWFCTTGLPSDVVIEVGDMTFHLHKFPLMSRSKKLHDLITNRESRAAGGGEQDEEEEEDAGEIREEEVVLEVDEDSDVHRIRLPDFPGGAEAFEQAAKFCYGVKLDLTPATAAPLRCAAERLGMSDDHSDDNLISRADRFMSHTVLRNPRDAIRALRSCEGLLPLADDLGLVSRCVDAIAAKAAASTPTALFGWPINDAAAAAAAAAGDRPRRKNNAGAGATWFDDLAGLSLATFTRVIAAMKERNVGPEIIEGALIAYAKRSIPGLSRSGRHVGGATAAAAAAPSSDGEQKAPLETVIANLPEETIKSNAHTGTAMGATTARVLFGLLRTASILQASESARDMLERRIAARLPDAALDDLLIPSYSYLVETLYDVECVERIVRYFLEGRDADDGNDDGSELETPGREASRRAMLAVGRLMDAYLGEIAADANLKPDKFCDLAWALPDGARVYDDGLYRAVDIYLKAHPGLREEEKEKVSGVVDGRKLTLEACTHAAQNERLPLRTVVQVLFFEQLQLRRAIARTIMANEGGAAGQGEEEGDSDAGGTWRVATRGNQMLRLDMDSMRNRVQELERECTSMRKAIEKMDRRGGGSTPGERGATPAMEGRWGSMVTKRFGCKFPAQVCQSQQRTVVARPRRPRIEQSP

SEQ ID NO: 13272 - protein, 558 aa, Erythrobacter sp. NAP1
MLKNPANKYRPFTPINLPDRQWPSRVIEGPPRWLSTDLRDGNQSIIDPMDGVKKARFFDLLVEIGVKEIEVGFPSAGATEFTFIKHLVESGTIPDDVIVQVLTQSREDLIRTSFESLEGARAAIVHLYNAVSPAWRDIVFRMSKDEVREIAKQGAKVMRDEAAKRPDTDWHFQYSPETFSTAEIDFSIEVCEAVMQVLAPTPEHPIILNLPATVEASTPNIYADQIEYFCRNLPNRDSAVISLHTHNDRGTGVAAAELGLMAGADRVEGCLFGNGERTGNCCLVTMALNMYTQGVDPGLDFSDIDRVIETVEYCNDLPVHQRHPYGGELVYTAFSGSHQDAIKKGFEAHDQQNDELWRVPYLPIDPADLGRDYEAVIRVNSQSGKGGFAWVLEQREGLKLPKAMQRDFSKHVQRLADESSRELNAEDIWQAFKGAYHVQTPDKHFQLVDYNETRASDGTRVFSGKIAVEGREQSVSGRGKGLISSVMATIRDVFGVELEVVDYTQQSLGSGTDANAATYLECVDPDGRTVWGCGIDEDVATASVRAVLSAAKSAVSVD

SEQ ID NO: 13273 - protein, 114 aa, Leavenworthia stylosa
LVEKFGIDPNNAFAFWDWVGGRYSVCSAVGVLPLSLQYGFSVVEKFLKGASNIDQHFKSTSLEENIPVLLGLLSVWNVSFLGYPARAILPYSQALEKFAPHIQQVSMESNGKGV

SEQ ID NO: 13274 - protein, 131 aa, Candida albicans SC5314
MSGGKGKAGSSEKASTSRSAKAGLTFPVGRVHRLLRKGNYAQRIGSGAPVYLTSVLEYLAAEILELAGNAARDNKKSRIIPRHLQLAIRNDEELNKLLGDVTIAQGGVLPNIHQSLLPAKKAKAGAASQEL

SEQ ID NO: 13275 - protein, 181 aa, Campylobacter coli RM2228
MDGHFVPNLTFGPCVIEKISTITEIPLDVHLMVKDVGKFVDLFIPIKPKFISFHIESEAHPIRLCEYIRSQGIHPAIVLNPHTPINSIKHMIDFVDMVLLMSVNPGFGGQKFLPLVYDKIKELRRLIDEKNAKVFIEVDGGVNGLNASDLEAAGADILVAGSYIFSSNDYKTSISSLKLEF

SEQ ID NO: 13276 - protein, 140 aa, Brassica napus
  misc_feature (36)..(36): Xaa can be any naturally occurring amino acid
  misc_feature (50)..(50): Xaa can be any naturally occurring amino acid
  misc_feature (71)..(71): Xaa can be any naturally occurring amino acid
  misc_feature (81)..(81): Xaa can be any naturally occurring amino acid
  misc_feature (125)..(125): Xaa can be any naturally occurring amino acid
  misc_feature (130)..(131): Xaa can be any naturally occurring amino acid
PPVPFEHACPVNKDVLPTGHKVDANSKIIIPLYALXRMKAVWGQDASEFXPERWVSNTGSLRHEPSFKFLXFNAGPRSCLXKQLAMNMMKTVIVEILQNYDIHVIKGQKIETFPGLMLLMTHGFXVTITXXDSALQSIVN

SEQ ID NO: 13277 - protein, 305 aa, Methanopyrus kandleri AV19
MKGDTITVSETIRVATRSSRLAIIQTREVIELLERESPRDVEVEIVKTKSRGDVVRDRPLHKLGEKGVFVKEVDRLVLEGKADIAVHSAKDVPSVVDYPVDVAAVPPRRDPRECLVSRHGGLKELPRGATVGTSSPRRRAQILLERPDLKVEPMRGNVDTRVSKVRRREYDAAVLAKVGLDRLGMTSEVSEVYDPEEFVPPAGQGALMITCRKDDDRVKRLLEVVDDEKSRVEVETEKAVVRELGVGCSEPVGVHVRARDGDHVRLVLGLFEEDGSCGHVLKMRGSPEDVVREAVSQAREVLSDG

SEQ ID NO: 13278 - protein, 171 aa, Zea mays
MVKYSQEPGNPTKSAKAMGRDLRVHFKNTRETAFALRKLSLTKAKRYLEDVIAHKQAIPFRRYCGGVGRTAQAKSRHSNGQGRWPVKSARFILDLLKNAESNADVKGLDVDNLYVSHIQVNQAQKQRRRTYRAHGRINPYMSSPCHIELILSEKEEPVKKEADNIVAARKQ

SEQ ID NO: 13279 - protein, 406 aa, Alkaliphilus metalliredigenes QYMF
MYKKYTLDNGLRIVTEHIPHVKSISIGLWIKAGSRNEDESNNGVSHFIEHMLFKGTENRSAKDIAEEIDGIGGQINAFTSKECTCYYAKVLDEHYELVLDVLADMFFKSKLDSLEIDKERSVIIEEISMYEDSPEDLAHDLLSQTIYSGNTLGLPILGTQKTLENIDKKSMKDYMENYYTPDNTVIAIAGNFEEKSLLQAIEKRFANWESQPHRSKQASEIKLNFEEKVKKKEIEQVHLCLGFQGTSLDSKNLYPLLVFNNILGGSMSSRLFQNIREEKGLAYSIYSYPSIYTDSGFLAIYAGMNPQQYSVVSELISQELSNLREKGLTETEFRKSKEQLKGNYILGLESTSGRMSSMGKSELLLGKIYSPKEVVDRINRIEIKNVLQVIEDSIGTNNICSATVRK

SEQ ID NO: 13280 - protein, 529 aa, Debaryomyces hansenii CBS767
MSSDTFHEFGVLFDRIQPYLTSLWAICIGAYILFSISTRINDRILMKKLGAKPMQMNAPNSFWGIPLMFRLLKAKREGTMVDVTKERYKELGVDTFNVNIAGTHAVVTRDPENIKAILATQFNDFALGKRHTHFKPLLGDGIFTLDGAGWKHSRTMLRPQFAREKVAHVKALEPHLQTLAKHIINSKGERFDIQPLFFRLTIDSATEFLFGESVENLHDESVGLTRDPVDFDGKSGFADAFNTSQTWLASRAVTQNLYFLVDGRSFRSSNAKVHKFADYYVRKALEASSEDLEKASRDGYIFLYELVKQTRDPVILRDQLLNILLAGRDTTAGLLSFTFFELARNQDVYDKLKEEIYEKFGEGEDSRVDEITFESLKKCEFLKCVLNEILRMYPSVPQNFRFAIRNTTLPKGGGPDGKSPIFVSKGKNLFYSMYSAHRNPKYYGKDAEEFRPSRWLEPEIRKVGWAFLPFNGGPRICLGQQFALTGASYIVVRLIQMFPNLSSFCEEYPPRKNTQLTMSHQNGVYIGMF

SEQ ID NO: 13281 - protein, 525 aa, Debaryomyces hansenii CBS767
MSSSAHELFRSIEPYLTNWWIICIGTYVLFSILTWINERILMKKLGAKPIQFIAPDPFWGIPLMFRLLRKKKDGTMVDMTKERFEEFGIETFSFRVGGTPVITTKDPENIKAMLATQFNDFALGKRHTYFKPLLGDGIFTLDGAGWKHSRAMLRPQFSREQVAHVRALEPHLQTLAKHIINSKGERFDIQPLFFRLTIDSATEFLFGESVENLHDESVGLTRDPVDFDGKSGFADAFNTSQAWLASRAVSKNLSLFVDGKEFRNSNAKVHKFADYYVRKALEASPEDLEKASRDGYIFLYELVKQTRDPVILRDQLLNILLAGRDTTAGLLSFTFFELARNQDVYDKLKEEIYEKFGEGEDSRVNEITFESLKKCEFLKCVLNEILRLYPSVPLNTRCATKNTTLPRGGGPDGQSSIFIPKGKSVLYSVYATHRNPKYYGKGAEEFRPSRWLEPEIRKVGWAFLPFNGGPRICLGQQFALTEASYIIVRLIQMFPNLNSFCEKYPPRKSSHLTMCHQDGVSIGMF

SEQ ID NO: 13282 - protein, 725 aa, Fusobacterium nucleatum
MNNYWEQLLDKARANHLNLDFDKIKLALGFAEESHQGQYRKSGDDYIIHPVEVAKILMDMKMDTDTIVAGLLHDVVEDTLIPIADIKYNFGDTVATLVDGVTKLKALPNGTKNQAENIRKMILAMAENIRVILIKLADRLHNMRTLKFMKPEKQQSISKETLDIYAPLAHRLGMAKIKSELEDIAFSYLHHDEFLEIKRLVDNTKEERKDYIENFIRTIIRTLSDLGIKAEVKGRFKHFYSIYKKMYQKGKEFDDIYDLMGVRVIVEDKATCYHVLGIVHSQYTPVPGRFKDYIAVPKSNNYQSIHTTIVGPLGKFIEIQIRTKDMDDIAEEGIAAHWNYKENKKSSKDDNIYGWLRHIIEFQNESDSTEDFIEGVTGDIDRGTVFTFSPKGDIIELPVGATALDFAFMVHTQVGCKCVGAKVNGRMVTIDHKLKSGDKVEIITSKNSKGPSIDWLDIVVTHGAKGKIRKFLKDENKETVTKIGKDNLEKEASKLGMTLKEIENDPTLKKHMEKNNIPNLDEFYFYIGEKRSRLDILITKIKTSLEKERAASTLTIEEVLKKKEEKKKEGKNDFGIVIDGINNTLIRFAKCCTPLPGDEIGGFVTKLTGITVHRKDCANFHAMVEKDPSREIMVKWDENLIETKMNKYNFTFTVVLNDRPNILMEIVNLIANHKINITSVNSYEVKKDGDRVVKVKISIEIKGKTEYDYLINNILKLKDVISVER

SEQ ID NO: 13283 - protein, 349 aa, Methanosarcina mazei Go1
MENGMHHNVFTNTPTIPIDVKDRSVSELMDGMLRTGFQGRKLAESVQAWSNMLKEKDTTVLMGLSGAMVPAGMRRVISYLIRERMIDCLVSTGANLFHDSHEALGRKHYVGSHLANDEKLFEHGVDRIYDVFAVEEEFRNADNLIADFAEEIGEISCSSREFMYLLGKELVRRGAAEDSIVVSAYRHNVPIFVPALSDSSIGIGLTIARRRGLKLEIDQIKDVDEITQIVEKSGHTGVVYVGGGVPKNFIQQTEVIASILGMDVPGHEYAIQYTSDSPHWGGLSGCTFDEAVSWGKVAAQAKKVQVFVDATIALPIVAHALHEKTRGVKRTAPVFSWDGPEGLEIAYNE

SEQ ID NO: 13284 - protein, 525 aa, Debaryomyces hansenii CBS767
MSSNFHEVVESIEPYVTNWWFICIGAYVLFSILTWINKRILMKRLSAKPMQVTARDAFVGIPLVFNLLKAKREGTMVDMTKERYEEFGVDTFDFRIAGTHAIATRDPENIKAVLATQFNDFVLGKRHAHFKPLLGDGIFTLDGAGWKHSRAMLRPQFAREQVAHVKALEPHLQTLAKHIINSKGERFDIQPLFFRLTIDSATEFLFGESVESLHDESVGLTRDPVDFDGKSGFADAFNNSQAWLASRAVSQNFYFLLNGKDFKDSNANVHKFADYYVNKALETSPEDLEKASRDGYIFLYELVKQTRDPVILRDQLLNILLAGRDTTAGLLSFTFFELARNQDVYDKLKEEIYKKFGEGEDSRVDEITFESLKKCEFLKCVLNEILRMYPSVPQNFRFSIKNTTLPRGGGPDGKSPILIPKGQNLLYSVYATHRNPKFYGKDADEFRPSRWLEPEIRKVGWAFLPFNGGPRICLGQQFALTEASYIIVRLIQMFPNLGSFCEEYPPRKSSHLTMCHQDGVFIGMS

SEQ ID NO: 13285 - protein, 157 aa, Mycobacterium tuberculosis CDC1551
MAISFRPTADLVDDIGPDVRSCDLQFRQFGGRSQFAGPISTVRCFQDNALLKSVLSQPSAGGVLVIDGAGSLHTALVGDVIAELARSTGWTGLIVHGAVRDAAALRGIDIGIKALGTNPRKSTKTGAGERDVEITLGGVTFVPGDIAYSDDDGIIVV

SEQ ID NO: 13286 - protein, 467 aa, Oryza sativa (japonica cultivar-group)
MASLASASASTSLVFSTSSSKPRLGSSVGFSSPARFRRTAAAAASKGTGRRAGLLVMRAARGKFERTKPHVNIGTIGHVDHGKTTLTAALTMVLASVGGSAPKKYDEIDAAPEERARGITINTATVEYETETRHYAHVDCPGHADYVKNMITGAAQMDGAILVVSGADGPMPQTKEHILLAKQVGVPKIVVFLNKKDQVDDEELLQLVELEVRELLSSYEYDGDEVPIVAGSALKALENLMANPAIKRGDDEWVDGIFSLIDSVDNYIPVPQRQTDLPFLLAVEDVFSITGRGTVATGRIERGTVKVGDTVDIVGIRETRNCTVTGVEMFQKTMDDAMAGDNVGLLLRGMQKDDIERGMVLAKPASITPHTKFDAVVYVLKKDEGGRHSPFFPGYRPQFYMRTTDVTGNVPKIMNDKDEEAKMCMPGDRVKMVVELIQPVACEQGMRFAIPEGGKTVGAGVINTILK

SEQ ID NO: 13287 - protein, 313 aa, Haemophilus influenzae
MASVVTITLNAAYDLVGRLNRIQLGEVNTVETLGLFPAGKGINVAKVLKDLGVNVAVGGFLGKDNSADFEQMFNQHGLEDKFHRVDGKTRINVKITETEADVTDLNFLGYQISPQVWQQFVTDSLAYCLNYDIVAVCGSLPRGVSPELFADWLNQLHQAGVKVVLDSSNAALTAGLKAKPWLVKPNHRELEAWVGHPLNSLEEIIAAAQQLKAEGIENVIISMGAKGSLWINNEGVLKAEPAQCENVVSTVGAGDSMVAGLIYGFEKGLSKTETLAFATAVSAFAVSQSNVGVSDLSLLDPILEKVQITMIEG

SEQ ID NO: 13288 - protein, 358 aa, Thermosynechococcus elongatus BP-1
MSHAVTLIRGDGIGPEVAAAARTAIDATGVKIDWVVVDAGVAMMERYGTPLPEEVIDAIKSTKTAIKGPITTPVGTGFRSVNVEIRKRLNLYANLRPAKSIVGVKSYFQNIDLVIVRENTEDLYAGIEFAYTSPEAAKARAFLSDLSGKPIREDAAIGVKPISVLGSDRILEFAFKYAKANGRKKVTAVHKANIMKFTDGLFLERAREIASRYPDIVFEDRIVDNMCMQLMQKPELYDVMVMPNLYGDILSDLCAGMIGGLGVAPGANIGDECAVFEAIHGSAPKYAGQNKANPTALILSGVLMLQHLGEMEAAQRLQAAVEKVIAEGRFVTYDLAAPGKEPVGTQEMAAAIAEYAAP

SEQ ID NO: 13289 - protein, 589 aa, Glycine max
MSSASLKEMRNGGEDYSNGHGGGGVRDLYGEDCATEDQLITPWTFSVASGCSLLRDPRYNKGLAFTEGERDAHYLRGLLPPAIFNQELQEKRLMHNLRQYEVPLHRYMAMMDLQERNERLFYKLLINNVEELLPVVYTPTVGEACQKYGSIFRRPQGLYISLKEKGKILEVLKNWPEKSIQVIVVTDGERILGLGDLGCQGMGIPVGKLSLYTALGGVRPSSCLPITIDVGTNNEKLLNDEFYIGLKQKRATGQEYAELLEEFMHAVKQNYGEKVLIQFEDFANHNAFDLLEKYSSSHLVFNDDIQGTASVVLAGLLASLKLVGGTLVDHTFLFLGAGEAGTGIAELIALEISKQTKAPVEETRKKIWLVDSKGLIVSSRLESLQQFKKPWAHEHEPVKSLLDAVKAIKPTVLIGSSGAGKTFTKEVVETMASLNEKPLILALSNPTSQSECTAEEAYTWSKGKAIFASGSPFDPVEYEGKLFVPGQANNAYIFPGFGLGLIISGAIRVRDEMLLAASEALAAQVSQENYDKGLIYPPFSNIRKISAHIAAKVAAKAYDLGLASHLPRPKDLVKYAESCMYSPGYRSYR

SEQ ID NO: 13290 - protein, 247 aa, Hordeum vulgare subsp. spontaneum
MEYQGQQQQHGRVDEYGNPVAGHGVGTGMGTHGGVGTGAAAGGHYQPMRDEHQTGRGILHRSGSSSSSSSEDDGMGGRRKKGIKEKIKEKLPGGHGDQQHNAGTYGYGQQGTGMAGTGGTYGQQGHTGMTGMGATDGTYGQQGHTGMAGTGAHGTAATGGTYGQQGHTGMTGTGMHGTGGTYGQQGHTGMTGTGMHGTGGTYGQQGHTGMTGTGMHGTGGTYGQHGTDTGEKKGIMDKIKEKLPGQH

SEQ ID NO: 13291 - protein, 475 aa, Vibrio vulnificus YJ016
MNSLFRQQCYLLGEWRSAPQTMTITNPFNDEVIGTVPNMGEKETQEVIAGADKAFQQFKALTAQERANLLHRWHQLILEHSDELAHIMTLEQGKPLAEAKGEVLYAASFIEWFAEEARRAYGTLVPSHKANAKILVTKEPIGVVAAITPWNFPAAMITRKCGPAFAAGCPVILKPAPDTPFTALALAVLAEKAGFPAGVFNVITGDAVAIGGELTSNKRVRKLSFTGSTPVGKLLMRQSADNIKKLSLELGGNAPFIVFEDADLDAAVEGAMIAKFRNAGQTCVCANRLYVQRSVYTEFCEKLVEKVSALNVGNGFDQGVHLGPLINDAAVAKVVQHVEDAQSKGAHIECGQLPTAGSRLVQPLVLSGVTDEMLVAQEETFGPMAPLFVFDSEEEVLARANNTDFGLAAYFYTQSLSRAWRVSEALEAGIVGVNEGLISTTVAPFGGVKESGLGREGSFLGMDDYMESKYILMGL

SEQ ID NO: 13292 - protein, 135 aa, Oryza sativa
  misc_feature (22)..(22): Xaa can be any naturally occurring amino acid
  misc_feature (61)..(61): Xaa can be any naturally occurring amino acid
  misc_feature (67)..(67): Xaa can be any naturally occurring amino acid
  misc_feature (76)..(76): Xaa can be any naturally occurring amino acid
MLAPWLERMDRGGEPEKSPDVXLDWLNKDMKRLIHAVYHVEDTNRTIQCCTNCFGMKLLRXIQDVPXEKYTNAFLXLGPEDTHFALELTYTYGVDKYDIAAGSGHFTIVSEDTFLMAENMKSSVGLKISLEPGPV

SEQ ID NO: 13293 - protein, 227 aa, Hordeum vulgare subsp. spontaneum
MEYQGQQQQHGRVDEYGNPVAGHGVGTGMGTHGGVGTGAAAGGHYQPMRDEHQTGRGILHRSGSSSSSSSEDDGMGGRRKKGIKEKIKEKLPGGHSDQQHNAGTYGYGQQGTGMAGTGGTYGQQGHTGMTGMGATDGTYGQQGHTGMAGTGAHGTAATGGTYGQQGHTGMTGTGMHGTGGTYGQQGHTGMTGTGMHGTGGTYGQHGTDTGEKKGIMDKIKEKLPGQH

SEQ ID NO: 13294 - protein, 164 aa, Pseudomonas syringae pv. phaseolicola 1448A
MHYITPDLCDAYPDLIQVVEPMFSNFGGRDSFGGQIVTVKCFEDNSLVKEQVELDGKGKGKVLVVDGGGSLRCALLGDMLAEKAARSGWEGMLIYGCIRDVDVIAQTDLGVQALASHPKKTEKRGIGDLNVLVTFGGVTFRPGEYLYADNNGVIISPSPLTMPE

SEQ ID NO: 13295 - protein, 82 aa, Zea mays
  misc_feature (59)..(59): Xaa can be any naturally occurring amino acid
  misc_feature (61)..(61): Xaa can be any naturally occurring amino acid
MSDKGRPLPKFGEWDVNDPASAEGFTVIFNKARDEKKTGGKPGSPGKSSDGHAKSGGGXRXDPSKPHPKKWLCCMQSPAVDS

SEQ ID NO: 13296 - protein, 81 aa, Gaertnera inflexa
  misc_feature (21)..(21): Xaa can be any naturally occurring amino acid
TPQDEMRAGMSYFHETIWKGXPKFLRRVDTALKNIGINERVPYNAPVIQFSSWMGGDRDGNPRVTPEVTRDVCLLARMMAA

SEQ ID NO: 13297 - protein, 327 aa, Zea mays
AGGVIFCSIPKSICEYPDLVRHYLGSIVLPGDNYYAALNSAVFSDGSFCFVPKDTVCPMEISTYFRINNKETNQFEGTLIVADERCTYVLLIELCLQVDGVKVRLPPWPPPVGTFSLPYDVCSGMHYNCRDCAWFKGIWQPLFLVTPFYIRRLKLGWDVFLGKEVGEPRGLKWLAVSSWNMAEKMQKGGKYDYASEFLEFADEFFSSMFSVVLSTRCLLNCFIVLHTCFSTAISIPKLGDADNGFAGAILEDQIFIDTLTSRKEMKGQVHKIACHLLYTMLGHVHKTASNGDKRASLHSDRRTWGLCDRCLERWSYGQKCTHSVQLH

SEQ ID NO: 13298 - protein, 691 aa, Beta vulgaris
MSESSDSILPYSYAPLATKNEFNGFGPGENQPRRRSLKIGLAVFSTLMICALLMSILDYNNNVIENNVSNNNAPNKYNNVVGDLTLRPPPENVASVEVMPGSKDLLFKVSRGKPHGVSQKANSLPLRGLKVPFFDWNDLQLAWQRTAFHFQPQKNWMNDPNGPLYYNGWYHFFYQYNPAGAVWGNIVWGHAVSKDLIRWKHLPIAMVADRWYDFNGVWTGSATILPDGQIMMLYTGSTNESVQVQNLAYPANLSDPLLLEWVKYPGNPVLVPPPGIGKLDFRDPTTAWLTSEGKWRITIGSKLNKTGISLVYDTTDFKNYELLSNILHAVQGTGMWECVDFYPVSVAEPNGLDTSTNGPSVKHVLKASMDDDRNDYYTLGTYIEDNVTWVPDNPAIDVGIGLRYDYGRFYASKTFYDHEKKRRILWGWITEGDSEAADVKKGWASLQGIPRTVLFDQKTRTNLVQWPVEEVETLRQNNKDFDKVEVPAGSVVPLDVSAATEIDIIAEFDIDKEALENLPVSEEHYSCPASKGAAQRGALGPFGLLVLANNDLAEQTPVYFYVIKTLSGSFKTFFCTDLSRSSAATDVFKNIYGSTVPVLKGEKLSMRILVDHSIVEAFAQGGRTCITSRVYPTKAIYKETKLYVFNNATTATVTASIKTWQMSSARMLRNSIWVHLIMFFSTFIFIGRPLI

SEQ ID NO: 13299 - protein, 179 aa, Avena strigosa
LLVLDDVWTREDHKWEQLKARFEHGGMGSVVLTTTRDNVVAKIIGTVEAYNLEGLGGQYITEIIETTAFSRLKKEEERPSVLVNMVGEIAARCVGSPLAAVALGSILRNKTSEEEWKAVSTRSNICTGETGILPILELSYNDLQPHMKQCFAFCAIFPKDYKIDVDKLIQLWIALGILE

SEQ ID NO: 13300 - protein, 217 aa, Glycine max
MATISAVQVEFLEFPAVVTSPASGKTYFLGGAGERGLTIEGKFIKFTGIGVYLEDKAVPSLAAKWKGKTSEELVHTLHFYRDIISGPFEKLIRGSKILPLAGAEYSKKVMENCVAHMKSVGTYGDAEAAAIEKFAEAFKNVNFAPGPLFLYRQSPDGILGLSFSEDVTIPEKEAAVIENKAVSAAVLETMIGEHAVSPDLKRILASRLLRIEHGIIV

SEQ ID NO: 13301 - protein, 284 aa, Beta vulgaris
  misc_feature (56)..(56): Xaa can be any naturally occurring amino acid
PLYYKGFYHLFYQYNPDSAVWGNITWGHAISTDLIHWKYLPISMKPDQWYDINGVXTGSATILPDGKIMMVYTGDTDKFVQVQNLAYPANLSDPLLLDWVKYPGNPVLTPPEGIGAKDFRDPTTAWVGPDGIWRLIIGSKTGTTGISLVYKTKDFKTYELESNLHAVPGTGMWECVDFYPVSITGQNGLDTSAYGSGMKHLLKASLDDNKQDHYALGTYDMTTQTWTPDNPDMDVGLGLRLDYGKYYASKTFFDQNKQRRILWGWVGETDTEADDLLKGWASLQ

SEQ ID NO: 13302 - protein, 469 aa, Erwinia amylovora
MSEAHLLKQALRAVLSGQQRAARDHHRPMWHLAPPVGLLNDPNGFIHFEQRYVLCYQWNPLDCKHGAKFWGQWSSCDLVHWRHEPLALAPSENYESHGCYSGCAVNNQGVLTLIYTGNVKFDDGSRTAWQCLATRDQQGEFHKLGPVLALPEGYTGHVRDPKVWQHDGQWYMVLGAQDLQLQGKVLLLRSADLHHWTLLGEIAGSQLNGLGDFGYMWECPDLFELDGSHVLVVCPQGLASEARRYRNTFQSGYFCGQLDHDSASFCHGQFQELDHGFEFYAPQTCLSDDGRRLLIGWMGIPDDDEFYQPTKAHGWMHTLTCPRELTLCAGRIHQQPARELQQLRQQETRLVGCAEDLPALDIGSAELELSVDGVCHARFGDRLTLCIDRPGITLRRNNLRSGDVEERYWMGEVRTLRILCDSSSIEIFINDGEGVMSSRYFPAAEPRLRFSGSAQIALRYWRLQQCVIE

SEQ ID NO: 13303 - protein, 347 aa, Rickettsiella grylli
MATHELEGTIQRLTIHGKGILAADESQATIAKRFSPLHIESTAENRRHYRELLFTTPGIEAFISGVILHEETLGQKTKDGLLFSDYLDNEGIVPGIKVDKGLISLNTEEKMTQGLDGLAERLLTYKNLGACFAKWRAVFSISNTLPSSLAITANTQALARYASICQHNGVVPIVEPELLIEGDHSLSRCAEATETVLYSVFEELHKHHILLECMLLKPSMVIAGNQYTPQPHIAEVAAATLKILRRTVPAAVPSINFLSGGQSPEAATAHLNTMNKLQPSRHPWRLSFSYARALQEPALKIWNGKAHNIKAAQRAFYKRAKLNAAACKGHYQSSMEKEEKEVETNFV

SEQ ID NO: 13304 - protein, 104 aa, Oryza sativa
TFIHSFWDFVGLSFYTTEEELKNVFSPFGAVEEARLVRDNQTGRPKGFGFVKYSSQADAEKAVKAMDGRVFALLIPYLAYDPQFTFLMLVLILLYLRRVLKICI

SEQ ID NO: 13305 - protein, 397 aa, Tropheryma whipplei TW08/27
MAKAKFERTKPHVNIGTIGHVDHGKTTLTAAISRVLSERLPSNTNVKQDFDAIDSAPEERQRGITINISHIEYETEKRHYAHVDAPGHADYIKNMITGAAQMDGAILVVAATDGAMAQTREHVLLAKQVGVPYLLVALNKADMVSDEEILELVELEVRELLSTHGFDGENVPVVRVSGLKALEGDQKWGDAVMELMKAVDESIPDPVRDRDKPFLMPIEDVFTITGRGTVVTGRAERGVLAVNSEVEIVGIRPTQKTTVTGIEMFRKQLDEAWAGENCGLLLRGTKREDVERGQVVVKPGSVTPHTKFEGKAYILSKDEGGRHNPFYSNYRPQFYFRTTDVTGVITLPEGTEMVMPGDTISITVDLIQPIAMEEGLGFAIREGGRTVGAGTVVKILE

SEQ ID NO: 13306 - protein, 407 aa, Oryza sativa
MTVVRAALLLLVALSALSLLAAGSRNDRHAGLGLATLLPIHSCPRQASPSNIVAVARHCDGGELLAVRIGRRSEKRRKKEGTRRKEGGDVEMVVLVVATTSDAASATPAAAFLAMPGWTPGPSIPDGVESFANGAGVRLLRHARGIVEEDDLDLRWEAATGERVSEVVLLSRHTAVSNRPALTVHPIGVPHLRDGVDVPPQGGRPGWAAPPNPRIGPWLRLLRRIAADRGLVPEFEITLEGTHHGPVTNTPTLFVEIGSTEEYWGRQDAADAVALLLWKGLGLGEEESVGNWHGNGEKVLLGIGGGHYAPRHMDIVTKDGVWVGHLLSGYSLPMEEPKQMNGKNVADVGGMWKHSIKVSYEATKAAFPGGEIIAHIDQKSFKGWQKNAITSYLQELNIRVGKPNDFF

SEQ ID NO: 13307 - protein, 114 aa, Leavenworthia stylosa
LVEKFGIDPNNAFAFWDWVGGRYSVCSAVGVLPLSLQYGFSVVEKRSYLTLKPLRNLLRTFKFLKGASSIDQHFKSTSLEENIPVLLGLLSVWNVSFLGYPARQVSMESNGKGV

SEQ ID NO: 13308 - protein, 218 aa, Gibberella zeae PH-1
MTMNTPLDGHFVPNITFGPPVVAAIRGHVDQPTEAHGRGTFDCHMMIAEPKKWVKEFKKAGCNLYCFHYEAAFSSAAENPEDQTDEKTNPKALIRYIHDQGLLAGIAIKPDTSVDVLWEILENSEEKERPDMVLVMTVYPGFGGQKFMASELPKVQALRAKYPELNIEVDGGIGPKTIDEAADAGANVIVAGSAVFGANDPSEVIAQLRQSVDARSAK

SEQ ID NO: 13309 - protein, 622 aa, Pyrococcus horikoshii OT3
MDEFVKGLMKNGYLITPSAYYLLVGHFNEGKFSLIELIKFAKSRETFIIDDEIANEFLKSIGAEVELPQEIKEGYISTGEGSQKVPDHEELEKITNESSVESSISTGETPKTEELQPTLDILEEEIGDIEGGESSISTGDEVPEVENNNGGTVVVFDKYGYPFTYVPEEIEEELEEYPKYEDVTIEINPNLEVVPIEKDYEIKFDVRRVKLKPPKVKSGSGKEGEIIVEAYASLFRSRLRKLRRILRENPEVSNVIDIKKLKYVKGDEEVTIIGLVNSKKETSKGLIFEVEDQTDRVKVFLPKDSEDYREALKVLPDAVVAFKGVYSKRGIFFANRFYLPDVPLYRKQKPPLEEKVYAVLTSDIHVGSKEFCEKAFIKFLEWLNGYVESKEEEEIVSRIRYLIIAGDVVDGIGIYPGQYSDLIIPDIFDQYEALANLLSNVPKHITIFIGPGNHDAARPAIPQPEFYEEYAKPLYKLKNTVIISNPAVIRLHGRDFLIAHGRGIEDVVSFVPGLTHHKPGLPMVELLKMRHLAPTFGGKVPIAPDPEDLLVIEEVPDLVQMGHVHVYDTAVYRGVQLVNSATWQAQTEFQKMVNIVPTPGLVPIVDVESARVIKVLDFSRWC

SEQ ID NO: 13310 - protein, 114 aa, Leavenworthia stylosa
LVEKFGIDPNNAFAFWDWVGGRYSVCSAVGVLPMSLQYGFSVVEKFLKGASSIDQHFKSTSLEENIPVLLGLLSVWNVSFLGYPARAILPYSQALEKFAPHIQQVSMESNGKGV

SEQ ID NO: 13311 - protein, 905 aa, Azotobacter vinelandii
MLTLLPSCLLALVLGIYFTWQQLAEMHGNLVGRGQLIVSQLAPLAAPALAQNYHNRLQRIANRVLDQTDIRAVSFLDSELGTIVHAGPSLNGPLPPQDPTQLTMVRDNSATHLLMPVLGYHQNLASGSNDRDDHLLGWIALEISHHNALLQGYRNLLASLLLILSVLLVSAFLALRVGRSISDPLRRIQQGVSQLRDGHLETRLPSLRSHELDELAAGINRMAEVMQHAQEEMQNSIDQATEDVRQNLETIEIQNIELDMVRREALEASRIKSEFLANMSHEIRTPLNGIIGFTNLLQKCELTPRQHDYLNTIQKSADSLLDIINEILDFSKIEAGKLVLEHTPFNLRELIQDTLTILAPAAHAKHLELVSLIYRDTPLALNGDPQRLRQVLTNLISNAIKFTNEGTIAVRAMVEDIGEEFAQLRISVHDTGIGLSQEDLNALFQAFSQADNSLTRQAGGTGLGLVISKRLIEQMGGEIGVNSVPGEGSEFWIRLSLPLDDHSEDEPPTALHGHRVALLEQHELARQSIQHQLEDCGLEVQPFAELDSLLAGVAAARQEERPVGLAVLGVTSRDTSAEELAQRIADLERLGCKCLVLCPTTEQMFYQEVLPEAQIQLQSKPAHRDKLQAALGELLTPQPTGSQTLGPLGNRAPRLLCVDDNPANLLLVQTLLGDMGAAVTVADSGHAAVEAAQRERFDLIFMDVQMPGMDGRQATRAIRQWEAGQPEQRHTPIIALTAHALANERRALLQSGMDDYMTKPINERQLAQVVHKWTRLHLRSPGAQQVHEVQPASIGHLSVLDSEEGLRLAAGKPDLAADMLSMLLASLDADRQAIHQARRDGDRAALIERVHRLHGATRYCGVPQLRAACQHSETLLKQHAPAADTALDELDAAILRLAGEAKFGA

SEQ ID NO: 13312 - protein, 283 aa, Glycine max
MEGNSGGGGGGNDVELLCKTLQVEHKLFYFDLKENPRGRYLKISEKTSATRSTIIVPFSGISWFLDLFNYYVNSDDQDLFSKELQLDTKVFYFDIGENRRGRFLKVSEASVSRNRSTIIVPAGSSRDEGWAAFRNVLAEINEASRLFILPNQQNSESSERLVGLSDDVGAGFISGHSTQPATSSELNVDRSVDLPPQDEIGNLGVSKVIRADQKRFFFDLGSNNRGHFLRISEVAGSDRSSIILPLSGLKQFHEIVGHFVEITKDRIEGMTVANVRTVDPPQR

SEQ ID NO: 13313 - protein, 114 aa, Leavenworthia stylosa
LVEKFGIDPNNAFAFWDWVGGRYSVCSAVGVLPLSLQYGFSVVEKFLKGASSIDQHFKSTSLEENIPVLLGLLSVWNVSFLGYPARAILPYSQALEKFAPHIQQVSMESNGKGV

SEQ ID NO: 13314 - protein, 590 aa, Asparagus officinalis
MCGILAVLGCSDDSQAKRVRVLELSRRLKHRGPDWSGLCQHGDCFLSHQRLAIIDPASGDQPLYNEDKSIVVTVNGEIYNHEELRRRLPDHKYRTGSDCEVIAHLYEEHGEDFVDMLDGMFSFVLLDTRNNCFVAARDAVGITPLYIGWGLDGSVWLSSEMKGLNDDCEHFEVFPPGNLYSSRSGSFRRWYNPQWYNETIPSAPYDPLVLRKAFEDAVIKRLMTDVPFGVLLSGGLDSSLVAAVTARHLAGSKAAEQWGTQLHSFCVGLEGSPDLKAAKEVAEYLGTVHHEFHFTVQDGIDAIEDVIFHIETYDVTTIRASTPMFLMARKIKSLGVKMVISGEGSDEIFGGYLYFHKAPNKEEFHHETCRKIKALHQYDCLRANKATSAWGLEARVPFLDKEFMDVAMSIDPESKMIKPDLGRIEKWVLRKAFDDEENPYLPKHILYRQKEQFSDGVGYSWIDGLKAHAAKHVTDRMMLNAARIYPHNTPTTKEAYYYRMIFERFFPQNSARLTVPGGPSIACSTAKAIEWDARWSNNLDPSGRAALGVHDSAYDPPLPSSISAGKGAAMITNKKPRIVDVATPGVVIST

SEQ ID NO: 13315 - protein, 574 aa, Erythrobacter sp. NAP1
MECLVDQGVEFVFGYPGGAVLPIYDELFGDERIRHILVRHEAGAGHAAEGYARATGKPGVVLVTSGPGATNAVTAIADAYMDSIPMVVITGQVPTALIGTDAFQEADTVGITRHCTKHNYLIKDPADLVATVEEAFRIATTGRPGPVVVDIPKDVQIAVPSQSSAYVAPGSHRYAPQMVAPAEQIAEAIELIENAQAPILYTGGGVINSGPEASELLRKLQDLTNAPITSTLMGLGAFPNTHPDWLGMLGMHGTYEANMAMNKCDVMICVGARFDDRVTGRLDAFSPDSKKIHIDIDRSSINKTVPVDIGIVGDCATVLGQLVEAWGTRKPQDLGEWKARIAGWRARECLAYPQRSKKNPEAIMPQKAVERLYALTKDRKPIVSTEVGQHQMWAAQYFGFDEPNKWLTSGGLGTMGYGMPAAIGAQLGCPDALVIDIAGEASIQMNIQELGTASQYRLPIKVFILNNEYMGMVRQWQELTYESRYSNSYSDSLPDFVALAEAYGWKGIRITEEAGLDAGIKAMIDHDGPVIVDCCVAKDANCLPMIPSGAAHTDMLLYGDSVDGTMDDEAKALV

SEQ ID NO: 13316 - protein, 506 aa, Lithospermum erythrorhizon
MALPAIPLAIIIFLIISYKLYQKLRLKLPPGPRPLPIIGNIYQVKPVKFRCFYNWSKTYGPIFSIYYGSQMNVIVSTTELAKEVLKENDQHLADRFRTRSSASMSRGGKDLIWADYGPHYVKVRKLCNVELFSPKRLEAIRPMREDEYTALVESIYKDCTKPELKGKSLLVREYLSSVAFNNITRLAFGKRFMDSNGVVNEQGQEFKKITHDGIKITAKLSIAEYIPWIRWMFKVEQDALDKFAADRDHLTRVIMEEHIKSGNTKQHFVDALLTLQKQYDISEDTIIGLLWDMIAAGMDTATISTEWAMAELVRNPRVQRKAQEELDRVVGPDRIMTEADVPKLPYLQCIVKESLRLHPPTPLMLPHRASANVKIGGYDIPKGSIVHVNVWAIARDPAYWKNPEEFRPERFMEEDIDMKGTDYRLLPFGAGRRICPGAQLAINLITSSLGHLLHQFTWSPQPGVKPEEIDLSENPGTVTYMRNPVKAVVSPRLSAVHLYKRVESDM

SEQ ID NO: 13317 - protein, 114 aa, Brassica napus
MAIKNSFSLLLSSLMVFALIAIPTISGQPSGTWCVANPKIQDPVVQAALGWACQQSEAYCSRIQLGQNCYSPNTLRDHASVVFNTYYQQNKNQPGSCDFNSAAVITNTDPSHDT

SEQ ID NO: 13318 - protein, 917 aa, Neisseria meningitidis Z2491
MRHLRYIYSIYGNERKIMQLHILNNPKDAALAADAEFLKQSLFNLLHEEASPLVVETVKLLSTSDDSAALIEKVLPQLDEQQTHDLTLACGLFAQILNIAEDVHHERRRQIHEEAGRGGAEGSLTETVRRLKAGKADGKSVQRQLDNTSVTAVLTAHPTEVQRQTVLNFNRRIRALLPQRERCTNADALARLRREIDTILLGLWQTSETRRHKLSVNDEINNGVSIFPMSFFEALPKLYRKMEHDFQTAYPDVRVPDILKIGGWIGGDRDGNPFVSAETLRFAFRRHADAVFRFYRGELDKLYRELPLSIRRVKVNGDVMALSDKSPDEETARAEEPYRRAIAYIMARAMGKARALGLGMGCKFGFLEPYASAQEFLDDLKKLQHSLIDNGSRLLAEGRLADLIRSVSVFGFHMMPLDLRQHAGKHADVVAELFQHAGLEDYNSLNEEQKQAALLRELSHQRPLYSPFITYSDHTRHELAIFNEARKIKDEFGEDAVTQSIISNCEQPSDLLALALLLKETGLLAVENGKPKSRINIVPLFETIEALENACPVMETMFRLDWYGALLESRGNIQEIMLGYSDSNKDGGYVTSSWCLYQAELGLVELFKKYDVRMRLFHGRGGSVGRGGGPSYQAILAQPAGSVAGQIRITEQGEVITAKYADPGNAQRNLETLVAATLEASILPDKKDPDAKLMQDLSDVSFKYYRELITHPDFIDYFLQTSPIQEIATLNLGSRPASRKTLARIQDLRAIPWVFSWMQNRLMLPAWYGFGSAVETLCEGNPDTLAALREHAQSNPFFQAMLSNMEQVMAKTDITLAENYAGLSESPDKAKVIFGMIKEEYRRSRKALLDLLQTEELLRDNRSLARSLALRIPYLNALNGLQVAMLKRLRKEPDNPHALLMVHLTINGVAQGLRNTG

SEQ ID NO: 13319 - protein, 1020 aa, Gibberella zeae PH-1
MVATKLDGNAIAKSIREKLCAEVNEKQKINPRFKPCLKIIQATYVRMKLKAAAEAGIDSQLLHYPESISEAELLDHIRQHNNDPAVHGILVQLPLPKHISEYTVTSFVADEKDVDGFGTKNIGELAKRGGKPLFIPCTPKGCMILLKESGIDLKGKNAVVLGRSDIVGSPVSYLLRNADATVTVVHSKTQNIEQHVRNADVLVAAIGQPLFVPGSWIKPGAVVIDVGTNFLPDATKKSGHRLVGDVDYASAVEVASAITPVPGGVGPMTVAMLMQNVVDATTWYFESQKLRKTIPLPLKLEDPVPSDIAVSRAQTPKDITRIAAEIGIAPHELEPYGAYKAKVDLGLMQRLEHRRNGRYVVVTGITPTPLGEGKSTTTMGLAQALGAHVGRMTFANVRQPSQGPTFGIKGGAAGGGYSQVIPMDEFNMHLTGDIHAIGAANNLLAAAIETRIFHENTQKDGPLYKRLVPVKNGARKFAPVMFRRLKKLGIDKTNPDELTEDEIHRFARLDIDPETITWRRVLDVNDRHLRGITVGAAPTEKGQTRETGFDITVASECMAILALSNNLAEMRERLGSMVVATSRGGDPVTADDLGAGGALTALMKDAIKPNLMQTLEGTPVFVHAGPFANISIGQSSILADKLALKLAGTEADEDHQKKAGFVVTEAGFDFTMGGERFFNIKCRTSGLVPDVVVIVATVRALKVHGGAPPIAPGAALSPVYKEENVDILRAGCVNLKKQIANAKSFGIPVVVAINKFATDTDAEIAVIREEAVSAGAENAILSNHWAEGGKGAVDLAHGVIAAAEKPKDLKFTYNLEGTVQERLEAIGKQMYGAEKVELSELAQKKVDTYTRQGFGHLPICVAKTQYSLSHDPDLKGAPTGFTVPIRDVRLAAGAGYFYALAADIQTIPGLPTAPGYLNVDVNVETGEIEECSTAATKSRAYDAGNMPVIQLKVYRMGTTDSKLTIGRNRIATRSHGERRPLLDTNTYPNKLGSTSISPDVTTEEFNPTNGSDLSLSVRYG

SEQ ID NO: 13320 - protein, 304 aa, Mycobacterium leprae
MAKWTTADIPDQTGRVAVITGANTGLGYQTALALAEHGAHVVLAVRNLDKGKDAAARITATSAQNNVALQELDLASLESVRAAAKQLRSDYDHIDLLINNAGVMWTPKSTTKDGFELQFGTNHLGHFAFTGLLLDRLLPIVGSRVITVSSLSHRLFADIHFNDLQWECNYNRVAAYGQSKLANLLFTYELQRRLATRQTTIAVAAHPGGSRTELTRTLPALIAPIFSVAELFLTQDAATGALPTLRAATDAAVLGGQYFGPDGFAEIRGHPKVVASNGKSHDVDRQLRLWAVSEELTGVVYPVG

SEQ ID NO: 13321 - protein, 81 aa, Gaertnera lowryi
  misc_feature (15)..(15): Xaa can be any naturally occurring amino acid
TPQDEMRAGMSYFHXTIWKGVPKFLRRVDTALKNIGINERVPYNAPVIQFSSWMGGDRDGNPRVTPEVTRDVCLLARMMAA

SEQ ID NO: 13322 - protein, 556 aa, Beta vulgaris
  misc_feature (555)..(555): Xaa can be any naturally occurring amino acid
MASCLKSRKQVILLLVSVLLAYGVSELQAARSPPTNQPYRTAYHFQPRKNWINDPNGPMLYKGVYHLFYQDNPNGVIWGPPVWGHSPSKDLVNWVPQPLTMEPEMAANINGSWSGSATILPGNKPAILFTGLDPKYEQVQVLAYPKDTSDPNLKEWFLAPQNPVMFPTPQNQINATSFRDPTTAWRLPDGVWRLLIGSKRGQRGLSLLFRSRDFVHWVQAKHPLYSDKLSGMWECPDFFPVYANGDQMGVDTSIIGSHVKHVLKNSLDIPKHDIYTIGDYNIKKDAYPPDIGYMNDSSLRYDYGKYYASKPFFADAKKERILLGWANESSSVEDDIKKGWSGIHTIPRKIWLDKLGKQLIQWPIANIEKLRQKPVNIYRKVLKGGSQIEVSGITAAQADVEISFKIKDLKNVEKFDASWTSPQLLCSKKGASVKGGLGPFGLLTLASKGLEEYTAVFFRIFKAYDNKFVVLMCSDQSRSSLNPTNDKTTYGTFVDVNPIREGLSLRVLIDHSVVESFGAKGKNVITARVYPTLAINEKAHLYVFNRGTSNVENGXS

SEQ ID NO: 13323 - protein, 399 aa, Aspergillus nidulans FGSC A4
MADGIDRRADDKMEFNTSKEVTVAPTFEDMHLKESLLRGIYAYGYESPSAVQSRAIVQICKGRDTIAQAQSGTGKTATFSISALQVIDTVVRETQALVLSPTRELATQIQSVIMALGDYMNVQCHACIGGTNIGEDIRKLDYGQHVVSGTPGRVADMIRRRHLRTRHIKMLVLDEADELLNRGFREQIYDVYRYLPPATQVVVVSATLPYDVLDMTTKFMTDPVRVLVKRDELTLEGIKQYFIAVEKEEWKFDTLCDLYDTLTITQAVIFCNTRRKVDWLTDKMREANFTVSSMHGEMPQKERDSIMQDFRQGNSRVLISTDVWARGIDVQQVSLVINYDLPTNRENYIHRIGRSGRFGRKGVAINFVTSDDVRILRDIELYYSTQIDEMPMNVADLLS

SEQ ID NO: 13324 - protein, 439 aa, Bradyrhizobium sp. BTAi1
MDPRGRRSLDRGLRHAVRLHDFGSLWQRTGSGVGPLSEPLVIVGNGMAAAKLVEELSQTALGRYAIAVIGEEPRLAYNRVLLSSVLAGEAASHEIELKPAAWWRERGVTLKYGARVTRIDVGRRELEVENEENMAFSRLVLATGSLPLRLPVPGADLAGVHTFRDSRDTDVLLSLAAKKSRVVVVGGGLLGLEAAYGLARAGAKVTLLHLMDRLMERQLDASAAALLKVLVERKGIEVLLQASTAAIHGELRVERVELADGRSLAADAVIFAAGIRPNVALAKEAGLAVNRGIVVDDALQSSVPGISALGECAEHRGTCYGLVEPAYEQARVLARHLAGRKAAYQGSVVATNLKVSGVAVFSAGDFVGAPGSEAIVLNDARRGIYKKLVIADGRLTGAVLIGDTQDALWYRDLIRNREPIASIRTEMMFGRAGARPRAA

SEQ ID NO: 13325 - protein, 503 aa, Beta vulgaris
MEKPVVWALLLCFVAVVNGVQTTDLGQNGASAGTTQPYRTAYHFQPLKNWMNDPNGPLYYKGVYHLFYQYNPYSAIWGNMTWGHSISNDLVNWVHLEHALNPIEPYELGGCFSGSITMLPGGRPVIFYTGADTNNFQSQNLAFPKDPSDPLLREWVKSPHNPVITAEDDIEPSDFRDPTTAWQAVDGTWQVLIGGKIDGRGMAYLYQSNDFINWTRSEKIFHSSVKTGMWECPDFYPVSINGKDGVDNYLEKGNTNFVLKASFLDHDHYILGYYKAETNGSIPRVVWLSASGNQLMQWPVEEIESLRKDEVEIKDKELEKGSLVEVVGITAAQADVEISFELPNLEDAEQMEPSWTDPQLLCAQKNAAVEGRLGPFGLLVLASSNLTEETAIFFRVFKNHSRHIVLLCNDLSRSSLSRDVRKTTFGAFLDIISPFRRAFHLEPWIDHSIVESFGGGGKACITARVYPVLAVDKEAKLFAFNKGSHNIKILKLNAWSMKEAKIL

SEQ ID NO: 13326 - protein, 129 aa, Archaeoglobus fulgidus
MEHKRLLKVRRRQKARKPEFRRYCWNKKLRLRNKSWRRPRGLFNKLRKRYGGKWSGRIPVNVGFGSPKAVRGLHPSGYEEVLVYNPADLEKIDKERQAVRIASCVGMKKRLAIEDKAKELGIKVLNPSG

SEQ ID NO: 13327 - protein, 81 aa, Gaertnera madagascariensis
TPQDEMRAGMSYFHETIWKGVPKFLRRVDTALKNIGINERVPYDAPVIQFSSWMGGDRDGNPRVTPEVTRDVCLLARMMAA

SEQ ID NO: 13328 - protein, 250 aa, Chlamydomonas reinhardtii
RIRVHGAKELLLKSNYKLVMTVCKSFVGKGPHIQDLVSEGVKGLLKGVEKYDATKGFRFGTYAHWWIRQAVSRSLAETGRAVRLPMHMIEQLTRLKNLSAKLQTQLAREPTLPELAKAAGLPVTRVQMLMETARSAASLDTPIGGNELGPTVKDSVEDEREAADEEFGSDSLRNDMEAMLLELPEREARVVRLRFGLDDGKEWTLEEIGEALNVTRERIRQIEAKALRKLRVKTIDVSGKLMEYARTWRC

SEQ ID NO: 13329 - protein, 392 aa, uncultured proteobacterium
  misc_feature (384)..(384): Xaa can be any naturally occurring amino acid
MFDVVVIGGGPSGATAAEDLARSGHHVALLDREGRIKPCGGAIPPRLIEDFAIPSSQIVARINTARMISPTQRKVDIPIENGFVGMVDREHFDPFLRRRAQGAGATWLTGTFLRIERDADHPTVIYRDKDSGEERRLACKVIIGADGARSKVAKSEVPNGDKIPYVIAYHEIIEAPLEGMSYDPKRCDVIYDGAISPDFYGWVFPHGKSASVGMGTGIEGVDLKKATAELRAAHGLSDCKTIRREGAPIPLRPLDCWDNGTDVVLAGDAAGVVAPSSGEGIYYAMVGGRVAATAASAFLTTGRAKDLQLARKLFMREHKSVFKVLGAMQNAYYRSDERRERFVSLCHDIDVQKLTFEAYMNKRLVAARPMAHLKIGLKNLAHLXRLISEDRV

SEQ ID NO: 13330 - protein, 81 aa, Gaertnera paniculata
TPQDEMRAGMSYFHETIGKGAPKFLRRVDTALKNIGINERVPYNAPLIQFSSWMGGDRDGNPRVTPEVTRDVCLLARMMAA

SEQ ID NO: 13331 - protein, 316 aa, Wolinella succinogenes
MKKAVILLNMGGPSSLLEVDMFLKNMFNDPRILPIKSPFFRSLVASFIANRRSETAKANYRKIGGKSPLIGHTFNLIQKLQSLDPSRFYTYAMRYTPPMTDMAVRELAQKEIEEVTLFSLYPQYSTTTTLSSIEEFHKQCALLSYFPKTKEIDRYFEDSNYNEAIIDRILEALGGDNPEEFTLIFSAHGLPQSVIDAGDPYEKEVHANIQALTKLLEERGITFKKITHAYQSKVGPMKWLEPSLDEVLKLHAKEKILLYPIAFTLDNSETDFELRIEYQEKATHLGITDYRVASCLNDSTRFAHAIIKLISQGEIS

SEQ ID NO: 13332 - protein, 483 aa, Candidatus Protochlamydia amoebophila UWE25
MMAAQLIPITVAEGDGIGPEIMDATLRILKAAGAPLDIKNVEIGEKVYLSGQPTGIENSTWDLIRQSKALLKAPITTPQGGGFKSLNVTIRTTLGLYANVRPCVAYYPFVETKYPGMNVVIVRENEEDLYTGIEYRQTPDVYEALKLITRPGCEKIIRYAFEYAQIYHRKKVTCFTKDNILKLTDGLFHKIFDEIGAEYPQIEKEHWIVDIGAAKLADTPTAFDVIVMPNLYGDILSDVAAQIAGSVGLAGSANIGNSGAMFEAIHGSAPRRAGQNLANPSGLLLAAIQMLVHLEQSNLAELIHNAWLKTLEEGIHTYDIFKEKTSKQKVGTKEFANAVTARLGKKPETLPAAHYSTSFHIKHSNFSSLKNFKQELYGIDIFIKWSEDVETLATLLQSTSNHDLKLKMINNRGVKVWPNKMPETACIDNWRCRFISSTNKIVSQEQILNLLNRLVQKKLTLTQTAYLFAFDGQAGYTLAQDEQ

SEQ ID NO: 13333 - protein, 310 aa, Lactobacillus acidophilus NCFM
MKKYDVAIIGAGPGGMAAALYAARANLTVAMIDRGVYGGQMNNTAEVENYPGFPSILGPELGEKMYQNTVKQGVNFVYGDVQGIEVKDDKRIVKLGSEDSDIETKAVIIGTGSSNRKLGVPGEDEYSGKGVSYCAVCDGAFFKNENVVVVGGGDSAVSEGLYLANVTDNVNVIHRRDQLRAEQVLQKRAFKNPKMDFTWDSEVKEIIGDENKMTGVKVHNKKTGKDETIDANGAFIYIGNIPNSEPFRDLNITDKDGWILTNDQMETEVPGIFAIGDVRKKKLRQIITAVNDGGIAGQNAYEYIQKLTEN

SEQ ID NO: 13334 - protein, 524 aa, Aquifex aeolicus VF5
MEAKMGEKVYIFDTTLRDGEQAPGFSMTTEEKLQMAHQLAKLNVDIIEAGFAAASKGDFEAVNRIAKEVKGPVICSLARALESDIEIAAKALEPAERKRIHTFIATSPIHMEYKLRMTPDQVLERIKKAVSFARNFTDDVEFSCEDATRSEREFLYRAIETAIKHGATVINIPDTVGYAIPEEFGQLIEDIMNNVPNIDKVILSVHCHDDLGLATANSLTAVKHGARQVECTINGIGERAGNAALEEVVMALKVRKDFFGDLYTDVNTKEIYKTSRLLCRITGNFVQPNKAIVGDNAFAHESGIHQHGVLSHRMTYEIMNPEDVGFPMSRIVLGKHSGRHALKRRLEELGFKFTKEELDRIFEKFKELADRKKEVYDEDLEALIYQEFMKIEDHEPVKVLHFQVQSGDNMIPTATVKLEFKGEEREASSTGNGPVDATIKAIQKALGIEPKLLDYSIKALTPNTDAQAEARVVLELDGVKASGRGVDTDIIKASVKAFTDALNRAIVRKEYIIQRQEIREEGTV

SEQ ID NO: 13335 - protein, 484 aa, Oryza sativa
MAGDRNSELLLSKLPSPPLRLPVIGHMHLVGSLPHVSLRDLAAKHGRDGLMLVHLGSVPTLVVSSPRAAEAVLRTHDLAFASRPRAMVPDIITYGATDSCYGPYGDHFRKVRKAVTVHLLNSHKVQAYRPAREEEVRLVIAKLRGAAAMAGAPVDMTELLHSFANDLICRAVSGKFFREEGRNKLFRELIDTNASLLGGFNLEDYFPSLARTKLLSKVICVRAMRVRRRWDQLLDKLIDDHATRLVRRHDHDQQQDSDFIDILLYHQEEYGFTRDNIKAILVDMFEAGTDTSYLVLESAMVELMRKPHLLAKLKDEVRRVIPKGQEVVNEDNIVDMVYLKAVIKETLRLHPPAPLYIPHLSREDCSISGYMIPTGIRVFVNAWALGRDAKFWDMPDEFLPERFMDSNIDFKGHDFHYLPFGSGRRMCPGIHSATVTLEIMLANLMYCFNWKLPAGVKEEDIDMTEVFGLTVHRKEKLFLVPQAA

SEQ ID NO: 13336 - protein, 406 aa, Geobacter metallireducens GS-15
MDQLSMATGLKNSTDVLFLMLGAVMVFAMHAGFAFLEVGTVRKKNQVNAFVKILTDWSVSTIAYFMVGFPIAYGISFLVPAGDLMGATQGYDLVHYFFLLCFSACIPAIISGGIAERAKFWPQVFAGALFAALTYPIFESLIWGKNASILQGFFKSIGGAEFHDYAGSVVVHSMGGWLALPAVLTLGPRMGRYIRSKSHPIPISNIPFLALGSWILAVGWFGFNVMSAGHLDKISGLVAVNSLLAMVGGVLAALLAGKNDPGFIHNGALAGLIAVCAGSDIIHPLGAFATGAIASVIFVYGFQIEQERLKIDDVLGVWPLHGIIGSWGGIAAGIFGQPLLGGIGGISFISQLLGTVAAILFALANGFLVYTVLSKTVGIRLSDEEEFAGADLSIHKIGAYPEDHVR

SEQ ID NO: 13337 - protein, 505 aa, Schizosaccharomyces pombe
MAILKSALVGFICFLHFFIVNASDNKSLLTEDIMASQVCNGMFAKKGKTSEITLKIDSYTSDFGGAIRLLIFNWKDVNAIGMEDDDGEKHYICNYEDIEAGVCKDDDYGLYLINQTAPHDSIYSAAVDAESMVSPLKYPVEQSGLYCVFTAPLEGSSEAYKITVTWENYFGNLDATDYPHLFLNPILLAINCLIGIWWSFIMFRYRHDLLQVQKYISGVVALSIVCTMVSTGYFYFANSKGYTTGSKVFAFFLSLAQSARQSYFGFLLLIVSLGYSIVVPSLGSLLRKCQILAGLQFVSSCFFLSSLFISPSNKESLVILFAAPVFLITLFAMFLWIVLALNNTIRDLRIRKQTVKAQMYTRLWIVICFGIVAYASIVAANAILIGIYGQMNYYLKYWKLLWFLNYGYTDILVLILMLTILYLWRPTENNRRFAMSEQVAQDVDEFEMTSSLSNDSLHLHHERPTSPANPHIIHGSADEHQALFAVDDESDDDASTLATSKQKPA

SEQ ID NO: 13338 - protein, 379 aa, Candida albicans SC5314
MSSLSSVTRSAKLATQSLKYNTRPSLSKIGQFQTSKITYRANSTQSTPVKEITVRDALNQALSEELDRDEDVFLMGEEVAQYNGAYKVSRGLLDKFGEKRVIDTPITEMGFTGLAVGAALHGLKPVLEFMTWNFAMQGIDHILNSAAKTLYMSGGKQPCNITFRGPNGAAAGVAAQHSQCYAAWYGSIPGLKVLSPYSAEDYKGLLKAAIRDPNPVVFLENEIAYGETFKVSEEFSSPDFILPIGKAKIEKEGTDLTIVGHSRALKFAVEAAEILEKDFGIKAEVLNLRSIKPLDVPAIVDSVKKTNHLVTVENGFPGFGVGSEICAQIMESEAFDYLDAPVERVTGCEVPTPYAKELEDFAFPDTEVILRACKKVLSL

SEQ ID NO: 13339 - protein, 379 aa, Polaromonas sp. JS666
MLLPHQYGHEQPYKKIATMKIAILPGDGIGTEIVAEAVKVLNVLDLKFETETALVGGAAYEAHGHPLPEATLKLAKDADAVLFGAVGDWKYDKLDRPLRPEQAILGLRKNLGLFANFRPAICYPQLVEASSLKRELVAGLDILIIRELTGDIYFGQPRGRRVATDGHFPGAEEAFDTMRYSRPEIERIAHVAFQAARKRKASGGEGRVTSVDKANVLETFQFWKDVVTEIGLQYPDVALDHMYVDNAAMQLVRAPKKFDVVVTGNMFGDILSDAAAMLTGSIGMLPSASLNDKNQGLYEPSHGSAPDIAGKGVANPLATILSAAMMLRFSLNQPETAARIEKAVDAVLSQGLRTPDIYSEGTTKVGTVQMGDAVVKALR

SEQ ID NO: 13340 - protein, 268 aa, uncultured marine bacterium
QPNAMGGREVGGLANMLAAHMDIENPEHRQWVQEFWNSPTICTQPGLKAIDLFDSMEQGKVKAVWIMATNPLVSMPNRGKIFRALENCDFVVVSDCVEQNDTLALADVKLPATAWSEKEGTVTNSERRISRQRAFKAAPGGAKNDWQIICDVAQKMGYSEGFDFQTPHQIFVEHARLSGVNNFGDRDFDISALADLSLKDYQQLKPVQWPVNQRYPDGCKRLFTDGRFFTPSGKARFIPLHPELPQQQTCRDYPLILNSGRIRDQWHT

SEQ ID NO: 13341 - protein, 968 aa, Tropheryma whipplei TW08/27
MHERHIGPSQEEIDHMLGFLGYKSLDDLMHAALPNGVQSPPDIKIPSHDELTCLTQLAAFAKMNRIKTSMLGQGFYNCITPAVIRRNILENPSWYTSYTPYQPEISQGRLEMLINFQTMICDLTGLEIANASMLDEASCAAEAMLLAKRVSRSSSNKYLVHNGVFPHIRRVLETRADAVGVEIVDLPEGQSIDFDHFGVYAQYQSASGKLLDLRPLFSRSKRAGAICVIGCDLLMLTLFTSPGELGADIAFGSAQRFGIPMNFGGPLASFLAARKAMERSLPGRLVGVSVDADSNHAYRLTLQTREQHIRREKATSNICTATVLMAIAAVAFAQHHGPKGLRAIAHRINTVAVGFARLLKQTAFRVSSLDIFDTIEINNPTQVCVEAESKYDLLFWKVDDNKLRITFDEVTARLDGDLPERLSKVFGISPDKIRDLGCNYDSCDCSFYGDLQQAREGLSSVASRNISVHSDLARHPLRRFSGYLKHPVFNNYTGEVALMRYLKALSDKDFALDRGMIPLGSCTMKLNAAFQLEPVLWPEFANLHPFAPLGDADGTLQIIDQIETWLANLSGYDAVSLQPTAGSQGELAGLLAIRGYYKSLNLDRDVCLIPASAHGTNAASAVLAGMRVVVVACDQQGNIDLDDLRLKASKNAHALAALMVTYPSTHGVYEDNISEVCSVVHKYGGQVYVDGANSNALIGYLRTGDFGGDVSHLNLHKTFGIPHGGGGPGIGPVVAKAHLAPFLPFRNRVHKPSTDLPAVKHMGGPIASSDYGFAGALYISWAYIFCLGSQGMKRCTAVAVLVANYIAKQLSDTFPVLYTGKNNLVAHEFIMDFREVTRVSGITVDDVCKRLIDYGFHAPTMSFPVPGTLMVEPTESEPFSEIQRFIKTIRSIRAEIDRVIDKTYDPDNNPLKRAPHTLEQIASDKWDRPYSRRTGIVYTSGKYWPASARIDNAYGDRNIFCTCPDLPD

SEQ ID NO: 13342 - protein, 414 aa, Pyrococcus horikoshii OT3
MVFDKLLEQAGINLEFEDKEIKDSDYLGDVSDLIKIAVIGVGGSGNNTISRLYDLGVQGADLIAMNTDAQHLHQIKAHKKLLLGKSITHGKGSGGDPRIGYRAAEASASEIADIVKDYDLIFLTAGMGNGTGTGATPVIARIIKETARNNGLPQEPLVISVVTFPFKMEGKVRIEKAKAGIEMLLEYSDTVIIIQNDKLIELVPKLPIQVAFRFADEIIARMVKGIVETIKLPSMVNIDYADIYSVMKGGGPALIGIGESDSNNRAVDAVMEALNNKMLDIEFGSGDKALVHFTVGPDVSLEEITKAMEIVYERLGEKSEIKWGAMIEEDMGKTVRAMVIMTGVRSPQILGNINVNALTYSSSSLVVPRDSKIMSESKVDEIFSSIDPRASKLRKGNNSSRINKIFKDLGFYEL

SEQ ID NO: 13343 - protein, 642 aa, Azoarcus sp. EbN1
MCGIAGLFDLRGKRDFSRDLVRRMNDVQVHRGPDEGGYHFEPGIALAHRRLSIIDLSTGQQPLFNEDGSVAVVFNGEIYNFQELVPELEALGHAFHTRSDTEVIVHAWEAWGEDCVQRFRGMFAFALWDRNRETLFLARDRLAVKPLFYALLPDGTFAFGSELKVLMQHPLLDRRIDAHAVEEYFALGYVAEPRTIFAGAKKLGAAETLCVRRGQPVPQPRCYWDVHFMLDNPLSLAEASAELTARLRESVRLRMIAEVPLGAFLSGGVDSSAVVATMAGLSDEPVHTCSIAFDDPAFNESDFAQKVADRYRTNHYVETVKSDDFDLIDTLAGLYDEPYADSSAIPTWRVCQLARKRVTVALSGDGGDESFGGYRRYRLHLMEERMRGALPLGVRQPMFGLLGRLYPKADWAPRMFRAKTTFQALARDSLQAYFHSVSILRDAMRRQLFSNRFRSELAGYNAIEVFRRHAATAHTDDALALIQYVDLKTYLVGDINTKVDRASMAHSLEVREPLMDHKLVEWLATLPSGLKVKGQEGKYLFKKAMEPLLPNDVLYRPKMGFSVPLSRWFRGPLRERVRQTVLGETLAATGIFNPDYLRHLVDAHQSGARDYSSPLWSLMMFEAFVRSSGGCPARAPELAAAV

SEQ ID NO: 13344 - protein, 323 aa, Pelargonium x hortorum
MENFPVIDMEMLNGEERSAAMNMIKDACENWGFFEIKNHGISHELMDKVERLTKEHYAKFMEQRFKEMVASKGLDATQSEIDDLDWESTFFLRHLPTSNISEIPDLEHDYRLAMKEFAERLEKLAEELLDLLCENLGLEKGYLKKAFYGSKGPTFGTKVSNYPPCPKPELIKGLRAHTDAGGLILLFQDDKVSGLQLLKDGRWIDVPPMRHSIVINLGDQLEVITNGKYKSVMHRVIAQTDGNRMSLASFYNPGSDAVIYPAPALIEEENQNPIYPKFVFEDYMKLYAGLKFQAKEPRFEAMKAMPLPMAMDTTPLQGPVATA

SEQ ID NO: 13345 - protein, 642 aa, Azoarcus sp. EbN1
MCGIHGIYRFDAAPVSPAQLSAMGDVTRHRGPDDEGRYIDADGRCGIAMRRLSIIDLAGGHQPISNADDTLWGVCNGEIYNFRELRAELQERGYRFKTGSDSEVLVHLYDAFGDDFVHRLDGMFNFALWDARRKRLLIGRDPLGVKPLYVHRSASMLAFATEAKALLELPGVTRELDHDVVADYLHLGYVAAPHSMFRDIRKLPPATLLSVENGEVRQWRYWRLPSSVARYVTEAEWIGRIRDGMERAVHRQMVSDVPIGAFLSGGVDSSAVVAFMAKHSAHPIRTYAIGFEGGEAEQLYNELPYARQVAQLIGTEHHEIVVTPDVVGLLPKLLWHMDEPVSDSAFITTFLVSEFARRDVKVILSGVGGDELFGGYRRYLGGHYVRKLQRLPRWSRQLMSRTAAMLPSDRHSKVLNTMRLARGFLASAELSPDERYRHYLQVLDRASIAELMNGRTGTTDALRDAFAAAGDEDALNRMFAVDAETQLPDDLLLLTDKMSMAVSLECRVPLLDRELVELAAAIPEALKVRDGRLKHLMKEALADVLPASILDRKKRGFGTPMGAWLKRDLAPVLRRLLSADVVRDRALFEPKVIARLMADHDANRIDGTDALLALMNLEIWSRIFLDRRSPDDVTTELKAYLP

SEQ ID NO: 13346 - protein, 507 aa, Staphylococcus epidermidis RP62A
MLNADLKQQLQQLLELMEGDVEFVASLGSDDKSNELKELLNEMAEMSAHITITEKSLKRTPSFSVNRPGEETGITFAGIPLGHEFNSLVLAILQVSGRAPKEKQSIIDQIKGLEGPFHFETFVSLTCQKCPDVVQALNLMSVINPNITHTMIDGAVFREESENIMAVPAVFLDGQEFGNGRMTVQDILTKLGSTQDASEFNDKDPYDVLIVGGGPASGSAAIYTARKGLRTGIVADRIGGQVNDTAGIENFITVKETTGSEFSSNLAEHIAQYDIDTMTGIRATNIEKTDSAIRVTLENDAVLESKTVIISTGASWRKLNIPGEDRLINKGVAFCPHCDGPLFENKDVAVIGGGNSGVEAAIDLAGIVKHVTLFEYASELKADSVLQERLRSLPNVDIKTSAKTTEVIGDDYVTGISYEDMTTGESQVVNLDGIFVQIGLVPNTSWLQNAVELNERGEVMINRDNATNVPGIFAAGDVTDQKNKQIIISMGAGANAALNAFDYIIRN

SEQ ID NO: 13347 - protein, 395 aa, Oryza sativa
MATRATAMGSADGSVSSTGSPLVSESKKKRIKTYIIASTSSLLGISVLVLAVFLVYKKHKCLLPWQRSTTAPRLHSLLRSQLKSYTYSEVRKMTKSFTHTLGKGGYGTVYKGSLSDGSTIAVKILEDSNNDGEDFINEVSSIGRISHINVVTLLGLCQHGSKRALIYEYMPNGSLDKFAVGGNDTMQQEKFLISWEKLYDILVGVAQGLDYLHHWCNHRVVHLDIKPQNILLDQDFCPKISDFGLAKLCKPKESKISIGCARGTIGYMAPEVFWGHRGAVTTKSDVYSYGMLILHMVGERENINASTESGSKYFPEWLYDNLNQFCGVPSGGIDGSNSTSEVAHKLVIIGFWCIQSAPTDRPSMSEVIDMFDRSLTELQLPPRISCCGNYNESFG

SEQ ID NO: 13348 - protein, 269 aa, Zea mays
MARNAVDKATSIDAQLRLLAPQKLSDDDKLVEYDALLLDRFLDILQDLHGEDIRETVQECYELAAEYENKLDPKMLDEIGNVLTSLDPGDSIVITKSFSHMLILANLAEEVQIAYRRRIKLKKGDFVDENSATTESDIEETLKRLMHQLKKSPLEVFDALKNQTVDLVLTAHPTQSVRRSLLQKHGRIRNCLTQLYAKDITPDEKQELDEALQREIQAAFRTDEIRRAPPTPQDEMRAGMSYFHETIWKGVPKFLRRVDKALKNIGINE

SEQ ID NO: 13349 - protein, 344 aa, Thermoplasma volcanium GSS1
MLTDDTLREGMQAPGIAFTLDEKIRIAQSISKSGIKRALVSYPSAHESEVEAARKITDLHLFDDTYSLGRSIKEDVDSIISTGSKVTLHLPFGDYDINKICDVVKYASDHSDSVEIAIVDMVKYEKEKIFDLAKKLWECGASIVQIPDTTGRATPKRVHDVVSYIKQNLKVKVEVHCHNDHGLAIANSIAGIEAGCDYVDTTIFGIGERNGIADTASIASYLEKAGYEDKINFEMLRKTYDLMSELILRKAGYRFFADNMPIFGRNVLSITAGTHSTSKVFPNSRVSLNVYAGSRLVASILRKNGIEPDERKVKLLVSKIKDLSSNEGRVVGEDEVLKIYGGIL

SEQ ID NO: 13350 - protein, 472 aa, Leifsonia xyli subsp. xyli str. CTCB07
MSDILIDRPELNSLGQYEFGWADSDAAGASARRGLSPEVVKDISSLKNEPEWMLQRRLKALQLFERKPMPTWGADLSEIDFDNIKYFVRSTEKQAQSWEDLPEDIRNTYEKLGIPEAERQRLVAGVAAQYESEVVYHQIREDLEQQGVIFLDTDTALKEHPEFFEEYFGTVIPAGDNKFAALNTAVWSGGSFVYVPKGVHVEIPLQAYFRINTENMGQFERTLIIADEGSYVHYIEGCTAPIYKSDSLHSAVVEIIVKKNARVRYTTIQNWSNNVYNLVTKRAQAAEGATMEWIDGNIGSKVTMKYPSIYLMGEHAKGETLSVAFAGPGQRQDAGAKMIHMAPYTQSSIVSKSIARGGGRAGYRGEVRVDANAHHSANTVRCDALLVDTISRSDTYPAIDIRVDDVQLGHEATVSRVSEEQLFYLMSRGLPEDEAIAMIVRGFIEPIARELPMEYALELNKLIEMGMEGSVG

SEQ ID NO: 13351 - protein, 124 aa, Theobroma cacao
YNLGGMGCSAGLISIDLAKNLLQVHPNSYALVISMENITLNWYFGNDRSKLVSNCLFRMGGAAILLSNKRSDRRRSKYELVHTVRTHKGADDKCFSCVTQEEDSAGKVGVTLSKDLMAVAGDAL

SEQ ID NO: 13352 - protein, 494 aa, Oryza sativa
  misc_feature (370)..(370): Xaa can be any naturally occurring amino acid
MAESYHKEVIAGLKDKSLFIQEAFIDGQWVAKDNKFDVFEPSTATVLGQVANCALEDFQTAIKSADVAQTNYFDSTTGASRGALLRTWYDLVLANQEDLANILSLENGKTYSEALGEVLYSASFISWFAEEATRSYGVTIPSSAPHTTLMTVREPVGVCGIITPWNFPAAMITRKIAPALAAGCSVVIKPPSETPYSALAFTKLAIDAGLPPATIQVLPTRDRQAATELATNPLVKKISFTGSTGVGKYLAKLAAGTLKKLSLELGGNAPFIVFEDADLDLAAEGAMFCKFRCSGQTCVCANRLYVQKSVAKEFTAKLVEKVNALKMGSGLDKSTTQGPLVNKAAVDKVKEHIADATSKGAQIATGGSTXRSPGFFHQPTVLTGVTQEMAVAKDETFGPLAPIFEFDTEEDAIRLANDTEFGLAGYFFSKDISRVMRVAHKMQVGMVGANTGKISAAEAPFGGVKESGYGKEGSLYGMAEYQNIKSITIGNLNN

SEQ ID NO: 13353 - protein, 496 aa, Haloferax volcanii
MALKEFKLPDVGEGVAEGELVTWHVAPGDEVTEDQVLAEVETDKALVDVPSPFDGTVKELLAEEGEVVPVGDVIITIQEDGDDEEAAEAADADAEAAGSESAEGDDGASDDESGSGGRVFAPPSVRRLARELGVDLDAVDGSGPSGRVTEGDVRAAADDDGDEDDEPSGPRTVQTNGKSATAKRDEGTSASASSSAPTESADREQTLAAPATRALAKEEGVDIDAVPATEMRDGEAFVSPEAVQEYAQAQREAQAADAEAVSAEADAGTATAEATVDAASEPAPPEAGPGAGERVPYKGVRKAIGDQMQRSKYTAPHVTHHDEVDVTELVELREQLKPVAEERGSRLTYMPFVMKAVVAALKGFPYLNSQLDEENEEIVLRDEYNIGVAAATDAGLLVPVVHDADRKGMLELADEMNEKVEKARNRKIAPEEMRGGTFTITNVGGIGGEYATPIINYPEVAILALGAIKEKPRVVDGEVVPRNVLTLSLSFDHRVV

SEQ ID NO: 13354 - protein, 264 aa, Butyrivibrio fibrisolvens
MSFVLYEQKDKIAVVTINRPEALNALNSAVLDELNEVLDNVDLNTVRALVLTGAGDKSFVAGADIGEMSTLTKAEGEAFGKKGNDVFRKLETLPIPVIAAVNGFALGGGCEISMSCDIRICSDNAMFGQPEVGLGITPGFGGTQRLARTVGVGMAKQLIYTARNIKADEALRIGLVNAVYTQEELLPAAEKLATTIAGNAPIAVRACKKAINDGLQTDIDSALVIEEKLFGSCFESEDQVEGMANFLRKKDDPKKVKHVDFKNA

SEQ ID NO: 13355 - protein, 316 aa, uncultured proteobacterium
MTYTLPTPKTPLNIGTRGSPLALAQAYETRARLAKAFDLPFEAFEIVVIMTTGDRVTDRPLKEIGGKGLFTREIEQAMLDGSIDIAVHSMKDMPVLQPDGLVLDTYLPREDVRDAFISLSGGALSDLSPGAVVGTSSLRRQAQLKLRRPDLQVVEFRGNLQTRLKKLENQVAEATFLAMAGLKRLNMDEVPRQAIEVDDMLPAVAQGAIGIERRINDGRMADMLAAIHDRETGQRLAAERAFLAALDGSCETPIAGLSELQGSTMRLRGEVLRPDGSDAIHDDMVVPIEDGAQAGKEMAAKLLEQAGRGFFDWRES

SEQ ID NO: 13356 - protein, 357 aa, Helicobacter hepaticus
MQKRIAVIYGDGIGKEVITQALKILKAVAKKYEHTFIFEEVLAGGAAIDECGECLPMKSLQICKQSDSVLLGAVGGPKWDNEPSHNRPEKALLTLRKELGLFANIRPATLLPQLSKASPLKDEILNRGIDFIIVRELIGGVYFGEHKLEEINGEKVASDAMTYSASQIESIAKVAFNIARNRKKEIVCVDKANVLSSSRLWREVVDKVAQNYKDVHLSYMYVDNAAMQICRAPSQFDVILTENMFGDILSDEASIITGTIGVIPSASLSNGTLGMYEPIHGSAPDIAGQDKANPIGTILSAAMMLELSFGLTKESEVIQKAVQNALDKGYRTGDMMSEGMQLVGCEQMGDVILESVI

SEQ ID NO: 13357 - protein, 156 aa, Arabidopsis thaliana
MRPLSIKPTSLDVARHATSVESFGNHRPPISPWHSPVPYLFGGLAAMLGLIAFALLILACSYWRLSTSGDDSGERVDEEKESRSGVKAASAACEEKVLVIMAGDDLPRFLATPAANKCMCGHEGRMVIFKEDGIGAGEEKMGDREKAKENEETTSQ

SEQ ID NO: 13358 - protein, 322 aa, Dendrobium hybrid cultivar
MEKLNNYMAVLRDACENWGFFSHFQATLSHELMDKVEHISERYIKKFREQKFKDICSHNSGNFCNTQVNDIDWESTFYLRHRPTSNISKSPEDLDDQYRKLMKEFAAQIERLSEQLLDLLCENLGLEKAYLKNAFYGANGCNPTFGTKVSNYPPCPKPELIKGLRAHTDAGGIILLFQDDTVSGLQLLKDEEWIDVPPMRHSVVVNLGDQLEVITNGKYKSVMHRVIAQTDGNRMSIASFYNPGSDAVIYPAPTLVEKEKETYPKFVFEDYMKLYVRQKFEAKEPRFEAMKTMDAVISSQPIPTAPLPLEAIRGGGYPGDLL

SEQ ID NO: 13359 - protein, 514 aa, Medicago truncatula
MIIIKFQILSFFIYLLFLLLFLPNNVHASIHYYSKQPFTHRSNAFFFHAGAEALFSSSFIRFESISFTRPKHSAIIHGQMQQNTGLIESIILEVKDRNRIGGFYFNPKSDLICCDPFLSKTQNCNLGEVIIHNNPQNPNFPKRLKTFFQGTNQIAHMDPQTVQINATGIYYLYFMFCDPNLEGTTFTGRTVWRNPNGYLPGKMQPFITLYAFMSLAYLLLGLAWFLRFLHFWKEKDVVHVHLHYHITAVIALGMVEMAFWYFEYANFNATGSRPMGITIWAVTFTSVKKTLSRLLLLVVSMGYGVVRPTLFEGFVSRVTVLGGFYFVACEVFELFEHLGNINDFSGKSKLLLVLPVVCLDSCFILWIFSSLSKTLEKLQTRRNLAKLEIYRKFTNTLAVSVLLSIAWIGFELYFNATDPLSELWQIAWIIPTFWCLLSYTLLLVICVLWAPSRNPTRYAYLEGTNDFDEEGISLTSSVAKMTGDVASKLERKERIGSSATDLTFGDDIEEDKRE

SEQ ID NO: 13360 - protein, 81 aa, Gaertnera schatzii
  misc_feature (37)..(38): Xaa can be any naturally occurring amino acid
TPQDEMRAGMSYFHETIWKGVPKFLRRVDTALKNIGXXERVPYNAPVIQFSSWMGGDRDGNPRVTPEVTRDVCLLARMMAA

SEQ ID NO: 13361 - protein, 273 aa, Bradyrhizobium sp. BTAi1
MPIAAGDSIAFAEGKILTTHAGDGVGVVTFNHPDKRNAMSLEMWDGLGQALIALRDSTDIRVVVLTGAGDKAFVSGADISQFEQSRHNAAASDAYAQRSAVQRALLASYPKPTIACIRGFCLGGGLQIAMLADMRFAAEDSRFGIPAARLGIAYGYDGLRNLVSLVGPSQARLLLYTGMRIDAHEALRIGLIDRMMGNEELMPATLDIARTIAGNAPLAVQAAKITIAEVLKDESGRDMAAIKRIGDACMDSEDFREGRRAFMDKRKPVFKGH

SEQ ID NO: 13362 - protein, 597 aa, Agrobacterium tumefaciens str. C58
MTDKDNTENSNRMTGAEIVLQALKDNGVEHIFGYPGGAVLPIYDEIFQQEDIQHILVRHEQGAGHAAEGYARSTGKVGVMLVTSGPGATNAVTPLQDALMDSIPLVCLSGQVPTSLIGSDAFQECDTVGITRPCTKHNWLVKDVNELAGIIHEAFRIAQTGRPGPVVVDIPKDIQFATGTYTPPSAAIQQKSYKPKVQGDLNAIHAAIELMSKAKKPVFYTGGGVINSGPEATRLLRELVELTNFPITSTLMGLGAYPASGKNWLGMLGMHGSYEANMTMHDCDVMVCIGARFDDRITGRINAFSPNSKKIHIDIDPSSINKTVRVDVPVIGDVGHVLEDMVRLWRALPKKPEKAQTADWWSQIERWRARNSFAYKNSKDVIMPQYALQRLYEASKGRDTYITTEVGQHQMWAAQFFGFEEPNHWMTSGGLGTMGYGLPAAIGVQVAHPEALVIDIAGDASIQMCIQEMSCAIQYGLPVKIFILNNQYMGMVRQWQQLLHGNRLSNSYTEAMPDFVKLAEAYGAVGMYCDDPKELDDKIAEMIAVNKPVIFDCRVANLANCFPMIPSGKAHNEMLLPDEATDEAVANAIDAKGRQLV

SEQ ID NO: 13363 - protein, 260 aa, Nocardioides sp. JS614
MSAGFETLLVEVADGIAVVTVNRPEVRNAVSRQVQADLRAVLDTFRHDDAVEVVVFTGAGDRAFVAGADIAQLRDYTLHTGLASEMQALYDEVEAYEKPTIAAVNGYALGGGCELAMACDLRVASTSARFGLPETNLAVLPGAGGTQRLARLVGVGRALELILTGRLVDAEEARTIGLVTSVVAPEELLPHAREVAGQIRAKGPLAVRLAKLVVRSGMDTDRRTGLVIEQLAQSLLYTTGDKREGAEAFLAKRTPAFRGA

SEQ ID NO: 13364 - protein, 471 aa, Bradyrhizobium sp. BTAi1
MGAAAYSDQGRDDPGQLCRQSQGDKGAARPRPRQEHYTDPGHPDAARQGQRRPARAAVGQAGRPRGADALSLDSSRPCEQRSGEAIQRLKLGSGLRPSLAMTSPTHSHCEENMSSTNSLHIAVLPGDGIGPEVMAPALEVLRKVEAKAGLAFRFTEAQAGAGNYLATGVSIAESTIRLCEQADAILLGACGLPSVRYPDNTEIAPQIELRFHFDLYAGVRPARLIPGVPSPIVGAAERGIDFVVIRESTEGLFASMGKGVVTHEEARETLVITRKTSERLFNFSFKLAERRRARGRSGILGCVDKANVFKAFAYFRKIFDEVAELHPNVKAERLYIDACALMLVKRPWDFDVLVTENMFGDILSDLAAGLIGGMGMAPSADIGDRHAVFQPCHGTAPDIMGQGKANPTAMILSAAMMLDWLADTRGIEGAAEAAQRIEQAVDKVYASGLKPFEFGGSAGTLEVTKAVLEAL

SEQ ID NO: 13365 - protein, 81 aa, Gaertnera schizocalyx
  misc_feature (33)..(33): Xaa can be any naturally occurring amino acid
TPQDEMRAGMSYFHETIWKGVPKFLRRVDTALXNIGINERVPYNAPVIQFSSWMGGDRDGNPRVTPEVTRDVCLLARMMAA

SEQ ID NO: 13366 - protein, 416 aa, Myxococcus xanthus
MAIFEFKLPDLGEGVMEGELVKWHVKAGDSVKEDQVLAEVMTDKATVTVPAPKAGRVVKTHGNEGDMAKVHQLLVTLEVEGAAPAQAGGHSEASAPAAAPVAGGHVGGAPASASKVLATPVTRRMAREHGLDLASIAGTGPQGRVTKADVVAALEGGEKNVVAAPAEQKARPAAPAVSSGAADERVPLRGLRKKIAEKMVRSKFTAPHFAFVEEVDATELVALRARLNAQLAAAGENIKLNYLPFIIKATVAALKKFPHLNANFDEASQELVVRGEFNIGMAAATPDGLTVAVVKSADRLTLAELARETARLGAAARDRKLKMEELTGGTFTISSLGQSGGLFATPIINHPEVGILGVHRLKKRPAVVGDQVVVRDMMNLSLSCDHRVIDGSVAADFTYEIIKYLEKPDLLFLAMA

SEQ ID NO: 13367 - protein, 81 aa, Gaertnera ternifolia
  misc_feature (8)..(8): Xaa can be any naturally occurring amino acid
  misc_feature (64)..(64): Xaa can be any naturally occurring amino acid
TPQDEMRXGMSYFHETIWKGVPKFLRRVDTALKNIGINERVPYNAPVIQFSSWMGGDRDGNPRXTPEVTRDVCLLARMMAA

SEQ ID NO: 13368 - protein, 173 aa, Arabidopsis thaliana
MGASSSSSVSEKSIHQFTVKDSSGKEVDLSVYQGKVLLVVNVASKCGFTESNYTQLTELYRKYKDQGFVVLAFPCNQFLSQEPGTSEEAHQFACTRFKAEYPVFQKVRVNGQNAAPVYKFLKSKKPSFLGSRIKWNFTKFLVGKDGQVIDRYGTTVSPLSIQKDIEKALAQEL

SEQ ID NO: 13369 - protein, 81 aa, Medicago truncatula
MRKRQVVVRRSEDPQRSVVKYGECQKNHAANVGGYAVDGCREFMPSTNGSLTCAACGCHRNFHKREVEVVSESSSPHSNGT

SEQ ID NO: 13370 - protein, 310 aa, Glycine max
  misc_feature (53)..(53): Xaa can be any naturally occurring amino acid
  misc_feature (159)..(159): Xaa can be any naturally occurring amino acid
IRLEGISTALTICCVLYMLVAAVIVGLVPYYELNPDTPISSAFSSYGMQWAVXRYIITTGAVTALFASLLGSVLPQPRVFMAMARDGLLPHFFSDIHKGTQIPLKSTIVTGVFAATLAFFMDVSQLAGMVSVGTLLAFTTVAVSVLIIRYVPPDELFEXDEQNEKARRKLASWTIALLCIGILIVTSAASADWCPRILRLTLCGMGGILLLCSTIVLACVKQDDTRHSFGHSGGFACPFVPFLPAACILINTYLLIDLGVATWLRVSVWMLIGVLVYLFYGRTHSSLLHAIYVPSAYADEIHRSQASHLA

SEQ ID NO: 13371 - protein, 161 aa, Vibrio vulnificus CMCP6
MDQVDVVEPMFSNFGGRASFAGQITTVKCFEDNALIRETLEQDGVGRVLLVDGGGSLRRALLDGELAAIAEENEWEGIVVYGCVREVDELEDMNIGIQALASIPVGAAMQGVGEVDVPVNFGGVTFLPEDYLYADTTGIILSQEPLSADLEEDEEEPELLD

SEQ ID NO: 13372 - protein, 279 aa, Solanum tuberosum
MFQTLKNEFQICEEIGRGRFGTVYRCFSPATGESFACKSIDKNLLIDSTDRECLDKEPKILQLLPGNPNILHLYKVYEDDDFLHMVTDFCPNSDLYERVSSGSLSESAAAAILTQLVSAISYCHHMGVAHRDIKPDNVLFDSENRLKLADFGSAEWFAGCEGRMMSGVVGTPYYVAPEVLMGKEYNEKVDVWSAGVILYIMLSGVPPFYGETPTETFQAVLRGNLRFPTRNFRSVSSEAKDLLRKMICKDVSRRFSAEQVLRHPWVINGGETRSMADLN

SEQ ID NO: 13373 - protein, 484 aa, Ralstonia eutropha JMP134
MFSLKDPGLLRQQAYVDGQWRAAESGKTLDVINPANNEPLGTIPACDAADTRAAIEAANRALPAWSALTTHQRAAVLRKWRELMVAHADDLALIMTLEQGKPLAEARGEILYGASFVEWFAEEGIRAYGETIPATHASRRIIARKVPVGVCAAITPWNFPNAMITRKLAPALAAGCAVVVKPSELTPYSALALAELGERAGIPAGVLNIVTGMPQGIGGELTANPIVRKLTFTGSTQVGKLLLRQCADTVKRVSMELGGNAPVIVFDDADLEQAVAGVMASKFRNSGQTCVCANRIYVQAGIYDRFSARLSEEVRKLKVGAGTEDGVSIGPLINDAALRKVVRHVEDAVAHGAKVIVGGASLSRGQQYFEPTVVTGATDGMLIASEETFGPVAALFPFESETEIIRRANDTPYGLAAYLFSTDVNRVFRVSEALEYGMVGANTGVISSAVAPFGGVKESGLGREGSHHGIDEFLEVQTLHLEIV

SEQ ID NO: 13374 - protein, 277 aa, Solanum tuberosum
MFQTLKNDFQICEEIGRGRFGTVYRCFSPATGESYACKSIDKNLLIDSTDRECLDKEPKILQLLSGNPNILHLYKVYEDDDFLHMVTDFCPNSDLYERVSSGSLSESAAAAILTQLVSAISYCHHMGVAHRDIKPDNVLFDSENRLKLADFGSAEWFAGCEGRMMSGVVGTPYYVAPEVLMGKEYNEKVDVWSVGVILYIMLSGVPPFYGETPTETFQAVLRGNLRFPTRNFRSVSPEAKDLLRKMICKDVSRRFSAEQVLRHPWVINGGETRSMAD

SEQ ID NO: 13375 - protein, 436 aa, Geobacter metallireducens GS-15
MNYVIIGNSVAAVGAIRGIRSIDQQGNITVISRERHVAYGRPLISYLLGGLITEKRMAYLPEDFYEKNRVNLLLNAEVVGVDTDNRKVTIAGGDVIVYDKLLVATGGDPFVPPIEGMAGKDRIFTFTTWDDAAKLKGIADDIEKVVVIGGGLIGLKAAEGLHLIDKKITIVELADRILSAAFDRPAGRVVAKKMKANGIDVITEDTVVRIEGDGAAITGVTLKSGDFIPCDTVVVAIGVRPAAGFLKGSGVEVNRGIVVDDLMETNVKGVFAAGDVAEAKDFFSGVKNPMPIWPDAYIQGDIAGVTMAGGSKGYQGGIAMNSIELFKVSTISMGITNPVEPKEYEILTYQDLENYQYRKIVLKDGILAGAVLVGAVDRAGIFAGLIRDRIEVSSFKDHLLTPDFGFVNLPREIRSTLFAPVGKVTGAYEQARAVGH

SEQ ID NO: 13376 - protein, 259 aa, Polaromonas sp. JS666
MAGAIKSTSEGQTLILTLSNPEFRNALGPEIYAAGIEALNAAENNPEIRSVVITGEGAVFCAGGNLQRLQANRREAPEVQAQSIEGLHNWIDSIRTYPKPVIAAVEGAAAGAGFSLALACDFVVAASNAVFVMSYSTVGLSPDGGGSWSLARSLPRALASELLMGGERISAQRLHDLGLVNKVASAGDALSEALRMAGQLNARAPNALASIKELINEASSNTLSQQLACERDHFVRNLHHSNGGEGIAAFLGKRTPQYR

SEQ ID NO: 13377 - protein, 334 aa, Geobacillus stearothermophilus
AVKVGINGFGRIGRNVFRAALKNPDIEVVAVNDLTDANTLAHLLKYDSVHGRLDAEVSVNGNNLVVNGKEIIVKAERDPENLAWGEIGVDIVVESTGRFTKREDAAKHLEAGAKKVIISAPAKNEDITIVMGVNQDKYDPKAHHVISNASATTNCLAPFAKVLHEQFGIVRGMMTTVHSYTNDQRILDLPHKDLRRARAAAESIIPTTTGAAKAVALVLPELKGKLNGMAMRVPTPNVSVVDLVAELEKEVTVEEVNAALKAAAEGELKGILAYSEEPLVSRDYNGSTVSSTIDALSTMVIDGKMVKVVSWYDNETGYSHRVVDLAAYIASKGL

SEQ ID NO: 13378 - protein, 574 aa, Gibberella zeae PH-1
MAQSRQNSMATVDHEKDEIKKAMGHEKAGVEALEVAGRGGREVDDLIDDMERQLDEAGGLDTGFFQIQFSNPKHFTWLLVAFASMGGLLSGLDQSLISGANLFLPDDLGLNERQNSLVNSGMPLGAVGGALLLSPANEYFGRKGAIIISIILYTIGAAIEAGSMNFGMIVSSRVILGLGVGLEGGTVPVYVAETVERRIRGNLVSLYQFNIALGEVLGYAVGAMFLKVPGNWRYILGSSLVFSTIMFFGMLFLPESPRFLIHQKRHLAAYKVWKRIRGIEDRESREEFYVMSASVIQEENAVVEGAKNRRFPWMDLFTEPRARRALVYSNIMILLGQLTGVNAIMYYMSVLMNQIGFNKEEANYMSLVGGGSLLIGTIPAIFLMERFGRRFWAITMLPGFFIGLVLIGISYQFDVTTQLMTVEGLYLTGLILYMGFFGSYACLTWVIPSESFPTHLRSYGMTSSDALLFLASFIVTYNFSAMQEAMGKTGLALGFYGGIAFVGEIYQIFFMPETKNKTLEEIDVVFSRPTMDIVRENWAGVKETTYDLCTGKWHKVFVEQAMTDPKDQVQISHA

SEQ ID NO: 13379 - protein, 236 aa, Pseudoalteromonas tunicata D2
MAKEKFQRTKPHVNVGTIGHVDHGKTTLTAAITNVLAKHYGGQAKDFASIDNAPEERERGITINTSHVEYDTPSRHYAHVDCPGHADYVKNMITGAAQMDGAILVVAATDGPMPQTREHILLSRQVGVPYIIVFMNKCDMVDDEELLELVEMEVRELLSEYDFPGDDLPLIQGSALRALEGDAAWEEKILELAAALDSYIPEPERAIDKPFIMPIEDVFSIQGRGTVVTRRVERVS

SEQ ID NO: 13380 - protein, 237 aa, Prochlorococcus marinus str. MIT 9211
MTSESQNQLKQAEKADVVKYFNGTGFERWNRIYSNSDDVNKVQRNIRIGHQKTVDDVLLWIKESGRVSEMSFCDAGCGVGSLSLPLASLGAASVAASDISQAMVEETRRRAELAGLDLDRMTFNTSDLESLRGSFHTVVCLDVFIHYQQKAAEEMVEHLCSLSREKLIVSFAPYTPFLALLKTIGQFFPGPSKTTRAYILRESGIVDAAKRKGFNVFRRKLNQAPFYFSQLIEFRKN

SEQ ID NO: 13381 - protein, 345 aa, Methanosarcina barkeri str. fusaro
MHLNVLTDNPTVPIDVKDRSISELMEGMLKTGFQGRKLAESVQAWHNMLKEKNVTVLMGLSGAMVPAGMRRVISYMIRERMIDCLVSTGANLFHDSHEALGKKHYVGSHLVDDEDLFEHGVDRIYDVFAVEEEFRTADNLIADFAEKIGEISCSSREFMYLLGKELERRGAAEDSIVVSAYRHNIPIFVPALSDSSIGIGLTIARRRGLKLDIDQIKDVDEVTQIVEKSGKTGVVYIGGGVPKNFIQQTEVIASILGIQTGGHDYAIQYTTDAPHWGGLSGCTFDEAVSWGKIAAQAKKVQVFVDATIALPIVAHALHEKCRELKRNAPIFNWEGPEGLDIDYRE

SEQ ID NO: 13382 - protein, 581 aa, Glycine max
MVPSSFRPFISDDSRAKRVRVLELSRRLKHRGPDWSGLHQHGDCFLAHQRLAIVDPASGDQPLFNEDKSVIVTVNGEIYNHEELRKQLPNHNFRTGSDCDVIAHLYEEHGEDFVDMLDGIFSFVLLDTRDNSFIVARDAIGVTSLYIGWGLDGSVWISSEMKGLNDDCEHFECFPPGHLYSSKERGFRRWYNPPWFSEAIPSAPYDPLVLRHAFEQAVIKRLMTDVPFGVLLSGGLDSSLVASITSRYLANTKAAEQWGSKLHSFCVGLEGSPDLKAAKEVADYLGTVHHEFTFTVQDGIDSIEDVIYHIETYDVTTIRASTPMFLMSRKIKSLGVKWVISGEGSDEIFGGYLYFHKAPNKEEFHRETCRKIKALHQYDCLRANKSTFAWGLEARVPFLDKAFINAAMSIDPEWKMIKRDEGRIEKWILRRAFDDEEHPYLPKHILYRQKEQFSDGVGYSWIDALKAHPPKHVTEKMMLNAGNIYPHNTPKTKEAYYYRMIFERFFPQNSARLTVPGGASAACSTAKAVEWDAAWSNNLDPSGRAALGVHISAYENQNNKGVEIEKIIPMDAAPLGVAIQG

SEQ ID NO: 13383 - protein, 419 aa, Gibberella zeae PH-1
MASRISTGQLCRSISQASSHRLALPHIAAQRRYLATTVHPVTQDATGSKGPTAMVFLNMGGPSTTDEVGSFLSRLFADGDLIPLGPLQNYLGPLISKRRTPKIIKQYSAIGGGSPIRKWSEYQNAEMCKILDKISPETAPHKPYVAFRYADPLTEEMYEQLLKDGFGNGKGGRAVAFTQYPQYSCSTTGSSLNELWKWRHRLEGKTNKESGDGTITWSVIDRWPNHSGLVEAFAQNIEAKLKEYPEERRKDVVLLFSAHSLPMSVVNRGDPYPAEVAATVYAVMQRLGFSNPYRLCWQSQVGPSAWLGPQTSDSVEHYVAKGQKDLVLIPIAFTSDHIETLYELDQEVIADSGSPETVKRVESLNGSPVFIEALADIAKKHLAENKACSKQMGLRCPGCKSERCAESKRFFASQQAGLA

SEQ ID NO: 13384 - protein, 510 aa, Oryza sativa
MSSGKGGGGGGKGGGGKKKEVKKETKLGMAYKKDDNFGEWYSEVVVNSEMIEYYDISGCYILRPWAMEIWELLKEFFDAEIKKLKLKPYYFPLFVTENVLQKEKDHIEGFAPEVAWVTKSGKSDLEAPIAIRPTSETVMYPYFSKWIRSHRDLPLRCNQWCNVVRWEFSNPTPFIRSREFLWQEGHTAFATKEEADEEVLQILELYRRIYEEFLAVPVSKGRKSEMEKFAGGLYTTSVEAFIPNTGRGVQGATSHCLGQNFAKMFDITFENDKGSRSMVWQNSWAYTTRSIGVMVMTHGDDKGLVLPPRVAPLQVIVIPVPYKDVDTTAIVNECKKTVETLEKAGIRADLDTRENYSPGWKYSHWEMKGVPLRIEIGPKDMANNQARVVRRDNGAKADIPTADLVEKVNGLLDEVQKNLFETAKQKRDACLKVVNTWDEFIVALNDKKLILAPWCDEEEVEKDVKARTKGDLGAAKTLCTPFEQPDLPEGTTCFASGKPAKKWSFWGRSY

SEQ ID NO: 13385 - protein, 597 aa, Kluyveromyces lactis NRRL Y-1140
MKVTSRTLLRKGSGIAQNMATPILNEMDAAKKRPVNYKLLQEAKKSKISAKGIGKMRDKQGFQLKIQDVNGSRNKQTDPDYDVKIEGALRKIVPYFFTYKTFCKERWRDRKLIDIFIDEFRDRSPEYYRKTIAAGKVYLNDSVADLDSVVRNGDLITHEIHRHEPSVTSRLIKTVFEDDDLLVIDKPSGIPVHPTGRYRFNTVTKILEKERGYTVHPCNRLDRLTSGLMFLAKNPRGADRMADQMKAREVSKEYVARVVGEFPVGLIVVDKPLRTVDPKVGLNVTCKITDEGAKEARTSFERISFDGKTSIVRCKPFTGRTHQIRVHLQHLGHPIANDPIYSNPHIWGPSLGKDYEGDFSDIIGSLDLVGKTESAESWMHPDSFGEVLLGQQCEICDTELYSDPGPNDLDLWLHAYRYESTELDSDGKKLWSYRTDFPDWAIEPHRKFMELAIDEARNCGETQTAFNVGALLVNGTDILSTGYSRELPGNTHAEQCALDKYFTKSEGAKLPDGTIIYTTMEPCSLRLSGNLPCVDRIIQTTGAIKTVFVGVMEPDIFVKNNTSYHKLAQYGIDYILIPGYEEECLKVACKGHDKTQN

SEQ ID NO: 13386 - protein, 453 aa, Lactobacillus acidophilus NCFM
MKVVKFGGSSLATGNNVNKALNIIKNDSSRQVIVVSAPGKRTDDDIKVTDLLITYAYTSLRSNNYDDTVEKIFRRYELIAQYFDLPESDLTKIKRLLLTLPTYDYPNADYRMATFKAHGERLNAILIAKILNHQGIKTRYLEPKDVGLIVTGTPNNAEVNPETYVNLKRINLKNNEKIIFPGFYGITPSGHIATFSRGGSDITGAILARGFDAELYENFTDVDAIFSANPNIVTNPAPIKKMTYQEMRELSYAGFSVFHDEALIPAIQGEIPVNVKNTNDPEKPGTLIVPEDGFIPKHTITGIAGGKNFAALYLRKYMLNKGAGFTLKLMEIFDRHHVSYEHMPSGIDDLTIIFKKDALSDQLIDVICNEIQTSLNPDQMQWIDDYAITMVVGEGMKDKLTLCASILYPLGEKNISIQMINQGASQISIMIGTRRQDEEEVIKTIYQNFIENR

SEQ ID NO: 13387 - protein, 408 aa, Thermus thermophilus HB27
MRRVVVTGLGALTPIGVGQEAFHKAQLAGKSGVRPITRFDASALPVRIAAEVDVDPGAYLDRKELRRLDRFVQYALIAAQLALEDAGLKPEDLDPERVGTLVGTGIGGMETWEAQSRVFLERGPNRISPFFIPMMIANMASAHIAMRYGFTGPSSTVVTACATGADALGSALRMIQLGEADLVLAGGTEAAITPMAIGAFAVMRALSTRNEEPEKASRPFTLSRDGFVMGEGAGVLVLEAYEHAKKRGARIYAELVGFGRSADAHHITEPHPEGKGAALAMARALKDAGIAPEQVGYINAHGTSTPAGDRAEVLAIKRVFGDHAKRLMVSSTKSMIGHLLGAAGAVEAIATVQALYHGVIPPTINLEDPDPELDLDFVPEPREAKVDYALSNSFAFGGHNAVLVFKRV

SEQ ID NO: 13388 - protein, 221 aa, uncultured proteobacterium
MTYESTRNTVETYFDRTATKTWERLTSDAPVSGIRATVRAGRDRMRQLLRSQLPADLRGARVLDAGCGTGALAFQLAQAGADVVAVDISPKLITIAKQRQPAHVSGTLKLMAGDMFDPGLGHFDHIVAMDSLIYYSAEDIGATLDRVSSRILTNMVFTVAPRTPLLMAMWRIGKLFPRNDRSPMMVPHQMAQIAKSTSGQISDIDRVASGFYISQALEFRP

SEQ ID NO: 13389 - protein, 81 aa, Gaertnera walkeri
  misc_feature (23)..(23): Xaa can be any naturally occurring amino acid
  misc_feature (43)..(43): Xaa can be any naturally occurring amino acid
  misc_feature (55)..(55): Xaa can be any naturally occurring amino acid
TPQDEMRAGMSYFHETIWKGVPXFLRRVDTALKNIGINERVPXNAPVIQFSSWMXGDRDGNPRVTPEVTRDVCLLARMMAA

SEQ ID NO: 13390 - protein, 111 aa, Picea abies
MGPSDSPYAGGVFLVTIHFPPDYPFKPPKVAFRTKVFHPNINNNGSICLDILKEQWSPALTISKVLLSICSLLTDPNPDDPLVPEIAHMYKTDRGKYESTARSWTQKYAMG

SEQ ID NO: 13391 - protein, 81 aa, Morinda citrifolia
  misc_feature (17)..(17): Xaa can be any naturally occurring amino acid
  misc_feature (24)..(24): Xaa can be any naturally occurring amino acid
TPQDEMRAGMSYFHETXWKGVPKXLRRVDTALKNIGINERVPYNAPVIQFSSWMGGDRDGNPRVTPEVTRDVCLLARMMAA

SEQ ID NO: 13392 - protein, 348 aa, Gibberella zeae PH-1
MAAPSFDTTPENQAGILHFFRQQLRYKPQAVTGVSLEGKTGIVTGASSGIGLETSRQLLDLGISKLILAVRNLEKGNAAAEDLAKGRNPPLKEGTIEVWKLDLDFYDSITAFAEKAKSLTRLDMVLMNAGLCPAKRVVNEQTKHDEIIQVNYLSTALLTLLLLPVIKATRLNQPGPTRVTFTSSEVAAWSKFKYDNGMNIIKTLDSSEKGSDTLSQMFNSKLLGQFFIAELAKRVPSSLAIINGASPGSIHDSQFNREIDQTFSGAMVKRVMKHVANTSANGARMMTDAIVKHGEETHGQFLSFQKLVPMAPIIYTDTGKKCSEQLWKETMEELAFAQPERLIESVSA

SEQ ID NO: 13393 - protein, 398 aa, Zea mays
  misc_feature (242)..(242): Xaa can be any naturally occurring amino acid
HGSKNPVLGAGRVTDAEQEPILGVGHRIRLSELKAFDDSKAGVKGLVDAGVTTIPAIFRGHLLQEGPKVSSSSSSSSTSLSIIPVIDLSAADAVAREEVVAQLKAAAETVGFFQLVNHGVPSELLCEMLASVRRFNEEPHEVKRPYYTRDARRKVRFNSNFDLFQSPAANWRDTLFCEAAPEPPRAEELPVAVRHVMLEYGGAVREVAARVLGLLSEALGLSPGHLAGMGCAEGLSLVCKCXNYYPPCPEPDLTLGCSRHSDPSFLTVLLQDSHAQGGLQALLASRWLDVPPVAGALLVNVGDLLQLVSNGRFKSVEHRVVANRSRDTARVSVACFCNADIARSTRLYGPIAELIAADDSDGAGRALYRNVTVPEFLAHYDKKGLDGRPALHRFQLLQ

SEQ ID NO: 13394 - protein, 330 aa, Erwinia amylovora
MSQNTLKVNELNEDAEFDENGAEVFDEKALVGNEPGDNELAEEDLLSQGATQRVLDATQLYLGEIGYSPLLTAEEEVFFARRALRGDVPSRRRMIESNLRLVVKIARRYSNRGLALLDLIEEGNLGLIRAVEKFDPERGFRFSTYATWWIRQTIERAIMNQTRTIRLPIHIVKELNVYLRTARELSHKLDHEPSAEEIAEKLDKPVDDVSRMLRLNERITSVDTPLGGDSEKALLDILADEKDNGPEDTTQDDDMKQSIVKWLFELNAKQREVLARRFGLLGYEAATLEDVGREIGLTRERVRQIQVEGLRRLREILQGQGLSIEALFRE

SEQ ID NO: 13395 - protein, 345 aa, Streptococcus thermophilus LMG 18311
MTKKIVTLSGDGIGPEIMAAGLGVLDKVASKIEFDYDVDAKPFGGAGIDAEGHPLPKATLEAAKSADAILLAAIGGPKYDNAPVRPEQGLLAIRKELNLFANIRPVRIFDALKHLSPLKPERIEGVDFVVVRELTGGIYFGEHILEEDKARDINDYSADEIRRIMRRAFKIAQGRGKKVTSIDKQNVLATSKLWRKVADEVSLEFPDVTLEHQLVDSAAMIMITNPARFDVVVTENLFGDILSDESSVLPGTLGVMPSASHSENGPSLYEPIHGSAPDIAGQGIANPISMILSVAMMLRESFNETEGAELIENAVDKTLNQGILTRDLGGQASTAEMTAAIISNL

SEQ ID NO: 13396 - protein, 81 aa, Morinda royoc
TPQDEMRAGMSYFHETIWKGVPKFLRRVDTALKNIGINERVPYNAPVIQFSSWMGGDRDGNPRVTPEVTRDVCLLARMMAA

SEQ ID NO: 13397 - protein, 165 aa, Glycine max
MRTIPTTTSTTIAPTATTSSLTTSPSQHSSTWHSPVPYLFGGLAAMLGLIAFALLILACSYWKLSGQLQNEENAERDLESVVGGEKQGDSANKESVTVYEEKILVIMAGDEKPTFLATPKASSFVPHGVPNHFEENLENHVTSEKSEKNHVQQPTSPQQQSQPRQ

SEQ ID NO: 13398 - protein, 337 aa, Arabidopsis thaliana
MGVDYYKVLQVDSSASDDDLKKAYRKLAMKWHPDKNPNNKKDAEAMFKQISEAYEVLSDPQKKAVYDQYGEEGLKGNVPPPDAGGATYFSTGDGSSSFRFNPRNADDIFAEFFGFSTPFGGGSGGTRFSSSMFGDNMFASFGEGGGGGGGSMHHAAARKVAPIENKLPCSLEDLYKGTTKKMKISREIVDVSGKAMQVEEILTIGVKPGWKKGTKITFPEKGNEHPGVIPADLVFIIDEKPHPVFTREGNDLIVTQKVSLADALTGYTANIATLDGRTLTIPITNVIHPEYEEVVPKEGMPLQKDQTKKGNLRIKFNIKFPARLTAEQKAGFKKLIG

SEQ ID NO: 13399 - protein, 628 aa, Haemophilus somnus 129PT
MAKEIQIPDIGGDEVTVTEVMVKAGDTIIVDQSVINVEGDKASMEVPSPEAGVIKEVLVKVGDKVSTGTPMFVLENAELASTETASKSMQTEKTQSAVASIIEIYVPDIGGDEVNVTDIMVSVGETVAEEQSILNVEGDKASMEVPAPTAGIVKEILIKVGDKVSTGSLVMKFEVAGVVSAAETAQVSSSAQVTGESAVQDVHVPDIGGDEVNVTEIMVAVGDSVTEEQSLITVEGDKASMEVPAPFAGVVKEILVKSGDKVSTGSLIMRFEVQGKAPTPEASSAVTEAKVDPSPAAQENQMTPVSQADVTASAVFAHATPVVRRLAREFGVNLDKVKGTGRKGRILKEDVQAYVKAAIKAVESGNVSPTSAGNGAVNGAGLGLLPWPKVDFSKFGDIEQVELGRIQKISGANLHRNWVMIPHVTQWDKADITELEKFRKEQNVLAEKQKLDVKITPLVFIMKAVAKALENYPRFNSSLSEDAQSLILKKYINIGVAVDTPNGLVVPVFKDVNKKGIIELSRELAEISKKARAGKLTASDMQGGCFTISSLGGIGGTHFTPIVNAPEVAILGVSKSEMTPVWNGKDFTPRLMLPLSLSYDHRVIDGADGARFITFINSVLSDLRRLVM

SEQ ID NO: 13400 - protein, 230 aa, Arabidopsis thaliana
MIEMGMLDKAYDISRLAVLDEYRVDRDIPENENWAMMGRIEIRKPPETEKKHTIALLSRPQPQRLNPRFTHQSLILSINPVKQSAETGIFWDIEDCKIPDDLNAGDALKNIKSALSSDGHHGTVSVRAYGDTTGLDFPSEGIKLNHFPAGERYARQTKMLEDIVSWSAEHPEPSTLFLIVGDTSRDFLDVVQLLKSKKNYNFIIYNFILYVYYQKTEHSYLAPIPSILLI

SEQ ID NO: 13401 - protein, 368 aa, Sordaria macrospora
MATHNIVVFGGDHCGPEVVVEAIKVLKSIETNSPSAGKFNLQNHLLGGASIDKHHDPLTDEALNAAKAADAVLLGAIGGPEWGTSSTVRPEQGLLKLRKELGTYGNLRPCNFASESLVDSSPLKAEVCRGTDFIVVRELTGGIYFGDRTEDDGSGYACDTEPYSRAEIERIARLAGFLALAKNPPAKVWSLDKANVLATSRLWRKTVTDVISKEFPQLQLEHQLIDSAAMLLVKNPRALNGVVITSNLFGDIISDEASVIPGSIGLLPSASLGGIPDGKGKCNGIYEPIHGSAPDISGKGIVNPVGTILSVAMMLRYSLNLPKEADAVEAAVKAAIDNGTKTKDLGGSATTSDMGNAVVAELEKILKA

SEQ ID NO: 13402 - protein, 313 aa, Brassica napus
MAALQMSREWIGIQQFPPATQSKLIEILNKFKEEDVSSLTVLVMGKGGVGKSSTVNSVIGEKAAAVSTFQSEGLRPSLVSRSRSGFTFNIIDTPGLIEGGYVNDQAVNLIKRFLLNMTIDVLLYVDRLDVYRVDDLDKQVVTAITDAFGTEIWKKSALVLSHAQFSPPDGLNYDLFVSRRSDALLKLIRASAQLKKQDIQDSSIPVILVENSGRCHKNESDEKILPDGSSWIPNLYKTITDISFNGNKSIHVDKKLVEGPNPNARGKRLIPLIFAFQYLLVMKPLVRAIKSDVSRESKPAWEMRESGSASRRS

SEQ ID NO: 13403 - protein, 554 aa, Glycine max
MDHRKPLLPTSSDAAPNPHTRKDLLLVICGLLLLSSLVAFGGYRASNAPHADVASATSNDEQRSPTSVPSPKWYPVSRGVSSGVSEKSSSMLFAVKDGASKAFPWDNSMLSWQRTAFHFQPEKNWMNDPNGPMYYKGWYHFFYQYNPNGAVWGDIVWGHAVSRDMIHWLHLPLAMVADQWYDMQGVWTGSATILPNGEIIMLYTGSTNESVQVQNLAYPANPSDPLLVDWIKYPGNPVLVPPPGIGAKDFRDPTTAWLTSEGKWRITIGSKLNKTGIALVYDTEDFKNYELKEGLLRAVAGTGMWECVDFFPVSKENENGLDTSINGAEVKHVMKVSLDDDRHDYYSIGTYDEKNVLFTPDDAKNDVGVGLRYDYGIFYASKTFYDQNKERRVLWGWIGESDSEYADVAKGWASVQSIPRTVELDRKTGSNLLQWPVAEIESLRLRSDEFKNLKAKPGSVVSVDIETATQLDIVAEFEIDKETLDKIPQSNEEYTCSTSGGSKQRGALGPFGLLVLADEGLSEYTPQYFYVIKGSNGNLKTSFCADQSRYWIIR

SEQ ID NO: 13404 - protein, 406 aa, Triticum aestivum
  misc_feature (222)..(222): Xaa can be any naturally occurring amino acid
  misc_feature (381)..(381): Xaa can be any naturally occurring amino acid
  misc_feature (398)..(398): Xaa can be any naturally occurring amino acid
DNPPLKIRFIDNTDPAGIDHQIAQLGEELKSTLVIVISKSGGTPETRNGLLEVQKAFRDAGLDFSKQGVAITQENSLLDNTARIEGWLDRFPMFDWVGGRTSELSAVGLLPAALQGIDVKEMLVGAALMDEETRNTVVKENPAALLALSWYWATDGIGSKDMVVLPYKDSLLLLSRYLQQLVMESLGKEFDLDGNRVNQGLTVYGNKGSTDQHAYIQQLREXGVHNFFVTFIEVLRDRPPGHDWELEPGVTCGDYLFGMLQGTRSALYSNDRESISVTVEEVTPRAVGALVALYERAVGIYASLVNINAYHQPGVEAGKKAAGEVLALQKRVLTVLNEASCKDPAEPLTLEQIADRCHCPEDIEMIYKIIQHMAANDRALXIAEGSCGSPRSVKVYLXGECNVDDV

SEQ ID NO: 13405 - protein, 402 aa, Bacillus thuringiensis serovar konkukian str. 97-27
MLSEKTIEIVKSTVPLLQEKGVEITTRFYEILFSEHPELLNIFNHTNQKKGRQQQALANAVYAAATYIDNLEAIIPVVKQIGHKHRSLGIKAEHYPIVGTCLLRAIKEVAGAPDEVLNAWGEAYGVIADAFISIEAEMYEEAAHKEGGWKDFRNFVVVKKVKESDVITSFYLKPEDGGKVSSFIPGQYVTVQINIEGETYTHNRQYSLSDAPGKEYYRISVKKEKGVDTPDGKVSNYLHDHVKEGDMLPVSAPAGDFVLNMDSTLPVVLISGGVGITPMMSMLNTLIEQDSKRNVCFVHAAINSNTHAMKEHVEAVDNEYEQVKAYTCYSAPTEKDLEMKNFDKEGFVEREWLQTIIPTTEAEFYFCGPVPFMKHINAVLTDLGVKQEHIHYEFFGPAASLQ

SEQ ID NO: 13406 - protein, 360 aa, Gibberella zeae PH-1
MSKTLKIAVIAGDGIGKEVMPYGVRCLQAASKKYNLSLEFTEFDFASCDYYEKHGKMMPDDWKDTLTAFDAIYFGAVGMPDQVPDNVSLWGSLLKFRREFDQYINLRPCRLMPGIPCPLAGRKPGEIDFWIVRENTEGEYSSVGGIMFEGTERETVIQDTVMTRVGVDRVLRYAFDLAQSRPRKKLTSATKSNGIGITMPWWDKRVVEMSKNYSDVAVEKYHIDILTAHFVQRPQIFDVVVGSNLFGDILSDLGPACTGTIGIAPSANINPTASFPSLFEPVHGSAPDIYGKGIANPVGMIWAGQMMLSHFGYTDAADGMMAAIENVLARSDPAVMTADVGGKGTTQSLGEAIEKEILSS

SEQ ID NO: 13407 - protein, 507 aa, Desulfovibrio desulfuricans G20
MADRLYIFDTTLRDGEQSPGATMNIHEKVQLARQLEMVGVDIMEAGFPAASKGDFEAVKTIAATVKNAQVAGLCRAVQPDIDHAWAAIRNAAHPRIHTFIATSPVHMQYKLRKSPEQVLEMARDAVRYAAGLCSNVEFSAEDASRSDWDFLTRVVETAIDAGATTINIPDTVGYAQPDEFGALVRYVMENARNSHKAVFSVHCHNDLGLAVANTLAALKAGARQAEVTVSGIGERAGNAALEELVMALRTRHAYYDMETGIKSEQLFPACRLLSMIIGQPIPANKAIVGANAFAHESGIHQDGMLKNRETYEIMTPESVGRTKTEIVLGKHSGRNAINGKLEELGYRLTPEQTQLVFDAVKKLADRKKQIYDEDMEALVLEEVFRIPDMFRLVHLSVQASDTGVPPSAAIVMEVGGERRQHTTFGVGPIDAVFNAISQIVGRAPQLRHYSVNAITGGTDAQGEVTVKLQENGSAAVGRGADADIITASAKAYLNALNRLAKKEQEDK

SEQ ID NO: 13408 - protein, 358 aa, Desulfovibrio desulfuricans G20
MEMRICLLAGDGIGPEIMEQGVRVLETVAGKFGHDMEFTDALIGGAAIDETGDPLPQETVEACKAAQAVLLGAVGGPRWDNLTGAERPEAGLLGIRKALGLFANLRPAKLFPELASACFLRPDIVANGIDVMVVRELTGGIYFGTPAGEETRDGLRTAFNTMVYNEEEVRRIARVAFEAARKRSGRVCSVDKANVLAVSRLWREIVTATHADEFPDVELSHMYVDNAAMQLVRDPSQFDVIVTGNLFGDILSDEASVITGSIGMLPSASLGAGGPGLFEPIHGSAPDIAGQNKANPLATILSTAMMLRHSFGLEKEAEAVEGAVQQVLKAGYRTGDIMDQGGTLVGCNTMGNLVNERI

SEQ ID NO: 13409 - protein, 555 aa, Yarrowia lipolytica CLIB122
MAQSFTTFKQASDLPAWQKLQTLYDSKGKSLPVKQLFKEDPERFNKLSHTFTNFDDSKILFDFSKNIVDDEILAQLVELAKEANVYGLRDELFEGDKINFTENRAVFHPALRNRANVAMDVDDKNVAPEVDDVLAHMKEFSEQVRSGEWKGYTGKEITDIVNIGIGGSDLGPVMVSEALKPYAKKGLRAHFVSNIDGTSIAEEVIKQLNPETTLFLIASKTFTTAETITNATSAKTWFLETAKDTKHVAKHFVALSTNKEKVVEFGIDEANMFPFASWVGGRYSVWSSIGLSVAIYVGFDHFNDFLKGAEAVDKHFKEAPPEKNIPLLGGLLSVWYNNFFNAQTHLIAPFDQYLHRFPAYLQQLSMESNGKGVTRSNEYVKYSTGPVLFGEPATNAQHSFFQLVHQGTKLIPADFILAAQSHNPIDHNLHQRMLASNFFAQSEALMVGKTQEQVEAEGTPADLVPHKIFLGNRPTTSILTQLITPATLGALIAYYEWVTFTEGAVWNINSFDQWGVELGKALAKKIQPELENKSEIDAHDGSTNGLINQYKAWAA

SEQ ID NO: 13410 - protein, 670 aa, Candidatus Kuenenia stuttgartiensis
MCGIAGLIDLSGKAIDPEILKSMSDVIRHRGPDDEGYVLIDQATSRFQTYAGHDSPSDIQEFNPNFKSSTTAFAGNLGLSHRRFSIIDLTAAGHQPFYDNDRSCCVVFNGEIYNYIELRAELESRGHIFRSHSDTEVLLEAYKAWDVECFTRFNGFWALALYDFRKKRLILSRDRLGKRPLYWVRNDSRIYFASEIKSLLKVPENARNKKVNQEAIWYWCSSGLRDLNLSTCFEGIFSLPSASWVIVDENFPNKLKTFWKVPEKRMSENDIGISEAATLVRETLMEAVRIRLRADVPIALELSGGLDSSAILALTAQIHPERITTYTVRFHDPRTNEEPFARSVAKHYNVDYRVIDPPSQTFWQHILAFTYLQEEPYHSPNLQTSQDIWSHMRGEGIKVTLTGAAGDEMFAGYSRYYAKAQRENLQTGHYLQFIENALLWSERRYNFKTMALSLIRSPIRYLFNNLMPQASRVRQRNRNYLRNISISQRQCNTETLTETLYSDITNALIPYWLRSGDKTLMGMPFEGRCPFLDYRVVEIATQLPITYLIRHGWHKWILRKALEDYLPSDVLWRKQKMGFPFPYQTFYENSRKIIDLILSHADNPFIELSNKEKFQKDWRAISFILWYEMFFNENLTLFKKIESMINQSCTTTDSKYTPEFLSSCEVTSIT

SEQ ID NO: 13411 - protein, 421 aa, Streptomyces arenae
MTRRVVITGIGVRTPGGLGTKAFWSLLSEGRTATRRISRFDPSPFRSRIAGEVDFDAEAEGFSPREVRRMDRATQFAVACTRDAVADSGLETTALDPARVGVSLGSAVASATSLEREYLVLSDSGRQWLVDDGFLSPHMADYLSPGVMPAEVAWSVGAEGPVTMVSDGCTSGLDAVGHGVQLIREGTVDVVLAGASDTPVSPIVVACFDAIKATTPRNDDPEHASRPFDGSRNGFVLAEGAAMFVLEEYEAARARGAQIYAEVGGFATRCNAYHMTGLKTDGREMAEAIRAALDEARLDRTAVDYVNAHGSGTKQNDRHETAALKRSLGAHAYDVPVSSIKSMVGHSLGAIGSIEIAACALAIKTNVVPPTANLHTPDPECDLDYVPLTARDKQVDTVLSVGSGFGGFQSAMVLHRPEVAA

SEQ ID NO: 13412 - protein, 159 aa, Zea mays
  misc_feature (74)..(74): Xaa can be any naturally occurring amino acid
ASASAQSGCTTTLISLYPCLNYISGNVSTPPPSCCSQLASVVQTSPQCLCAALSSDSSSLGGVTIDRTRALQAXLPQACSVKTPPASKCNSVGGGSAPGAATPAAPSSGVPATAAAGTGSGSKATPTAPFLTSGGASVRGAVSLALAFAAVTVYAISAM

SEQ ID NO: 13413 - protein, 335 aa, Methanopyrus kandleri AV19
MAYKIAVIPGDGIGPEVIEAALHVIEPLIDAEFVEGEAGDECAEKHGDPLPEDTLELCHEADAILFGAAGETAADVIVRLRQELDLYANIRPVRGFPGLRELTGEPYVRDDVDFVIVRENTEGLYSGIEGRFRDTAYTLRIITEEGTRRIAEVACDLAEERGSNTVTCVHKANVMRETCGLFREVCKEVVESRGLEFEEYYVDAAAMFMITEPERFDVVVTPNMFGDILSDEAAALVGGLGLAPSGNVGDRHGLFEPVHGSAPDIAGKGIANPFATILSAVMMLEWLGEDEAAEAVREAVGEAIREGVVTPDLGGDKKTMEVAEFVREAALNRVQ

SEQ ID NO: 13414 - protein, 154 aa, Synechocystis sp. PCC 6803
MPLPTSLTTLDGTPLAPEVIADKVVLFVNVASKCGLTPQYSGLVALDKAYGEKGLVIIGVPCNQFGAQEPGSPEEIKDFTKTKYDVDFTLLEKQDVNGPNRSPLYQFLVGDGEDISWNFGKFLIGRDGQVVARFDPQTKPDDTNLKAAIEKALG

SEQ ID NO: 13415 - protein, 286 aa, Xanthomonas axonopodis pv. citri str. 306
MSDKPHVFDATTDTFETEVLQKSLTTPVLVDFWATWCGPCKSLTPILEKLAGEYNGAFELGKVDVDKEQQIAAAFQIRSVPTVFLVKGGEIVDGFPGAMPEGQVREFLTQHGVLPAEPQVAEEDVPLAPLDPQAQAAALREAIAAEPDKDELKLDLALALLKTGDTAEAERLIDALPANLATDDRAVRAKARLSFANVLKDAPDAGTLQSAVDANSADLRARHLLGVRHLLDGNDEAALEQFLEMLRQDRTFDDNLPRRSLIDAFRVIEDEDLVGRYRRKMSALVF

SEQ ID NO: 13416 - protein, 241 aa, Zea mays
  misc_feature (218)..(218): Xaa can be any naturally occurring amino acid
MASSLLSSPAKPTITTTTKTTPAPRPARSAHVHVLSAARCLRLRLRASSQHPPPPPTPRSRRPEYVPNRIDDPNYVRIFDTTLRDGEQSPGATMTSAQKLVVARQLARLGVDIIEAGFPASSPDDLDAVRSIAIEVGNPAPAGEDAAVHVPVICGLSRCNRRDIDAAWEAVRHARRPRIHTFIATSDIHMQHKLRKTPDQVVPIAREMVAYARSLGCXDVDFSTEGAFRSNSVLMYLFLEF

SEQ ID NO: 13417 - protein, 385 aa, Brassica rapa subsp. pekinensis
MVAHKETVCVTGASGFIGSWLVMRLLERGYFVRATVRDPGNLKKVQHLLDLPNAKTQLTLWKADLSDEGSYDDAINGCDGVFHIATPMDFESKDPENEVIKPTVNGVLGIMKACDKAKTVRRIVFTSSAGTVNVEEHQKNVYDENDWSDLDFIMSKKMTGWMYFMSKTLAEKAAWDYAKEKGIDFISIIPTLVIGPFITTSMPPSLITALSPITRNEAHYSIIRQGQYVHLDDLCNAHIFLYEQAGAKGRYVCSSHDATILTISEFLRQKYPEYNVPSTFEGVDENLKSIMFSSKKLIDMGFNFKYSLEDMLVESIETCRQKGFLPVTLPEHLKSEDKVPGSDDNKEIKNGSAGLTDGMVACKKTEPGMAGEKADSHMSAQQICA

SEQ ID NO: 13418 - protein, 411 aa, Triticum aestivum
MNALAATSRNFRQAARLLGLDSKLEKSLLIPFREIKVECTIPKDDGTLASFVGFRVQHDNARGPMKGGIRYHPEVDPDEVNALAQLMTWKTAVAAVPYGGAKGGIGCSPGDLSRSELERLTRVFTQKIHDLIGTHTDIPAPDMGTNSQTMAWIFDEYSKFHGHSPAVVTGKPIDLGGSLGRDAATGRGVMYATEALLAEYGKSISGSTFVIQGFGNVGSWAAQLIHEKGGKVIALGDVSGTIRNKAGIDVPALMKHRNEGGQLKDFHGAEVMDASELLVHECDVLLPCALGGVLNRENAPEIKAKFIIEAANHPTDPEADEILTKKGVVVLPDIYANAGGVIVSYFEWVQNIQGFMWEEEKVNMELHKYMNSAFQNIKAMCKSQDCNLRMGAFTLGVNRVARATILRGWEA

SEQ ID NO: 13419 - protein, 450 aa, Leifsonia xyli subsp. xyli str. CTCB07
MTPVLSTLLDDVLRRNAGEPEFHQATREVFGSLGPVIAAQPRYTQAAVLERLTEPERQLIFRVPWTDDEGNVRVNRGFRVEFNSALGPFKGGLRFHPSVTLGTVKFLGFEQIFKNALTGLPIGGGKGGSDFDPKGRSDAEVMRFCQSFMTELYRHLGEYTDVPAGDIGVGGREIGYLFGQYKRITNRYESGVLTSKGIGWGGSLVRTEATGYGSVFFAERMLATRGRDFTGVRVLVSGSGNVALYAIEKVHQLGGTVVACSDSSGVVYDRGGLDLDLLRQIKENERGRLSDYAARRAAGSEYRANGDIWAIAAQTPIDVALLAATQNELDATAAATLAQNGVIAVVEGANMPCTPEAVHLLRTAGVLFAPGKAANAGGVATSALEMQQNASRDAWSFEYAEGRLADIMANIHDSCAETAEKYGAPGDYVLGANIAGFVRVADAMLALGVI

SEQ ID NO: 13420 - protein, 340 aa, Campylobacter lari RM2100
MGYVSVEQAIKELQDGKMLIMVDAEDRENEGDLIFPAQFSSKEKVNFTITHARGVVCVALSENLAKKFELPLMVPKNTSNHETAFTITVDAKNATTGVSAYERDMTIQIFADDNAKASDFVRPGHINPLIAKKGGVLERTGHTEGTVDLCRLAGLKEACVICEIVKDNGDMARRDDLLEFCKKHDINMITISDLIEYRLKNESLISLIKEEDSILAGFKAKKMIFKDHNANEHIAFSFGALKECENVKFYLSGSDFELLTSNKFNELLKQIEFLSQKGGVIIFMKNEKQENTQFKNYGIGAQILRYLKISKIKLLSQNTDKEFIGLKGFGLDITSSDFKA

SEQ ID NO: 13421 - protein, 104 aa, Clostridium pasteurianum
MVKDINDSNFQEEVKAGTVVVDFWAAWCGPCKMLGPVIDEDLSEEQGKLDIAKVNVDTNPIVASRFEIASIPTVLVFKNGQVADETLVGFAPKGRLKEVLQKHI

SEQ ID NO: 13422 - protein, 136 aa, Haemophilus somnus 2336
MRILHTMLRVGDMDRSIHFYQQVLGMRLLRTSENTEYKYSLAFLGYDDEENSSVIELTYNWGVSKYEMGTAYGHIAIGVEDIYATCKAVKEAGGKITREPGPVKGGKTVIAFVEDPDGYKIEFIENKMAQAGLGNQ

SEQ ID NO: 13423 - protein, 551 aa, Bifidobacterium adolescentis
MPATPADLINVDEVIGKYYDVVPDPNVPEQRVSFGTSGHRGSSLKTSFNEAHIVAITQAIAEYRKKAGVTGPLYIGRDTHALSEPAWKTAIEVLVANGVTVRIDSRDDFTPTPVVSQAILTHNRAADGTQRFTGEGLADGIVVTPSHNPPTDGGFKYDPVTGGPAPADVTNAIADRANELLGDFRNVKRVPFEQAVKSDLVERFDFREHYVADLENVIDFDVIRSSGVRLGIDPLGGASVNYWPLMNEKFNLTIDVVRPQVDPTWSFMTIDHDGKIRMDPSSPYAMKGLVDSLNNGAWDKYDLVGGTDPDADRHGIVCPNWGVMNPNHYIAVCVEYLFGGNRPGWPEGAGIGKTLVSSSLIDRVAASIDAKLVEVPVGFKWFVDPLFKGEVAFGGEESSGMSFLRKDGRVWTTDKDGLIPDLLAAEITAKTGKNPAQLHQEQVERFGESWYKRVDTPTTLEQKQKFAKLTGDDVEATQLAGEDITAKLTEAPGNHAKIGGLKVTTKDNWFAARPSGTENIYKVYAESFESPEALDKVLAEATEVVDKALAE

SEQ ID NO: 13424 - protein, 363 aa, Yersinia pseudotuberculosis
MTKTYHIAVLPGDGIGPEVMAQASKVLDAVRQRFGLKISTSVYDVGGAAIDRHGSPLPAATVAGCEQADAILFGSVGGPKWEHLPPAEQPERGALLPLRKHFKLFSNLRPARLYQGLEDFCPLRSDIAARGFDILCVRELTGGIYFGQPKGREGQGMHERAFDTEVYHRFEIERIARIAFESARKRRSKVTSIDKANVLQSSILWREVVNGIAADYPDVALSHMYIDNATMQLIKDPSQFDVLLCSNLFGDILSDECAMITGSMGMLPSASLNEQGFGLYEPAGGSAPDIAGKNIANPIAQILSLILLLRFSLGKDDAADAIERAINQALEQGYRTADLAGDGHAIGTHEMGDIIAKFVVEGV

SEQ ID NO: 13425 - protein, 604 aa, Wolinella succinogenes
MCSICGGTIKPSLIQKASDTMRHRGPDARSFWSDGKISLAHNRLSILDLSEAGNQPFGDERYRLIFNGEIYNFQELSSDYGLRLQSSSDTEVLWRLLILEGERILPRLNGMFSFLFYDGHKGEILMARDRFGKKPLFYFHEGKELGVASEIKALRAILGEKGALDQGALLDYLSYLAPCGEKSFFPTIHKLPAGCLARFSLSEGRLEKSSFYSLPSAPSRENIEEKEALRKIEELLVESVRYRLLSDVPVASFLSGGIDSSLISALYARLSPCSIETFSIGYDEYKHYDELPYAREVASHIGSIHHEKIATRKDFLEAFEEVLPILDEPLGDPAIIPTYLLSKEVAKSGFKVVLSGEGSDEIFFGYDGYFDSLKLLWLENSLGLKEKAILLDYHRKSEHGGKEWERLRRLLMDEKPYFRGINESWTPGQRARLFKQEPAWRDPILETFQDFPSKEGEGWYSYIDLKHWMAEVLMSKMDRMSMAHSLESRAPFLDYQLVDFVLSLPSSLRTGEITKNLLKKIALAYLPDSIVNRRKKGFSSPMFEWYFEAYQGRILEDYQRVNRELGWFEDSYLKFLYEKGRMGEYKSQNWGMILFSRWFLIHCG

SEQ ID NO: 13426 - protein, 324 aa, Mesorhizobium sp. BNC1
MTTRHAPVLIIGSGPAGYTAAIYAARAMLKPLLVSGLEQGGQLMITTEVENYPGFAEPIQGPWLMEQMRLQAEHVGTEIVNDLIVEADIRSRPFRLKGDSGTVYTCDALIIATGAKARWLGLPSENTFMGFGLSACATCDGFFYRGKEVVVIGGGNTAVEEALYLSNLAKRVTVIHRRGEFRAERILQERLLRKENVEIMWDTVVDEILGETPKPPLPPSVTGIRVQNVQTGEVRDLPVDGVFVAIGHAPAVELFEGKLKQKPNGYLWTEPNSTRTDVPGVFAAGDVADDVYRQAVTAAGLGCMAALEAERYLAELETHREAAE

SEQ ID NO: 13427 - protein, 169 aa, Picea abies
ASMVTAEDFMFKGLNIAGDTSKMLGSNVTQANVMQIPGLNTLGISMVRIDYAAPLGLNPPHTHPRATEILVVIEGTLSVGFITTDNRLFSKTLEKGDVFVFPKGLVHFQQNVGRYNAVAIAALSSQLPGTQQVAMSLFGASPPVDASLLAKAFKIDASLVQRLQREFLA

SEQ ID NO: 13428 - protein, 169 aa, Picea abies
ASMVTAEDFMFKGLNIAGDTSKMLGSSVTAANVMQIPGLNTLGISMARIDFAPNGGLNPPHTHPRATEILVVIEGTLSVGFITTDNRLFSKTLEKGDVFVFPKGLVHFQLNVGRYNAVAIAALSSQLPGTQQVAMSLFGASPPVDASLLAKAFKIDASLVKRLQREFLG

SEQ ID NO: 13429 - protein, 571 aa, Aspergillus nidulans FGSC A4
MCGIFACHHHPDVQAFKPTALRMAKAVRHRGPDWSGSFIADKTILCHERLCIVGVDSGAQPLVNDDESLALAVNGEIYNHRIVRKTLDVEYNYKTHSDCEVIIPLYMKYGLDAPKHLDGMFAWVLYDKKEDRVIAARDPIGICSFYIGWSSQTPGAVYFASELKSLHPVCDKVEAFPPGHVFDSKSGEFSRYFQPSWWDPTNVPSTPVDYKAIRESLTRSVRKRLMAEVPYGVLLSGGLDSSLVASIAQRETLRMQKASSGVKSEANGELVGIDDENELSTVNSFQQLQSFSIGLPGAPDTEAAMEVAKFLGTKHHALTFTIEDGLNALSDVIYHLETYDVTTIRASTPMYLLSRKIKGLGVKMVLSGEGSDEIFGGYLYFHAAPNKEEFHKETVRRVKNLHLADCLRANKSTSAWGLEARVPFLDKAFIETSMSVDPQEKMITKDRIEKYILRKAFDTSDEPDVEPYLPDKILWRQKEQFSDGVGYSWIDGLKDHAELHVTDEMMKNPKPEWGDDIPTTKEAYWYRMMFDEHFPSYCASTVERWVPTWSKQSDPSGRAIATHNAKYDDAE

SEQ ID NO: 13430 - protein, 81 aa, Gaertnera cuneifolia
  misc_feature (35)..(35): Xaa can be any naturally occurring amino acid
  misc_feature (41)..(41): Xaa can be any naturally occurring amino acid
TPQDEMRAGMSYFHETIWKGVPKFLRRVDTALKNXGINERXPYNAPLIQFSSWMGGDRDGNPRVTPEVTRDVCLLARMMAA

SEQ ID NO: 13431 - protein, 606 aa, Wolinella succinogenes
MCGILGYLRKGSAGQSQLSCEQFNQILSKIAHRGPDHQDFVWFNEPEYQLYLGHVRLSIIDLDERASQPMLFKDRYLLVFNGEIYNYRELKEKLLLQGYGFATQSDSEVLLAAYDFWGETCVEHFNGMWAFAIYDKKRHSLFCSRDRFGVKPFYFYENEEIFVFASEIKALLPFFKEAKLNPKVILPYLARGFLDGGSETFFDGVYRLEASSNLFYDLRGKQKSFQTYYSILLNPLSAKEREIPSSAKELLSLLRQSVSLRLRSDVRVGACLSGGLDSSGVAALASQQYDFGEKLVAIHAKSSLKESDESSYAIEVANHLGLDLHMVEPSFEDFCESLDDLFYTQEEPFGSTSMFMQYFVMKKAKELGCKVMLDGQGADEVFLGYEHYFHNIFKDLRDRKFFLENDFFKDLKTFRYTKEQILEELKKADDAGVAWDVIKNRGNICSRYLCREWLDSYIAPVKTIQEFQKREIFYNHLPSLLRYEDRDSMRFGIETRLPYLDYRIVEWVLALPTEVKFQQGYLKFALREALEISGLLPKSIVWRYNKMGFESPQKLWIDRYRFEMMKVIEGSEIIRDIFFKVDIRRDDFLWKLFSIAKWEKMFNVKL

SEQ ID NO: 13432 - protein, 115 aa, Triticum aestivum
MAHSAVAQVVLVAVVAAMLLAATEAAVSCGQVSSALSPCISYARGNGANPSAACCSGVRSLASSARSTADKQVACKCIKSAAAGLNAGKAAGIPTKCGVSVPYAISSSVDCSKIR

SEQ ID NO: 13433 - protein, 303 aa, Lebetimonas acidiphila
ASHDVTLLSGQKGRLTHFIVEPFTPHTEDEEYYIAATTLDAYHDVLYLSAHGGMEVEENWDKVTEIKIPIDMDEANLEHLIRANIPADIPEENKERFVTFAEQFYKFSRDLNFAYLEINPLVLQGNNIYILDLVARLDDTAGFLMKDKWGNIEFPTPFGMPEKSPEEKAIAEADAKSGASLKLTILNPMGRIWTLVAGGGASVVYADTIADLAGGVNELANYGEYSGGPTTDETRFYTETVLDLMTREKDPQGRDKILIIGGAIANFTDVAKTFTGIIQAFNKYADKMKDVGVRIYVRRGGPN

SEQ ID NO: 13434 - protein, 199 aa, Zea mays
  misc_feature (6)..(6): Xaa can be any naturally occurring amino acid
MASRKXLVGLTARRQLQSRTQQLFWATSLPEATTSRSLMAAAAMARLSDRSPAPFILSSRAISLTQPVMQSTGDVSGSSPSAVDHKLAMQEDEFHKLADETIHDLLEKLEEYGDSIQMDGFDIEYGNQILTLRLGDLGTYVINKQTPNKQIWLSSPVSGPSRFDWDGTANGWIYKRTGVNLVRLLEKEIGELCGTPVEL

SEQ ID NO: 13435 - protein, 177 aa, Pyrococcus horikoshii OT3
MRFKVSKLMAYILRHSPWEFGLEPDEEGFVSIEELVNAVRKVYPWVTEEYIREIVERDEKGRYEIRGNKIRARYGHSYPVILRHEEDKESKVLYHGTVRRNLKGIMREGIKPMKRQYVHLSINYEDAYNTGRRHGEDVVVLIIDAECLRNKGYKILKAGKKVRIVKHVPVDCISGIL

SEQ ID NO: 13436 - protein, 422 aa, Aquifex aeolicus VF5
MEDSLPAIYTDFLVFLFLLFASGFFSSSEVVFFSVSKPVLMKFSGNRFFKLLMKLLSKPKELLISILIGNELVNVLIASYGTKTFVELFGDKGALLAVAVSSTLIFIFGETIPKNVVLPIADRLALVYAPVFYLFHVVITPLRIILILPVQTLLKKMGVEIKEETFELTEEKLLSLIEQGIESGEFEIQEKSMIEKVLEMDEVLVREVMTPRPKIFALPEDKRVGEVVEEIKRRAHSKIPLYKDVLDNVSGIVHVKELLPIQHNRERALKEFATDVLIIPEVTTLSNFLREIKKYKIKLAVVIDEHGAVSGVVTLYDVLKWIVGEIPEEYEEEKEIEKISADTYRVGGSVSIEELAEKIGLELPEEYDYDTVSGFVMANLGRIPKKGDEFTFDGFKFIVNEVQNNKVKEVIVVRLSEEKVTK

SEQ ID NO: 13437 - protein, 553 aa, Zymomonas mobilis subsp. mobilis ZM4
MSDTKSTVAKLLVKCLEAEGVEYVFGIPGEENIRLIDAMADSSIRFILVRHEQGASFMADMYGRLTGKAGVCTATLGPGAINLLLGVADAQTDSTPMVAISAQVGLNRIYKESHQYIDLQGMFAPVTKWSDTILTPASVPEMMRKAFDLAQRERPGAVYLAVPQDLEESDVSADLKPITVHPVHTTAPDPDQVAATIDLIKKAKQPIILAGHGVARSHASKQLIELSELLNVPVATTFMAKGVIPDRHPNALGVAGFMRRDYENFAFDAADVILSVGYELQEFAPSKINPNHDKKIVHIHHFAEDIDAAYPVAIAIEADIDKSLDALIDGLKKTTFPKFDNHAKIKQIKKEELDGNADDQSFPLKPQRIISDIRKAMGDDDIVLADTGAIKMWMARLYPTQKPSTCLISNGLSTMAFALPGALAAKLACPDRKVLAVMGDGSFLMNSQEIETAIRENIPLVVLIWVDDAYGLIKWKMDLEIKHHRDVDFTNPDFVQYAESFGAKGYEIKSADMLLPVIEKALADDGVSIIACPVDYAENNKLTDKLGDLTITI

SEQ ID NO: 13438 - protein, 434 aa, Thermoplasma volcanium GSS1
MDEISSMLDYLGIKSTEELFSDIPLSVRKKEIGIGSPLDEHLVLERARKYASLNSTEMLNFLGNGIYDRVIPEAVNYIISKSEFLDSYTPYQPEVSQGMLQSIFEYQSLISDLFKMDFTNASMYDGYSALGEAARMAYRINGKNKILIPESTYDSKLSVLKNYVWGLSMKIEKYKMNEEGKIDIDDLQSRIDGDTSAVVVENPNGYGVIDENVFRISEIKKESLLISYVDPISLGVLKPPGEYGSDIAIAEGQQLGIPMNFGGPLLGIMSFKADYVRKSPGRLIGESVDADGKRAFVMTLQTREQHIRRAKATSNICSNQALLTLAAGSYLSILGSSGLKKVALLTIKHSKNLAESLGNIGIEKVFDSISFSDTLFRIDKNVMLDLAKKGILGGIKLTSLIKDSKYSSGTFFTATEKTDNEKIKALVNALEVIM

SEQ ID NO: 13439 - protein, 114 aa, Nicotiana tabacum
MEMVSKIACFVVLCMVVVAPHAEALTCGQVQSSLAPCVPYLLGRGPLGGCCGGVKRLLGAARTPADRKTACNCLKSAANTFKGIDMGNAARLPGTCGVNIPYKISPSTDCSKVQ

SEQ ID NO: 13440 - protein, 160 aa, Arabidopsis thaliana
MAQRTEKEETEFKVLETLTTTTTTLCTNNCGVTANPATNNMCQKCFNASLVSAAAGVVESGSILKRSARSVNLRSSPAKVVIRPREIDAVKKRDQQIVNRCSGCRKKVGLTGFRCRCGELFCSEHRYSDRHDCSYDYKTAGREAIARENPVVKAAKMVKV

SEQ ID NO: 13441 - protein, 567 aa, Ralstonia metallidurans CH34
MPMLQDPSTKYRPATTVDLHDRTWPSRQITRAPRWMSTDLRDGNQALIEPMNSARKLRFFEQLVKIGLKEIEVAFPSASQTDFDFVRMLIEEDRIPEDVNIVVLTQARDDLIRRTVESVRGARRATVHLYNPIAPAWRRIVFNASREEIKEVAVSGTRLIRELTDAMPDTAWTYEYSPETFSLAELDFSLEVSDAVSAVWEPDANRPMVLNLPTTVECSTTNVFADQVEWMHRRLARREHIVLSVHPHNDRGTAVAAAELAVMAGADRVEGCLFGNGERTGNVDLVTLALNLYTQGVDPQLDFSDIDEVRQCVEHCNQLPVHPRHPYVGDLVFTAFSGSHQDAIRKGFAQQKDDAIWEVPYLPIDPADLGRSYDAVIRVNSQSGKGGMAYLLEQMHGIYMPRRLQIEFSRAVQAMTDETGLEASAADLYALFRREYLDVEAPLRYVSHRMVSASDAAAEVEIDIVRDGRPMRMRGTGNGPIDAAVDAFTRGLGVAVRVMDYHEHAMTTGADANAACYVEVRVAGSITGFGAGVDPSIVTASLKAVVSGINRHLQTRDMSEAVEARAA

SEQ ID NO: 13442 - protein, 414 aa, Polaromonas sp. JS666
MSRRRVVVTGLGCVSPVGTTVADSWTNLLAGTPGIDLITQFDASNFACKFAGEVKGFKIEDYIPEKEARHMDRFIHLGLAAACQAVADSGLPTGDALGEELATRIGCNIGSGIGGLPMIEQTHAELVNRGPRRISPFFVPASIINMISGHVSIKFGFKGPNIAVVTACTTGLHAIGLSARMIEYGDCDVMVAGGAESCVSPLGVGGFAAARALSTRNDDPKTASRPWDKDRDGFVLGEGGGVLVLEEYEHAKARGAKIYAEVIGFGMSADAYHMTSPDINGPRRSMAMALKNAGVNADQVQYLNAHGTSTPLGDLNETNAIKAAFGSHAKNMVVSSTKSMTGHLLGGAGGIESVFTVLALHHQKIPPTINMFSQDPECDLDYCANVARDANIEFAVKNNFGFGGTNGTLVFKRV

SEQ ID NO: 13443 - protein, 139 aa, Agaricus bisporus
MSGKGKAGKSGGKAGSETKSMSRSSKAGLQFPVGRVHRLLKKGNYAQRVGAGAPVYMAAVLEYLAAEILELAGNAARDNKKQRIVPRHLQLAIRNDEELHKLLGNVVISQGGVVPHIAPELLPSKSSKGKKDEGVSQEL

SEQ ID NO: 13444 - protein, 332 aa, Streptomyces coelicolor A3(2)
MTRIGINGFGRIGRNVLRALLERDTKLEVVAVNDLTEPATLARLLAFDSTAGRLGRPVTVDGDTLVVDGHRIKVLAEREPARLPWAELGVDIVLEATGRFTSADAARAHLTAGARKVLVSAPSSGADVTLAYGVNTDAYDPAAHTIVSNASCTTNALAPLAAVLDELAGIEHGFMTTVHAYTQEQNLQDGPHRDARRARAAGVNIVPTTTGAAKAIGLVLPGLDGKLSGDSIRVPVPVGSIVELNTTVARDVTREDVLAAYRAAADGPLAGVLEYSDDPLVSSDITGNPASSIFDSALTRVEGRHIKVVAWYDNEWGFSNRVIDTLALLATR

SEQ ID NO: 13445 - protein, 444 aa, Leptospira interrogans serovar Copenhageni str. Fiocruz L1-130
MELIGFFIIVLLIFANGFFVSAEFALVSIRPSRLEELIKENKPLAFITKRAAQKLNDMLSVCQVGITIASLLLGWVGEGYVSRWLIFLLEMFGYSANEATVHGLAITISFTIITFLHILLGELLPKTVAIQNTETIALFISIPLFFFYYLFYPITFFLNEMTSFLLKLIGIEANKSRMMHSPEELMIIIEEQNKQGKIDQEEFQIIQNTFQFSEHQAKDVMTHRLSIIGIPHDTSMDSLISIIAEHHFSRYPIYEGSTDKIIGIIHVQTYLTWLSNSKKGRKEKVTAIMQPPIFVPEGLSIEKVMQKLRENKQHMAIVIDEYGGVAGLLTLEDIIEEIFGQIRDETDDHETDPFPTQHSDSFTIDGEAELDDLKEILVGVQEEEIKDIRTIAGFILGRLEDMPEEGSTISLQTGTLTVEKMEGNKILSVRFTRVSLNNRAQSKK

SEQ ID NO: 13446 - protein, 158 aa, Malus x domestica
MEGKVFTEEQETLVVKSWGVMKKNAAELGLKFFLKIFEIAPSAQKLFSFLRDSDIPLEKNPKLKPHAMSVFVMTCESAVQLRKAGKVTVRESTLKRLGGVHFKSGVVDEHYEVTKFALLETIKEALPEMWSPEMKNAWGEAYDQLVAAIKSEMKPPLN

SEQ ID NO: 13447 - protein, 180 aa, Skeletonema costatum
AVFTDGSFCYIPKDVICPLDLSTYFRINDQNSGQFERTLIIAEENSKVSYLEGCTAPQYDNNQLHAAIVELIALKNATIKYSTVQNWYSGDQKGQGGVYNFVTKRGLCAGDFSKISWTQVETGSSITWKYPSCVLVGDSAQGEFYSVALTNNYQQADTGTKMIHIGRNTRSRIVSKGISA

SEQ ID NO: 13448 - protein, 593 aa, Frankia sp. EAN1pec
MCGLSGELRFDGREADVAAVGRMTAAMEARGPDGVGLWATGPVAFGHRRLKIIDLSERGAQPMVDTALGLTAVFNGCIYNYQELRDRLVDAGYRFFSTSDTEVILKAYHHWGPRCVDHFAGMFAFAVYERDTGRLVLVRDRLGIKPLYVTRDPHRLRFASTLPALLAGGGVSSDIDLVAFHHYLSFHSVVPPPHTILTGVRKLPQATIRTVEADGTTRDEVYWRPDSTRQEEHASWTADDWRDAIGERLRTAVRRRMVADVPVGVLLSGGLDSSLIVALLAEAGQRDLATFSVGFEAAGGESGDEFHYSDIIARRFGTDHHQIRVPGDRLLPAIDAAVAAMSEPMVSHDCVAFYLLSQEVARHVKVVQSGQGADEVFAGYSWYPPLATVPRGDAVDAYLRVFADRPHAELPAMVESHHLIEGDASRHFVAERFAEPGAETSVDAALRIDSTVMLVDDPVKRVDNMTMAAGLEARTPFLDHELVELAAACPPELKLASGGKGVLKDLSRPLMPVDVIDRPKGYFPVPAIRHLGGPFLARVADALTDPVARGRGLFRKDWVDEMLADPNSNRTTLGANALWQAALLEMWLQTQGV

SEQ ID NO: 13449 - protein, 181 aa, Arabidopsis thaliana
MASSMLSSAAVVTSPAQATMVAPFTGLKSSAAFPVTRKTNKDITSIASNGGRVSCMKVWPPIGKKKFETLSYLPDLSDVELAKEVDYLLRNKWIPCVEFELEHGFVYREHGNTPGYYDGRYWTMWKLPLFGCTDSAQVLKEVEECKKEYPGAFIKIIGFDNTRQVQCISFIAYKPPSFTEA

SEQ ID NO: 13450 - protein, 479 aa, Nostoc sp. PCC 7120
MSATVKTLVNQPYKYGFVTDIEADTIPRGLDEDVVRLISTKKNEPEFMLEFRLRAFRQWQKMTEPTWPSVKYPPIDYQNIIYYSAPKQKKAKLNSLDEVDPTLIETFEKLGIPLSEQKRLANVAVDAIFDSVSVATTFKEKLAKDGVIFCSISEALQEHPELIKKYLGSVVPIADNYFAALNAAVFSDGSFVYIPKGVKCPMELSTYFRINSGDTGQFERTLIVAEEGSYVSYLEGCTAPMYDSNQLHAAVVELVALDNAEIKYSTVQNWYAGDANGKGGIYNFVTKRGLCQGVNSKISWTQVETGSAITWKYPSCVLVGDNSVGEFYSVALTNNMQQADTGTKMIHIGKNTRSTIISKGISAGQSSNSYRGLVKINPTAKGARNYSQCDSMLIGDNAHANTFPYIQVQNNTGKVEHEASTSKIGEDQLFFFAQRGISSEDAISMMISGFCKDVFNQLPMEFAVEADKLLSLKLEGSVG

SEQ ID NO: 13451 - protein, 81 aa, Gaertnera edentata
  misc_feature (17)..(18): Xaa can be any naturally occurring amino acid
TPQDEMRAGMSYFHETXXKGVPKFLRRVDTALKNIGINERLPYNAPLIQFSSWMGGDRDGNPRVTPEVTRDVCLLARMMAA

SEQ ID NO: 13452 - protein, 200 aa, Triticum aestivum
RTTSPLPRFLLLSPSPMAQSWAFFLLVVLCFCCVSDLICGSNGERVFLYPQSQKVSSIVSQRYRTAYHFQPPKNWINDPNGPMYYNGIYHEFYQYNPNGSVWGNIVWGHSVSTDLINWIPLETAIARDTPSDINGCWTGSATILPGNRLVIIYTGADPEKRQVQNIVVPKNMSDPYLREWTKAGNNPVIQPVGPGLNSGQ

SEQ ID NO: 13453 - protein, 322 aa, Caulobacter crescentus CB15
MSRQPPIRIGARGSKLSLAQSGLMQARIAHALGVPAGASKDEIEAAAPLIPIVTSGDRIQDRRLMEIGGKGLFTKEIEEALLDGRIDCAVHSLKDMPAELPPGLVLAATPEREDPRDAFISHVCERLEDLPKGARLGTASLRRQAQALHVRPDLEIVMLRGNVDTRLAKLERGEADAILLAQSGLNRLGLGHLTRSWLDPDACPPAPGQGALVIETRAEDIGAPWLEAVRCRQTTIAVAAERGALLALEGSCRTAIGARAILDGARLSMIVEALTPDGAQRFRREGDITLTGADDIAEARAFGLTLGAEVRAAGGDAIILPE

SEQ ID NO: 13454 - protein, 182 aa, Thermosynechococcus elongatus BP-1
MGAATAASGQRLRNFVIAVVAILISFALLAGLGSDNQPLTLAEQAKHATPWEEAQVNGKPTLLEFYANWCSTCRSMAKDLGELKAQYRDRVNFVMLNVDNSKWLPEIEQFNVDGIPHFVFLNRQLEPQAVAIGLQPKEVMAKNLEALSNDLPLPYGQLTGEMSQLPSPLARQRSDDPRSHGG

SEQ ID NO: 13455 - protein, 246 aa, Bifidobacterium adolescentis
MTYKLVLLRHGQSAWNKTNQFTGWVDVPLTEQGVEEAKNGGRLLKEKNVLPDIVFTSMLRRAINTANVALDEADRLWIPVKRSWRLNERHYGALQGKNKTEIRQEYGDEKFMLWRRSYATPPPEIDPNDEYAQNNDPRYTGDPVPEAECLADVVKRVEPYFKSDIEPELKAGKTVLIAAHGNSLRAIVKMLDNLSEEEIAKVNIPTAMPLLYELDENFKPIKPRGEYLDPEAAAAGAAAVAAQGQK

SEQ ID NO: 13456 - protein, 81 aa, Gaertnera fractiflexa
  misc_feature (43)..(43): Xaa can be any naturally occurring amino acid
TPQDEMRAGMSYFHETIWKGVPKFLRRVDTALKNIGINERLPXNAPLIQFSSWMGGDRDGNPRVTPEVTRDVCLLARMMAA

SEQ ID NO: 13457 - protein, 473 aa, Oryza sativa
MCCGVHLRQDAPLEAVNGGGRRTMTIATDAQIRQLSRGRPWPAAGGGPPPRLNKSGSSAAGGRGHAHRRRRRPSRHSSAGRSPRASYRVCQRQQGRRARSLELAPAAVGVAAPNLPHALAQPPAAWDTELGEARAERVAVYSGSVVGGSPEAEQDSTLAQSPVTQRPRPLPSKEPPHKLGRGSRDKVQQFMTITGASEKVALQALKASDWHLEGAFDFFYSQPQISLTNSRHLEDLYNRYKEPDVDMIMVEGVSQFCTDLQVDPQDIVMLVISWHMKAATMCEFTRQEFIGGLQSIGVDSIEKLREKLPSLRAEIKDDHKFREIYNFAFAWAREKGQKSLALETALGMWQLLFAERHWPLIDHWCQFLQACRVKGCGALHLQSCTATTLTAGNRREDEANRRKPGRCRRADETTDALGAVAPKDIVRRRGHMPPRSDGPEPSELLLLCCLYSAMEYNGRHCMGAGLPDAEVSE

SEQ ID NO: 13458 - protein, 356 aa, Oryza sativa
MYSSDVAMQPGFESSYSDYGILDDLSAFNCTEDKSLTTADPSSAVCDEQFDDSYLFNEQKTEDVYGEQIGNRYSSENAMEQPEDQKFSIASGSQLSSSQNLLNQKNHLDSTSPSNITSESYPERNCQIIPSGASFAERNLKVQKKVASSASGQLISDNVTGHPGHQTLTRRASYPCENHEIGKRSLGKRGLGHSDVAMGTSMVVDGSFVSSISSDNSVEENSFRQLQDAVSQLDVKTKMCIRDGLYRLARSAQNRQVFPNTMNNNGDSHNVKDMQNAETSGKFVDPGSIETQTNPIDRSIALLLFHQPSEHVTGAVDEAASLKSHNDNHQAAAKNQRVMHASSVHSPRGQGDPMDA

SEQ ID NO: 13459 - protein, 480 aa, Pseudomonas fluorescens Pf-5
MQLKDAQLFRQQAFIDGAWVDADNGQTIKVNNPATGEILGTVPKMGAAETRRAIEAADKALPAWRALTAKERATKLRRWYELLIENQDDLGRLMTLEQGKPLAEAKGEIAYAASFIEWFAEEAKRIYGDVIPGHQPDKRLIVIKQPIGVTAAITPWNFPAAMITRKAGPALAAGCTMVIKPASQTPFSALALVELAHRAGIPKGVLSVVTGSAGDIGGELTSNPIVRKLSFTGSTEIGRQLMAECAKDIKKVSLELGGNAPFIVFDDADLDKAVEGAIISKYRNNGQTCVCANRLYIQDSVYDAFAEKLKAAVAKLKIGNGLEEGTTTGPLIDEKAVAKVQEHIADALKKGATLLAGGKSMEGNFFEPTILVNVPKDAAVAKEETFGPLAPLFRFKDEAEVIAMSNDTEFGLASYFYARDLGRVFRVAEALEYGMVGVNTGLISNEVAPFGGIKASGLGREGSKYGIEDYLEIKYLCLGI

SEQ ID NO: 13460 - protein, 662 aa, Arabidopsis thaliana
MTTISDLSDDLVGDILSRVPFTSLISVRSTCKKWNALSKNQIFGRKTAARNQFLEFMILDSRVCSLRLDLQGIRNEDKEDFVDPSMKLISIPSNDDQVEISQVYHCDGLLLCIAKENSNVFVWNPYLGQTKWIRPRNTFHRYDRFALGYDNNRNHKILRFLYDEESNESSRRTHIDVYDFSSDSWRVLDVNPDCDIPFYQTGVSLKGNTYFFGQEVTQATKVTEIETCLLCFDFTTERFGPCLPLLFYPPCPSFETVTLSWVRDEKLAVLYNHYVTAEIIEIRISTKIEPNAVSWSSFLTVDMSLVNGLPDHFSMYFEAKSFFIDEEKKVVVLFDSKEIKTCRYQMAYIVGDDGYFKSVNIGEKVGDRERNGSQMKTSLLCIAEDNSGLVVWNPYLCQTKWIRLRNTFHRYDVFALGHDNNRNHKILRFLYDAKKYRTGRGRDNDVYDFSSDSWRRVFDVNPHRGELFYYSGVSLKGNSYFFGQEVTIEEEEEEVISQPRDYLLCFDFTTERFGPRLSLPFNPPSPNFDYLTLSWARDEKLAVLYNHYNTREIIEIWISTKIEPNTVSWSTFLTVDTSLINGLPDRFSTFYGPRSFFIDEEKKVAVFFDNKGTETGCYQVAYIIGDNGYFKSVKIGVISNSQWQQGILVCSSYVPSLVQLQD

SEQ ID NO: 13461 - protein, 258 aa, Zea mays
  misc_feature (162)..(162): Xaa can be any naturally occurring amino acid
LRHCRHLPAPTPHLRFAMNPSSSSTSSSGGYHSRAAAFASPQPRGGGGGGGRDGSDRIDALGRLLTRVLRHMAAELRIDMRTDGYVRVRDLLKLNLQTFAKAPLKSHTVDEIREAVRQDNKQRFSLLEEDGELLIRANQGHTVTTVTSESLLKPILSPDEVXRKNLDSILQFGLKRMARLHIHFSSGLPSDGEVTSGVRQNVNILIHLDVSKALKGGMKLYISDNKVILTEGFDGVVPVKYFERVETWPGRAPIPFQR

SEQ ID NO: 13462 - protein, 359 aa, Kluyveromyces marxianus
MSKNIVVLPGDHVGTEITNEAIKVLNAISEARPSIKFNFEHHLIGGAAIDATGVPLPDEASKKADAVLLGAVGGPKWGTGSVRPEQGLLKIRKELGLYANLRPCNFASDSLLDLSPLKPEYAKGTDFVVVRELVGGIYFGERKEDEGDGVAWDSEKYSVPEVQRITRMAAFLALQHNPPLPIWSLDKANVLASSRLWRKTVEETIKNEFPQLTVQHQLIDSAAMILVKSPTKLNGIVITNNMFGDIISDEASVIPGSLGLLPSASLASLPDTNKAFGLYEPCHGSAPDLPANKVNPIATILSAAMMLKLSLDLVEEGRAVEEAVRKVLDSGIRTGDLGGSNSTTEVGDAVAKAVKEILA

SEQ ID NO: 13463 - protein, 285 aa, Rickettsia typhi str. Wilmington
MNNIIDGKALANEILADLKLEIQGFKEKTQTSPKLAIVLVGDNPASMIYIKNKIKNAQQVGIDTLLVNLSTNIYTDDLISKINELNLDKEISGIIVQLPLPSSIDENKILSAVLPSKDSDGFHPLNVGYLHSGINQGFIPCTALGCLAVIKKYAPNLNGKDAVIVGRSNIVGKPLSALLLKENCSVTICHSKTCNLSSITSKADIVVVAIGSPLKLTAEYFNPESIVIDVGINRISNNKIIGDVDFENVKSKVKYITPVPGGIGPMTIAFLLKNTVKAFKNAIAL

SEQ ID NO: 13464 - protein, 494 aa, Zea mays
  misc_feature (211)..(211): Xaa can be any naturally occurring amino acid
MVLSHGVGGSDESVHSTFASRYVRTSLPRYRMPEQSIPKEAAYQIINDELMLDGNPRLNLASFVTTWMEPECDKLIQASVNKNYVDMDEYPVTTELQNRCVNMIAHLFNAPLGDAETAVGVGTVGSSEAIMLAGLAFKRRWQNKMKAAGKPCDKPNIVTGANVQVCWEKFARYFEVELKEVKLSDGYYVMDPQKAVDMVDENTICVAAILXGSTLNGEFEDVKLLNDLLTKKNAETGWDTPIHVDAASGGFIAPFLYPELEWDFRLPLVKSINVSGHKYGLVYAGIGWCIWRTKADLPEELIFHINYLGADQPTFTLNFSKGSSQVIAQYYQLIRLGFEGYKNIMENCQENATVLKQGLEKTGKFNIVSKDNGVPLVAFSLKDNSRHNEFEISDFLRRFGWIVPAYTMPPDAQHVTVLRVVIREDFSRTLAERLVLDIEKVLHELDALPARVPSGDLAALAAAESSEREMEKKRQVISLWKRAVLAKKKTNGVC

SEQ ID NO: 13465 - protein, 305 aa, Oryza sativa (japonica cultivar-group)
MEFTPKITGKTTSMSGELKRDYEIGEEIGRGRFGVVHRCTSRATGEAFAVKSVDRSQLADDLDRELAELEPKLAQLAAAGNPGVVQVHAVYEDDAWTHMVMDLCSGPDLLDWIRLRRGAPVPEPVAAAVVAQLAEALAHCHRRGVAHRDVKPDNILLDVVDDGIDGGGTPRARLADFGSAAWVGESGGSAEGLVGTPHYVAPEVVAGGEYGEKADVWSAGVVLYVLLSGGALPFGGETAAEVLASVLRGSVRFPPRLFAGVSPAAKDLMRRMMCRDTWRRFSAEQVLGHPWIVSGGGARAMEQPT

SEQ ID NO: 13466 - protein, 80 aa, Thermoplasma volcanium GSS1 [sequence omitted]

SEQ ID NO: 13467 - protein, 497 aa, Bradyrhizobium japonicum USDA 110
MTPTAAARAQHATATLRDRLKDPSLLKEACYIDGAWVGTPVFAVNNPATGVELAKVPQLGADDTTKAVEAAERAFPAWAKHTAKQRSNILRKWFELIIANREDLALILTSEQGKPLSEALGEVDIGAAYIEFFAEEARRVYGETIPTQRPDARLLAIKQPIGVCGAITPWNFPNSMITRKVSPALAAGCTVVLKPANETPLSALALAVLAEKAGIPKGVLNIITGDAPPIGKVLCEHPAVRFVGFTGSTAVGKILYQQASVGVKRLGLELGGNAPFVVFDDADIDAAVEGAIVSKYRNMGQTCVCANRLYAQDKIYDEFVQKLSKKVAVMKIGDGTEAGVTQGPLINLKAVDKVERHIADAVKRGAKVVTGGKRSELGRSFFEPTVLADVKPDSLVAQEETFGPLAPVIRFKDEADVIAMCNASPFGLASYFYSRDLGRVWRVAEALESGMVGVNTGLITTEVAPFGGVKESGLGREGSRHGMEEYVEIKYVMMAGV

SEQ ID NO: 13468 - protein, 738 aa, Erythrobacter sp. NAP1
MGRWLAIWNILFVMLFLGGAAPSHAQSVPTSYSAANTPHFAPFAADLRSPIGRDLQTRNKVRSAIWAASQHTGVDYRYLLAKAQIESGLNPDAKARGSTATGLYQFIETTWLVSLDRYEAQLFTSLPIRGTNGQAGLSRRAKLALRDDPRMSAMMAAAYTLENGRALRSVLGREAVSRELYLAHFLGTGGAKRFLSAWLRNPHASAASLFPRAARSNRPIFSDRRGQMRSLDQVLRYIDVKLMEASKLTMGKIEAGLAKLSDCQIIILVEGFKRVTEETAETCDGETPASYTAPRSIGRGTLAVSGDHIALPCHHIEMCYLSRMSTSTITQVRELVETGAYTKAGIARAAGLHANTLRDASEPDWNPTAETLAKLQRFLDANDDSPVLVGIEEIIDEARNGRMYILVDDEDRENEGDLIIPAQMATPAAINFMATHGRGLICLALDKGRVDQLGLDPMSRNNKESMQTAFTVSIEAKKGVTTGISAADRARTVSVAIDATKGADDIVTPGHVFPLMARDGGTLVRAGHTEAAVDISRLAGLNPSGVICEIMNEDGSMARLDDLVDFARKHSLKIGTIRDLIAYRMRNDHLVERIDERSFESDYGGQWRLITYTNKVSGGEAYVLQKGHVVPGEPTLARVHPISVFDDVLGQPGPRKRTLQRAMGAIGEHGSGVIVILTNRIGGDEWTRDEQDRNIGIGSQILADLGVHDMVLLSNTRPELVALDGYGLTITDHMPIPE

SEQ ID NO: 13469 - protein, 509 aa, Methanopyrus kandleri AV19
MREANADADPPDEVRIFDTTLRDGEQTPGVALTPEEKLRIARKLDEIGVDTIEAGFAAASEGELKAIRRIAREELDAEVCSMARMVKGDVDAAVEAEADAVHIVVPTSEVHVKKKLRMDREEVLERAREVVEYARDHGLTVEISTEDGTRTELEYLYEVFDACLEAGAERLGYNDTVGVMAPEGMFLAVKKLRERVGEDVILSVHCHDDFGMATANTVAAVRAGARQVHVTVNGIGERAGNAALEEVVVVLEELYGVDTGIRTERLTELSKLVERLTGVRVPPNKAVVGENAFTHESGIHADGILKDESTYEPIPPEKVGHERRFVLGKHVGTSVIRKKLKQMGVDVDDEQLLEILRRLKRLGDRGKRITEADLRAIAEDVLGRPAERDIEVEDFTTVTGKRTIPTASIVVKIDGTRKEAASTGVGPVDATIKALERALKDQGIDFELVEYRAEALTGGTDAITHVDVKLRDPETGDIVHSGSSREDIVVASLEAFIDGINSLMARKRS

SEQ ID NO: 13470 - protein, 463 aa, Arabidopsis thaliana
MAEEGFIGIGESEEEAAEIGAFSYSHHQISDLRRRSSAVKDDSAQTSTPSSPPPPLPIHAGGSAVGATGKAKKKTGGARLWMRFDRTGAMEVVECDKSTIIKRASVPARDLRILGPVFSHSSNILGKNFDLLIPGLAREKAIVVNLEVIKAIVTAEEVLLLDPLRPEVLPFVERLKQQFPQRNGNENALQASANVQSPLDPEAAEGLQSELPFEFQVLEIALEVVCSFVDKSVAALETEAWPVLDELTKNVSTENLEYVRSLKSNLTRLLARVQKVRDELEHLLDDNEDMADLYLTRKWIQNQQTEAILAGTASNSIALPAHNTSNLHRLTSNRSASMVTSNTEEDDVEDLEMLLEAYFMQLDGMRNKILTVREYIDDTEDYVNIQLDNQRNELIQLQLTLTIASFAIAAETLLASLFGMNIPCPLYSIHGVFGYFVWSVTALCIVLFMVTLGYARWKKLLGS

SEQ ID NO: 13471 - protein, 158 aa, Pyrus communis
MEGKVFTEEQETLVVKSWGVMKQNAADLGLKFFLKIFEIAPSAQKLFSFLRDSNIPLEKNPKLKPHAMSVFVMTCESAVQLRKAGKVTVRESTLKRLGGVHFKSGVVDEHYEVTKFALLETIKEAVPEMWSPEMKNAWGEAYDQLVTAIKLEMKPPLN

SEQ ID NO: 13472 - protein, 702 aa, Synechococcus sp. WH 8102
MVASGVAVTDDRATRAFPLAAITGHGTLKLALLLAAVDPGLGGVVIAGGRGTGKSVLARGLHALLPPIDILDVDNGVGRNLDPQNPEEWDDTTRERISGEPPSKVIPAPFVQIPLGITEDRLVGALDVAASLASGSAVFQPGLLADAHRGVLYVDELNLLDDGIVNLMLAAVGSGENRVEREGLSLSHPCRPLLIATYNPEEGNVRDHLLDRFAIALSANQVVSTEQRVEITGAVLSHGQCSRSFAQKWGEETDALATQLLLARQWLPDVLISREQIEYLVTEAIRGGVEGHRSELYAVRVARAHAALSGRDTVEADDLQVAVALVIAPRASQMPPPDQQMEPPPPQDQEPPPPPQDQGDQQQDNPPPPPEGSDEEDSDPPEDSNDDNDTEDDDGDGEEDQAPPAVPEEFILDPEAIEVDPDLLLFNAAKAKSGNSGSRSVVLSDSRGRYVKPMLPRGPVRRIAVDATLRAAAPYQKIRREREPGRSVIVEEGDLRAKLLQRKAGALVVFLVDASGSMALNRMQSAKGAVIRLLTEAYENRDEVALIPFRGDQAEVLLPPTRSITAARRRLESMPCGGGSPLAHGLTQAARVGANALATGDLGQVVVVAITDGRGNVPLSTSLGQPELEGEEKPDLKQEVLDVASRYRMLGIKLLVIDTERKFIGSGMGKDLAEAAGGKYVQLPKASDQAIAAVAMNAINDI

SEQ ID NO: 13473 - protein, 334 aa, Haemophilus somnus 2336
MTIKIGINGFGRIGRIVFRAAQTRDDIEVVGINDLIDVEYMAYMLKYDSTHGRFDGTVEVKDGNLVVNGKAIRVTSERDPANLKWNELGVDVAVEATGLFLDDATARKHITAGAKKVVLTGPSKDATPMFVNGVNFDAYAGQDIVSNASCTTNCLAPLAKVINDKFGIKDGLMTTVHATTATQKTVDGPSAKDWRGGRGAAQNIIPSSTGAAKAVGKVIPALNGKLTGMAFRVPTPNVSVVDLTVNLEKPATYAEICAEIKRASENEMKGVLGYTEDAVVSTDFNGCSLTSVFDAAAGIALTDTFVKLVSWYDNETGYSNKVLDLVAHVHNYKG

SEQ ID NO: 13474 - protein, 346 aa, Thermus thermophilus
MKVAVLPGDGIGPEVTEAALKVLRALDEAEGLGLAYEVFPFGGAAIDAFGEPFPEPTRKGVEEAEAVLLGSVGGPKWDGLPRKIRPETGLLSLRKSQDLFANLRPAKVFPGLERLSPLKEEIARGVDVLIVRELTGGIYFGEPRGMSEAEAWNTERYSKPEVERVARVAFELARKRRKHVVSVDKANVLEVGEFWRKTVEEVGRGYPDVALEHQYVDAMAMHLVRSPARFDVVVTGNIFGDILSDLASVLPGSLGLLPSASLGRGTPVFEPVHGSAPDIAGKGIANPTAAILSAAMMLEHAFGLVELARKVEDAVAKALLETPPPDLGGSAGTEAFTATVTATVGI

SEQ ID NO: 13475 - protein, 680 aa, Nostoc sp. PCC 7120
MQPEPKVNILLVDDKVENLLALEAILERLGANLVRATSGEEALRCLLHQDFAVILLDVQMPGMDGFETATLIRNRGRSRQTPIIFLTAFSTSDQMLFKGYALGAVDYLLKPIDANILTSKVTVFVELFKKTQAIQHQAAQLAAINAELRQSEERFRSLSTCSPIGIFETDTAGCCKYTNPRYQAICGLDATESLDKRWLESVHSEDQERAIASWSTYIYQGGDYSDEFRFQTVDGSLRWVQVRSSPMLSGNGELLGYVGTLEDITARKQSEEIRAQVIREQTARQEAEATNRMKDEFLAVLSHELRTPLTSMLGWSKILRAKKLDEKATARALEAIERNANSQVQLIEDILDVSRIIRGQLRLNLSPVNLITVVEAALEAVRPLADTKNMTINTVLDYTLSPVSGDFARLQQIVWNLLTNAIKFTPKEGQVEIRLEGINGELSDDLTHAQIQVIDTGVGIASEFLPKVFERFRQADSTTTRSHNGLGLGLAIVRHLVELHNGTILAESPGVGKGATFTVRFPLIQENRETRPTPTEKLSGDAANSSPLAGLKVLIVDDETDTRNFLGFLFEEYGAISSTSASVETALAVIEQLKPDILISDIGMAEQDGYSLIRKLRSLPPEQGGKIPAIALTAYSREEDRQQIIEAGFQHHLSKPIDPNKLISVVASIFHLSPALSGSV

SEQ ID NO: 13476 - protein, 370 aa, Narcissus pseudonarcissus
MTIMNTSPIGFEGFEKRLEITFSEASAFVDPHGRGLRALSRSQIDSILDLARCTIVDHLSNKDFDSYVLSESSLFIYPHRLILKTCGTTKLLLSIPKILDLASELSLPIQSVKYSRGSFIFPEAQPTPHRNFSEEVSALDHFFGNLASGGNAYVIGDPSSPNRNWHIYYATQKPELPTVTLEMCMTGLDSEKASIFFNSPGNANNAQSKKMTKLSGISNIIPEMEICDFEFEPCGYSMNAICGSAHSTIHVTPEDGSSYASYEAMGFNPAELDFGGLVERVLECFGPADFSVAVTIFGGRGQAGSWGREVDSYGFRCVDLVEQELAGGGLLMYQSFTAGVGRMGSPRSTLHCWDGEEIEEKKAEDKKRRF

SEQ ID NO: 13477 - protein, 344 aa, Thermus thermophilus
MKVAVLPGDGIGPEVTEAALKVLRALDEAEGLGLAYEVFPFGGAAIDAFGEPFPEPTRKGVEEAEAVLLGSVGGPKWDGLPRKIRPETGLLSLRKSQDLFANLRPAKVFPGLERLSPLKEEIARGVDVLIVRELTGGIYFGEPRGMSEAEAWNTERYSKPEVERVARVAFELARKRRKHVVSVDKANVLEVGEFWRKTVEEVGRGYPDVALEHQYVDAMAMHLVRSPARFDVVVTGNIFGDILSDLASVLPGSLGLLPSASLGRGTPVFEPVHGSAPDIAGKGIANPTAAILSAAMMLEHAFGLVELARKVEDAVAKALLETPPPDLGGSAGTEAFTATVGMGI

SEQ ID NO: 13478 - protein, 378 aa, Candida glabrata CBS 138
MIMKSIARPGLGFVRHFSHTCSRRTTGIVLMNMGGPSTIEETHDFLYELFADNDLIPISKKYQPQIAKYIAKFRTPKIEKQYKEIGGGSPIRKWSEYQAAEVCKILDETCPDTAPHKPYVAFRYARPLTDETYKQMLQDGVTRAVAFSQYPQFSYSTTGSSINELWRQIKKLDPERKVNWSCIDRWPTNDGLTTAFAENIKKSLETYPKDIRDKVVLLFSAHSLPMDVVNTGDAYPQEVGATVQKVMEKLNFCNPYRLTWQSQVGPKPWLGAQTAQMAEYLGERAEGVIFIPIAFTSDHIETLYEIGKEVIGESKYKDKFRRCESLNGSPVFIKGMADLVKDHLKSNQLYSKQLPLDFKLGKSNDPVTDFSKMFGKQN

SEQ ID NO: 13479 - protein, 472 aa, Yersinia pestis KIM
MRECTMKNDSSTLKRGLSARHIRFMALGSAIGTGLFYGSAEAIRLAGPAVLLAYLIGGAAVFMVMRALGEMAVHDPVAGSFGHYASRYLGPLAGFLTGWTYTFEMVVVALADVTAFGIYMGLWFPDAPQWVWVLSIIFFIGALNLCSVKVFGEMEFWLSLLKVAAIIAMIAAGLGIMMFGFGAGHDSTGVSNLWAHQGFMPNGITGVIASFAVVMFAFGGIEIIGVTASEAKDPGKVLPRAINTVPIRILLFYVLTLFVLMAIYPWNSIGQNGSPFVEIFSSLGINSAANILNLVVITAAISAINSDIYGAGRMMYGLAQEGLAPKSFSRLTRNGVPYMTILVMAITLLCGVVLNYLIPKNVFLVIASIATFATVWVWLMILVSQVAMRRSMSKAQVARLAFPVPFWPLAPILTILFMAFIIAVLGYFPATRIAMYVGLAWVALMTLAWWIWLRKAPSCVIQERAKSSEMPS

SEQ ID NO: 13480 - protein, 504 aa, Sinorhizobium meliloti
MVMTVVVRPKALGDYDTREFRMLIDGQWVDGAEGRTIERVAPGHGVVVSRYQAAAKADAERAIAAARRAFDEGPWPRMTASERSLILLRAADMIAARADELAFLDAVESGKPISQAKGELAGAADIWRYAAALARELSGESYNTLGEGTLGVVLREPIGVVSIITPWNFPFLIVSQKLPFALAAGCTTVVKPSELTSASTLVLGEILEAAGVPQGVVNIIVGTGPEAGAPLTTHPHVDMVSFTGSTGIGQLTMANAAQTLKKVSLELGGKNPQIVFPDANLDEFIDAAVFGAYFNAGECCNAGSRLILHRDIAEEVTARIASLSAKVKVGDPLDPETQVGAIITPQHLQKIAGYVSSASNEGARIAHGGTTLDLGMGQFMAPTILSAVRPEMAVAREEVFGPVLSVLTFEKTEEAIRIANSIDYGLSAGVWSRDFDTCLTIGRRVRAGTVWMNTFMDGASELPFGGYRQSGLGRELGRHAVEDYTETKTLNMHIGRRSNWWMPR

SEQ ID NO: 13481 - protein, 259 aa, Sinorhizobium meliloti
MADERIRVDFEGPIAIVTVARPEKLNAFDIDMLKALDSACDTVEARRDLRAVILTGEGKAFSAGGDIKAWGGMEPAAFGHDWVRFGHRVFERLATLRMPVIAALNGHALGGGLELAAAADIRLAEKQVKIGLPETSLGMVPGWSGTQRLVARFGAQIVRRMVLGGEMFSAAEARAEGLIDAVVETGAVMQAARDYAARVAGRGPAALEISKLMIASASGEDKGAAVEALGSILVAKTGDLKEGVAAFSEKREARFKGEW

SEQ ID NO: 13482 - protein, 81 aa, Gaertnera junghuhniana
  misc_feature (48)..(48): Xaa can be any naturally occurring amino acid
  misc_feature (54)..(54): Xaa can be any naturally occurring amino acid
TPQDEMRAGMSYFHETIWKGVPKFLRRVDTALKNIGINERLPYNAPLXQFSSWXGGDRDGNPRVTPEVTRDVCLLARMMAA

SEQ ID NO: 13483 - protein, 166 aa, Xanthomonas axonopodis pv. citri str. 306
MTWTTPDLCDRYPDAMIAEPLFRHFGGRTAFAGPLATVRCFEDNSRVRELAATPGDGRVLVVDGQGSLKHALLGDQIAANAVANGWAGVLIHGCVRDVEILATLPLGVLALAACPRRTERRDLGDVDVPVNFAGVPFVPGHWLYADANGVLVAPQPLALDGAGGSI

SEQ ID NO: 13484 - protein, 183 aa, Capsicum chinense
GAYGIVCSALNSETNENVAIKKVANAFDNKIDAKRTLREIKLLRHMDHENIVAIRDIIPPPQREAFNDVYIAYELMDTDLHQIIRSNQALSEEHCQYFLYQILRGLKYIHSANVLHRDLKPSNLLLNANCDLKICDFGLARVTSETDFMTEYVVTRWYRPPELLLNSSDYTAAIDVWSVGCMF

SEQ ID NO: 13485 - protein, 121 aa, Glycine max
PRVRESLLKPILSPDEVSVCVHGTYRKNLDSILQFGLKRMARLHVHFSSGLPSDGEVTSGVRQNVNILIHLDVSKALKGGMKLYISDNKVILTEGFDGVVPVKYFERVETWPGRAPIPFQR

SEQ ID NO: 13486 - protein, 340 aa, Zea mays
MRTLLPVAAGRGTVACAATPVPRRSLLLSTAAAGAALQPEQVAGTRPLRLTRSEASAVAKPRTLADEAISWAKKDNRRLLHVVYRVGDLDKTIKFYTECLGMKLLRKRDIPEEKYSNAFLGYGPEESHFVVELTYNYGVDKYDIGEGFGHFGIAVEDVAKTVELIRAKAGKVIREAGPVKGGETVIAFVEDPDGYKFEIIERPGTPEPLCQVMLRVGDLDRAISFYEKACGMELLRKRDSPEYKYTVAMMGFGPEDKDAVLELTYNYGVTEYAKGNAYAQIAIGTDDVYRTAEAAKLSGGQVVREPGPLPGINTKITAILDPDGWKLVFVDNMDFAKELE

SEQ ID NO: 13487 - protein, 81 aa, Gaertnera lowryi
  misc_feature (27)..(27): Xaa can be any naturally occurring amino acid
TPQDEMRAGMSYFHETIWKGVPKFLRXVDTALKNIGINERLPYNAPLIQFSSWMGGDRDGNPRVTPEVTRDVCLLARMMAA

SEQ ID NO: 13488 - protein, 180 aa, Capsicum chinense
GAYGIVCSALNSETNEHVAIKKIANAFDNKIDAKRTLREIKLLRHMDHENIVAIRDIIPPPQREAFNDVYIAYELMDTDLHQIIRSNQALSEEHCQYFLYQILRGLKYIHSANVLHRDLKPSNLLLNANCDLKICDLGLARVTSETDSMTEYVVTRWYRPPELLLNSSDYTAAIDVWSVG

SEQ ID NO: 13489 - protein, 81 aa, Gaertnera macrostipula
  misc_feature (70)..(70): Xaa can be any naturally occurring amino acid
TPQDEMRAGMSYFHETIWKGVPKFLRRVDTALKNIGINERLPYNAPLIQFSSWMGGDRDGNPRVTPEVTXDVCLLARMMAA

SEQ ID NO: 13490 - protein, 183 aa, Capsicum chinense
GAYGIVCSALNSETNEHVAIKKIANAFDNKIDAKRTLREIKLLRHMDHENIVAIRDIIPPPQREAFNDVYIAYELMDTDLHQIIRSNQGLSEEHCQYFLYQILRGLKYIHSANVLHRDLKPSNLLLNANCDLKICDFGLARVTSETDFMTEYVVTRWYRPPELLLNSSDYTAAIDVWSVGCIF

SEQ ID NO: 13491 - protein, 759 aa, Bordetella pertussis Tohama I
MAFPGLKYASSGLLAALRLGRRTGKKGRTPPSPSPGAQEAVDAAASPVASLAPLTEIISTYLDPKEVERVREAYRFADQAHLGQFRASGAPYISHPIAVTEICAGWKLDANALSAALLHDVMEDQGVGKHELAEKFSPEVAELVDGLSKLDRLDFATKAEQQAESFRKMLLAMARDVRVILIKLADRLHNMRTLDAVNPEKRRRIARETLEIYAPIAHRLGLNLLFRELQDLCFAAMYPNRYQVLYRAVLAARGNRREVISKIEDAVRAALPAAGIEAEVTGREKTLYGVYRKMTEQKKSFSEVLDIYGFRVIVHTLPECYLALGTLHQLYRPVPGKFKDYIAIPKVNGYQSLHTTLVGPYGTPVEFQFRTRDMHHIAEEGVASHWLYKDADLTLNELQKRTHQWLQSLLDIQSQTGDSGEFLEHVKVDLFPDAIYVFTPRGKIISLPRGATPVDFAYAIHTDIGNQAVAAKVNGEFVPLRTELSSGDTVEIITSPASRPNAQWLNYVRTGRARSEIRHYLRTVKYEESVAFGERLLEQAMIELHLPVPSTDDPQWDKLARSSGTSSRDEILADIGLGKRLAAVVARRFAPEHDLIATTAAAVDQITSARAAPILIQGSEGQAVQLAPCCGPLPGDPIIAGMRLGHGLVVHTSDCPVALRARAREPERWINVAWDAQTAKHLPTRLDIVTRNERGVLGRLAAEVTAADANIVHVTMHDDAVSTVSLHLTVQVDSRKHLAQVIRAIRHVPQVQKIVRVKG

SEQ ID NO: 13492 - protein, 541 aa, Brucella melitensis biovar Abortus
MTVKTIATTPYQDQQPGTSGLRKKVPVFQQPNYAENFIQSIFDVLEGFKGKTLVVGGDGRFYNREVIQKLIKIAAANGFGRIMVGQGGILSTPAASNMIRKYKAFGGMILSASHNPGGPTQDFGIKYNIGNGGPAPEKITEAIFARSKVIDQYKIADAADIDKIGTSKIGDTEVVIFDPVADYAELMESLFDFAAIRAMIKGGFQMKFDAMHAVTGPYAKEIFERRLGAPEGSVVNFVPLPDFGGHHPDPNLVYAKDLYDLLMSSHAPDFGAASDGDGDRNLILGRGIFITPSDSLAMLAANAHLAPGYKGGIKGIARSMPTSAAADRVAEKLGIGMYETPTGWKFFGNLLDSGKVTICGEESSGTGSDHVREKDGLWAVLLWLNILAVRKESVKAIADDHWARFGRNYYTRHDYEAVDSDIATKLVADLRGKLAGLPGTSVNGLRIEKADDFAYHDPVDGSTSEHQGIRIYFEGGARIVLRLSGTGTSGATIRIYIERYEADPAKHNLDTQATLAPLIDAAEQIAEVKKRSGRTEPSVVT

SEQ ID NO: 13493 - protein, 375 aa, Rhodopirellula baltica SH 1
MSFTRPPHAHLVPVRPMNSSIVLLPGDGIGPEIVEQARLVLVKVAERFGHTFDFSSHQIGGIAIDETGDPLPQPTIDACRNAAAILLGAVGGPKWDDPSAKTRPEAGLLKIRKELGLFANLRPIKLFDELADASPLRADIVKGTDILFFRELTGGIYFGESGTSGSGEEETAFQSMTYSVGEVKRIVRMAAQAARGRSNRLTSVDKANVLEPSRLWRRVAAEVMANEFPDVQYDVVLVDSMAMHLINRPSEFDVVVTGNMFGDILTDEASMLPGSLGMLPSASLGDGGPGLYEPIHGSAPDIAGKSVANPLATILAAAMMLRHSLGLTDEAEAIEKAVAGVITDGLRTPDLARGDQSKSVSTEEMGAAVVAKLAS

SEQ ID NO: 13494 - protein, 393 aa, Pyrococcus horikoshii OT3
MRYDVVVVGSGVAGPIVARNVAKAGFSVLLVDKKPAIGAPKQCAEGLTINAFKQFDIPYDKRFINREIYGAKIYSPSGYTAELRYKEVSGVILERKVFDKMLAYYAAKAGAEVLARTEVVDVIRREGKIVGVKAKHEGEPMEIEAKVIVAADGVESTIARKAGIDTYAPPHEFDSGYEYEMIIEGFDPDLIHLFFGNEVAPRGYVWVFPKDEDRANVGIGINSDNEKTAKYYLDKWLKENNIPRNKILEVNVGLIPVGGFVKELVKENVLVVGDAARQVNPIHGGGMAEAMKASTIASKWIIKALEEENLELLKNYKEEWWKTEGPRMEKLLRLRRAMEKLTDEDLDVFVQLVSGTDLEKIAGGNYIEVVKALMKHPKVLMSRRRLEILKALL

SEQ ID NO: 13495 - protein, 695 aa, Solibacter usitatus Ellin6076
MERQCISEYNFESTDCAGASAARDNTSRKVPRVVAAILTSVIRSTPAATTSAVCRRDGKFERVPMCGIAGYALIDQSAQRARVQAMCDQIRHRGPDDEGVHVDRNCAIGMRRLSIIDLSTGHQPMCNEDGSVWIVFNGEIYEYKELRAELIAHGHQFRTASDTETLLHLYEEEGVEGLRRLRGMFAFAIWDARRNRLMLARDPFGKKPLYYAVLPTGIYFGSEISCLREAGVPLEPDPEALRLYFQFNYIPDPMSAYRAVRRLPAGSWLTWENGQVRQGRYWQPPVPAAQPVAGLSHADAVVKVREKFDEAVRIRMIADVPLGAFLSGGIDSSSIVASMAMQSREPIKTFSIGFEESEFNELPYAAMVARKYGADHHEIVVRPDSIGIIRKFARHFGEPFADASAIPTYIMSEFAARYVKVALSGDGGDELFGGYTSLRQVQKLAAFDRVPQAVRLMMSWASSRMPYSAYGKNFLHMLGRRSALDRYFAFNYAPFHMRSKLLRPDWMLPAESGFLARALPDCILPEDAGALSQVMYFEGTANLTGDMLVKVDRMSMAASLEVRCPLLDHELAELAATIPHAWKVVGGQGKRILLDALGDRLPPELLNRPKTGFGVPLVDWFRTSLRELLWDTLTAERFLAHNIVAPEFLRTLLEEHDSGRRDNSQWLFTLLVLALWFEDIEQPLASPVPARVEGA

SEQ ID NO: 13496 - protein, 408 aa, Nicotiana tabacum
GLSSNTGIDILSSSSNSLSFYHSTRFTQCFSPKSLCKRQRRRFSICSSLSSAKIKVVGVGGGGNNAVNRMIGSGLQGVDFYAVNTDAQALLQSTVENPIQIGELLTRGLGTGGNPLLGEQAAEESKEHIANALKGSDMVFITAGMGGGTGSGAAPVVAQIAKEAGYLTVGVVTYPFSFEGRKRSLQALEAIEKLQKNVDTLIVIPNDRLLDIADEQTPLQNAFLLADDVLCQGVQGISDIITIPGLVNVDFADVKAIMKDSGTAMLGVGVSSSRNRAEEAAEQATLAPLIGLSIQSATGVVYNITGGKDITLQEVNKVSQVVTSLADPSANIIFGAVVDERYNGEIQVTLIATGFAQSFQNSLLTDPRGAKLVDKSKGTTERTVSPDTLRSSESPSTKPRPAARRLFF

SEQ ID NO: 13497 - protein, 1703 aa, Arabidopsis thaliana
MFREAGLRNIGEDVDSRWTIGNRKLDAKSVPNANSGHGFGFRSAPPLSSSIKPVRGNNNGGSSSDMDIASDSDEEIFERQHSPQDYRIHLGLPHVAAQNGLGRNGAKVFGAADDLSDSATSTEEAEACGVRNNISSHNEFERRNVEAGTSGRTLNGTSTSTSSLPRFPTFHASEQGPWSAMIAYEACVRLCLHSWSTDSVSEASYFLNNECTIMRNAFSLQRFFLHSEEELLGKGPSELVTETSVPKSKKTIGKIKLQVRRIKMGLDPPPGCNIATLTVSKEKLEVVRHHIVELNSTLSSGWKAARKVHVTPQVPLNGSLSRQSLAYMQAAARYLKQVSKAVKKEIVTSHTGPQTYEAVQETYSCSLRLKSSPEDDQIKTQPGSGETLPDSLGDDLIIEVRDSKAQLLGRVVAQLAAMADDPGPWHWMITRFASYYGVSDAYTRLRYLSYVMDVASPTKDCLDLIHDFLFPIIMTSNHRAVLSHQENRLLGEIDEQIQQILASAFENYKSLAELSFSGMKDVFESATGTPAPAIESAVKLYGLLNDVLTPEAQLKLCRYFQAASKKRSRRHLLDTNDLLNNRSEGVPVDPMVLAASYQKMKSLILSLKNEISTDIAIHDCNVLPRLREFLLVWPPPGPSPAVVDLVITTADFQRDLSSWHINPIKGGVNAKELFYSYITTWIEEKRRVLYELCKLETSKACVEIPGLTSPFVDEMYERLNGTLDEYDIIIRRWPEYAISLEKVVADSEKAIVEAMEKQFTEILSPLKESKIFGLKIVKKFTKGTPNPYSVPKELGVLLNSMKRVLDILRPSIENRFKSWNSYIPDGENRVLGERLSEVTVLLRSKFRSYMQALVEKLAENTRIQSHMKLKTIIHDLRETTAEPDVRNRMTSLKDLLDKTIDHLHGVFLPDVFVAICRGIWDRMGQDVLRLLEDRKDNVTWHKGPRIAVSVLDEIFATQMQSLLGNGLKPEHLEPPRSMMELRCPNPLPAVASLIATIFSAVLPSTFTLTLTITVFVLLCITNVNHLSTIRLFQIDSGFSQEVIRLIALATEESYLAEEVRPATVDYGGDSVSDVYRCAVCLYPTTTRCSQCKSVRYCSSKCQILHWRRGHKEECRSPDYDEEKEEYVQSDYDAKESNVDFPSRGTAYESSSNVSVDVACDMSTSRPSIHKVQPRSEAVDFTTSLNIKDNLYETRPLSRKKSRNRTDKVESASNYSKGKTDAKLRKLGNQNSRRSGDSANMSISDQFLSVGFEEEMNALKHERITSEPSSASAAMSSSSTLLLPSKANSKPKVSQASSSGLKTSVQKVVQHFRPPQSSKKSQPSSSIDEMSFSYELFVKLYCDRVELQPFGLVNLGNRGGESPLSPIKILSKLQKIGKHLGPGKEEDAHEFLRCAVDTMQSVFLKEAPAAGPFAEETTLVGLTFGGYLHSKIKCMACLHKSERPELMMDLTVEIDGDIGSLEEALAQFTAYEVLDGENRYFCGRCKSYQKAKKKLMILEGPNILTVVLKRFQSDNFGKLSKPIHFPELLDISPYMSDPNHGDHPVYSLYAVVVHLDAMSTLFSGHYVCYIKTLDGDWFKIDDSNVFPVQLETVLLEGAYMLLYARDSPRPVSKNGGRKSKQRRNLAAIPSRKGNKKQRDGDNNSLLPRVDWSSGSLSSMFSSSDTTSSCSTKDSSGIENLSDYLFGGVEPVWKWDRHNKSQTFD

SEQ ID NO: 13498 - protein, 319 aa, Vibrio vulnificus YJ016
MNNTKKRGVLLVNLGTPEEATAPAVKRFLSQFLHDQRVVDMTRWLWCPILHGIILPIRSPKVAKLYQTVWMKEGSPLMVYSKRQQVELQAKLNCPVEIGMTYGTPSVLDGVNKLQAQGVDEICVLPLYPQYSGTTTGAAYDALAHALRKVAVVPSIQFIRDYHDHPLYIKALAESVRQSWQAQGKGDYLLCSYHGIPQRYADNGDIYPLHCEMTTELLRLELGLDKSQIGTTYQSRFGREEWLQPYTDKTLESLPAKGIKSLDVITPAFSVDCLETLEEISEQGQESFLHAGGEQYRFIPCLNDAPSHIEMMARLVTER

SEQ ID NO: 13499 - protein, 355 aa, Sulfolobus solfataricus P2
MRKLENIILKNYEEELFDHEVYSKLAEVERDPELKKTLFKLAEMEKKHSEFWREIAEKRGLKVKGKLSTLNKIKVDFYSLLRKILGLDITIKVLESSEEDDIEKYRKLSEMEMFSSEEKQRLKDIMVDEAVHEKVLGNVEAKSVGDFVYGISDGLVEVLAAVSGLSGAISSPLFVAVGGLIVGVSGTLSMAIGAYLSTKSEKDVKIQERKRLELEKNVDQHSVQLRLVNFFTELGVNLNLAKKVSLSLVNVAEDILYPEVKENPVKSALITGLSYITGAIIPILPYLIGLSGLTGLITSYIVAGLSTFIVGSIIGILSGISPFKKGIQMASLALLAALGTHGLGYLASRFLNVSI

SEQ ID NO: 13500 - protein, 607 aa, Debaryomyces hansenii CBS767
MVIYRNRLLHFKYNFSRYFYKSSSQMSKEEAKGVKRSPSPAEINPLLTPKLRDSLGFRMKRQTIDKRTLTAYQQLGGEESNDDTNTLSKTKTIHEEEAEGASYTIDGRLRRVNPYFFTYLTYCKMRWRDRKLLDIFVKEFRDRDADFYKKTIAAGQVTLNKKPADLDSIVRNGDLISHRCHRHEPSVSSRGIKIVHEDENIIAIDKPSGIAVHPTGRYRYNTITKIFQHEFGKVVHPCNRLDRLTSGLMFLGKNAKGADAFVQQIRDRTVKKEYIARVVGKFDIGDVEVDKPLKTVSPKHGLNRVDFDEGKEAKTVFRRISYDPESDTSIVKCFPFTGRTHQIRVHLQYIGHAIANDPMYSNATVWGKNLGKHGEGENADIISKLDRIGKDKASSTWIHPQEDGEILSGHLCDICSAELYTDPGPNDLDLWLHAYKYEAADKTWSYKTEYPEWATLPHRKYMELALEMANKCGETQTQFNVGAVLVNNGEVLATGHSRELPGNTHAEQCALEKYFEQTGKREVPAGTEIYTTMEPCSLRLSGNLPCVDRILETNIKTCFVGVVEPDIFVKNNSGYTKLTERDVEYIHIPGYEELCLKIAKKGHEKIE

SEQ ID NO: 13501 - protein, 477 aa, Synechococcus sp. WH 8102
MTTPRVLFWHRRDLRLTDNLGLAAAAAISPAVTGVYVLDPQVISPSEHLLPMAPARLWFLIESLIELQQRWRDAGSRLLVVEGDPVQLLPQLAERIAAEAVVWNRDVEPYARERDRQVAQRLQADGRKVVVDWDQLLIAPELLKTGGGDPYRVYGPFLRNWRGQVQAKQPVTVPAPAGLVDLDPAAVPSGEPLMARRDSHGFKGTELCPCRPGEAAAMQQLTSFCDGALFGYEPDRNFPGVVGTSYLSAALSVGTLSPRQAWSAAQEAREQARSEEQLHAIAVWEQELCWREFYQQALFHFPELSDGPYREQWRRFPWENNEDWFDFWREGQTGMPIIDAAMRQLNQTGWMHNRCRMIVASYLVKDLICDWRWGERAFMELEVDGDLAANNGGWQWSASSGMDPKPLRIFNPATQASKFDAAGDYIRQWVPELRHVNTKDLLSGEIGALERRDYPEPLVNHKTQQAKFKALYATIRS

SEQ ID NO: 13502 - protein, 239 aa, Ashbya gossypii ATCC 10895
MVKPIIAPSILASDFANLECGCHRVINAGAEWLHIDVMDGHFVPNITLGPPIVKSLRKAVPRVGDKESDKPKAFFDCHMMVAEPEKWVDVFVENGADQFTFHYEATKNPLELVKLIKSRGIRAACAIKPDTPVDVLFELAPYLDMALVMTVEPGFGGQKFMPDMMPKVAALREKFPQLDIQVDGGLGKETIPHAAKAGANVIVAGTSVFAAADQKDVISYMKDNVRDELRSRGLLDIDM

SEQ ID NO: 13503 - protein, 416 aa, Zea mays
RLYPSTSAPSFPSPHAPRERSFRIPHRIGRVPLTEKIGLGGASVLSVVRSDAKEGTTTGVSAKDRTNTILALASPNSKPEDFNSPGHIFPLKYREGGVLKRAGHTEASVDLAMLAGLPPVAVLCEIVVDDDGFMVLLPKLQQFAKRENLKIISIADLIRYRRKRVLWSLDRGVAHGDGHAVNEDDVTKFGVVPGDGRANVQDVVTKLAGDGAHGDRDAGCQDGVTKVACGATHRDGDVGCQDGVMKVTCGAVHGDGDAGCQDDTTKLAAEAIGSDRNPRGIGLGHKLQAYNLQDDGRDTVEANLELGLPADSREYGIGAQILRHLGARTMRLMTNNPAKYTGLKGYGLSVLGRVPLLTPITTENRRYMETKRLKMGHVYGSRSSNHANGSGLAGAGEREEQDQNDSAGVQERTPEA

SEQ ID NO: 13504 - protein, 224 aa, Haemophilus ducreyi 35000HP
MAQQPFLIAPSILSADLARLGDDVNQVLTAGADIIHFDVMDNHFVPNLTFGPMICQALRNYGITAEIDVHLMVKPVERIIPDFAKAGANYITFHPEATDHIDRTLQLIHQYGCKAGLVFNPATPLHYLDYVIDKIDMILLMGVNPGFGGQTFIPSTLTKLREVRQRIDASGKSIRLEIDGGVKIDNIAEIAAAGADTFVAGSAIFDQQNYKSVIDQMRAELSKI

SEQ ID NO: 13505 - protein, 904 aa, Xanthomonas campestris pv. campestris str. 8004
MNEYRSSLVFATPDVPLRDDVRRLGALVGDLLAEQVSADFLEEIERIRTTAIARRESDTPPAGLLSLLEGREPRAAEALVRAFSTYFQVVNIAERVHRIRRRRDYQRSGTDTPQPEGLHDALRRLKAQGVTLDELSEWLPRIDVEPVFTAHPTEAVRRALLEKEQLMVASLVDNLDGMRTPNERATDAARFRMALTASWQTADSSPVRPTVEDEREHVGFYLTQVLYRVIPVMYETLEHAIEETYGSTLALPRLLRFGTWVGGDMDGNPNVDAHTIAGTLDAQRRAVLDRYLNELWQLASLLSQSTTLVAVSPALSAQLERYQALLPDAAARSRPRHGDMPYRLLNDLMRARLQATLDDADGAYAAPAELEHDLQLILDSLQANKGLHAGWFAVRRLLWRVRSFGFHLARLDVRQESSVHARAVADALGQADWDSQDATHRAGLLGPYASGEQALPQVDDEGNARLDAVFAALADARTRHGADALGSYIISMAHNRADVLTVLALARRGGLVDDAGAVPLDIVPLFETVDDLRGGTGTVQDLLADPVYRQHLRARGDTQMVMLGYSDSGKDGGIAASRWGLQRAQVELLEAAAELGVRLTFFHGRGGSIVRGGGKTTRALDAAPRGSVDGRLRVTEQGEVIHRKYGIRALALRSLEQMTGAVLLSSLRPRAPEPREDAWRPVMDLVAERSTVAYRGFVGAPDFMQYFRLATPIDVIERMTLGSRPSRRLGQDAALSNLRAIPWVFAWSQARAVIPGWYGVGSGLQAAVEAGHEDSLREMAQDWPFFRTFLDDIAMVLSKGDLNIAELFSRLAGPLHARFFPRIRDELALTKHWVKTLLGQRSLLQHDPRLALSIRLRNPYIDPISVLQVDLLQRWRATDGEDEELLRALVACVNGVAQGVQNTG

SEQ ID NO: 13506 - protein, 370 aa, Arabidopsis thaliana
MQKQSTTMLSDLPKDVAEEVLSKFPVTSLRRVRFTCKKLNTLSKDMSFTRKHIDKEEAKKKQSKEFHVVMMLDFRVSLFSLNLLNPNPIERLGQLVSLDGGAQVDISNIFHCEGFLLCTTKDISRVVVWNPCVGQTIWIKPRNSFNKWDRYALGYDVMKNHKVLRFVDDGEYGRRHLLCEFEIYSFESDSWEVLDVNPDWEIDFVHRGLSIDGNSYWFARDKVVPYGGQDPSYFLLCFDFTTERFRPPLPLPFQPYFGDTVALSSVGDNQIAVLCQRSSSPYTLKIWISSKVEPNAVSWNKLFLKVDMKPLTGNSFSYSGGSFFVDEEKKMAVVLDKNIGGGFDPTRNIAYIIGKEGYFKKVDLGESRHL

SEQ ID NO: 13507 - protein, 437 aa, Thermotoga maritima
MNYPYIPHTDEDVRAMLDFIGVSSIEELFSSIPVSARSSLNIPESRDEFSVFKQLKEISEMNNSLEDYAVFLGAGVYKRYVPTVVYDLAMKPDFLTAYTPYQAEVSQGTLQALFEYQTMVCELTGMEVANASMYDGATALAEAALMSFRLTGKEKVVVARSVHPEYRAVLRTYLEKRGFTVVEAGYDETGRVLLEEVDEETAAIAVQYPNFFGIIEDLDYVRSRSGNALLIVVVEPVSLALLEPPGSYGADIVVGEGQSLGLPMWFGGYSLGIFATREEYVRQMPGRLIGQTVDQAGNTAYTMILQTREQHIRRARATSNICSNHAHAALIAAVYMSVMGPDGLKEVARRSYNAAHYLQERLEEIGFKLCFSGEFFNEFVFNVPEDYPDRWRKMMEKKILGPLPLEEFYPELGDTALACATEVISKEDIEKLLEAMK

SEQ ID NO: 13508 - protein, 474 aa, Thermotoga maritima
MTIFERSKKGRKAFRLPESDIPEYSLPDRFLRRTPPELPEVSEPDLVRHYTNLARKNYSVDLGIYPLGSCTMKYNPKLNEKAANLEGFREIHPYQPVETVQGSLRLMYELKKMLCEITGMDDMTLQPAAGAHGELTGMLIVREYFKNRGDTGRKKVLVPDSAHGTNPASASMVGFEVVEIKSKNGMVDVEDLKKLLDEEVAAVMLTNPNTLGLFEKDILKIAEMTHECGALLYYDGANLNAIMGKVRPGDMGFDIVHLNLHKTFSTPHGMGGPGSGPVGVKKHLVDFLPFPQVKKNGELYELFVPEKTIGRVRSFFGNFPVLVKAYTYILTMGRDGLERVSEMAVLNANYLKKKIEKFLEIPYNGFCMHEFVASAEKVFRETGVRTLDIAKRILDFGVHPPTVYFPLIVPEALMIEPTETENKETLDKYAEILERVVKEAYENPDALKNAPHNTPVRRVNEVLASKKPVFRWRG

SEQ ID NO: 13509 - protein, 545 aa, Caulobacter crescentus CB15
MHDRAGLRALPEDLVDLDALIGAYFEIKPDVSNPAQKVVFGTSGHRGSSLDGAFNEAHILAVTQAIVEYRAAQGVTGPLFVGRDTHGLSEPAWRSVLEVLAANGVEALVDSRDGFTPTPAVSHAILTHNRQGGRQADGLLLTPSHNPPRDGGIKYNPPSGGPAGSDATSAIAARANELLAQGLAGVKRVPFETARKAVGDYDFLGRYVDDLPAVIDIAAIRAAKVRIGADPLGGAAVAYWGAIAERHALDLTVVNDAVDPRWAFMPLDTDGKIRMDCSSSSAMANLIGIMKGGAAYDVATGNDADADRHGIVTPDGGLMNPNHYLAAAISYLFSHRPGWGADTAVGKTLVSSSMIDRVVSGLGRRLLEVPVGFKYFVPGLLDGSVGFGGEESAGAAFLRHDGGVWTTDKDGIQLALLAAEIQAVTGKSASQLYAGLTDQYGAPAYARVDAPASREEKARLSKLSPSDVSAKTLAGEAITDILTAAPGNGEAIGGLKVCTQNAWFAARPSGTEDVYKVYAESFLGADHLKQVQAEAREVVAGALKG

SEQ ID NO: 13510 - protein, 370 aa, Sinorhizobium meliloti
MTVRNLFLLPGDGIGPEAMAEVRKIIAYMNAERDAGFVTDEGLVGGSAYDAHGAAISEGDMAKALAADAVLFGAVGGPKWDAVPYEVRPEAGLLRLRKDLELFANLRPAICYPALANASSLKPELVEGLDILIVRELTGGVYFGEPKEIVDLGNGQKRGIDTQVYDTYEIERIAGVAFELARTRNNRVCSMEKRNVMKSGVLWNQVVTETHKAKYSDVQLEHMLADAGGMQLVRQPKQFDVIVTDNLFGDMLSDVAAMLTGSLGMLPSASLGAPDAKTGKRKALYEPVHGSAPDIAGTGVANPIAMIASFAMCLRYSFNLVKEADDLEKAIANVLDQGIRTGDIMAEGCRKVGTAEMGDAILAEFKSLSA

SEQ ID NO: 13511 - protein, 81 aa, Gaertnera madagascariensis
  misc_feature (59)..(59): Xaa can be any naturally occurring amino acid
TPQDEMRAGMSYFHETIWKGVPKFLRRVDTALKNIGINERLPYNAPLIQFSSWMGGDRXGNPRVTPEVTRDVCLLARMMAA

SEQ ID NO: 13512 - protein, 476 aa, Bacillus anthracis str. Sterne
MQNKIIVMFQKDFRLYDNPALFEAAQSGEVVPVYVHDETFSMGSASKWWLHHAIIDVKKQLEALGSTLIIRKGSTQEEILSLVEQLGITAVYWNICYDPDRLQSNQKMKMMLEHKGMICKEFNSHLLLEPWVIKKKDNTEYKVFTPFYNAFQKQVIHKPISKVQSIKGGNSLPVSLSVSELHLLPTIPWTSHMESIWEPTEEGAYKTWKEFFSSKLASYSEGRDFPNQNAHSMLAPYLSFGQISVKLIYHYLINKSTESQCSLFEKQVNSFIRQLIWREFSYYLLYHYPFTAYKPLNKSFEHFPWNNEEELLRVWQKGDTGYPFIDAGMRELWQTGFMHNRTRMAVASFLVKHLLIPWQEGAKWFMDTLLDADIANNTMGWQWVAGSGADASPYFRIFNPITQGEKFDKNGEYIRKWVPELKDMPNKYIHKPWEAPEHILQKANIQLGHTYPLPVVDHKAARERALCAYKSMKEFV

SEQ ID NO: 13513 - protein, 81 aa, Gaertnera paniculata
TPQDEMRAGMNYFHETIWKGVPKFLRRVDTALKNIGINERLPYNAPLIQFSSWMGGDRDGNPRVTPEVTRDVCLLARMMAA

SEQ ID NO: 13514 - protein, 353 aa, Cymbidium hybrid
METERKGPVVVTGASGYVGSWLVMKLLQKGYEVRAAVRDSTNFEKVKPLLDLPGSNELLSIWKADLNDIDETFDEVTRGSVGLFHVATPMNFQSEDPENEVIKPTISGLLGILRSCKRVGTVKRVIFTSSAGTVNVEEHQATVYDESSWSDLDFVTRVKMTGWMYFVSKTLAEKAAWEFVSDNDIHFITIIPTLVVGSFLISRMPPSLITALSLITGNEAHYSILRQAQFVHLDDLCDAHIFLFEHHKANGRYICSSHDSTIYSLAKMLKNRYATYDIPLKFKEIDPNIESVSFSSKKLLDLGFKYKYKYTMEEMFDDAIKTCRDKNLIPLHTEEMVSANEKFDEVKEQIAVK

SEQ ID NO: 13515 - protein, 432 aa, Bacillus cereus ATCC 10987
MDILKLLMVVILIALTGFFVAVEFAIIKVRSSRIDQLVSEKRRGALAAKKVTSNLDEYLSACQLGITITALGLGWLGEPTIKHLLEPLFLKLHLSSAIASTVSFIIAFAVITFLHVVIGELAPKTFAIQRAEQVSLLLSKPLIYFYRVMYPFIWALNGSARLVTGLFGLHPASEHEVAHSEEELRLILSESYESGEINQREFKYVNNIFEFDNRVAKEIMVPRTEVVGLYEDEPFETHIKIIAQEKYTRYPVFGEDKDEIIGMVNVKDLFIRYMDGNRDEECSIMPYTRPVIEVLENIPIHDLLLQMQRKHIPLAVLYDEYGGTAGIVTLEDILEEIVGEIRDEYDEDEHPPIEHISEGCKIVEGKVLISEVNDLFGIHLIADDVDTIGGWIMVQKQVVAEGDIIEKHGFSFKVLEKDMHQIKRVEIKKGEE

SEQ ID NO: 13516 - protein, 413 aa, Nicotiana tabacum; identical to SEQ ID NO: 583

SEQ ID NO: 13517 - protein, 261 aa, Escherichia coli O6
MSESLHLTRNGSILEITLDRPKANAIDAKTSFEMGEVFLNFRDDPQLRVAIITGAGEKFFSAGWDLKAAAEGEAPDADFGPGGFAGLTEIFNLDKPVIAAVNGYAFGGGFELALAADFIVCADNASFALPEAKLGIVPDSGGVLRLPKILPPAIVNEMVMTGRRMGAEEALRWGVVNRVVSQAELMDNARELAQQLVNSAPLAIAALKEIYRTTSEMPVEEAYRYIRSGVLKHYPSVLHSEDAIEGPLAFAEKRDPVWKGR

SEQ ID NO: 13518 - protein, 957 aa, Ralstonia metallidurans CH34
MRRLVTSFAASFVTGAACFILAGLSALPVPAFAARPSSVAPPPPAAPVIRAERVAAVEGITEYRLPNGLRILLAPDDAQPTTTVNMTYLVGSRHENYGETGMAHLLEHLMFKGTPSLPGRTIPTEFARRGMQFNGTTAQDRTNYFETFAASDDNLDWALRMEADRMVNSFISRADLDKEMTVVRNEMEIGENNPMRMLQQQMYAAAYRWHNYAKAPIGARSDVERVGIQNLQAFYRRYYQPDNAVLVVAGQFDPVRALSRIEQAFGPIPRPTRVLPTEHTVEPPQEGARELTLTRPGDSSIVAAMYHVAPGAHPDTTALALLTVILADTPGGRLEHALVDTRKAAWQMSMFDAMKDPGVILFAAGTGKDRPIEPVRAALLAEIEGLAAKPVTQDELDRARVRMRNAYEKILNDPARYGVALSESIAKGDWRLLFIARDRVETTTLEDVQRVAENYLRQTNRTVGEFLPGDKPQLATIPQSPDVAALVRDYAGKAVAQAVPTFDPSPANIDAHTVRQTLPNGMELALLSKPTRGEAVNGTLVLHLGNTQSLQGKTAIGSLTAGMLDRGAGVFSRQQIADRFEALKANVSISGSSERLTVRFETHRAYLPDLLDLLRTVLRMPTFPSAELETLRASSIAGVDSQRRQPNALAPNALGRHGNPYPAEDPRYTPTFDESVASLRGVTQADLREFHAQFYGADHAQLAIVGDFDAADAAKQIQFLFGDWRAQVPFERVDRPFIAIPAASFTLDTPGKANAVYLASQPVDLLNDSPDYPLMLIAARVLGGTGMRSRLADRLRQQEGISYGVSSSLSIGALDRAGRFALWAVYAPQNQTRLRDAVGQEMQRFVRDGITSVELSEAVSGLLQQGLISRTRDGLLAGALANQLYLGRTMAHTAEVEARISKATPEAVNDAIRRYLSPDTLTQAFAGDFGSGAGTPAATAAEPATAPAAAPAEPARP

SEQ ID NO: 13519 - protein, 433 aa, Aquifex aeolicus VF5
MIKFLILGVILMVQVLTAQELYIRDLPNGAKLIVKPRDDTEAVALHVWFRVGSVYEKYDEKGMAHFLEHMLFNGTEKYKYGEIDRIIESLGGNINAGTSKDYTYYHVEIAHPYWKQALEVLYQLTMKATLDEEMIEKEKPIVIEELRRGKDNPTTVLWEEFEKLVYKVSPYRFPIIGFEETIRKFTREKLLKFYKSFYQPRNMAVVIVGKVNPKEVEEEVMKTFGKEEGRPVPKVQIPTEPEQIGIRFKKLKDPRIEKAYWIIGWRVPAIGKTDYKGLLVFSEILCGGRISVFYRELREKGLVYSYSCGDMGRPRDNIFIITATFPPENYEKVKKRVFELLKETYENLTDEQVEEAKSRIINSRLFEEERVENDAFDIGYSYTVVRDLDFYRFFDKNLSRVRRVDVMRIFERYIKEDKYSEILMVPEDGNKAE

SEQ ID NO: 13520 - protein, 337 aa, Phaseolus coccineus
MATVKKIGKKACVIGGSGFMASCLVKQLLHKGYAVNTTVRDPDNAKKISHLLALQSLGDLNIFGADLTGERDFDAPIAGCELVFQLATPVNFASEDPENDMIKPAISGVLNVLKACARVKGVKRVILTSSAAAVTINPVKDTGLVMDESNWTDVEFLNTAKPPTWGYPVSKALAEKAAWKFAEENHIDLITVIPALTTGPSLTPDIPSSVGLATSLITGNDFLINALKGMQFLSGSISITHVEDICRAHIYVAENESSSGRYIVSAHSTSVPELAKFLSKRYPQYKVPTEFDDCPSKAKLTISSEKLVKEGFSFKYGIEEIYDQTVEYLKNKGTLKN

SEQ ID NO: 13521 - protein, 559 aa, Schizosaccharomyces pombe
LTMCGILAVHHVAEDIEAFKPKALHLSKQLRHRGPDWSGKAIRNQTILCHERLAIVGVESGAQPLVSDDGKLVLTVNGEIYNHLKLRENLKGNYKFKTYSDCEVILYLYREHGPACANMLDGMFSWVLYDQDKDKVVAARDPIGITTLYQGFSSDSPDTAYFASELKALHPVCDKIIAFPPGHYYDSETKQTVRYFKPSWWDENKIPSNPVDYKLLRETLEASVRKRLMAEVPYGVLLSGGLDSSLIASIAARETEKLANSTSQSEEARTITAWPKLHSFAIGLPGSPDLLAARKVADFLHTFHHEHTFTIDEVLMLFVTLFTILRHMMLPLSVQVPPCIYYLVKSRLKVLKWFCLVRDLTKSLVDTYISVMPPLVRPSIPSVCVVLRTCTYPNACVLTSQLWLGVLRLVFLSWIRTFWKLLLTLILRRKCILTVVKKNIFFAKALDTTHDSSLQPYLPQDILWRQKEQFSDGVGYSWIDALKDTAELCISDDEFALPRREWGDDIPTTKEAFWYRKLFDEIFPRQCADTVMRWVPKAEWGCPEDPSGRYQAGHVAALK

SEQ ID NO: 13522 - protein, 229 aa, Pediococcus pentosaceus ATCC 25745
MAKLVLIRHGQSQWNLSNQFTGWVDVDLSDEGVKQAQNAGKLIKEAGIEFDQAYTSVLTRAIKTLHYALEGSDQLWIPETKTWRLNERHYGALQGQNKAEAAEKWGDDQVHTWRRSYDVLPPLLDADDEGSAANDRRYANLDPRIIPGGENLKVTLERVIPFWEDEIAPKLIDGKNVIIAAHGNSLRALSKYIENISDEDIINLEMATGEPVVYDFNEKLEVQSKTKLN

SEQ ID NO: 13523 - protein, 445 aa, Yarrowia lipolytica CLIB122
MLSIAEIAAKGLDYPYTNNTSFRVWIHVVGTVLREAEIYRDDGDFEKAYLLYTRFADLLLNKMPGHPGLKANRALFKKMTGKMPGVLQEMQQLKKALEVQITEEKKAEEERQRKLRALQQASDSGRSGGSRGSGSTSRIDDLRSQLGQGGPDHVNLEDYSFGRYDTRQVSEPMYEHGNWQQQAHHQHDTFDYPDLNRELSSVLSPYVYESGPLTLSPTAGQIRLADSPPAIPAKPAALKASYEKPAAPAPPTTSSSSVEHTSRYTTEGGLALRSLFIPAELEATFLKVAHANTVKNLETCGILCGKLSRNAFFVTHLMIPPQESTSDTCQTTNEELLFEQIDENDLFVLGWIHTHPTQTCFMSSVDLHTQNSYQIMLPEAVALVCAPQHDPNFGIFRLSDPPGVDIIKNCNRGGFHPHTEDNIYNNARHAMVKNGLPFKMKDLRS

SEQ ID NO: 13524 - protein, 148 aa, Thermoplasma volcanium GSS1
MKGYSMSVDENNARARIVEADISLKDAVNIAHHIRGMKLDYAKQILEDVVSKKYAIPYFRYLDSVSHRPGKGPGRYPVKAAKVFIDLLSNVENNAEFKGMNTDSLIIKHVAANKGRMIKKYTPKAYGRAGANFKDLINLEVIVTEGDQ

SEQ ID NO: 13525 - protein, 115 aa, Triticum aestivum
MAPAATIRGAARALLVVAVLVLAARGASAALSCSTVYNTLMPCLGYVQSGGVVPRACCGGIKKLVSTARSTPDRRSICTCLKNVGSGAAGGPYVSRAAGLPGKCKVPLPFNCNSN

SEQ ID NO: 13526 - protein, 141 aa, Cicer arietinum
RDIISGPFEKLIRGSKIRELSGPEYSRKVMENCVAHLKSIGTYGDEEVEAMQKFAEAFKNVNFPPGASVFYRQSPDGVLGLSFSKDASIPEKEDAVIENKAVSSAVLETMIGEHAVSPDLKRCLAARLPALFDQGTFSIGN

SEQ ID NO: 13527 - protein, 178 aa, Bacillus subtilis
MIFDFVVIRENSEGEYSEVVGRIHRGDDEIAIQNAVFTRKATERVMRFAFELAKKRRTLVTSATKSNGIYHAMPFWDEVFQQTAADYSGIETSSQHIDALAAFFVTRPETFDVIVASKLFGDILTDISSSLMESIGIAPPDINPSGKYPSMFEPVHGSAPDIAGQALPIRSARFGQRS

SEQ ID NO: 13528 - protein, 112 aa, Neisseria meningitidis Z2491
MKKIEAIVKPFKLDDVREALTEIGITGMTVSEVKGFGRQKGHTEIYRGAEYAVDFLPKVKIELVLADDAVERAIDVIVEVARSGKIGDGKIFVLPVEEAIRIRTGERADAAV

SEQ ID NO: 13529 - protein, 109 aa, Arabidopsis thaliana
VFSWLGLTVCIVASADAAISCDTGAGSLPPCATYLSRGGWAPPSCCAGVHSLDRMAKTTPDRQQACRCIQSTAKSISGLNPSLASGLPGKCGVSIPYPISMSTNCNNIK

SEQ ID NO: 13530 - protein, 533 aa, Microcystis aeruginosa
MNTSPDRVIIFDTTLRDGEQSPGAALNVDEKLTIARALARLGVDVIEAGFPHASPGDFEAVQKIAGSVGSEADSPIICGLARATQKDIKSAADALRPAAKPRIHTFLATSDIHLQYKLKKTRQEVLEIVPEMVAYAKSFLNDVEFSPEDAGRSDPEFLYQVLERAIAAGATTVNIPDTVGYTTPSEFGALIRGIKENVPNIDQAIISVHGHDDLGLAVANFLEAVKNGARQLECTINGIGERAGNASLEELVMALHVRRSYFNPFLGRPAESTEPLTKINTKEIYRTSRLVSNLTGMIVQPNKAIVGANAFAHESGIHQDGVLKHKLTYEIMDAESIGLTNNQIVLGKLSGRNAFRSRLQELGFELSETELNNAFIQFKEMADRKKEITDRDLEAIVNDEIDTVPDHFRLELVQVSCGNNARPTATVTIRTPDGSELSDAAIGTGPVDALCKAIDRVVQIPNELISFSVREVTEGIDALGEVTIRLRYAGRTYSARAADTDIIVASARAYVSALNRLHVALQQKEKTPEMLQV

SEQ ID NO: 13531 - protein, 331 aa, Thermus thermophilus
RDEVVRGRDVVISTHTHDDLGMATANALAGVENGAGQIECTINGIGERAGNCALEEVVMALYVRRDWYKAYTRINTREIYRVSRLVERYTGMPVPPNKAIVGDNAFAHESGIHQDGVIKHRATYEIMDAELIGRRPAVLVLGKHSGRAAFKKALEDLGYKDLSEEEVKKLFARFKEIAEKKGPLSAEELQALVESEREPTSHFFQLEHVQFFSGSGLLPTATVKVKTPDGERLATHTGDGPVDAVYKAIQEAIGLRPELELYRVEAITGSTEALGQVTVRLRLGELQAVGVGVSPDIIEASALAFLDAAGKLASGRATRHPPSIEEVHRGV

SEQ ID NO: 13532 - protein, 339 aa, Nocardioides sp. JS614
MTRSSTVSTAEALVAPGKGILAADESTPTIAKRLAAIGVESTEPVRRAYRELLLTAPGLSEHISGVILYDETLRQRTDDGVPFGELVAGAGMIPGIKVDAGTADLAGFPSEVVTEGLDGLRRRCAEYVELGARFAKWRAVIKVGEGRPTRTCIEANAHALGRYAALAQEAGLAPIVEPEVLMDGSHTIDRCAEVTVAVLWAVYDQLAEQRVLLEGTLLKPNMVLPGAECPDQVDDETIATRTVTAMRESVPVAVPGIVFLSGGQTHQQATARLDAINRHGSQPWQLSFSFGRALQAPVLEAWGGDERNRDAAQAALLERAALNGAARYGSYRPEMERPR

SEQ ID NO: 13533 - protein, 318 aa, Zymomonas mobilis
MSADPISTRVFILGSGPAGLTAAIYAARAGLNPIVAQGLQPGGQLTITTEVENFPGFREPIQGPWLMEEMQAQAENVGAKLVWDIITSVDFSQRPYRLMGDGGQVYLADSLIISTGAQARWLGLESETALRGKGISACATCDGFFFRGKKVVVIGGGNTAVEEALYLTNHSPEVTLIHRRDSLRAEKIMQKRLLANPKIKIRWNSEVAEFIAGEDSALSAVKLKDTKTGEESLLETEGAFIAIGHKPATELFQGHLKLDDEGYIEVTPGTTQTSIKGIFACGDVMDKHYRQAVTAAGTGCMAALEAERFLGEIDFKED

SEQ ID NO: 13534 - protein, 1541 aa, Ustilago maydis 521
MTDSSSHAVDRHHSNLGLHNVAIPDSSLDPASSPDFPLAASGSTKQALPKKGFRVRVNSFGAAVMLNSKATSSSDPAPLAQQPKSSKFKMRARSATVNNLQMPTSHSVQADNFNPASSSCAPLSPTPHHHSPPPHSPQTRDPTLLSPAASKQSELSVTAESGNGFNRRKFFGRSNSIRSLLGGNSATSSNTTKAGSSHVSEPNPGTITTTTTTPTMGSGLLRRMSSKSFLNLNQPKTGAKAANNSSSDDLSSTTSVESHASRRFSDSLKGMRSRRGNSISKDTTKSRSLSSRSSSEARTARLTHKEILPPNSSRRSTDSTHSSLSVSSAEPHPPSSEADHSGNMAQPAREAQDSFTNAPRRLTGWLYNMVSSDNTPSSVEVGAPLSPVREADAIDFSPSSPTTHRQNPRILSHQTPAQSLAASSQVDASQPVSTTSSASTRSKAGALFQSLSNASPNRAVRMTNAATGDNNGSGSVPGTTSHTISSNHGGASSNSTSNATTGGANTGSWVPGGVNFDRAFKFFMDHDPSSKDDEGIWLLGVWHGPRQAGKVNSSEASVLPPDLSTSTSPCAPEMTASTTSNARNIDRPRASSPSSSLSASSPRQSPSELVHASLASLPPLHDRASIPTTRNESRVGSSISTAATASTSNSIRTKSSTTSFSVVNQASIPAAVDRQFAFQPDFASRIWCTYRNHFAPISRDGTISDQAASAAENMGVAQESVLQDTSASSTCSAVPSSSEATRSSSPPASTGRGWLGRKTAESNAAQDAALQANSPLGLGAALGAGYANASSTLGERMGITNLWSRATAAAQAAGFSRAGLTTDSGWGCMLRTGQSLLANALLNVHLGRSWLREAPPMRQMDFLEQLASLSLDSSVEMQSLQEWREKRARHAAYIKILSWFLDDPSPACPFGVHRMAREGKRLGKEVGEWFGPSTAAGAIKQLVTEFPDAGIAVELAHDGVFYLDEVRLAAGARSALQSGKGRQGDAAVTWRRPVVILIGIRLGLDSVNPIYYESVKETFSFPHSVGIAGGRPSSSYYFMGHQGNSLFYLDPHNVRPAVALRYPPSTFPTAVPHQLDVAHRFALEDKDDELEWWSHAYTEAQTSTFHCEKVRRMPIKSLDPSMLLGFLVKDEEDLMDLCTRIKGLPKTIFSFAESAPKWVDDDDFDPSMESISEPSVDEESEVDGEDKQDVQATHEGEPMQRTRASANAEDTSPASSKGTDARSSDKMFRESQQRTAAWLGQGQRLNSSREASHASSVSGGGIAFPSLDLLTPQSEGHTLQRPSRSDVRQVSTSSATTTRPARRALETVPAAGSKVGRELTVSQSTASPYTEQTPPWRSPGKLGTNESSSTVHLSDSEVGSGWEEVSDGGTIAPSGYAGASVLRTSSPFRVSLATKSPTTGVQGTADGGQVVDVAASDLIEGDLVSLDMNPPEEAQGGATHLLSHTSKSSATTDTVTASSASDSAATAQDESYFGLTSAHKPLALPRRRSQSKGSPIELATAVPTDDAPPVPVVPAAFLAELGQSKNKSNAAPDLNDSDDDF

SEQ ID NO: 13535 - protein, 611 aa, Zymomonas mobilis
MTIIAIGSWGFEKEIKHVSPTQRAAIVLETLKDMGVDLIFGYPGGAVLPIYDALYQDEGIRHILARQEGGAVHAAEGYARSTGKPGVVIVTSGPGATNAVTGIADAMLDSIPLVVFSGQVATNLIGTDAFQEADTIGITRHCTKHNYLVRDPKEFSSDDCRGLPSGTSGRPGPVVIDLPKNVQTAVIDYIKPDPNKRMHRGYRPRVKADPVEITNALDMIAKAKRPVFYTGGGVINSGPDASKALRELADLTGVPVTSTLMGLGAFPASSQQWLGMLGMHGTYEANFAMHDADLVVALGSRFDDRVTCRVDSFSPHSKKIHVDIDRSSINRIIHVDLPIVGDVGSVMQDMVALWKEKHYQMQDISAWWVQIDEWRAKQCLNFTKQGNEIMPQQAIRSLWEATKGKNPIVSTEVGQHQMWTAQYFGFDSPNHFLTSGGLGTMGYGFPSIIGAQVGNPDSLCMTIAGEASFQMNIQEMATVAQYRLPVKIFILNNRFMGMVRQWQDLLYDHRRSQSYSEALPDFVALAKAYGWNALKIEKPSQLEDGIKTMLETPGPVLVDCQVAQLANCLPMVPPGAGQTEMILESDITDNHVKKPEYTPSAAPSSATTIRG

SEQ ID NO: 13536 - protein, 123 aa, Zea mays
MAAPKGATLALAVLLAATVVAPPAAVRAAMSCSTVYSTLMPCLPFVQMGGAMPPQPCCGGIRSLLAQANNTPDRRTICGCLKNVANGANGSDTYINRAAALPSKCGVSLPYKISTNVNCNTIN

SEQ ID NO: 13537 - protein, 122 aa, Glycine max
MASLKVACVVAVMCMVVVAMSAAPMAQAAITCGQVVGDMSPCFSYLRSGGKPSHACCNGVKSLSSAAKTTADRQGACSCLKNLANNMGQSLNAGNAASLPGKCGVNIPYKISTSTNCATIKF

SEQ ID NO: 13538 - protein, 160 aa, Brassica napus
  misc_feature (100)..(100): Xaa can be any naturally occurring amino acid
  misc_feature (129)..(129): Xaa can be any naturally occurring amino acid
MSDEEHHFESSDAGASKTYPQQAGNIRKGGHIVIKGRPCKVVEVSTSKTGKHGHAKCHFVAIDIFTAKKLEDIVPSSHNCDVPHVNRIDYQLIDISEDGXFVSLLTDSGGTKDDLKLPTDDNLSALMQXGFEEGKDVVVSVMSSMGEEQICAVKEVGGGK

SEQ ID NO: 13539 - protein, 577 aa, Bacillus thuringiensis serovar konkukian str. 97-27
MNRGRDVMSKFTVASNGSLETTLRGVEVLSTPLLNKGVAFTQEEREELGLKGLLPPAVLTLEEQARRAYEQFCSQPDDLLKNVYLTALHDRNEVLFYRILTDHLREMLPIVYTPTVGVAIQRYSHEYRKPRGVYLSINDPSGIEEAFANIGATAENIDLVVVTDGEGILGIGDWGVGGINIAIGKLAVYTAAVGIDPSRVLPVILDVGTNREELLDNPFYIGNRHPRITGEAYDEFIDTFVQAVNKQFPKALLHWEDFSSRNARKILDKYRHDICTFNDDIQGTGAVSLAAVLSAVKASGVPLSEHRVVVFGAGTAGIGIADQVRDAMVRVGVSEEESYKRFWCIDRNGLVTDNMEDLLDFQMPYARKEAEVSEWKENGVIGLAEVVKQVKPTILIGTSTVAGAFKEEIIKEMASHVERPIILPMSNPTPLAEAKPADLIKWTEGRALVATGSPFEPVTYNGVTYVIGQSNNALIFPGLGLGTIVVRASVMTDGMFAAAAEAVASMVDTSQPGAPILPEVEELRNISEMVAIEVAKVAVAEGVARENLSDNDIKIAVKEAIWEPEYRQIKAVEKVTI

SEQ ID NO: 13540 - protein, 554 aa, Parvularcula bermudensis HTCC2503
MSSTPQDVNHTFDDDDLSILTTYGTVKAHEAGEILVPSGTSKADCLVTLSGQTHIFVISGQEESRVGYMERGQFAGDLSVLTGGVTFARTVMGEAGEVLHIPHDRFKRLLVERSALSDVFVRVLTARREFGKSRANRSIILIGPGRQRETFALRRLLERQSVPHTLVDPTLDEEAGEGVMRVHGLGPEDLPAVLLGEKEPMRAPTPSALAEALGLDLVADGTTTDVLVIGAGPAGLAASVYAGSEGLSVLTLDGDAPGGQAGTSSKIENYLGFPTGISGQELADRASVQAQKFGVQMAAPAEVASLQVEDKLYRVALEDGREVAARSVVIATGARYRRLDIDHLEDFEGRGIYYGATPMEAQLCGGREVAIVGAGNSAGQGAVFLSHTAKAVHVVYRRADIRETMSEYLVRRLEETPNIILHPEREVVALYGDNDGLLEKVDFINHATGSTETCDCGFLFLFIGARPCTDWLQGRLATDDRGFLKTGADLTNMELVKAQWSMDRMPTKYETSLPRVYAVGDVRTGSIKRVASAVGEGSVVVSDIHRALGELAAS

SEQ ID NO: 13541 - protein, 554 aa, Staphylococcus aureus subsp. aureus NCTC 8325
MTDKKYTAADMVIDTLKNNGVEYVFGIPGAKIDYLFNALIDDGPELIVTRHEQNAAMMAQGIGRLTGKPGVVLVTSGPGVSNLTTGLLTATSEGDPVLALGGQVKRNDLLRLTHQSIDNAALLKYSSKYSEEVQDPESLSEVMTNAIRIATSGKNGASFISIPQDVISSPVESKAISLCQKTNLGVPSEQDINDVIEAIKNASFPVLLAGMRSSSAEETNAIRKLVERTNLPVVETFQGAGVISRELENHFFGRVGLFRNQVGDELLRKSDLVVTIGYDPIEYEASNWNKELETQIINIDEVQAEITNYMQPKKELIGNIAKTIEMISEKVDEPFINQQHLDELEQLRTHIDEETGIKATHEEGILHPVEIIESMQKVLTDDTTVTVDVGSHYIWMARNFRSYNPRHLLFSNGMQTLGVALPWAISAALVRPNTQVVSVAGDGGFLFSSQDLETAVRKNLNIIQLIWNDGKYNMVEFQEEMKYKRSSGVDFGPVDFVKYAESFGAKGLRVTNQEELEAAIKEGYETDGPVLIDIPVNYKDNIKLSTNMLPDVFN

SEQ ID NO: 13542 - protein, 322 aa, Phyllostachys pubescens
MASTLSFPVIDMGLLGGDERPAAMELLRDACENWGFFEILNHGISKELMDEVEKMTKGHYKMVREQRFLEFASKTLKDGCDAQGVKAENLDWESTFFVRHLPESNITEIPDLDDDYRRVMKRFAAELEKLAEGLLDLLCENLGLEKGYLARAFRGSKGAPTFGTKVSSYPPCPRPDLVKGLRAHTDAGGIILLFQDDHVSGLQLLKDGEWVDVPPMRHSIVVNLGDQLEVITNGRYKSVLHRVVAQTDGNRMSIASFYNPGSDAVIFPAPALVEEEAGGTYPKFVFEDYMNLYVRHKFEDKEPRFEAFKSMERESSKRIAIA

SEQ ID NO: 13543 - protein, 285 aa, Oryza sativa (japonica cultivar-group)
MSEELKRDFEIGEEIGRGRFGVVHRCASRSTGEAYAVKSVDRSRLSDDLDRSLAALEPKLARLAAAGNPGVVQVHAVYEDDDWTHTVMDLCTGPDLLDWVRLRCGQPVPEPDAAAVVAQIAEALALCHRRGVAHRDVKPDNVLLDATGDGPPRVRLADFGSAAWVGDGISAEGLVGTPHYVAPEVVAGGEYGEKADVWSAGVVMYVLLTGGALPFGGETASDVFAAVLRGNLRFPPRLFSGVSPAAKDLMRRMMCRDVYRRFSAEQVLRHPWIVSGGGARDVQPT

SEQ ID NO: 13544 - protein, 451 aa, Geobacter metallireducens GS-15
  misc_feature (45)..(45): Xaa can be any naturally occurring amino acid
MAKEKLVVIGGDAAGMSAASQAKRRRPELEIVVFERSPHTSFSAXGIPYYVGRVVDKEEKLVIRSPEKFREKYGIDARALHEVVEIDAAQGKVRVRDLQRGGSAWESYDQLLIATGAVPLCPDLPGSDAVDICGVNTLESGLEIRRRLDKGGMKKGVVVGGGYIGLEMAEALVRHGLEVSLVNRAPQVMGTLDYDMGAMVSQALRDVGVSLYLEETLTAFETKGGKVTGVVTDRRTLPADIVILGLGVRPNTALASAAGIPLGEKGSIRVNERMQTGVAGIWAAGDCAESFHLVSRKPVHIALGTVANRHGRVAGINLGGGYATFPGVVGTAVTKICQVEVARTGLQEEELRELGIEWISAVIKSRTRAGYFPGAGGITVKVLAERGSGRLLGGQIVGMEGSAKRIDTLATALHAGFTVEEMINLDLGYAPPFSPVWDPVVIAAREVAKEL

SEQ ID NO: 13545 - protein, 322 aa, Debaryomyces hansenii CBS767
MSTETKPAGRTILASTIAKEFVDEITGQLKELEFKPKLVGFLANDDPAAQMYANWTGKTCEGLGFNYELIQVDKNDLESSLMKANKDDNVNGIMVYFPVFGDKQDQYLQQLISTEKDVEGLNFMYYHNLYHNVRFLDAPYNEQKCILPCTPLAMVKILEYLGVYNKILHYGNRLYGKKIMIVNRSEIVGRPLAALLANDGATVYSVDINNIQQYSRGDDLLEKRHKALQLDSTHTIETLAPTCDVIITGVPSDSYKFPIEYITNGTVVINFSSSKNFPDEVKQKAGLYVPSIGKVTIAMLLRNLLRLIKNKNHRIVKGEQQP

SEQ ID NO: 13546 - protein, 681 aa, Yarrowia lipolytica CLIB122
MQSRLARRATNLARISRSKYSLGLRYVSNTKAPAAQPATAERSQPAPHFQGTVGKPPILKKAEAANADMDESFIGMSGGEIFHEMMLRHNVDTVFGYPGGAILPVFDAIHNSEYFNFVLPRHEQGAGHMAEGYARASGKPGVVLVTSGPGATNVITPMQDALSDGTPMVVFTGQVLTSVIGTDAFQEADVVGISRSCTKWNVMVKNVAELPRRINEAFEIATSGRPGPVLVDLPKDVTAAILREPIPTKSTIPSHSLTNLTSAAATEFQKQAIQRAANLINQSKKPVLYVGQGILGSEEGPKLLKELAEKAEIPVTTTLQGLGAFDERDPKSLHMLGMHGSGYANMAMQNADCIIALGARFDDRVTGSIPKFAPEARAAALEGRGGIVHFEIQAKNINKVVQATEAVEGDVTESVRQLIPLINKVSAAERAPWTETIQSWKQQFPFLFEAEGEDGVIKPQSVIALLSDLTENNKDKTIITTGVGQHQMWTAQHFRWRHPRTMITSGGLGTMGYGLPAAIGAKVARPDCDVIDIDGDASFNMTLTELSTAVQFNIGVKAIVLNNEEQGMVTQWQSLFYENRYCHTHQKNPDFMKLAESMGMKGIRITHIDQLEAGLKEMLAYKGPVLVEVVVDKKIPVLPMVPAGKALHEFLVYDADAEAASRPDRLKNAPAPHVHQTTFEN

SEQ ID NO: 13547 - protein, 487 aa, Synechococcus sp. WH 8102
MASAPLRLSPAPIKFGTDGWRGVLGVDITVERLLPVAAAAAQELAHRAPDGLNSRTVIIGFDRRFLAPELAEAIANAVRGCELEPLLTETPVPTPACSWAVVERKALGALVITASHNPPEWLGLKIKGPFGGSVEGDFTAAVERRLAAGGITPPIAATTSRFDGRGEHLEGLRRKLDLTALVTGLKAMNLKVFVDPMHGSAAGCVSDLLGPEASELVDEIRSTRDPLFGGNPPEPLAPYLSDLITAVQHSTAAGTPAVGLVFDGDGDRIAAVDENGRFCSTQLLMPLLIDHLARARQLPGTVVKTVSGSDLMRLVAEAQGREVLELAVGFKYIASEMLAGEVLIGGEESGGVGFGMHLPERDALFAAMLVLEALVEGGQPLGSRLDALQQRHGGASHYDRLDLRLQDMEARRRLETLLASSTPQQVAGDAVVEVNTTDGIKLRMGASHWLMLRFSGTEPLLRLYCEAPDRDRVDAVLAWAKRYAEAA

SEQ ID NO: 13548 - protein, 166 aa, Arabidopsis thaliana
MAFVTTAEVCDANQELIRSGQLRALQPIFQIYGRRQIFSGPVVTVKVFEDNGLIRQFIEEKGNGRVLVVDGGGSQRCAILGGNPVVQAQNNGWAGIVVNGCIRDVDEINGCDIGVRALASHPIKASKKGLGEQRVPVNIAGTRICDGEWLYADTDGILVSQIELSV

SEQ ID NO: 13549 - protein, 571 aa, Debaryomyces hansenii CBS767
MSAEEFKAQGNQYFAAKDFTKAIEYFTKAIEASPTPNHVLYSNRSASYASLKNFKKALEDAEECVKVNDSWAKGYNRVASAQHGLGNLDEAKTSYKKALELDSNNAMAKDGLKSVEDSERSRNSQPDMGLGAMFSDPNLITNLKNNPKTSELMKDPELVQKVVNMQTNPQANATQFLSDPRLMTIMATLMGIDMDAPEPPQQQQPSQSAPKSETKQEPKSEPKKESAPEPKDVEMEDVSSSSKADADAAKAEGNKLYKLKKFDEAIEQYNKAWESHNDITYLNNRAAAEYEKGDYDTAIKTCETAIEQGREVRADYKLIAKSFARLGNTYLKKNDLQSAVKYFDKSLTEHRTPDILNKLRATQRDIKIQEALSYVDPEKAEEARLQGKEYFTKGDWPNAVKAYTEMVKRAPEDARGYSNRAAALAKLMSFPDAVQDCNKAIEKDPSFIRAYIRKANAQLAMREYSQVMETLNIAREKDLEVGEGKNVSEIDQLFNKALSQRFQALEGETPEQTMERVSRDPEIVGILQDPVMQGILGQARENPAALQDHMRNPEVSKKINMLIAAGVIRTR

SEQ ID NO: 13550 - protein, 529 aa, Heterocapsa triquetra
MAVKTSACLAAALLTQTTAAADAFAVAGQPQKISVVQRGLRGAAASQESAAPAGSWASATAVAASVAVAAAVVPRRQRKAAKLAGASMVPNKNQRTIRDAKTIVCAGPRLPEGRKLRVAVIGGGPGGASCADALAKGGCETYLIERKLDNCKPCGGAIPMCMVGEFDLPTDLIDRKVRKMTMISPTNNEVQIGRTLKDDEYIGMVRREVLDNFLRERAAENGATLINGLFTQMRMPKSEKESYVLTYNDFGDAEGDARKGVKKTLEVDVVIGADGANSRVAKEIEAGDYEYAIAFQERMRIPEDKMEYYKERAEMYVGEDVSPDFYAWVFPKYDHVAVGTGTVVDKKGIQKYQQGIRERAAPRIEGGEIIRVEAHPIPEHPRPWRTKDRCTLIGDAAGYVTKCSGEGIYFAAKSGLMCASEIVAASENGTRQITQNDLMEYIRKFDSKYGPTYIVLDALQKLFYTSDAARESFVDLCELDYVQQVTFDSYLYKTVQGNSPIGDVMLLGKTVSSLVKYNTSKVPEMRQLA

SEQ ID NO: 13551 - protein, 116 aa, Pseudomonas syringae pv. syringae B728a
MSSDLIKHVTDGTFDAEVLEAQGPVLVDYWAEWCGPCKMIAPVLDEIASTYKGRLTVAKLNIDQNPDTPAKHGVRGIPTLMLFKGGNVEATKVGALSKSQLTAFLEGNGIDLPKPV

SEQ ID NO: 13552 - protein, 351 aa, Frankia alni
MMTVRDPRFPSSSTTAIQSDAAIKFCDTTLRDGEQAPGVAFTAAEKLAIAAALDAIGVHQIEAGIPAMGVTERDVLREILATDPHADIVGWCRADHRDVEAAASCGLVTAHLTIPVSDLHLKSKLGRDRAWARLRVRDCVADATDRGMRVSVGFEDASRADDAFVTDLAGELRELGVTRLRWADTVGLLDPVSAHDRLGRLVRAVPGPWEIHAHDDFGLATANTIAAVQAGFTWVSTTVLGLGERAGNAPIEEVAMALRHLLKLPVDLDTTSFRSLARLVSRAARRPLPAGKAVVGESVFAHESGIHVHGILRHPATYEPFDPAEVGGRRRLAIGKHSGRASVRYALEQYG

SEQ ID NO: 13553 - protein, 456 aa, Acidobacteria bacterium Ellin345
MIVMKFGGTSVESAEAIDRVAGIVRGRLDRRPTVVVSAMSKATDQLLAMAAAAGAGDKEKAVTLCQALRDRHFGVASALVSDASNPVHTSIAADYLALEQLLEGICAVGELTPRTQDNVVAYGERINSKVVAAAFAARGLKATHVDAREIIVTDHTFGKATPQVAEIDRRLMAKVKPLIDDGVVPVLGGFIGSTPDGITTTIGRGGSDFSAALVGAGLNAEAIEIWTDVDGMKTTDPNLCPDAHRIKVISFEEAAELAYFGAKVLHPATVLPAIEKNIPVYVLNSRNPSNEGTKIVARAPQTRNPFKAIAAKKRITVIDVVAARMLMAHGFLRQIFEIFDRHKCAVDVVSTSEVSVSLTVDSNERIPEIAADMEKLAFVKYSGRKAIVCLVGENIRERPGIAAQVFTAISDINVRMISQGASEINITFVIDEADVPEAVRRLHAHFFTDVDPEVFD

SEQ ID NO: 13554 - protein, 549 aa, Streptomyces avermitilis MA-4680
MSDSPRLTRRPEWTELEDHRAGPLLHPALRELFAADPERAERYVVRAGDLRLDYSKHLITDETLALLQELATATDVFGLRDAMFRGEKINVTENRAVLHTALRAPRDAVIEVDGENVVPAVHAVLDRMADFADRVRSGEWTGHTGSRIRTVVNIGIGGSDLGPAMAYEALRAFTDRSLTVRFVSNVDGADLHEAVRDLDPAETLFVIASKTFTTIETITNATSARSWLLAGLDGDEKAVAKHFVALSTNAGKVSDFGIDTANMFEFWDWVGGRYSFDSAIGLSLMIAIGPERFRELLDGFRIVDEHFRTAPAEANAPLLLGLLGVWYGSFFGAQSHAVLPYSHYLSKFTAYLQQLDMESNGKSVDRDGHPVEWQTGPVVWGTPGTNGQHAYYQLLHQGTKVIPADLIGFINPVDGLSDELAAQHDLLMANLFAQGQALAFGKTGDEVRAEGVPEEQVPHRTFRGNHPTTTILAAELTPSVLGQLIALYEHKVFVQGAIWNIDSFDQWGVELGKVLAKRVEPALTEGADVPGLDPSTAALVAAYRTHRKK

SEQ ID NO: 13555 - protein, 129 aa, Zea mays
MAARSSSSQPQLVAAAAVLAAALLLLAAGAGTASAAVSCGEVTSSVAPCLGYAMGSAASPSAACCSGVRSLNSRASSTADRQATCNCLKSMTGRLGGGVSMANAANIPSKCGVSVGVPISPSVDCTKIN

SEQ ID NO: 13556 - protein, 958 aa, Ashbya gossypii ATCC 10895
MTMEVPLINGTNSVVVTAYSREQYAQCMQFYSAMLRLETLTKGENETVLTNKAVSVRVKYEEDKSRDQEARERREALAAAATTHDWRGEASTVVFSTVDVAKVRQTLGLCQAYPSELAPLEVYTLDPQGNVVGFTQTKNAISTFTNVPSVVGPRHARDSMTVSSAGSSTDLRSFGLDTTAHYPSLPKKSVAGDRKAIAVMTSGGDAPGMNANVRAIVRSVIFKGCRAFTVMEGYEGLVRGGPEYIKECKWEDVRGWSTEGGTNIGTARCMAFRERSGRLLGAQHLIEAGVDALIVCGGDGSLTGADLFRSEWPSLIQELLETGKITQAQYDRYRHLNICGTVGSIDNDMSTTDATIGAYSSLDRICQAIDYLEATAKSHSRAFVVEVMGRNCGWLALMAGIATSADYILIPEKPASSREWQDQMCDIVSTHRSRGKRTTIVIVAEGAIAADLTPITPKNVHQVLVDRLGLDTRITTLGHVQRGGSAVAFDRILATLQGVEAVNAVLESTPDTPSPLIVLNENKIMRKPLMESVALTKSVADAIQAKDFKKAMGLRDPEFVEHLNNFMAINSADHDEPKLRGEKRLNIAIVNIGAPAGGINSAVYSMANYCLSQGHKPFAIYNGWTGLARHESVRTLNWKDMLGWQSRGGSELGTNRTVPEDADIGMIAYYFQKYKFDGLVIVGGFEAFVSLHQLERARENYPAFRIPMVLIPATLSNNVPGTEYSLGSDTALNALMEYCDVVKQSAASTRARVFVVDVQGGNSGYLATHAALAVGAQVSYVPEEGISLEQLSQDIETLRESFEKAHGKGKHGKLILKSTNASKVFTTAVLADVITAEAKGDFDAKSAVPGHVQQGGLPSPIDRTRGTRLAVRAIGFIEAKQDVIREARENEEAFDCADKAVSHTAAVLGITGSQLKFTSIRQLYDLETEFSKRMPKVIHWEPTRAIADHLEGRKRVTV

SEQ ID NO: 13557 - protein, 416 aa, Shewanella sp. ANA-3
MEELTKLGVTVSELRFALDTFYFLISGALVMWMAAGFAMLEAGLVRSKNTTEILTKNVVLYAIACVMYLLIGYNIMYVDNAEGGWLPSLGTLIGSQADDANHALESDFFFQVVFVATAMSIVSGAVAERMKLWAFLFFSVVMTGIIYPVEGYWTWGKGFISSLGFVDFAGSGIVHMTGAAAAIAGVLLLGARKGKYGPNGQVNPIPGSNLPMATLGMFILWMGWFGFNGGSQLMVSDAANASSVAKVFVNTNTAAAFGAISALVVCKMIWGKADLTMILNGILAGLVAITADPLSPSLLMAGVIGVVAGGLVVFSIVGLDRIKIDDPVGAISVHGVAGFLGLMCVPLSNADATITAQLTGAAIIFAWVFSASFAVWFVLKMTMGIRVTEEEEYNGMDASDCGIDAYPEFVTVKSAG

SEQ ID NO: 13558 - protein, 407 aa, Methanopyrus kandleri AV19
MEQIVKNALERVEREQGGDDPPSSRGTDDDQELMEVLERARARILVVGVGGAGNNTATRLKEEGIGGAEVIAINTDAQDLVSCKADRKVLIGYELTRGLGAGGDPRVGEEAAKEDMEKIKEVVEGADMVFVTCGLGGGTGTGAAPIIAEVARKEGALTIGVVTLPFSVEGRRRIENALEGLERLRQVADTCIVIPNDRLLEIVPDLPIAAAFKVADEVLINAVKGITEMITQPGLMNLDFADVRAVMENGGFALIGIGEAENDSESGSRAVQAVENALNNPLVDVEVSGATGALVNIVGGKDLTLKEAEEVVELVASELSEDATVIWGAQIDEDLNDVLRVTVIVTGIEDADLEAMFTGPRQPKRTEVKEVAAESSRPEKVPEVSKGGAESSEDERPSSLEDLEKIL

SEQ ID NO: 13559 - protein, 425 aa, Leifsonia xyli subsp. xyli str. CTCB07
MSLATIPEALAELRAGRPIIVVDNESRENEGDVVLAAELASQEWIAWTVKNSSGFLCAPMTNEIADRLELPVMVATNEDTRGTNYTVSVDAADRLSTGISAGDRAHTLRVLAGLDSTPSSLHRPGHILPLRAAEGGVRERDGHTEATVDLLKLAGMTPVGAIAEIVSGDGEMMRLPGLIELGEREGILVITIEALIAYLQEFHCDRRLESPTPVPESSRVIFEVETTVPTPNGPFRMRAYRDRMTGADHVAIVAGSPDPTGTLVRVHSECLTGEAFGSLKCECGPQLDAALETVQREGGVVVYLRGHEGRGIGLINKLRAYKLQEDGLDTLDANLALGLPIDARDYGAATAILQDLGMRSVRLLTNNPEKVRQLEEHGIEVEERVALVVGVGAFNEGYLETKRDRMGHAIGEIYQTASAAERTTQ

SEQ ID NO: 13560 - protein, 411 aa, Bacillus halodurans C-125
MNRRVVVTGIGAVTPLGNTAEETWEKAIAGQSGVGLLTRVEAADFPMKVAAEVKEFDPTTHIDRKEARKMDRFTQFAVASALMALKDADLEITEDIAPRVGVWIGSGIGGMETYENQFRMFIEKGYRRVSPFFVPMMIPDMASGQVSIITGARGINSCSVTACASGANSIGDAFKVIQRGDADVMITGGAEAPITNMAVAGFSMAKAISTSEDPNTASRPFDANRDGFVMGEGSGILILESLESAEKRGAKIYAEIVGYGATGDAYHVTQPAPEGEGAARAMKQAIEDAGLTPEDIQYMNAHGTSTYYNDKYETLAAKQVFGDHVNNLAISSTKSMTGHLLGAAGAVEAIFSVKAIEEGIIPPTINYETPDPDCDLDYVPNEARKQGVNAVLSNSLGFGGHNATLVFKKYQ

SEQ ID NO: 13561 - protein, 541 aa, Magnaporthe grisea 70-15
MAHSTVSLALAAVGIFTLYLISKVILKTWQNATEARRLGCKPPASFPSWCPFGLDIVRKLIISRRQMRTPEWLREQLAKTSTPANPNNLTCSFQIVHTSGILTADEVNVHAMLSKQFDDFEVGQTRREIARPLVGESIFTTDGHAWKMLRGLVRPSFARHQVGDLELDEKHFKNMMACLETGSDGWTGNIDLQTLMFRYSLDSSTEFLCGASVGSQLKELQLQNGKVTDDEDEIDFASALDRAMEGLATRGQFFKCGPYIWPRGFEKACRDCHAFIDKYVARRQNKTLAAAEKQPPAESPPAAKEKYIFLDALAESFPDPVELRHQILGVLFAGRDTTASLISWVFYNLARDPARCHKLRRAVLEHFGGPREEEEEDPGRAVTFESLKECRYLQHVINETARLCPVVPVNSRRARRNTTLPRGGGPDGQSKVFVKEGTLVYFAPYIMGRRKELWGEDAERFVPERWEGKRHGWEFIPFSGGPRICPGQQSALTKTAYVIVRLLQRFDRIESWDPEVDVKHDATATMCSGTGVKVRLHADGF

SEQ ID NO: 13562 - protein, 518 aa, Methanocaldococcus jannaschii
MIIYREENEIIKKALENLNIPDRVYIFDTTLRDGEQTPGVSLTPEEKIDIAIKLDDLGVDVIEAGFPVSSLGEQEAIKKICSLNLDAEICGLARAVKKDIDVAIDCGVDRIHTFIATSPLHRKYKLKKSKEEIIDIAVDAIEYIKEHGIRVEFSAEDATRTEIDYLIEVYKKAVDAGADIINVPDTVGVMIPRAMYYLINELKKEIKVPISVHCHNDFGLAVANSLAAVEAGAEQVHCTINGLGERGGNAALEEVVMSLMSIYGVKTNIKTQKLYEISQLVSKYTEIKVQPNKAIVGENAFAHESGIHAHGVLAHALTYEPIPPELVGQKRKIILGKHTGTHAIEAKLKELGIEVGKDINKDQFDEIVKRIKALGDKGKRVTDRDVEAIVEDVVGKLAKKDRVVELEQIAVMTGNRVIPTASVALKIEEEIKKSSAIGVGPVDAAVKAIQKAIGEKIKLKEYHINAITGGTDALAEVIVTLEGYGREITTKAASEDIVRASVEAVIDGINKILAKREK

SEQ ID NO: 13563 - protein, 491 aa, Methanocaldococcus jannaschii
MMVRIFDTTLRDGEQTPGVSLTPNDKLEIAKKLDELGVDVIEAGSAITSKGEREGIKLITKEGLNAEICSFVRALPVDIDAALECDVDSVHLVVPTSPIHMKYKLRKTEDEVLETALKAVEYAKEHGLIVELSAEDATRSDVNFLIKLFNEGEKVGADRVCVCDTVGVLTPQKSQELFKKITENVNLPVSVHCHNDFGMATANTCSAVLGGAVQCHVTVNGIGERAGNASLEEVVAALKILYGYDTKIKMEKLYEVSRIVSRLMKLPVPPNKAIVGDNAFAHEAGIHVDGLIKNTETYEPIKPEMVGNRRRIILGKHSGRKALKYKLDLMGINVSDEQLNKIYERVKEFGDLGKYISDADLLAIVREVTGKLVEEKIKLDELTVVSGNKITPIASVKLHYKGEDITLIETAYGVGPVDAAINAVRKAISGVADIKLVEYRVEAIGGGTDALIEVVVKLRKGTEIVEVRKSDADIIRASVDAVMEGINMLLN

SEQ ID NO: 13564 - protein, 451 aa, Shewanella sp. MR-7
MSLVVAKFGGTSVADYGAMNRCADIVLGNPDCRLVVVSASSGVTNLLVELTQESMNDDGRLQRLKQIAQIQYAILDKLGRPNDVAAALDKLLSRMAVLSEALASQRSKATMDELLSLGEQCSSALFAAVLREKGANSSAFDVRRVLRTDSHFGRAEPQVEQIALLSSEHLLPLLSEQVIVTQGFIGSDEAGQTTTLGRGGSDYSAALLAEALKASAVEIWTDVAGIYTTDPRLAPNAHPIAEISFNEAAEMATFGAKVLHPATILPAVRQQIQVFVGSSKEPEKGGTWIRHQVEDAPVFRAVALRRDQTLLNLHSLQMLHAQGFLAETFATLARHKISVDLITTSEVNVSLTLDKTGSDSSGQGLLSEALLQELSQHCRVRVEDSLALVAIIGNRIATTAGICRRVFEVLEPHNVRMICQGASPHNLCVLVAESEAAQVVKALHENLFEGA

SEQ ID NO: 13565 - protein, 336 aa, Nostoc sp. PCC 7120
MRVKLSPGLTYCFMTSVVSSARRTIRIGSRKSQLALVQTYWVREQLQNSFPDINFEVHTMSTQGDKILDVALAKIGDKGLFTKELEVGMINEEIDFAVHSLKDLPTNLPEGLALAAITERENPADALVVHENFKDKQIDTLPAGAVIGTSSLRRLAQLRNQFPHLTFKDVRGNLNTRLAKLDAGEYDGLILAAAGLQRLGMGDRVHQILPKEISLHAVGQGALGIECRADDAELITVLKAIEHPETRDRCLAERSFLRSLEGGCQVPIGVNTEINGNELILTGVVASVDGQNLVKDTVSGNASDAEAIGIRLAELLREQGAQEILNTIFAEIQRGS

SEQ ID NO: 13566 - protein, 499 aa, Legionella pneumophila str. Paris
MIRNSMKSHTELLSWNLLQKEADRVRLNSDSLTCVVPDSNNYESSKQINCIEYDYSRQRVNRTIIDLLIDLANEVKLQEKIDNLINGKKINISENRPALHTALRDLGNKSIMIDGLDIMSAVINTREKIKVISNQIREKKWLGHSGLPITDIVNIGIGGSDLGPRVCINALSNYISKEFNYHFISDVDPASFNDVIAKINPQTTLFIVSSKSFTTKETLLNARKAFALYEDTASIDQHFIAVTAHPERAYQMGIKTVLPIWDWVGGRFSFCSAVNLITAIAIGYEQFVELLAGAHDVDTHVQFTDFKNNIPVLMALIGIWNNNFLNIHNLLILTYSKKLEYFVPYVQQLDMESNGKSIDVNGSMVDYATGPIVWGGLGNQAQHSYFQLLCQGTHRCVGDFITLKTNDEHEINSMCHYKMKVLSEGIQTIENPYGYIPGNMPMNHLILSDCSPYTLGALVALYEHKIFVQSVIWNINPFDQPGIESAKSAHREITLSSES

SEQ ID NO: 13567 - protein, 212 aa, Carica papaya
  misc_feature (1)..(1): Xaa can be any naturally occurring amino acid
XPEYVDWRQKGAVTPVKNQGSCGSCWAFSAVVTIEGIIKIRTGNLNQYSEQELLDCDRRSYGCNGGYPWSALQLVAQYGIHYRNTYPYEGVQRYCRSREKGPYAAKTDGVRQVQPYNQGALLYSIANQPVSVVLQAAGKDFQLYRGGIFVGPCGNKVDHAVAAVGYGPNYILIKNSWGTGWGENGYIRIKRGTGNSYGVCGLYTSSFYPVKN

SEQ ID NO: 13568 - protein, 552 aa, Paxillus involutus
MSGKLATEYSSWKKLQQIYDAEHPRLILKELFSQDPHRFSKFSKEYVDPTDPNTTFLLDYSKNLVTQPILDTLLSLASEAQLETYRDKMFAGERINTSEDRAVLHVALRNFDDFKIQENGVEEVASVLAHMKEFSEAIRSGSWKGYTGKTINTIVNIGIGGSDLGPVMVTEALKPYAKRDLTALFVSNIDGTHLAETLRECDPERTLFIIASKTFTTQETITNAESARAWFLSFAKDKAHVAKHFVALSTNTKAVTAFGIDEANMFQFWDWVGGRYSLWSAIGLSIALYIGYDNFESLLKGAHGMDKHFKETPLESNLPVLLAVVGVWYNDFYGAQTHALLPYDQYLHKFADYFQQGDMESNGKFVTKSGERVDYQTGPIIWGAAGTNGQHSFYQLVHQGTKLIPADFLAPATSHNPIADSKHHRILLSNFFAQPEALAFGKTEEEVRKELGSGASEALVKSKVFEGNRPSNSIMFPLLTPRTLGALIALYEHKIFTQGVIWGINSFDQMGVELGKVLAKNILSQLGKPSDVTGHDSSTAGLIHYYQKNRKE

SEQ ID NO: 13569 - protein, 501 aa, Kluyveromyces lactis NRRL Y-1140
MNFKLNWVTLFCTALWLHFATANKGTITEKQNQICSGMYSKEDWSGRVDPYISFDLKKLNKEGISVVIFDFQDYIHIGAKTKAGVVKYICDEEAIKENLCQEKNKNQFIISPEAYDPDSDTEKSLSADIHTFYVGNTGLVKDKYAIKKTGYYCVGTYAKDTGISYKAEVNFRNSFGNLAASEINKLPLYGLLAIFYVVAMALYLFAFWKHKHELLPLQKYLLAAFVFLTIDTIFIWGYYDLKNTKGSTAGTTVYMVIVSILNSAKITMSLFLLLVICKGYGVVYPKLNKTTMRRVQFFSVLTFAISVAALIQNYMTPSDSTSMVPLFFFIPLGICFMIFYFLILQSLDQTVKYLKQQKQIVKLGMYKKLIIIFYVALFVIFGGIILSSFVLIGMSSIEMVEQHWRTRFFFVDFWPSLVYYAVFVALSFTWRPTSTSYMLAVSQQLPTDPENVADFDLDDLQSLEQEWNQEYEQPAGSEPNEADLNFSDDENDKKKPVQPSA

SEQ ID NO: 13570 - protein, 113 aa, Xylella fastidiosa Temecula1
MSDYVLHISDANFDAMVLLSDQPVLVDFWAKWCGPCKIISTLLDDLAQSYEGRLKIAKVDIDENRALAIKYHVCSIPMLLLFKDGQVQITQTGAVGKGRLTQMIDKVLANTDS

SEQ ID NO: 13571 - protein, 291 aa, Clostridium perfringens
MELIIATRKSKLAQVQTEKVMELLKEKENVDSKKLLVMTEGDRRLDVSLNKIGGKGLFVKEIELALLNKEAHGAVHSMKDVPFELPSEFELVAMPEREDIRDAFVSLNGSTLSNLRKGARIGTSSIRRAEQLKLFRDDLEIVPIRGNVQTRIKKITEENLDGIILAAAGLKRLGMEDVISDYFDPKVFLPAIGQGALGIECLKGGEFNDYFKALDSKEVRTTVEAERSFMKVLNGGCHSLIGAYSEVKDNDLYMIGTFTVNNRIVKKDILGNKEDNILLGKKLAEKILGEV

SEQ ID NO: 13572 - protein, 377 aa, Candida albicans SC5314
MSADGEFTRTQIFGTVFEITNRYTELNPVGMGAFGLVCSAVDRLTGQNVAVKKVMKPFSTSVLAKRTYRELKLLKHLKHENLITLDDIFISPLEDIYFVNELQGTDLHRLLNSRPLEKQFIQYFTYQIMRGLKYIHSAGVIHRDLKPSNILINENCDLKICDFGLARLQDPQMTGYVSTRYYRAPEIMLTWQKYDTEVDLWSVGCILAEMIEGKPLFPGKDHVHQFSIITELLGSPPADVIDTICSENTLRFVQSLPHRDPIPFSERFASCTHVEPEAIDLLAKLLVFDPKKRISAVEGLTHPYMEAYHDPTDEPVCESKFDWSFNDADLPVDTWRVMMYSEILDFHQTVGVANETEGSEQPDSQVEQNNLDSANGA

SEQ ID NO: 13573 - protein, 294 aa, Zymomonas mobilis subsp. mobilis ZM4
MSEDSSTDNGGGLWRGLRNFLFHEEKEPTLREVIEKAIEEHEHDAPDRDDLSPIERRMLRRLLHFGRRSAGDVGTPRADIVAVPDDINGQDLIAAFANSGLSRLPVYKETLDDIIGMLHVKDIFSLMAEGQRDNFDLKSLLRQPRYVPETMGVLDLLAEMRATRTHMAIVLDEYSGTEGLITIEDLVEEIIGDIEDEHDEAPTALLTSRPDGIWEAEGRTELEDIAEWIDPHLSEVEEDVDTIGGLATVLAGHVPQRGEILEHPSGWRIEILAGDSRHVERVRLYPPKKNPDED

SEQ ID NO: 13574 - protein, 119 aa, Oryza sativa
MARPANNNYAAAVMVVALLVAAPAASAVTCGQVVSMLAPCIMYATGRVSAPTGGCCDGVRTLNSAAATTADRQTTCACLKQQTSAMGGLRPDLVAGIPSKCDVNIPYGISPSTDCSRVH

SEQ ID NO: 13575 - protein, 409 aa, Bacillus thuringiensis serovar konkukian str. 97-27
METIVQKFGGTSVGSVERIQHVANLIIEEYERGHSIVTIVSAMGKSTDELVALANAITENPSKREMDMLLSTGEQVTISLLTMALQAKGYNAISLTGWQAGITTESVHSSARITDIHTDRIQSYLAEGTIVIVAGFQGVSENHEITTLGRGGSDTTAVALAAALNAKKCDIYTDVTGVYTTDPRVVKDAYKLDEISYDEMLELANLGAGVLHPRAVEFAKNHNVILEVRSSTEQENGTIVKGECNMEQQSIVKGIAFEDNITRITVKGLEQGSLSTVFSTLAAAHINVDIIIQSITNEGTVHLSFSIHSNDLRETLKVLEQNQEALHYESVEYENHLAKVSIVGSGMVSNPGVAANMFTTLKEEDIHIKMVSTSEIKVSVVIDRLHLVTGVEALHQSFMAKIEPLVQLI

SEQ ID NO: 13576 - protein, 917 aa, Pseudomonas syringae pv. tomato str. DC3000
MLTKLGIKGRELLLTILPASLMAAMLGGYFTWMQLSELQSQLLLRGEMIAQDLAPLSASALGRKDKVLLSRIATQTLEQPDVRAVSFLDVDRSPLAHAGPTMISPTPIGNSSQLLNSTGTDATRYLLPVFGNQRHLTSPIIPAEADTLMGWVDVEISHNGTLLRGYRSLFASLLLIFTGLAITAVVAVRLSRTINGPMSQIKQAVSQLKDGNLETRLPPLGSRELDELASGINRMAATLQNAQEELQMSIDQATEDVRQNLETIEIQNIELDLARKEALEASRIKSEFLANMSHEIRTPLNGILGFTHLLQKSELTPRQFDYLATIEKSADNLLSIINEILDFSKIEAGKLVLDNIPFNLRDLLQDTLTILAPAAHAKHLELVSLVYRDTPLALSGDPLRLRQILTNLVSNAIKFTREGTIVARAMLEDETEEHAQLRISVQDTGIGLSSQDVRALFQAFSQADNSLSRQPGGTGLGLVISKRLIEQMGGEIGVDSTPGEGSEFWISLKLPKAREDKEESLNLPLEGLRAAVLEHHDLARQALEHQLEDCGLHTVVFTNLENLLNGVTAAHETPAAIDLAVLGVTTLEISPERLRQHIWDLENLNCKVMVLCPTTEYALFQLAVHDVYTQLQAKPACTRKLQKALSELIAPRAIRADIAPPLSSRAPRVLCVDDNPANLLLVQTLLEDMGAEVMAVEGGYAAVNAVQQEAFDLVLMDVQMPGMDGRQATEAIRAWEAERGQSSLPIVALTAHAMANEKRSLLQSGMDDYLTKPISERQLAQVVLKWSGLALRNPAPERQNESLEAHVGPLVLDPEEGLRLAAGKADLAADMLAMLLASLDADREAIRVARASQDVQALIERIHRLHGATRYCGVPQLRTACQRAETLLKQDAPHTGDALDDLDKAIVRLETEARVTA

SEQ ID NO: 13577 - protein, 394 aa, Solibacter usitatus Ellin6076
MAGKRIGILTGGGDVPGLNSVIKTVVYRGSEIGCEVIGIRRGWEGLTHVNLQDPASRTRYVLPLNRENTRTIDRTGGTYLHSSRTNPSKMKKLPPVLEGQDFPKVTSTKKGVTSEVFDVSKAVLKNIETLNLDYLIAIGGDDTLSYAAELDRQGFRVIAVPKTMDNDVQNTEYCIGFSTAITRAMDAIERQRTTVGSHERIGLFRVFGRDAGYTALYTAYVTSVRCCIPEHKVDLPKLIDLLVTDKKNNPSNYSLAILSEGAEWVGYTVKEYGEADAFGHRKKMSVAEDLSNEIKNSTGEETIVSDLTYDLRSGSADFVDRMVASTFAGMAMDAIQEGKHGLMTAISNGSYTMVGIPDPKLGPRRVDVASMYNTDRYRPVYDHKLGLPIFLTRA

SEQ ID NO: 13578 - protein, 220 aa, Spinacia oleracea
SISSSFVRHVRISSEFEQEEDVMGDDDAGRQPNFSPDLKIFVGNLPFNVDSAELAGLFGAAGTVEMVEVIYDKLTGRSRGFGFVTMSSVEEVEAAAQQFNNYELDGRTLRVTEDSHKDMTLPRVESECDSFGSSNRVHVGNLSWKVDDDALKTLFSETGDVVEAKVIYDRDTGRSRGFGFVTYNSANEVNTAIESLDGVDLNGRSIRVTAAEARQRRGPK

SEQ ID NO: 13579 - protein, 447 aa, Geobacter metallireducens GS-15
MESVLGELAVIFLLILGNGFFAGSELAIISARKSRIAQLVAAGDPKAKIVEQLQDDPHRFLATVQIGVTLVGSLASAVGGATAVRYLKPLLEGSSIKFFHNAAEPLSIGIVVVLISYFSLIFGELVPKTVGLQYADRMALHVAKPINFMARVTGVVVSFLTLSNRAVLAVLGIKAEGDQAFVTPEEVQHIVAEGHEAGVFSSTEQEFIRNIFDFTHTCVREVMVPRTRVVALDLGLSRDELVNTVLENKYSRYPVYRESIENVTGFIHGKDLLGGIVTDPAFDIKSIIRPPFYVPEGKKVNELLKEMQRKRIHMALVVDEYGGISGLATTEDLLEELVGEIEDEHDIGEPGSIQRLPDGSLLVDALVSISDLAEHLEIKLGDDIPYDTLAGLILDRLGRFPEKGERVEWDRFTLICEEVKKTAVVKVRIVETVPSDSGHEEDGDVKV

SEQ ID NO: 13580 - protein, 321 aa, Nostoc punctiforme PCC 73102
MPTANDFKDYYNILGVSKTATSDEIKRAYRKLARKYHPDVNPGNPEAEEKFKDINEANEVLSNPEKREKYDSFGQYWKQAEASGTPPGGTSTYAENFDQYSNFDDFINDLLGGLGGRTRAGRTYYRTSARQPDDFGSFGSQAPAPDSEAAIALSFSEAFHGVQKRLQLDDETINVRIPAGAKPGSRIRIKGKGRPSPFSQQRGDLYLTIELLPHPFFQFSDDNLTCEVPIRPDEAVLGAQIQVPTPEGRVTLSVPKGVRSGQSLRLRGKGWTQPKGGRTDLIVKLQIVSPKELSEIERDCYEKIQANSSFNPRTALEGVTL

SEQ ID NO: 13581 - protein, 173 aa, Arabidopsis thaliana
MCGLYWIFRFKLCLEMGEIGFTEKQEALVKESWEILKQDIPKYSLHFFSQILEIAPAAKGLFSFLRDSDEVPHNNPKLKAHAVKVFKMTCETAIQLREEGKVVVADTTLQYLGSIHLKSGVIDPHFEVVKEALLRTLKEGLGEKYNEEVEGAWSQAYDHLALAIKTEMKQEES

SEQ ID NO: 13582 - protein, 119 aa, Cicer arietinum
LVNVMKSFENLNHWREEFLIQASPSDPENFPFVVLGNKIDVDGGNSRVISEKKAKAWCASKGNIPYFETSAKEGFNVEAAFQCIAKNALKNEPEEEMYLPDTIDVGSGGRQQRSTGCEC

SEQ ID NO: 13583 - protein, 508 aa, Bordetella pertussis Tohama I
MANQTAQVAHWIGGQAAYGAEHGLQDINDPATGEVAAQVGLGGGDTVAQAVAAARAAQPAWAAKSPLHRARVLNRFLALLEDNKETLARMISREHGKVISDARGEVMRGIEVVEFACGAPELMKGAMSINVGGGIDNWVQREPLGVVAGITPFNFPVMVPLWMMPMALATGNAFVLKPSPLDASPSLALAEMLGQAGLPAGVASVVQGGVQAVNALIDHPDVKAVSFVGSTAVAHQIYERSAREGKRVQALGGAKNHLVVMPDADPEGAADALVGAAFGSAGERCMAISVAVFVGGAAEAVMPHILRKARALKVRRGMQEDAEMGAIVSAAARDRIAAYIASGVDEGASLLLDGREIAAADCGEGCGEGCGNGYWLGPTVFDRVQPSMRIYREEIFGPVLACVHVETLEQAIDLINGHDFANGVSLYTDSGTAARAFVQGIEVGMVGVNVPIPVPAAWQGFGGWKQSLFGDLHVYGEEGVRFYTRQKSVMQRWAAKAAGMSFAMPRSG

SEQ ID NO: 13584 - protein, 451 aa, Isochrysis galbana
MLSFSAAALGLNLGAAPAPIVSRAAVSMGPIRVAVVGGGPAGACAAEIFAQAPNIECTMFERKMDNCKPCGGAIPLCMVEEFSLPPDIVDRRVRKMKMISPSGREVDVGRTLKEDEYIGMLRREVMDKYLRDRAVQFGATPVNGLVQKVEFADTDGPYTIKYTKYEEGTPKGTPAEAEFDIIVGADGANSRTAKAIDAGEYNYAIAFQERIKIADEKMAYYEDLAEMYVGDDVSPDFYAWVFPKYDHVGVGTGTVVNRPAISEYQAAIRERCAEKLGPDPKVMKVEAHPIPEHMRPRRVVGRVALVGDAAGYVTKCSGEGIYFAAKSGRMAAQEIVALTAGGSRLPTEQEIKDTYLKKFDQKYGPTYLVLDILQKVFYTNNGAREAFVDMCASDYVQKVTFDSYLYKKVQGNNPLDDVKLLFNTIGSVIKGNAIASPDKTFSNPVESLKRL

SEQ ID NO: 13585 - protein, 284 aa, Pasteurella multocida subsp. multocida str. Pm70
MTAQVISGTELSKTIKSQVAQKIETYTQQGKRSPGLAVILVGADPASQVYVGSKRKSCAEIGIQSKSYDLPETTQESELLALIDELNADTTVDGILVQLPLPKHIDSTKVIERITPEKDVDGFHPYNVGRLCQRIPTLRACTPYGVMKLLETTGIDLHGKHAVIVGASNIVGRPMALELLLAGCTVTVTHRFTKDLAHHVRQADILVVAVGKPKFIPGDWIKAGAIVIDVGINRQEGKLVGDVEYDVALEKAGYITPVPGGVGPMTVAMLMFNTLSAYEMKIAS

SEQ ID NO: 13586 - protein, 365 aa, Zea mays
MGAASPAMWAGLVLVVLLAASGPASAGLPRFAEAPEYRNGDGCPAPVTGAGVCDPGLVHIAMTLDAHYLRGSMAAIYSLLKHASCPESIFFHFLAAEGGGAPAVAELRAAVAASFPSLRFEIYPFRADAVAGLISASVRAALEAPLNYARNHLADLLPRCVPRAIYLDSDVLAVDDVRRLWETRLPAAAVVAAPEYCHANFSRYFTEAFWDDPVLGARVFAGRRRAPCYFNTGVMVIDLRRWRVGNYRQRIERWMEMQKEKRIYELGSLPPFLLVFAGEIEAVDHRWNQHGLGGDNVFGSCRPLHNGPVSLMHWSGKGKPWDRLDAGKPCPLDHTWKSYDLYIGENDSSPASGPSRSALSSLVAW

SEQ ID NO: 13587 - protein, 360 aa, Debaryomyces hansenii CBS767
MNNEQPPPQQAHTRQISFNVSDHYQILEVVGEGAYGIVCSAIHKPTNQKVAIKKIEPFERSMLCLRTLRELKLLKHFNHENIISILAIQRPINFNLFNEIYLIQELMETDLHRVIKTQKLSDDHIQYFIYQTLRALKTMHLANVLHRDLKPSNLLLNSNCDLKICDFGLARSIASSEDNFGFMTEYVATRWYRAPEIMLTFQEYTTAIDVWSVGCILAEMLVGRPLFPGRDYHNQLWLIIEVLGTPNMEDYYNIKLKRAREYIRSLPFVKKVPFANLFNSEAINPLAIDLLENLLVFNPAKRITVDNALNHPYLNIYHDPNDEPISEKIPEDFFDFDKRKDELSIEDLKKLLYDEIMKPL

SEQ ID NO: 13588 - protein, 428 aa, Pseudomonas aeruginosa PAO1
MGTHVIKMPDIGEGIAEVELVEWHVQVGDSVNEDQVLAEVMTDKATVEIPSPVAGRILALGGQPGQVMAVGGELIRLEVEGAGNLAESPAAATPAAPVAATPEKPKEAPVAAPKAAAEAPRALRDSEAPRQRRQPGERPLASPAVRQRARDLGIELQFVQGSGPAGRVLHEDLDAYLTQDGSVARSGGAAQGYAERHDEQAVPVIGLRRKIAQKMQDAKRRIPHFSYVEEIDVTDLEALRAHLNQKWGGQRGKLTLLPFLVRAMVVALRDFPQLNARYDDEAEVVTRYGAVHVGIATQSDNGLMVPVLRHAESRDLWGNASEVARLAEAARSGKAQRQELSGSTITLSSLGVLGGIVSTPVINHPEVAIVGVNRIVERPMVVGGNIVVRKMMNLSSSFDHRVVDGMDAAAFIQAVRGLLEHPATLFLE

SEQ ID NO: 13589 - protein, 391 aa, Prochlorococcus marinus
MTRVGVLLMNLGGPERIKDVGPFLYNLFSDPEIIRLPLPIFQKPLAWFISTLRSSKSQKAYQAIGGGSPLRRITEQQARELQSALRNRGINATSYVAMRYWHPFTESAVEDIKADNINEVVVLPLYPHFSISTSGSSFRELRRLREVDKEFQKLSIRCIRSWFDNTGYIASMAELIEQEISSCESPNAAHICFTAHGVPKSYVEEAGDPYKDEIQDCALLIIDKVEKSLGFSNSYTLSYQSRVGPEEWLKPYTEEVLEELGANGVKELIVVPISFVSEHIETLQEIDIEYKKIALNNGIINFRRVKALDTYPLFINGLADLVASCLSGPEISLDEAAKLPEKVKLYPQEKWQWGWNNSAEVWNGRVAMFVFIICFFELVIGNGPLHYIGLL

SEQ ID NO: 13590 - protein, 572 aa, Ehrlichia ruminantium str. Welgevonden
MENRLSSLISIITEYEIDVLLLYNTDEYQSEYIHESKQRLRWLCGFSGSNATLIISKQEKQHFFTDGRYTLQAQQELDLNYYQIHNVADITPWQWCVRNLPAGVIVGYEAQLFTLNHIKKYTNHHIILKPIDDILIDKLWVRDFNVPQNIVDHDLKYSGIAGYEKASEAIKCLHGKDVALITDTDVISWLLNIRNKDFVFNPSVLSRAILYKDGTIDLFIENVESVNFEYEYIRIYHVDELFSVLESIQSIVIDASTVPMNIFKHLSQKDVLVKDFDACLIIKSIKNNTEISGAVNAHVRDGVAVINLLYWLDVQLSNNARITELDVVAQLLMFRQQQDLFCGDSFATISGFAENGAVIHYKVNNETNKLICKNGLYLLDSGGQYLDGTTDVTRTIAIGEPTYEQIVNFTLVLKGHIAIAMAVFPLKTTGGMLDILARQYLWKSGLDYQHGTGHGVGSFLSVHEGPCAISYGNNIILQPNMILSNEPGYYKDGEYGIRIENLMYVEKCCDKFLRFKQLTCVPIDLNLINVDMLSKEEIDYINKYHDFVYTTVAPYLNAKVKDWLWNSCRSIK

SEQ ID NO: 13591 - protein, 311 aa, Helicobacter hepaticus
MGSPNSLFEVESFLKNMFNDPLILGIKNTFARKMLASFITHSRVEETKKNYQAIGGKSPLTAHTLNLTNKLNELDCKRFYTYAMRYTPPFAYQVLEDIKTQGIQSVVLFSLYPQFSYSTIASSLIDAKAALQKLAFTPTLYEISSYHTHPDYISCIIERIKESLGADNPNEFVLLLSAHSLPQSRIDEGDPYQKQCEENKEVIQKALESEGIVFKKIALAYQSKVGRMKWIGPSTKETITKYKKHKMIIFPLSFTLDNSETEYELKILYASLAKELNVPQYRVCSCFNDNERFAKSIMNILEEHLRGKAEV

SEQ ID NO: 13592 - protein, 608 aa, Medicago sativa
MQKDQLKKDVKEVKFFTDYGDANRYKILEVVGKGSYGVVCAAIDTHTGGKVAIKKIHDVFEHISDAIRILREVKLLRLLRHPDIVEIKRIMLPPSKREFKDIYVVFELMESDLHQVIKANDDLTREHQQFFLYQMLRALKFMHTANVYHRDLKPKNILANANCKLKVCDFGLARVAFNDTPTTTFWTDYVATRWYRAPELCGSFFAKYTPAIDIWSIGCIFAEVLTGKPLFPGKSIVHQLDLITDLLGTPPPEIISGVRNEKARKYLMEMRKKLPVPFERKFPNADPLALRLLQRLLAFDPKDRPTAQEALADPFFKGLAKIEREPSSQPISRMEFDFERRRVSKDDIKELIYREILEYHPQLLKDYISGTEGTNFMYPSAIDQFRKQFAYLEENNGKCGPVIPPERKHVSLPRSTVLSSTIPPSTQPSFAPYANRQITQEAFSIPRAAESNSLSQSKGLRPPPRAPAAKSGRVTGPVLYDNGRSTKDNYDARIFYQNAIPQAISPHCFQRVANAHQTSTKTTPETYKDNSQGKHQLSPKKCNVPARPAFDLNTNPYHQQSKNDLLNDPVTVIDAKLLKAQSQFGAAGAAAVAVAAHRHSAGFQYGLT

SEQ ID NO: 13593 - protein, 362 aa, Rhodospirillum rubrum ATCC 11170
MARIAVVLFNLGGPDSPEAVRPFLFNLFNDPAIIEGPSLTRWVLARLISWRRAPIAREIYGHLGGRSPLLEQTEGQARALEKALSERGHDARCLIAMRYWKPLTREAVKAAKAWNPDQVVLLPLYPQFSGTTSGSSLNQWTVEAEKAGLTAQTHTVCCYATEVGLITALAERTLGGLEQVRESTVGLPAPRVLFSAHGLPRKVVDAGDPYQSHVEATVNAVVAAMAVEGLDYQVCYQSRVGPLEWIGPSTEDEIAKAGREGRPLVVVPVAFVSEHSETLVELDIEYGELAEERGVPKYVRVPTVREHPAFIGGLAGLVERAMRSDGRPCSHLNRRVCEGRWGRCLHLSSRKAEAQSRGGDTK

SEQ ID NO: 13594 - protein, 490 aa, Synechococcus sp. WH 8102
MTTAFHSPTSRRRKTLQEANLLEGPLMLIKSIRGFSSNRAMTWLACAPLALMGLGIFTLSAKAEELPDLNAAFLANNLWLLVATILVIFMNAGFAMVEAGMCRQKNAVNILAKNLFVFALAVTAYWFVGYSFMYGDAAIDGWLYFGGLFFDPTVTAETISDAGLVPTVDFLFQAAFAGTAATIVSGLVAERIKFGEFVVFALILTAFIYPVAGSWEWNGGWLNSVGNAEFIDFAGSSIVHSVGAWAGLVGAALLGPRIGKYVGGNVQAIPGHNMSIATLGALILWIGWYGFNPGSQLAMDQWVPYVAVTTTLGAAGGAIGATVISTITSKKPDLTMIINGILAGLVSVTAGCGNLTLTGSWVAGLVGGIIVVFSVSALDSAGIDDPVGAFSVHGVCGVWGTLVIGLWGFDVQGDGSPLGLLVGGGIEQLGIQALGTAAYAIWTVVTCFIAWQIIGALFGGIRVTEQEETEGLDIGEHGMEAYAGFSTTNN

SEQ ID NO: 13595 - protein, 104 aa, Campylobacter lari RM2100
MGKYIDLTAENFAQAKEGVALVDFWAPWCGPCRMLAPVIDELANDFDGKAKICKVNTEEQGDLAAQFGVRSIPTIFFFKDGEVVDQLVGAQSKQVLADKLNSLL

SEQ ID NO: 13596 - protein, 313 aa, Campylobacter lari RM2100
MMLDLAIIGGGPAGLSAGLYATRGGLKNVVMFEKGTPGGQITSSSEIENYPGVAQVLDGISFMAPWNEQCMRFGLKHEMIGVEQISKNTDGSFNIKLENGKVEQAKAVIVCTGSTPRRAGFKGEDEFFGKGVSTCATCDGFFYKNKEVAVLGGGDTALEEALYLANICSKVYLIHRRDEFRAAPSTVEKVRNNDKIELITNAVVDEVCGDNMGVNKVKIAFNDGSKRELDVPGIFTFVGLNVRNEILKQENGEFLCAMEEGGQVSVDLKMQTNIAGLFAAGDLRKDAPKQVICAAGDGAVAALSALAYIENLH

SEQ ID NO: 13597 - protein, 484 aa, Burkholderia sp. 383
MSTVLKPIPASDVRYEALRIDGQRVWRDAVIDVRNPYDGSLVGTVPKATLDDVRRAFAVARAYRPTLTRHDRSAILRRAADIVRARTAEIAGLITAESGLCVKDSTYEAGRVADVLTFGAGEVLKDDGQIFSCDLTPHGKKRRVYTQRDPLLGVISAITPFNHPMNQVAHKIVPSVATNNRMVVKPSEKVPLSCYLFADILYEAGLPPQMLQVLTGDPKEIADELITNPAIDLITFTGGVSIGKSIASRMGYRRAVLELGGNDPIIVMDDADLDEASTLAVSGSYKNSGQRCTAIKRMLVHESVADRFTELVVEKTRAWSYGNPADPSVDMGTVIDEAAAKFCEQQVNDAIARGARLLVGNVRNGALYSPTVIDRVTPDMPLVKYETFGPVSPIMRFSDIDEAIRMSNSTDYALSSSVCTNRFDHITRFITELEVGSVNVREVPGYRLELTPFGGVKDSGLGYKEGVQEAMKSFTNVKTYSLPW

SEQ ID NO: 13598 - protein, 1742 aa, Aspergillus nidulans FGSC A4
MEAVDTTKRLSSLRQLMREHKVDVYIVPSEDSHQSEYIAPCDGRREFISGFSGSAGTAIISLNEAALSTDGRYFNQAAKQLDNNWTLLKRGVEGVPTSQEWITQQAEGGKVVGVDPALITGAAARSLSDALQKSGASLIGVSQNLVDLVWGNDRPAPPREKVRVHPEKYAGKSFQEKVSDLRKELENKKAAGFVISMLDEIAWLLNLRGSDIPYNPVFISYCIVTPTKVELYIDDEKLTPEVKAHLGDDVIIKPYDSIFADAKALFEAKKKDPDAPSSKFLLSNRASWALNLSLGGEDHVEEIRSPIGDAKAVKNEVELAGMRACHIRDGAALIEYFAWLENELVNKKSTLDEVDAADKLEQLRSKQELFAGLSFDTISSTGPNGAVIHYKPEKGSCSVIDPNAIYLCDSGGQYLDGTTDVTRTFHFGQPTELEKKAFTLVLKGCIGLDSAVFPKGTSGFALDVLARQHLWKEGLDFLHGTGHGIGSYLNVHEGPVGIGTRVQYTEVPLAPGNVISDEPGFYEDGKFGIRIENVIMVREVQTTHKFGERPWLGFEHVTMCPIGQNLIEPSLLSDSEIKWLNDYHAECQRFGMTGRSGYANGYGYSDTSRYDRGDGGYGNNSNRGVNGYESGGARDRRPGGYGGFYPEALQQPSLSPAPSPERRRERYDRDDRSYSSSRSRTRGPDADRERRAQRAGESRARGDTSRVPGSTINQGANVGGSQAVENVLQSIQREWDFVATDDCVPVQVALQLMDTSTLGKAEREPDFLNVHQTIQQTLKAIVNEHHQGFNSSIGTYHKIQASIQSSQSRVRNLKHALEDAKGGLMSTKPELKELATSSQKYDDIIQLFSQIQEIQSLPEKLESRLSDKRFLGAVEVLHDALRLLRRSELENIGALADIRAYFENQESSITDILVEELHDHLYLKSPYCVDRWKPPAPETESNGVNGAGAGASSWERPVYGFLARLDASKPMVEDASRNPEADTFSYLQLLIEALNKMGHLDIAVDRIEQRLPVELFTVVDKTNAEIDARYPLPRGFMAQDGKTDSPTEMIQKRGHVLSEFLWTLYAKFEAIAEGHRVVHDVIAAIVEREGIPKSSSLAGGFKELWKLYQSEIRSLMHDYLATDGDSSIRPDEEADARRQFYSGYRDKNKARLPPLEKWSVMKAEQNELDEILRSSVPGLISKSEQKSDEDGPTDSRQGTGHKILIEPSVFNMSLLLPPSLSFIQRLKDIVPVDSDMFTGSLTSFLDDFLVNVFLPQLDETVTDLCTLSFITPDAFTEDPQWSMVSPKPVFKGTVKFMSVVREFSRMLSSIPHDQAFTQLLLSQIVTYYDKCCGWYKTIVTKVSGRGDVQLKAGAAFAESGPVHDLVVELWRGTNPNKQELIDKETSLLIKETDRVPLEPVDIISDAKSVVSLSLLHNSMQWLASSLSKLRQPSIDSRSSQPGSGPTNRRWTLISAMKPKRDSINQSIYLPLNQETATAFDTTLQSLRDLALTAIFALHLDIRCGIIHMLTRTMAGPNPPAVRNSEPATPSPPPSGGCWHLLTSQPTAASPAILELNKDLIAFDTNISTYLGSAQRHFITSGLARFVDRVFVASTRYIWAMNENGALRLQLDVLVLQQNLKNVIIDPTQIPPPDQARTPQAELYREVVTLPRSAKFLDWFLEGAEKALDYAKEEKERMAAHGDQALADGDPFSYEELKVLVDLCFSENLRGPRSEDNREDFMASKKASADALLRLNEIMWDSK

SEQ ID NO: 13599 - protein, 518 aa, Saccharum hybrid cultivar H65-7052
MAGGGMAALGVKTERAAQYKGRMTLAVAMTCLVAAVGGAIFGYDIGISGGVTSMDPFLEKFFPVVFHRKNSGGKNNYCKYDNQGLAAFTSSLYLAGLVASLVASPVTRNYGRKASIVCGGVSFLIGAALNVAAVNLAMLILGRIMLGVGIGFGNQAVPLYLSEMAPAHLRGGLNIMFQLATTLGIFTANLINYGTQNIKPWGWRLSLGLAAAPALLMTLAGLFLPETPNSLIERGRVEEGRRVLERIRGTADVDAEFTDMVEASELANTIEHPFRNILEPRNRPQLVMAVCMPAFQILTGINSILFYAPVLFQSMGFGGNASLYSSVLTGAVLFSSTLISIGTVDRLGRRKLLISGGIQMIVCQVIVAVILGAKFGADKQLSRSYSIAVVVVICLFVLAFGWSWGPLGWTVPSEIFPLETRSAGQSITVAVNLLFTFAIAQAFLSLLCAFKFGIFLFFAGWITVMTVFVCVFLPETKGVPIEEMVLLWRKHWFWKKVMPVDMPLEDGWGAAPASNNHK

SEQ ID NO: 13600 - protein, 551 aa, Triticum aestivum
AYLGDSIEQVCTKKQAGTGPEFPGYRRPTRPHTMGNRTSRHRRAAADQPATAPPPTAQPKPQPPPKPQTAPAPAPTPEAGQVAMGRVLGRPMEDVRATYTFGRELGRGQFGVTYLVTHKATGQRFACKSIATRKLVHRDDIEDVQREVQIMHHLTGHRNIVELRGAYEDRHSVNLIMELCEGGELFDRIIARGHYSERAAALLCREMVSVVHSCHSMGVFHRDLKPENFLFLNNKEDSPLKATDFGLSVFFKHGEQFKDLVGSAYYVAPEVLKRHYGAEADIWSAGIILYILLSGVPPFWADNEDGIFEAVLLGHIDFSSDPWPSISNGAKDLVKKMLRQDPKERLTAAEILNHPWIREDGEAPDKPLDITVISRMKQFRAMNKLKKVALKIVAENLSEEEITGLKEMFRSLDTDNSGTITLEELRSGLPKLGTKISESEITQLMEAADVDGNGTIDYSEFVSATMHMNRLEKEDHILKAFEYFDKDHSGYITVDELEEALKKYDMGDDKTIKDIIAEVDTDHDGRINYQEFVAMMRNNSPEIVPNRRRMF

SEQ ID NO: 13601 - protein, 475 aa, Lactobacillus acidophilus NCFM
MNLWQKMNKKEDPRVYENKDGHLVRSLKVKDFLALGVGTIVSASIFTLPGEVAALHTGPAVAISFILAAVAAGLVAFAYAEMAAAMPFAGSAYSWINVVFGEFWGWVAGWALLAEYFIALAFVGSGLSANFRALIAPLGIKLPAALSNAFGTNGGVIDIISLISILLVALLISHGVSRAARVENALVVLKVLAILFFIVVGLTAIKGSNFVPFIPKYRPTAHGPFGGWQGIYAGVSMIFLSYIGFDSIAANSAEAINPQKTMPRGILGSLAIAVTLFVGVSLVLIGIMPYQKYANSAEPVGLALRYAGHPIVAIVVQTIAVLGMFTALIGMSMAGSRLIYSFGRDGMLPKWLGKLNADRRPNNALWTLTVIGILLGAFFPFSMLSQLVSAGTLIAFMFVSLGIYKLRPREGKDIDDPSFKMPFYPVLPALGFLAALVVFLGLDYQAKLYAGIWFILGLLIYLGYGVHHSVLNNKK

SEQ ID NO: 13602 - protein, 420 aa, Streptococcus agalactiae NEM316
MSKEAILNFLQAKGEPTWLQELRLKAFEKIEELELPVIERVKFHRWNLGDGTILENDYTANIPDFTELGNNPKLVQIGTQTVLEQVPMELIEKGVVFTDFYSALEEIPEVIERYFGKARPFEEDRLAAYHTAYFNSGAVLYIPDNVEITQPIEGLFYQDNQSKVPFNKHILLIVGKNAKVSYLERFESIGDGTERTSANISVEVIAQAGSQIKFASIDRLGENVTTFISRRGRHSSDATIDWALGVMNEGNVVADFDSDLIGDGSHANLKVVAASSGRQVQGIDTRVTNYGCNSVGHILQHGVILERGTLTFNGIGHIIKGAKGADAQQESRVLMLSDKARSDANPILLIDENDVTAGHAASIGQVDPEDLYYLMSRGLNQKTAEQLVIRGFLGTVIAEIPVKEVRDEMIAVIDTKLEKR

SEQ ID NO: 13603 - protein, 553 aa, Coccidioides immitis RS
MSAFDQATSLGAWKALEEHHSSAGKDISLKEEFQKDPQRFSKFSRTFNNPADGSEILFDFSKNLITDETLKLLVNLAKEAGVEKLRDEMFNGDPINFTENRAVYHVALRNVSNGPMQVNGKSVVEEVNSVLQHMKEFSEQVRSGEWKGYTGKKIKTIINVGIGGSDLGPVMVAEALKPYADRSLTVHFVSNIDGTHIAEALKESDPETTLFLIASKTFTTAETITNAQTAKAWFLATARDEAHIARHFVALSTNEAEVTKFGIDKRNMFGFESWVGGRYSVWSAIGLSVALYIGFDNFHQFLAGAHAMDKHFRETPLEQNIPVLGGLLSVWYSDFFGAQTHLVSPFDQYLHRFPAYLQQLSMESNGKAITRSGDFVKYTTGAILFGEPATNAQHSFFQLLHQGTKLIPADFIMAAESHNPVENGKHQRMLASNFLAQAEALMVGKSPDQVRAEGAPENLVPHKTFTGNRPTTSILAQKITPAALGALIAYYEHVTFTEGAVWNINSFDQWGVELGKVLAKKIQSELETKGAGSGHDASTSGLIAAYKKKAGLL

SEQ ID NO: 13604 - protein, 472 aa, Streptococcus agalactiae NEM316
MSEINEKVEPQPIDLGEYKFGFHDDVKPIYSTGKGLNEAVIRELSAAKGEPEWMLDFRLKSLETFNKMPMQTWGADLSDIDFDDIIYYQKASDKPARDWDDVPEKIKETFERIGIPEAERAYLAGASAQYESEVVYHNMKEEYDKLGIVFTDTDSALKEYPELFKKYFAKLVPPTDNKLAALNSAVWSGGTFIYVPKGVKVDIPLQTYFRINNENTGQFERTLIIVDEGASVHYVEGCTAPTYSSNSLHAAIVEIFALDGAYMRYTTIQNWSDNVYNLVTKRATAKKDATVEWIDGNLGAKTTMKYPSVYLDGEGACGTMLSIAFANKGQHQDTGAKMIHNAPHTSSSIVSKSIAKGGGKVDYRGQVTFNKDSKKSVSHIECDTILMDDISKSDTIPFNEIHNSQVALEHEAKVSKISEEQLYYLMSRGLSEAEATEMIVMGFVEPFTKELPMEYAVELNRLISYEMEGSVG

SEQ ID NO: 13605 - protein, 368 aa, Pseudomonas putida KT2440
MNMSDTFLNPVTTQTWANGRHIVRCVKVIQETWDVRTFCFMADQPIMFFFKPGQFVTLELEIEGKPVMRSYTISSSPSVPYSFSITVKRVPGGLVSNFLHDTMHEGAELPVHGPVGLFNAIDFPAGKVLYLSGGVGITPVMSMARWFYDTNANVDMVFVHSARSPKDIIYHRELEQMASRIPNFSLHIICEKHGLGEPWAGYRGYLNQRLMELIAPDYMERVVFCCGPTPYMTAVKRMLEAVGFDMKNYHEESFGATPPEAKADAVEHAEQAADAPELDVSDLNLVEFIGSEKSIRIAPGETVHAAAAKVGLMIPKACGMGICGTCKVLKLGGEVEMEHNGGITEEDEAEGYILSCCSVPKGDVRIDY

SEQ ID NO: 13606 - protein, 143 aa, Arabidopsis thaliana
  misc_feature (6)..(6): Xaa can be any naturally occurring amino acid
  misc_feature (57)..(57): Xaa can be any naturally occurring amino acid
  misc_feature (116)..(116): Xaa can be any naturally occurring amino acid
  misc_feature (119)..(119): Xaa can be any naturally occurring amino acid
  misc_feature (121)..(121): Xaa can be any naturally occurring amino acid
  misc_feature (124)..(124): Xaa can be any naturally occurring amino acid
MASSMXSSTAVVTSPAQATMVAPFTGLKSSASFPVTRKANNDITSITSNGGRVSCMXVWPPIGKKKFETLSYLPDLSDVELAKEVDYLLRNKWIPCFEFELEHGILCTREHGNTSXYYXLXGTXQLWKFHFRSFKELRPGLFW

SEQ ID NO: 13607 - protein, 1055 aa, Dechloromonas aromatica RCB
MNLRKVFLSVLLALAGWLVLIGGVTVGALSAYNEAYNAARHRQESLVLMNGIRQEVDLLSRLVSSYVTTANPRFLIYYYDILAIREGSKASPDAGSATYWEQVISGLRTYAPSPPGPGVALIERTSRLGFDAEEQTLLRRVFLITEQMKEVEQIAFAATQGLYDPVKREVVSEAEPQREFANNLLHEGHYLKLRAELAMSVEDLAKQVDLRTIRDLVQAGEMLRGWIIAALLLLVGAGAVLVISYNYLKKHLLAPLTVLHQTAIALSKKAFNQRVGDLQGVEEVRALAATIDSMAAAIEADLEQRELVQRALRQARARAEVAAEAKSIFLANMSHEIRTPMNAILGMAYLALKSKLPPRQHDYVSKIHSAARSLLGILNDILDFSKIEAGKVALEAVLFDIETVLQNALFMVQQKVEGKQIELILDFKPSRSMRFLLGDPLRLGQVLINLLSNAVKFTERGHVRLVVSEAACDGATSTISFRVEDTGIGMSPEQVGRLFQEFSQADGSTTRKYGGTGLGLAISKRLVAAMSGEIGVESTLGKGSVFHFSIQLPFASEEAAEESAPEVLACQRALVVDDYPEARDSMVAMLRSMGCQEVDQAADGAGAIARLATATAKGEDYDLLLLDWLMPDMSGGEVIEALQAKGLALPARTIVVSAADSAVLRQEAVHPGVSEVIQKPLLPSVLRRICAAELAESGGGFSEHGGESSGSLQGLSVLLVEDNEVNQQVAGEILRSWGARVDVAANGQIALDLLYSHAADYYAAVLMDLEMPVMDGREATRRLRDDERFHDLPVIVMTAHVAGHGMRDRLVPGVSGYIAKPFEPEELQAILMPYWHGLQSADLASVAAPEADVDEGFVLALESLFEIDSVVLLRRFAGRLPFLARALGRFVEDCRNWSGRLNEMLARGELESAQRQVHTLKGLSGTFAMARLQSALIELELAMKAGGAEFSGEIAEVDTQLQALLTSLKRLPGCCSEPVAISSLGALDAELTKLCEQLRQGDGEAEEVWRQIKESMATIYPARQIAAIDHAISQWNFDEALSLIDQVSKGGGGQS

SEQ ID NO: 13608 - protein, 570 aa, Bacillus thuringiensis serovar konkukian str. 97-27
MKQYTTYEKLQCEEVTGAGHVIQCLKKLGVTTVFGYPGGAILPVYDALYESGLKHILTRHEQAAIHAAEGYARASGKVGVVFATSGPGATNLVTGLADAYMDSIPLVVITGQVATPLIGKDGFQEADIVGITVPVTKHNYQVRDVNQLSRIVQEAFYIAESGRPGPVLIDIPKDVQIKKVTSFYNEVIEIPGYKLEPRPDSMKLREVAKAISEAKRPLLYIGGGIIHADGSEELIQFARKKGIPVVSTLMGLGAYPPGDPLFLGMLGMHGTYAANMAVTECDLLLALGVRFDDRVTGKLELFSPHSKKVHIDIDPSEFQKNVAVEYPVVGDVKKALHMLLHMSIHTQTDEWLQKVKTWKEEYQLSYKQKESELKPQHVINLVSELTNGEAIVTTEVGQHQMWAAHFYKAKNPRTFLTSGGLGTMGFGFPAAIGAQLAKEEELVICIAGDASFQMNIQELQTIAENNIPVKVFIINNKFLGMVRQWQEMFYENRLSESKIGSPDFVKVAEAYGVKGLRATNATEAKQVMLEAFAHKGPVVVDFCVEEGENVFPMVPPNKGNNEMIMKRWEE

SEQ ID NO: 13609 - protein, 394 aa, Pseudoalteromonas tunicata D2
MLNDMQLQLIKSTLGVLESAGPKLTAHFYQRLFHHHPELQHIFNMSNQKSGRQQVALFEAIAAYAKNIENVAVLVNAVERIAQKHTSMNIQAAHYAVVGMHLLATLEELAPEVFNTEVLAAWAAAYQILADIFIAREAQLYQERADANGGWQATRQFVVAEKIVESELVTSFVFTAKDERAVLAYLPGQYIGLQVRPTHSEYNEIRQYSLSQASNGKNYRISVKREQSPFVGVVSNYLHDEVNLGDEVSLYPPAGDFYWQDRASPVVLISAGVGITPMFAMLETLAKQGYGYEVSFLHACENQAQHSFASQSEALCQRLNAQRFTWYREGVTQLPIFSGQMELAPLASNLPLHDGHFYLCGPIGFMQAIFRQLIALGVVAEQIHYEVFGPHQGM

SEQ ID NO: 13610 - protein, 248 aa, Candida albicans SC5314
MPKLVLVRHGQSEWNEKNLFTGWVDVRLSETGQKEAKRAGELLKEAGINVDVLHTSKLSRAIQTANIALDAADQLYVPVKRSWRLNERHYGALQGKDKAQTLEAYGQEKFQIWRRSFDVPPPKIDPKDEYSQVGDRRYADVDPAVVPLTESLALVIDRLLPYWQDEIAGDLLAGKVVLIAAHGNSLRALVKHLDNISDEDIAGLNIPTGIPLVYELDENLKPTKPSYYLDPEAAAAGAAAVAAQGQKK

SEQ ID NO: 13611 - protein, 285 aa, Geobacter metallireducens GS-15
MSTIIDGKAIAAKLRAEIATEVKILKEKGIIPGLATVLVGEDPASEVYVRMKGNACQELGMHSVKHTLPATTTEAELLALVARLNSDPTIHGILVQLPLPKQINSDTILEAISPVKDVDGFHPYNVGRLMVGKPTFQPCTPYGVMVMLREAGVDLAGKEVVVVGRSNIVGKPVALMCLQQHATVTICHSKTRDLPSKVKEADVVIAAVGVPEMIKGEWIKEGAVVIDVGVNRVGEKKLVGDVEFAAASQRASAITPVPGGVGPMTITMLLYNTLEAAKKTGEGNR

SEQ ID NO: 13612 - protein, 388 aa, Zea mays
MAAAASSALHAVGAVASAKPRSVAPGTCTPPPKANLLTLSPPPRRANRRAKADEAAAAAGSKSGGHELLMFEALREALIEEMNLDPTVCVMGEDVGHYGGSYKVTKGLAEMFGDLRVLDTPIAENSFTGMGVGAAMKGLRPVVEGMNMGFLLLAYNQISNNCGMLHYTSGGQFKIPVVIRGPGGVGRQLGAEHSQRLESYFQSIPGLQMVACSTPYNAKGLMKAAIRSENPVVLFEHVLLYNLKEKIPDEEYICCLEEAEMVRPGEHVTILTYSRMRYHVMQAAKTLVNKGYDPEVIDIRSLKPFDLHTIGNSIKKTHRVLIVEECMRTGGIGASLRSAIIDNFWDYLDAPIMCLSSQDVPTPYAATLEDATVVQPAQIVAAVEQICQ

SEQ ID NO: 13613 - protein, 309 aa, Saccharomyces cerevisiae
MDSKEVLVHVKNLEKNKSNDAAVLEILHVLDKEFFPTEKLLRETKVGVEVNKFKKSTNVEISKLVKKMISSWKAQLIKNKRCRQPQQHHQDHAPGNAEDKTTVGESVNGVQQPASSQSDAMKQDKYVSTKPRNSKNDGVDTAIYHHKLRDQVLKALYDVLAKESEHPPQSILHTAKAIESEMNKVNNCDTNEAAYKARYRIIYSNVISKNNPDLKHKIANGDITPEFLATCDAKDLAPAPLKQKIEEIAKQNLYNAQGATIERSVTDRFTCGKCKEKKVSYYQLQTRSADEPLTTFCTCEACGNRWKFS

SEQ ID NO: 13614 - protein, 160 aa, Glycine max
RFRHSTAIFPSPSSSSTLPFPKPQASAELARRRIVIGVCDGPMLAKKQFAELIQPIEERINNVKTFIKSVKPELEVQAVPITDPFGPSITDENLEAVIVSKETLPGGLAINRRRAERGLSQLKIEVVDLVSGESGEIKLSSSMLRKIEAEKAKQQNTISE

SEQ ID NO: 13615 - protein, 150 aa, Lactobacillus delbrueckii subsp. lactis
  misc_feature (137)..(137): Xaa can be any naturally occurring amino acid
NREIYNFKPLREELIKAGHTFSTKADTEVILHGYEEWGMDGILKRVRGMFAFIIWDDNTQTMYGARDFFGIKPMYYQDVDGHLLVGSELKSFLPFPHFKKELNTEAVKPYLMNQYNDLKETFFKGVYRFQPGHWFEXKDGKMKTHQYWDA

SEQ ID NO: 13616 - protein, 441 aa, Oryza sativa (japonica cultivar-group)
MQHQQRMKQAAAAAQQQQMMQQALLMQQQQAAAVAAAAQQQQAPLFPPHHPHPGLLAAPQIEPIVSGNLPPGFDSSTCRSVYVGNIHLQVTDSLLHEVFQSIGPVEGCKLIRKEKSSFGFVDYYDRRSAAIAIVSLNGRQLFGQPIKVNWAYASTQREDTSGHFNIFVGDLCPEVTDAALFAFFAGFTSCSDARVMWDQKTGRSRGFGFVSFRNQQDAQNAINELNGKWLGNRQVRCNWATKGANAGEEKQNTDSKGMIELTNGSSEGGKDNANEDGPENNPQYTTVYVGNLPHDVNSNDVHRFFHSLGVGSIEEVRVTRDKGFGFVRYSTHEEAALAIQTGNGQLIGGRQIKCSWGSKPTPPGTASAPLPPPAPAPFNPGMSATDLLAYERTLALSKMAANPALMSQHAALKQAAAMGMGAGASQAIYDGGYQSANAVFY

SEQ ID NO: 13617 - protein, 506 aa, Rhodopirellula baltica SH 1
MRGDRMSKAPRTAISPTREENYPEWYQQVIRAADLAENSPVRGCMVIKPWGYQLWENVQRALDDMFKATGHQNAYFPLFIPMSFLEKEAEHVEGFAKECAVVTHHRLEPDPDGGLRPAGKLEEPLIVRPTSETIIGATYAKWVQSYRDLPILINQWANVVRWEMRTRMFLRTAEFLWQEGHTVHATSEEAVEETEKMVEVYRDFAENWMAMPVIVGSKTPLERFPGAVETLSIEAMMQDRKALQAGTSHFLGQNFSKAQEIKFQSESGDIEFAWTTSWGVSTRLIGALIMTHSDDDGLVLPPRLAPTHVVIQPIYKDDSRAEVMEYVQSLRDELAAQTYANAPVRVTIDDRDIRGGEKKWYHVKRGVPIRLEVGPKDIAAGTVFCGIRNQPKSVGIDRAELVATIGEKLATLQQELFDAALKMREDNTVELTSEAEFRDFFADKGDTAITGGFAWCHYCDEDSLQPLLKELKVTIRCVPRSDNATEGTCFLTGKPAAQRAIFAKAY

SEQ ID NO: 13618 - protein, 112 aa, Anabaena variabilis ATCC 29413
MKKVEAIIRPFKLDEVKIALVNAGIVGMTVSEVRGFGRQKGQTERYRGSEYTVEFLQKLKVEIVVEDNQVDMVVDKIIAAARTGEIGDGKIFISPVEQVIRIRTGEKNTEAV

SEQ ID NO: 13619 - protein, 92 aa, Oryza sativa
MSSRRSRSRQSGSSRITDEQISDLVSKLQDLLPEARLRSNDRVPSSRVLQETCNYIRSLHQEVDDLSERLSELLATSDMSSAQAAIIRSLLM

SEQ ID NO: 13620 - protein, 282 aa, Methanosarcina barkeri
MISMKKYDVVIIGAGPAGSYAAYMLAKSKINVLVIDKYSFPRYKPCAGGLTAKAFNSFDFPISKEVKYSTNSIVTSYKNQIFHNISGNKTLVKMIERKEFDDFLIKKAVDSGATFLDGMKVTEITWENAEFSIKTDSEFFRCNYLIGADGTNGIVNRTFNIVERDLYGFAVEINCPVSRDNIGKFNMTFDFGTVPNGYLWIFPKDEYVCVGAYTTNRKMKNIQKYLLDYIEKLGLIPESEKLKGHIIPYYGINYKQPDFPCVLVGDAAGFGEYWTGEGIYMR

SEQ ID NO: 13621 - protein, 145 aa, Anabaena variabilis ATCC 29413
MRLLHTMLRVGNLEESLKFYCDVLGMKLLRRKDYPGGEFTLAFIGYGDESDNTVIELTYNWGVDKYELGNAYGHIALGVDDIYATCESIKNQGGKVVREPGPMKHGSTVIAFVEDPDGYKIELIQLSNQSETVKQDSSEQLVKQG

SEQ ID NO: 13622 - protein, 257 aa, Synechococcus sp. WH 5701
MLIIGSGPAGYSAAIYAARAMLEPIVVQGLQPGGQLTITTDVENYPGFRDVVQGPWLMEEMKAQAEHVGTRMMYDIITSVDLEGGSPFRAVGDSGDEYIADTIVIATGAQAKWLGVPGEQELGGKGVSACATCDGFFYRGKKVAVIGGGNTAVEEALYLTNHSDDVTLIHRRDELRSEKILQDRLFKSPKISTLWNKTVESFEAGENGTLSHLVLKDTQTGETSTLEVDGAFVAIGHAPATELFKGKLPMDESGYLD

SEQ ID NO: 13623 - protein, 391 aa, Phaseolus vulgaris
LFSVDWHRDRINGKQEVMIGYSDSGKDAGRLSAAWALYKAQEELIKVAKDFGVKLTMFHGRGGTVGRGGGPTHLAILSQPPDTIHGSLRVTVEGEVIEQSFGEEHLCFRTLQRFTAATLEHGMHPPVAPKPEWRALMDEMAVIATEEYRSIVFQEPRFVEYFRCATPELEYGRMNIGSRPSKRKPSGGIESLRAIPWIFAWTQTRFHLPVWLGFGAAFRHVVKKDPKNLQMLQDMYNQWPFFRVTIDLVEMVFAKGDPGIAALYDKLLVTEELWSFGERLRSMYEETKRLLLQVAGHRDLLEGDPYLKQRLRLRDSYTTTLNVLQAYTLKRIRDPDYHVNLKPHLSKDYMESSNPAAELVKLNPTSEYAPGLEDTLILTMKGIAAGMQNTG

SEQ ID NO: 13624 - protein, 335 aa, Bacillus halodurans C-125
MATKIGINGFGRIGRNVFRAALNNPNVEVVAINDLTDANMLAHLLKYDSVHGKLDAEVKVDGDSLVVNGHSVKVKAERDPAQLGWGDLGVEVVVESTGRFTNREDAAKHLEAGAKKVIISAPAKDEDITVVMGVNENKYDPANHHVLSNASCTTNCLAPFAKVLNDKFGIRRGMMTTVHSYTNDQQILDLPHKDYRRARAAAENIIPTTTGAAKAVALVLPELKGKLNGGAMRVPTPNVSLVDLVAELDKEVTAEEVNAALKEAAEGDLKGILAYSEEPLVSGDYNGNPASSTIDALSTMVMEGNMVKVISWYDNESGYSHRVVDLVDYIAKQGL

SEQ ID NO: 13625 - protein, 447 aa, Wolinella succinogenes
MKSLIWFRRDLRLEDNRTFEQASGEVLPLFIFDSHLLSPLPKEDRRVGYIYGEVMRLKSELRARGLDLAIFYGEPLKILSRLKEQGFSRLFASQDYDSYALSRDEAARELLDCRFVLDNYLFDPNEVLKKEGSPYTIFSAYYNQSLKILSEGHYAKGLDLPKKLAPYPIPAPPSLESMGFSPLPLLESLKILPQKRLEEFSSKITRYALDRDSLEAEATSGLSLFLRFGTLGVREVIRRLKVWQEEGIKVAPFYRQILWREFYAMLLYHFPHSEREDFKPMQMRWSESQERLERWQKGECGVPLVDAGMRELNHTGFMHNRARMVCASFLTKNLHLHWSWGERYFASKLLDYDVAQNAGNWQWCAGSGADAQPFFRIFNPYTQSLKFDPKGEYVKRWIPELRGISTQNWSSEERWEGLKERYLAPIVSAKRSAQEAKAMQNTLRVSS

SEQ ID NO: 13626 - protein, 434 aa, Agrobacterium tumefaciens str. C58
MSMRVNVTRLSSGLTVVTERMPHLESVALGVWIKSGSRNETTAEHGIAHLLEHMAFKGTARRTARQIAEEIENVGGEVNAATSTETTSYYARVLKDHVPLAVDILADILTESLFDEDELEREKNVILQEIGAATDTPDDVIFDNFSGVAYRDQTIGRPILGTPDTVQSFTSGEIRHYLARNYTTDRIFVVAAGAVDHESFVKQVEERFASLPLVPAAPPVMEKAIYTGGEIRETRDLMDAQVLLGFEGKAYHARDFYCSQILANILGGGMSSRLFQEVREARGLCYSVYAFHWGFSDTGIFGVHAATGGNDLPELIPVIVDELRKSSETIHQDEINRARAQIRAQLLMGQESPAARAGQIARQMMLYGRPIPNEEMMTRLEDITRERLTDLAGRLFFDTVPTLSAIGPLEQLPPLSDITAALSAQQPARIKANG

SEQ ID NO: 13627 - protein, 111 aa, Synechococcus elongatus PCC 7942
MLPVVTAQTFSAEVLQAKDPVLVYFWAAWCGPCRLLTPCLEQWHQTASQNLRVVSINADENFTLANRYRLATLPTLIWFADGRIRDRLEGISDREALQTFLKRYQPVANAV

SEQ ID NO: 13628 - protein, 1023 aa, Dechloromonas aromatica RCB
MTFDNKYPAFSSRLLLTVVLFLALLIAFGAYVRAEKEIDRANELRHQSLQLAAELRQSSDDLTRMARTYVATGQPVYKKYYQDILDIRDGRKARPEGYRGVYWDLVLGGQRQPPADSGKGVELLALMRQAQFSDDEFQKLAAAKAHSDRLATIELEAMRLYEADSPDHQANQEKARLVMHDDAYHRSKMEIMQPIGQVYELADQRTAQAVRASEENAFFLRSLFMAFGLAAIFMLWRTYMALRKTLGGSADDVRSLIVRLGQGDFSMDTAPEAGTENSVIGWLKETSRKLNDMAATTQQSEQQLAQRTRELMLNNRILKRISQGGSLTETLENLARDVESLHPGMLCSILLLDEDGLHLRHGAAPSLADFYCQAIDGVAIGEGVGSCGTAAFIGERVIVEDIQRHEYWRDYVELARRADLGSCWSQPFKNREGRVLGTFAIYHRQPTQPSAAEIALIEDYASLAELAVESAQTESALEKSRELYRLIVDNSNDVIWLMALPAMKFTYVSPSVLRMRGWTAEEIMAQPLEAASTPESTLLIKAQLKKNLELLRAGDMRGRFATTEVDQPCKDGRIIHTEVVTTLLLDESGQPSQILGVTRDVTERKRAEAELEQYRHHLEKMVEDRTAALSDAKEAAEAANRAKSTFLANMSHELRTPMNAIMGMTDLVLRRSTDDRQREQLSKVVQASRHLMAVINDILDLSKIEAERLTLEKIPFRLTEIFDNLKNLVGERVAEKGLLLKISKAPELSNMVFRGDPLRLGQILLNLTGNAVKFTAEGSIALSVSVVEDHPHDVVLRFEVCDTGIGIAAVDQGRLFTAFEQADGSTTREYGGSGLGLAISRRLAKLMGGNIGVESTPGVGSTFWFTARLDKAGPLAGVAAGPSPEMAEAAIRSHHAGSRVLLVEDEPINQEVATEMLKEIGLVVDLATDGEQALDMVQRTGYDLILMDLQMPKMNGIEATQAIRQLPAGAEVPIVAMTANAFTEDRQRCLDAGMNDHIGKPVDPELLFEILLKWLGRGHGDRR

SEQ ID NO: 13629 - protein, 327 aa, Kineococcus radiotolerans SRS30216
MVTMAIGKAINAGLRAAMDRDPRVLLMGEDIGALGGVFRVTDGLQKDFGEDRVIDTPLAEAGIVGTAIGMALRGYRPVCEIQFNGFVFPAFNQITTQLAKLRARSRGRLSVPVVLRIPSGGGIGSVEHHSESPEVLFAHTAGLRVVMPSSAHDAYWMVQQSIASADPVVFLEPERRYWEKSEVDVDLGPGQVTPLHRARVLRPGTDATLVCYGPTVKLALDAAVAAAADGTDLEVVDLRSISPLDVDTVAESVRRTGRLVVVTEAPVFHGPGAELAARIQESCFYSLEAPVKRVGGYHLPYPVARVEEHYLPTVDRVLDAVEQTLSA

SEQ ID NO: 13630 - protein, 494 aa, Paxillus filamentosus
KLQQIYDAEHPRLILKELFAQDPDRFSKFSKEYVDPTDPNTTFLIDYSKNLITQPILDTLLSLASEAELETYRDKMFAGERINTSEDRAVLHVALRNFDDFKIQEKGVEEVASVLAHMKEFSDAIRSGSWKGYTGKTINTIVNIGIGGSDLGPVMVTEALKPYAKRDLTALFVSNIDGTHLAETLRECDPERTLFIIASKTFTTQETITNAESARDWFLSFAKDKAHVAKHFVALSTNTKAVTAFGIDGANMFQFWDWVGGRYSLWSAIGLSIALYIGYDNFESLLKGAHGMDKHFKETPLESNLPVLLAVVGVWYNDFYGAQTHALLPYDQYLHKFADYFQQGDMESNGKFVTKNGERVDYQTGPIIWGAAGTNGQHSFYQLVHQGTKLIPADFLAPATSHNPIADSKHHRILLSNFFAQPEALAFGKTEEEVRKELGRGASEALVKSKVFEGNRPSNSIMFPLLTPRTLGALISLYEHKIFTQGVIWGINSY

SEQ ID NO: 13631 - protein, 570 aa, Mesorhizobium sp. BNC1
MDAKNEILHRSTRKGMPTAPRKYQPYPFVDLSDRTWPSKRIEKAPVWCSVDLRDGNQALIDPMGHDRKARMFALLLDMGFREIEIGFPSASQTDFDFTRWAIEEGNVPDDVSLQVLVQCRPELIARTFEALEGATHPIVHFYNSTSELQRRVVFEKDVAGIKTIATDAAKMITDMAAKAGGGYRFQYSPESFTGTELDVALEICNAVIGIVQPTPEDKLIINLPSTVEMSTPNIYADQIEWMCRQLDRRDSLIVSLHPHNDRGTAIAATELGLMAGADRVEGTLFGNGERTGNVDIVTLALNMYTQGVDPVLDCSEINRIKDVYEYSNQLRIPERHPYVGELVYTAFSGSHQDAINKGMKAYRKANKELWEVPYLPIDPADVGRTYEAIIRINSQSGKGGIAYVLQADYGLNLPRNLQVEFREDIQAITDAEGKELPSKRIHDRFLEVYVDQPGARIKLIDHQTFPDPEMKGRRILEATILDNGKETVIKGTGTGPIDGIVNALSRHIGMEISVLDYSEHSLQRGTDAAAVSYVEMEFPGGKLFGVGINTNITTASLEAVVSAVNRILRV

SEQ ID NO: 13632 - protein, 159 aa, Chromobacterium violaceum ATCC 12472
MTTLYDFSAQRADGAEQALSAYEGRVALLVNTASECGYTRQYAGLQELQDYFAGQAFVVLGFPCNQFGGQEPGGEDEIVDFCRSRFGVSFPLFAKLQVNGDGAHPLWRWLTQADSDRPHPIKWNFTKFLVDGRGRVVKRYEPAVEPHELVDDIKALLAR

SEQ ID NO: 13633 - protein, 434 aa, Solibacter usitatus Ellin6076
MSFGGSRVATSTLPVSISLENEKNPWLAAAARFEEAAKRLKLDDGMRKVLGTPSKELTVHIPVQLDDGRIEVFTGYRVQHSVARGPAKGGIRFAPDVTLDEVRALASWMTWKCAVVNIPFGGGKGGVICDPHILSDTELEKLTRRYTAEIIDFIGPERDVPAPDVNTNEKVMAWMMDTYSMHARHTVTAIVTGKPMALGGSRGRPEATGRGCMMVTQRALNRMGKRPEDTSVVIQGFGNVGGMAAKLMSAVGFKIIAIVEYDGAAYNPNGLDIAALQLHRKETGSITGFSGGEDMDKTEAMFLECDVLIPAATENVITSQNAHRVRCRILCEGANGPTTPLADDILAEKKVFVIPDILANAGGVTVSYFEWVQDRQGFFWNEQLVNERLQEIMDESFDAIVAYAEAHQVNNRIAAYMVALDRVAQAIKLRGIYA

SEQ ID NO: 13634 - protein, 431 aa, Chlamydia trachomatis D/UW-3/CX
MLRQETAPLVCKFGGTSVGTAQSIRRVCEIIQEERPSFVVVSAVAGVTDWLEEFCRLPKGKRAALTEKIRERHESIAKELGIEVSLAIFWEILEHFEDVEELFSEDQARILAIGEDLSSTLICSYCCTYVLPLKRLEARQVILTDSQFLRAVPDLALMQTAWGELALQEDTIYLMQGFLGATSSGKTTVLGRGGSDFSASLIGELCKARELRIYTDVCGVHTADPKILKDTQLIDSLTFEEMQELASSGAKVLHQDMLKPCVRAKVPIFVTSTFNVTKEGTWICASLNESTEGPVIKALSLKSNQALWFVEYNSPLVRLEDVLGCVRSLGFVPGVVMAQSLGVYFTIDWEEYPQTITKALEAFGTVSCEGPLSLVALVGAKLASWSMSRVFEALHRTPVLCWSQTDTVINLIINKDFGVAVTELLHDCLFK

SEQ ID NO: 13635 - protein, 220 aa, Eucalyptus gunnii
MNPFSSHSHPNSCRFNFAEPPSDSRSATALGNFSHKEVLLASHHPKKRAGRKKFRETRHPVYRGVRLRDSGKWVCEVREPIKKSRIWLGTFPTVEMAARAHDVAALALRGRSACLNFADSAWRLPVPASADTKEIQKAAARAAEAFQSVESEDVMSGDEKKLRSEEGVFYDEEDIFGMPGLLADMAEGMLLSPPKWGGDIYGGEDEGNLGAHTSLWSYSI

SEQ ID NO: 13636 - protein, 115 aa, Arabidopsis thaliana
  misc_feature (89)..(89): Xaa can be any naturally occurring amino acid
MAFALRFFTCLVLTVCIVASVDAAISCGTVAGSLAPCATYLSKGGLVPPSCCAGVKTLNSMAKTTPDRQQACRCIQSTAKSISGLNPSXASGLPGKCGVSIPYPISMSTNCNNIK

SEQ ID NO: 13637 - protein, 615 aa, Bacillus cereus ATCC 10987
MCGITGWVDYKRSLEGERDVVTKMAETLAKRGPDDNKVWIKGNVAFGHKRLIVVDPEGGKQPMTCLKGETNYAICYNGELYNTEDIRKELLRRGYTFKGHSDTEVLLASYMEWKEECVDHLNGIYAFAVWDEQKEQVFIARDRLGVKPLFYKYDSGRLLFGSELKAILAHPDVKAEVTLEGLSEIFGLGPSRTPGHGIYAGIKELRPGHAMTFSKNGLCIWRYWNVESKKHEDSFEETVEKTRFLLQDAITRQLVSDVPLCTFLSGGVDSSAITAIAAKEYERSGKGQLHTYSIDYEDNDKYFKANAFQPNSDAPFIHLMTETFQTIHHRCVISNEQLAQYLTEAVLVRDLPGMADIDSSLLWFCREIKQDFVVGLSGECADEIFGGYPWFYREDDLQSSAFPWMRSTEAREQLLKKEWRNKLNLQQYVQRRYEESIQEVPILEGESPIEAKRRQLFYLNMVWFMTTLLDRKDRMSMGASLEVRVPFADHRLVEYAWNIPWEMKMYKNREKGLLRKALEGLLPNDILYRKKSPYPKTHNPHYTKAVTVWLQDLLTDKGSILHELFDKEQLSGLIESGGSAFQTPWFGQLMTGPQLLAHLAQIHVWFKEYGVNIKE

SEQ ID NO: 13638 - protein, 481 aa, Clostridium sticklandii
MAKKDQEFVKDITNMDEDFPQWYTDVITKTDLVDYSPVKGFMVIKPYGYAIWENIQAFLDRRFKETGHQNCYFPLLIPESLLNKEKEHVEGFAPEVAWVTHGGSEKLAERLCVRPTSETIICSMYSKWLTSYRELPYLYNQWCSVVRWEKSTRPFLRTSEFLWQEGHTLHETAEEAQAETLQMLAIYKEMAEDLLAIPVVDGRKSDRERFAGAAATYTIEALMHDGKALQSGTSHNLAQHFTKAFDITFQGRTGELEYPHHTSWGASTRLIGGIIMVHGDNRGLVLPPRVAPTQVVIIPIAQNKEGVLDKAYEIKKELEAKGIRVTLDDDTNYSPGWKFNQYEMKGVPLRLEIGPRDIENNVAMIARRDTLSKDSYSLDNIGDTVKNLLDTVHTDMLERARAHRDSKTFTFKDYEEFKRKMIETPGFAKGMWCGEEECEAKIKEDTGVTIRCIPFVQENLGETCQFCGKPAKHMVYLAKAY

SEQ ID NO: 13639 - protein, 286 aa, Methylobacillus flagellatus KT
MAEPDKRNANDKPHWLERLTHFLLREPEDREQLIEQLHTAYENSVLDADALAMIEGVLQVSEMQVRDIMIPRSQMDVIDITDPPEKFIPFVIEAAHSRFPVIDENKDDVIGILLAKDLLKFYSGKDFNVREMLRPAVFIPESKRLNVLLKEFRSNRNHIAIVVDEYGGVAGMVTIEDVLEQIVGDIEDEFDEDENEDNIIQDSHGRYRVKALTEISDVNEILGTQLSDEEFSTIGGLVVSKFQHMPKRGEEVSFDNLKVTVLRADSRRVHSLLVEVLPPAGDLPED

SEQ ID NO: 13640 - protein, 224 aa, Eucalyptus gunnii
MNSSSYISHPNSFSFDFAEPPFSLLLSHDRSAAPGNFSGEEVRLASDHPKKPAGRKKFRETRHPVYRGVRLRDSGKWVCEVREPRKKSRIWLGTFPTADMAARAHDVAALALRGQSACLNFADSAWRLPVPASPNTKDIQKAAAKAAEAFQLVESEDVMSGNEKKLHSEEGVLYDEEDIFGMPGLLANMAEGMLLSPPECSGDIYAGLDDGNLDAYTSLWSYSM

SEQ ID NO: 13641 - protein, 319 aa, Bacillus cereus ATCC 10987
MAKKKIGLLVMAYGTPESLEDVEAYYTHIRHGRKPSEEALQDLIGRYKAIGGISPLAKITKEQAHKLTDSMNNIFTEYEFNCYLGLKHIAPFIEDAVEEMKRDGIEQAISIVLAPHYSTFSIKAYNDRAIRLSEEIGGPVIEPIEQWYDEPKFISYWADQIKETFTKIEDKEKAVVIFSAHSLPEKIIAAGDPYVKQLQHTADLIAAAANIQNYTIGWQSAGNTPDPWIGPDVQDLTRDLFEEHRYESFIYCPVGFVAEHLEVLYDNDYECRVVTDEINAAYFRPNMPNSQSIFIDCLTEIVSKKMKEVVDKDLVLNNN

SEQ ID NO: 13642 - protein, 1451 aa, Cryptococcus neoformans var. neoformans JEC21
MAASTLSNYQLGDLLGRGASGNVYRALNFLTGETVAIKSISLLSLPPSSLPDIMSEIDLLKNLNHANIVKYKGFARDKENLWIILEYCENGSLQTILKKFGKFPESLVAVYISQVLEGLIYLHEQGVIHRDIKGANILTNKDGSVKLADFGVSSRAPTAVLDQSGKSNDGEAEVVGSPYWMAPEVIEQSGASTASDIWSVGCVVVELLEGKPPYGDLAPMQALWRIVQDESMRIPEGASPIVKDFLYHCFQKDPNLRISAKKLLRHPWMLSVKKSASNRPPITPSLVDTTFDHSIDPKANSDGITPQAQRDGNKSRPEREGENEKQSRQGTVKPRKKIMTVYDEAVQRVQEWNEALKASPKNLSKPSPSPSPSTSSASASTSASKALLLPVPSTNPLISKARQRGESNPPLSLFSLLPTSNSKPLSSSLSQEQPLSLPLQLRNQVGQGGGLLSKNYMVSDVLERAKEEGEERWDDDFAEGISFSKLGRTEIYKHPQAHHHTHLTSSASSASTAREEAEEANQKTLRQNRALALPTPSSKPGRKSNLSRPVGEVEDYSDMEQAFGENEGSLEKKMRILKLKAIGRKGLMHPDDIHKYPLSPVKRKPSSRVDVRGNSSTSTTATTCASASASNPGAPPITVPLSSSIPIPNSSFPRRRAPSNPIPSSFSTLTIPSLSETGTGMSTETKNRNRDNSFLSQDAPTRSSPSSRSSSLRNKAKVGEEVEEQIKKYTENEEENYEDIFGGANKTFSSSQEVPLKLVLLPSHPLSSSSALRNGGGGGRGSSEGGISFTDPHSHINFDYPESDEEDMLDPFAEIEDEFDTAEDLEKKLMRDKKVMMQGKVSKLVDELMIGGVGGGGLRGVCDDLFGILENSSPEMGLEAHFVAQHGLIADVVVRLLKLVNLIVTSNVELLESFCLIGGIPVIIPYTSKKHSLETRLEASRFIRQLTRSALTLQMFISCRGLRILVELLDEDYALNKTLILSSLEGINSVFELQSPTPRNDFVRMFVREGVIDPLSTALLAILKDKYEDRSANDDGNGNGNGEMEDGQGQERGQFMMEQASRSVGVLLFFCQVAQADARVREAFATRTIMIRLLKACDLLPRKLLVTAIKAIKHLSTSPQLIEVLQNSNAMEILVDLLGKNIKGSHSNEICSHIFQTIYSMTRLSKSRQEEAASSGIIPLLKRVIQNKSPLKQFALPILCDMANAGKGSRRLLWHYDGLGLYLDLLEDPYWRVSALDAILAWMQDETARVEDVLLEKSASDSLVRCFVQASGVSFEGILDPLFKVLRLSTSLTSSLSHPPFFSRLSESLERSSKAVIKLNLLRLTKVVCECHPDKATLVERFGLAQIVERLSKQDGAVLVRELAKEILPGLLFGGDAPDPAASFRYTSSGTVGEERGGRTMKSQGRMEGRRSSQLRRTLSENVATDLLHPAPPVAPFPSTVSRCKYTKERG

SEQ ID NO: 13643 - protein, 319 aa, Bacillus cereus ATCC 14579
MKKKKIGLLVMAYGTPESLDDVEAYYTHIRHGRKPSEEALEDLIGRYKAIGGISPLAKITKEQAHKLTDSMNNIFTEYEFTCYLGLKHTAPFIEDAVEEMKRNGIEQTISIVLAPHYSTFSIKAYNDRAIRLSKEIGGPVIESIEQWYDEPKFISYWADQIKETFTEIDDKEKAVVIFSAHSLPEKIIAAGDPYVEQLKHTADLIAEAANIQNYTIGWQSAGNTPDPWIGPDVQDLTKDLYEEHGYESFIYCPVGFVAEHLEVLYDNDYECKVVTDELNAKYFRPNMPNAQSAFIDCLAEIVSKKVKEIVDKDLVLNNN

SEQ ID NO: 13644 - protein, 685 aa, Methanopyrus kandleri AV19
  misc_feature (132)..(132): Xaa can be any naturally occurring amino acid
MARMRFVPQVCPFCGCGCGILVGTDGEEIKLLEPWRRHPVNEGRQCVKLWELPEAVQKDRLERPVRMTESGEPRELSWNRALEEVAEVLSTHEPEEVYFVTSAKATNEDNYVAQKLARTLGTNNVDHCARLXHAPTVVALSELLGSGAMTNSIPDLVEADCYLVAGSNTAEQHPIVYRRILQGLEENDADLIVLDPRRTQIAELADIHLQVRPRTDLIVFLYMAKVIVEEGLHDGTFIEERTTGFESFEEYVREAVSEGDVRRIAGVDPEDVRKAAVRYAEAERGCILYCMGLTHHDIATRTVRALCALALLTGNVGRPGTGVNPLRGQNNVQGACDVGALATHFPGYRPINTETANEMSKIWSFEVPDEPGLKLTEAFDADEITVMYVVGENPAVSEPNTRHAVEKLESLEFLVVQDLYLTETGELADLVLPAAGWAERTGTFTATDRRVQLAEKAVEPPGEARPDWWILEAVARRLGLKGFGHRSPREVFEEIRRVVPQYRGITYERLRRRPGGIHWPCPSEDHPGTPILHTEEFATEDGKARFPKPEDVEYREPERDVDEEYPLILTTGRVYAHYHTRTITRRSRLLSEEVPESFVEIHPKDAERYGVRDGELVVVETPYGEWRCRARVTDRVREGTIFTPFHFGENVLTPHDVRDPESGIPEYKYVPARVRPDSRGSASRG

SEQ ID NO: 13645 - protein, 771 aa, Rhodopirellula baltica SH 1
MSMPASGTLRVTLLSLHGLIRARDCELGRDADTGGQVKYVLELAEELSRREEVESVELVTRQIFDERVGPDYAQVEEIINPKAKIVRVPFGPKRYLRKEGLWPYLETFIDQMLGHYRRVGLPDLIHGHYADAGYAGAQLARLLHVPYVFTGHSLGRVKRQRLIAASQESKAPKPPRELDKKFKFTVREEAEEFALETASMVITSTGQEVEEQYAVYDHYQPDRMEVIPPGVDLDQFYPVDESEPLPRIHDLLTPFLKDSEKPMVVAMARPDERKNIEMLVRVFGENPKFREMANLVLVLGSRDDLREMPSGQRRVLTNVLHLIDVYDLYGHVAYPKAHRPSDVPELYRLTARRKGIFVNPALTEPFGLTLLEAAASGVPIVATNDGGPRDIIANCQNGLLIDPLSAEDIDHALMRCLTEPEQWQTWSENGIEGSRTHYSWANHVDRYLRDVTEIIEQSATPALAQSMGRTTRRLPEFDRIIMTDLDNTLTGDDEALADFVDLLNTAGRDVGFGIDTGRSLDEAMSLITKLNLPRPDVLSAAVGTELYYGEGLTPDLSWRKQIKHHWQPKLVHEVLDSIPGLFLQTEKDQTEFKISYRIDPEDSPSVAQIRKMLRSAGLRVKVVLSLGSFLDIIPLRGGSELSLRHLAYRWGFEPERLLVAGDCGNDEGMLKGGTLGVVVGNYSPELEKLRRLPRIYFAEGNHARGIMEGIEYYDFLNHIRIPNDKIEHEPGKHRTSEKAGEESNEHQDDEPAGDTNDDRNQRQSSEAAAAS

SEQ ID NO: 13646 - protein, 179 aa, Francisella tularensis subsp. holarctica
ERVDLDKLGIYKIENTTVEVINSVIDYAELMQQIFDFDKVRELFAKGFKVRFDSMCAVSGPYAKYIFETLLKAPAGTVVNAQPLEDFGGFHPDPNPVNAEDLVKHMRSGKYDFGAASDGDADRNMIVGKQIDVSPSDSLAIMAANAHLIPVYSKGIKGVARSMPTSTAVDRVAESLRLP

SEQ ID NO: 13647 - protein, 390 aa, Sulfolobus shibatae
LDTLEALSQPERVIQVKIQIRGSDGKLKTFMGWRSQHNSALGPYKGGVRYSPNVTQDEVIALSMIMTWKNSLLLLPYGGGKGGIRVDPKKLTLKELEDLSRKYVQLIHNYLGSDVDIPAPDINTNPQTMAWFLDEYIKITGEVDFAVFTGKPSELGGIGVRLYSTGLGVATIAREAANKFIGGIEGSRVIIQGFGNVGSFTAKFLNEMGAKIIGVSDIGGGVISDDGIDVNKALEVVQSTGSVVNYPEGKKVTNEELLTSDCDILIPAAVENVINKFNAPKVKAKLIVEGANGPLAADADEIIKQRGIVVIPDILANAGGVVGSYVEWANNKSGGIISDEEAKKLIIDRMTNAFNALYEFHKRKFADQDLRTVAMALRVDRVVGMKARAI

SEQ ID NO: 13648 - protein, 961 aa, Streptomyces avermitilis
MTAHRIPLSDLEQGIPFEQRHIGPDSEARAKMLAQVGYGSLDELTATAVPDVIKNAEALELPGARTEAEVLAELRSLADRNQVLGSMIGLGYYGTFTPPVILRNVMENPAWYTAYTPYQPEISQGRLEALLNFQTVVAELTGLPTSGASLLDEGTAAAEAMALSRRMGKNKKGLFLVDADALPQTIAVIETRAEPTGVEVVVADLSEGIPAGIAEREINGVLIQYPGASGAVRDIKPLVEQAHELGAVVTVAADLLALTLLTSPGELGADIAVGTTQRFGVPMGFGGPHAGYMAVREKFARSLPGRLVGVSVDADGHKAYRLALQTREQHIRREKATSNICTAQVLLAVMAGMYAVYHGPDGLRTIARRTHRYATILAEGLKAGGVEVVHGAYFDTLTARVPGRAAEIVAAAREGGVNLHLVDADLVSISCDETTTRAQLGAVWTAFGVEGDIEALDAAAEDTLPAALLRTDDYLTHPVFHQYRSETAMLRYLRRLSDRDYALDRGMIPLGSCTMKLNATTEMEPVTWPEFGQLHPFAPAEQAQGYLTLIRELEERLAEVTGYDKVSLQPNAGSQGELAGLLAVRGYHRANGDEQRTVCLIPSSAHGTNAASAVMAGMKVVVVKTADDGEIDVEDLRAKIEQYRDELSVLMITYPSTHGVFEEHVADICAQVHEAGGQVYVDGANLNALVGLAKPGHFGGDVSHLNLHKTFCIPHGGGGPGVGPVGVRAHLAPYLPNHPLQPEAGPATGVGPISAAPWGSAGILPISWSYVRLMGGEGLKRATQVAVLSANYIAKRLEPHYPVLYTGPGGLVAHECIIDLRPLTKATGVSVDDIAKRLIDYGFHAPTMSFPVAGTLMIEPTESEDLGELDRFCEAMIAIRAEVEKVGSGEWPAEDNPLRNAPHTAAALGGEWEHAYSREEAVFPAGVSAADKYWPPVRRIDQAFGDRNLVCSCPPLDAYDD

SEQ ID NO: 13649 - protein, 119 aa, Arabidopsis thaliana
  misc_feature (75)..(75): Xaa can be any naturally occurring amino acid
MFSSMPSAVVEETSPAQASGVTPYTGGKSFAANPVTRKTNKDITTIASNGGRGSCMKVRPPIGKKKLETISNLPXLSDVQLAEEGDHTLRNKGIPCGEFRLEHPFEYPEHGNHSGYHQG

SEQ ID NO: 13650 - protein, 722 aa, Kluyveromyces lactis NRRL Y-1140
MSTVNMRPSLASISGVGPSGPTTATATSSRSFKPCANCTCSYGQLSRQGRRSSALLKQINFSRRHSHFGNPPLSPTSESIYSTDSICQLKSTETAKRLLALRKQMDTHDLCCYIIPSEDEHQSEYVSQADERRAFISGFTGSAGVACVTRDLLNFNTDKPEGEAILSTDGRYFNQASQELDCNWTLVRQGEDPITWQQWAVNEAHEMSLALGGKPTKIGIDPRLISFDQVRMFEKVIKDKTEGTNAKIEFVAVADNLVDKIWCEFETMPVRDLNELLLLDRKYTGECYKSKRERVMNKISKDHNGASHLVVFALDEICWLLNLRGSDIEYNPVFFAYLVLSNDETILFTDNPFDDKIENYLSENNIKVESYQNIWSFLSDKASALAEKKETILIPSNSSWEIVRKLYGSTMKRVSSPIEVMKSVKNETEIQNAHSAQVKDAVALIQYFSWLEDQLVKHEKLIDEHKASQKLTEIRKTAKHYMGNSFCTISSTGSNAAVIHYEPPEENSSMIDPNKIYLCDSGAQFLEGTTDITRTLHFTEPTQEEIDNYTLVLKGNLALERLVVPEGTSGYNIDVIARQFLWQAGLDYKHGTGHGVGSFLNVHEGPIGIGYKPHLVNFPLEKGNIITNEPGYYKDGEYGIRIENDLLVKEAEGLQFGKRKFLKFENLTMVPYCKKLINTSLLTPEEKSQINDYHTRIWSSIVPFLQPSSIAFKWLKRETKSL

SEQ ID NO: 13651 - protein, 408 aa, Frankia sp. EAN1pec
MTPTPRQVVVTGLGATTPLGGDVPSTWEGLLSGRSGARRLTEDWVEQLPVHIAAPLAVEPPLGRVEARTLDRSQQMALVAAREAWAHAGSPEVDSERLAVCVASGIGGVLTLLNQHDVLRERGARRVSPHVVPMLMPNGPASTVGLAFGAKAGVHAPVSACASGSEAIALALDIIRAGRADIVIAGGTEAAIAALPIAGFAQMQALSRRNDAPEAASRPFDKARDGFLLGEGAAVIVVEAAEHAQARGARVLGTLAGAGISSDAYHVAATDPTGAGAARAIRAALRSASLEPEDVIHVNAHATSTPTGDVAESIALRLALGSALDSIAVTSTKSMTGHLLGAAGALEAVVTLLSLRERVVPATRNLDALDDEIALDVVSIDNRELGTGAGLSNSFGFGGHDVCLAFTV

SEQ ID NO: 13652 - protein, 397 aa, Shewanella sp. MR-7
MLDSRTIQIIKSTIPLLESAGPALTQHFYQRMFTHNPELKDVFNLAHQHSGGQPVALFNAVAAYAKNIDNLGALGTAVERIAQKHTGFLIQPEQYAIVGGHLLATLQELGGEAVTEEVLTAWGDAYQFLANIFIQREAQIYQESAQQDGGWSGVREFIISEKKAESAVITSFVLTPTDGQAVKDFTPGQYLSIKLQHPKLAFDEIRQYSLSDAPNGRTYRISVKREPNGQVSNLLHDMLQVGDTVSVMPPAGDFALTAQPETPIVLISAGVGQTPMKSMLNQLLKLKHPSAVTWLHACEHGEVHGFKTAVKSKLGQHANLASHVWYREPKEADILGQDYDFEGTMNLTSVADKIATDAHYYFCGPIGFMASIKQQLLAFGVPSEQMHYEVFGPHAEL

SEQ ID NO: 13653 - protein, 315 aa, Bacillus halodurans C-125
MGEEQKVYDVVIAGAGPAGMTAAVYTSRANLSTVMVERGVPGGQMANTEDVENYPGFDHILGPELSTKMFEHAKKFGAEYAYGDIKEIIDQGDLKLVKAGNKEYKARAVIVATGAEYKKLGVPGEKELSGRGVSYCAVCDGAFFKGKELVVVGGGDSAVEEAVYLTRFASKVTIIHRRDQLRAQKILQQRAFDNDKIEFIWDHVVKQINGTDGKVSSVTIEHAKTGEQQDFKTDGVFIYIGMLPLNEAVKNLNILNDEGYIVTNEEMETSVPGIFAAGDVREKSLRQIVTATGDGSLAAQNVQHYIEELAEKVKN

SEQ ID NO: 13654 - protein, 462 aa, Archaeoglobus fulgidus DSM 4304
MRIVMKFGGVSVKDGENIYHCANLVKKFSEGNEVVVVVSAMQGVTDALLKAAHRCCSEPSAGFIKMFIADMMKRHYEAIEYAVRNDEIKAKVIAAVERLLDELEKVLLGISYLGELTRRSEDYIVSFGERLSAPIFSAALLSLGVDSVALTGGDAGIITDRNFGRAKPLPGVYTTIRNRLEPLLTIKKTIPVVTGFIGATDDGSITTLGRGGSDYTATILAAALDADEVWLWKEVDGIMTCDPKYVPNARVIPEISYQEAMELSHFGAKILHPRALEPVMRKNIPVRIKNTFNPDAPGTVIGPTTKDSSEIVKALSLIPQAGIVNVSGAGFDFAEIMSEVFGRLAEERVNVIMVAQSSSELNLSIVVDIRDLEKAYNALKSLENGVIKVEKIPYIAVVSAVGSGMAGTPGVAGKIFSALGKNGINVIMISQSCSEYNVSFVVDGSDGVNAVKVVHDEFGLGN

SEQ ID NO: 13655 - protein, 514 aa, Kluyveromyces lactis NRRL Y-1140
MLGRTQVTTLRRFIRLYSQLPLKVPVQLPNGITYEQPTGLFINGEFVPSRQHKTFEVLNPSNEEEITHIYEAREDDVDIAVAAAKKAFNNGWSTAEPEDRAKCLLKLADLIDQHAETLASIESLDNGKSLFCSRGDVALVAKYLRSCAGWADKIYGKVIDTGADHFSYTKREPLGVCGQIIPWNFPLLMWSWKVGPALATGNTVVLKPAEATPLSALYACQLVQEAGVPKGVVNIIPGFGKIVGERICTHPDIKKVAFTGSTATGRHIMKTCADSIKKVTLELGGKSPNIVFGDADLDKAVKNIAFGIFYNSGEVCCAGSRIYVQDTVYEEVLEKFKQYAESLKVGNPFEENVFQGAQTSQMQIDKILSYVDVGTSEGARVITGGERIGNKGYFIKPTIFADVKEDMQIVKEEIFGPVVTVSKFTTVDEVVAKANDSEYGLAAGIHTKDVNKAIDVSNRVKAGTVWINTYNNFHQNVPFGGFGQSGIGREMGAEALDNYTQTKAVRMAIDHPNY

SEQ ID NO: 13656 - protein, 406 aa, Haemophilus influenzae Rd KW20
MRRTVITGFGIISSIGNNKEEVLASLKAGKSGIEVVPEFVEMNMRSHVAGTIKLNPSEHIDRKVFRFMGDAAAYAYLSMREAIEDAGLTEDQVSNDRTGLVIGAGTGSAHNQLVACDAVRGPRGVKAIGPYAVTKTMASSVSACLATPYKIRGVNYSMSSACATSAHCIGHAVELIQLGKQDVVFAGGAEELSWECATEFDAMGAVSTKYNETPEKASRAYDANRDGFVIAGGGAVVVVEELEHALARGAKIYAEIVGYGATSDGYDMVAPSGEGAERCMKQAMATVDTPIDYINVHGTSTPVGDVKELGAIKNVFGDKIPAISSTKSMTGHSLGAAGAHEAIYTLLMLDNDFIAPSINIETLDEAAEGCNIVTETKENAGLQTVMSNSFGFGGTNATLIFKRYNG

SEQ ID NO: 13657 - protein, 482 aa, Propionibacterium acnes KPA171202
MTQVDTPASLPGAGASQDEHLAALSGYKYGWHDSDAYAAASRRGLSEDVVRGISAMKHEPQWMLDMRLKALKLFQRKPMPTWGVDISTIDFDQIKYFVRAQERQAASWEDLPADIKNTYDRLGIPEAEKDRLVAGVAAQYESEVVYHKINEELGKQGVVFLDTDTALKEEPELFREHFASAVPLGDNKFSALNSAVWSGGTFIYVPKGVHCTIPLQAYFRMNTENLGQFERTLIIVDEGAYVHYVEGCTAPIYKSDSLHAAVVEIIVKKNARCRYTTIQNWSNNVYNLVTQRAYVEEGGTMEWIDGNIGSKANMKYPACYLMGPHAKGEALSVAFAAEGQHQDTGAKMVHKAPYTSSTIVSKSISQGGGRSAYRGLVSVGKDAHHSSSAVRCDALLVDDISRSDTYPYNDIRTDEVSMAHEATVSKVSEDQLFYLMQRGLTEEEAMAMIVRGFIEPIAKELPMEYALELNRLIELQMEGAVG

SEQ ID NO: 13658 - protein, 245 aa, Triticum aestivum
  misc_feature (123)..(123): Xaa can be any naturally occurring amino acid
  misc_feature (162)..(162): Xaa can be any naturally occurring amino acid
MAPTVMASSATSVAPFQGLKSTAGLPVSRRSNGASLGSVSNGGRIRCMQVWPIEGIKKFETLSYLPPLSTEALLKQVDYLIRSKWVPCLEFSKVGFIFREHNASPGYYDGRYWTMWKLPMFGXCTDATQVINKWRSQEGVPDAYVRIIGFTTSQVQCVSFIXAFKPPGLQGSGQALKTSFPKGQFKRALCSFGNFEIGLGFPSPFTFLNGSKKNGIGPVSLYKMAPKNLAHKKMLSGGFFIKRTH

SEQ ID NO: 13659 - protein, 446 aa, Xanthobacter autotrophicus Py2
MRYLPLTPEDRAEMLARIGVASVDELFVDIPADKRETALPRLALHKSELEVERTLARLAGQNVPAGSVPFFVGAGAYRHHVPATVDHLIQRSEFLTSYTPYQPEIAQGTLQYLFEFQTQVAELTAMEVANASMYDGSTAAAEAVLMAHRVTRRRKAVLAGNLHPHYRSTIETVSRYAADEVVALPPAPFGEEDLITPIDDTVSCVVVQSPDVFGNLVDLKPIAEAAHKAGALLVAVFTEAVALGLIEPPGAQGADIVVGEGQSIGNALNFGGPYVGLFATRQKFVRQMPGRLAGETVDAEGRRGFVLTLSTREQHIRREKATSNICTNSGLCALAFTIHMSLLGKTGLTRLARANHAAACDLADRLAAVKGASVVNDTFFNEFTLRVPGPAADVVEKLAAKGILAGVPYSRLAPKSGLDDLILVAATETTTEDDRAAYAAALKEVL

SEQ ID NO: 13660 - protein, 183 aa, Pseudomonas syringae pv. tomato str. DC3000
MKIRFVSIPLLLLSMSGAVMAADCPPLLQGELPKLRAKENIDLCKRFAGKPLVVVNTASFCGFAPQFKGLEELSQRYKGQGLEVLGLPSNDFKQEAKDGEETAKVCYVNYGVTFTMTEPQAVRGDDATHLFKVLAEQSSAPRWNFYKYVVDRQGKVVANFSSMTKPDDPELIAAIEKAIASKP

SEQ ID NO: 13661 - protein, 258 aa, Brassica napus
  misc_feature (209)..(209): Xaa can be any naturally occurring amino acid
MGPESRSTPISASSPASSSSPSGKRTRDPEDDEVYLDNLRSQKRYLSEIMACSLNGLTVGDSLPVNMLDSPSRSDTLLSPNNHIHRDDLSLQYSPMSEDSDEARFCEDPITSTSSSQQPESRPTSPVSPYRYHRPLTSTTSHHLSNSHSCPASMSTNATTPQSRPRGSDTEGRFPSSPSDICHSSDLRRTALLRSVQMRTQPCGIASTXGTSNVDGGEEKLCFKSMEEDNRGEDVSYTQVSGGKSKSCKALDMRLCER

SEQ ID NO: 13662 - protein, 397 aa, Brevibacterium linens [sequence omitted]

SEQ ID NO: 13663 - protein, 233 aa, Dechloromonas aromatica RCB
MSAKDYVIAPSILSANFAKLGEEVANVIASGADWIHFDVMDNHYVPNLTIGPLVCEAIRPCTTAPIDVHLMVKPVDRIIPDFAKAGANIITFHPEASEHVDRSLSLIRDAGCKGGLVFNPATPLDYMDYVLDKIDVILLMSVNPGFGGQKFIPGTLAKAKQARAKLDAYERETGRRIRLEIDGGVNTANIAEIARAGVDAFVAGSAVYGAGKDSDPHRYDSIIGALRSELAKV

SEQ ID NO: 13664 - protein, 382 aa, Rhodobacter capsulatus
MTPDRTLALCDTTLRDGEQTAGVAFSLAEKKAIARALDRAGVAEIEVGIAAMGWAEVAEIRAVVAEIAHATPVVWCRLRMHDLDMAQKTGVKRVHFAVPTSTAQLEGKLRVDRDWILRETAALVFCASDRGLQVSVGAEDASRTDPDFLIRLAEVAAAAGAIRFRIADTLGLLDPLGAFRLVAELSARISLPIEMHAHNDFGMATANTIMAAHAGATHLSVTVNGLGERAGNAACEEVGAALEAGGIDTGLDLCALPELSAVVAKASGRAFRAQKPITGDDWLFAHESGIHVDAILKRADTYEDPRCAPARFGRERQIVIGKHSGSAGLRAALLEAGLPADDAVLDRLKPLLRAHAVRVKRPVEAGDLRRMVARLARPSPRT

SEQ ID NO: 13665 - protein, 450 aa, Geobacter metallireducens GS-15
MSPQLIDERLAGIYQDVLKRNPGEVEFHQAVAEVLESLGPVVTKHPEYLERKIIERIAEPERQIIFRVPWQDDKGQVHINRGFRVEFNSALGPYKGGLRFHPSVYLGIIKFLGFEQIFKNSLTGMPIGGGKGGSDFDPKGKTDDEVMRFCQSFMTELYRHIGEHTDVPAGDIGVGGREIGYMFGQYKRITNRWEAGVLTGKGLKFGGSLVRPEATGYGATYFINEALKVRKDSFDGKTCLVSGSGNVAIYTIEKIHQLGGKCIACSDSNGVIIHEKGLDVELIKQLKEVERRRIADYATYHKDAKYIANGNIWDIPCQVAMPSATQNEINGKDAKTLVKNGCIAVGEGANMPTTPEGIKVFIEAQIAYGPGKAANAGGVATSALEMQQNAQRDSWSFEETEKKLEKIMVGIHKLCYETAEEYGDKGNYVTGANIAGFIKVADAMVAHGLV

SEQ ID NO: 13666 - protein, 382 aa, Chloroflexus aurantiacus
HVDHGKTTLTAAITKVMSLKGAAQFMAYDQIDNAPEERARGITIAIRHVEYQTDKRHYAHVDCPGHADYIKNMITGAAQMDGAILVVSAPDGPMPQTREHILLARQVQVPAIVVFLNKVDMMDDPELLELVELELRELLSKYGFPGDEIPIVRGTARNALESPSKDINAPEYKCILELMNAVDEYIPTPQRAVDQPFLMPIEDVFGIKGRGTVVTGRIERGKVKVGDTVEIVGMTNDAPRRTVVTGVEMFQKTLDEGIAGDNVGCLLRGIERTDVERGQVLCAPGSIKPHKKFEAQVYVLKKEEGGRHTPFFSGYRPQFYIRTTDVTGAIGLPAGMEMVMPGDNVVMTIELIVPVAIEEGLRFAIREGGRTVGAGVVTKILD

SEQ ID NO: 13667 - protein, 520 aa, Amanita muscaria
MPPAATGNGGIDPKNKFTGIAMTAFSAFGGILYGYDTGIISGILAMDDFKRTFGQQASDGTCSLPLSSQSLFVSILSAGTFVGALFGAPMGDIIGRKWGIVIAAAIFSIGIALQTASVTAAPFVVGRVFAGLGVGLVSCLVPMYQSECSPKWIRGAVVSLYQWAITIGILLAAVINNATQGRSNHSAYQIPISIQFVWAFILGFGMMLLPESPRFLVRQGRDEDAALSLSRLTRLSPDDPVVRNELAEIRTNFEAELALGESSYLDCFRPSHNKILLRTLTGIFIQAWQQLTGINFIFYYGTQYFQNAGINQAFLITIATGIVNVFMTLPGLYGVERYGRRSLLLIGALGMTICEFIVAIVGVTIPASNLAGQRVLIAFVCIYIAFFASTWGPMLWVIVGEIFPLQVRAKGISLSVASNWLWNFGIAFATPYLVNTQAGSAGLGSKVFFIWGTTCACCLVFTYFCVPETKGLSLEQIDEMYQEVMPLKSYQYRRRLAIEGGFRTEKADIIHEETAEKESG

SEQ ID NO: 13668 - protein, 361 aa, Sinorhizobium meliloti
MKALVENLKATARETDATDIRAAFAADPNRFSRFSTAFDDLLFDYSKCAVNDRIIDGLEALAKAAKVEEKRDAMFRGDIINITEERAVLHTALRNRSNRPVLVDGKDVMPDVNAVLEAMGKFADDIRSGALKGATGKKITDVVNIGIGGSDLGPVMATLALAPFHDGPRLHFVSNVDGAHIADTLTLLDPETSLFIVASKTFTTIETMTNAATARAFIAGKLGEAAVGHHFAAVSTALDKVGAFGIDAARVFGFWDWVGGRYSIWSAIGLPLMIAIGKENFGRFLDGGHAIDEHFRSAPLRQNIPMLLGLIGFYNRNVLGYPSRAILPYDQRLTRFPAYLQQLDMESNGKGVTLDSQPVEF

SEQ ID NO: 13669 - protein, 942 aa, Rhodopirellula baltica SH 1
MNSTIASNPTSSRIVSITSLPPKVLATDLDGTFLPLDGDDAAVASMKQIREQLEAIDVPLVFVTGRHFDSVRDAIGEFNLPKPQWILCDVGVSIYKADGEGGYIRESAYEQILDEVLGDIDIQKHRLAIGELENFTLQESYKQGRHKWSYYVPADQLEACHQAVEAYLKLHELPCSIVSSIDPFNNDGLVDVLPHGASKAFALHWWCDQHELQPEQIVFCGDSGNDTAALIAGYRSVVVGNADRKIARKVADAHQAAGWVDRLKLARGTSTSGVLEGARWFGLFENSIEETSIEATSPLNATDLPESIPWGARLIGANRAEFTLWAPKQKQVVLELMPDRLVRMQREDRGFHRCIVDGVVDGTRYQYRFVRDEHVAAFADPNTELSVDMLLHALPDPASRYQPEGVHGPSSIVDAQFPFQATADSAADELDELIIYEMHLGTFTEQGTYLSAIERLDELVDLGITAIELMPIAACAGHWNWGYDGTHWFAPMTAFGSPNEFRQFVDAAHIRGLLVMVDVVYNHFGSEGNYWTEFGPYTSRKHNTVWGAAPNFDDPKRGDLVRRFVIDNAIMWLKEYNLDGFRVDAIHCMKDDSAKHITTQMSEEIRRWSDKAGRRVWLIAETNVYDAAMVKPLSEGGTGFDAQWSDDFVHSMFATVRPGEQLTQRIYSPGSDLEQTLRRGFVFAGDVRGDRGREAEPTLDTDGMLKRIDTRSSIVCIQNHDFIGNHPTGMRLHQLTSPETQAAAVTLAMLLPSIPMLFMGEEFASPNPFRFFVDFGDPRLQRAVVRGRKREYPQHDWSDGVLPTDEEAMRSSVIGSVELGSETMRNWYKTLISIRKQFVGSGLLSPQNFSVDVNCEANLYSLSYQTPNEALQVMVRLSPLTEDDSVDEPSAIDPLPSRPEGASPDSWRLLADSMEAFGERLTEGLLPNHARICYFEHDEPTA

SEQ ID NO: 13670 - protein, 307 aa, Staphylococcus aureus subsp. aureus NCTC 8325
MNAAVRAVVRTAIYNEIEVYGVYHGYQGLLNDDIHKLELGSVGDTIQRGGTFLYSARCPEFKEQEVRKVAIENLRKRGIEGLVVIGGDGSYRGAQRISEECKEIQTIGIPGTIDNDINGTDFTIGFDTALNTIIGLVDKIRDTASSHARTFIIEAMGRDCGDLALWAGLSVGAETIVVPEVKTDIKEIADKIEQGIKRGKKHSIVLVAEGCMTAQDCQKELSQYINVDNRVSVLGHVQRGGSPTGADRVLASRLGGYAVDLLMQGETAKGVGIKNNKIVATSFDEIFDGKDHKFDYSLYELANKLSI

SEQ ID NO: 13671 - protein, 128 aa, Brassica napus
MSTFSSISSFRTSKLFSHKEDEQKMYADSGLMLRYMQTCSPDIHQFEDLFKSYKLSDDEMRNAFAGPSNIPEYDTGEEGDLFKAPDSILEESILTVDPLSAALTMISCGEDSSQGLCDLPDLDLGLQS

SEQ ID NO: 13672 - protein, 506 aa, Mycobacterium sp. KMS
MTNQIQHFINGKRTAGESTRTADVMNPSTGAVQAQVLLGSRADVDAAVAGAAEAQKEWAAWNPQRRARVMMRFIELVNQHMDELAELLSIEHGKTVPDAKGDIQRGIEVIEFAIGIPHLIKGEYTEGAGTGIDVYSMRQPLGVVAGITPFNFPAMIPLWKAGPALACGNAFILKPSERDPSVPVRLAELFIEAGLPAGVFQVVHGDKEAVDAILEHPVIQAVGFVGSSDIAQYIYAGATANGKRAQCFGGAKNHMIVMPDADLDQAVDALIGAGYGSAGERCMAISVAVPVGKETADRLRNRLVERVNNLRVGHSLDPKADYGPLVTEAALNRVRDYINQGVEAGAEAVVDGRERSSDEMQFGDDSLEGGYFIGPTLFDHVTPDMSIYTDEIFGPVLCIVRADNYEEALRLPTEHEYGNGVAIFTRDGDTARDFVAKVQVGMVGVNVPIPVPVSYHTFGGWKRSGFGDLNQHGPHSILFYTKTKTVTQRWPSGIKDGAEFVIPTMK

SEQ ID NO: 13673 - protein, 359 aa, Pasteurella multocida subsp. multocida str. Pm70
MQTFNIAVLSGDGIGPEIIAEAIKVLDVVQQKYAFKLNYRTFDVGGIAIDNHGTPLPEATLKGCEESDAILFGSVGGPKWEHLPPAQQPERGALLPLRKHFALFCNLRPATLYKGLEKFCPLRADISAKGFDMVTVRELTGGIYFGQPKGREGEGANEKAFDTEVYHRYEIERIARVAFETAMKRSKHVTSVDKANVLISSVLWREVVCDVAKDYPEVTLDHIYIDNATMQLIKQPEFFDVLLCSNIFGDIISDECAMITGSMGMLPSASLNEKGFGLYEPAGGSAPDIAGKGIANPIAQILSAAMMLRHSFNLNDAATAIENAVKNVLAEGHRTADLADESQPLSTKQMGDLIAQAVE

SEQ ID NO: 13674 - protein, 404 aa, Arabidopsis thaliana
MAAFLQTNIRLEIIPGRYSSLTDHKFRAPYRIRCAAASPVKKRYNITLLPGDGIGPEVISVAKNVLQKAGFLQGLEFDFQEMPFGGAALDLVGVPLPEETSTAAKQSDAILLGAIGGYKWDKNEKHLRPEMGLLNIRRDLNVFANLRPATVLPQLVDASTLKKEVAQGVDMMIVRELTGGIYFGEPRGITINENGEEVGFNTEIYAAHEIDRIARVAFETARKRRGKLCSVDKANVLDASILWRKRVTALASEYPDVELSHMYVDNAAMQLVRDPKQFDTIVTNNIFGDILSDEASMITGSIGMLPSASLGESGPGLFEPIHGSAPDIAGQDKANPLATILSAAMLLKYGLGEEKAAKMIEDAVVDALNKGFRTGDIYSPGNKLVGCKEMGEEVLKSVDSKVPV

SEQ ID NO: 13675 - protein, 179 aa, Francisella tularensis subsp. novicida
ESVDLDKLGIYKIENTTVEVINSVIDYAELMQQIFDFDKIRELFAKGFKVRFDSMCAVSGPYAKYIFETLLQAPAGTVVNAQPLEDFGGFHPDPNPVNAEDLVKHMRSGKYDFGAASDGDADRNMIVGKQIDVSPSDSLAIMAANAHLIPAYSKGIKGVARSMPTSTAVDRVAESLRLP

SEQ ID NO: 13676 - protein, 140 aa, Brassica napus
  misc_feature (11)..(12): Xaa can be any naturally occurring amino acid
  misc_feature (28)..(28): Xaa can be any naturally occurring amino acid
  misc_feature (32)..(32): Xaa can be any naturally occurring amino acid
  misc_feature (35)..(35): Xaa can be any naturally occurring amino acid
  misc_feature (39)..(39): Xaa can be any naturally occurring amino acid
  misc_feature (46)..(47): Xaa can be any naturally occurring amino acid
  misc_feature (52)..(52): Xaa can be any naturally occurring amino acid
  misc_feature (54)..(54): Xaa can be any naturally occurring amino acid
  misc_feature (58)..(60): Xaa can be any naturally occurring amino acid
  misc_feature (64)..(64): Xaa can be any naturally occurring amino acid
  misc_feature (72)..(72): Xaa can be any naturally occurring amino acid
  misc_feature (75)..(75): Xaa can be any naturally occurring amino acid
  misc_feature (78)..(78): Xaa can be any naturally occurring amino acid
  misc_feature (81)..(82): Xaa can be any naturally occurring amino acid
  misc_feature (85)..(85): Xaa can be any naturally occurring amino acid
  misc_feature (87)..(87): Xaa can be any naturally occurring amino acid
  misc_feature (90)..(91): Xaa can be any naturally occurring amino acid
  misc_feature (93)..(93): Xaa can be any naturally occurring amino acid
  misc_feature (97)..(98): Xaa can be any naturally occurring amino acid
  misc_feature (102)..(102): Xaa can be any naturally occurring amino acid
  misc_feature (105)..(105): Xaa can be any naturally occurring amino acid
  misc_feature (107)..(109): Xaa can be any naturally occurring amino acid
  misc_feature (111)..(111): Xaa can be any naturally occurring amino acid
  misc_feature (113)..(113): Xaa can be any naturally occurring amino acid
MASSMLSSAAXXTSPAQGTMVAPFTGLXSSAXFPXTRKXNNDITFXXSNGRXVXCMKXXXPVGXKKIENLSXLSXLTXMNXXKGXDXPFXXKXVSCXXIQMXHGXFXXXGXGXTPPILIGVLKGNFLGRADGGQKGKTKF

SEQ ID NO: 13677 - protein, 228 aa, Schizosaccharomyces pombe
MSEETSIPGIIASTPPISKDSRRNVSHWLQALAVFLHSVSLTLTASWYTVLWAFLPFWPFLIVYLIWLIYDDGFVTGKDRQKRWLRNAPPYRWFCHYFPIRLHKTTELDSEKNYIFGYHPHGIISLGAFGGFASEGADFSKLFPGINVSVLTLNSNFYVPVYRDYLMALNINSVSKKSCVSILSRKPGDSVLIVIGGAQESLLSRPGQNNLVLKKRFGFVKLAFLTGS

SEQ ID NO: 13678 - protein, 496 aa, Burkholderia xenovorans LB400
MGHMNETPALPAWLDGSPKLLLIDGQPTPARSGRTFETINPTTGKALAQIAEADEKDIDLAVAAARRALDGPWGRFKPFDRQAVLLKLADLVETHFDELALLDTLDMGGPIRSTGAKRTRAIGLLRFYAGLATSIHGSTIDNSQAGEVISYTVKEPVGVVAAINPWNGPLGLAIWKIAPALAAGCTVVLKPAEQAPLSPLRFGELCLEAGIPQGVVNVVTGFAGAGAALAAHPGVDKVAFTGSTEVGQHIIRASAGNIKRVSLELGGKSPNIVFADANLDAAVPGAAMAVFANSGQICSAGTRLFVQRSIHEEFVERLSSFAKTLRVGNPLDPDTQLGPLVSEAQLKRVTSYLDKGREEGARAVAGGTRLQNDELKNGYFVEPTVFDGVKDDMAIAREEIFGPVISVLPFDTAEEAVQRGNDTEYGLGSGVWTRDIGNAHRVARGLRAGSVWVNCYQVMDPAVPFGGYKMSGYGRESGVEHMEEFLQTKAIWIKTD

SEQ ID NO: 13679 - protein, 292 aa, Ashbya gossypii ATCC 10895
MSSIYKALSGKNQKKKDGNAGAEKQYMNKQRVLLISSRGVTYRHRHLIQDLHSLMPHSRKEPKLDTKKDLGQLNEIAELYNCNNVAFFEARKHQDLYMWLSKPPNGPTVKFYLQNLHTMDELNFTGNCLKGSRPVLSFDKRFDTQPQYRLFKEMFIHTFGVPPQARKSKPFIDHVMSFSIVDDKIWVRNYEISHAARNNSEYEDKQDEDISLVEIGPRFVMTPILILEGAFGGPKIYENKQYVSPNVVRAQLKQEAAKEARARADAAVQRKIKRRDNVLAMDPLSNDALFKN

SEQ ID NO: 13680 - protein, 313 aa, Enterococcus faecalis
MKRTGILLVNLGTPKDSSKTEVRKYLKTFLSDRRVIKIHPIIWKPILNGIILNIRPKKSAKLYQKICTENGFPLLEYTEKQMENLKNICPEVEVTIGMSYSEPSIETALDTLLSKEIEELNVIPMYPQYSGTTVGSVFDSVMNYFIKSDRIVDIKFIRSFYNNPQYIDYFSKKINEALNESPIDAIVFSYHGIPMSYVKDGDNYPKECTKTTKLIMDKLGDIRYYQTYQSKFGPSEWLKPATDDTLKKLPSKGIKNILIVAPGFVVDCLETIEELEHENRNYFLENGGEVYKYVHPFNGDIEFAKLVKDIISL

SEQ ID NO: 13681 - protein, 157 aa, Lactococcus lactis subsp. lactis Il1403
MNFYDFSAFKMNGETVSMSDFKGKVVIVVNTASKCGFTPQFEGLEKLYENYKDQGLEILGFPCNQFVNQDAGENSEINEFCQLNYGVTFPMFQKIKVNGKEAHPLYQFLKKEAKGALSGTIKWNFTKFLIDREGNVIERFAPKTEPKEMEEEIQKLL

SEQ ID NO: 13682 - protein, 181 aa, Medicago truncatula
MDTVTSTSASLTLTLPTLPVRTITASISVSSSLPLPRSHRQQRLYSQKRSFSNSSSSSVAVPKFTVSCGITEINESQFNVTVLKSERPVLVEFVATWCGPCRLITPAMESIAQEYADRLTVVKIDHDANPQLIEEYKVYGLPTLILFKNGEEFPGSRKEGAITKVKLKQHLDALLESISVT

SEQ ID NO: 13683 - protein, 546 aa, Pseudomonas putida KT2440
MSELIRVPDIGSGEGEIIELFVKVGDRIEADQSLLTLESDKASMEIPAPKAGVIKELKVKLGDRLKEGDELLVLEAEGAAAAAPEAPAAAAAPAAAPAPAAEAAPAAPAAAPAAASVQDIHVPDIGSSGKAKIIEVLVKVGDTVEADQSLITLESDKASMEIPSPAAGVVEEVLCKLEDEVGTGDLIFKLKVAGAAPAAAPAPAAAPAPAKAEAAPAAAPAAAAPAAAPAPAATAPAAGSNAKVHAGPAVRQLAREFGVELGAVAATGPHGRILKEDVQVYVKAMMQKAKEAPAAAGATGGAGIPPIPAVDFSKFGEVEEVALTRLMQVGAANLHRSWLNVPHVTQFDSADITELEAFRVAQKAVAEKAGVKLTVLPLLLKACAFLLKELPDFNSSLAPSGKAIIRKKYVHIGFAVDTPDGLLVPVIKNVDQKSLLQLAAEAAALAEKARTKKLSADEMQGACFTISSLGHIGGTGFTPIVNAPEVAILGVSKATMQPVWDGKAFQPKLMLPLSLSYDHRVINGAAAARFTKRLGDVLGDIRTMLL

SEQ ID NO: 13684 - protein, 236 aa, Kluyveromyces lactis NRRL Y-1140
MSVQDRRRILGPAEAKPLQFAAITPVRTVENRDDGNGNKSGKESVFISTDLVTNANGSSYLEYMDGTSDQVLVMSSVFGPRPLRGSFQSKASVSIQFKEVTLEHLNTGEIKEICTFLTNVFNAVINVEKYPKSGIDIFIDLIQHSNSNPTEEANIVNILPTCINSITMALVDAGIEIIDLVSAGSKDNSVVAFIRNGHEIVGIWSDDDNVTDISKLIEECKAKYLVNKQTLVQYLK

SEQ ID NO: 13685 - protein, 529 aa, Xanthobacter autotrophicus Py2
MHKKIGQCAGQQRVPVSRRRLLETHHKGKRIMREIGHFIGGKHVPGTSGRYADVYQPMTGEVIAHVALASTDELNAAVANAKAAQPAWAATNPQRRARVLMKFLELVQRDYDKLADLLAREHGKTVPDARGDIQRGLEVVEFAVGIPHLMKGDYSDGAGPGIDIYSMRQALGVVAGITPFNFPAMIPMWKFGPAIACGNAFILKPSERDPGVPMMLAELMLEAGLPPGILNVVNGDKESVDGILDHPDIQAIGFVGSTAIAQYIYARGAANGKRVQGFGGAKNHMIIMPDADMDQAVDALIGAGYGSAGERCMAISVAVPVGEDAAERLLEKLVPRVENLKIGPSTDGAADFGPLVTREAVDRVKNYVDIGLQEGAKLLVDGRGFKMQGYENGFYMGGCLFDHVTADMRIYKEEIFGPVLSVVRAPDYKEALRLPTEHEYGNGVAIFTRDGDAARDFASKVNVGMVGINVPIPVPLAYHTFGGWKRSGFGDLNQHGPDGVRFYTKTKTVTSRWPSGIKDGADFVIPTMG

SEQ ID NO: 13686 - protein, 394 aa, Mycoplasma pneumoniae M129
MAREKFDRSKPHVNVGTIGHIDHGKTTLTAAICTVLAKEGKSAATRYDQIDKAPEEKARGITINSAHVEYSSDKRHYAHVDCPGHADYIKNMITGAAQMDGAILVVSATDSVMPQTREHILLARQVGVPRMVVFLNKCDIATDEEVQELVAEEVRDLLTSYGFDGKNTPIIYGSALKALEGDPKWEAKIHDLMNAVDEWIPTPEREVDKPFLLAIEDTMTITGRGTVVTGRVERGELKVGQEIEIVGLRPIRKAVVTGIEMFKKELDSAMAGDNAGVLLRGVDRKEVERGQVLAKPGSIKPHKKFKAEIYALKKEEGGRHTGFLNGYRPQFYFRTTDVTGSISLPENTEMVLPGDNTSITVELIAPIACEKGSKFSIREGGRTVGAGSVTEVLE

SEQ ID NO: 13687 - protein, 484 aa, Rhodopirellula baltica SH 1
MLDFGTAGTQTLGRREIIGTAVEQRASDEQRSNIGQSKLNQRVFLWSLTSSLAGFLFGFDTVVISGAEKAIQGLWALGDFQHGLALSAALWGTVIGSLVGGWPTDKFGRKKTLLWIGILYLVSAIWSGFATDVFSFMIARFIGGLGVGISTVAAPLYISEISPPKHRGTLTGLFQFNIVFGIMVAFASNYLIGTWGNENAWRWMLAVEAIPALIFTVMCISLPSSPRWLIAVKKDQAAGMSVLKQLRPDASDEEVQRTVDEIVASLRAESDLTPAEPFWSRRLFTPISIAFLVAFFNQLSGINAVLYFSPRIFELAGMGEQAALLQSIGIGITNLIFTFVGLYLIDRLGRRTLLLIGSAGYILSLGTCAYAFQSETFSIVPACIFAFIASHAMGQGAVIWVLISEVFPNEHRAAGQSLGSFTHWIFAALLTLVFPAVVETFHPAAIFGFFCFMMVLQGLWVITMLPETKGISLEQMEAKLGIRV

SEQ ID NO: 13688 - protein, 469 aa, Solanum tuberosum
MAPEFQKNAMYVSNELENGDVQKNFDDDGREKRTGTLLTASAHIITAVIGSGVLSLAWAIAQLGWVAGPAVLFAFSFITYFTSTLLADCYRSPGPISGKRNYTYMDVVRSHLGGVKVTLCGIAQYANLVGVTIGYTITASISMVAVKRSNCFHKNGHEASCSIESYPYMIIFAVIQIVLSQIPNFHKLSWLSILAAVMSFTYASIGLGLSIAKASGVGHHVKTALTGVVVGVDVSGTEKVWRSFQAIGDIAFAYAYSTVLIEIQDTLKSSPSESKVMKRASLAGVSTTTLFYVLCGTIGYAAFGNNAPGNFLTGFGFYEPFWLIDFANVCIAVHLVGAYQVFCQPLYGFVEGRCSERWPDSKFITSEYAMQVPWCGTYNLNLFRLVWRTTYVIVTAVIAMIFPFFNDFLGLIGAASFYPLTVYFPIEMYIAQRKIPKYSFTWVWLKILSWTCLISITCCSCWIDPGTCH

SEQ ID NO: 13689 - protein, 554 aa, Mycobacterium sp. KMS
MTGPTAVPRKPVILTVDDDPAVSRAVARDLRRHYGETFRIVRAESGPDALETLNELKLRGETVAVFVADYRMPQMSGIEFLEEAMDLYPMARRVLLTAYADTHAAIDAINVVDLDHYLLKPWDPPEEKLYPVIDALIEAWRATGDRAIPHTKIIGHPWNARSSEVREFLARNRLYYTWFRADEAKGRQLLEAAGQDGMTLPVVITEQGETLVDPSDAELGATLGLTTTPAEDFYDLVVIGGGPAGLAAAVYGASEGLKTVLIERTATGGQAGQSSRIENYLGFPDGLSGSQLAERARRQAEKFDAELITAAEVTALEVDGSARTVRLSDGRSIGARAVILAMGVEYRQLPAEGCDGLTGAGVYYGATSSVAADCEDDEVYVIGGANSAGQAAMYLSRSAKQVTIVSRRRLEDSMSHYLIQQIRANDKIRELPNTVVHAVKGDGHLEGICLENTLTGAREEHHCGRMFIFIGAEPRTDWLDGIVVRDDHGFILAGPDLRDVSGWMLDRPPHHLETSVPGVFVAGDVRAESAKRVAAAVGEGSMAVMLVHRYLAEA

SEQ ID NO: 13690 - protein, 396 aa, Corynebacterium glutamicum
MAKAKFERTKPHVNIGTIGHVDHGKTTTTAAITKVLADTYPELNEAFAFDSIDKAPEEKERGITINISHVEYQTEKRHYAHVDAPGHADYIKNMITGAAQMDGAILVVAATDGPMPQTREHVLLARQVGVPYILVALNKCDMVEDEEIIELVEMEVRELLAEQDYDEEAPIVHISALKALEGDEKWGKQILELMQACDDNIPDPVRETDKPFLMPIEDIFTITGRGTVVTGRVERGTLNVNDDVDIIGIKEKSTSTTVTGIEMFRKLLDSAEAGDNCGLLLRGIKREDVERGQVIVKPGAYTPHTEFEGSVYVLSKDEGGRHTPFFDNYRPQFYFRTTDVTGVVKLPEGTEMVMPGDNVDMSVTLIQPVAMDEGLRFAIREGSRTVGAGRVTKIIK

SEQ ID NO: 13691 - protein, 513 aa, Picea abies
MAGGMAVSRPKQGRAELYEGHITAYVILACIVAATGGSLFGYDLGVSGGVTSMDDFLKKFFRHVYERKQHHLRETDYCKYDNQLLTLFTSSLYLSGLVATFGASYITRSKGRRVSIIIGGLSFLLGAILNAAAKNLGMLIVGRILLGAGVGFSNQSVPLYLSEMAPAKVRGGTNNLFQLKTCLGIFVTNVINYFTNKLHPWGWRLSLGLAVIPALLMSIGGYFLPETPNSLVEQGRLQEGRQILEKIRGTKNVQAEFDDLVEASDVARAVKHPFRNLLQRRNRPQLVMGTCIPAFQQLTGNNSFLFYAPVIFQSLGMGNDASLYSAIMTGAVITFGALVSMFTVDRVGRRFLFMEGGTQMIVCHVIISILLKSNFGKGEKIPTGYGVGIVLLICIFYLLAYGWLWGPLSWLVCSEIFPMESLVVCVNLFFTAVIAQSFLALLCHLKYGIFLLFGGLVFIMSVVIYFFLPETKNVPIEEMRFQWAKHWYWKRFMDEYMDNDDENEKGNMTKAAA

SEQ ID NO: 13692 - protein, 516 aa, Arabidopsis thaliana
MAYASRIINHSKKLKDVSTLLRRENAATIRYYSNTNRAPLNREVTGVHYFFNYEIKSKQCNGKANIWKRIFMVQSHSLTLCGGYLPPHQEIGMPSLSPTMTEGNIARWLKKEGDKVAPGEVLCEVETDKATVEMECMEEGYLAKIVKAEGSKEIQVGEVIAITVEDEEDIGKFKDYTPSSTADAAPTKAEPTPAPPKEEKVKQPSSPPEPKASKPSTPPTGDRVFASPLARKLAEDNNVPLSDIEGTGPEGRIVKADIDEYLASSGKGATAKPSKSTDSKAPALDYVDIPHSQIRKVTASRLAFSKQTIPHYYLTVDTCVDKLMALRSQLNSFKEASGGKRISVNDLVVKAAALALRKVPQCNSSWTDDYIRQFKNVNINVAVQTENGLYVPVVKDADRKGLSTIGEEVRLLAQKAKENSLKPEDYEGGTFTVSNLGGPFGIKQFCAVVNPPQAAILAVGSAEKRVVPGNGPDQFNFASYMPVTLSCDHRVVDGAIGAEWLKAFKGYIENPKSMLL

SEQ ID NO: 13693 - protein, 351 aa, Staphylococcus aureus subsp. aureus NCTC 8325
MTKISKIIDELNNQQADAAWITTPLNVYYFTGYRSEPHERLFALLIKKDGKQVLFCPKMEVEEVKASPFTGEIVGYLDTENPFSLYPQTINKLLIESEHLTVARQKQLISGFNVNSFGDVDLTIKQLRNIKSEDEISKIRKAAELADKCIEIGVSYLKEGVTECEVVNHIEQTIKQYGVNEMSFDTMVLFGDHAASPHGTPGDRRLKSNEYVLFDLGVIYEHYCSDMTRTIKFGEPSKEAQEIYNIVLEAETSAIQAIKPGIPLKDIDHIARNIISEKGYGEYFPHRLGHGLGLQEHEYQDVSSTNSNLLEAGMVITIEPGIYVPGVAGVRIEDDILVTNEGYEVLTHYEK

SEQ ID NO: 13694 - protein, 285 aa, Bacillus cereus ATCC 10987
MRGKHIFIITALLSILMLSACGQKNDSDTVATATDSTITKSDFEKQLKDRYGKDMLYEMMAQDVITKKYKVSDDDVDKELQKAKNQYGDQFKNVLKNNGLKDEADFKNQIKFKLAMNEAIKKSITEKDVKDHYKPEIKASHILVSDENEAKEIKKKLDAGASFEELAKQESQDLLSKEKGGDLGYFNSGRMAPEFETAAYKLKVGQISNPVASPNGYHIIKLTDKKALKPYDEVKDSIRKNLEEERISDPIFGKKLLQKELKKANIKINDSELKDTFTLTREQEN

SEQ ID NO: 13695 - protein, 339 aa, Moniliophthora perniciosa
MVKVGINGFGRIGRIVLRNALQLQDIDVVAVNDPFIDLEYMVYMFKYDSVHGRFDGTVETKDGKLVINGKSIVVYGERDPAAIPWGSVGAHYIVESTGVFTTIEKASAHLKGGAKKVVISAPSADAPMYVCGVNLDTYDSSHTVISNASCTTNCLAPLAKVIHDKFGIVEGLMSTIHATTATQETVDGPSNKDWRGGHGINNNIIPSSTGAPKADSKVIPSLHGKLTGLSFRVPTPDVSVVDLVVRTEKACSYDDIKVAIKEAANGSLKGILTYTEENVVSTDFVGNNASSIFDATAGIQLNKNFVKLIAWYDNEWGYSRRVCDSCRRMTRRWADKWFN

SEQ ID NO: 13696 - protein, 453 aa, Saccharomyces cerevisiae
MSENNEEQHQQQQQQQPVAVETPSAVEAPASADPSSEQSVAVEGNSEQAEDNQGENDPSVVPANAITGGRETSDRVLYVGNLDKAITEDILKQYFQVGGPIANIKIMIDKNNKNVNYAFVEYHQSHDANIALQTLNGKQIENNIVKINWAFQSQQSSSDDTFNLFVGDLNVNVDDETLRNAFKDFPSYLSGHVMWDMQTGSSRGYGFVSFTSQDDAQNAMDSMQGQDLNGRPLRINWAAKRDNNNNNNYQQRRNYGNNNRGGFRQYNNNNNNNMNMGMNMNMNMNMNNSRGMPPSSMGMPIGAMPLPSQGQPQQSQTIGLPPQVNPQAVDHIIRSAPPRVTTAYIGNIPHFATEADLIPLFQNFGFILDFKHYPEKGCCFIKYDTHEQAAVCIVALANFPFQGRNLRTGWGKERSNFMPQQQQQGGQPLIMNDQQQPVMSEQQQQQQQQQQQQ

SEQ ID NO: 13697 - protein, 318 aa, Arabidopsis thaliana
MDGDELTEQETALYDRQIRVWGAGAQRRLSKSHVLVSGIKGTVAEFCKNIVLAGVGSVTLLDDRLVTTEVFNANFLILPDENAYVGKTVAEICCDSLKDFNPMVHVSIEKGDLSTLGVDFFEKFDVVVIGYSSRATKKAVNEKCRNLAKDVAFYTVDCRGSCGEIFVDLQNYKYTKLDETVECELTFPSFEEAVSVPWKPMPRRTAKLYFAMRVIELFEETEGRKPGECSLSDLPRVLKLKKELCEGNSVSENHIPDILLERLVSNNTEFPPACAIIGGILGQEVIKVISGKGEPLKNFFYFDAEDGKGVIEDLSHKL

SEQ ID NO: 13698 - protein, 960 aa, Mesembryanthemum crystallinum
MASIDAQLRLLVPAKVSEDDKLVEYDALLLDRFLDILQDLHGEDIRETVQECYERSAEYEGKHDPKKLDELGSVLTSLDAGDSIVVAKSFSHMLNLANLAEEVQIAYRRRIKKLKKGDLSDENSATTESDIEETFKRLVAELGKSPEEIFDALKNQTVDLVFTAHPTQSVRRSLLQKHGRIRNCLAQLYAKDITPDDKQELDEALQREIQAAFRTDEIRRTPPTPQDEMRAGMSYFHETIWKGVPKFLRRVDTALKNIGINERVPYNAPLIQFSSWMGGDRDGNPRVTPEVTRDVCLLARMMAANLYFSQIEDLMFELSMWRCTDELRARADELHSSSRRDAKHYIEFWKHIPPNEPYRVILGDVRDKLYNTRERSRQMLSHGVSDIPEDATYTSLEQFLEPLELCYGSLCACGDRPIADGTLLDFLRQVFTFGLSLVRLDIRQESDRHTDVMDAITQHLEIGSYKEWSEEKRQEWLLSELSGKRPLFGSDLPQTEEIADVLDTLHVLAELPSDCFGAYIISMATSPSDVLAVELLQRECRVKQPLRVVPLFEKLADLEAAPAAVARLFSIDWYKNRINGKQEVMIGYSDSGKDAGRLSAAWALYKAQEELVQVAKEYGVKLTMFHGRGGTVGRGGGPTHLAILSQPPETVNGSLRVTVQGEVIEQSFGEEHLCFRTLQRFTAATLEHGMHPPISPKPEWRALLDEIAVVATEKYRSIVFKEPRFVEYFRLATPELEYGRMNIGSRPSKRKPSGGIESLRAIPWIFAWTQTRFHLPVWLGFGAAFGYAIQKDVKNLSVLQKMYNEWPFFRVTIDLVEMVFAKGDPGIAALYDKLLVSEELWPFGERLRADFEETKGLILKIAGHKDLLEGDPYLRQRLRLRDSYITTLNALQAYTLKRIRDPNYNVQLRPHISKEYMDSTSNKPAAELVKLNPSSEYAPGLEDTLILTMKGIAAGMQNTG

SEQ ID NO: 13699 - protein, 322 aa, Salmonella typhimurium LT2
MGTTKHSKLLILGSGPAGYTAAVYAARANLQPVLITGMEKGGQLTTTTEVENWPGDPNDLTGPLLMERMHEHAAKFETEIIFDHINNVDLQNRPFRLTGDSAEYTCDALIIATGASARYLGLPSEEAFKGRGVSACATCDGFFYRNQKVAVIGGGNTAVEEALYLSNIASEVHLIHRRDGFRAEKILIKRLMDKVENGNIILHTNRTLEEVTGDQMGVTGLRLRDTQQSDNIETLDIAGLFVAIGHSPNTALFEGQLELENGYIKVQSGTHGNATQTSIPGVFAAGDVMDHIYRQAITSAGTGCMAALDAERYLDGLADASK

SEQ ID NO: 13700 - protein, 331 aa, Ashbya gossypii ATCC 10895
MVKVAINGLGKIGRLVMRIALSRANVEVVAINDPFITVDYAAYMFKYDSTHGKYAGDVQYEGNTLVIDGKKIKVFQERDPAQLPWGEEGIDIAIDSTGVFKELDSAQKHIDAGAKKVVITAPSSTAPMFVMGVNEEKYAGETIVSNASCTTNCLAPLAKVIDEQFGIEEGLMTTVHSLTATQKTVDGPSMKDWRGGRTASGNIIPSSTGAAKAVGKVLPQLNGKLTGMAFRVPTVDVSVVDLTVKLNKETTYDEIKAAIKAASEGKLKGILGYTEDAVVSTDFLGDNNSSIFDASAGIMLSPKFVKLVSWYDNEYGYSTRVVDLVEHVAAN

SEQ ID NO: 13701 - protein, 334 aa, Acidobacteria bacterium Ellin345
MAIKVGINGFGRIGRNVYRAALNDSNIEIVAVNDLTDPKTLAHLLKYDSILGNLHHNISATADAITVDSKSVKVFAEKDPAALDWSALGVQVVVESTGRFTKAADAKKHLKGSVKKVIISAPATDEDITIVLGVNQDKYDASKHHILSNASCTTNCLAPVVKVLHETFGIVSGLMTTIHSYTNDQVILDFPHKDLRRARAAAINMIPTSTGAAKALRLVIPEMAGKLDGFAIRVPTPNVSVVDLTFTAEKPITKDAINEAVKKAAEGELKGILGYETAPLVSSDFKGNSLSSIFDAELTKVLGNTAKVISWYDNEWGYSCRVRDLITFLGNKGL

SEQ ID NO: 13702 - protein, 380 aa, Shewanella sp. ANA-3
MDTKTMNISTMQNIMPSPALSSAPASVVGFSQLVCVERWNETADVVSFRFQAGEPMKFDYKPGQFMTLVLEINGEQACRSYTLSSTPSRPYSLMLTIKRVDGGLVSNYLIDHLQPGQTVRVLPPTGQFNLFDIPAKKYLFLSAGCGITPMYSMSRYLTDSQMNADIAFVHSARTQADIIFKTSLETMATRHRDFKLRYIVEDVTADTAWHPEAVLHNVGRLRPDNLRDLVPDFAERTVFLCGPEPYMQAVKTILAELNFDMTQLYHESFATAVKEAQSRVKQAEMQTEAPESGSNSFMLSIGDKKRALTAEQTLLEGIEAEGLPIIAACRSGVCGACKCQVLEGETESTSSMTLTPSEIEAGYVLACSTKLKSDVTLSLT

SEQ ID NO: 13703 - protein, 228 aa, Haemophilus somnus 2336
MTPYLIAPSILSANLARLGEDVENVLKSGADVIHFDVMDNHYVPNLTFGPAICKALRDYGIKAPIDVHLMVKPVDRIIPDFAKAGADYITFHPEASEHIDRSLQLIRDCGCKAGLVFNPATPLSYLDYVLDKIDVILLMSVNPGFGGQAFIPSTLEKLKQARKIIDESGLDIRLEVDGGVKVNNIAEIAQAGADMFVAGSAIFDQPDYKKVIDEMRQQLSTIREKETK

SEQ ID NO: 13704 - protein, 781 aa, Leptospira interrogans serovar Lai str. 56601
MKNRIANRIVLILFLGINLPLFSESPALELSKTVDPIWLILCAALVFFMQAGFLMLETGLSRLKNTINVAVKNLMDYIVGTIAFFSVGFALMFGLSYEGWIGTNHFFLTGLKTGKDFSFFLFQVAFMGTAATIVSGAVAERIKFSAYLIVSVVVSLFIYPVFGHWTWGGGWIAKIGFVDFAGSTVVHSLGGWIALAGVIVLGPRKDKFKEDGTPRKIHGHNLTFSVLGVFILWFGWFGFNGGSALSFTDQVPLIILNTSLAGSVGGIFAITFSWIFYRVASVEDCMNGVLGGLVAITAGCHAFQPYASLIVGALAGISVVITSWVLEKILKLDDVVGAFPVHGVCGIIGTLLLPILSENQDIRIYPQFIGVLTCSFWAFGLGMILFLLLKISIGIRVNEEFEEKGLNVTEHGAGSSWIDLIHSLKDLAKGGGDLTRKIHVDSGTEAGAIAFLMNRYLANLGQMIYTIKEKSIELEYSSSEISVAWGKMSQGIQQQAANLGEVTSIFDSFRESFQTISSSAAQQKEMETSASELLNELVFGFQKFDSDLKNSSEKSEESVKAIDLSRKELNQLETDINDIGSSAKKVEGLVKLLNDISAKLGMLSINASIEAARSGAAGKGFGVVAEEISKLASSTQESTKKASEILGEIQSTVSRGKTTVQTSVEFFKNLTEEFRFLAETYITIRKSSLHYSNLIGNLNRLNTSITNQSEIIMTDIDKRFSEIGNLYESVDLINGAFHEISAQSEELNATGEFLKQLAEILNSLVRNFRVEQNSSQELIPG

SEQ ID NO: 13705 - protein, 254 aa, Arabidopsis thaliana
MNSLAIRVSKVLRSSSISPLAISAERGSKSWFSTGPIDEGVEEDFEENVTERPELQPHGVDPRKGWGFRGVHRAIICGKVGQAPLQKILRNGRTVTIFTVGTGGMFDQRLVGATNQPKPAQWHRIAVHNEVLGSYAVQKLAKNSSVYVEGDIETRVYNDSISSEVKSIPEICVRRDGMYVHIVDPEHQFVAELRFSCFVLGKIRMIKYGESISKISFDELSKLSFFIQLIFAKKKEIVACVLIFVSHLAEEGLI

SEQ ID NO: 13706 - protein, 1555 aa, Wolinella succinogenes
MKKLFALVTLLLLGLTLHASTQKLSLRLQWKHQFEFAGFYTAIEKGYYQEAGLEVELKEYENGVNIIQEVLEGKSHFGIWGSGIIKEQMEGKPILLLANYFKRSPLAIVTSPEIKSPGDLKGKRLMLSEVNIDSANFTHMLQGFGLSMKDIQILSTSFNIHDFIDGKVDAYSIFLTNELFDLQRLGVRYNILDPSNYGVELYDENLFGAKEFVLKNPTLVKRFIDASNRGWQYALDHPEEIVDLILERYNTQNKTKEQLLFEARETAKMVLSRSYPIGSIDPHKVRKIGEIFAEARLAPPAKDYASFLFGQIRTSLDLTEAERAYILMRPTLRVQNESDFAPMNYHSDGGQPAGFSIDYIKLLASKVGLKVEYVSGPTWSEFLQMMRDGRLDAMVNIAKSPEREEYLLFTSPYSEIISAVFTKDSRAQEFSSLNDLKGKKLAVVKGFFEEALLKKHYPEIEMVFAEDTLSALKMVAFGKADAAINSLQVGNFLIKKSGLSGMAPAFEVQDPQFRVNLHVATSSSNSTLRNLLEKAKEQVSDSELLLLTSKWFLQGNAPDKEKRITLSEKERAYLKARSTPFTLCVDPLWMPFEKLDSKGNYEGIAADLLKIVFERTGVEAKVLQTKDWVETLNAVKSGQCDILSFSNQTPAREEWLLFSDPLFQDPNVFITHADHPFITNPKSLEGKTIVLPKGTSIEEWVRRDYPWLKLILVETEEEVFKALLERKADLSIRSLTVAAYTIKKEGLFSLKIAGQLPEKDNHFRMGIKPKEPILRDILNQGIHTLTPEEIDRIANKFVSVNIQKGFDYSLLWKILIGMAGIFVGFFYWNRKLTEYNKALQAAKEKAEAATQEKSNFLANMSHEIRTPMNAIIGMTYLAQQTDLTPLQRDYLQKIEGSANALLGLINDILDFSKIEAGKLEIECIDFDLHSVIEHVSTLVELKATEKNLEFVVSYDQGMNMNLHGDPLRLGQILTNLANNAIKFTHEGEVGIYITKQELHRYRFEVRDTGIGLSPGQKEKLFRSFSQADTSTTRQYGGTGLGLAISKQLVEMMNGRIWVESEEGKGSSFIFEIELNEQENAPKESKAFSHKHVLIVDDTPSWQKILARLLKGFHIEVSVASSGEEALRLIKEQPGFYDLILMDWKMPQMDGIETTKLIKESCETPPPTIIMVSSYRQENIVNAAKEQGINVFLQKPINPSLLYNVLLEILGEGIKQSGVQKADSHSLKNELTTRAGSQILLVEDNAMNREIIMGMLQPFGIRIDIAQNGQEAVTLYQENPKRYELILMDIQMPVMDGYEATKILRAQGANLPIIALTANAMKSDIERTKAAGMDEHLNKPIVVEKLFGTLLAHLTPKCAPQENPSLAPQELQSSTLPTLVHTDTLKGIAHLAGDEALYRKLLRDFIEHYENLEIEPASQEGARILHTLKGLSANLGMDELSRLAKECEENPSLTSLASLTQALSQALQELKESGILSDSTPLIPQIAAPEGRVEEIWSELGSLLPKRRPPLCKPLLEELEGYALNERDRALFERLKPLVERYKFSEALKILEERLS

SEQ ID NO: 13707 - protein, 181 aa, Brassica napus
MASSMLSSAAVVTSPAQATMVAPFTGLKSSSAFPVTRKANNDITSIVSNGGRVSCMKVWPPVGKKKFETLSYLPDLTEVELGKEVDYLLRNKWIPCVEFELEHGFVYREHGSTPGYYDGRYWTMWKLPLFGCTDSAQVLKEVQECKTEYPNAFIRIIGFDNNRQVQCISFIAYKPPSFTGA

SEQ ID NO: 13708 - protein, 383 aa, Shigella flexneri 2a str. 301
MFEPMELTNDAVIKVIGVGGGGGNAVEHMVRERIEGVEFFAVNTDAQALRKTAVGQTIQIGSGITKGLGAGANPEVGRNAADEDRDALRAALEGADMVFIAAGMGGGTGTGAAPVVAEVAKDLGILTVAVVTKPFNFEGKKRMAFAEQGITELSKHVDSLITIPNDKLLKVLGRGISLLDAFGAANDVLKGAVQGIAELITRPGLMNVDFADVRTVMSEMGYAMMGSGVASGENRAEEAAEMAISSPLLEDIDLSGARGVLVNITAGFDLGLVEVETVGNTIRAFASGNATVVIGTSLDPDMNDELRVTVVATGIGMDKRPEITLVTNKQVQQPVMDRYQQHGMAPLTQEQKPVAKVVNDNAPQTAKEPDYLDIPAFVRKQAD

SEQ ID NO: 13709 - protein, 105 aa, Alicyclobacillus acidocaldarius
ATMTLTDANFQQAIQGDKPVLVDFWAAWCGPCRMMAPVLEEFAEAHADKVTVAKLNVDENPETTSQFGIMSIPTLILFKGGEPVKQLIGYQPKEQLEAQLADVLQ

SEQ ID NO: 13710 - protein, 361 aa, Aspergillus nidulans FGSC A4
MATDTSTYKLNHTMLRVKDPKRSVEFYKFLGLNQVQQLDFPDNKFSLYFLAYNGPQSLQGDRHWTDRNAVLELTHNYGTENDPNYSITNGNTEPHRGYGHIAISVDNIEAACQRLEDAGYAFQKKLTEGRMRHIAFVKDPDGYWVEIIKRRDEAMSTSTDPATYRLNHTMLRVKDAEASLKYYQEVLGMTLVRTIENKEAAFNLYFLGYPASNPQATEGANNPVAEWEGLLELTWNYGTEKQEGKVYHNGNDEPQGFGHICVSVDDLNAACERFESLKVNWKKRLTDGRMKNVAFLLDPDGYWIEVIQNEALKRTSNWRIVQARCRPIWVKDSAVSNGGTITHEYKLIKGFARGLEFGGGI

SEQ ID NO: 13711 - protein, 508 aa, Burkholderia sp. 383
MNAAVPQTTLALPTAKLLIDGAFVESQSTEWGDIVNPATQEVIGRVPFATLDEVDAAIASAQRAFQTWKTTPIGARLRIMLKFQDLVRRNLERIAHTLTAEQGKTLPDAQGDIFRGLEVVEHACSIGTLQQGEFAENVAGGVDTYTLRQPIGVCAGITPFNFPGMIPLWMFPMAIVCGNTFVLKPSEQDPLSTMQLVELAIEAGVPQGVLNVVHGGKTVVDRLCTHPDIKAISFVGSTRVGTHVYNLGSQHGKRVQSMMGAKNHAVVLPDAHREQSINALVGAGFGAAGQRCMATSVVVLVGKARDWLPELVEKAKALKVNAGAEAGTDVGPVVSKAAKERILSLIDQGVKEGATLLLDGRDVKVPGYEQGNFVGPTIFSGVTTDMSIYTEEIFGPVVVVLEADTLDEAIALVNRNPMGNGVGLFTQSGAAARKFQSEIDIGQVGINIPIPVPVPYFSFTGSRGSKLGDLGPYGKQVVQFYTQTKTVTARWFDDDATAGGVNTTIALR

SEQ ID NO: 13712 - protein, 247 aa, Nocardioides sp. JS614
MTHTLILLRHGESEWNAKNLFTGWVDVNLTEKGRAEAVRGGELMREAGVLPDVVHTSVQRRAINTACLALDAADRHWIPVRRSWRLNERHYGALQGKNKKETLEAYGEEQFMLWRRSFDVPPPPIEEDSEFSQFGLPQYAGLGDDMPHTECLKDVIARFLPYWESDIVPDLRAGHTVLIAAHGNSLRALVKHLDGISDEDIAGLNIPTGMPLVYELDDDFRPTVPHGRYLDPEAAAAAAAAVANQGR

SEQ ID NO: 13713 - protein, 574 aa, Kluyveromyces lactis NRRL Y-1140
MNATATENPHVHQNQHEIQKALSNYDTSFLSDDEEDLCPLCIEPLDVMDKHFKPCPCGYQICQFCYNNIRQNPELNGRCPACRRKYDDESVEYIVLSPEELKMERSKQARKERDRKQRERERRENDTHNRKQLAGMRVIQKNLVYVIGLNPPYPYEELPSILRSDKYFGQYGKINKIVINKKTGHEHHSVSNSSSHINSGYGIYVTFSRKDDAAKCIQAIDGIYIDGHQVKAAYGTTKYCSSYLRGQPCPNPNCMFLHEPGEEADAFNNARKEHAHHSHAPPTLAKPSTSASSTPKLAHASLRTDDSTVPAAATSSSKQTAPVLTPAPVPSGSNPWGISQAPTPVSTIFNKTSTSTTFPTLSSSLGETLNSPGPGTPTTTGSAPTANSSSNVSSKKKGEKTYEDPYDPMATCVKFLDQTFKFLSDIPERSYTFNSNLLDDETYQSYPSLFSFEKIGCSEQSEGVLGAKLCDLLTIKPVDHMSSLLPFIQNKATPTMLPPGIAVQQPQLVQQQKQQLQQQQLQQQQQQLSLQMQLQAQQGMAQQGMAQQVMSQPQSNSSDLLNQLIHGKKQTAAV

SEQ ID NO: 13714 - protein, 190 aa, Triticum aestivum
  misc_feature (27)..(27): Xaa can be any naturally occurring amino acid
  misc_feature (37)..(37): Xaa can be any naturally occurring amino acid
  misc_feature (79)..(79): Xaa can be any naturally occurring amino acid
SKRVLTSGRVRLLLHRGTHCFRGFGRXRNGERRRKSXVRGCIVSQDLSVINLVIVKKGENDLPGLTDTEKPRMRGPKRXASKIKKLFNLGKDDDVRSYVNTYRRTFLNKKGKKVSKAPKIQRLVTPLTLQRKRARIADKKKRIAKKKSEAAEYQKLLAQRLKEQRDRRSESMAKRRSKLSAATKAPAASA

SEQ ID NO: 13715 - protein, 304 aa, Xanthomonas campestris pv. vesicatoria str. 85-10
MTTLRIATRKSPLALWQSEHVAAALRQHHPGLEVVLVPMSTRGDEMLDRSLAAIGGKGLFLKELELAMLRGEADCAVHSLKDVPMELDAPFVLPAILERGDPADALVSNLYASLQALPLGARVGTSSLRRQAQLRAARPDLELIDLRGNVNTRLAKLDNGGYDAIVLACAGLQRLGLEARISARLDAPEWLPAPAQGAVAVECRGDDARIYSLLAVLDAGRTRACVEAERAMNRALHGSCHVPVAAFARWEGQGLFLQGMVGSASDGRLIHADAHGSAEDTEALGRRVAQGLFDKGAAQLLAEL

SEQ ID NO: 13716 - protein, 393 aa, Prosthecochloris vibrioformis
MAKESYKRDKPHVNIGTIGHVDHGKTTLTAAITSVLAKSGKAAAREFGDIDKAPEERERGITISTAHVEYQTDKRHYAHIDCPGHADYIKNMITGAAQMDGAILVVAGTDGPMPQTREHILLARQVNVPALVVFLNKVDIADPELLELVEMELRELLTEYGFPGDDIPIIKGSALNALNGDPEGEKAIMELMDAVDDYIPEPVRDVDKPFLMPVEDVFSISGRGTVGTGRIERGIIKVGNEVEIVGIKPTTKSVVTGIEMFQKTLDEGQAGDNAGLLLRGVDKEALERGMVIAKPGSITPHTKFKAEVYILKKEEGGRHTPFFNGYRPQFYFRTTDVTGSVTLPEGVEMVMPGDNLSVDVELIAPIAMEESLRFAIREGGRTVGAGSVTKIVE

SEQ ID NO: 13717 - protein, 181 aa, Brassica napus
MAYSMLSSAAVVTSPAQATMVAPFTGLKSSAAFPVTRKANNDITSIASNGGRVSCMKVWPPVGKKKFETLSYLPDLTEVELGKEVDYLLRNKWIPCVEFELEHGFVYREHGSTPGYYDGRYWTMWKLPLFGCTDSAQVLKEVQECKTEYPNAFIRIIGFDNNRQVQCISFIAYKPPSFTGA

SEQ ID NO: 13718 - protein, 214 aa, Pasteurella multocida subsp. multocida str. Pm70
MNQSILSPFGQSEERAIAAINAFKQGNGVLVLDDEDRENEGDLIFPAETITVEQMTMLIRYGSGIVCLCLSDEICQQLDLPPMVTENTSVNKTAFTVTIEAAKGVSTGVSATDRVTTIRAAVADNAKPSDLSRPGHIFPLRAMTGGVLKRRGHTEASVDLARLAGYKAAGVICEITNDDGSMARAPEIVTFAQKFGFPVVTIEDLVAYRQKYDV

SEQ ID NO: 13719 - protein, 437 aa, Brassica napus
MKGVRKTYDNSYTLSSLFVFFVLIILRPIFSTTTLSSTESLTISSNRTLVSPGNIFELGFFNTTSSSRWYLGIWYKKISERSYVWVANRDNPLSNAVGTLKISGNNLVLLGHSNRSVWSTNLTRENERSPVVAELLANGNFVMRDTNNNRSSRFLWQSFDYPTDTLLPEMKLGYEPKTGLNRFLTSWRSSDNPSSGDFSYKLEARRLPELYLSSGIFRVHRSGPWNGIRFSGIPDDKKLSYLVYNFTENSEEVAYTFLMTNKSIYSRLTVSFSGYLERQTWNPTLGMWNVSWSLPFDSQCDSYRMCGPYSYCDVNTSPICNCIQGFIPSNVEQWDQRVWANGCIRRTRLSCSGDGFIRMKNMKLPETTMATVDRSIGVKECEKKCLSDCNCTAFANADIRNGWTGCVFWTGRLDDMQNYVTDHGQDLYVRLAAADLV

SEQ ID NO: 13720 - protein, 285 aa, Clostridium thermocellum ATCC 27405
MEAKVLNGKELSTKIKEELKIEVEDLKKNNINPGLAVIIVGNDPASRVYVNSKKKACAEIGIESFEYALEENTTQEELIELIHKLNKDDKVSGILVQLPLPKHIDEEKVIYAIDPSKDVDAFHPVNVGKLMIGNPDFLPCTPAGVMELIKESGIDITGKECVVVGRSNIVGKPMAMLLLAQNGTVTVCHSRTQNIDEVCKRADILVVAVGKPEFIKGSSIKPGAVVIDVGINRLENKKLVGDVEYESASRVASAITPVPGGVGPMTIAMLMKNTVKAAKLQAKMK

SEQ ID NO: 13721 - protein, 213 aa, Brassica napus
  misc_feature (202)..(202): Xaa can be any naturally occurring amino acid
MATNIGMMDSAYFVGRNEILGWINDRLHLNLSRIEEVASGAVQCQMLDMTFPGVVPMHKVNFAAKNEYEMIQNYKVMQEVFTKLKITKPLEVNRLVKGRPLDNLEFLQWLKRFCDSINGGIMNENYNPVERRSRGGKEKSIKGSSKVSKSLQTNNTHHTPTVTASSKPTGPKQARSHAIGGGSNSSAEVQALSKELEDLKVXVDVLEKERDFY

SEQ ID NO: 13722 - protein, 402 aa, uncultured bacterium 562
MKNVVITGVGIKSCIGNTYDDVLESLKLGKSGIVSNTSYAEMGFRSQVSGSMDIDFSQLIDRKLLRFMGESAAYSYLAAQDAISMASLSDEQLDSPRVGIVAGSGGASTRVMVTTADIAREKGPKRIGPYAVTKSMGSSISAILGTAFKIKGVNYSISSACATSAHCIGHGADLIKSGQQDIVIAGGGEDEHWSSSSLFDAMGALSSNFNDNPSVASRPYDKNRDGFVISGGAGILILEEEEHAKKRNANILAKLSGYYATSDGYDMVAPSGEGALRCMQGALKSYGSDVDYINTHGTSTPVGDIAELNAINELFGDNRPVISSTKSMTGHSLGATGAQEAIYSIMMLRDKFIAPSINIEDLCDEAKGLKLNTETTSSEIKSAMSNSFGFGGTNASLILTKY

SEQ ID NO: 13723 - protein, 175 aa, Pseudoalteromonas tunicata D2
MLKALLLSLTVLSANALASECDDFTNVEMKKLRSDKTINLCQFKDKPLLIINTASNCGFTPQFKGLEAIHKKYKDQGLVVLGFPSDDFFQEEDDEKDTAKVCFINYGVTFNMFAPISVRGKNADPIFKHLAEQTSSPKWNFYKYIVSKDRKTVLKFNSKTTPEDADFIKAIEESL

SEQ ID NO: 13724 - protein, 741 aa, Vitis vinifera
MESCDCIDPPWPGDELLMKYQYISDFFIALAYFSIPLELIYFVKKSAVFPYRWVLVQFGAFIVLCGATHLINLWTFGMHSRNVEVVMTTAKVLTAVVSCVTALMLVHIIPDLLSVKTRELFLKNKAAELDREMGLIRTQEETGRHVRMLTHEIRSTLDRHTILKTTLIELGRTLSLEECALWMPTRTGLELQLSYTLRQQNPVGFTIPIQHPVINQVFSSNRAVKISPNCPVARLRPLAGKYMPGEVVAVRVPLLHLSNFQINDWPELSTKRYALMVLMLPSDSARQWHVHELELVEVVADQVAVALSHAAILEESMRARDLLMEQNVALDLARREAETAVRARNDFLAVMNHEMRTPMHAIIALSSLLQETELTPEQRLMVEAILKSSSLLATLINDVLDLSRLEDGSLQLENGTFNLHALFREVLYLIKPIASVKKLFVSSSLAPDLPEFAVGDEKRLMQIMLNVVGNAVKFSNEGNISIFAFIAKSESLRDSRAPDFFPVHSDNHFYLRVQVKDSGAGIDPQDISKLFTKFAQCQSLAARNSGGSGLGLAICKRFVNLMGGHIWIESEGLGKGSTAVFIVKLGIPEYSNESKLPFFPKVSANHCQTNFPGLKVLVMDDNGVSRSVTKGLLVHLGCDVTTVSSADDCLRVVSQEHNVVFLDVCMPGVDGYEVAIRIHEKFTTCRQGPLLVALMGNTDRVTKENYLRVGINGVVLKPVSVDKMRCVLSEVLEHRFLFETC

SEQ ID NO: 13725 - protein, 179 aa, Francisella tularensis subsp. tularensis
ESVDLDKLGTYKIENTTVEVINSVIDYAELMQQIFDFDKVRELFAKGFKVRFDSMCAVSGPYAKYIFETLLKAPAGTVVNAQPLEDFGGFHPDPNPVNAEDLVKHMRSGKYDFGAASDGDADRNMIVGKQIDVSPSDSLAIMAANAHLIPVYSKGIKGVARSMPTSTAVDRVAESLRLP

SEQ ID NO: 13726 - protein, 306 aa, Schizosaccharomyces pombe
KTTLHHFKMGNVQSQEGETRAHAVPSQDATTTPDNANNVPKEPRAQSMISIAADDLNQEGEMSDDNQQEGGNNRTSQNGTSGSSGHTKRRSQTSGKKTHQPYSGPCVPTIIRWRGGGEVVYVTGSFSRWKKKIQLLKSEDYTVLLQLRPGTQRFKFLVDGIWCCSSDFPTATDAEGNLYNYLEVEANEKLGASIDERLSQVHTDLPMEEKSESEQYSTEIPAFLTSNTLQELKLPKPPSLPPHLEKCILNSNTAYKEDQSVLPNPNHVLLNHLAAANTQLGVLALSATTRYHRKYVTTAMFKNFDV

SEQ ID NO: 13727 - protein, 412 aa, Bacillus cereus ATCC 10987
MEKKRVVITGLGAVTPVGTDVETAWENIKKGVSGIGRLTRIDPELFPAKVAAEINDFEVEKYIDKKEARRMDRFTQYAVAAAKMAVADAKLEITEENGPRIGVWIGSGIGGMETYEEQFKIFTEKGPRRVSPFFVPMMIPDMAAGQVSIATGAKGINTCSVTACASGANSIGDAFKAIQRGDADAMITGGAEAPLTNMAFAGFSSAKALTFNEDPATACRPFDKNRSGFVMGEGSGILILEELEHALARGAHIYAEIAGYGATGDAFHITMPAPGGEGGVRAMRQALADAGLQPEDIDYINAHGTSTDANEKYETMAIKETFGEHAYKVAISSTKSMTGHLLGAAGAVEAIFSIKSITDGVIPPTINYETPDPECDLDYVPNQARHQEVNAVLSNSLGFGGHNAVLVFKAYK

SEQ ID NO: 13728 - protein, 179 aa, Francisella tularensis subsp. holarctica
ERVDLDKLGIYKIENTTVEVINSVIDYAELMQQIFDFDKVRELFAKGFKVRFDSMCAVSGPYAKYIFETLLKAPAGTVVNAQPLEDFGGFHPDPNPVNAEDLVKHMRSGKYDFGAASDGDADRNMIVGKQIYVSPSDSLAIMAANAHLIPVYSKGIKGVARSMPTSTAVDRVAESLRLS

SEQ ID NO: 13729 - protein, 956 aa, Colwellia psychrerythraea 34H
MTNNNLLAQLNDNLDFISRHNGPDRTQQQHMLDTLKVDSIEQMIDKTVPDNIRLLQPMALAKPQSEIEMLATLKGIASKNKVNRSYIGQGYYDTHVPHVILRNVFENPGWYTAYTPYQPEISQGRLEALLNFQQMITDLTAMELSNASLLDEATAAAEAMSLCKRASKNKSNVFFVSDDVHPQTLDVINTRAKYFSFEVVVAPCSELENHDVFGALLQYPGTTGQVHNLEKIIEQAHSKKTLVAVAADLLALTVLKAPGEMGADVVIGSAQRFGVPMGYGGPHAAFMATKEKYKRTIPGRVIGVSIDSKGKPALRMAMQTREQHIRREKANSNICTAQALLANMASFYAVYHGPQGLRKMGRRVNRLTSVLAAGLQKAGIELVHNDFFDTITLQTNEKTDAIYQRALAADLNLRLLPDQLGISLDETTTSADVEALWLAITEQSFNVDDIEQTLSAEFCNIPADCQRTSEYLSHPVFNSYHSETRMLRYLKSLENKDFSLTHGMIPLGSCTMKLNATAQMIPVTWPEFSRMHPFAPSDQCTGYETLAESFSDMLIEITGYDAFSLQPNSGAQGEYAGLIAIQRYHASRGEDYRNICLIPSSAHGTNPASASMVSMRIVLVNCDKEGNVDLDDLKEKINLHRDQLSAMMITYPSTHGVYEESIKEICELIHEAGGQVYLDGANMNAQVGLTSPGFIGADVSHLNLHKTFCIPHGGGGPGMGPIGVKSHLADFLPGHSVTNTVGAVSATALGSASILPISWAYIALMGAEGLKSATELAILNANYIMEKLSPHYPILFRGKQGRVAHECIIDLRPLKESSGISEEDVAKRLMDFGFHAPTMSFPVAGTLMIEPTESESLEELDKFIDALITIRHEIAKVEEGTWTLADNPLVNAPHTLNDLTGSDWPRAYSRLTACYPSSCPSQPKFWPTTNRIDNVYGDRNLICSCPPIESYQSTDT

SEQ ID NO: 13730 - protein, 232 aa, Brassica napus
PRVRLRSSFRLLYITRTNLLVRASPSSLSRLPSKFTSAKQLVRSHHQIPLSTTGAKLSRSEHSMAASSEPKSIYDFTVKDAKGNDVDLSTYKGKVLLIVNVASQCGLTNSNYTELAQLYQKYKDHGFEILAFPCNQFGNQEPGSNEEIVQFACTRFKAEYPIFDKVDVNGDSAAPIYKFLKSSKGGLFGDGIKWNFAKFLVDKDGNVVDRYAPTTSPLSIEKDLKKLLGVTA

SEQ ID NO: 13731 - protein, 523 aa, Yarrowia lipolytica CLIB122
MIILYVLAVAVSFLIFKRVTYTMRSRELAKKWHCEEPHNLNEFPLNLPLFFLIINASRRHELLDTLLGLFRSFAPTKTVKQVLLGSFTIIPTNDPENIKAVLATQFKDFCLGQRHGQLAPVLGDGIFTLDGQGWQHSRAMLRPQFARDQVSDVEMIERHVQMMLLRIPNNKKFDIQELFFNLTLDTATEFLFGQTVGSQTVEMPNEDKSTVSDMPKDMRKSFQEDFNVAQHHGGIRTRFQMFYWLWRPTELFSSSKRVHAFVDHYVEKALANSDEEKSDDKYIFLRELAREVKDPRVLRDQALNILLAGRDTTAGVLSWIVYELARHPEVWKKLRAEIHQDFGDGSDLSQITFEGLKRCEYLRFVINETLRLYPSVPLNVRYASRDTTLPRGGGPDESKPILVRKGDTIVYNVFSMHRTEEFWGKDCDEFRPERWAEKGSRGWEYLPFNGGPRICLGQQYALTETSYVITRICQLFTNIENADTAVEPPQKLHALTLCHLNGVFVKMTRDEAAFAETEKLINA

SEQ ID NO: 13732 - protein, 407 aa, Campylobacter lari RM2100
MLNNTLFFKTQDFKKITAYANRMNDELESGDIGYYHLVDTSFDLIEESKEFIATKTHIENIVLVGMGGSSCGVKALKELLFDQVEEKKLFIIDNTSSHTFTQTMQKINPQKTLFIIASKSGTTIEVISLFKLIIAHFDFKNENLHENFVFITDLNSKLHKLGEELNIKCFFIPQNVGGRFSVLSAIGIVPLSFCGYDTKALLEGAKACYVDFFEKKCDQILQKAYHYCTHKSAHINVLFSYGDAFKGFNEWYIQLIAESLGKKQGFKRIGLTPIALIGARDQHSFLQLIMDGPKDKTVTFLKIKDSQKSPSIPNISFNHLQNCDFTNEVNLHDLLNAQCDATMHALIAENLSVDVIELEKLDAYHCGYLMYYYELFTSACGIMLGINTYDQPGVEVGKLILKNMLSK

SEQ ID NO: 13733 - protein, 762 aa, Vibrio vulnificus CMCP6
MSFRIKTIIGIACIEIIMLMLLVFSAMNFMRQSNQEQFIQKANATSQMFARASKDALLSLDLATLDDLTQEILSLPDILYVDIRNNDQQLAFAGALPKVSADWQADDHVSLGDLVFDVSEKITVDGLTYGEIRMGFNTTAIQTALDEASKAIVLIAVLEIILVALFSYFLGSYLSQNLYQLTRAAERVANDGPGFQLQLKAKDEIGKVAAAFDSMSHNLATSYQELEQARTQAELANESKSRFLASMSHEIRTPMNGVLGLLGILGETKLDNHQQNLVHTAKESGELLLSIINDILDFSRMEANTLILYPRPFELKSCVEEIVNSFEPLAKTKGLYLSLTFNDECDYVVVGDSNRYRQVLLNLLGNAVKFTQKGSVSLHVTTQNEGDKLYIRCEINDTGIGIAPDAMAILFEEFTMVDQGYSRTREGSGLGLAICKRLAQLMEGEINVESEVGKGSCFVFSVEMPLAEHDTVTQQAQPDNDSVCTLLQGKRILVAEDNTANQMVIKAMFERLGVAIDLANDGYEAVSMASNHHYDIIFMDISMPGKDGMQACKEIRQLPDAKQAATPIIALTAHALYGDKEKFLRSGMNGYLSKPLRSRHLIEELNNILSASNHHDTAHKPLETEKTNHMQITLTSEKNTTAPLVDELIIQQMIRDTSAEVMPMLIEHYIEESERRLVKIDQAIAHSDFQQLEFELHTLGSSSLALGNRRLSNLARKLERLCVAKEYDAVMEDASGIAQLAHDSLSALNERKQLGFVEPNSI

SEQ ID NO: 13734 - protein, 701 aa, Photobacterium sp. SKA34
MISSESEKLQETIIDLLRSQERENQLQDENEAILEGISAMAGANDKRQVFNSLLEVLRKFIGFDQALVLTREDEQEMLDVLVSTDNRFGTNSWLMESTFRRAINGECIALYSPKDIIEFSTQSVEALNDFSSALLTGVKVSSSDAVMILMSHDKSQFTPRCRRVLNRFRPLLARAIIDIDYRERLQSLVAARTQQLTFSQQRFKDFAKTAGDWFWEIDVDYNFTYISEPQVANTQISCDNFIEFFNNYPLFQNKLTSKLSQQVVFEDLEWNLSSVDNTDQWYSFSGTPYFDKYGKLQGFRGTAKDITSRKRRLFDLQEAQKQAETANKAKSQFIAMMSHEIRTPLNAVLGLMESLSLSGLNNKQNLWLSQMDQSAHLLLTIINDILDLSRIESGSFRLFNSDINVVESIRLVADQLAPQATKNNVQFQCEIDDAIPKQIYGDKNRIAQVLFNLIGNAVKFTSIGSVRVVARKVDDNIEIAVIDTGIGIAKDAQANIFNPFHQADGSITRRYGGTGLGLAISQHLIEKMDGTISLESELGTGSCFKISIPIIYPSLKSCEADIKFKNKSDCSLNILLAEDSKTNQLVAKLMLERRGHKVAITNNGKEAINVLLQGHNKFDLVLMDISMPILDGLEATKQLRQRKISIPIVALTANAMQSDQKIYHDIGMDGFLAKPICSNELDALLEKYQELKENQQSESTI

SEQ ID NO: 13735 - protein, 392 aa, Triticum aestivum
  misc_feature (185)..(185): Xaa can be any naturally occurring amino acid
MANVGGALLRGAGESFRFFVRGDPPCSERIASKILPVVKNQHLLLCTLLICNAAAMEALPIFLDSLVTAWGAVLISVTLILLFGEIIPQSICSRYGLAIGASVAPLVRVLVWICFPVAYPIAKLLDHVLGHGKAALFRRAELKTLVTLHGNEAGKGGELTHDETTIIAGALELSEKKAKDAMTPXCDTFVIDINAKLDRKLMQEVIEKGHSRVPVYYEKDTNIIGLPRVRNLLSINPDDEIPIKSVTIRKIPRVSEDMPLYDILNEFQKGHSHMAVVIKQNIPSYPAKQPSIDGGSLEVAIAIDEKQGEKVAKSLTPLRRWKSYPNTLNSNTGSRRGKWSKDQSDVLQVHEEPLPTLSEDEEAVGIITMEDVIEELLQEEIYDETDVHVEEQ

SEQ ID NO: 13736 - protein, 524 aa, Burkholderia xenovorans LB400
MCGEVRIARTFEREFMMNAVTQASNAHVSTVKLLIDGEFVDSATTEWRDVVNPATQEVLARVPFTTVAEVDAAVRSAHAAFATWKNTAIGARLRIMLKFQALIREHMPRIAKTLTAEQGKTLPDAEGDIFRGLEVVEHACSIGTLQQGGFAENVAGGVDTYTLQQPIGVCAGITPFNFPAMIPLWMFPMAIVCGNTFVLKPSEQDPLSTMQLVELALEAGIPKGVLNVVHGGKEVVDAICSHPLVRAISFVGSTTVGTHVYRLGSEHGKRVQSMMGAKNHAVVLPDANREQTINALVGAGFGAAGQRCMATSVVVLVGASKDWVPELVEKAKTLKVNAGHEPRTDVGPVVSRAAKTRVLGLIESGVKQGATLALDGRDVKVPGYEDGNFVGPTIFTDVTTDMDIYTQEIFGPVLVVLAAATLDEAIAIVNANPFGNGVGLFTQSGAAARKFQSEIDIGQVGINIPIPVPVPYFSFTGSRGSKLGDLGPYGKQVVQFYTQTKTVTARWFDDATVNDGVNTTISLR

SEQ ID NO: 13737 - protein, 184 aa, Haematococcus pluvialis
MSAMMNIRSSRPVTQATPSRPARSALGRRCTARAASEDVPVTEAAPIASTSSPADAPARSVAAPFSLLNATNEAINGRAAMLGFVAAVGAELASHQGIVSQVAGRYDNAELVEKALRGSDLGFFAIVSLVTMGTLAPRLLENEAVDARSFGPFTPGLEKTLGRAAMMGFAGVLLIELAKGSPLL

SEQ ID NO: 13738 - protein, 392 aa, Glycine max
  misc_feature (45)..(45): Xaa can be any naturally occurring amino acid
  misc_feature (112)..(112): Xaa can be any naturally occurring amino acid
MANSHLSTPSELFSRQHKPPRVPNLIGGSFLDSKSLTFIDVINPXEEFKAAVSAAKKAFPSWRKTPITKRQRVMLKFQELIRRDMDKLALNVTTEQGKTLKDAQGDVFRGLXVVEHACGMATLQMGEYVSDVSSGIDTYSIREPLGVCAGICPFNFPAMIPLWMFPVAVTCGNTFILKPSEKVPGASVMLAELAMEAGLPEGVLNIVHGTHDIVNAICDDDDIKAISFVGSNVAGMHIYARAAAKGKRVQANMGAKNHAVVMPDASVDATVNALVAAGFGAAGQRCMALSTVVFVGDSKLWESKLVEHAKALKVNVGTEPDADLGPVISKQAKERIHRLIQSGVESGARLVLDGRNIVVALIFSFIFIISYFIHGHFHTFSCMINLPLQSLA

SEQ ID NO: 13739 - protein, 413 aa, Erwinia carotovora subsp. atroseptica SCRI1043
MSKRRVVVTGLGMLSPVGNTVESTWSALLAGQSGISLIDHFDTSAYATRFAGLVKNFNSEEFISRKEARKMDAFIQYGVAAGVQAMQDSGLEVTEENAPRIGAAIGSGIGGLGLIEENHTALVNGGTRKISPFFVPSTIVNMVAGHLTIMFGLRGPSISIATACTSGVHNIGHAARIIAYNDADVMLAGGAEKASTPLGVGGFGAARALSTRNDDPQAASRPWDKDRDGFVLGDGAGLMVLEEYEHAKKRGAKIYAEIVGFGMSSDAYHMTSPPEDGSGAALAMENALRDAGVSTSQIGYINAHGTSTPAGDKAETQAVKSVFGADASRVLVSSTKSMTGHLLGAAGAVESIFSILALRDQAVPPTLNLDNPDEGCDLDFVPHEARQVSNLEYVLCNSFGFGGTNGSLIFRKV

SEQ ID NO: 13740 - protein, 247 aa, Brassica napus
RPRVRTHSRTVALVMTTAKVLTAVVSCATALMLVHIIPDLLSVKTRELFLKNKAAELDREMGLIRTQEETGRHVRMLTHEIRSTLDRHTILKTTLVELGRTLALEECALWMPTRTGLELQLSYTLRQQHPVEYTVPIQLPVINQVFVTSRAVKISPNSPVARLRPVSGKYLLGEVVAVRVPLLHLSNFQINDWPELSTKRYALMVLMLPSDSARQWHVHELELVEVVADQVAVALSHAAILEESMRA

SEQ ID NO: 13741 - protein, 657 aa, Coccidioides immitis RS
MPSAAPLATSGDGNLRANDNIRRFEAASRPLTPLEHNLFHNKTRCFVYGMQPRAVQGMLDFDFICKRTTPSVAGIIYTFGGQFVSKMYWGTSETLLPVYQSVGKAMAKHTDVDVVVNFASSRSVYSSTMELMQYPQIKTIAIIAEGVPERRAREIMVTAKEKGVTIIGPATVGGIKPGAFKIGNTGGMMDNIVASKLYRKGSVGYVSKSGGMSNELNNIVSQTTDGVYEGIAIGGDRYPGTTFLDHLLRFQADPQCKILLLLGEVGGVEEYRVIEAVKNGTITKPVVAWAIGTCASMFKTEVQFGHAGASANSQLETAVMKNQAMREAGIHVPDTFEELPEVLRAVYQKLVKQGIIKPQPEPIPPKIPIDYAWAQELGLIRKPAAFISTISDDRGQELLYAGMPISDVFKEDIGIGGVMSLLWFRRRLPPYASKFLEMVLMLTADHGPAVSGAMNTIITTRAGKDLISALVSGLLTIGSRFGGALDGAAEEFTKAFDKGLSPRDFVDTMRKENKLIPGIGHKVKSRNNPDLRVELVKEFVVKHFPSHKLLDYAIAVETVTTSKKDNLILNVDGCVAVCFVDLMRNCGAFSPEEAEDYLSMGVLNGLFVLGRSIGLIAHYLDQKRLRTGLYRHPWDDITYLLPTLQKGGAEGRVEVSM

SEQ ID NO: 13742 - protein, 365 aa, Gypsophila paniculata
MVADRPKTLTSLEGDNKLNPNFIRDEDERPKVAYNTFSNDIPVISLAGLDGENRAEICRKIVEACEDWGIFQVVDHGVGDDLIADMTRLAREFFALPPDEKLQYDMSGGKKGGFIVSSHLQGEVVQDWREIVTYFSYPITSRDYTRWPDKPDGWKKVTEEYSNKLMGLACRLLGVLSEAMGLESEALTKACVDMDQKIVVNYYPKCPQPDLTLGLKRHTDPGTITLLLQDQVGGLQATRDGGRTWITVQPISGAFVVNLGDHGHFLSNGRFKNADHQAVVNSECSRLSIATFQNPAPEATVYPLAIREGEKSIMEEPITFAEMYRRKMSKDLEAARLKRLAKEELVIKEMDKAKLETKSIEQILA

SEQ ID NO: 13743 - protein, 486 aa, Coccidioides immitis RS
MSAKSIYEADGKAILNYHLTRAPVIKPSPLPAPTTHNAPAKLASLHFDEDCSVEGVLDQAESTYPWLLAKGAKFVAKPDQLIKRRGKSGLLALNKTWEEAREWIAARAGKPQQVETVTGVLRHFLVEPFVPHPQETEYYININSVREGDWILFTHEGGVDVGDVDAKAEKLLVPVNLKNFPSNDEIAAKLLSKIPQGLHNVLVDFITRLYAVYVDCQFTYLEINPLVVIPNADKTSAEVHFLDLAAKLDQTAEFECGTKWAVARSPAALGIRAPLKNDDKVTIDAGPPMDFPAPFGRELSKEEKFIADMDAKTGASLKLTVLNSTGRIWTLVAGGGASVVYADAIASAGFVSELANYGEYSGAPTETQTYNYARTVLDLMLRAPMHPDGKVLFIGGGIANFTNVATTFKGVIRALREVAPVLNEHKTQIWVRRAGPNYQEGLKNIKAVGEELHLNMHVYGPEMHVSGIVPLALNGKTTDVKEFGEA

SEQ ID NO: 13744 - protein, 764 aa, Dechloromonas aromatica RCB
MNILVVDATHLYRDILQRALGHYADVRVELALSQQEAREIVARETFHFFIISGQLPDGDGIELAKALRADGRAKAEPIVLLTSSASSGLATQAEQAGVSELFRKQDIDELLRFMRHYVELLQPMRCRILYVEDSRDQRALLEAQLRDWGMTVDAFASADEAWLAFEANDYDLVLCDVVLGGHMTGTRLINRIRRLPLPKGETPVLAVTAFDNPLRRIELFQLGVDDYVQKPILAEEIRARLHNLLTRKRAVERSQMLLAATALGVVVVGQDAVIESMDDNSLDMFRPATQPVLGQPLSILLPEEKNPGLLGQMMQRVMAEERISGLKAVGQRGDGEDFPVELTIIEINSGDGVRHFALLARDISEEQALATYLTRASEAAERAEQMKTAFLANMSHEIRTPLNAIIGMAHILSRTELDTAQKKYVGHIDAAGEHLLGLITNVLDMSKIEAGRLELENIPLAVENIVFEVLSMVADQAAEKGLDVRIGELDAPSGLVGDPVRLRQALLNYVSNAIKFTADGSIDVRVITQAVSEDSVLLRFEVADTGIGISAEARDEIFSAFRQADNSTTRRYGGTGLGLAITRQLAELMGGEVGVSSTPGQGSLFWFTASLKRASAPLARPAIPLLSAESAEVVLARDFAGCRFLLVEDEVINRHVAEAILSRLNCEIDTAKDGREAVDLASRNDYALILMDMLMPNMGGLEATQCIRQLPGGEKVPIVALTANAFAYEKQRCLDIGMNGFVTKPIRPEVLFETMLRCLNGEGV

SEQ ID NO: 13745 - protein, 375 aa, Fibrobacter succinogenes
HVDHGKTTLTAAICTTLAAKGLAAAKRFDEIDNAPEEKARGITINTSHVEYTTANRHYAHVDCPGHADYVKNMVTGAAQMDGAILVVAATDGPMPQTREHILLAHQVGVPKIVVFMNKCDMVDDAEILDLVEMEVRELLSKYDFDGDNTPIIRGSALKALEGDPEYQDKVMELMNACDEYIPLPQRDTDKPFLMPIEDVFTITGRGTVATGRIERGVVRLNDKVERIGLGETTEYVITGVEMFRKLLDDAQAGDNVGLLLRGAEKKDIVRGMVLAAPKSVTPHTEFKAEIYVLTKDEGGRHTPFMNGYRPQFYFRTTDVTGTIQLPEGVEMVTPGDTVTIHVNLIAPIAMEKQLRFAIREGGRTVGAGSVTEIIK

SEQ ID NO: 13746 - protein, 346 aa, Populus tremuloides
MGTEAETVCVTGASGFIGSWLIMRLLEKGYAVRATVRDPDNMKKVKHLLELPKASTHLTLWKADLSEEGSYDEAIQGCTGVFHVATPMDFESKDPENEVIKPTINGVLDIMRACAKSKTIRKIIFTSSAGTVDVEEKRKPVYDESCWSDLDFVQGIKMTGWMYFVSKTLAEQAAWKFAEDNNLDFISIIPTLVVGPFIMQSMPPSLLTALSLITGNEAHYGILKQGHYVHLDDLCMSHIFLYENPKAEGRYICNSDDANIHDLAQLLREKYPEYNVPDKFKDIDENLACVAFSSKKLTDLGFEFKYSLEDMFAGAVETCREKGLIPLSHKKQAVEECKENEVLPAS

SEQ ID NO: 13747 - protein, 665 aa, Magnaporthe grisea 70-15
MSPTATNGDGAKGSNPTGGLSANDNIRRFPAPSRPLSPLPNHALFNDKTRCFVYGLQPRAVQGMLDFDFICKRSTPSVAGIIYTFGGQFVSKMYWGTSETLLPVYQEVQKAVAKHPDVDTVVNFASSRSVYSSTLELMEYPNIKTIAIIAEGVPERRAREIAHIAKKKGITIIGPATVGGIKPGSFKIGNTGGMMDNIVASKLYRKGSVGYVSKSGGMSNELNNIISQNTDGVYEGVAIGGDRYPGTTFIDHLLRYQADPDCKILLLLGEVGGVEEYKVIEAVKEGVITKPIVAWAIGTCASMFKTEVQFGHAGSFANSQLETAATKNKSMKEAGFYVPNTFEELPELLSSLYQKLVKDGTIKPQAEPAVPKIPIDYSWAQELGLIRKPAAFISTISDDRGQELLYAGMPISDVFKEDIGIGGVMSLLWFRRRLPDYASKFLEMVLMLTADHGPAVSGAMNTIITTRAGKDLISALVSGLLTIGSRFGGALDGAAEEFTKAHDKGLSPREFVDLMRKQNKLIPGIGHRVKSRNNPDLRVELVKEYVKAKFPSCKLLDYALAVETVTTSKKDNLILNVDGCIAVCFVDLLRNCGAFSAEEAEDYLKMGVLNGLFVLGRSIGLIAHYLDQKRLRTGLYRHPWDDITYLLPTLSQTQPGNEGRVEVQI

SEQ ID NO: 13748 - protein, 400 aa, Herpetosiphon aurantiacus
MAKQKFERNKPHINIGTIGHVDHGKTTLTAAITKTMALRGRAEFRAFDQIDNAPEERARGITISISHVEYETENRHYAHVDCPGHADYIKNMITGAAQMDGAILVVSAPDGPMPQTREHILLAGQVEVPAMVVFLNKVDMMDDPELLELVEMELRELLTKYGFPGDEIPIVRGSAKGALDSASTDASQPEYQSIQELMQAVDDYIPTPERAIDKPFLMPIEDVFSIKGRGTVVTGRIERGIVKVGDTIEIIGMGPDVRTTAVTGVEMFKKLLDEGRAGDNVGALLRGIERTDVERGQVLAKPGSIKPHTKFKAEVYVLKKEEGGRHSPFFSGYRPQFYVRTTDVTGAIGLPEGVEMVMPGDNIQMTVELIVPVAIEQGLKFAIREGGRTVGAGIVPEIIA

SEQ ID NO: 13749 - protein, 283 aa, Pediococcus pentosaceus ATCC 25745
MGQIIDGKTLAAEIDKQTMTEVQKLKNQGVEPHLVVVLVGENPASQIYVRNKEKRANKLGIKSTLVTMNADISENELLLKIQELNQTEDVNAILVQMPLPKHIDAFKVTMAIDPRKDVDGFHPVNVGKLFEGKTQHTPIACTPQGIMEMFQKYHIDIQGKRAVVVGRSSIVGKPMAALLLNANATVTLAHSYTKNLAALTKEADILVVATGIAHFIKEDQVKEGAVVIDVGMDRDENGKLTGDVDFENVEKHVSYITPVPKGVGPMTISMLMKQTVNLTKWSI

SEQ ID NO: 13750 - protein, 490 aa, Clostridium acetobutylicum ATCC 824
MNSLEFIKKVSYIEEKYRDKVEKDYYRQNYHLMPKVGFMNDPNGLIEINGEYHVFYQYNPFYPDEKHVCWGHFRSKDLITWECLPVALSPLEWYDSHGCYSGSAVNKGGKLVLMYTGNVKDSKGERETYQCLAESSDGVEFKKPYINPVIKNQHEGYTRHFRDPKVWKHNDKWYMVLGAQREEEKGSTVLYCSDDLQNWSIVHEILGSNLSKFDFLGYMWECPNLFTLDNKDVLLFCPQGVDKQGDLYNNIYQCGYVLGSLNYETGEFSCGDFLELDRGFEFYAPQVMKTSDGRTLLLGWMGLPDREVSPTIDNRWLHCLTIIRELKMKDNKVVQKPLRELKRLRKGKVEYKNKIIKDTETKLDGINGDSFELKCKFEFDKVNQFGIKMRYNSHKDEEILMFYDAINEKIVFDRSKDGFHKEADAERKCFIKNNGKVKMHIFMDKSSVEIFINDGEETFTSRIYPSKDSKDIVFYSKGGEVRLSVDHWQI

SEQ ID NO: 13751 - protein, 261 aa, Solibacter usitatus Ellin6076
MPYSQILFDVSEAGVALITINRPEKLNALSSAVIGELAQAFAQVAGDPGIRGAILTGAGEKAFVAGADISELASLTAYEARGFALRGQGVFRELETCGKPSVAAVNGFALGGGLELAMACTVRFASENAKLGQPEVKLGIIPGYGGTQRLPRLVGRGRALELLLAGDPIPAAEAYRIGLVNAVTPQAELLEYSRGWLAKVLANGPLALGLVMDAVDTGMSCGLDEGLRLEAEAFGVSAATEDRREGTRAFLEKRRAVFTGK

SEQ ID NO: 13752 - protein, 325 aa, Mycobacterium sp. KMS
MKTSYRAAVHDALRDALRDDDRVLLMGEDVGRYGGTYAASKGLLEEFGPERVRDTPLSELGFVGVGIGAALGGLRPIIEIMTVNFSLLALDQIVNTAAALRHMSGGQFSVPIVVRMATGAGRQLAAQHSHSLECWYAHIPGIKVVAPATVEDAYGMMTTALADPDPVIVFEHVALYNSSADGTTLHATDIRHAAVRRSGSDVTLITYGGSLPKTLDAADQLALAGIDCEVIDLRVLRPLDTATFVESVRRTHRAVVVDEAWKTGSLAAEISAQIVENAFYDLDAPVARVCGAEVPVPYAKHLEQAALPQAGQIATAVRDLCGGPA

SEQ ID NO: 13753 - protein, 300 aa, Oceanobacillus iheyensis HTE831
MSVYINKDTKVIVQGITGGTARFHTKQMLEYGTKIVAGVTPKKGGTEVEGVPVYNTVKDAVDATGATASVIYVPAPFAADAILEATDAELDLVICITEHIPVMDMVKVKRYMEGKKTRLVGPNCPGVITADETKIGIMPGYIHKKGHIGVVSRSGTLTYEAVHQLSEAGYGQTTAVGIGGDPVNGTNFIDVLDAFNQDPETEAVIMIGEIGGTAEEEAAEWVKANMNKPVVGFIGGATAPPGKRMGHAGAIISGGKGTADEKIRTMEAAGIKVADTPAVMGETMIKALKENGLDEKCKTH

SEQ ID NO: 13754 - protein, 294 aa, Mycobacterium sp. KMS
MSGSTPRYGIVVGVDGSPESQVALRWAATEAQTSGRPVTLINVVTPIAISWPTIMLQEQISAYEKQNAEEVLGHARQTLLDGLGPGPQPAVHSEVLMAGIVEALVEASKDAHMVVVGARGRGAVRRVLLGSVSAGLIHHAHCPVAVIHSRDGRLPTADAPVVVGIDGSPASEAATALAFDEASRRGAELVAVHVWSDMAPIPGAATDRHQCEQRAEETLAERLAGWQERYPDVRTRRVVESDRPARWLVEHSADAQLVVLGSHGRGGFAGMLLGSVSAAVAQSVDVPVIVVRQQ

SEQ ID NO: 13755 - protein, 311 aa, Nostoc punctiforme PCC 73102
MKNEKWNTENILSQKGRVAIVTGSSSGIGYETARVLANKQASVIIAVRNLDKGNKALAKILQQNKDADVKVMELDLANLASVKNFAENFQKNYVRLDLLINNAGVMIPPYSKTTDGFELQFGTNHLGHFALTGQLLERLIDTEDSRIVNVSSGAHSIGKIDFDDLNWEKRSYAKWKAYGDSKLANLYFTYELDRKLKDKGIDTLVTASHPGWTATELQRTAGGVVKYLNGILAQDITMGALPTLRAATEAGLKGAEYFGPNGFMEMRGYPIKVESNELSKDQAIAKKLWEVSEKLTNVKFEFNKKTQSAGK

SEQ ID NO: 13756 - protein, 159 aa, Vibrio angustum S14
MTKIYDFYVKALSGEVLSLSDYEGKVLLVVNTASKCGFTPQYEALQALYEKYRDQGLVILGFPCNQFGGQEPGEESQIKQECLINYGVTFPMFSKVDVKGRDAEPLFSYLVKQLPGLLGNDIKWNFTKFLISREGEPMKRYAPTTKPFAIEDDIIKLLS

SEQ ID NO: 13757 - protein, 259 aa, Burkholderia xenovorans LB400
MIEFELSHNGAVAVVTLTRPPANAFTPDGLRQLQQVIRTCDEQLHVRAVVITGSGPKFFSAGADLNTFASGDRDLAREAASAFEAVQNARPVVIAAINGYAMGGGLECALACDIRIAEEHAVLALPETAVGLLPCGCGTQTLPWLVGEGWAKRIILTGERVNAATALRIGLVEDVVARGGAREAALAMAARVASLSPQAVSFSKELIHQGRNGVPREAALAVERERFVDLSGSPDQLEGVNAFLEKRAPRWSTTAESGA

SEQ ID NO: 13758 - protein, 398 aa, Aspergillus oryzae
MYTDKGANSDRMEFNTSKEVTVAPTFEDMHLKESLLRGIYAYGYESPSAVQSRAIVQICKGRDTIAQAQSGTGKTATFSISILQVIDTVVRESQALVLSPTRELATQIQSVIMALGDYMNVQCHACIGGTNIGEDIRKLDYGQHVVSGTPGRVADMIRRRHLRTRHIKMLVLDEADELLNRGFREQIYDVYRYLPPATQVVVVSATLPYDVLDMTTKFMTDPVRVLVKRDELTLEGIKQYFIAVEKEEWKFDTLCDLYDTLTITQAVIFCNTRRKVDWLTDKMREANFTVSSMHGEMPQKERDSIMQDFRQGNSRVLISTDVWARGIDVQQVSLVINYDLPTNRENYIHRIGRSGRFGRKGVAINFVTSDDVRILRDIELYYSTQIDEMPMNVADLLS

SEQ ID NO: 13759 - protein, 369 aa, delta proteobacterium MLMS-1
MTATSNHDPLRRLQRRLRRRRLDLLLVSQPENRRYLSGFTAADHGINESAGVLLIPAAGAPWLLTDGRYRLQAAEEAGGFETMVYPRGLFALLRRLLKRLLPKRLAFESHYLLHSVYLQLSKLAAELEVELVPLVGLVEEQRQLKSASELALIEEAVRLNEAVFAEVYQQLRPGLSEREVAGLIEETMRRRGAEGPSFPTIVAGGPNGAMPHAVPGERPLAEGEPIIIDMGLKIGGYCSDMTRTVVLGQPDAKTIGISRLVRQAQLAGLEALRPGVAGRHVDRLARRVIEAAGYGDYFGHGLGHGVGLNVHEGPSLNYRNRKLLRPGMVLTVEPGIYLPGWGGVRLENMAVVTEQGCRLLNRDTTCLDF

SEQ ID NO: 13760 - protein, 235 aa, Glycine max
SARVPLLGGLLSVWYSDFFQAQTHLVAPFDQYLHRFPAYLQQLSMESNGKTITSDGSSAKYTTGPILFGEPCTNAQHSFFQLVHQGTKLIPTDFILAAKSHNPVSDNLHQKMLASNYFAQAEALMVGKTDDQVRAEGTPEELVPHKRFLGNRPTTSILVGGAIGPAELGALIVYYEHLTFTEGAIWDINSFDQWGVELGKVLAKKILKELDEAGNGEGHDASTGGLIGAFKKYGN

SEQ ID NO: 13761 - protein, 352 aa, Alternaria brassicicola
MPPAGSGSSRKISFNVSEQYDIQDVVGEGAYGVVCSALHKPSGQKVAIKKITPFDHSMFCLRTLREMKLLRYFNHENIISILDIQKPRNYETFTEVYLIQELMETDMHRVIRTQELSDDHCQYFIYQTLRALKAMHSANVLHRDLKPSNLLLNANCDLKVCDFGLARSAASTEDNSGFMTEYVATRWYRAPEIMLTFKEYTKAIDVWSVGCILAEMLSGKPLFPGKDYHHQLTLILDVLGTPTMEDYYGIKSRRAREYIRSLPFKKKIPWKAMFPKTNDLALDLLERLLAFNPVKRITVEEALKHPYLEPYHDPDDEPTADPIPEEFFDFDKNKDNLTKEQLKLLIYQEIMR

SEQ ID NO: 13762 - protein, 604 aa, Shewanella sp. ANA-3
MSLESSSSQQPNKIANRLAAIRSELASANLDAFIIPRADEYLGEYVPEHNERLYWATDFTGSAGMAIVLKDKAAIFTDGRYTVQVRLQVDANLFSYESLTDTPQIEWLCDTLAAGSRVGFDARLHTLAWFENAKAMLAKAQIELVAVEQNPIDKHWQNRPAPSSAAITLFSNESAGKTSLQKRTEIGALVKKAGADVALIAALDSFCWLLNIRGNDVPRLPVVLGCALLHANGDMQLFTDLSKLPEGIEEHVGAGVSFKSEAALADTLASLQGVKLLADPNSANAWAQNIARDAGAKLIAGIDPVSLPKAQKNAAELAGMRASHIRDGVAVSRFLAWLDAEVAANRLHDEATLADKLESFRLEDPQYREPSFDTISAAGANAAMCHYNHNNGTPAMMTMDSIYLVDSGAQYLDGTTDVTRTIAIGKVTDEQKKMVTLVLKGHIALDQARYPKGTTGQQLDAFARQYLWQHGFDYDHGTGHGVGHFLSVHEGPQRIGKNLNAIALMPGMVLSNEPGYYRADSFGIRLENLVVVQHCEALKGAEREMYEFDALTLIPMDARLIDKSLLTQGEIDWFNAYHQKVFNTLSPLMSGSELEWLTKVTKAI

SEQ ID NO: 13763 - protein, 311 aa, Ustilago maydis 521
MASIFQQASKAAKGKRKADAHDEDAVAAPIRRNKQRVLMLPSRGVTSRMRHLINDLESLMPHAKKDSKLDSKSQLHLLNELAELNNCNNALYFEARKREDLYMWASKTPNGPSAKFQVQNIHTMDELKMTGNCLKGSRPILSFDKEFDEKPHWTLVKEMFTQMFGVPKGARKAKPFVDHVISFSIVDNKIWFRNYQIVESDPGATAMAKVEEAQDGKKKAGGAKDASRQPKLVEIGPRMVLSPIRVFEGSFGGATVFENPEYISPNAIRHMVRKQKGNKYADRVNQQESFRTKKDRLKPREDALSRNKVFA

SEQ ID NO: 13764 - protein, 561 aa, Zea mays
  misc_feature (394)..(394): Xaa can be any naturally occurring amino acid
FGSSLAEAHRGVLYVDEINLLDDGISNLLLNVLTEGVNIVEREGISFRHPCKPLLIATYNPEEGSVREHLLDRIAINLSADLPMSFDDRVEAVDIATRFQESSKEVFKMVEEKTETAKTQIIFAREYLKDVTISTEQLKYLVMEAIRGGCQGHRAELYAARVAKCLAAMEGREKVFVDDLKKAVELVILPRSILSDNPQDQQQEQPPPPPPPPPPENQDSSEDQDEEDEDQEDDEEENEQQDQQIPEEFIFDAEGGLVDDKLLFFAQQAQRRRGKAGRAKNVIFSEDRGRYIKPMLPKGPVRRLAVDATLRAAAPYQKLRREKERDKTRKVFVEKTDMRAKRMARKAGALVIFVVDASGSMALNRMQNAKGAALKLLAESYTSRDQLCALASLXVSIIPFRGDYAEVLLPPSRSIAMARKRLEKLPCGGGSPLAHGLSTAVRVGLNAEKSGDVGRIMIVAITDGRANVSLKRSTDPEAAAASDAPRPSSQELKDEILEVAGKIYKAGMSLLVIDTENKFVSTGFAKEIARVAQGKYYYLPNASDAVISAATKTALTDLKSS

SEQ ID NO: 13765 - protein, 284 aa, Synechococcus sp.
MSYPLHLFWHRRDLRLADNLGLYAARQHTPTVVGVFCFDPALLQGQDVAAVRVAYLLGCLQALKEAYQQRGGCLLMVQGDPRQVIPEVATTLKATAVHWHEDVEPYARERDRVVAATLNDLGIAVHRQWDQLLHPPSAVQTQQGQPYTVYTPFWRNWSALPKAAPVPPPPDFAPLEATEIASIPLPSTHDLGFDWSGELILAPGEAAAAQQLAHFSQHAIYEYGEQRNYPGRPGTALLSPALKFGVIGIRTVWAASEAALEHARSDEARASIRTWQQELAWREF

SEQ ID NO: 13766 - protein, 486 aa, Magnaporthe grisea 70-15
MSAKSITEADGKAILNYHLTRAPVIKPSPLPAAATHNPPPRLASLYFAEDADVNGVLDQAEVTYPWLLQPGAKFVAKPDQLIKRRGKSGLLALNKTWAEAKAWVAERAGKEQKVEHVTGVLRNFLVEPFVPHPDGTEYYININSVRDGDWILFTHEGGVDVGDVDEKAEKLLIPVDLSEYPSNEEIASALLKKVPKGIHNVLVDFITRLYAVYVDCQFTYLEINPLVVIPNEDATSAAVHFLDLAAKLDQTADFECGVKWAIARSPAALGLAATASSKINIDAGPPMEFPAPFGRELTKEEAYIAELDAKTGASLKLTVLNGNGRVWTLVAGGGASVVYADAIASAGFADQLANYGEYSGAPTESQTYHYARTVLDLMLRAPLAPEGKVLFIGGGIANFTNVASTFKGVIKALREYAKALNEHNVSIWVRRAGPNYQEGLRNMKAATQELGLNAKIFGPEMHVSGIVPLALIPGKWEEGNFEEFKG

SEQ ID NO: 13767 - protein, 737 aa, Bordetella pertussis Tohama I
MSATSAPDTPTPFDDAWRQLAAAGLDDAGQRQLAHAAAWAWPRFEAQKALTGEPLASHAAGAVRILASLHTDQATRVAAVLASLPADLNAPAPTLRNDPVASEFGVEVARLVQGARALLRLGIVARHASDSEAESGSQKEMQRKMLLAMAADLRIVLMRLASRLQSLRWHAETKTPCAAGFARETLDLYTPLANRLGIWQLKWEMEDLAFRFLEPERYKQIAHLLEEKRVEREAFIAEAIARMQEALARAGVVAEVSGRPKHIYSIWNKMRLKGLDFSQMYDLRALRIIVDDVRACYTALGLVHEMWTPLPEEFDDYISRPKPNGYRSLHTVVTDAQGRAFEVQIRTREMHQFAEYGMAAHWRYKEAGARGGQVAASSEYDRQLSWMRQLLAWNSDVEDEGEAARRADQRIYVLTPQARVIELPAGATPVDFAYHLHTDLGHRCRGTRVDGQMVPLNTRLATGQTVEVIAAKSGGPSRDWLNTQLGYLASPRARAKVRMWFNAIELQQRITQGQALVEKELQRLGKTAVNLEQLAQGLGFARADDLYVAAAKDEFSLRQIDAVFQQPAPVAEPEPAALAHARSADSAEKSGKSGVLVVGVGSLLTQLARCCRPAPPDEIAGFVTRGRGVSIHRADCPSYKALAEREPERVIEVAWGKTSDSFYPVDISVRAQDRPGLLRDLSEVFARQRLNVVGVNTQSRQSLAHMVFTVEVRGGESLHKALDALGEVAGVTSAARR

SEQ ID NO: 13768 - protein, 407 aa, Dechloromonas aromatica RCB
MSIIEVQVPQLSESVAEGTLASWKKKIGEAVARDEILIDIETDKVVLEVPSPAAGVLVEIIKADGETVVSGELIARIDTEAKAGVAAPAAEAPKAAAAAAPAPAAAAPAGTASPSARKILDEKGVAAADVAGSGRGGRVTKEDAVAAAPKSGPVAAPAAAKVSLPTPPVTVALGDRTEQRVPMTRLRARIAERLLQSQQTNAILTTFNEVNMGPMMALRKQYGEKFEKTHGVRLGFMGFFVKAACAALQKFPVLNASVDGNDIVYHGYIDIGIAVGSPRGLVVPIIRNADQMSIAEIEKKIAEFGAKAKDGKLTIEELTGGTFSISNGGIFGSMMSTPIINPPQSAILGIHATKDRAMVENGQVVVRPMNYLAMSYDHRIIDGREAVLGLVTMKEALEDPSRLLLGV

SEQ ID NO: 13769 - protein, 104 aa, Arabidopsis thaliana
LGEGLKWGLVWPWGNLLVPLKAVDLPPKFKSWLVPGKIHHIFCTENFCFKKIHDYLKTICPDWLIVRGEFDKNARYPEIKTLTIGQFKLGLCHGHQVIPWGDLD

SEQ ID NO: 13770 - protein, 353 aa, Staphylococcus aureus subsp. aureus MSSA476
MSRITQVHRILEQKHLDAIIILSDYNRRYLSGFTGTSGALIISKDKQYLITDFRYIDQATKQAPNYEIINRKSTIIGEIKELLHQENFENVGFEGHHVSYDTYLELNKSRISLISISNTVDKIRDVKDAEEIALIQKAANIVDETYEYILTVVKAGMTEKELKAILESKMLELGADGPSFDTIVASGHRGALPHGVASDKIIEKGDMITLDFGAYYNGYCSDITRTFAIGEPDPKLKEIYQIVLESQMKAINEIRPGMTGAEADAISRNYLESKGYGKEFGHSLGHGIGLEIHEGPMLARTIQDKLQVNNCVTVEPGVYIEGLGGIRIEDDILITENGCQVFTKCTKDLIVLT

SEQ ID NO: 13771 - protein, 415 aa, Clostridium thermocellum ATCC 27405
MSRLEGACIFGQSGGPTSVINASAAGVIQEALKQDCITAVYGAAHGIKGILEENFFDMSKEDPYELELLKTTPSSALGSVRYKLKDADEDETDYKRLLEVFKKYNIRYFFYNGGNDSMDTCNKVSKYMQKVGYECRVMGVPKTIDNDLWGTDHCPGYGSAAKYIATSIMEVYHDARVYDTGMITILEIMGRNAGWLTAAAALASYKGNGPDLIYLPELSFDIDKFVEDVTRIYKENGKVIVAVSEGIKDKNGKYISEYGSDLAKTKDSFGHAQLGGLASTLANIVKEKTGAKVRGIEFSLLQRCAAHVASLTDVNEAYLAGQAAVQYAVEGKTDYMVAFERAEGPEYKCNIKLLNLSEVANTEKKVPLEWIKPDGAGLTEDFIKYALPLIQGESRPPIEDGLPRFAKLKKVLARK

SEQ ID NO: 13772 - protein, 636 aa, Oryza sativa
MDFTNLLITVLLLLSPLKYESDVATASDDEDFFKTCSSQRCSKHGPEIRYPFRLSTQPPSCGAPGMQLSCSGQDTILDHPVLGSCKVTMIYYRHVIMNAIPLVDSLPHCPLQKLVSVNQSTAVYKPHTSEVASVVGCSRDSIDTNQYGIVGPTSCPSLANNASQFWYLAYPYTYMSILPLGCTIVSKDIPMPYSYDKNGPNFDISIFTETAKRVISTGETVFTWYTSNVTSICQQCEREVWITVGGTTVRVVTISIRPFGARDALDSAVARGPRVTIIAATSSVGTFIVLSLIVATALYISLKSRYNEEIHLKVEMFLKTYGTSKPTRYTFSEVKKIARRFKDKLGHGAFGTVYKGELPNGVPVAVKMLENSVGEGQEFINEVATIGRIHHANIVRLLGFCSEGTRRALIYELMPNESLEKYIFPHGSNISRELLVPDKMLDIALGIARGMEYLHQGCNQRILHFDIKPHNILLDYSFNPKISDFGLAKLCARDQSIVTLTAARGTMGYIAPELYSRNFGAISYKSDVYSFGMLVLEMVSGRRNTDPTVESQNEFYFPEWIYERVINGQDLVLTMETTQGEKEMVRQLAIVALWCIQWNPKDRPSMTKVVNMLTGRLQNLQVPPKPFISSQNQLVI

SEQ ID NO: 13773 - protein, 336 aa, Burkholderia mallei ATCC 23344
MTIRVAINGYGRIGRNTLRAFYENGKKHDLEIVAINDLGDAKTNAHLTQYDTAHGKFPGEVSVDGDYLVVNGDRIRVLANRNPAELPWGELGVDVVMECTGFFTSKEKASAHLKGGAKKVIISAPGGKDVDATIVYGVNHDVLKAEHTVISNASCTTNCLAPLVKPLNDKIGLETGLMTTIHAYTNDQVLTDVYHEDLRRARSATHSQIPTKTGAAAAVGLVLPELNGKLDGYAIRVPTINVSIVDLSFIAKRDTTAAEVNAIMKEASEGALKGILGYNDAPLVSIDFNHNPASSTFDATLTKVSGRLVKVSSWYDNEWGFSNRMLDTAIALANAK

SEQ ID NO: 13774 - protein, 470 aa, Novosphingobium aromaticivorans DSM 12444
MLFATLAAGEGLDVLNPATQQRIATVKAYSTEEIARLIEAADAARGAWAARTAKERSVVLRRWYDLVMSHQEDLAALVTAESGKPLAEARGEVAYGAAFIEWFAEEGKRAYGDTIPTFANGKRVLTIRQGVGTCAAITPWNFPVAMITRKVAPALAAGCAMVVKPAEATPLSALALETLAHEAGVPAEVFRVVPTDDPAGVGTLFCTHPQVRKLSFTGSTRVGQLLMEQAAANVTRLSLELGGNAPFIVFDDADLDAAVDGLMASKFRNAGQTCVCANRILVQDSVHDAFLAKVQERVAALVVGDGAQPGTTIGPLINEAAVKKVGALVADACEAGARVLAGGGKSPVGTGFFEPTILADVTPDMAVASAEIFGPVVPVIRFADEPQAIRIANDTPYGLAAYFYARDVGRIWRVMEALEYGMVGVNDGIISTEVAPFGGIKHSGLGREGSRHGLDEYLELKYCLMGGIDR

SEQ ID NO: 13775 - protein, 107 aa, Nostoc punctiforme PCC 73102
MSTAAQVTDSSFKQEVLDSDVPVLVDFWAPWCGPCRMVAPVVDEISEQYKGQIKVVKVNTDENPQVASQYGIRSIPTLMIFKDGQKVDMVVGAVPKSTLASTLEKYL

SEQ ID NO: 13776 - protein, 228 aa, Novosphingobium aromaticivorans DSM 12444
MPRLILIRHGQSQWNLENRFTGWWDVDVTEKGAAEAFAAGKLLKDKGVLPTLAFTSLQTRAIKTLHLALEAAGRLWVQEDKDWRLNERHYGGLTGLDKAETAAKHGDEQVKVWRRSFDVPPPPLEAGSEFDLASDPRYDGIAVPATESLKDTIARVLPCWEEKIAPALRAGETVIVSAHGNSLRALVKHLSGISDEDITGLEIPTGQPIVYELDNDLAQVERYYLSER

SEQ ID NO: 13777 - protein, 311 aa, Acidobacteria bacterium Ellin345
MATLRIGSRGSQLALWQANHISALLRERGHEVELEIIKTTGDKILDVALAKVGTKGMFTKEIEEALAAGKVDVAVHSLKDLPTELPQGFELAAVTKRENPRDVFLSVKYDSISGLPQGAKVGTSSLRRQAQIKAIRPDLEIFPLRGNVDTRVRKLEQGEYDAIILAFAGLNRLGKTQLVKEIISEDVMCPAAGQGALGIEIRLGDTRMREILSFLNDYDARATTTAERALLNQLGGGCQVPIGAFAEVKDGQVHLTAICARPDGSEILRESKSGADPAHLGEEVGKTLLARGATKILEDVYSQNIAAPAQP

SEQ ID NO: 13778 - protein, 494 aa, Burkholderia xenovorans LB400
MNANPKHVADPTRLRNQNLIGGQWKAALSGQSIAVENPANEEIIAQVPRGQQEDIDEAVKVARATFESAAWRKIRPIDRGRILENIARKVEEHAEELSWLESLDTGKAISFARVIDLPSTVDVFRYMGGWCSKLGGTTPPISFDGKEYHAYTRREPVGVVGAITPWNYPLALGSWKIASALAAGCTMVLKPTELTPLSTLRLAELCLEAGLPEGALNVVNGYGHEAGEALARHPDIDKITFTGSTVVGKKIVEYALGNMKRVTLELGGKSPSIVFDDADLDQVGLGAALAVFFNSGQICFAASRLFVQASVYDRVVEAVAAVASQFKVGNGQDTDTMLGPLVSRKQQERVLGYVQSGIEQGASLIYGGQKIGDKGYFLQPTVFADADQSMKIAQEEIFGPVVSIIRFKDEVEAIRLANDTTYGLAANIWTRDIKKAHRVAHRLQAGSVWINCHGVIDPAAPFGGFKQSGWGREVSEEGLAAYTEIKTVCALLDD

SEQ ID NO: 13779 - protein, 592 aa, Zea mays
  misc_feature (126)..(126): Xaa can be any naturally occurring amino acid
  misc_feature (202)..(202): Xaa can be any naturally occurring amino acid
  misc_feature (325)..(325): Xaa can be any naturally occurring amino acid
LGTSRPAGSVSRCCASSLRALTVLFVLAALVSDVGGRHHHHVCRPYFSCGGFSNISYPFRRQGDPSGCGVQSYELVCTDTDATIRIGSGTYTVLSINSTYSYFWVVDANLDIQSSCPLPWWDYHDXLEPSCGYLAMIYLGGPGIPVPKNTSYPDVVKLMRNGFGLRFPSSIGDRGIRECFAESVRNVRKEPERIRLWTFLWXEIWVCVINQLGSTIHDISCGIIYIIWNLKSRYVFCRLVLMPLAVFVFLAHKYWKARITIDAVEKFLRMQQMLVPMRYAYTNIIAITSHFREKLGQGGYGSVYKGVLQPGEVHVAVKMLGNSNXGGDEFISEVATIGKIHHFNIVRLIGFCSEENSRALIYEFMPRGSLDKYIFSSEKSFSWDKLNEIALGIARGLNYLHHGCDMQIVHFDIKPHNILLDSNFVPKVADFGLAKLFPRGDSFVPLSAMRGTIGYIAPEMVSRSFGVISSKSDVYSFGMLLLEMTGGRRNADPHAGSSSQAYYPSFVYRQLSQGDANMISEGVDMHELEKKLCIIGLWCIQMKPQDRPTMSEVIEMLEAGVDGIQMPPRPYFCDEEGESSYSTISELDPIEE

SEQ ID NO: 13780 - protein, 1097 aa, Aspergillus oryzae
MPLLEAPRNGGAVNNGVLSGVSHSQSFGIDTESHLDDPNRRQQIVVVGLGMVAISFLEKLVKQDSERRKYDIVVIGEEPHVAYNRVGLSSFFEHRNIEDLYLNPKEWYGSFKDRSFDYHLNTRVTDIFPDRKTVKTSTGDIIAYDLLVLATGSDAVLPTHTPGYDANGVFVYRTISDLERLIEFASNHKGETATTVGGGLLGLEAAKAMTDLEDFGKVKLIDRNKWVLARQLDGDAGTLVTRKIRELGLDVMHQKRVAKIKTDDNNNVTGIVFEDGEEIDCCCVCFAIGVRPRDELGTTAGIQCASRGGFVINESLQTSIPEIYAIGECASWENQTFGIIAPGIEMADVLAFNLTNPDKEPRSFRRPDLSTKLKLLGVDVASFGDFFADRDGPKFLPGRRPSVATIPRVKDTTEKESPVKALTYKDPFGGVYKKYLFTMDGKYLLGGMMIGDTKDYIKLNQMVKSQKELEVPPSQFILGAQNGGEENGDDLADDTQVCSCHNVTKGDIVESVKSGTCKSIGEVKSCTKAGTGCGGCMPLVQSIFNKTMLDMGQEVSNNLCVHIPHSRADLYNIVAIKQLKTFEDIMKAVGRSPDSLGCELCKPAIASILSSLFNGHIMDHEYHELQETNDRFLANIQRNGTFSVVPRVPGGEITADKLIAIGQVAKKYNLYCKITGGQRIDMFGAKKQDLLDIWTELVNAGMESGHAYAKSLRTIKSCVGTTWCRFGIGDSVGMAIRLEERYKSVRSPHKLKGAVSGCVRECAEAQNKDFGLISTEKGFNIFVGGNGGAKPRHSELLAKDVPPDMVIPIIDRYLIFYIRTADKLQRTARWIENLPGGINYLREVVIDDKLGICAEMEQQMQELVDSYFCEWTETIRNPKRRKYFQQFANTDETVDTVELVKERDQERPTYWPSEGAKEDFKGHQWSALSWQPIIKADHFSDGPPAISSANVKRGDTQLAIFKVKGKYYATQQMCPHKRAFVLSDGLIGDDDAGKYWVSCPYHKRNFELNGEQAGRCSNDEAMNIATFPVEERDDGWIYLKLPPVEELDSVLGTEKWKVKKGEAPDPFQKCDKKYKGTRGKKAGDRPSPTKQSKTIDW

SEQ ID NO: 13781 - protein, 317 aa, Clarkia lewisii
LVEKFGIDPNNAFAFWDWVGGRYSVCSAVGVLPLSLQYGFSVVEKFLQGAHSIDQHFSSAPFEKNIPVLLGLLSVWNVSFLGYPARAILPYSQALEKLAPHIQQVSMESNGKGVSIDGLPLPFESGEIDFGEPGTNGQHSFYQLIHQGRVIPCDFIGVVKSQQPVYLKGEVVNNHDELMSNFFAQPDALAYGKTPAQLKKENVSEHLIPHKTFTGNRPSLSILLPTLDAYRIGQLLAIYEHRVAVQGFVWGINSFDQWGVELGKSLATQVRKQLHASRVKGEPVEEGFNFSTKTLLTRYLQATTDVPADPSTLLPNI

SEQ ID NO: 13782 - protein, 165 aa, Oryza sativa (japonica cultivar-group)
MRTMVAAPPPSPAMAVSPWHSPVPYLFGGLAAMLGLITLALLILACSYWKLNSYLGTGHSSSAAAAAAAGDGGDGDGGSKSPATAVAAFPVVYGDLVAVVMAGERMPTFLAAPIVRRPPSTDTSSSAVAEVASPENGCDAAEGGAASRPPPQPVAARQAVQLAQL

SEQ ID NO: 13783 - protein, 131 aa, Candida glabrata CBS 138
MSGGKGGKVGSAAKASQTRSAKAGLTFPVGRVHRLLRRGNYAQRIGSGAPVYLTAVLEYLAAEILELAGNAARDNKKSRIIPRHLQLAIRNDDELNKLLGNVTIAQGGVLPNIHQNLLPKKSAKPSASQEL

SEQ ID NO: 13784 - protein, 377 aa, Anemia phyllitidis
  misc_feature (266)..(266): Xaa can be any naturally occurring amino acid
MGDAEEVQPLVCDNGSGMVKAGFAGDDAPRAVFPSIVGRPRHTGVMVGMGQKDAYVGDEAQSKRGILTLKYPIEHGIVTNWDDMEKIWHHTFYNELRVAPEEHPVLLTEAPLNPKANREKMTQIMFDTFNAPAMYVAIQAVLSLYASGRTTGIVLDSGDGVTHTVPIYEGYALPHAILRLDLAGRDLTDALMKILTERGYSFTTTAEREIVRDMKEKLAYVSLDFEQELETAKSSSSLEKSYELPDGQVITIGAERFRCPEVLFQXSLIGMESAGIHETTYNSIMKCDVDIRKDLYGNVVLSGGSTMFPGIADRMSKEITALAPSSMKIKVVAPPERKYSVWIGGSILASLSTFQQMWIAKSEYDESGPSIVHRKCF

SEQ ID NO: 13785 - protein, 403 aa, Oryza sativa
RVVWENDKGECQVQKGYRVQFNSALGPYKGGLRFHPTVNLSILKFLGFEQIFKNALTGLNMGGGKGGCDFDPKGKSDNEIRKFCVAFMRELNKHIGADTDVPAGDIGVGGREIGYLFGAYRAERNRWEGVLTGKGGSWGGSLIRPEATGYGLVYYVEHMINYASGGKESFAGKRVAISGSGNVAQYAALKIIELGGTVISLSDSKGALIADDDKGFTPEVINEIAALKLQRKALTALENHSFRYVEGARPWKEVKKVDVALPSATQNEVSEDEAKALIESGAKFIAEGSNMGCTQEAIEVFEAHRRENKGSAIWYAPGKAANAGGVAVSGLEMAQNSQRLSWSAEEVDEKLKGIMKDCFENCLSTAKEYFTPSEGEFPSLVGGANVAGFRKVAAAMHDQGDWW

SEQ ID NO: 13786 - protein, 172 aa, Brassica napus
MAASVMLSSVTLKPADFTVEKMSARGLPSLTRASPSSFKIVASGGKKIKTDKPFGVNGSMDLRDGVDASGRKGKGYGVYKFVDKYGANVDGYSPIYNEDEWSASGDVYKGGVTGLAIWAVTLAGILAGGALLVYDEHSPVFLPEELFLCTTPVLWLSKILKLCLTYVFLLRN

SEQ ID NO: 13787 - protein, 230 aa, Photobacterium sp. SKA34
MKNTRIVLLRHGQSVWNKENRFTGWANVSLSELGETEARNAGIKLKENGFNFNFCYTSMLDRAIKTSNLALEQLDSLWIPVEHDWQLNERHYGDLQGLNKTETAEEFGDEQVHIWRRSYDIEPPQVSEDSFFYPGNDRRYQELQHSQLPHGESLKDTYDRVIPFWNENIVPNVKQGSDILIAAHGNSLRALIKYLDNIPDDKITELEIPTGAPLVYEFNKQMKPVQSYYL

SEQ ID NO: 13788 - protein, 230 aa, Zea mays
MNDADVSKQIQQMVRFIRQEADEKANEISVSAEEEFNIEKLQLVEAEKKKIRQEYERKEKQVEVRKKIEYSMQLNASRIKVLQAQDDLVNKMKDDAMKELLLVSHNHHEYKNLLKDLIIQGLLRLKEPAVLLRCRKDDHHHVESVLHSAKHEYASKADVHEPEIFVDHDVYLPPAPSHHDAHGQFCSGGIVLASRDGKIVFESTLDARLEVVFRKKLPEIRKLLFGQTAA

SEQ ID NO: 13789 - protein, 742 aa, Aspergillus nidulans FGSC A4
MYHDHPVRSVQDLIGFSGLISHAIRHPLDFHYSVGPTLSELSGGLLSSSFEPERDLPGLSGKVIFVTGGNTGLGKETVLQLARHRPERIYLAARTAIKATNAIASIQEALPCRADIRHIPLDLASFASIRAAAKQFQAECERLDILILNAGVMGHPPSLTEEGYEIHLGTNHIGHFLLTKLLLPTLRETVSRSESPDVRVITLSSLAANTAPSYDSITSTPALLSLGWASRYGASKAANVLFAAELARRHPEILSVSVHPGAVVTDLYQQTKKAGLFYEAGVGLMMKFFRSIRTGALTQIWAAAAPREQLINGGYYVPIAVKGVSRYHQYLPDLSLPRFQVMRNQDAHEYAEAFKKGRNPPWLHALYTHWKDLAQEPFKGVTTDGNVRPNLFTLQDEQVPIDTIVSATKHLFSLLSPDQQQTLSYHIDSPEWRTWSNPEFLLSHKGLRLDEVNPEIRDAILAVLQATLSPEGYDKAIKAMRINHFLGELVESPRVMNEYSYNFVLFGNPSTTRPWGWSFYGHHLCLNIFLYKSQIVASPWFTGAEPNLIDSGPYSGTRILHVEETLGLKLMQSLPPHIQRKAQTYALMKDPAMPPGRWNRDDQRHVCGAYRDNRIVPNEGVPVTLFTEDQKATLYEILNQYLLYLPTYARALRIAHIKQYESETYFSWIGGYGDHDPFYFRIQSPVILVEFDHHSGVFLNNEEPKKFHIHTLLRTPNGGDYGFALRPLVPPIEDANGKEISW

SEQ ID NO: 13790 - protein, 162 aa, Azoarcus sp. EbN1
MSVPANVFDFETRRLNGAPMPLAEFRGKVLLLVNTASECGFTPQYEALQELHDRFAPRGFSVIGFPCNQFGGQEPGGAEEIAAFCAKNYGVSFPLSEKIDVNGDNAHPLYRHLTSVAPGILGTEAIKWNFTKFLVDRDGQVVARFAPATKPESIARDIEALL

SEQ ID NO: 13791 - protein, 131 aa, Haemophilus haemolyticus
DFCQRIISGEWKGYTGKAITDVVNIGIGGSDLGPYMVTEALRPYKNHLNMHFVSNVDGTHIAETLKKVNPETTLFLVASKTFTTQETMTNAQSARDWLLKAAKDESAVAKHFAALSTNAKDVEKFGIDTNN

SEQ ID NO: 13792 - protein, 490 aa, Staphylococcus aureus subsp. aureus MSSA476
MTSKSSPLIFERSREGRYAYSLPKSDIKTNSVESLLDDKFIRKNKAEFPEVAELDLVRHYTELSNKNFGVDNGFYPLGSCTMKYNPKINEKVARIPGFSESHPLQDEDQVQGSLEIIYSLQEELKEITGMDEVTLQPAAGAHGEWTALMIFKAYHENNGEGHRDEVIVPDSAHGTNPASASFAGFKSVTVKSNERGEVDIDDLKRVVNENTAAIMLTNPNTLGIFEKNIMEIREIVHNAGGLLYYDGANLNAIMDKVRPGDMGFDAVHLNLHKTFTGPHGGGGPGSGPVGVVKELASYLPKPMVIKDGDKFKYDNDIKNSIGRVKPFYGNFGIYLRAYTYIRTMGATGLKEVSEAAVLNANYIKARLSKHFEIPYKQYCKHEFVLSGVRQKEFGVRTLDMAKRLLDFGVHPPTIYFPLNVEEGMMIEPTETESKETLDYFIDTLISIAEEAKNDPDKVLEAPHTTVIDRLDEATAARKPILKFENLKQEK

SEQ ID NO: 13793 - protein, 451 aa, Staphylococcus aureus subsp. aureus MSSA476
MCIVSHRYIPLTEKDKQEMLQTIGAKSIGELFGDVPSDILLNRDLNIAEGEAETTLLRRLNRIASKNITKETHTSFLGAGVYDHYAPSVVDAMISRSEFYTAYTPYQPEISQGELQAIFEFQTLICELTDMDVANSSMYDGMTSFAEACILAFSQTKKNKIVVSKGLHYQALQVLHTYAKTRKEFEVVEIDLDGTVTDLKKLEAAVDDETAAVAVQYPNFYGSIEDLEKIHSFIEDKKALFIVYANPLALGLLTPPGSFGADIVVGDTQPFGIPAQFGGPHCGYFATTKKLMRKVPGRLVGQTQDDEGNRGFVLTLQAREQHIRRDKATSNICSNQALNALASSIAMSALGKQGIYDIAVQNIEHANYAKQQFIKKGFEVLDGTSFNEFVVKFDKPIQQVNEELVKYNIIGGFDLGVVSDDFKNHMLIAVTELRTKDEIDTFVEKAGELND

SEQ ID NO: 13794 - protein, 131 aa, Haemophilus haemolyticus
DFCQRIISGEWKGYTGKAITDVVNIGIGGSDLGPYMVTEALRPYKNHLNMHFVSNVDGTHIAETLKKINPETTLFLVASKTFTTQETMTNAQSARDWLLKAAKDESAVAKHFAALSTNAKDVEKFGIDTNN

SEQ ID NO: 13795 - protein, 101 aa, Glycine max
QVIPWGDLDSLAMLQRQLDVDILVTGHTHQFTAYKHEGGVVINPGSATGAYSSITYDVNPSFVLMDIDGLRVVVYVYELIDGEVKVDKIDFKKTSTSHSAH

SEQ ID NO: 13796 - protein, 131 aa, Haemophilus parainfluenzae
AFCYRVISGEWKGYTGKAITDVVNIGIGGSDLGPYMVTEALRPYKNHLNMHFVSNVDGTHIAETLKKVNPETTLFLVASKTFTTQETMTNANSARDWLLAAAKDNSAVAKHFAALSTNGKAVAEFGIDTNN

SEQ ID NO: 13797 - protein, 497 aa, Burkholderia mallei ATCC 23344
MFRQLFIGALPLSSSISIAPAVVWFCDDLRVSDHPALMRAAESGRPVIGVYVFDERAGGRPLGGAARWWLHGSLRALGAALAALGGTLALLRGDEHDTIVSFAAALGAGAVYWSRRYALAARAVDNAVQTALDAQGIAVETFNASLLFEPGDLVNADGRPYQVFSAYWRAAMRRGVPAPPLGAPRRLNGGALPAALARQCVALDALGLEPTGPDWAGGLRDAWRFGEDAAHRRLRAFVDSRLGGYAAERDRPGIASTSRLSPYVRFGNLSARQLWHAAADAYAHGAATQADLDKFLSELGWREFGWTQLHHFPDLPRRNLRHTLDGMPWRDDPAALAAWRRGATGYPFVDAGMRELWATGWMHNRVRMVCASFLVKHLLIDWRAGEAWFWDTLVDADAASNAANWQWVAGCGADAAPYFRIFNPVAQGRKFDPDGAYVRRWVPELAGLPPATIHEPWAAPGAQLAAAGVRLGETYPLPIVAYDAARRRALDAFGAIR

SEQ ID NO: 13798 - protein, 131 aa, Haemophilus parainfluenzae
AFCDRVISGEWKGYTGKAITDVVNIGIGGSDLGPYMVTEALRPYKNHLNMHFVSNVDGTHIAETLKKVNPETTLFLVASKTFTTQETMTNANSARDWLLAAAKDSSAVAKHFAALSTNGKAVAEFGIDTNN

SEQ ID NO: 13799 - protein, 308 aa, Mesorhizobium loti MAFF303099
MQTTLKIGTRGSPLALAQAHETQARLMAAHGLPAEAFEVVVISTSGDRIQDRPLSEAGGKGLFTKEIEEALLAGAIDIAVHSSKDMPTQLPDGLELSAFLPREDARDAFVGKAAKTIADLLRGAKVGSSSLRRQALIRRMRPDLDVVMFRGNVQTRLRKLDEGVAAGTILAYAGLKRLGLEHVATDLMPLDIFPPAPGQGAIGIETRIGDRAVEKMLVAIHDVPTGQALACERAFLAALDGSCRTPIAGHATIETGNLSFAGLIISPDGTQSHTVELQGPAQDAARIGDEAARTVRAKAGEKFFDGWV

SEQ ID NO: 13800 - protein, 131 aa, Haemophilus parainfluenzae
AFCERVISGEWKGYTGKAITDVVNIGIGGSDLGPYMVTEALRPYKNHLNMHFVSNVDGTHIAETLKKVNPENTLFLVASKTFTTQETMTNANSARDWLLAAAKDNSAVAKHFAALSTNGKAVAEFGIDTNN

SEQ ID NO: 13801 - protein, 185 aa, Glycine max
  misc_feature (181)..(181): Xaa can be any naturally occurring amino acid
KKYKAFKPLNLPDRQWPNKTIEKPPRWLSTDLRDGNQSLVDPMDGEQKWMYFQMLTRLGYKEIEVSFPSASQTDFDFTQRLVQTPGIVPDDVWLQVLSPCRKELIRRTVDSLKGAKKAILHLYLATSPCFQQIVFNMNDEETIALAVECTKYARSITKDDPEQAGTQWHYEFSPETFSDSXPEFA

SEQ ID NO: 13802 - protein, 331 aa, Magnaporthe grisea 70-15
MSKQYLTVHTIDNAHQSQIFALATTPNGVFSASGGEAIKFHSAATDATGASSFSSSDIPKAHRSGCHHLAAGAGGPGKVLASAGFGHEVKVWVQQEGSGEWKEHGTVSPWGSGPSAAKVWAVALNSDEQFLACSSEAGKVAVWDIPAGRAVHLYETASEGQGSFGMSVDISPDGRLTASGHQNGTVYVFNNDSGRLVYSLTGLSKPIRSVKFSPGGTRLATAGDAGIIAIYDTQNGEHVSNLSPSGPSGPWIMSLDWSHTGEYLLSGSFDGRVRVWSIEAATCVATHSESDETIWAVKWLPKPAGNPRAAESFCAAGARGSITFYREASGS

SEQ ID NO: 13803 - protein, 65 aa, Arabidopsis thaliana
  misc_feature (13)..(13): Xaa can be any naturally occurring amino acid
  misc_feature (31)..(31): Xaa can be any naturally occurring amino acid
  misc_feature (34)..(35): Xaa can be any naturally occurring amino acid
  misc_feature (39)..(39): Xaa can be any naturally occurring amino acid
  misc_feature (47)..(48): Xaa can be any naturally occurring amino acid
  misc_feature (57)..(57): Xaa can be any naturally occurring amino acid
MASSMLSSATMVXSPAQATMVAPLNGLKSSXAFXXTGKXNNGITSIXXNGGRVKCMXVWTTIGKK

SEQ ID NO: 13804 - protein, 581 aa, Ehrlichia ruminantium str. Welgevonden
MFANRGFGFMENRLSSLISIITEYEIDVLLLYNTDEYQSEYIHESKQRLRWLCGFSGSNATLIISKQEKQHFFTDGRYTLQAQQELDLNYYQIHNVADITPWQWCVRNLPAGVIVGYEAQLFTLNHIKKYTNHHIILKPIDDILIDKLWVRDFNVPQNIVDHDLKYSGIAGYEKASEAIKCLHGKDVALITDTDVISWLLNIRNKDFVFNPSVLSRAILYKDGTIDLFIENVESVNFEYEYIRIYHVDELFSVLESIQSIVIDASTVPMNIFKHLSQKDVLVKDFDACLIIKSIKNNTEISGAVNAHVRDGVAVINLLYWLDVQLSNNARITELDVVAQLLMFRQQQDLFCGDSFATISGFAENGAVIHYKVNNETNKLICKNGLYLLDSGGQYLDGTTDVTRTIAIGEPTYEQIVNFTLVLKGHIAIAMAVFPLKTTGGMLDILARQYLWKSGLDYQHGTGHGVGSFLSVHEGPCAISYGNNIILQPNMILSNEPGYYKDGEYGIRIENLMYVEKCCDKFLRFKQLTCVPIDLNLINVDMLSKEEIDYINKYHDFVYTTVAPYLNAKVKDWLWNSCRSIK

SEQ ID NO: 13805 - protein, 130 aa, Triticum aestivum
MATITTMAFMATFPAPRTVAQPPATLPSRPNVVSFAARAMRAHGRRLVAVAGSPSTPPELAQKVTESIKQAEETCAGDPEGGECVAAWDEVEELSTAASHARDRKKEHSDPLEEFCEDNPETDECRTYDS

SEQ ID NO: 13806 - protein, 251 aa, Persicaria hydropiper
AYNQFSSDIPVISLAGIDDVGGKREEICGKIVAACEDWGVFQVVDHGVDTQLVSEMTRLAREFFALPAEEKLRFDMTGGKKGGFIVSSHLQGEAVQDWREIVTYFSYPIKNRDYSRWPDTPEGWLKATEHYSEQLMGLACKLLGVLSEAMGLEAEALTKACVDMDQKVVVNYYPKCPQPDLTLGLKRHTDPGTITLLLQDQVGGLQATRDDGKTWITVQPVEGAFVVNLGDHGHFLSNGRFKNADHQAVVN

SEQ ID NO: 13807 - protein, 514 aa, Oceanicola granulosus HTCC2516
MTALDTPKVTEVKEGVDEETVEAVRKLSGKYKYGWETDIEMDYAPKGLSEDIVRLISGKNDEPEWMTEWRLGAYARWLKMDEPDWAMVEYPEIDFQDQYYYARPKSFETKPKSLDEVDPKLLETYQKLGIPLKEQMILAGVEGADEVATPEDNSERKVAVDAVFDSVSVGTTFQKELQKAGVIFCSISEAIREHPELVKKYLGSVVPQGDNFYAALNSAVFSDGSFVYVPPGVRCPMELSTYFRINAENTGQFERTLIIADKGSYVSYLEGCTAPQRDTAQLHAAVVEIIVEEDAEVKYSTVQNWYPGDEEGRGGIYNFVTKRADCRGDRAKVMWTQVETGSAVTWKYPSCILRGDDSQGEFYSIAITNNHQQADTGTKMVHLGKRTKSRIVSKGISAGQAQNTYRGLVSMHPKALESRNYTQCDSLLIGDQCGAHTVPYIEVKNNSSRVEHEATTSKVDDEQMFYCRQRGMDEEEAVALIVNGFAKEVLQALPMEFAMEAQQLVAISLEGSVG

SEQ ID NO: 13808 - protein, 466 aa, Lactobacillus plantarum WCFS1
MNKQKKVSSKFIFFFGSFGGILFGYDIGVMTGALPFLKTDWALTNATLVGWVTSAVMFGAIFGAAIAGQLADRLGRRRMILMSSLIFAIGSILCGFSPNNGTYYLIGMRIFLGLAVGAASALVPAYMSEMAPARLRGSLSGINQTMIVSGMLISYIVDYILKDLPENMSWRLMLGLAAVPAIILFLGVLKLPESPRFLIKANRLDEARQVLSFVRKPDEVDSEVKAIQSTAQTEANNLEKTSWATLFNGKYRYLVMAGVGVAAFQQFQGANAIFYYIPLIVEKATGSAASSALMWPIVQGILLVLGSLLYIWIAEKFNRRTLLMLGGSVMALSFLLPAVINSLVPNASPMMIVVFLSIYVAFYSFTWAPLTWVLVGEVFPLAVRGRASGLASSFNWIGSWAVGLLFPIMTASMSQEAVFAVFGVICVLGVLFVRFCVPETRGHSLEEIEAAGTNHHKQVPVQQASH

SEQ ID NO: 13809 - protein, 385 aa, Aspergillus oryzae
MFATRNFALPARQCLRSTRVSPRIASPLSQLRGYAAATDERVAKFKGQKDTDGKYTVTLIEGDGIGPEISQSVKDIFAAANAPIKWEPVDVTPILKDGKTAIPDEAIESVKRNYVALKGPLATPVGKGHVSLNLTLRRTFNLFANVRPCRSVAGYETPYDNVDTVLIRENTEGEYSGIEHVVVDGVVQSIKLITKEASERVLRFAFQYARSINKKKVRVVHKATIMKMSDGLFLNLARDIAKEFPDIEFDAELLDNSCLKIVTDPTPYNDKVLVMPNLYGDILSDMCAGLIGGLGLTPSGNIGNECSIFEAVHGSAPDIAGKGLANPTALLLSSIMMLQHMNLGEHAARIQKATFDTLAEGKTLTGDLGGKAKTHEYAEAIMKRL

SEQ ID NO: 13810 - protein, 375 aa, Blakeslea trispora
MEDEVAALVIDNGSGMCKAGFAGDDAPRAVFPSIVGRPRHQGVMVGMGQKDSYVGDEAQSKRGILTLRYPIEHGIVTNWDDMEKIWHHTFYNELRVAPEEHPVLLTEAPLNPKSNREKMTQIMFETFNAPAFYVAIQAVLSLYASGRTTGIVLDSGDGVTHTVPIYEGYALPHAILRLDMAGRDLTDYLMRILAERGHSFTTTAEREIVRDIKEKLCYVALDFEQEMQTAAQSSALEKSYELPDGQVITVGNERFRAPEALFQPALLGLESVGIHETTYNSIMKCDVDIRKDLYSNIVMSGGTTMYPGIADRMQKEITALAPSSMKIKIVAPPERKYSVWIGGSILASLSTFQQMWISKQEYDESGPSIVHRKCF

SEQ ID NO: 13811 - protein, 166 aa, Triticum aestivum
  misc_feature (38)..(38): Xaa can be any naturally occurring amino acid
  misc_feature (60)..(60): Xaa can be any naturally occurring amino acid
MLQGSGISNQKTLYEVLSVPEDATYDEIRAAYKCAALXTLEPSVSTGEQHGFFSVQKAWXETLRYPKCRAEYDKQLQSSRQSLDVIATDIEIEDMIVESSGDGVELLYACRCGDYFSITACELGEMGISVSEDGEIEAQAPDSLPTSVVLGCGSCSLKTRLVINKT

SEQ ID NO: 13812 - protein, 740 aa, Methylobacillus flagellatus KT
MPKTAAKRPAEPTSPPPLLPADSEDSQLTLRLREYLKQDDIDHIWDAYRFSAAAHEGQVRRSGEPYVTHPVSVAGILAELHLDPPTLIAALLHDVVEDTGVTKQEISDRFGKQVAELVDGLSKLDKIEFQSATQAQAENFRKMLLAMSQDVRVILVKLADRLHNMSTLDVMKPEKQRRIARETLDIYAPIANRLGLNEIYQTLEDLSFKYLYPMRHRVISKAVMAARGNRKEVVGKILDAINQRLKEQNIEAEVTGREKHLYSIYKKMTGKTITFSQIYDIYGFRVIVRDLPTCYAALGVLHGLYKPIPGKFKDYIAIPKANGYQSLHTTLFGPFGTPIEIQIRSREMHNIADAGVAAHWLYKTTDAHLTALQQQTHQWLQRLLDIQSESTDSLEFLEHFKVDLFPDEVYVFTPKGNIMALPKGATAVDFAYAVHTDIGNRCVAVKINQELAPLRTELHNGDHVEIITAAHAHPNPAWLNYVLTGKARAHIRHYLKSMQSTESALLGERMLNQALRALHANPAEIDESAWQRLVRDYGAKSKDEILADIGMGKRLNVMVAHQLMAQAGQQDAVTEQQKAPAKILDTITIRGSEGMAVQFAQCCRPIPGDPILGFINKDKGLVIHTHDCPAIRKFRLDPDKWLDVEWDPQGHRLYKVSLKLVVANRRGMLAKIASGIAEAGSNIDNVSMEEADNSTYTNMNFTVQVENRVHLAELMRRLRKIPDVVRINRVKGSGAEQRIQ

SEQ ID NO: 13813 - protein, 377 aa, Anemia phyllitidis
  misc_feature (318)..(318): Xaa can be any naturally occurring amino acid
MADAEDIQPLVCDNGSGMVKAGFAGDDAPRAVFPSIVGRPRHTGVMVGMGQKDAYVGDEAQSKRGILTLKYPIEHGIVTNWDDMEKIWHHTFYNELRVAPEDHPVLLTEAPLNPKANREKMTQIMFETFNVPAMYVAIQAVLSLYASGRTTGIVLDSGDGVTHTVPIYEGYALPHAILRLDLAGRDLTDALMKILTERGYSFTTTAEREIVRDMKEKLAYVASDFEQELETSKSSSSLEKSYELPDGQVITIGAERFRCPEVLFQPSLIGMETPGIHETTYNSIMKCDVDIRKDLYGVIVLSGGSTMFPGIVDRMSRXITALAPSSMKIKVVAPPERKISVWIGGSILASLSTFQQIWIAKSEYDESRPSIVHRKCF

SEQ ID NO: 13814 - protein, 311 aa, Rickettsiella grylli
MSKKKFLRIATRKSPLAYWQATSIKNQLEKIFPFLKITLLPFVTEGDRPSHSLNQWGGKGLFVKELEAALLHGQADIAVHSLKDLPMTLEKGLVLGAICKRCDPRDVLISRSDRLFTQLPPGSYVGTSSLRRQSQLLALRPDLKIGVLRGNIGTRLNKLAAGEFDAIILAAAGLIRLKKTECISEYFEIDHFLPAPGQGALGIECHENDEESLTYISALIHPITHSCVLAERALSRELGGGCQVPLAAYAASLGQDFIRLQAFVGSSDGTTQIKVEKQGPRVEAEKIGFLAAQDLRALGVEEILNKFKRIK

SEQ ID NO: 13815 - protein, 360 aa, Psilotum nudum
MVKAGFAGDDAPRAVFPSIVGRPRRTGVMVGMGQKDAYVGDEAQSKRGILTLKYPIEHGIATNWDDMEKIWHHTFYNELRVASEEHPVLLTEAPLNPKANREKMTQIMFETFNVPAMYVAIQAVLSLYASGRTTGIVLDSGDGVTHTVPIYEGYALPHAILRLDLAGRDLTDFLMKILTERGYSFTTTAEREIVRDMKEKLAYVALDFEQEMETSKSSSSLEKSYELPDGQVITIGAERFRCPEVLSQPSLIGMEAAGIHETTYNSIMKCDVDIRKDLYGNVVLSGGSTMFPGIADRMSREITALAPSSMKIKVVAPPERKYSVWIGGSILASLSTFQQMWIAKSEYDESGPSIVHRKCF

SEQ ID NO: 13816 - protein, 274 aa, Glycine max
MHVSNGRQWLPTPEAADGLQSELPFEFQVLEIALEAVCTYLDSNVGDLERGAYPVLDELARNVSTKNLEHVRSLKSNLTRLLARVQKVRDEIEHLLDDNEDMAQLYLTRKWLQNQQFEEAHLGATTSNNFPNTSRSVRRLGSNRSESLVTCHYEDDNNVEDLEMLLDAYFMQLDGTRNKILSVREYIDDTEDYVNIQLDNHRNELIQLQLTLTIASFAIAIETMIAGAFGMNIPCNLYHIDGVFWPFVWITSAACVLLFLLILAYARWKKLLGS

SEQ ID NO: 13817 - protein, 109 aa, Methylobacillus flagellatus KT
MSQIVIESKPSATRLEQLGVSKWPTWSKEVSTFPWVFPEQEIAYVLEGEVVITPDGGGAPVTFRKGDLVTFPAGLRCTWEVKQPLRKHYQLDGTLVGRIYRRIKLFFTR

SEQ ID NO: 13818 - protein, 107 aa, Erwinia carotovora subsp. atroseptica SCRI1043
MVIKPFKLEDVREALSSVGIQGLTVTEVKGFGRQKGHAELYRGAEYSVNFLPKVKIDIAIADDQLDEVIDVISKAAYTGKIGDGKIFVAELQRVIRIRTGETDEAAL

SEQ ID NO: 13819 - protein, 485 aa, Bacillus halodurans C-125
MANLATGEKLKNFIGGQWVESDSGKTEAVPNPATGEILAHVPISNREDLDRAVSVAKEAFKTWGKTPVPRRARVLFKYQQLLVENWEELARLVTLENGKSYKEAYGEVQRGIECVEFAAGAPSLMMGKQLPDIATNIESGMYRYPIGVVGGITPFNFPMMVPCWMFPLAIACGNTFVLKPSERTPLLANRLAELFTEAGLPEGVLNIVHGAHDVVNGLLEHPDVKAISFVGSQPVAEYVYKTASQHGKRVQALAGAKNHSIVMPDADLDGAVNQIVNAAYGSAGERCMAAAVVVAVGEVAEPLMEKLQKAVNEITIGNGLDDDVFLGPVIRESHKQKTENYIELGEKEGATLVRDGRKDNVSKDGYFLGPTLFDNVTTEMTIWKEEIFAPVLSVVRVESLDEAIQLTNQSEFANGACLYTTNGSSVRKFREEIDAGMLGINLGVPAPMAFFPFSGWKNSFYGDLHANGTDGVEFYTRKKMITARW

SEQ ID NO: 13820 - protein, 1070 aa, Silicibacter sp. TM1040
MSIRFFSSRHRPVHLGPFPLERLRRSHQADLSNVPAALPLNFRRPQKPDSIVNAMCEYQAMMDAIRDGLVNGTRGDVPADLQERSNHLKAFGYFADASMVGIGPMREEARLYEPWHNPDIDRLAEDLKTRQTKTLASGIDMIMADLKDAMQAPPTTIGAHRHAIVFLYEMPRDPRPDEAGCDWITDAEAHRACLRSAETAVVLANYIRLLGWDAKAHTGTSSDVDLNRLAVAAGLVRMEEGQLVAPYLGTRFGLAAVTTDFELAEDRPLAPLSEQPGRAGRDLRWWLGAGAERSALNGDPYKDRDFRDGPHPFETLKRVETPTTYIDEARVARVPKRADMFARAQFGDMGKGNQKAATGGFYVRKAAPAMAQRRMLGAFVLLQDGTPAVGPRPTDAQRNADMVKAASYWLGIDAVGISRCPDWTWYSHDATGTPIVPDQPHAISMIVDQGFDTTEGTSGDDWIAVAQSMRAYLRFSLLGGVIARQIRNLGYKAKAHTVMDGEVLQPPLLLLSGLGEVSRIGEVILNPFLGPRLKSGVVTTDMPMAHDKPIDFGLQSFCESCNKCARECPSGAITAGPKLMFNGYEIWKSDSQKCTTYRITTPGGAMCGRCMKTCPWNLEGIFAEKPFRWAAMNMPRAAPALARLDDMLGNGEMNPAKKWWWDLELEEDGGYRPTRHPVNARSLQKDLDLRYEDQTLAVYPAPLAPHPYPYPFPMDREAGIEAYQAMITAEEYQERKARGETGDWDHIYKNDAESPVLQVVVSKVEEMAEGVTKYEFRAADGADLPEWTAGAHLDIVVAPEFLRQYSMSGNPADRSHYQIGVLREDAGRGGSKLLHRIFSEGRRIFVSRPINHFPLDETATRTFLMGGGIGVTPMIAMAHRLHALGADFEFHYSIKSRALGGYLRDLADVPWASKVNLHVSDEGSRANFDQILGQYQSGWHLYTCGAAPYMDAVMQAAEQAGFPEEARHLEYFSVPEQPEYENHPFTLKLARSGRELQVRAEQTATDALAEHGIHVDVKCADGICGVCKCGLISGEVEHRDFVLSKAQRRESIVLCQSRAADPGGCVEIDL

SEQ ID NO: 13821 - protein, 567 aa, Ashbya gossypii ATCC 10895
MTQLPAEPMPKHQQKHAQTSIKAVKRLKDAKPFLQPVDPVKLNVPHYFQHIKRPMDLSTIERKLAVGAYETPEQVAQDFNLMVDNCAKFNGASSVIAQMARNIQASFEKYMLNMPPRDQPVQPRKRRKSSEEAAVVIRRAETHTGRPKREIHPPKSKDIYPLENAKPQSKKHQTEMKFCQQVLKELTAKKHASFNYPFLEPVDPIALNCPSYFDYVKEPMDLGTIGKKLGNWEYADYDDFERDVRLVFKNCYAFNPDGTLVNMMGHRLEDVFNSKWADRPIVADEDSDEGEDDSEYESDVPYTEEDIDESLITNPAIQYLEQQLARMKVELQQLKRQELERIRKERRLARGLSNGGSSSTGRRKRSRTARKKGGAGAAAAAGGSSGGGAGLGNGSGGSGLVKKKRKLKTVVTYDMKRIISERIGDLPEAKLERAVDIIKNSMPDIVGADGEVELDIDQLDDTTILTLYNTFFRQYGAPSSSVAEDELRTNSLSPPSAASSKANKRRRSKALSEEEQNKQIEKIKNKLAILDSASPVSPNLLGLLSGNNEGSSEDDDDDDISSESEEE

SEQ ID NO: 13822 - protein, 453 aa, Rickettsiella grylli
MSKKVKQQKLGLWMLTALVTGNMIGSGIFLLPASLAAYGSISLLSWVVTAVGALLLALVFAKLSNVMPLIGGPYAYCREAFGEFVGFQMAYNYWIALWVGNAAIVVALIGYLSFFWPKLAHDTRWTCLVSISVVWLVTFINILGVRQAGIFQLLTTVLKLIPLLLIALVGIFYIHPHFLSAFNLSGQSNLKAFSGAATLTLWSFIGLESASVPAGHVNNPHRTIPKATILGVVITTVVYLLSSTAAMGVMPLTVLAHSNAPYADAARIMFGPIGSILVAIGAVISCLGALNGWVLLQGQIPLAAAQDKLFPAVFLKKSKSGTPIVGLIVSSILISLLLLMTLNHSLVKQFTLIILLATLASLIPYFLTTMSELVIFYKYPGLFKKDRKLLRSVIIAILAGIYSFWVIIGSGKEIVFYGTLLLLSSVPVYVWMKWRSSSNGNVINVNEQSLPLP

SEQ ID NO: 13823 - protein, 412 aa, Brassica napus
  misc_feature (65)..(65): Xaa can be any naturally occurring amino acid
  misc_feature (99)..(99): Xaa can be any naturally occurring amino acid
  misc_feature (131)..(131): Xaa can be any naturally occurring amino acid
MNALAATNRNFRHASRILGLDSKIEKSLMIPFREIKVECTIPKDDGTLVSYVGFRVQHDNARGPXMKGGIRDHPEVDRDEVNAYARGKTWKTAFAGMAXGGAMGEPGWQPADVSSRELNYVSLRSTSMIQXVIRIRSAFPAPDMGTNAQTMAWILDEYSKFHGHSPAVVTGKPIDLGGSLGREAATGRGVVYATEALLAEYGKSIKGLTFVVQGFGNVGTWAAKLIHEKGGKVVAVSDITGAVRNPEGLDIDALLSHKEATGSLVDFSGGDAMDSNELLIHECDVLIPCALGGVLNKENAGDVKAKFIIEAANHPTDPDADEILSKKGVIILPDIYANAGGVTVSYFEWVQNIQGFMWEEEKVNLELQKYMTRAFHNIKSMCHTHSCNLRMGAFTLGVNRVARATQLRGWEA

SEQ ID NO: 13824 - protein, 365 aa, Aspergillus oryzae
MAEFVRAQIFGTTFEITSRYTELQPVGMGAFGLVCSARDQLTGQPVAVKKIMKPFSTPVLSKRTYRELKLLKHLRHENIISLSDIFISPLEDIYFVTELLGTDLHRLLTSRPLEKQFIQYFLYQILRGLKYVHSAGVVHRDLKPSNILINENCDLKICDFGLARIQDPQMTGYVSTRYYRAPEIMLTWQKYDVEVDIWSAACIFAEMLEGKPLFPGKDHVNQFSIITELLGTPPDDVIETICSENTLRFVKSLPKRERQPLATKFKNADPDAVDLLERMLVFDPKKRIRAGEALAHEYLAPYHDPTDEPVAEEKFDWSFNDADLPVDTWKIMMYSEILDFHNIDQGTEASQVLVEGAGDAQQNFV

SEQ ID NO: 13825 - protein, 334 aa, Glycine max
MGDRGSSHSLLAGEHKHSLFASWRNSIEAIYPSMAAGLPTAAILKPYNLVQPPIPLSKPTTSLFFNPLRCFHHSTILRVRPRRRMSGFTVCVLTEDSKEIKTVEQEQEQVIPQAVSAGVAEKLARKKSQRFTYLVAAVMSSFGITSMAVFAVYYRFSWQMEGGDVPWSEMLGTFSLSVGAAVAMEFWARWAHRALWHASLWHMHESHHRPREGPFELNDVFAIINAVPAIALLSYGIFHKGLVPGLCFGAGLGITVFGMAYMFVHDGLVHKRFPVGPIANVPYFRRVAAAHQLHHSDKFNGAPYGLFLGPKEVEEVGGLEELEKEISRRIRSGS

SEQ ID NO: 13826 - protein, 428 aa, Trichodesmium erythraeum IMS101
MSDSLFDDASRRLERALQYVSLSEDTKERLKYPKATLIVSIPVRMDDGSLRVFQGYRVRYDDTRGPTKGGIRYHPNVSIDEVKSLAFWMTFKCAVVSLPFGGAKGGITVNPKELSRMELERLSRGYIDAIADFIGPDTDIPAPDMYTNPMIMGWMMDEYSIIRRQLSPAVITGKPVSIGGSLGRNTATAMGAFFAIETIMPKFEYTPEKTTVAIQGFGNAGAFLAELLCLHGYKVVAVSDSQGGIYSAQGLDIPSIRQYKEVNKQIQAVYCKDSVCNIVEHTVLTNEELLALDVDILIPAALENQITEENVKDIQAKFIFEAANGPTTSGADKILEDRGVYVFPDILINAGGVTVSYFEWVQNRSGLYWTLDEVNQKLKAKMVAETENIWQISQELSISMRTAAYVHGLDRLGQAINAKGTRAFYAKR

SEQ ID NO: 13827 - protein, 183 aa, Erwinia carotovora subsp. atroseptica SCRI1043
MSTEIYAIPLTTIDGKATTFEAFKGQVALVVNVASKCGLTKQYDALEKLYETYRDKGLVVLGFPSNEFAGQEPGSEEEIQEFCRGTFGVQFPMFSKIEVNGENRHPLYQLLIRQQPEANGTWKSDFFARLVNKGRKPKNPEDILWNFEKFLVDREGRVIERFAPDMSPDHDTIVKAIEAALAK

SEQ ID NO: 13828 - protein, 387 aa, Trichodesmium erythraeum IMS101
MSRVGILLLNLGGPEQLEDVRPFLFNLFSDPEIIRLPFPWLQKPLAWFISTMRFQKSQENYKEIGGGSPLRSITEEQALAIQQQLEQKGLLTQMYIGMRYWHPFTEEALTRIKREQVEKLVILPLYPQYSISTSGSSFRLLDKLWEKDSELKKIEYTVIPSWHQRPGYVQAMVELITQQLDQSPNPDQVHIFFSAHGVPVSYVEEAGDPYQAEIEECVDKIMKTLNCSNPHTLAYQSRVGPVEWLKPYTEDAIEELAAGGVKDLLVVPISFVSEHIETLQEIDIEYRELAEEAGISNFYRVPALNTHPVFINDLADLVMEALDAPSRDFSDAIQMKKIIKMYPQERWQWGLTTTAEVWNGRLAMVGFMALLLELITGYGPLHFAGLL

SEQ ID NO: 13829 - protein, 131 aa, Haemophilus parainfluenzae
AFCDRVISGEWKGYTGKAITDVVNIGIGGSDLGPYMVTEALRPYKNHLNMHFVSNVDGTHIAETLKKVNPETTLFLVASKTFTTQETMTNANSARDWLLAAAKDNSAVAKHFAALSTNGKAVAEFGIDTNN

SEQ ID NO: 13830 - protein, 336 aa, Sinorhizobium meliloti
MTVKVAINGFGRIGRNVLRAIVESGRTDIEVVAINDLGPVETNAHLLRFDSIHGRFPADVKVDGDAIVINNGKPIKVTAIRNPAELPHKELGVDIAMECTGIFTARDKAAAHLEAGAKRVIVSAPADGADLTVVYGVNHDKLTKDHLVISNASCTTNCLVPVAKVLHDAVGIDHGMMTTIHSYTNDQPSLDQMHKDLYRARAAALSMIPTSTGAAKAVGLVLPELKGKLDGISVRVPTPNVSVVDLKFVAKRETTKEEINAAIKAAADGPLKGVLGYTLAPNVSIDFNHDPRSSVFHMDQTKVMEGKFVSILSWYDNEWGFSNRMSDTAVALSKLI

SEQ ID NO: 13831 - protein, 129 aa, Burkholderia mallei ATCC 23344
MRLLHTMLRVGDLDRSIKFYTELLGMKLLRRQDYPDGKFTLAFVGYGDERDHTVIELTHNWDTKSYELGTGFGHLALEVEDAYKACEQIKAQGGKVTREAGPMKHGTTVIAFVEDPDGYKIEFIQRNAH

SEQ ID NO: 13832 - protein, 528 aa, Arabidopsis thaliana
MGNCCRSPAAVAREDVKSNYSGHDHARKDAAGGKKSAPIRVLSDVPKENIEDRYLLDRELGRGEFGVTYLCIERSSRDLLACKSISKRKLRTAVDIEDVKREVAIMKHLPKSSSIVTLKEACEDDNAVHLVMELCEGGELFDRIVARGHYTERAAAGVTKTIVEVVQLCHKHGVIHRDLKPENFLFANKKENSPLKAIDFGLSIFFKPGEKFSEIVGSPYYMAPEVLKRNYGPEIDIWSAGVILYILLCGVPPFWAESEQGVAQAILRGVIDFKREPWPNISETAKNLVRQMLEPDPKRRLTAKQVLEHPWIQNAKKAPNVPLGDVVKSRLKQFSVMNRFKRKALRVIAKFLSTEEVEDIKVMFNKMDTDNDGIVSIEELKAGLRDFSTQLAESEVQMLIEAVDTKGKGTLDYGEFVAVSLHLQKVANDEHLRKAFSYFDKDGNGYILPQELCDALKEDGGDDCVDVANDIFQEVDTDKDGRISYEEFAAMMKTGTDWRKASRHYSRGRFNSLSIKLMKDGSLNLGNE

SEQ ID NO: 13833 - protein, 90 aa, Triticum aestivum
ERYEGSEFSEDTFIAKVKMEIVVCKEQVEPVIDKIIEKARTGEIGDGKIFLIPVADVVRVRTGERGVHAERMIRRSVQDKLPPVDHNLMS

SEQ ID NO: 13834 - protein, 490 aa, Pseudomonas syringae pv. tomato str. DC3000
MARFELQKLYIDGGYVDASNTETFDSINPANGEVLAKIQRASKEDVERAVVAAEKGQKIWAAMTAVERSRILRRAVDILRERNDELAALETLDTGKAISETRYVDIVTGADVLEYYAGLVPAIEGEQIPLRDSSFVYTRREPLGVVAGIGAWNYPIQIALWKSAPALAAGNAMIFKPSEVTSLTTLKLAEIYTEAGVPNGVFNVLTGSGREVGTWITEHPRIEKVSFTGGTDTGKKVMASASSSSLKEVTMELGGKSPLIVFDDADLDRAADIAMMANFYSSGQVCTNGTRVFVPNALKGEFEAKILERVKRIRPGNPEDENINFGPLVSFEHMESVLGYIAKGKEQGARLLCGGDRLTGGVFDKGAFVAATVFTDCTDEMTIVREEIFGPVMSILGYDTEDEVVRRANDTDFGLAAGIVTRDLNRAHRVIHLLEAGICWINAWGESAAQMPVGGYKQSGVGRENGISSLAQYTRIKSVQIELGDYASVF

SEQ ID NO: 13835 - protein, 515 aa, Buchnera aphidicola (Pemphigus spyrothecae)
  misc_feature (227)..(227): Xaa can be any naturally occurring amino acid
MGEKIIIFDTTLRDGEQALQASLTTKKKLKIALSLEEMGIDIIEAGFPISSPGDFKSVETISKEFKSSIICSLARCVEKDIDIAAEAMRFAKHFRIHIFLGTSPLHVKSKLKKNFSEIIDMAIFAIKKAKRYTBDIEFSCEDAGRTPINQLCYIVENVIKAGATTINIPDTVGFTIPYEFNQIIKSLYNKVPNIDKVILSVHCHNGLGMATANSITAIQAGARQIEXTMNGMGERAGNTALEEVIIAIKLKKNNLNLHTNIKHKKIYKTRKLISEICNTVIPSNKAIIGTNAFSHSSGIHQDGILKNRKNYEIITPKSIGLKPIKLNLTSRSGRAAVKYHMTEMGYDEKLYKLDILYNSFLKLADRKGQVFDYELESLAFIDQKENTTEHFRLKKFNVQHQSTGITISSIELYCGKKIKTANTRTKKGLVNSIYITLNKITNLPIYLKNIQLITQKKPINIIISIKVQIEYKKRQFYGIGNSKDIVESTAQAMIHILNNIWKANKVNILLKNIKT

SEQ ID NO: 13836 - protein, 131 aa, Haemophilus pittmaniae
AFCERVISGEWKGYTGKAIRDVINIGIGGSDLGPYMVTEALRPYKNHLNMHFVSNVDGTHIAETLKKVDPETTLVLVASKTFTTQETMTNALTARDWLLAAAKDQAAVAKHFAALSTNAKAVAEFGIDTDN

SEQ ID NO: 13837 - protein, 363 aa, Buchnera aphidicola (Pemphigus spyrothecae)
MTKIYNLAILPGDGIGPELLQKDLNFKVLKEQYKLKINTTEYDIGGIAIDKYGKALPKETLDGCKESDSILFGSVGGPKWQHLPPDQQPERAALLPIRKYFNLFSNLRPAKLYSTLNHLSPLRRDISEKGFDILCVRELTGGIYFGKPKGYIKNIIDKKAFDTEIYYASEIKRIAHIGFKLAQNRKYKITSVDKANVLESSVLWRETVNTISKEYPDVKLSHLYIDHAAMQIIKNPDKFDVILTSNLFGDILSDECAMITGSIGMLPSASLNDSNFGLYEPAGGSAPDIAGKNIANPIAQILSIAMLVRYTMKLPMISDHIESAVIDTLKKGYRTLDIANDKEKYVSTNDIGDIISDILKKRI

SEQ ID NO: 13838 - protein, 809 aa, Glycine max
  misc_feature (489)..(489): Xaa can be any naturally occurring amino acid
  misc_feature (669)..(669): Xaa can be any naturally occurring amino acid
  misc_feature (691)..(692): Xaa can be any naturally occurring amino acid
  misc_feature (746)..(746): Xaa can be any naturally occurring amino acid
  misc_feature (792)..(792): Xaa can be any naturally occurring amino acid
  misc_feature (803)..(803): Xaa can be any naturally occurring amino acid
MSMSVLSCQRSTMLAAQNNSPFLRRFRSFKPHRSRFRCLLDQISAPTLLTSDNVIAAAAKAASVHSAVSSAITQVAVTAVAIASGACLSTKFDFLWPKLQEQSGTVMQDGVDVTGYPIFNDAKVQKAIAFARKAHRGQMRKTGDPYLTHCIHTGRILAALVPSSGKRAVDTVVAGILHDVVDDTCQSLRDIEAEFGDDVVKLVASVSRLSYINQLLRRHRRVSVNQGVLGQEEASNLRVMLLGMVDDPRVVLIKLADRLHNMRTIYALPLQKAQAVAEETLIIWCSLASRLGLWALKAELEDLCFAVLQPQIFQKMRADLASMWSPTSRTGNPRRLSIKGNLIHLDENSSTAFCNGSLTFNEDVNRKDLLEAVVPFDILLDRRKRANYLSSIGRLEETCKKPKVVQDAGLALATMVICEEALEREMIISSSYVPGMEITLSSPLKSLYSLYSKMKRKDVSIDKVYDARALRVVVGDKNGTLHGPAVRCXYSLLDIVHRLWTPIDGECDDYIINPKPSGYQSLHTAVQGPDNSPLEVQIRTQRMHECAEQGLAAHWLYKETGNPFLSIDSMDEPETEASSYFSKDLEEGNSSDILLSKYKSLKAGHPVLRVEGSHLLAAIIISVENDERELLVAVSFGLAASEAVADRRSFQIKRWEAYARLYKKVSDEXWFEPGHGDWFTCLEKYTLCRDXXQFGRLLPTFIQVINFTEQEKSEYWAVVSAVFEGRQVDWITSRSKFDLVASTSVXAGIDNKVNLLRTMLSWEEQLRSEVNFKQTKHDVKLYDLHGSLGEVXIICWPHGEILXLKAGST

SEQ ID NO: 13839 - protein, 131 aa, Haemophilus parahaemolyticus
DFCERVISGEWKGYTGKVITDVINIGIGGSDLGPYMVTEALRPYKNHLTMHFVSNVDGTHIAETLKKVNPETTLVLVASKTFTTQETMTNAHSARDWLLAAAKDESAVAKHFAALSTNAKEVEKFGIDTNN

SEQ ID NO: 13840 - protein, 148 aa, Persicaria hydropiper
FIGSWLVMRLLERGYVVRATVRDPTNMKKVKHLLDLPTANTHLSLWKADLGEEGSFDEAINGCAGVFHVATPMDFESKDPENEVIKPTINGMLDIMKACLKANVRKLVFTSSAGTVNVEEKQKPVYDENCWSDVEFCRRVKMTGWMYF

SEQ ID NO: 13841 - protein, 315 aa, Mycobacterium leprae
MIRIGTRGSLLATTQAALVRDALIANGHPAELVIVNTAGDQSSASIDSLGVGVFTTALRAAIEEGCVDAAVHSYKDLPTADDPRFTVAAIPPRNDPRDAVVTRDELVLAELPAGSLVGTSSPRRAAQLRALGLGLEIRPLRGNLDTRLNRVSSGDLDAIVVARAGLARPGRLDEVTETLDPVQMVPAPAQGAIAVECRAGDSRLVAVLAALDDADTRAAVTAERVLLAELEAGCSAPVGAIAQVVESIDGEGRVFEELSLRGCVAALDGSDVIRASGISTSGRASELGLAVAVELFELGARELMWGARSDRARGS

SEQ ID NO: 13842 - protein, 110 aa, Buchnera aphidicola (Pemphigus spyrothecae)
MINTKIINVNEENFEKNILQEKNFILVDFWAEWCNPCKILAPILEEIANEYQDKLIVAKINIDENPNIAPKYSIRGIPALLLFKNGTLLKTKIGALSKIQLQTFLNKYLI

SEQ ID NO: 13843 - protein, 204 aa, Triticum aestivum
MRPGPEFVTMSRRAGAPTAAPGHGLINGTAAPHSTWQSPVPYLFGGLAAMLGLIAFALLILVCSYWKLSGYLDGDRDGQAAGDADGEKGSVLGAARPAMDFLEHVVVIMAGDEQPTFLAKPVTSRAAEMELTAAAAPEASARAGDDDGQVRKVDEQGCEVCSHLGADSATPSRDHHDAASRSHNHHHDHDHESSSTTALQESSQ

SEQ ID NO: 13844 - protein, 182 aa, Glycine max
RVCLCLVAVIVATMWSQNAAQSGCTNTLTSLSPCLNYIMGSSSTPSASCCSQLSSIVQSSPQCLCSVLNGGGSTFGITINQTLALSLPGACEVQTPPVSQCQAGNGPTTPSTAPVGSPSGSSAESPQGSITPSALDFPSGAGSKTVPSIDGGSSDGSAIKVPSHLVLYLLALVSCALTFTKF

SEQ ID NO: 13845 - protein, 308 aa, Yersinia enterocolitica
MKQSKLGVLMVNLGTPDAPTPQAVKRYLAEFLSDRRVVDTSPWLWWPLLRGVILPIRSPRVAKLYQSVWMDEGSPLLVYSRRQQKALAERMPEIPVELGMSYGSPNLPDAIDKLLAQGVTKLVVLPLYPQYSCSTSAAVWDAVARILKGYRRLPSISFIRDYAEHPAYISALKQSVENSFVQHGKPDRLVLSFHGIPKRYAQLGDDYPQRCEDTSRALRAEIALPAEQIMMTYQSRFGREPWLTPYTDETLKSLPSQGVKHIQLICPGFSADCLETLEEIKEQNREVFIHAGGEKFEYIPALNDDEGP

SEQ ID NO: 13846 - protein, 227 aa, Pseudomonas syringae pv. tomato str. DC3000
MGLSPLAGSRRFAPFSFRERDYLPQLTGRGVPLIEAARELVGKALGHMPLGRVCLLTQARSWGLSFNPVSFFYCHEADGTLAAILCEVTNTPWGERYSYVLPATGEGHQHFSVAKAFHVSPFLPRDLEYRMSFSQPAERIGVHMADWQGELKMFDATLNLTRQQLSRKTLHRYLIAYPWMTAKTCLAIYWQAMRLLVKRIPIFSHQAADGDYRAAAAQPKDSRHEKQ

SEQ ID NO: 13847 - protein, 183 aa, Nicotiana tabacum
MLASNNPKKRAGRKKLRETRHPVYRGVRKRNSGKWVCEVREPNKQSRIWLGTFPSAEMAVRAHDVAAIALRGRSACLNFADSAWKLHIPASTDAKDIQKAAAEAAEAFRTSEAENMPEYSGEDSKEVNSTPENMFYMDEEALFCMPGLLANMAEGLMLPPPQCSQIGDHMEDDFDMPLWSYSI

SEQ ID NO: 13848 - protein, 477 aa, Escherichia coli
MTQSRLHAAQNALAKLHEHRGNTFYPHFHLAPPAGWMNDPNGLIWFNDRYHAFYQHHPMSEHWGPMHWGHATSDDMIHWQHEPIALAPGDDNDKDGCFSGSAVDDNGVLSLIYTGHVWLDGAGNDDAIREVQCLATSRDGIHFEKQGVILTPPEGIMHFRDPKVWREADTWWMVVGAKDPGNTGQILLYRGSSLREWTFDRVLAHADAGESYMWECPDFFSLGDQHYLMFSPQGMNAEGYSYRNRFQSGVIPGMWSPGRLFAQSGHFTELDNGHDFYAPQSFLAKDGRRIVIGWMDMWESPMPSKREGWAGCMTLARELSESNGKLLQRPVHEAESLRQQHQSVSPRTISNKYVLQENAQAVEIQLQWALKNSDAEHYGLQLGTGMRLYIDNQSERLVLWRYYPHENLDGYRSIPLPQRDTLALRIFIDTSSVEVFINDGEAVMSSRIYPQPEERELSLYASHGVAVLQHGALWLLG

SEQ ID NO: 13849 - protein, 392 aa, Nostoc punctiforme PCC 73102
METLPIIISDETLRDGEQQAGIFFSYPTKQKLAHLIAQTGVDRLSMMPRVHEQEEELVKSLVSEGLDSLIAAATMTGKQYIDQAKMYGVKRIILFYGLSDRLLFLRDPQIRLLNEFKGKTIDDDIPKKVIERIRQNAIDLIVENLHYATTVAGLTVDFAAEDASRADFDFLVQCIRSFSPYLDHFMLCDTVGVLTPEKSYIWINDLLQRTTGVAFGVHYHNDMGLALENTLQSVIAGATLVSGTFCGIGERAGNVAIEQVLNGLRVRFGIEVKGINYDAIAAVTDYIEQLGIRPAPPYSQTAQRHESGIHVNSLFSDPQSYAALPYNTIEVLFGKWSGISNFQYLFEKQLQNPQPRNQYEKMRSVIKSLAVEQERYFTAKEVLELWKNGVFK

SEQ ID NO: 13850 - protein, 219 aa, Nicotiana tabacum
MDIFRSYYSDPLAEYSSISDSSSSSCNRANHSDEEVMLASNNPKKRAGRKKFRETRHPVYRGVRKRNSDKWVCELREPNKKSRIWLGTFPSAEMAARAHDVAAIALRGRSACLNFADSAWKLPIPASTDAKDIQKAAAEAAEAFRSSEAENMPEYSGEDTKEVNSTPENMFYMDEEALFFMPGLLVNMAEGLMLPPPQCSQIGDHMEADVDMPLWSYSI

SEQ ID NO: 13851 - protein, 158 aa, Cryptococcus neoformans var. neoformans JEC21
MAEEEHHETFEATGAGASKTFPMQCSALRKNGHVVIKGRPCKIVDMSTSKTGKHGHAKVHLVAIDIFTGKKLEDISPSTHNMDVPNVRRQEFQLLDIQDGFLNLMDSDGGSKDDVKVPETEIGQQIMADFEAGKDLMVTIISAMDEEQAISYKEAPSN

SEQ ID NO: 13852 - protein, 439 aa, Oryza sativa
MDDAGRASAPAVVTVTASAAAPTPPLPPPPPPPPPSQLPATAAATDEPSHDPAALYGEGMWQQMTMSGSGAMQPGPYPERSGEPDCTYYLRTGLCRFGMSCRFNHPQDRNLAIASARMKGEYPERMGQPECQYYLKTGTCKFGPTCKFHHPREKAGIAGRVQLNTLGYPLRPSEKECAYYLKTGQCKYGNTCKFHHPELFNAMASSRGSPIYPSVHSSATAGPPYTGTMASWAFPRGSFIPSPRWQNPSNYAPMIVPQGLVQVPSWNSYTGQMMPVSSSESRLQSPGAQQTYGTSQQVDASAGNQGMLSPYRSSSYPVPQYALQRENVFPERPDQPECQYYMKTGDCKFGAVCKFHHPRVRSMPTPDCVLSPVGLPLRPGEELCKFYSRYGICKFGANCKFDHPTMAPPMGVYAYGSASTNVPMVRRLLQSPSASAYTS

SEQ ID NO: 13853 - protein, 416 aa, Vibrio parahaemolyticus RIMD 2210633
MSKRRVVVTGMGMLSPVGNTVESSWKALLEGKSGIVNIEHFDTTNFSTRFAGLVKDFDCTEYMSKKDARKMDLFIQYGIAAGIQALDDSGLQITEENAPRVGVAIGSGIGGLDLIETGHSALVEKGPRKVSPFFVPSTIVNMVAGNLSIMRGLRGPNIAISTACTTGLHNIGHAARMIAYGDADAMVAGGAEKASTPLGMAGFGAAKALSTRNDEPQKASRPWDKGRDGFVLGDGAGVMVLEEYEHAKARGAKIYAELVGFGMSGDAYHMTSPSEDGSGGALAMEAAMRDANITGTQVGYVNAHGTSTPAGDVAEIKGVKRALGEEGAKQVLVSSTKSMTGHLLGAAGSVEAIITIMSLVDQIVPPTINLDDPEEGLDIDLVPHTARKVEGMEYAICNSFGFGGTNGSLIFKKFAE

SEQ ID NO: 13854 - protein, 182 aa, Nicotiana tabacum
MDQNLPVTAKKFWKIVRVAFFMLRKGLSKRKLMFDLNLLMKRGKIAGKAAIQNLMFHHNNNTCPSSTSSSKEYYEFSCSNSPAFHLPFNLNKRSKHNRHHETDGDVLMVNAAVLKALEMIQSETASPALPGFGRTPTVRQLRVTDSPFPIRDGEGNSHVDEKADEFISRFYKDLRREASAFA

SEQ ID NO: 13855 - protein, 913 aa, Staphylococcus aureus subsp. aureus COL
MKKRIDYLSNKQNKYSIRRFTVGTTSVIVGATILFGIGNHQAQASEQSNDTTQSSKNNASADSEKNNMIETPQLNTTANDTSDISANTNSANVDSTTKPMSTQTSNTTTTEPASTNETPQPTAIKNQATAAKMQDQTVPQEANSQVDNKTTNDANSIATNSELKNSQTLDLPQSSPQTISNAQGTSKPSVRTRAVRSLAVAEPVVNAADAKGTNVNDKVTASNFKLEKTTFDPNQSGNTFMAANFTVTDKVKSGDYFTAKLPDSLTGNGDVDYSNSNNTMPIADIKSTNGDVVAKATYDILTKTYTFVFTDYVNNKENINGQFSLPLFTDRAKAPKSGTYDANINIADEMFNNKITYNYSSPIAGIDKPNGANISSQIIGVDTASGQNTYKQTVFVNPKQRVLGNTWVYIKGYQDKIEESSGKVSATDTKLRIFEVNDTSKLSDSYYADPNDSNLKEVTDQFKNRIYYEHPNVASIKFGDITKTYVVLVEGHYDNTGKNLKTQVIQENVDPVTNRDYSIFGWNNENVVRYGGGSADGDSAVNPKDPTPGPPVDPEPSPDPEPEPTPDPEPSPDPEPEPSPDPDPDSDSDSDSGSDSDSGSDSDSESDSDSDSDSDSDSDSDSESDSDSESDSDSDSDSDSDSDSDSDSDSDSDSDSDSDSDSDSESDSDSESDSESDSDSDSDSDSDSDSDSDSDSDSDSDSDSDSDSDSDSDSDSDSDSDSDSDSDSDSDSDSDSDSDSDSDSDSDSDSDSDSDSDSDSDSDSDSDSDSDSDSDSDSDSDSDSDSDSDSDSDSDSDSDSDSDSDSDSDSDSDSDSDSDSDSDSDSDSDSDSDSDSDSDSRVTPPNNEQKAPSNPKGEVNHSNKVSKQHKTDALPETGDKSENTNATLFGAMMALLGSLLLFRKRKQDHKEKA

SEQ ID NO: 13856 - protein, 457 aa, Streptomyces avermitilis MA-4680
MNVSVVLFTSDLRLHDHPPLRAALDGARQVVPLFVRDRAVDGAGFAAPNRLAFLADCLRDLDAGLRERGGRLVLRSGDVVDQVCKVAAEADADEVHLAAGVSAYAHRREQRLRSALEADGRRLHVHETVITAVAPGAVTPSSSDHFAVFTPYFRHWEREHLRDALGAPRGVRVPESVGSERLPTRTELSGLSQGLAAGGEEEGRKRLMAWLRGGITAYEDRHDDLAGDATSHLSPHLHFGTLSPVELVHRARRTGGPGAEAFVRQLAWRDFHYQVLAARPDAATADYRGRGDRWRSEAAAREEVEAWRTGRTGYPVIDAAMRQLRHEGWMHNRGRLLTASFLTKTLYVDWRVGARHFLELLVDGDVANNQLNWQWMAGTGTDTRPNRVLNPVTQAKRYDPDGAYVRRWVPELEGLRGAAVHEPWKLKGLDRAAYDYPDPIVELADGLARFRHARGRD

SEQ ID NO: 13857 - protein, 287 aa, Glycine max
  misc_feature (9)..(9): Xaa can be any naturally occurring amino acid
  misc_feature (25)..(25): Xaa can be any naturally occurring amino acid
DKGILPHPXILMAIARDGLLPPIFXLILSLPACPCYIPLITGLVASLLAFSMEVSELAGMVSVGTLLAFTMVAISVLILRYIPPNEVLLLPSLPRTNSNEEDAKTHVGASGSKKPTVFKEDVPIDCPLIAKDPVIGKYVHEGNRRKVIGWVIAFTCLGVFVLTFAASNKTMISSVRFALCGVGGCLLLSGFVFLTCMDQDDARHNFGHSGGFTCPFVPLLPVACILINSYLLVNLGAATWARVSIWLAIGVIVYVFYGRTHSTLKDAVCVPATQVVDIYHTSTSCLA

SEQ ID NO: 13858 - protein, 321 aa, Burkholderia xenovorans LB400
MSQHSPERIDVHLTQIRLEADDVASYEFRPVAGGPALPVFEAGAHIDLYLPENRVRSYSLVNDPQERHRYVVAVQREAAGRGGSAWMHRVPRVGERFTISAPKNDFPLCESARESLFICGGIGITPVVAMIRRLERIGASWRLHYAVRECSRAAYADDLAQLDNADSRVEMYFQNEDRRPDVRGIVDRAPAGTHLYCCGPRGMVDDFIAACAGRPQDEVHFERFAAANDAASEGGFEVVLHRDGRRIAVAPGKTILDTLLDHGVDVQYACSSGVCGTCRVGVIDGVPDHRDDFLSADEKAGNGAIMVCCSGSLSPTLVLDL

SEQ ID NO: 13859 - protein, 169 aa, Glycine max
RIRTAAGAKCGIRASIAGEQQTSQTKAARRRSGTRGRPPALAQAYETRDKPMASHAEPAEEGATQNARRKTTGDKRRAQPHADTGGKGLFTKEKDEARINGEQDNAGHATKEGATHPPEKTMPPRNPPTRRTEETAGKTGAEEAPGGPPAGNTAATATTDRQGTQHAQR

SEQ ID NO: 13860 - protein, 341 aa, Sinorhizobium meliloti
MSERLEDIAVAMVANGRGLLAADESTATIKKRFDSIGLESTETSRRDYREMLLRSDDAMREYISGVILYEETLFQKAADGTPLADVIRNAGSIPGIKVDTGAKPMAHFPNETITEGLDGLAARLARYHEAGARFAKWRGVIAISDALPTWGAIRANAHALARYAALCQEAKIVPIVEPEVLMDGAPGDHSIERSEEVTEWVLRTVFEELGELRVRLEGMILKPSMVIDGKKARKASVDEVAERTIKVLKRTVPAAVPGIAFLSGGQSTEEATAHLSAMNAAHDLPWKLTFSYGRALQQEALNAWGGKSENVAAGQRAFAHRAKMCSLAAKGSWTKDFEKAA

SEQ ID NO: 13861 - protein, 181 aa, Fagus sylvatica
MASSMISSATVATVSRATPAQATMVAPFTGLKSTAAFPATQKSNNDITSLASNGGRVQCMKVWPPLGLQKFETLSYLPPLSLESLAKQIEYLILKGWIPCLEFELEHPFVYRENNRSPGYYDGRYWVMWKLPMFGCTDATQVLAELQEASKTYPTSHIRIIGFDNKRQVQCISFIAYKPPK

SEQ ID NO: 13862 - protein, 112 aa, Synechococcus sp. PCC 7002
MKKVEAIIRPFKLDEVKIALVNAGIVGMTVSEVRGFGRQKGQTERYRGSEYTVEFLQKLKIEIVIDDDQVDAVVDKIVAAARTGEIGDGKIFISPVDQIVRIRTGEKDLEAV

SEQ ID NO: 13863 - protein, 892 aa, Oryza sativa
MERARRLANRALLRRLLAAATAESPAAPSRGISTLAKGSRPRAPPRPAPHQYTTGRRPVSASALQPSDTFPRRHNSATPAEQAAMASECGFGTVDALIDATVPAAIRAPEMRFSGRFDAGFTESEMIEHMQRLAAMNRAYKSFIGMGYYNTHVPAVILRNLMENPAWYTQYTPYQAEIAQGRLESLLNYQTMVADLTGLPMSNASLLDEATAAAEAMAMCNGILKSKKKTFLIASNCHPQTIDVCQTRAAGFDLNVVVADAKDFDYGSGDVCGVLVQYPGTEGEVLDYAEFVRDAHAHGVKVVMATDLLALTSLRPPGEIGADIAVGSAQRFGVPMGYGGPHAAFLATSQEYKRLMPGRIIGVSVDSSGKPALRMAMQTREQHIRRDKATSNICTAQALLANMAAMYAVYHGPEGLKAIADRVHGLAGTFAHGLKKLGTVTVQELPFFDTVKVKDADANAIAQEACKNEMNLRVVDATTITVAFDETTTLEDVDKLFKVFNGGKPVNFTAESLVSEVSSSIPSSLVRKSPYLTHPIFNMYHTEHELLRYLHKLQSKDLSLCHSMIPLGSCTMKLNATVEMMPVTYPSFANMHPFAPTEQAAGYHEMFDDLGDLLCKITGFDSFSLQPNAGASGEYAGLMVIRAYHRARGDYHRDVCIIPVSAHGTNPASAAMCGMKIVAVGTDSKGNINIEELRKAAEANKDNLAALMVTYPSTHGVYEEGIDEICRIIHENGGQVYMDGANMNAQKHYPVLFRGVNGTVAHEFIIDLRGFKTTAGIEPEDVAKRLMDYGFHAPTMSWPVPGTLMIEPTESESKAELDRFCDALISIREEIAEIESGKADVNNNVLKVKYQYTAICFHILDCRVDNVYGDRNLICTLQQGSQVAEEAAAATA

SEQ ID NO: 13864 - protein, 488 aa, Listeria monocytogenes str. 4b F2365
MSIKETALPKVQTKLFINGKWTDGDNKETKDIVNPANGEVIAKIAQAGPNETKKAIKAAKEAFPDWAKMELADRVKLLHKIADLMEEKADTLAKIMTLEQGKPLKESKGEVLTGAENFRFAAEEARRLYGETIPAPNNHAFIVKKQPIGVVAAITPWNFPGGMVTRKLAPALATGNTIVLKPSGDTPLSALAIFEIFEEAGLPKGVANIVMGSSKEIGETLTDSDDVRKLTFTGSTKVGQTLFKQSAETLKKISLELGGHAPFIVFDDANLDAAVNDLVAAKFRNNGQVCVSPNRIFVAKEIKEKFTKALVAKVEQLKVGNGLDDVNVGPLIREDAIDKIDKQLKNATDKGAKVLTGGGRLTGSDYDKGNFYKPTVLDNVTREMDIFYEETFGPVIPLITFETEDEAIEMANDSEFGLASYFYTKDLARVEKVGAALEYGMVGANEIAISNPETPFGGVKHSGFGRENGHYGMEEYIQVKFINLKYRD

SEQ ID NO: 13865 - protein, 131 aa, Haemophilus parahaemolyticus
DFCERVISGKWKGYTGKAITDVINIGIGGSDLGPYMVTEALRPYKNHLTMHFVSNVDGTHIAETLKKVNPETTLVLVASKTFTTQETMTNAHTARDWLLAAAKDESAVAKHFAALSTNAKEVEKFGIDTNN

SEQ ID NO: 13866 - protein, 204 aa, Debaryomyces hansenii
MPAKFVSIPEAIEAFKNGEYLIVMDDESRENEGHLIMSAELMTQEKMAFLVRYSSGYVCVPLSTERADALNLHPMLANETDRHGTAYTVTCDYADGTTTGISAHDRALTATKLADPSSKPVDFIRPGHVLPLRAVPGLLKKRRGHTEAGVQLCELAGLQPAAVICEMVRDEDGLMMRLDDCAKFSETHNIKMITIEQLVEHISQ

SEQ ID NO: 13867 - protein, 131 aa, Haemophilus paraphrohaemolyticus
DFCERVISGEWKGYTGKAITDVINIGIGGSDLGPYMVTEALRPYKNHLTMHFVSNVDGTHIAETLKKVNPETTLVLVASKTFTTQETMTNAHTARDWLLAAAIDESAVAKHFAALSTNAKEVEKFGIDTNN

SEQ ID NO: 13868 - protein, 478 aa, Nocardioides sp. JS614
MTQRVRPGLTTGAEAPRLARMVATATPGHDVSALHPELRPMYEKVVSRNPGEREFHQAVFEVMQSVGPIAEERSDYAQWSILQRICEPERQIIFRVPWVADDGKVEINRGFRVEFNSALGPFKGGLRFHPSVNLSIIKFLGFEQVFKNALTGMPIGGGKGGADFDPKGRSDGEVMRFCQSFMTELYRHVGEYTDVPAGDIGVGGREIGYLFGQYKRITNRYESGVITGKGLTWGGSQVRTEATGYGTVFFVEQMLQARGEHLEGKRVVVSGAGNVAIYAVEKAQALGAVVVAVSDSGGYVVDEAGIDLELLKEIKEVERGRLTEYVERRSGATHVTDGCIWDVPCDIALPCATQNELDESAAKTLAANGVTLVAEGANMPSTPAAVQLFQAAGVLFAPGKASNAGGVATSALEMQQNASRDSWHFDETEARLQEIMSEIHDTCLATSDHYGAPGNYVVGANLAGYVRVADAMVALGVI

SEQ ID NO: 13869 - protein, 131 aa, Haemophilus paraphrohaemolyticus
DFCERVISGEWKGYTGKAITDVINIGIGGSDLGPYMVTEALRPYKNHLTMHFVSNVDGTHIAETLKKVNPEATLVLVASKTFTTQETMTNAHTARDWLLNAAKDESAVAKHFAALSTNAKEVEKFGIDTNN

SEQ ID NO: 13870 - protein, 112 aa, Mesorhizobium loti MAFF303099
MKIVMAIIKPFKLDEVREALTAVGIQGLTVTEVKGYGRQKGHTEIYRGAEYAVSFLPKIKIEVAVSADTVDKAVEAITAAAKTGQIGDGKIFVFGIDQAVRIRTGETDTDAL

SEQ ID NO: 13871 - protein, 482 aa, Bacillus cereus E33L
MIRVGGEWMYTETKEKKQSPNKMVRKIAFISTFGGLLFGYDTGVINGALPYMSDSNQLDLNPFTQGLVASSLLLGAAFGALFGGRLSDYNGRRKNILYLALLFFISTLGCTLAPNTTLMVICRFILGLAVGGASVTVPTFLAEMSPAETRGQIVTQNELMIVTGQFLAFTCNAILGNVLGDVGYVWRLMLVIASLPAVVLWFGMLIVPESPRWLASKGKIGDSLRVLKQIREENQANIELEEIKSALAEDSKLEKSSFKDLSTPWVRRILFLGIGVAIVNQINGVNAIMYYGTEILKNTGWGTKAALIGNVANGVISIAAMLVGIWLLGRVRRRPMLIIGLCGTTTSLFLIGFFSFILNGSVMLPYIVLSLTVIFLAFMQGAIGPVTWLTLAEIFPLRMRGLGMGFSVFWMWIVNFLISLSFPVLLSKIGLSATFLLFGILGLVAIAFVNKYLPETKGKSLEELEHYFRSYDDQGLENKQAR

SEQ ID NO: 13872 - protein, 482 aa, Pseudomonas syringae pv. tomato str. DC3000
MQLIWLRSDLRVHDNTALTAAMQRGPTLAVYLLSPTQWRNHDDADCKVDFWLRNLVELEKALGKLNVPLLIREADTWDQAPEVLATLCKQFKVEGLHLNEEYGINETRRDQAVQQSMQADGVHFTSHLDQLLFKPGSILTKTGNYFQVFTQFKKVCYTRLHQAMPRTVHTPEAQQPLSIKSDAIPDQVKGFSTPSKTLRDLWPAGEVEASRRIEAFAGEQISYYKDERDFPARPGTSQLSAYLAAGVISPRQCLHAALASNQGEFETGDVGTVTWINELLWREFYKHTLVGYPRVSRHRAFRPETEALKWRDAPEELLAWQEARTGLPIIDAAMRQLLETGWMHNRLRMVVAMFLTKNLLIDWREGERFFMRHLIDGDLAANNGGWQWSSSTGTDSAPYFRIFNPLSQSERFDPEGVFIKRWLPELADLNKKQIHDPASVGGLFGVADYPKPIVDLSKSRARALAAFKALPTRQPAAGADNG

SEQ ID NO: 13873 - protein, 131 aa, Actinobacillus lignieresii
DFCERVISGSWKGYTGKAITDVINIGIGGSDLGPYMVTEALRPYKNHLNMHFVSNVDGTHIAEVLKKVNPETTLVLVASKTFTTQETMTNALTAREWLLAAAKDESAVAKHFAALSTNATEVAKFGIDTAN

SEQ ID NO: 13874 - protein, 866 aa, Klebsiella oxytoca
MTETRTTCPYCGVGCGVIASRAPHGQVSVRGDEQHPANFGRLCVKGAALGETVGLEGRMLFPEVDGERATWPQALAAAGSRLREIIDRHGPQAVAFYASGQLLTEDYYAANKLMKGFIGAANIDTNSRLCMSSAVTGYKRALGADVVPCSYEDVENSDLVVLVGSNAAWAHPVLYQRLAQAKRDNPQMRVVVIDPRRTATCDIADRHLALAPGSDGGLFVGLLNAIAASGAISDDFNDAQRALTIAQDWDLDKVAQFCGLPRQQIADFYREFIAAPRAITLYTMGINQSASGSDKCNAIINVHLACGKYGRPGCGPFSLTGQPNAMGGREVGGLATMLAAHMNFEPDDLRRLARFWGSERLAQTPGLTGVELFAAIGRGEVKAVWIMGTNPVVSLPDSHAVSEALARCPLVIISDVVADTDTGRFAHIRFPALAWGEKSGTVTNSERRISRQRAFMPPPGEARADWWIVARVAEALGFGSAFAWQHPHEVFSEHAALSGYENDGQRAFDIGGLADLSREAWDALEPVRWPVSRSEAAWSVHKGWHRDGKLRMVPVAPQPTRATTDAFYPLILNSGRIRDQWHTMTRTGAVPRLMQHINEPVVEVAPADAQRYHLLEGELARVRSPKGVMVAKVTIGDGQRPGSLFVPMHWNNQFARQGRVNNLLAAVTDPHSGQPESKQTAVAIATWLPAWKGELFSRQPVPLPASLHWRRRAAQGIIHLSLAGDTRSRDWLVEWCQRQGWQMQVAEGGKVWNLLAWRAGELMLGWWSDASEPAIDADWIHAAFRVPPQNAARRHALLSGRKGGVEMPRGRIICSCFSVGERAIGEAIAGGCRTPGALGGKLKCGTNCGSCIPELKALLAAKLAQA

SEQ ID NO: 13875 - protein, 428 aa, Guillardia theta
RKMRVAIVGGGPSGSCAAEIFAQEPNIDTYIFERKMDNAKPCGGAIPLCMIEEFQIPEEVVDRKVRKMLMISPTGKEAPIGQTLRDDEYIGMTRREILDGFLRDRAIKLGAKPINGLVTGIDLPEGNSETKPYKIHYTNYNGQKVGTPEELDVDLIIGADGANSRVAKAIDAGEYNYAIAFQERIRINDQQMAFYEELAEMYVGDDVSPDFYGWVFPKYDHVGVGTGTVVNRPAIKQYQNAIRERAGKKIEGGKIIKVEAHPIPEHYRPKRVLNRAALVGDAAGYVTKCSGEGIYFAAKSGRMAAEAITKLTQGGTVLPTQEEIEDTYLRRYDQLYGPTYAVLDVLQQVFYRSNPAREAFVEMCESEYVQKVTFDSYLYKKVTSGGPVEDLKLLFNTVRSLVKQNLRSDIPKDAKFYNPVESLQRLGK

SEQ ID NO: 13876 - protein, 131 aa, Actinobacillus pleuropneumoniae
DFCERVISGGWKGYTGKAITDVINIGIGGSDLGPYMVTEALRPYKNHLNMHFVSNVDGTHIAEVLKKVNPETTLVLVASKTFTTQETMTNALTAREWLLAAAKDESAVAKHFAALSTNATEVAKFGIDTAN

SEQ ID NO: 13877 - protein, 201 aa, Arabidopsis lyrata subsp. petraea
LYEGYAVFENMIRKGSKPNVAIYTVLIDGYAKTGSVEDAIRLLHRMIDEGFNPDVVTYSVVVNGLCKNGRVEEAMDYFQTCRFNGLAINSMFYSSLIDGLGKAGRVDEAERLFEEMSEKGCTRDSYCYNALIDAFTKHGKVDEALALFKRMEEEEGCDQTVYTYTILISGMFKEHRNEEALKLWDMMIDKGITPTAACFRA

SEQ ID NO: 13878 - protein, 401 aa, Lactobacillus plantarum WCFS1
MSDLDQTNNYRYVIVGGGMVAGYAIKGIRQEDPEGAILVISQEADVPYERPALSKKLWLDDEFTEENIRIGAENYPNVTFKFKTTVTAINRQDKVITLTDSEQIKYEQLLLATGGEPRQIQGPADPHVLVFRQWSDYRKLRKFSGPNKRVVIIGGGYVGTELASSLTQNGTKVTMIFPEKALGEGKFPESIRAEYEATFKRNGVTLMSGQFVQSYQRQGDHLTLLTKDGTAIAADTIIVGLGVTPRISLAEDSSLDLADGGVKVDEYLNTSDPAIWSAGDIASYPDHILGRQRIEHVDHARLSGELVGRNMAGAHMSYQHTPYFYSMIFDISWQAIGNIDPKLQLIFDRRTHGLLVYFIDADKLVGVLVWNVKVNLDDVRALLANAPATDDLVGSIREQEG

SEQ ID NO: 13879 - protein, 899 aa, Vibrio angustum S14
MISQGIKSACPYCGVGCGVVTKQSEIIGDVSHPTNRGALCVKGSSLAASMSQPNRLLYPQIKGEVVEWDQATSQIAETISRVIAESGPEAIGMYLSGQLLTEDYYVANKLMKGFIGSSHVDTNSRLCMASAVAAHNRAFGEDIVATNYSDLDNTDLIVLVGSNLAWTHPIVFKRIQQAKKQNPLLKIVVIDPRKTVTAEQADLHLALANDTDIDIYNGLIRYLIENNAVDRDFIAQVTEGFDALQQEVMKDKYSLLEVSKSSGIAIEQLATFYQWIKEAPRAVTVFCQGVNQASCGTDKANSIINSHLVSGKIAKQGCGPFSITGQPNAMGGREVGGLANQLAVHRGFDDISISQVKAFWQAPNIATTAGHKAVDLFKSVENGDIRVLWIMATNPVISMPDNEQVRRALEKCEYVIVSDVTPESDTAAYADCLLPAAAWGEKSGMVTNSERMMSRQRAFTAMPGEVKADWQMICDVAKKLGFSKAFDYQSEADIFREHAALSGINNSTDLLFDISCLALLSDDDYQTWQPQQWPLNSTSNRVFEQHNNLPLFSTPTRKAQLVVTPSPTENSLSNVMLAQDVSQSIFWLNTGRQRDQWHTMTRTGHVPVLAQSEVEPSLYIHPTSAKHVGLVDGSFVCIESLESYQDLNKHLARVVFDSTLSQQQVFMSMHWAGKYGAKSAINQSVIVACDPISGQPSFKSAQVKLTPISMEFHGVSLGDIPAQLDYEYASFQTYQNEHYQHKGIWRYAGKACLDKTALLRSLSESKQQYLLVEQKWGFALVQLAKVINPDAKLNTTAIHLFSEQPINVDMTTLVNSVNQPFVMTDVLEALGCQHSKQTLVCSCFQITDLMIEQAIVTNNITSLSDLTKQLKCGTNCGTCLPQVERHFYESQQLIPTVQL

SEQ ID NO: 13880 - protein, 367 aa, Bacillus megaterium
MTKKVAVLPGDGGQSNQRRCCRLKAIGERLRHQFEFTYGLIGGAAIDEAGSSSSRSTIETCNEADAVLLGSVGGPKWDRFPSHLRPEKGLLAIRKELDLYANLRPVTFYDSLADASPLKKEYIEGVDFIIVRELTGGLYFGKPSDRRTEGNKETVVDTLFYKRTEIERIIASIDTAVNRRKKVTSVDKANVLESSRVWREVAEEVAKDYPDVELEHMLVDSAAMQLIRNPKYFDVVVTENMFGDILSDEASMLTGSLGMLPSASLTADGPSLYEPVHGSAPDIAGQNKANPIAAAILSAAMLLRHSFGLEKEAAVIEQAVESVLHAGHRTADLADGNHYLGTDKMVEVITAVIANDSAISSIMTASR

SEQ ID NO: 13881 - protein, 621 aa, Glycine max
MNPDLEHAPQIPLLNPPTGESGRRTQKGTLVFIVLMSLFALIIVNLQSHEPSLENNITLIPKARGVAEGVSAKSNQYLSHKASYNWTNAMLSWQRTAFHFQPQRNCACLLVLSASDPNGPLFYMGWYHVFYQYNPDSAVWGNITWGHAVSRDLIHWLYLPIALFPDKWFDVNGVWSGSATLLPDGKILMLYTGSTDQNVQVQNLAYPANLSDPLLLDWVKYADNPVLAPPPGIGPKDFRDPTTAWFGPDEKWRITIGSKLNGTGLSLVYKTQDFIHYEQNDHYLHQVPGTGMWECVDFYPVSVNGPNDVKHVLKASLDDTKVDHYAIGTYFIENDTWVPDNPHEDVGIGFKLDYGRYYASKTFYDQHKNRRILWGWINESDSETADLKKGWASLQTIPRTVVFDKKTRTNLVHWPVEEVESLRLGSSEFEGVVVKPGSVVPLDIGPATQLDVFAEFEIEFLASKGSGKDNIGCGNGAVDRSALGPFGILAIADDHLSELTPIYFHLSSTTKDGSSTTSFCVDETRSSKAPDVSKLVFGSKVPVLSDEKLSMRVLVDHSIIESFAQGGRTVISSRVYPTEAIYGAARLFLFNNATDINIKVSLKIWQLNSAFIRPFPFDQKL

SEQ ID NO: 13882 - protein, 335 aa, Bdellovibrio bacteriovorus HD100
MSKLRVGINGFGRIGRVLFRAGFEKFDIVGINSLDSIEGDAHLLKYDSAHGVFNADVSTEGHNLIVNGKKIAVSKTRNPAEVPWKDLGVDLVLECTGAFKKREDFMQHISAGAKRVLVSGPAEKGADITMVYGINHESYDPSKHVVVSNASCTTNCLAPLAKVLNDTFGIEHGTMMTVHSYTNDQKILDAPHSDLRRARAAAVSMIPTTTGAAKNVGLVLPELKGLIDGISVRVPTPNVSLVDFTFTAKKDVTRESVNEALIKASEGAMKGVLAVEHNELVSVDFNGNKHSSIVDLATTMVVGPRMVKVLSWYDNETGFSNRMVDVALHMQKKGL

SEQ ID NO: 13883 - protein, 188 aa, Arabidopsis lyrata subsp. petraea
HNNSHHQHQQQQQQNQQNQSLQDSLNPIFPSITKYQELVDKNRAGSVSSDHHLDTFVCDVDGVLLRQHSSKLFHTFFPYFMLVAFEGGSIIRAILLLLSCSFLWTLQQETKLKVLSFITFSGLKVKDMDNVSRSVLPKFFLENLNLQVYDIWARTEYSKVVFTSLPQVLVERFLREHLNADDLIGTKL

SEQ ID NO: 13884 - protein, 363 aa, Nostoc punctiforme PCC 73102
MESLSKASYRIVAIPGEGIGPEVVEASLKILQHVAKIQGFTLQVDYGWLGATAFEQLGSYFPQATTELCDGADGIVFGAVSQGGLLELRKHFDFFCNLRPIRSVNSLLHKSSLRPEKIQGLDILIVRELVSGIYFGPSGRSSDERGNYGYHTMRYYDEEIRRIARKALEQAQYRRGLLTVAHKENALPHLHWTRLVQEEATKFPNVIVEPMLVDNLAMQMVLNPQRFDVILASNLFGDILSDIGGALVGSIGLLGSASLNANGFGLYEAIHGTAPDIAGLGIANPLGTLGACVLMLQQWGEVQAAQQIIAAQDRILAKGYRTADLFTQGEEILVNTATLVDLLLEELSVVQHSQLGVLHESRK

SEQ ID NO: 13885 - protein, 553 aa, Bordetella pertussis Tohama I
MSNIVEIKVPDIGDFKEVEVIEVLVSAGDTIKAEQSLITVESDKASMEIPASAAGVVKSVKVKVGDKIAEGTVILEVEAAGEAAAAPKAEAPKAEAPKAEQAAETPKADAAKAEAPQAQAAQAEAPAAAGPIEVKVPDIGDFKEVEVIEVLVAEGDTIKAEQSLITVESDKASMEIPASAGGVVQSLKVKVGDKVAMGTVIAVVQGQGAAAAPAAAEPAAPASPVAPASAPAQRPAPAAALQDEDLKPGQLPHASPSVRKFARELGVNLSRVTGSAAKGRITADDVRAYVKQALSAGAPAGASGGGDGAALGLLPWPKIDFTKFGPIEAKPLSRIKKISGANLHRNWVMIPHVTNNDEADITDLEALRVALNKENEKSGVKVTMLAFLIKAVVAALKKFPEFNASLDGDNLVLKQYYHIGFAADTPNGLVVPVVRDADKKGILELARETSELARKAREGKASPAEMQGGCFSISSLGGIGGTHFTPIINAPEVAILGVSRSAHKPVWDGKQFVPRLTLPLSLSYDHRVIDGASAARFNAYLGQLLVDFRRIAL

SEQ ID NO: 13886 - protein, 530 aa, Zea mays
MGNRASRHHRQAAEQQPATPTLPKPQPQIQPPPPPPPTQTQQYQQAPPQSQQKPKPAADVGAVGRVLGRPMEDVRATYTFGRELGRGQFGVTYLVTHSETGQRFACKSIATRKLVHRDDIEDVRREVQIMHHLTGHRNIVELRGAYEDRHSVNLVMELCEGGELFDRIIAKGHYTERAAASLCREIVAVVHSCHSMGVFHRDLKPENFLFLNNKEDSPLKATDFGLSVFFKHGETFKDLVGSAYYVAPEVLKRKYGAEADIWSAGVILYILLSGVPPFWAENEDGIFDAVLRGHIDFSSDPWPSISNGAKDLVKKMLRQDPKERLTAAEILNHPWIREDGEAPDKPLDITVIGRMKQFRAMNKLKKVALKVVAENLSDEEIMGLKEMFRSLDTDNSGTITLEELRSGLPKLGTKISESEIKQLMEAADVDGNGTIDYAEFISATMHLNRLEKEDHILKAFEYFDKDHSGYITVDELEEALKKYDMGDDKTIKEIIAEVDTDHDGRINYQEFVAMMRNNSPEIVPNRRRMF

SEQ ID NO: 13887 - protein, 838 aa, Vibrio angustum S14
MNNGMDKQHLIVIGNGMVGHHFIDQLVDKGGLAHYCITVIGEESVAAYDRVQLSAMFADKSQQDLMLGDVSWYQNQGIDLRLGQQVVEINRAQQTVNIRDVVTSELICLDYDKLVLATGSTPFVPPIKGNDRQNCFVYRTVDDLAAIKNACSQAKTGAVIGGGLLGLEAANALRLLGLETHVVEFAPRLMPVQLDDLAGDLLAKKITKLGVHIHTDMRTEKITDGETATHRLWFENDTPLDVDVIVFSAGIRPQDTLARQCELEIGERGGIVIDDTCLTSDANIYAIGECALWQARIFGLVAPGYSMARTVASQLVSDTEAKFIGADMSTKLKLLGVEVASIGDAQMRTEGAKEVVLQDSAGGRYKKLVVNADSTQILGAILVGDSSDYDALLQCYLNQTILTEHPAQLLFDTSMLAPSTDENSVVCSCHNVTRGALISQVQQGCHELGEIKQVTKAGTGCGGCSSMVKQIVDEQLASMGMEVNNHVCQHFSYTRQELFHLCQVEKIQDFETLLSTHGKGLGCDICKPTAASIFASLWNEHVLESPYQPLQDSNDAFLANIQKDGSYSVVPRVPGGEITPDKLITLGEVAKKYDLYTKITGGQRVDLFGAQLSQLPDIWAELIEAGFETGHAYGKSLRTVKSCVGSTWCRYGVDDSMALSIELENRYKGLRSPHKLKFAVSGCTRECAEAQSKDIGIIATEQGWNLYVGGNGGMRPRHGDLFAVDLDKPTLIAYIDRILMFYVKTADRLQRTSVWLENLEGGLDYLKQVVIEDKLAINTSLEQQMEHVINSYQCEWKTTLSSEQKLNRFRQFVNLKDEEISLPYQRIRGQRIPIKEEL

SEQ ID NO: 13888 - protein, 379 aa, Triticum aestivum
MTPTPPTMSESAASSPVAYDRAADLRALDATFAGVSGLVASGLTHVPRIFRVPEGHHDKQDTTVVAGSGGQEEPGAIPVIDLGCGDHAAVVAAVRQAAAGCGFFQVTGHAVPEAAMAAATDAVRAFHAADGGEGTEKARLYSRDPVKPVKYQCNFDLYESPVANWRDTLHIRMAPDPPDVGDIPESCRDALLEYTEQVNKLGKTLFELLSEALGLKPSYLTELECDQGQILICHYYPPCPQPELAIGTSRHSDAGFLTVLLQDEVGGLQIFNEDRWVDVTPTPGAFIVNIGDLLQLISNDGFRSVEHRVLAKNAAPRVSIAFFFSTHFHPASTRMYGPIKELLTEENKPLYRETLVRDYMKHYFSIGLDAKTAISDFRL

SEQ ID NO: 13889 - protein, 133 aa, Vibrio parahaemolyticus
ILHTMLRVGDLDKSIKFYTEVMGMQLLRTNENKEYEYTLAFVGYGDESQGAVIELTYNWGKTEYDLGTAFGHIAIGVDDIYATCDAIKAAGGNVTREAGPVKGGTTHIAFVKDPDGYMIELIQNKQASAGLEG

SEQ ID NO: 13890 - protein, 477 aa, Frankia sp. EAN1pec
MTETDLSTSDDRTSDGRTSNDRTPGLAGPEHASGPRPARVAELLAAGPGSEVLLAGAVRRTVLPGGLRVVTEKVPGVRSVAIGIWVGVGSRDETPLTGGCSHYLEHLLFKGTPSRDALSISASIEAVGGDLNAFTAKEYTCYYARVLDVDMDLAIDVVCDMVANSLVTADDVEAERGVILEEIAMHEDDPGDVVHDVFADAVLGSSVLGRPVLGTVDTIEALGRETVFDYYRERYAPPALVVSIAGNIEHDHALDRVVAAFADRLTGPARHQEVRRGEYPFPPPPGIVVTNRPTEQAHVVLGTAGLSRHDPRRYALGVLSTALGGGMSSRLFQEVREKRGLAYSVYSFDNQFADAGLFGVYAGCTPGRADEVLEICREQVHRIAEHGITAEELERARGQNRGGLVLNLEDTGSRMSRLGKSELVHGELLSVDEVLARVEAVTLDDVRAVAGELVDQPWALGVIGPFEDHDFSAAVAR

SEQ ID NO: 13891 - protein, 481 aa, Cryptococcus neoformans var. neoformans JEC21
MSCPFHTTTNTSNRSPLPDRALLLAMKSQTNTFILGTRKSNLALVQTGHVADDLRRLHSGAGSKFGETREEGDDAEQGDVPFVHPYTFSIESMTTVGDRNQTTPLHLLSPYSSTQPAKSLWTDELEARLINGHFDMLVHSLKDVPTVLKDGCEIGCMAKRHDPRDALVVKQGLPYKRLEDLPDGAVVGTGSVRRVAQLKRAFPNLVFEDMRGNLNTRFNKLDNPQSPFSALILAMSGLERLGMAHRATSPLSSPTLMHAVGQGALAIEIRSTDPRVRNCLRGLGHWQTEWSCGAERGCLRVLEGGCSVPVGVESELVELDEDEVAAHPELLEGVEDPFKGQEEIPLEGDSPMLWFSGLVDTTSAPTPSTPTFSSHSLPPLRTRLAKLTLHSCVTSTDGSKHVLFTPPPVLVRSYRQAEQFGEECARRLRGMGAGEILDEINKLRKERELRDLESAIERSRAAQEESEKMGLVQDGTAEVVA

SEQ ID NO: 13892 - protein, 395 aa, Pediococcus pentosaceus ATCC 25745
MAKEHYERTKPHVNIGTIGHVDHGKTTLTAAITKVLSEKGLAKASDYADIDAAPEEKERGITINTAHVEYETEKRHYAHIDAPGHADYVKNMITGAAQMDGAILVVAATDGPMPQTREHILLAHQVGVDYIVVFLNKTDLVDDDELVDLVEMEVRELLSEYDFPGDDVPVLRGSALKALEGDAEQEKVIMDLMDTIDEYIPTPERSTDKPFLMPVEDVFTITGRGTVASGRIDRGEIKVGDEVEIVGLKEDVTKTTVTGIEMFRKTLDVGEAGDNIGALLRGVNREDVVRGQVLAAPGSIQTHKKFKGEVYILSKDEGGRHTPFFSNYRPQFYFHTTDVTGVIELPDNVEMVMPGDNVTFTVELIEPVAIEKGTKFTVREGGHTVGAGVVSEIDD

SEQ ID NO: 13893 - protein, 289 aa, Methylobacillus flagellatus KT
MTAQIINGKAIAEATLSETKSLIDKRLEKGLRAPTLAVILLGSDPASTIYVRNKRLACDKTGIRSLAYDLPDTTSEAELLALIKQLNQDDAVDGILVQSPLPAHIEEKKIIETISATKDVDGFHPYNIGRLAVRQPTLRSCTPYGVIKLLQSTGVRLLGLDAVVVGVSNHVGRPMALELLLAGCTVTSCHRHTKDLQASIARADIVVAAVGKPHLIKGEWIKPGAIVIDIGINRLADGSLCGDVEFDIAKTRAAWITPVPGGVGPMTVATLMQNTLTALELGESDQAPA

SEQ ID NO: 13894 - protein, 433 aa, Listeria monocytogenes str. 4b H7858
MKVIKFGGSSLASGIQLNKVFQLVAEDPDRKIVVVSAPGKRFKEDTKVTDLLIDCAAKALLGEDTSELFESVIARYAGIALDTGMSDEIINQIRADLQATISSDKSDPDKFLDRMKASGEDNNAKLIAAYFKFKGLNANYINPKDAGLLVTDEHASAQVLPESYDRLFALREREGIIVFPGFFGYTKDGEISTFSRSGSDITGAIVANGAQAELYENFTDVDAVYAVNPAIVKNPKKVLELTYREMRELSYAGFSVFHDEALIPAFHAGIPVHIKNTNNPDSCGTRVVHERENNNGPVVGIASDDGFCSIYISKYLMNREIGFGRKVLQILEDAGLNYEHMPSGIDDLTIIIRENQFGEDTEQTIMSRLKEELNADQVIMQHGISLIMVVGETMRHNVGITSRASKALSDAKVNIEMINQGSSEVSIMFGVKK

SEQ ID NO: 13895 - protein, 82 aa, Oryza sativa
  misc_feature (23)..(23): Xaa can be any naturally occurring amino acid
  misc_feature (65)..(65): Xaa can be any naturally occurring amino acid
HEAISEEEINELISKLQSLLPRXSADRGSSQASMTKLLKETCNYVKSLHREVDELSDRLSDLMAXMDHNSPGAEIIRSILRS

SEQ ID NO: 13896 - protein, 112 aa, Rhodospirillum rubrum
MKLIMAIIKPFKLDEVCEALTSLDVHGLTVSEVKGFGRQKGQTEIYRGAEYQVNFLPKVKIEVAVSDGLADLAVEAICNAARTDRIGDGKVFVYDLDKIVRIRTGEIDADAL

SEQ ID NO: 13897 - protein, 470 aa, Methylobacillus flagellatus KT
MVEAIKNRPMLADRSRWGGAASALLYIALACMPQAQAAETHEFKLDNGMRVIVQEDHRAPVVVSQVWYRAGSVDEVNGKTGVAHVLEHMMFKGTKTVPPGQFSRLIAAAGGRENAFTGTDYTAYYQQLEKSKLPLAIRLEADRMANLELTEEEFSKEIKVVMEERRWRTDDKPQGMLNEQFNAVAYHAHPYGRPIVGWMNDLENMTVADAREWYQTWYTPSNAILVVVGDVDPQAVYKLAKQHFGKIKPHALPPRKPQVEPKQIGERRIVVKVPAELPYVRLGFHVPVLQDADKDWEPYALEILAGVLDGHASARLNQNLVRQKQLAVEVGAGYDLIQRGQVGLFELEGTPSEGRTVAELEEALLNEVERIKQEGVTEEELQRVKAQVIAADVYQRDSMFYQAMQIGRLETTGFSWRTLKHYPARLQAVTPQQVQDVARKYLVKDGMTVAILDPQPIDPNAKPKGKPYAH

SEQ ID NO: 13898 - protein, 146 aa, Glycine max
MASLKFACVVAVICMVVVITCGEVARSLSPCINYLRSRRGGSPEAECCRGVTSLNRAASNTADRRTACNCLKSVAASISGLNANNAASLPGRCRVRVPYRISTSTNCNSVHSIAGSGNESCMDPGRKKWKGNFSIAQYYISFCHCR

SEQ ID NO: 13899 - protein, 320 aa, Erwinia carotovora subsp. atroseptica SCRI1043
MKQEKYGVLMVNLGTPDAPTPQAVRRYLAEFLSDRRVVDTPRLLWWPLLRGIILPIRSPRVAKLYQSVWMEGGSPLLVISRRQHQALAARMPDTPVELGMSYGSPSLRSALDKLLAQGVTQLVVLPMYPQYSCSTTAAVWDGLAAQLRDNRQLPAIRFIRDYAEHPAYIAALKHRVEQSFAEHGEPDRLVISYHGIPVRYANEGDDYPQRCRATTEALIAALGLPEGKIMMTFQSRFGREPWLTPYTDETMQGLPAQGIKHIQIMCPGFAADCLETLEEIQEQNREIFLHAGGEAFHYIPALNDDPLHIDLLEQLVGKVE

SEQ ID NO: 13900 - protein, 231 aa, Escherichia coli K12 [sequence omitted]

SEQ ID NO: 13901 - protein, 525 aa, Shewanella sp. ANA-3
MLDANLKNQLQTYLQNLKRPVELVVSADESKKSQELKSLANDIVSLSSLVSLKEAQGSRTPAMTVVNTDLNTQISFAGLPMGHEFTSLVLALLHTGGHPIKLSDEVIEQIRNLPGKYEFETYVSLTCQNCPDVIQALNMMAAINPNITNVMIDGALFQDEVASRNIMAVPSVYLNGEVFAAGRISIGEILNKLDTGAASRKAEELSQKAPYEVLVVGGGPAGAAAAIYAARKGLRTGVVADKFGGQVAETVGIENFISVKATEGPKLVANLEAHVRDYEVDIMDNQKAVKLASDGLFELELASGATLRSRTILLATGARWREMNVPGEKEYRGKGVAYCPHCDGPLFKGKRVAVIGGGNSGIEAAIDLANIVEHVTVLEFDSKLRADDVLQRKAASMGNIHIITQAMTTEVTGDGTRVNGLNYTDRATGESHHIALAGIFVQIGLVPNAEWLKGTVDLTPRGEIIVDERGQTSIPGVFAAGDVTNSPYKQIIIAMGSGANASLGAFDYLIRHSDDSAETTETKAA

SEQ ID NO: 13902 - protein, 652 aa, Oryza sativa
MDFTNLLITVLLLLSPLKYESDVATASDDEDFFKTCSSQRCSKHGPEIRYPFRLSTQPPSCGAPGMQLSCSGQDTILDHPVLGSCKVTMIYYRHVIMNAIPLVDSLPHCPLQKLVSVNQSTAVYKPHTSEVASVVGCSRDSIDTNQYGIVGPTSCPSLANNASQFWYLAYPYTYMSILPLGCTIVSKDIPMPYSYDKNGPNFDISIFTETAKRVISTGETVFTWYTSNVTSICQQCEREGRRCGFSSQRNQAFCQHHKTRTYPSYTTLVRKLCTCIFPAMLCKIIESGPRVTIIAATSSVGTFIVLSLIVATALYISLKSRYNEEIHLKVEMFLKTYGTSKPTRYTFSEVKKIARRFKDKLGHGAFGTVYKGELPNGVPVAVKMLENSVGEGQEFINEVATIGRIHHANIVRLLGFCSEGTRRALIYELMPNESLEKYIFPHGSNISRELLVPDKMLDIALGIARGMEYLHQGCNQRILHFDIKPHNILLDYSFNPKISDFGLAKLCARDQSIVTLTAARGTMGYIAPELYSRNFGAISYKSDVYSFGMLVLEMVSGRRNTDPTVESQNEFYFPEWIYERVINGQDLVLTMETTQGEKEMVRQLAIVALWCIQWNPKDRPSMTKVVNMLTGRLQNLQVPPKPFISSQNQLVI

SEQ ID NO: 13903 - protein, 265 aa, Triticum aestivum
LFNCGNSCYANAVLQCLMCTKPLMIHLLLRLHSKDCNTKPSVVAAEVLLSAQGKSNNTVVYSCLSHTLCYLRIGCSKNWCLMCELEQYASTLRESGGPVSPSRILSNLRNIGCRLGGGSQEDAHEFLRHLVMSMQAACLDGLGGEKQVEQSLQETTLIQQMFGGRLKSKVKCLRCHHESERYENIMDLTLEIHGWVESLQDALTQFTAPEDLDGDNMYKCGRCCAYVKARKQLSVHEVPNILTVVLKRFQTGKYGKINKCVTFPD

SEQ ID NO: 13904 - protein, 362 aa, Ashbya gossypii ATCC 10895
MTFWWKKSPKTPGDYVKHLTEQLARFELAVSDNRKKIQDECTKYITGTKDFILGETDPAPSGEAIDELYFAIYDADLLYDLLVHFHELDFESRKDVALIYATCLRRSKDNKFTTVDYLVTKPKILAYMLRIAEMALNKPNGTEVFLTTGGMILESIKYEQLCRLLLKNPQIWTFFDFARLSSFEVSTESLQILTELFTTHTKLVATEFFNQDANIKKFIDRINMLMAHGNYVTKRQSVKLLRTMILNRAYGQLMNSYINSPENLKLNMILLSDRSKNLQLESFNVFKVVVANPRKSKPVLDILIKNRDKLLKFFENFGVDTKDTTLLDEKEFVVAQIEGLPRLMSSNTENNLGSSPQKNLVA

SEQ ID NO: 13905 - protein, 516 aa, Bacteroides fragilis YCH46
MLDSAIKEQLRTIFAALEANYTFDITVSPQHESRTELLELLNDVASCSEKLSCRINEGKGLEFTLLKGEHRTGITFRAVPNGHEFSSLLLAILNTDGKGKNFPDEGICNRVKSLKGPVRLTTYVSLTCTNCPDVVQALNAMTTLNRQIQHQTVDGAINQAEVEALKIQGVPSVFADGKLIHVGRGDFGELLAKLEEQYGTETNSAETSIKKYDVIVAGGGPAGSAAAIYSARKGLNVAVIAERIGGQVKETVGIENLISVPSTTGSQLADNLKTHMSQYPIDLLEHRQIEKIELDGKDKVLTAKGGERFSAPAVIVATGASWRKLNVPGEAEYIGRGVAFCPHCDGPFYKGKQVAVVGGGNSGIEAAIDLAGICSKVTVLEFMDELKADQVLQEKLKSLPNVEVLVHSQTTEVVGNGDKVTGIRVKDRKTEEERVISLDGIFVQIGLVANSGIFRDVVEVNRPGEIVIDAHCRTNVPGIYAAGDVSTVPYKQIIIAMGEGAKAALAAFEDRMRGEI

SEQ ID NO: 13906 - protein, 169 aa, Arabidopsis thaliana
MAASSEPKSLYDFTVKDAKGNDVDLSIYKGKVLLIVNVASQCGLTNSNYTELAQLYEKYKGHGFEILAFPCNQFGNQEPGTNEEIVQFACTRFKAEYPIFDKVDVNGDKAAPVYKFLKSSKGGLFGDGIKWNFAKFLVDKDGNVVDRFAPTTSPLSIEKDVKKLLGVTA

SEQ ID NO: 13907 - protein, 487 aa, Bacillus cereus E33L
MTVQTAQIVKNYIGGEWVESISTKMEAVYNPATGEVIAQVPLSTKVDVEQAVLAANEAFKSWSKTAVPKRARILFKYQQLLVDNWEDLAKLITIENGKSYNEAYGEVLRGIECVEFAAGAPTLMMGKQLPDIATGIESGMYRYPIGVIGGITPFNFPMMVPCWMFPLAIACGNTFVLKPSERTPLLAAKLVELAEEAGLPKGVLNIVNGAHDVVNGLLEHKLVKAISFVGSQPVAEYVYKKGTENLKRVQALAGAKNHSIVLSDANLELATKQIISAAFGSAGERCMAASVVTVQEEIADQLVGRLVEEANKIVIGNGLDEDVFLGPVIRDNHKERTIGYIDSGVEQGATLVRDGREDTAVKGAGYFVGPTIFDHVTQEMKIWQDEIFAPVLSIVRVKSLDEAIEIANESRFANGACIYTDSGASVRQFRETIESGMLGVNVGVPAPMAFFPFSGWKDSFYGDLHANGTDGVEFYTRKKMLTSRWEK

SEQ ID NO: 13908 - protein, 387 aa, Acidobacteria bacterium Ellin345
MTPQSPFCDVETALAEIRAGRMIVVVDDEDRENEGDLTMAAEYITPEAINFMAKYGRGLICLAMTEERLDALRLPLMSAENTSNFGTAFTESIDARDGVSTGISAYDRAHTIKVAIDPGTRPNDLARPGHTFPLRARKGGVLVRAGQTEASVDLARLAGLVPAGVICEIMNDDGTMARVAELTEFCKQHDMKMLTVAELIRYRMANERYIRRLAEATVPTRYGDFRMIAYESDITGESHVALVKGDVEHAPEPVLVRMHAHCLVGDVFGATQCDCSKTIERALEMIAREGRGALIYLHQTSKGYSVEKLGDKLTIQFHHDLRLPTLPEHQRKTQREVGIGAQILSDLGLTRIRLITNRPRRVAGLEGFGIHIVEQVPTAEPRPAAAK

SEQ ID NO: 13909 - protein, 377 aa, Ustilago maydis 521
MTSTAAKILKNASSGVLRLGMMPADGIGREVLPCAQRILQNTPGAPKFEFVHLDAGFEHFQKTGSALPEETVKALKNDCHGAMFGSVSSPSHKVEGYSSPIVKLRKELDLYANIRPVVGVRGTKDDEKFIDSVIIRENTECLYIKSETSESGPDGQIARAIRQITEKASTRIGKKAFEVALARKELRKTTQPSYVPTVTICHKSNVLSVTDGLFRTSVRGIYEQDQKANGGAGRYEEVKLNEQLVDSMVYRLFREPEVFDVVVAPNLYGDIVSDAAAALVGSLGLVPSVNAGDSFFMGEPVHGSAPDIAGQGKANPIASIRSAALMLEYMGYTEPALKIYTAVDQVIREGKYLTPDLGGSATTTQCEEAILKKIQEA

SEQ ID NO: 13910 - protein, 131 aa, Haemophilus aphrophilus
TFCARVISGEWKGYTGKAITDVINIGIGGSDLGPYMVTEALRPYKNHLTMHFVSNVDGTHIAETLKKVNPETTLILVASKTFTTQETITNALSARNWFLAAAKDPAHVAKHFAALSTNAKAVAEFGIDTDN

SEQ ID NO: 13911 - protein, 340 aa, Pseudomonas syringae pv. tomato str. DC3000
MTDHALLLVNLGSPASTQVADVRSYLNQFLMDPYVIDIPWPLRRLLVSLILIKRPEQSAHAYASIWWDEGSPLVVLSKRLQQAMKKEWSHGPVELAMRYGEPSIETVLTRLSEQGFKKVTLAPLYPQFADSTVTTVIEEAKRVVRAKSLKMQFSVLQPFYDQPEYVSALVESVRPHLEQPYDHLLLSFHGLPERHLHKRDPTGKHCLKDDCCMTAPAQVVATCYRAQCLQSAAAFAKRMGIPDGKWSVSFQSRLGRAKWIEPYTEARLDELAAQGVKKLLVMCPAFVADCIETLEEIGDRGAEQFKEAGGEELILVPCLNDDPNWAKELNRLCERAPLML

SEQ ID NO: 13912 - protein, 131 aa, Haemophilus paraphrophilus
TFCARVISGEWKGYTGKAITDVINIGIGGSDLGPYMVTEALRPYKNHLTMHFVSNVDGTHIAETLKKVNPETTLVLVASKTFTTQETMTNALSARDWFLAAAKDPAHVAKHFAALSTNAKAVAEFGIDTDN

SEQ ID NO: 13913 - protein, 290 aa, Helicobacter pylori
MPNRGVVLLDGQALADNIEKDLKHKIQIITAQTHKRPKLAVILVGKDPASITYVNMKIKACERVGMDFDLKTLQENITEAKLLSLIKDYNTDQNISGVLVQLPLPRHIDTKMILEAIDPNKDVDGFHPLNIGKLCTQKESFLPATPMGVMRLLEHYHIEIKGKDVAIIGASNIIGKPLSMLMLNAGASVSVCHILTKDISFYTQNADIVCVGVGKPDLIKASMLKKGAVVVDIGINHLNDGRIVGDVDFNNVQKVAGFITPVPKGVGPMTIVSLLENTLIAFEKQQRKGF

SEQ ID NO: 13914 - protein, 462 aa, Oryza sativa (japonica cultivar-group)
MYYNGIYHEFYQYNPNGSVWGNIVWGHSVSTDLINWIRLEPAIEGNTPSDINGCWTGSATILTGDQPVIIYTGADTEKRQVQNIVLPKNRSDPYLREWTKPKNNPLIEPVGPGLNSNQFRDPTTGWIGPDGLWRIAVGAELNGYSAALLYKSKDFMQWTRVDHPLYSSNASNMWECPDFFAVLPGKNNGLDLSAAIPNGAKHVLKMSLDSCDKYMIGVYDLKHDMFVPDTVLDDRRLWLRIDYGNYYASKSFFDSKKGRRIIWGWTNETDSTSDDVAKGWAGIHADVEIDFELTSIDAADPFDPSWLLDTEKHCREADASVHGGLGPFGLVVLASDNMDEHTTVHFRVYKSEQKYMVLLCSDLRRLMLRSSLRPGLYTPAYGGFFEYDLEKEKKISLRTLDRSAVESFGGGGRACIMARVYPAAVVDGATHMYAFNNGSSTVKVSQLKAWSMTRAQVNVRKG

SEQ ID NO: 13915 - protein, 285 aa, uncultured bacterium 311
MSLVEGKNCLITGATSGIGRSTALALSEKGANIFFIARNQQKAEELTEEVERVSGKSPNAIIADLSSFKQIERAAEEFKSLNKPIDVLLNNAGIMNTERRVTEDGLEEVFAVNHLAYFLLTNLLIEKILESGLKRVVNVSSDAHRFLKSMNFDDLQSEKEFKMFAAYGQSKLANILFTRKLSSLYQEEGLTTNCLHPGFVSTSIGAQNENLAFFARLIRWVSPLIAKPSDKGAETSIYLCSSEEVSSTSGEYFIDCKKAPITKAAESKEDAEKLWQISLELTGLK

SEQ ID NO: 13916 - protein, 182 aa, Arabidopsis lyrata subsp. petraea
SEDMCCTPKLADAGSCKLGEVMISADPNDPEWPKRIPTFFKRSEEEVKMYPEAVIIKKTGWYTVYFMTCDPELDGTTIRGRTVWKNRGGYLQGDKAPLMKFYASMLLAYVVLGLLWFPQVAQYWKDGIQLHSHISLVIVFTMGELAFLYFDFAYLDSAGTSPMEVTVWAITLSSMRKALSRL

SEQ ID NO: 13917 - protein, 380 aa, Methanocaldococcus jannaschii
MIYKFNIRNLRMIIMKLVKDALSRSDTTRYLKDEFGEARIVVVGCGGAGNNTINRLMEIGIQGAETIAINTDKQHLEVIQADKKILIGATLTRGLGAGGYPEIGRKAAEMAKNILEEQLKGADLVFVTAGMGGGTGTGSAPVVAEVAKENGAIVVGVVTYPFKIERARMKKADEGIARMSEVCDTVIIIDNNKLLDLVPNLPINDAFKVADEIIAQAVKGITETIAVPSLINIDFADVKAVMSGGGVAMIGVGEVDSSDRGDRVQNVVRETLSCPLLDVDYRGAKGALIHITGGPDLTLKEANDIGEGITKELDPEANVIWGARIDPEMEGCIRVMAIITGVKSPNIVGKDTKPKRIIPKVSKEQSQRKERKIGGIDFIV

SEQ ID NO: 13918 - protein, 336 aa, Bordetella pertussis Tohama I
MTIRVVINGYGRIGRNILRAHYENGKKHDIEIVAINDLGDPKTNAHLTRFDTAHGKFPGTVTVDGDYMVVNGDKIRVLANRNPAELPWGELGVDVVLECTGFFTSKEKAGAHLKGGAKKVIISAPGGKDVDATIVFGVNQNVLKAEHTVISNASCTTNCLAPLVKPLHDKLGVETGLMTTVHAYTNDQVLTDVYHEDLRRARSATMSMIPTKTGAAAAVGLVLPELNGKLDGFAIRVPTINVSLVDLSFVAKRDTTVEEVNSILQAAAEGELKDILTYNTEPLVSIDFNHNPASSNFDATLTKVSGKLVKVSSWYDNEWGFSNRMLDTTVALMSAK

SEQ ID NO: 13919 - protein, 575 aa, Schizosaccharomyces pombe 972h-
MSSSSGLKQQGLAQKKKFQLEFDPSSVSKNGTKTEAKVVGTEFGVLLVRARNTYFATAGKCSHYGAPLAKGVVTSDGHIVCPWHGACFNAATGDVEDTPAIAALRTFPVTEEGDGSLWIEVEDKNDNGASVLQPEGCWRNKATEVYNKGSVETEVTAPHVCIIGGGKGASVAAEYLREKNFKGKITIFTREDEVPYDRPKLSKSLLHDISKLALRSKEYYDDLDISFHFNTDVTKIDLAEKKIYCGSDEKPTESYTKLILATGGEPNKLPIPGLDSKNVYLLRSIADASKLAAVTTEAGDKKNIVIIGSSFIGLELAVVLKDHNVSVIGMESIPFEKVMGKEVGTALKALHEQNGIAFYLENSIKEVKTSSNDSSKAEHIVLKDGQSIPADVVILAAGVKPNLRYLGNAVSLEKDGGVKVDEHCRVLGAEDVYAVGDIAHAPFAGLPSSGEKSHTRIEHWDVAGNLGRVAADHILFGNKAGYTTKSFTPYFWSAQGKQLRYCGNNAAEGFDDVVIQGSLSDYKFACFFTKGEKVVGVCSIMKDPVVSQCARLFIKDAMPSKSQLKENFDVLSIPL

SEQ ID NO: 13920 - protein, 584 aa, Lactobacillus plantarum WCFS1
MEMTKIKAGQALAQVLVDWNIDHIYGITADSINNTVDGFYQEKDHLKYIQVRHEEVGALAAAADAKLTGTIGVSFGSAGPGAVHLLNGLYDAKMDHVPVLALVGQSATSIMNTNFFQEMNQDPIFADVAEFHKQVTTAEQIPYVVDEAIRSAYATRSVSVVIIPDDLSGQDIKFDGFKTASLSGSQQVLMPKLDDVQQTIAALKAAQHPVLWIGKGAYNARQEVIAVSEKFSLPVLSTAPATGIMPTDHPNFMGSRGRLGTKPAFEVSQAADLVLFVGTNFPFARYLPQGIKFIQVNNNLADLGKQHDADITVLADAKEFFQALLQSEVTIKPTKFLKAAQRDKQNWNRWLKTIATDDQGGLTAEGVLEAIKDNATDDAVFGLDVGNNTEWAIRQLPLNKQQTFTMSAWYGTMGFGLPAGLAAQLNYPKKQVWSISGDGGYAMVMPDLLTEVKYHLPVINVVLENKVLGFIQHEKLLANQAPYGIDLIGADWAKMADNMGAIGFKVTNLKELKATFQKVTQLQQNGNQLPIVIDAKIKNVDPIDTSFVPVDPENFDADTIAKYRERYGIAEADQPALSQLLNEL

SEQ ID NO: 13921 - protein, 393 aa, Staphylococcus aureus subsp. aureus NCTC 8325
MQFDNIDSALMALKNGEPIIVVDDENRENEGDLVAVTEWMNDNTINFMAKEARGLICAPVSKDIAQRLDLVQMVDDNSDIFGTQFTVSIDHVDTTTGISAYERTLTAKKLIDPSSEAKDFNRPGHLFPLVAQDKGVLARNGHTEAAVDLAKLTGAKPAGVICEIMNDDGTMAKGQDLQKFKEKHQLKMITIDDLIEYRKKLEPEIEFKAKVKMPTDFGTFDMYGFKATYTDEEIVVLTKGAIRQHENVRLHSACLTGDIFHSQRCDCGAQLESSMKYINEHGGMIIYLPQEGRGIGLLNKLRAYELIEQGYDTVTANLALGFDEDLRDYHIAAQILKYFNIEHINLLSNNPSKFEGLKQYGIDIAERIEVIVPETVHNHDYMETKKIKMGHLI

SEQ ID NO: 13922 - protein, 603 aa, Lactobacillus plantarum WCFS1
MVMKQTKQTNILAGAAVIKVLEAWGVDHLYGIPGGSINSIMDALSAERDRIHYIQVRHEEVGAMAAAADAKLTGKIGVCFGSAGPGGTHLMNGLYDAREDHVPVLALIGQFGTTGMNMDTFQEMNENPIYADVADYNVTAVNAATLPHVIDEAIRRAYAHQGVAVVQIPVDLPWQQIPAEDWYASANSYQTPLLPEPDVQAVTRLTQTLLAAERPLIYYGIGARKAGKELEQLSKTLKIPLMSTYPAKGIVADRYPAYLGSANRVAQKPANEALAQADVVLFVGNNYPFAEVSKAFKNTRYFLQIDIDPAKLGKRHKTDIAVLADAQKTLAAILAQVSERESTPWWQANLANVKNWRAYLASLEDKQEGPLQAYQVLRAVNKIAEPDAIYSIDVGDINLNANRHLKLTPSNRHITSNLFATMGVGIPGAIAAKLNYPERQVFNLAGDGGASMTMQDLATQVQYHLPVINVVFTNCQYGFIKDEQEDTNQNDFIGVEFNDIDFSKIADGVHMQAFRVNKIEQLPDVFEQAKAIAQHEPVLIDAVITGDRPLPAEKLRLDSATSSAADIEAFKQRYEAQDLQPLSTYLKQFGLDDLQHQIGQGGF

SEQ ID NO: 13923 - protein, 503 aa, Oryza sativa (japonica cultivar-group)
MACVLRLASRSRSRSGLRPTLAAPRPSPVPPPPPRTLDIPVHVTLCVPPLMADLDFFHTVQWRRAGIGRRWFATEASAASTAAELVDVPLAQTGEGIAECELLRWFVTEGDQVDEFQRLCEVQSDKATIEITSRFKGKVHQIHFGPGDIVKVGETLLKMMVGDSQTVSHDSIASSTDHSHAVDAANPSGEGSVPSGTLSTPAVRHLAKQYGLNISDIQGTGKDGRVLKEDVLSYAASKGLCKEPTSALEENIDQVELLEGRGSLPDANSYEDRRISLRGYQRSMVKSMTLAAKVPHFHYLEEINCDALVELKASFQNANKDHTIKHTFLPFLIKSLSKALSKYPLLNSCFVEETNEVIFKGSHNIGVAMATEHGLVVPNIKNVQSLSILEITKELSRLHEMASHNRLSTEDIAGGTITLSNIGAIGGKFGSPLLNLPEVAIIALGRIQKLPRFDDDENVYPSSIINVTVGADHRVVDGATVARFCNEWKSLVEKPERLLLHMR

SEQ ID NO: 13924 - protein, 132 aa, Methylobacillus flagellatus KT
MRILHTMLRVGDLEKSLAFYTQVLGMKLLRRHEYPDGKFTLAFVGYGSERDQAVIELTYNWYTSSYDKGNAYGHIAIEVDDAYAACEAVRQAGGKVVREAGPMMHGTTVIAFIEDPDGYKVEFIQKGTWTPA

SEQ ID NO: 13925 - protein, 244 aa, Aspergillus oryzae
MDNKWDIIAEIPDLTGKVAIVTGAKYIDYSRWKGTIADHKSSSPQGIGYHIAHQLAIKGAKVYVGARNREKSQNAIDEMLQSTPSLVHERLVPLAMDLNDFQQVQSTARGILEREERLDILVNNATRFLGPYLFTTELLPLLKMTARQAPGVRIVNVSSRVHLALPTGVQFSSLDDFNQDFGSEDDHQSNRLRYGLSKLAMVLFSKEIQRRANEEGIPMVATSMHPGGVRTDISVRGMIDSRIS

SEQ ID NO: 13926 - protein, 178 aa, Glycine max
  misc_feature (26)..(26): Xaa can be any naturally occurring amino acid
MGASASVTEKSIHEFMVKKSLLMVGXDAKGRDVNLSTYKGKVLLVVNVASKCGFTNSNYTQLTELYSKYKDRGLEILAFPCNQFLKQEPGSSQEAEEFACTRYKAEYPIFGKVRVNGPDTAPVYKFLKANKTGFLGSRIKWNFTKFLVDKEGHVLARYGPTTSPLSIENDIKTALGEA

SEQ ID NO: 13927 - protein, 474 aa, Acinetobacter sp. ADP1
MNTMKDSELSLDNGATRDVDYFAKRQLKKGAVGWLLLVGLGVSYVISGDFAGWNFGLAQGGWGGLFIATVIVALMYLCMSLSMSEMSTMLPTAGGGYSFARVAFGPLGGYLTGTAILIEYAIAPAAIAVFIGSYCESLFGIGGWSVYLLCYLVFMGIHLKGAGEALKIMFIITAIACVALLVFIVAMIPHFESGKLFDIAVSNNVGASAFLPLGYLGIWAAVPYAIWFFLAVEGVPLAAEEAKDPVRSLPRGLIGSMLILAAFALLILFLSAGAAGSDALKASGAPLVDALIAVYGQHTWLASFVNFVGLAGLVASFFSIIYAYSRQIFALSRAGYLPKSLSLTNKNKAPFLAIIIPGIIGFLMSLTHEGDLLILMAVFGATISYVLMMLSHIKLRISHPNLARPYKTPGGVVTSSIALVLAAIAVVAGLMVNPKVWLLTAMIYVAFILYFILYSRFHLVKGTPEEEFARVNED

SEQ ID NO: 13928 - protein, 112 aa, Burkholderia xenovorans LB400
MKLITAIIKPFKLDEAREALSAIGVSGITVTEVKGFGRQKGHTELYRGAEYVVDFLPKVKIEAAVSDDIVDQAIEALERAARTGKIGDGKIFVTPIEQVIRIRTGETGADAL

SEQ ID NO: 13929 - protein, 131 aa, Vibrio vulnificus CMCP6
MTKMIHSMIRVSDLDRSIAFYRDALELEIKDQFVFDTFTLTYLANKTTGFELELTYNHGMSDPYTHGTGYGHLAVCVEDIELAHKRLRDLGIAPSDVKAMDHNQKHLATFFFITDPDGYKIEFLQRQGRYQ

SEQ ID NO: 13930 - protein, 770 aa, Silicibacter sp. TM1040
MKAPLRKLLQSKGILSQIVVSMSLAALLVVVAVGGVARRYEVERVSEQLSEQANLTVSLLSGLMLEAIIVEDVPVLETGLVEAITRYPKILSINIENSEGEVIAEASNSAADEAEGYVMYRRPVEFEGFVFGTMVVQWSTAEGREIVLDKVRQTITWTVLAVIAMSLLMLYLVYRLALNPLQIVHARMSNAVAGAKTGHFSLPWYSSREFQALNVSVGVLEDSFAERDEREKALEHAREQAEIASRAKSEFLANMSHEIRTPMNGVIGMAEVLRETELTPDQELYTETIVKSGNALLSIINDILSFSKIEAGKLELTQATFNLRTVIEDVIMLLAPKAAEKWVQLTLRYDPDLAEFYDGDAGRIRQIVTNVVGNAVKFTSRGSVHIDVTGVARGQLMDLRISVVDTGIGIPAEKLDRIFHAFEQVDGAATRNFEGTGLGLAISTRLLQMMKGRIHVTSSEGKGSVFTIDISLPTSDRAPVAFLPEQPVSGLHALIVDDLELNRRILGERLRSWGLRVTEAASAMEAMLHLDEMRDATDTCDLIFLDYNMPDCDGYELALRIRGLPNTASVPIIVISSVDPALSQSMLADIEVCHQVLKPVRADDLRGVISQALGAGSAVEERAPSGSEDAKIMQRIKVLMAEDNRTNQVVVTRMLKSESVDIIIASNGQEAIEMYLRERPDVILMDMMMPVMDGLDATKAIRKIENETGVRQVPIIALTANALQSHEEACLEVGMDDFLSKPIRKQALLDALHQWTEDRDSAEPQNKLEA

SEQ ID NO: 13931 - protein, 568 aa, Candida albicans SC5314
MVLSKHIDALRLESQILKKTPQAQLRKEAFIDAYDSHKNIPQFEIPQNSSNEQLIYKYLSQELALDGIPTLNLASFVNTYVDDTSARLIQDNLTKNLADNDEYPSLIDIQTRCISILSNLWHAPGKVDKVTGNRVTNSIGTATTGSSEAIMLAGLALKKRWQLKRKAEGKSTDNPNILMATCAQVALEKFACYFDVENRLIPVTEESGHLIDVSKIKENIDENTIGIFVIMGSTFTGAFEPVEEISKLLDEVEKERGLDIRIHVDGASGGFVAPFIFPHLKWDFAVPRVDSINTSGHKFGLTSVGLGWVIWKDADLLPKELRFSLDYLGGVEETFGLNFSRPGFPVITQYYNFLSLGRQGYAKIFDGCMTNARLLSRFLEESKYFDVVSVIHHKLSDSEKKAQFTREVDDKKLDSKLYTINEEFKPGLPVVAFRFSKEVRDKYPELPQELLSTLLRKRGYIIPNYHLPPSENDKEILRVVVRNSLSLNLLERLIQDITGATELLIKAADSIADYVSTSGEHTDVENRERIHKLLAAIASGGVAEVKEEKHKKDNHQGSKNKKSYRGTC

SEQ ID NO: 13932 - protein, 398 aa, Candida glabrata CBS 138
MPRTITFNIPKEYKLVDLVGEGSYGIVCSATHLPTGNKVAIKRIRFPDSPPSDDGQGVPRLEEDDEHDNIAKVALIRTIREIKILSHFNNHENIITIFEKIKPMQSINFKEIYLVQELMETDLSRILASSNTLTVDHIQYFLYQILRALKAIHSAKVIHRDLKPSNILLNSNCDLKICDFGLARTYDPDDDASTMNGNNVGFLTEYVATRWYRAPEIMLNFQDYSTAIDIWSCGCVLAEMLFRKPIFPGKDYHHQLLLILDTLGTPSPEDIEAINYGRAKEYILSLPHFPKKDWSQLLGTDNEMLLDILDKLMIFNPKRRITAEQALEHPFLATYHDPKDEPNFPPLNFKGDEFWQLDNCMETSNGYGTDDSNNLRANVTRRKLREILYQEMVTPAPR

SEQ ID NO: 13933 - protein, 183 aa, Yersinia intermedia
MLDKIIRIATRQSPLALWQAHYVQHLLQANHPGLQVELVPMVTRGDIILDTPLAKVGGKGLFVKELELALLDGRADIAVHSMKDVPVAFPEGLGLVTICEPDDPRDAFVSPHFAHIDDLPAGSIVGNSSLRRQCQLRERRPDLIIRDLRGNVGTRLAKLDNGDYHAIILAVAGLNRLGLASRI

SEQ ID NO: 13934 - protein, 131 aa, Haemophilus segnis
SFCERVISGEWKGYTGKAITDVINIGIGGSDLGPYMVTEALRPYKNHLTMHFVSNVDGTHIAETLKKVNPETTLILVASKTFTTQETMTNALSARDWFLAAAKDPAHVAKHFAALSTNAKAVAEFGIDTNN

SEQ ID NO: 13935 - protein, 91 aa, Triticum aestivum
SEGDIQKLGANNPRPGIAGNVQASGERLVTISDLKSEERKQKLNRYRKKKIQRNFGRKIKYACRKALADSQPRVRGRFAKMDDGDMLKPRK

SEQ ID NO: 13936 - protein, 136 aa, Brassica napus
MATKSMGDIEKIKKKLNVLIVDDDPLNLIIHEKIIKAIGGISQTANNGEEAVIIHRDGGSSFDLILMDKEMPERDGVSTTKKLREMEVKSMIVGVTSLADNEEERRAFMEAGLNHCLAKPLTKDKIIPLINQLMDA

SEQ ID NO: 13937 - protein, 109 aa, Arabidopsis thaliana
  misc_feature (85)..(85): Xaa can be any naturally occurring amino acid
  misc_feature (102)..(102): Xaa can be any naturally occurring amino acid
MASSMLSSTAVVTSPAQATMVAPFTGLKSSASFPVTRKANNDITSITSNGGRVSCMKVWPPIGKKKFETLSYLPDLSDVELAKEXFDYLLRNKWIPCVEFEXEHGFFVP

SEQ ID NO: 13938 - protein, 131 aa, Pasteurella multocida
DFCHRVISGEWKGYTGKAITDVVNIGIGGSDLGPYMVTEALRPYKNHLNLHFVSNVDGTHIAETLKKVNPETTLFLVASKTFTTQETMTNAHSARNWFLTTAKDESHVAKHFAALSTNSKAVAEFGIDTNN

SEQ ID NO: 13939 - protein, 101 aa, Pyrobaculum aerophilum
MPFSHTKIVGPAGRYGARYGMGLRRKVTAIEVKQRGKHRCPSCRSLVRLERIAFGIWRCPKCGFTFAGGAWTPQTIMGKALAPEELKEVEAQKAKWKEAVK

SEQ ID NO: 13940 - protein, 206 aa, Rhodopirellula baltica SH 1
MFREFRGRGKKMGLTGVSGWFTLRSQLSTTFGLVGLFWKRFPVKRARMREASCLVGDGLQGIRLVTNIYVGNLSFKATEEELRGAFEQYGEVSAVNIIMDRETGRSRGFAFVEMADAEGAKDAIENLNGHEIDGRSVTVNEARPREPRSGGGGGGGGYGGGGGGRGRGGGGGGYGGGGGNRGGGYGGGGGGYGGGGGGGYGGRGDR

SEQ ID NO: 13941 - protein, 102 aa, Zea mays
  misc_feature (57)..(57): Xaa can be any naturally occurring amino acid
  misc_feature (76)..(76): Xaa can be any naturally occurring amino acid
  misc_feature (85)..(85): Xaa can be any naturally occurring amino acid
MAENADLVEWPKKDKRRFLHVVYRVGDLDRTIQFYTECFGMKVLRKRDVPEEKYSNXFHLGFGPETSNFVVELTYXYGVSSYDIXRTGFGHFAISTQDVSKR

SEQ ID NO: 13942 - protein, 408 aa, Oryza sativa
MSIQANPLIKTLALSPRRRMAPPAPATARRPMAAVRCSAAKRSYNVTLLPGDGIGPEVVAVAKDVLSLAGALEGVEFRFQEKLMGGAAVDAYGVPLPEETLAAAQASDAVLLGAIGGYKWDNNEKHLKPETGLLQIRAGLGVFANLRPAAVLPQLVDASTLKKEVAEGVDIMVVRELTGGIYFGQPRGFGKNDKGEDTGFNTEVYSASEIDRITRVAFEVARKRRGKLCSVDKANVLEASMLWRKRVTSLASEFPDIELSHMYVDNAAMQLIRNPKQFDTIVTNNIFGDILSDEASMLTGSIGMLPSASVGESGPGLFEPIHGSAPDIAGQDKANPLATILSAAMLLRYGLGEENAAKRVEAAVTETLNNGFRTGDIYSPGTTLVGCKRMGEEVLKTVESQSAVALNS

SEQ ID NO: 13943 - protein, 414 aa, uncultured bacterium 578
MPTQKNVELPDIGDFDSVDVIEVLVKVGDVINENDSIITLETDKATMEIPAPFAGKVTTLSIKVGDKIAKGELILTLESESEEIKSELDQVEGKSENVEKTIKQEDIEVKPDNSETPQDSIKNNDEPQEELSVKTEIDSHASPSIRKLARELGVSLAKIKGTGQKGRILDKDLKSFVKQIVSHGSTDDEVEIVPLSRIKKISGKHLAKCWSTIPHVTQFDEVNIEQMEKFRLHQKERNIKLSPLVFIMKAVVQTLKRHPNFNASLDESGENLVIKKYFNLGIAVDTPNGLVVPVVRNVGKKSLIELSDELTEISSRAREGLLEANEMKGASFTISSLGGIGGTQFTPIINSPEVAILGVSRSQIKPIWNGDSFEPTATLPLALSYDHRVIDGAEGARFMAELNQILRNIMEMLL

SEQ ID NO: 13944 - protein, 92 aa, Arabidopsis halleri subsp. halleri
LTESVPFFRDIVTGAFEKFIKVTMKLPLTGQQYSEKVTENCVAIWKSLGIYTDCEAKAVEKFLEIFKEETFPPGSSILFALSPTGSLTVAFS

SEQ ID NO: 13945 - protein, 321 aa, Zea mays
MTEEAEAKAKGNAAFAAGRFEEAVQHFSDAIALAPDNHVLYSNRSAAYASLWRYAEALDDAKRTVALKPDWAKGYSRLGAAHLGLGDAPKAVEAYEKGLALEPSNEALKSGLAQARQSASAPRRPVGSGADAVGKMFQGPELWSKVAADPTTRGYLDQPDFVQMLREVQRNPGRLNSYLSDQRMVQVLTLMLNIKFQNQSSGAPDPAAAQSNPPPPKQQPEAKAREPEPDPEPEPMEVTEEDKEQKERKASAQKEKEAGNAAYKRKDFDTAIQHYTEAMELDDEDISYITNRAAVYLEMGKVRTRRSLVLNHKLFTYICSL

SEQ ID NO: 13946 - protein, 654 aa, Vibrio angustum S14
MLEVAVAEPVCSKGAPFLSRSYIGIPMQETVTEFRQLDLADTLLSALDNMGFVAPTPIQAASIPLLLTGTDALGKAQTGTGKTAAFSLPVLNKVDLSQHKPQAIVMAPTRELAIQVAAEIKVLGQNIKGLKVLEIYGGASIVDQMRALKNGAHIVVGTPGRVKDLISRKQLQLDEVHTFVLDEADEMLKMGFVDDVTWIMEQAPETAQRVLFSATMPPIVKEIVDRFLRNPARIDVAGENRTVSKVEQQFWVVKGVEKDEAMSRLLETEDTDASIVFVRTRQDTERLADWLSSRGFKAAALHGDIPQSLRERTVDHIKRGVIDILVATDVVARGLDVPRITHVFNYDIPFDVESYIHRIGRTGRAGRTGKAILLVRTNQIRMLRTIERVTKSRMEEIQLPLRDLVAASRLNRLGEELAAQKEQTSVEAFVELVEKLQESIDVDAATLAAMLLQRQQGNRPLFYKGPDPMIAAIERESQRRERRGNDRDRGDRRERGGERGERRSYNNADWDTYQLQVGREQGVQVKDIVGAIANELGLSKEFIGAIKLAPTHTFVQLPKKMTAEVAAQLKKLRIRQNDVKAVVVEGEVLREHRPRSGNRDGNRGGYRGNRDGNRDGNRGGERRFDRNRGNDTRGGYRGNRDGAPRTDRKPRTEA

SEQ ID NO: 13947 - protein, 306 aa, Bacillus subtilis
KMGLLVMAYGTPYKEEDIERYYTHIRRGRKPEPEMLQDLKDRYEAIGGISPLAQITEQQAHNLEQHLNEIQDEITFKAYIGLKHIEPFIEDAVAEMHKDGITEAVSIVLAPHFSTFSVQSYNKRAKEEAEKLGGLTITSVESWYDEPKFVTYWVDRVKETYASMPEDERENAMLIVSAHSLPEKIKEFGDPYPDQLHESAKLIAEGAGVSEYAVGWQSEGNTPDPWLGPDVQDLTRDLFEQKGYQAFVYVPVGFVADHLEVLYDNDYECKVVTDDIGASYYRPEMPNAKPEFIDALATVVLKKLGR

SEQ ID NO: 13948 - protein, 473 aa, Frankia sp. EAN1pec
MALHGRARGRRGDQAVEVRPHLVIPDEDGPVPRYRMPRSSMSAETAYQIVRDELMLDGNARLNLATFVTTWMDEHADRLMTECAAKNMIDKDEYPQTAELEARCVNMLADLWHAPDATDAVGCSTTGSSEACMLAGLAMLRRWRSTREPHRGEQGGGQRGTGARPNIVMGANVQVCWEKFARYWDVEPRLMPLAPGRTHLTAPEAVARCDENTIGVVAVLGSTFDGTYEPVAEIVAALDQLAASGGPDVPVHVDGASGGFIAPFCDPDLVWDFRLERVVSINASGHKYGLVYPGVGWALWRDARHLPAELVFDVDYLGGSMPTFALNFSRPGAQVVAQYYSLLRLGRAGYRHTARTCRDNARWLADEIAKLGPFELISDGSGIPAFAFTTRDAAEFSVFEVSEALRARGWLVPAYRFPPDLAELAVLRIVVRAEFSRDLAHLLVEDLHRVVGRLSGPRWRTAAGGADLASFHH

SEQ ID NO: 13949 - protein, 406 aa, Oceanobacillus iheyensis HTE831
MIERHTCNNGLRIVHEQIPAVRSVTIGIWVLTGSRNESQQNNGISHFLEHMFFKGTDKRSAQDIAEEFDSIGGQINAFTSKEYTCFYAKVLDTHKEYALEILADMFFNSTFDPEEMEREKKVVLEEIKMYEDTPDDIVHDLLAKASYGTHPLGYSILGTEEQLLSFDSAQLNDYIEHAYSPDRVVISVAGNVDSSFMKTIESSFGSYKGKSNSVEIIKPTFLAESIDRHKDTEQAHLCLGYQGLEQGHPLLYSLTIMNNVLGGSMSSRLFQDVREKQGLAYAVFSYHSTFIDSGLLTIYGGTGKEQLSVLEDTIQLTVDTLIQNGLTDKELRNSKEQLKGGLMLSLESTNSRMSRNGRNELLLKRHRTLDEMIQEIDAVSHETIQQVINEVFKEKAARALIAPKAI

SEQ ID NO: 13950 - protein, 285 aa, Vibrio vulnificus CMCP6
MTAQNIDGTLISQTVRSEVAARVKARVAAGLRAPGLAVVLVGEDPASQVYVGSKRRACEEVGFVSKSFDLPASTSEEELLALIDELNNDAEIDGILVQLPLPAGIDSTHVLESIHPEKDVDGFHPYNVGRLAQRIPKLRSCTPKGIITLLERYNIALRGKHAVIVGASNIVGRPMTLELLLAGCTTTTCHRFTKDLEGHVRQADVLVVAVGKPNFIPGEWVKEGAIVVDVGINRLESGKLIGDVEYNKARERASFITPVPGGVGPMTVASLIENTMLACEQYHTK

SEQ ID NO: 13951 - protein, 343 aa, Zea mays
MRTPPGDNALLSPKTAFLFNVMWQRSHSFSTLFPASFDFIGEAYFGVRPSATELGKGGPSKAAKWLIWQLHPLVTLGLPMVLEEPLLHTFHLPPFLVKGDYRALYKYFSTVAKQALDTAEGLGLSREEACHNLLFATTFNSYGGLKVLFPGLLANVASGGEKLHERLVAEIRGAVADAGGKVTLAAVERMELAKSVVWESLRLDPPVKFQYGHAKKDLLVESHDAVFQVRKGEMLFGYQPCATKDPRVFGDTAGDFVPDRFLGEEGSKLLQYVYWSNGRETENPSVDNKQCPGKNFVVLVGRLLLVELFLRYDTFTAEVGKELLGTSVIFTGVTKATSGPGSE

SEQ ID NO: 13952 - protein, 248 aa, Burkholderia xenovorans LB400
MYKLVLIRHGESTWNKENRFTGWVDVDLTEQGNNEAQQAGVLLKDSGYTFDIAYTSVLKRAIRTLWHVQDKMDLMYLPVVHSWRLNERHYGALSGLNKAETAARFGDEQVLVWRRSYDTPPPALEPTDERAPYNDPRYAKVPREQLPLTECLKDTVARVLPLWNESIAPAIKSGRQVLIAAHGNSIRALVKYLDDISDNDIVGLNIPNGVPLVYELDENLRPIKHYYLGDQEAIAKAQAAVARQGKAG

SEQ ID NO: 13953 - protein, 303 aa, Pediococcus pentosaceus ATCC 25745
MIYTVTLNPSIDYVISLDEMKVGLVNRLKTSSKFPGGKGINVSRILNELNVSNTALGFLGGFTGKFVNDALTRLNVQTDFVEIKEDTRINVKIHAQQETELNALGPNIDDAELASFIDKFNQIGNGDVVVFSGSIPANLPQNLYDQIIKKIKANGAQLAVDTTGQGLLDTLENNPIVIKPNNHELGELFHTEVTTDADIEKYAKKLIEMGAQNVMISMAGEGGMLVSKDRVLRSFAPKGKVLNSVGAGDSMLAGFVGEFNQSHDLEKAFKKGLACGSATAFSLDIATNKKIDEIFNEIDVFEK

SEQ ID NO: 13954 - protein, 542 aa, Triticum aestivum
  misc_feature (407)..(407): Xaa can be any naturally occurring amino acid
MAYGLKPKAPSVPPPGEENDQPIDRPRPKPLSIRGRPPLHSGFGEAAHGIWPVKMDGNTRGGGHSEALKNYNLGKTLGHGTFGKVMIAEHKLTGQKVAIKILNRHQMEIMEMVEKAKREIKILRSFIDFIHPHIIRVYEVIETPKDIFVVMEYCQNGDLLDYIVEKGRLQEDVARRIFQQIISGVEYCHTNMVVHRDLKPENLLLDSKYNVKLADFGLSNVMHDGHFLKTSCGSINYAAPEVISGELYAGPEVDVWSCGGGFYILPNHLSDLAMDLIPRMLIVDPMKRITICEIRDHPWFQNRLPPRRAVPPPDTAQQAKMEIDEDTLQEVANLGYDKDHVCESLCNRLQNEATVAYYLLLDNRFRATSGYLGADYLQSMGRSFNQFTSSESASPSTRQYLPASNGXSKAVALRPYYPVQRKWALGLQSPAHPREIMIEVLKALQELNVRWKKNGHHNMKCRWCPGFPQVSDMLDANHSFVDGSTIMDIGDANGRLPAVIKFEIQLYKTKDDKYLLDMQRVTGPQLLFLEFCAAFLTNLRVL

SEQ ID NO: 13955 - protein, 363 aa, Lycopersicon esculentum
MESPRVEESYDKMSELKAFDDTKAGVKGLVDSGITKVPQIFVLPPKDRAKKCETHFVFPVIDLQGIDEDPIKHKEIVDKVRDASEKWGFFQVVNHGIPTSVLDRTLQGTRQFFEQDNEVKKQYYTRDTAKKVVYTSNLDLYKSSVPAASWRDTIFCYMAPNPPSLQEFPTPCGESLIDFSKDVKKLGFTLLELLSEGLGLDRSYLKDYMDCFHLFCSCNYYPPCPQPELTMGTIQHTDIGFVTILLQDDMGGLQVLHQNHWVDVPPTPGSLVVNIGDFLQLLSNDKYLSVEHRAISNNVGSRMSITCFFGESPYQSSKLYGPITELLSEDNPPKYRATTVKDHTSYLHNRGLDGTSALSRYKI

SEQ ID NO: 13956 - protein, 975 aa, Burkholderia mallei ATCC 23344
MKLEHPDRLMNRTPLSLAALETHDAFAERHIGPDAASQQAMLDTLGFATRAALIDAVIPASIRRAETLPLGPFAQPKSEAEALAALRALADKNQVFRSYIGQGYYDTHTPAVILRNVLENPAWYTAYTPYQPEISQGRLEALLNFQQMVADLTGLEISNASLLDEATAAAEAMTLLQRVGKPQSNVFYVADDVLPQTLEVIKTRAKPIGIEVKSGPAADAAAANAFGVLLQYPGANGDVRDYRALADAIHAAGGHVVVAADILALTVLMPPGEWGADVAVGNTQRFGVPMGFGGPHAAYMAVRDEFKRQMPGRLVGVTVDAQGKPALRLALQTREQHIRREKATSNVCTAQALLAIMASMYAVYHGPRGLKTIALRVNRIAALLAAGIRHLGYATVNDTFFDTLTIDTGARTAQLHAFAQAKRINLRRAGDTRVGVSVDETTTRADLADLLTIFAQAAGATAPDIDALDAGLLPAPALPPSLERTSAYLTHHVFNRHHSETEMLRYLRSLSDKDLALDRSMIPLGSCTMKLNATSEMLPVTWPEFGRIHPFAPAEQTVGYREMIDQLEQMLVAATGYAAVSLQPNAGSQGEYAGLLIIHAYHESRGESHRDVCLIPASAHGTNPASAHMAGMKVVVVACDAQGNVDIADLKAKADAHSHDLAAIMITYPSTHGVFEQNVREICEIVHAHGGQVYVDGANMNAMVGLTAPGQFGGDVSHLNLHKTFCIPHGGGGPGVGPVAVGPHLAKFLPNQRSTGYARGEDGIGAVSAAPYGSASILPISWMYIAMMGAKNLTAATETAILNANYIAKRLAPHYPVLYSGPGGLVAHECILDLRPIKDSSGITVDDVAKRLMDYGFHAPTMSFPVPGTLMVEPTESESQEELDRFIAAMIAIRDEIRAVEEGRADREDNPLRHAPHTAAVVTANEWPHAYSREQAAFPVASLVANKYWPPVGRADNAYGDRNLFCSCVPVSDYA

SEQ ID NO: 13957 - protein, 258 aa, Streptomyces avermitilis MA-4680
MRREGATLVLTLNRPEARNALSLPMLVGLYDGWVEADEDDAVRSVVLTGAGGAFCAGMDLKALAGQGMEGQQYRDRLQADPDLHWKAMLRHHRPRKPVIAAVEGPCVAGGTEILQGTDIRVAGESATFGLFEVRRGLFPIGGSTVRLQRQIPRTHALEMLLTGRPYPAREAAGIGLVGHVVPDGTALAAALEIAGRINACGPLAVEAVKASVYETAEMTETDGLAAELKRGWPVFDTADAKEGARAFAEKRPPVYRRT

SEQ ID NO: 13958 - protein, 392 aa, delta proteobacterium MLMS-1
KFERTKPHVNVGTIGHIDHGKTTLTAAITRVLSNKGYASATAFDQIDKAPEEKERGVTISTAHVEYESDNRHYAHVDCPGHADYIKNMITGAAQMDGAILVVGADDGPMPQTREHILLARQVGVPSIVVFLNKCDMVDDPELIELVEMELRELLSKYDFPGDDTPIIHGSALQALENPDDEAAAKPIWDLMAALDDFIPAPERDVDKPFLMPVEDVFSISGRGTVATGRIERGIVKVGDEIEIVGIRDTQKTTVTGVEMFRKILDEGQAGDNVGILLRGTKREEIERGQVLAKPKSITPHTKFKAECYILSKEEGGRHTPFFNGYRPQFYFRTTDVTGVVTLGEGVEMVMPGDNVTVDAELITPIAMDEGLRFAIREGGRTVGAGVINKIIS

SEQ ID NO: 13959 - protein, 482 aa, Zea mays
MASSDHGSTTAPKDVPGSYGLPLVGAVRDRLDFYYFQGQDKYFESRVERYGSTVVRMNVPPGPFMARDPRVVAVLDAKSFPVLFDMDKVEKKDLFTGTYMPSTSLTGGYRVCSYLDPSEPTHTKVKQLLFSLLLSRKDDVIPTFRSNFSSLLATVEAELAKGGKAEFNKLNDVTSFDFIGEAYFGVRPSATELGKGGPSKAAKWLIWQLHPLVTLGLPMVLEEPLLHTFHLPPFLVKGDYRALYKYFSTVAKQALDTAEGLGLSREEACHNLLFATTFNSYGGLKVLFPGLLANVASGGEKLHERLVAEIRGAVADAGGKVTLAAVERMELAKSVVWESLRLDPPVKFQYGHAKKDLLVESHDAVFQVRKGEMLFGYQPCATKDPRVFGDTAGDFVPDRFLGEEGSKLLQYVYWSNGRETDNPSVDNKQCPGKNFVVLVGRLLLVELFLRYDTFTAEVGKELLGTSVIFTGVTKATSGPGSE

SEQ ID NO: 13960 - protein, 478 aa, Trichodesmium erythraeum IMS101
MTAKVTSLVNQPYKYGFVTDIESDTIPRGLSEDIVRLISAKKNEPEFMLNFRLKAYKKWLQMKEPLWAHVDYPKIDYQNIIYYSAPKLQDKKKSLEEVDPTLLETFEKLGIPLSEQKRLSNVAVDAVFDSVSVATTFKEKLAEEGVIFGSISEAVQEHPELVEKYLGSVVPVGDNFFAALNSAVFSDGSFVFIPKGVKCPMDLSTYFRINNGESGQFERTLIVAEEGSSVTYLEGCTAPMFDTNQLHAAVVELVTLDNAEIKYSTVQNWFAGDENGKGGIYNFVTKRGLCKGVNSKISWTQVETGSAITWKYPSCVLVGDNSVGEFYSVALTNNKQQADTGTKMVHVGKNTRSTIISKGISAGNSANSYRGLVKMGPGAKGSRNYSQCDSMLIGDRAQANTFPYIQVDNNTAKVEHEASTSKIGVDQLFYFAQRGISPEDAVSMIISGFCKDVFNELPMEFAAEADKLLSLKLEGTVG

SEQ ID NO: 13961 - protein, 450 aa, Clostridium symbiosum
MSKYVDRVIAEVEKKYADEPEFVQTVEEVLSSLGPVVDAHPEYEEVALLERMVIPERVIEFRVPWEDDNGKVHVNTGYRVQFNGAIGPYKGGLRFAPSVNLSIMKFLGFEQAFKDSLTTLPMGGAKGGSDFDPNGKSDREVMRFCQAFMTELYRHIGPDIDVPAGDLGVGAREIGYMYGQYRKIVGGFYNGVLTGKARSFGGSLVRPEATGYGSVYYVEAVMKHENDTLVGKTVALAGFGNVAWGAAKKLAELGAKAVTLSGPDGYIYDPEGITTEEKINYMLEMRASGRNKVQDYADKFGVQFFPGEKPWGQKVDIIMPCATQNDVDLEQAKKIVANNVKYYIEVANMPTTNEALRFLMQQPNMVVAPSKAVNAGGVLVSGFEMSQNSERLSWTAEEVDSKLHQVMTDIHDGSAAAAERYGLGYNLVAGANIVGFQKIADAMMAQGIAW

SEQ ID NO: 13962 - protein, 82 aa, Brassica napus
MSDKGRPLPKFGEWDVNDPASAEGFTVIFNKARDEKKTGGKPGSPGKSSDGHAKSGGGGGGDPSKPHPKKWLCCMQSPAVDS

SEQ ID NO: 13963 - protein, 573 aa, Vibrio sp. Ex25
MKDKYLDIYQQEALQEALVELKQARQRERLLADENKAILSAISAMSEAKNRHEIFTGLNNVLKKYINFDDFIVLTRDDERYSFKTLISTNSVFDNISWLHGNASERALNGECILLFEPDRLAEFINLNSFIKSHVNSVVLTGIRSEVTQTVILLIGAKKGHFSIENKETLRRFRPLIERAVIDIETKEKLQRIVEVRTTQLAKAREEAELANRSKSEFLAMMSHEIRTPLNSVLGMLDILKQSTLSEEQIDALSQMECSAELLLAIISDILDLSKIESGRFQLNEQWVNLRDTVTFVISQQKQIAKKKSLQFKLNCMVTTDKQFWIDSTRLSQILFNLIGNAIKFTDEGEVKVSVSEQDTELVISISDTGIGISKAKQEHLFTAFHQGDRSITRRFGGTGLGLAITKHLVEMMRGKIIVKSDEHVGSTFTIKIPVLTRCNQNRPVKIENNQPTKAMDLLVVEDTESNQFVIKLILNKLGHNVHIASHGAEALTFLEENEDLIDLILMDVSMPVMDGITATRLIRDKGFKTPIIALTAHALESDRDKCLDAGMDGFISKPVRRQDIFEAIQPFL

SEQ ID NO: 13964 - protein, 551 aa, Agaricus bisporus
MTGSLASNYASWKQLQEIYDKDRAKIVLRDLFAADPQRFSKLSATYNSQSGPGVQILLDYSKHLVTEPILQKLFNLLREAKVEDARDKMFSGEHINTSEDRAVLHVALRNFNDFSIKEEGVDEVSKVLQHMKEFSESVRSGQWKGYTGKTINTIVNIGIGGSDLGPVMVTEALKPFSKRDLNAHFVSNIDGTHIAETLRLCDPERTLFIVASKTFTTQETITNAESARDWFLGFAKDKAHVAKHFVALSTNTSAVTAFGISEANMFQFWDWVGGRYSLWSAIGLSIALVIGFDNFEKLLRGAHAMDQHFKTTPLEKNLPAIMAALGIWCNDFYGAQTLALLPYDQYLHKFADYFQQGDMESNGKFITKNGDRVNYQTGPIIWGASGTNGQHSFYQLIHQGTKIIPADFMAPATSHNPIANSKHHRILLSNFFAQPEALAFGKTEEEVRKELGQNASEALVKSKVFEGNRPSSSLMFDKLDPATLGALIALYEHKIFVQGVVWGINSFDQMGVELGKVLAKQILAQLDKSDDVKGHDSSVRHLPFILQVDHC

SEQ ID NO: 13965 - protein, 638 aa, Bifidobacterium longum DJO10A
MGQDQSSVFDLAAVAAASNGGNNDPLLPPARFIGDPQKPSRMPYNKYAAYDKQIPFDYPERTWPGKRLQRAPRWCSVDLRDGNQALVNPMDSERKLRFWNLLVSMGFKEIEVGFPSASETDFDFIRMLIERELIPDDVTIVVLTQCREHLIRRTYEALKGAKRAIVHFYNSVSVLQREVVFRKNKEEIKKLATDAAELCKDLENEAKGIDLYYEYSPESFTGTEPEYAVEVCNAVIGVIKPTPEHPMIINLPATVEMTTPNVFADEVEYVSTHLDDRDSVVLSLHPHNDEGMGVAATELAVLAGADRVEGCLLGNGERTGNVDLVTLGLNWLTQGIDPQLDLSNVPEIRKTVEYCNQIKISERHPYAGNFVFTAFSGSHQDAIKKGLEARQVAAERAGADLDSFVWLVPYLPIDPKDIGRTYEAIIRVNSQSGKGGMAYLLKTNHNLDLPKRLQIEFDKIVQNYADTTKKEVKDEDIWRLFKDEYLPVEQSGMTAAGVVVGDTHDASLVPWGRLKLLKVAVSSGEDGSDTVLKARLLDRGVNVGVDAPVEREVSGIGNGPIAAFLNAISNFGVDASIMDYAEHTMSVGTDAMAASYVECQVGEADDAQIVWGVGIDSSITTSALKSIISAINRSQRKR

SEQ ID NO: 13966 - protein, 466 aa, Bdellovibrio bacteriovorus HD100
MKRISTLLLGLSLSLSAHAVDPTPVPKTPDKDVIGAIQGWAPKNDLKISLPVTKFTLENGLTVLLLEDHAVPMVSYHTWYRVGSRDESPGVTGAAHMLEHMMFKGAKKYDGKSFDRIFHENGITNNAFTTNDYTGFYENLPSSKLELVMDMEVDRMSSLLISPEDLKSEKEVVKEERRWRVDNNPMGLLRELMMGTIFKVHPYKWPVIGHMKDIEAYDSEKLRYFYNTFYVPNNAVLVVVGDFNTSKVKSLIEKYYGKLPSRPLPERKYPSEPAQKVQQNATLRKDVQNTSFVVAYKSPKQGQPDMYALDLAANILGYGTSSRLHKRLVYQKQTATSAYSYNYAMQDEGMFAVGVNLKPGQAPQEALDVVYNEIWKLRNQKVTEAELEKAKTQVMKDLVDSLKTMDGKARALAVNEIVTGSYQSLFTDLEKYQAVTADDIKRVADKYTQQTQRSIITLEPKVKKEQ

SEQ ID NO: 13967 - protein, 470 aa, Lactobacillus plantarum WCFS1
MDVSESTNKKSNSHTGFLWLATFIAAMGSLLFGYDTGIVNGSLEFMAVKGQLDLTAFQQGIVSSGLTLGAAFGAIIGGPFADKIGRKKILTILGIIFSVGALGCAFATNITILIVFRFILGLAVGSASANVPVYIAEIAPTELRGKMVTTAQVMIVSGQFVAFGVNAALTPLGAQNAAIWRWMLGLGTIPGIILWIGMYLIPESPRWLVSQGKMDKALGVLRRIRSAASVESEMKEIQDKDKADKELNAEQATFKELISKRWVVQILITGAMLGIIQQFAGINSIMYYGGKIIQESGFDTTVAAILNAGNGFLSIVGAVLGMFTIDWLGRRKLEFAGLTICGITLVSAGVIHTVAPNASWAGITIVVLVYLYIIFFQGTLGPVTWLINSEIFPQRYRGIGTGITIFVLWIGNFIVGLLSPVLLEWNMSNTFYIFAVCCVLGIIFVALRVPETKGVPLEEIEKYFRTKYDK

SEQ ID NO: 13968 - protein, 131 aa, Cryptococcus neoformans var. neoformans JEC21
MSSGGKGKASSETKSSSRSSKAGLQFPVGRIHRLLKKGNYAQRIGSGAPVYLAAVLEYLAAEILELAGNAARDNKKSRIVPRHLQLAVRNDEELNKLLGSVVISQGGVLPHIMAELLPVKTKGKAKASQEV

SEQ ID NO: 13969 - protein, 369 aa, Novosphingobium aromaticivorans DSM 12444
MTSRRKKTPEKTDEGVSMKIAVLPGDGIGPEVTREAVRVIEALGLGDIEMKEAPVGGAAYKAYGHPLPPETLEIARLSDGILFGAVGDPDCDSLERHLRPEQAILGLRKALTLFANLRPARVFKGMEDFSALRPEVAGAIDLLIVRELNGDVYFGEKGFRTAANGDREGYDVMSYSESEVRRIAHVAFRAAMGRKKRLCSVDKANVLETSQLWRDVMLEVAKDYPEVALEHMYVDNAAMQLVRAPGNFDVVVTGNLFGDILSDQASMCVGSIGLLASASLGERETEYGTFGLYEPIHGSAPDIAGKGLANPMATILSAAMLLRHSLGLEVAADRIEAAVAKALADGVLGRDLGGTAGTTEIGDAVLARL

SEQ ID NO: 13970 - protein, 108 aa, Arabidopsis thaliana
MASSMLSSATMAASPAQATMVAPFHGLKPSAAFPATRKVNNDITSITRNGGSVHWMHVWPPIAKKKSGTLSYLHDLTDSELPKEDDYLIRNPRIPCAEFELGYRTRVP

SEQ ID NO: 13971 - protein, 411 aa, Oceanobacillus iheyensis HTE831
MQVMVQKFGGTSVQSSENREHVIRHIREALVQEYKLVVVVSALGRKPDPYATDSLLGLVDFPTNTNSSRELDLLMSCGEVISSVVLSNELQKNHISAVALTGAQAGFVTNEDFNRAKIKEVNPTRILKELETHDVVVVAGFQGQSESGEITTIGRGGSDTSAAALGVALSAERIEIFTDVEGIMTADPRVVKNARPLDVVTYTEICNLAYQGAKVIHPRAVEIAMQGKIPMRIRSTYSEQLGTLVTSSRVHELGMDIPDRMITGIAHISPVTQIKVQTKESAYRVQSEVFKAMAEAGISVDFINISPTGVVYTVPDTLTTKAIEILEMLGFHPEVTKGCAKVSAVGAGMSGVPGVASKIVQALTDSGVQILQSADSHTTIWVLVHNDDLITAVNALHDVFGLSITEELLES

SEQ ID NO: 13972 - protein, 367 aa, Vibrio vulnificus YJ016
MTLNKLSPIITCRCLLDSVILLPVIFNQKLSCGATIMTIKVGINGFGRIGRFVFRAAQERADIEVVGINDLIDVDYMAYMLKYDSTHGRFNGTVEVEGGNLIVNGKTVRVTAERNPEDLKWDAIGVDVVAEATGLFLDDATARKHITAGAKKVVLTGPSKDATPMFVMGVNHTSYAGQDIVSNASCTTNCLAPIAKVLNDKFGIESGLMTTVHATTATQKTVDGPSAKDWRGGRGASQNIIPSSTGAAKAVGVVLPELNGKLTGMAFRVPTANVSVVDLTVNLKNGASYEAICAAMKEASEGELKGVLGYTEDAVVSQDFIGEVQTSVFDAKAGIALTDNFVKVVSWYDNEIGYSNKVLDLIAHISK

SEQ ID NO: 13973 - protein, 488 aa, Lactobacillus plantarum WCFS1
MSAEKSISSDHVPLSDPALKTINRNAGRNLNHIAFISTLGGLLFGVDTGVINGAIGYMATPAELNLSPNNEGLVTSGITLGAAFGAVFAGHLSDRIGRKRLLKYLALLFFVCTLACSLAPNALFMIISRVLLGLAVGGASVIVPTYLSEISTPEIRGRLVTQNELMIVTGQLLAFIVNAILGNWFGHISNIWRYMIGFGMIPAVALFFGMMVVPESPRWLVMVNQLDNAFDSLRKIRSHPETCNEEITQIQDTLNQESEIKQATFKDLSTPWIRRLVFIGIGLGVMQQFIGINIMMYYGTTILTNSGFAHNAALIANIGNGLVSVIATFIGMSIMNRVNRRSMLIAGIIGTTTSLILIVGVSAFLSQSPLLPILVVLCTMMFLGFFQGFISPLVWLLLSEIFPQNLRGLGMGVSTFFLWFANFLVGYFFPILLSAVGMTWTFLIFVFFNILSFIFAYKYAPETRGKSLELIQMEFKYGDTTGINPEDK

SEQ ID NO: 13974 - protein, 371 aa, uncultured bacterium 578
MAPIVMKFGGTSLRDEDSRAHALKHIKNYSDAGERIVVVVSAMGRKGEPYATDTLVALLKDVGHNINPRELDLVMSVGETLSSAFFSHLLSHNGMPAASFNGRQSGILTDDNAGNAEILEINPSRIVEALDEGKIAVVAGFQGVNDRGDIRTLGRGGSDTSAVSLASALGAEKVEIFSDVDGIANCDPRQVEASSYLELISVNQMLDMADEGSRVIHPRAIKASLKTKTPIVAKNNFTDSAGTLIHHNKSSEEEVVAIAHRESMVLLEFALEHKAASHVDGIVNIDSKRLLLNDDVYLSDKLAQLEETLGFYKLSRHWTTISVVFNNKVSKKPAGLDYAELLESPNNIIRYLLKESKSRETLKFLHGRYTQ

SEQ ID NO: 13975 - protein, 281 aa, Mycobacterium sp. MCS
MRGRRPGQRDHPRTAVTETATAPGALTERRGNVLIITINRPEARNAVNASVSIGVGDALQAAQEDPEIRAVILTGAGDKSFCAGADLKAISRGENLFHPEHSEWGFAGYVRHFIDKPTIAAVNGTALGGGTELALASDLVVAEERAKFGLPEVKRGLIAGAGGVFRIVEQLPRKVALELIYTGEPISAADALRWGLINDVVPDGTVVDAALKLAERITCNAPLAVQASKRVSYGAVDGVVGSDEPFWKQTFSEFSTLLKTEDAMEGPLAFAQKREPVWKAK

SEQ ID NO: 13976 - protein, 472 aa, Thermobifida fusca YX
MSTTGEAPSSGEVNIAHVVMIAAAAAMGGFLFGYDSAVINGAVSAIQDTFRVGSTVIGFTVAAALIGSAVGAAIAGALADRIGRIRVMQLAAVLFAASAVGSALPFTVWDLAWWRVVGGVAIGIASVIAPTYIAEVSPPAFRGRLASLQQLAIVLGIATSQLVNYGLAAAVGGSALHRLGPLQAWQWMLGIEVLPAATYFVLTLVIPESPRHLVRIGRDARARRVLAEVEGGDVDGRVAEIRRVLGRERRPRLRDLRGRYGLLAIVWVGMALSAFQQLVGINVIFYYSAVLWQSVGIAETDSLLLSLFTSIVNIVGTLIAIGLVDRVGRKPLLLAGSAGMTVALAFTAFAFSHARGEGDDVVLSTAWALTALVSASTFVLFFALSWGVVTWVLLGEMFPLRIRAAAMAVATATQWITNWLVTVTFPSLRDWSLPGTYLVYTAFALLSFGFVLRFVRETKGRTLESMDELAGQ

SEQ ID NO: 13977 - protein, 255 aa, Candidatus Phytoplasma australiense
VEYETSKRHYAHVDCPGHADYVKNMITGAAQMDAAILVVSGADSVMPQTREHILLARQVGVPKIVVFLNKCDLCPDEEILELVEMEVRELLSKYDFPGDDTPIIRGSALKALEGDAHYVAQVNELIQTLDTYIEDPAREVDKPFLMPVEDVFTITGRGTVVTGRVERGQVKAGDEIEIVGLKETKKTIVTAVEMFKKDLDFAQAGDNIGALLRGINREDVQRGQVLAKPGSVKPHSKFVAQVYVLTKEEGGRHTA

SEQ ID NO: 13978 - protein, 287 aa, Candidatus Phytoplasma australiense
RGITIKTSHVEYETSKRHYAHVDCPGHADYVKNMITGAAQMDAAILVVSGADSVMPQTREHILLARQVGVPKIVVFLNKCDLCPDEEILELVEMEVRELLSKYDFPGDETPIIRGSALKTLEGDAHYVDQVNELIQTLDTYIEDPAREVDKPFLMPVEDVFTITGRGTVVTGRVERGQVKAGDEIEIVGLKETKKTIVTAVEMFKKDLDFAQAGDNIGALLRGINREDVQRGQVLAKPGSVKPHSKFVAQVYVLTKEEGGRHTAFFSQYRPQFYFRTTDITGGVNYK

SEQ ID NO: 13979 - protein, 308 aa, Zea mays
AGRFENRSAGRAGPVPSPFTSSQAPEPYHQNPRPLPEASIMAAALFSSSLSPRFLALSSPKPAAPAATAFLPFRLPPRAVSAPGRRVFEPVAVAVSSEYKTEGAEQEGEDGSEEFSEDLKLFVGNLPFSVDSAQLAGLFEQAGSVEMVEVVYDRMTGRSRGFGFVTMSSAEEAESAVEQFNGYAFQGRQLRVNCGPPPPRDESTPRAPRGGGGGGGGGFVDSANKVYVGNLAWGVDNSTLENLFSEQGQVLDAKVIYDRDSGRSRGFGFVTYGSAQEVNNAISNLDGIDLDGRQIRVTAAESKPRRQF

SEQ ID NO: 13980 - protein, 256 aa, Candidatus Phytoplasma australiense
ERERGITIKTSHVEYETSKRHYAHVDCPGHADYVKNMITGAAQMDAAILVVSGADSVMPQTREHILLARQVGVPKIVVFLNKCDLCPDEEILELVEMEVRELLSKYDFPGDDTPIIRGSALKALEGDAHYVAQVNELIQTLDTYIEDPAREVDKPFLMPVEDVFTITGRGTVVTGRVERGQVKAGDEIEIVGLKETKKTIVTAVEMFKKDLDFAQAGDNIGALLRGINREDVQRGQVLAKPGSVKPHSKFVAQVYV

SEQ ID NO: 13981 - protein, 357 aa, Synechococcus sp. WH 7805
MTHHRVVLLPGDGIGPEITAVTRQLLDVVSERHGFQLDFDEQLIGGAAIDATGEPLPSTTLEACRSADAVLMAAIGSPRFDSLPREKRPESGLLALRSGLKLFANLRPVKIVPALIEASSLKPDVIDGVDLMVVRELTGGIYFGQPKGRVEADGEERGFNTMTYSASEVDRIAKVAFELARERGGRLCSVDKANVLDVSQLWRDRVDAMAPSYGDVEVSHLYVDNAAMQLVRAPRQFDVLLTGNLFGDILSDEAAMLTGSIGMLPSASLGSDGPGLFEPVHGSAPDIAGEDKANPMAMVLSAAMMLRIGLKQKAAADALEQAVDRVLAAGFRTGDLMAEGCTQLGCEAMGEELRKVL

SEQ ID NO: 13982 - protein, 293 aa, Pyrobaculum aerophilum str. IM2
MTVLVGPNTKVVVQGATGREGSFHLQRMLEYGTKVVAGVTPGKGGTTVHGVPVYDTVEEAVRRHGANASVIFVPARFAADALLEAVDAGVELSVVITEHIPVHETLRAVNYARARGVTVIGPNCPGIVAPPVRTKLGIMPNNIYQTPGKIAVVSRSGTLTYEISYQLVRAGFGINVAIGVGGDPIVGLDLMEATLKVAEDPEVDGVVVIGEVGGDAEERLARLYAEGVIKKPVVAYVAGRTAPPGKRMGHAGAIVMLGSGDATSKIEAFRAAGVPVAETPFEVPQLLAKLLKK

SEQ ID NO: 13983 - protein, 502 aa, Mycobacterium sp. JLS
MTALASNASASNSVASSWIDGAPAQTGGGSFQIVNPATGAVVTEYARAANVDVDVAVAAARAALPGWATATPAERSAVLAKLAKLADEHTDVLVAEEVSQTGKPVRLAREFDVPGSVDNIDFFAGAARHLEGKATAEYSGDHTSSIRREAIGVVATITPWNYPLQMAVWKVLPALAAGCTVVIKPCELTPLTTLTLARLAGEAGLPPGVLNVVTGFGADVGTALAGHPGVDLVTFTGSTVVGRKVMSAAAVHGHRTQLELGGKAPFVVFDDADLDAAIQGAVAGSLINSGQDCTAATRAIVARDLYDDFVAGVAEVMGKIVVGDPEDPDTDLGPLISTAHRDKVAGMVSRAPAEGGRVVTGGTIPDLPGSFYRPTLIADVGEQSEVYREEIFGPVLTVRSFTDDDDALRQANDTDYGLAASAWTRDVYRAQRASREINAGCVWINDHIPIISEMPHGGVGASGFGKDMSDYSFEEYLTIKHVMSDITGVAEKEWHRTVFKKR

SEQ ID NO: 13984 - protein, 263 aa, Triticum aestivum
  misc_feature (198)..(198): Xaa can be any naturally occurring amino acid
NKFVQKSLPVPVRNSRDIVDPRVRHSATARLSLAACAVALHLCLLISSSASLRWLSDKSAAVTTAGHGLGHVRTRSAYHFQPAKNWQNDPNGPMYHNGLYHFFYQYNPDGVTWGNGNLSWGHSVSVDLVNWFALDAALQPSRSFDANGCWPGSATILPDGSPVMLYTGIDARGDQVQNVPLPKNASDPLPAEWVKPEXNPVIPVPGEIKGPKNFRGPPPRGGLGPRRPRGGHPPPGAPHPRNAGGRPHSSSNADTEERPRPPE
